(19) United States
(12) Patent Application Publication
(10) Pub. No.: US 2021/0368750 A1
(43) Pub. Date: Dec. 2, 2021

(54) BOS TAURUS CELL TYPE 'HO840003210132823'

(71) Applicant: ABS Global, Inc., DeForest, WI (US)

(72) Inventors: Katrina Dattilo, Waunakee, WI (US); Devan Funk, DeForest, WI (US)

(73) Assignee: ABS Global, Inc., DeForest, WI (US)

(21) Appl. No.: 17/323,658

(22) Filed: May 18, 2021

Related U.S. Application Data
(60) Provisional application No. 63/031,761, filed on May 29, 2020.

(51) Int. Cl. A01K 67/027; A01N 1/02; C12N 5/073; C12N 5/075; C12N 5/0735

(52) U.S. Cl. CPC A01K 67/027; A01N 1/0221; A01K 2227/101; C12N 5/0609; C12N 5/0611; C12N 5/0604

(57) ABSTRACT

The disclosure relates to Bovine germplasm of Bos taurus HO840003210132823. Included in the present disclosure are cells comprising the genome of Bovine HO840003210132823 characterized by the presence of homozygous loci and spermatozoa obtained from said cells. Also provided by the present disclosure are tissue cultures of cells, animals obtained from said cells, and parts thereof, including F1 spermatozoa. The disclosure further provides for methods of breeding, selecting, and using the germplasm to improve existing commercial cattle herds generated from in vitro fertilization methods and progeny cattle obtained from in vitro fertilization and implantation and artificial insemination methods.

### CROSS REFERENCE TO RELATED APPLICATION

[0001] This application claims the benefit of and priority to U.S. Provisional Application 63/031,761, filed on May 29, 2020. 63/031,761 is hereby incorporated by reference in its entirety.

### INCORPORATION OF SEQUENCE LISTING

[0002] The Sequence Listing, including the file named DG-66-2020-US1-SEQLST.txt, which is 12,898,823 bytes in size, was created on May 18, 2021 and is hereby incorporated by reference in its entirety.

### FIELD

[0003] The present disclosure relates to the field of Bos taurus breeding. In particular, the present disclosure related to Bos taurus HO840003210132823 having high multi-trait selection indices and high trait transmissibility.

### BACKGROUND

[0004] There are numerous steps in the development of any new, desirable Bos taurus germplasm. Bos taurus breeding begins with the analysis and definition of problems and weaknesses of the current germplasm, the establishment of program goals, and the definition of specific breeding objectives. The next step is selection of germplasm that possesses the traits to meet the program goals. A goal is to combine in a single animal an improved combination of desirable traits from the parental germplasm. See Schefers et al., Animal Frontiers 2(1):1-9 (2012).

[0005] During breeding, cattle breeders have a variety of sources when making breeding decisions. In addition to genomic data, a number of agencies and organizations collect and release analysis of population data and indexes. Every three months, the Animal Improvement Programs Laboratory (AIPL) of the United States Department of Agriculture releases the newest USDA-DHIA (Dairy Herd Improvement Association) genetic evaluations for dairy bulls and cows. The AIPL calculates genetic evaluations for type for various breeds, and many breed associations provide their own indexes or other strategies for evaluating certain breed-relevant traits. U.S. dairy genetic evaluations are computed every four months by the Council on Dairy Cattle Breeding (CDCB) and Holstein Association USA (HAU). Both CDCB and HAU traits provide the breeder with important comparative data to evaluate the complex genetic and phenotypic traits to develop improved and desirable Bos taurus germplasm. For Holstein and Jersey sires, for example, evaluations are genomically enhanced and represent a blending of genomic data, pedigree information, and results from progeny. These genetic evaluations provide the breeder with important information for the selection of desirable germplasm and the development of new and valuable inseminates.

[0006] There is a continuous need to develop improved Bos taurus germplasm for use in improving production herds as well as for the continued improvement of elite animals.

### SUMMARY

[0007] The present disclosure provides for and includes elite Bos taurus germplasm. In various embodiments, the present teachings can provide for a Bos taurus cell of type Animal, a representative sample of cells of type Animal comprising the Deposit. In some configurations, the present teachings can include a frozen vial, a cell culture, a tissue, a zygote, or an embryo comprising a plurality of the Bos taurus cell disclosed herein. In various configurations, the present teachings can include a bull comprising a plurality of the Bos taurus cell disclosed herein. In various configurations, the cell can be a sperm cell. In some configurations, semen can comprise a plurality of the sperm cell of the present teachings.

[0008] In various configurations, the present teachings can include an embryo produced by contacting the cell with a Bos taurus ovum.

[0009] In various configurations, the present teachings can include a composition of matter comprising the cell and a Bos taurus ovum.

[0010] In various embodiments, the present teachings can provide for a Bos taurus cell produced by somatic cell nuclear transfer of a Bos taurus cell of type Animal, a representative sample of cells of type Animal comprising the Deposit. In some configurations, the present teachings can include a frozen vial, a cell culture, a tissue, a zygote, or an embryo comprising a plurality of the Bos taurus cell. In various configurations, the present teachings can include a bull comprising a plurality of the Bos taurus cell. In various configurations, the cell can be a sperm cell. In some configurations, semen can comprise the sperm cell of the present teachings.

[0011] In various embodiments, the present teachings can provide for a Bos taurus cell from an F1 offspring of an animal comprising a cell of type Animal, a representative sample of cells of type Animal comprising the Deposit. In some configurations, the present teachings can include a frozen vial, a cell culture, a tissue, a zygote, or an embryo comprising a plurality of the Bos taurus cell from an F1 offspring. In various configurations an animal can comprise a plurality of the Bos taurus cell from the F1 offspring. In some configurations, the present teachings can include a container of semen produced by the animal wherein the animal is a bull. In some configurations, the animal can be a bull, a cow, or a heifer. In various configurations, the animal can be a bull. In various configurations, the animal can be a cow or heifer. In various configurations, the F1 offspring can be a gene edited animal.

[0012] In various configurations, the cell can be an ovum.

[0013] In various configurations, the cell can be a sperm cell. In some configurations, the present teachings can include semen comprising a plurality of the Bos taurus sperm cell.

[0014] In some various configurations, the present teachings can include an embryo produced using a gamete of the F1 animal of the present teachings. In various configurations, the present teachings can include an embryo produced by contacting the sperm cell of the F1 bull with a Bos taurus ovum. In various configurations, the present teachings can include an embryo produced by contacting an ovum of the F1 cow or heifer of the present teachings with Bos taurus sperm cell.

[0015] In various configurations, the present teachings can include a composition of matter comprising a gamete of the F1 animal of the present teachings and a gamete cell from a second Bos taurus parent. In various configurations, the present teachings can include a composition of matter comprising the F1 sperm cell of the present teachings and a Bos taurus ovum. In various configurations, the present teachings can include a composition of matter comprising the F1 ovum of the present teachings and a Bos taurus sperm cell. The present disclosure provides for and includes elite Bos taurus germplasm. In various embodiments of the present teachings can provide for a Bos taurus cell having a genome comprising at least 90% of loci comprising a Homozygous Genotype of Animal, a representative sample of which comprises the Deposit. In some configurations, the genome comprises 95% of loci comprising the genotype of Animal.

[0016] In various configurations, the Bos taurus cell can further comprise a plurality of the cell comprising a frozen vial of the plurality of the cell, a cell culture, a tissue, a zygote, an embryo, a calf, or a mature adult. In various configurations, the Bos taurus cell further comprises a plurality of the cell comprising a bull.

[0017] In various embodiments, the present disclosure provides for and includes a Bos taurus cell comprising a genome comprising at least 90% of loci comprising a Haploid Genotype of Animal, a representative sample of which comprises the Deposit. In some configurations, the genome comprises at least 95% of loci comprising a Haploid Genotype of Animal. In various configurations, the cell is a gamete. In various configurations, the cell is a sperm. In some configurations, the sperm further comprises a plurality of sperm comprising semen. In some configurations, the semen is contained in a straw. In some configurations, the straw of semen is cryopreserved.

[0018] In various embodiments, the present disclosure provides for and includes a Bos taurus cell from an F1 offspring of an animal having a genome comprising at least 90% of loci comprising the Homozygous Genotype of Animal, a representative sample of Animal comprises the Deposit. In some configurations, the F1 offspring cell comprises at least 70% of loci that comprise a Homozygous Genotype of Animal. In various configurations, the at least 70% of loci that comprise a Homozygous Genotype of Animal is at least 80% of loci that comprise a Homozygous Genotype of Animal. In various configurations, the at least 70% of loci that comprise a Homozygous Genotype of Animal is at least 90% of loci that comprise a Homozygous Genotype of Animal. In various configurations, the at least 70% of loci that comprise a Homozygous Genotype of Animal is at least 95% of loci that comprise a Homozygous Genotype of Animal. In various configurations, the at least 70% of loci that comprise a Homozygous Genotype of Animal is at least 98% of loci that comprise a Homozygous Genotype of Animal. In various configurations, the F1 offspring further comprises at least one gene edited sequence. In various configurations, the cell from an F1 offspring further comprises a plurality of the cell comprising meat. In various configurations, the cell from an F1 offspring further comprises a plurality of the cell comprising a frozen vial of the plurality of the cell, a cell culture, a tissue, a zygote, an embryo, a calf, or a mature adult. In various configurations, the cell from an F1 offspring further comprises a plurality of the cell comprising a bull.

[0019] In various embodiments, the present disclosure provides for and includes a Bos taurus haploid cell from an F1 offspring of an animal having a genome comprising at least 90% of loci comprising the Homozygous Genotype of Animal, a representative sample of Animal comprising the Deposit. In various configurations, the haploid cell comprises at least 50% of loci that comprise a Homozygous Genotype of Animal. In various configurations, the haploid cell comprises at least 66% of loci that comprise a Homozygous Genotype of Animal. In various configurations, the haploid cell comprises at least 75% of loci that comprise a Homozygous Genotype of Animal. In various configurations, the haploid cell comprises at least one gene edited sequence. In various configurations, the cell is a gamete. In various configurations, the cell is an ovum. In various configurations, the cell is a sperm. In some configurations, the sperm further comprises a plurality of sperm comprising semen. In various configurations, the semen is contained in a straw. In various configurations, the straw of semen is cryopreserved.

[0020] In various embodiments the present disclosure provides for and includes a method of producing an embryo comprising crossing Animal to a cow or heifer. In some configurations the embryo can be a cow embryo. In various configurations, the embryo can be a calf embryo. In various configurations, the present disclosure provides for and includes an F1 offspring or part thereof of Animal that matured from an embryo produced by the instant method. In various configurations, the part of the F1 offspring can be a gamete. In various configurations, the gamete can be a sperm.

### DETAILED DESCRIPTION

[0021] A goal of a Bos taurus breeding program is to combine in a single Bos taurus animal an improved combination of desirable traits from the parental germplasm that provides for desirable progeny when used in artificial insemination programs, in vitro fertilization programs, Embryo transfer programs, or a combination thereof. Improved Bos taurus inseminate varieties are useful for various artificial breeding techniques, including artificial insemination (“AI”) and embryo transfer (“ET”). Improved Bos taurus germplasm, varieties, oocytes, embryos, and inseminates prepared therefrom, are desirable.

[0022] The present disclosure provides for, and includes, an improved elite germplasm obtained from a multigenerational breeding program. The germplasm is unique and readily distinguishable from germplasm present in non-selected cattle. Indeed, in the absence of continued selection, the germplasm reverts to heterogeneity and diversity. As provided herein, the germplasm of the present disclosure is identifiable using standard methods and the germplasm can be readily identified in progeny generations. Indeed, as few as 800 SNP markers are sufficient to identify parentage with greater than 99% accuracy. See McClure et al., Frontiers in Genetics 9(84):1-14 (2018). As provided here, the tens of thousands of sequences provide for tracking and selecting animals through multiple generations. Breeding with the germplasm provided herein, combined with the selection of suitable mates, will maintain the desirable germplasm in subsequent generations. Moreover, genetic testing allows for the removal of progeny having germplasm that lacks that set of desired loci for the improvement of cattle herds.

[0023] It is to be understood that the disclosure is not necessarily limited in its application to the details set forth in the following description or exemplified by the Examples. The disclosure is capable of other aspects or of being practiced or carried out in various ways.

### Definitions

[0024] “Animal” as used herein, refers to cells, animals, or particularly gametes and embryos of Bos taurus HO840003210132823. The terms “Animal” and “HO840003210132823” are used interchangeably without any change in their meaning.

[0025] “Diploid Genotype” as used herein refers to a genotype containing two copies of each chromosome. This genotype is generally present in somatic cells.

[0026] “Haploid Genotype” as used herein, refers to a genotype containing one copy of each chromosome. Therefore, relative to a diploid genotype for a given individual, it will contain half of the loci comprising a diploid chromosome. This term can refer to the genotype of a haploid cell, or to one half of the genotype of a diploid cell. This genotype is generally present in gametes.

[0027] “Homozygous Genotype” as used herein refers to the loci of a diploid genome wherein both chromosomes have the same allele at a given locus.

[0028] “Heterozygous Genotype” as used herein, refers to the loci of a diploid genome wherein each chromosome has a different allele at a given locus.

[0029] “Animal Genotype” as used herein, refers to the genotype of Animal and is characterized by the SNPs and flanking regions recited in SEQ ID NOs: 1 to 41546.

[0030] “Animal Homozygous Genotype” as used herein, refers to the loci in Animal that are homozygous and is characterized by the SNPs and flanking regions recited in SEQ ID NOs: 1 to 28548.

[0031] “Animal Heterozygous Genotype” as used herein, refers to the Heterozygous Genotype of Animal and is characterized by the SNPs and flanking regions recited in SEQ ID NOs: 28549 to 41546.

[0032] “Animal Haploid Genotype”, as used herein, refers to a Haploid Genotype derived from Animal and comprises at least one copy of the SNPs and flanking regions of the Animal Homozygous Genotype and, on average, at least one copy of 50% of the SNPs and flanking regions of the Animal Heterozygous genotype. This can refer to the genotype of a haploid cell, or to one half of the genotype of a diploid cell.

[0033] “Animal F1 Genotype,” as used herein, refers to the genome of an F1 offspring derived from Animal and a second parent. This offspring has a set of chromosomes comprising a pair of chromosomes for each chromosome (1-29 and a sex chromosome): one member of the pair inherited from Animal, the other member of the pair inherited from the second parent.

[0034] “Deposit” as used herein, refers to a representative sample of cells of Animal deposited under ATCC Accession No. TBD on TBD. The Deposit contains cells obtained from Animal as described in Example 3. The Deposit was made under the Budapest Treaty with the American Type Culture Collection (ATCC), 10801 University Boulevard, Manassas, Va. 20110-2209 USA. Upon issuance, all restrictions on the availability to the public of the deposit will be irrevocably removed consistent with all of the requirements of the Budapest Treaty and 37 C.F.R. §§ 1.801-1.809. Applicant does not waive any infringement of rights granted under this patent.

[0035] The term “Cell of Type Animal” means any type of cell having the same genotype across each of the nuclear chromosomes as the cell line comprising the Deposit. As used herein, two cells may have the same genotype even when read errors or mutations make the measured DNA sequences of the two cells not completely identical. While the cell line comprising the Deposit is a diploid line, a plurality of haploid Cells of Type Animal can be genotyped and can have the same genotype (allowing for read errors or mutations) as the cells comprising the Deposit. Multiple haploid Cells of Type Animal have the same average genotype as the cell line comprising the Deposit. For any given cell, meiotic recombination may result in chromosomes that have a different arrangement of alleles than the parent, but a plurality of haploid cells from an animal with an Animal cell type can be genotyped and will have the same genotype as the cells comprising the Deposit. The germplasm of Animal inherently comprises this genotype, and therefore can be defined by a cell of type Animal.

[0036] The phrase “producing an embryo from an animal” as used herein refers to the process of fertilization. With regard to the bull, this refers to contact of the bull's sperm cells with a Bos taurus ovum resulting in fertilization of the ovum to produce an embryo. Regarding the cow or heifer, this refers to contact of an ovum of the cow or heifer with Bos taurus sperm cells. Contacting a sperm and an ovum can comprise natural service, artificial insemination, in vitro fertilization or any other method wherein an ovum and sperm are brought into proximity such that they can join to form an embryo.

[0037] “Sire” as used herein, refers to the sire of Animal, Bos taurus HO840003141494670.

[0038] “Dam” as used herein, refers to the dam of Animal, Bos taurus HO840003143328234.

[0039] “Paternal Grand-Sire” as used herein, refers to the paternal grand sire of Animal, Bos taurus HO840003129038181.

[0040] “Paternal Grand-Dam” as used herein, refers to the paternal grand dam of Animal, Bos taurus HO840000074258448.

[0041] “Maternal Grand Sire” as used herein, refers to the maternal grand sire of Animal, Bos taurus HO840003128557482.

[0042] “Maternal Grand Dam” as used herein, refers to the paternal grand dam of Animal, Bos taurus HO840003133318719.

[0043] Offspring, as used herein, refers to the progeny of an animal created through natural service, artificial insemination, somatic cell nuclear transfer, or in vitro fertilization (IVF).

[0044] As used herein, “germplasm” includes intact genomes comprising chromosomes present in cells or nuclei. The term “germplasm” may include any gamete or germ cell, or any somatic cell from which an animal can be cloned.

[0045] As used herein the term “about” refers to ±10%.

[0046] As used herein, the singular forms “a,” “an,” and “the” include plural references unless the context clearly dictates otherwise. For example, the term “a compound” or “at least one compound” may include a plurality of compounds, including mixtures thereof.

[0047] Throughout this application, various embodiments of this disclosure may be presented in a range format. It should be understood that the description in range format is merely for convenience and brevity and should not be construed as an inflexible limitation on the scope of the disclosure. Accordingly, the description of a range should be considered to have specifically disclosed all the possible subranges as well as individual numerical values within that range. For example, description of a range such as “from 1 to 6” should be considered to have specifically disclosed subranges such as “from 1 to 3,” “from 1 to 4,” “from 1 to 5,” “from 2 to 4,” “from 2 to 6,” “from 3 to 6,” etc., as well as individual numbers within that range, for example, 1, 2, 3, 4, 5, and 6. This applies regardless of the breadth of the range.

[0048] Whenever a numerical range is indicated herein, it is meant to include any cited numeral (fractional or integral) within the indicated range. The phrases “ranging/ranges between” a first indicate number and a second indicate number and “ranging/ranges from” a first indicate number “to” a second indicate number are used herein interchangeably and are meant to include the first and second indicated numbers and all the fractional and integral numerals there between.

[0049] For the purposes of this disclosure, the term “semen” means seminal fluid which may contain sperm (also referred to as “spermatozoa”) secreted by the gonads of a male animal which can be collected from the male animal by any method known to those in the animal breeding arts.

[0050] As used herein, “locus”, or plural “loci”, refers to a physical site or location of a specific gene or marker on a chromosome. Loci of the present disclosure include, and are identifiable by, a SEQ ID NO, each SEQ ID NO providing the identity of the polymorphism at a single nucleotide polymorphic (SNP) site and the adjacent 100 base pairs.

[0051] Loci may also be characterized as either ‘A’ loci, ‘B’ loci, or heterozygous ‘A/B’ loci. The identification of loci as either ‘A’ or ‘B’ loci is determined according to the top (TOP) and bottom (BOT) designations based on the polymorphism itself, or the contextual surrounding sequence as developed by ILLUMINA®, Inc. (San Diego, Calif.). Methods for determining the designation of a polymorphic site as ‘A’ or ‘B’ are known in the art, for example as provided by ILLUMINA®'s Technical Note entitled ““TOP/BOT” Strand and ‘A/B’ Allele”, available on the internet at www(dot)illumina(dot)com/documents/products/technotes/technote_topbot.pdf. The NCBI's dbSNP database adopted the TOP/BOT nomenclature in 2005 and the designation is well known to those of skill in the art. As shown in the Examples, thorough sequence comparison extensive information about each locus is available to a person of ordinary skill in the art, including, but not limited to, dbSNP identifier, sources, chromosomal location, genes, transcripts, linkage to genes or quantitative trait loci (QTL), and interactions.

[0052] In diploid cells, the germplasm is characterized by the presence of sequences representing the sequences at polymorphic sites (e.g., SNPs) that are homozygous or heterozygous. As used herein, the germplasm of the present disclosure is characterized by the homozygous loci. In haploid cells (e.g., ova or sperm), each of the sequences at each homozygous locus in the parent are present in each cell. In contrast, heterozygous loci are present in haploid germplasm according to random assortment. Accordingly, the genotype at heterozygous loci in haploid cells varies from haploid cell to haploid cell, while the sequences of the homozygous loci from the parent are present in each haploid cell and are therefore faithfully transmitted to progeny.

[0053] During breeding, to maintain and improve the germplasm, selections of a second parent may be an elite second parent having superior traits. As demonstrated in the examples, such select crosses result in progeny that retain significant numbers of homozygous loci present in each elite parent and further result in additional loci becoming homozygous. Thus, select crosses result in some or all of the homozygous loci of the Bos taurus cells of the present disclosure being retained in progeny generations. Generally, locus homozygosity is maintained when the second parent is an elite parent with high trait values as described below. Similarly, the improved germplasm of the present disclosure can be maintained by selecting superior breeding partners in the F1 and later progeny generations. By suitable selection of the second parent, the germplasm can be maintained at the homozygous loci. Even further, careful selection of elite breeding partners results in increased numbers of homozygous loci as the preferred allele at the heterozygous loci of the parent become homozygous in elite progeny.

[0054] As used herein, “gamete” refers to a haploid germ cell and includes either a sperm or an ovum and may be used interchangeably. Generally, the identity as a sperm or an ovum can be determined by the context as bulls produce sperm and cows produce ova. For the purposes of this disclosure the term “sperm” means the haploid cell that is the gamete of a male animal which may join an egg (also referred to as “ovum”) to produce a zygote and broadly encompasses infertile sperm, sperm having a comparably lesser or a comparably greater fertility between a first amount of sperm obtained from a first animal and a second amount of sperm obtained from a second animal and which may be obtained in the form of a raw ejaculated semen, frozen semen, as sperm separated from the semen and contained in an extender or diluent, or as sex-selected sperm.

[0055] As used herein, the term “inseminate” is intended to broadly encompass an amount of sperm whether contained in semen alone or together with a cryoprotectant, extender, or other diluent. Inseminates may optionally include one or more “extenders” and diluents which can be utilized to fertilize the eggs of a female animal whether in vitro or in vivo. As used herein, inseminates can further include sex-selected sperm compositions.

[0056] As used herein, the term “sex-selected sperm” means sperm which have been separated, regardless as to the method of separation, into subpopulations containing X-chromosome bearing sperm and Y-chromosome bearing sperm having a purity in the range of about 70 percent (“%”), 80%, 90%, and about 100%.

[0057] As used herein, the term F1 refers to the first filial generation—progeny born from the gametes of a particular parent. Therefore, as used herein, an F1 Animal is a direct genetic reproduction descendent of Animal. Because cattle reproduce by meiosis, this term refers to an animal arising from a gamete of the parent—in this case, from a gamete from Animal. Therefore, for each of Animal's chromosome pairs, their offspring, an F1 Animal, will receive one copy of the chromosome carrying one of Animal's alleles for each locus. In general, this means that for each locus, an F1 Animal will receive one allele from Animal and one from their other parent. An F1 Animal, therefore, will receive one copy of each of Animal's homozygous alleles, and, for each locus, one copy of one of Animal's heterozygous alleles. This means that two progeny of Animal with the same second parent will not necessarily inherit the same heterozygous alleles from Animal and may have varying genotypes for Animal's heterozygous loci.

### Animal Genotype Characterizations

[0058] The present disclosure provides for, and includes, cells, animals, and progeny of Bos taurus Animal comprising an improved germplasm characterized by the Animal Genotype and homozygous loci comprising the nucleic acid sequences of Animal Homozygous Genotype. Animal differs from the reference genome at 11645 homozygous loci, or about 28% of the total loci. All chromosome positions are determined using the ARS-UCD1.2 October, 2019 bovine genome build.

TABLE 1
Genotype of Bos taurus Animal

| | SEQ ID Range | | |
|---|---|---|---|
| | SEQ ID NOs: 1 to 28548 | | No. of |
| | Reference | | Alternate |
| Homozygous | Allele | Alternate Allele | Alleles |
| Chromosome 1 | 1-1015 | 16875-17556 | 681 |
| Chr. 2 | 1016-1888 | 17557-18185 | 628 |
| Chr. 3 | 1889-2772 | 18186-18690 | 504 |
| Chr. 4 | 2773-3563 | 18691-19237 | 546 |
| Chr. 5 | 3564-4256 | 19238-19681 | 443 |
| Chr. 6 | 4257-4995 | 19682-20318 | 636 |
| Chr. 7 | 4996-5785 | 20319-20884 | 565 |
| Chr. 8 | 5786-6581 | 20885-21432 | 547 |
| Chr. 9 | 6582-7201 | 21433-21909 | 476 |
| Chr. 10 | 7202-7906 | 21910-22452 | 542 |
| Chr. 11 | 7907-8579 | 22453-22981 | 528 |
| Chr. 12 | 8580-9102 | 22982-23353 | 371 |
| Chr. 13 | 9103-9702 | 23354-23712 | 358 |
| Chr. 14 | 9703-10234 | 23713-24129 | 416 |
| Chr. 15 | 10235-10807 | 24130-24499 | 369 |
| Chr. 16 | 10808-11353 | 24500-24885 | 385 |
| Chr. 17 | 11354-11847 | 24886-25270 | 384 |
| Chr. 18 | 11848-12351 | 25271-25552 | 281 |
| Chr. 19 | 12352-12774 | 25553-25872 | 319 |
| Chr. 20 | 12775-13336 | 25873-26288 | 415 |
| Chr. 21 | 13337-13808 | 26289-26590 | 301 |
| Chr. 22 | 13809-14285 | 26591-26904 | 313 |
| Chr. 23 | 14286-14627 | 26905-27134 | 229 |
| Chr. 24 | 14628-15078 | 27135-27459 | 324 |
| Chr. 25 | 15079-15423 | 27460-27632 | 172 |
| Chr. 26 | 15424-15826 | 27633-27854 | 221 |
| Chr. 27 | 15827-16183 | 27855-28133 | 278 |
| Chr. 28 | 16184-16499 | 28134-28355 | 221 |
| Chr. 29 | 16500-16874 | 28356-28548 | 192 |
| | | No. Alternate | 11645 |
| | | alleles | |

| | SEQ ID |
|---|---|
| Heterozygous | Range |
| Chromosome 1 | 28549-29513 |
| Chr. 2 | 29514-30221 |
| Chr. 3 | 30222-30874 |
| Chr. 4 | 30875-31534 |
| Chr. 5 | 31535-32165 |
| Chr. 6 | 32166-32832 |
| Chr. 7 | 32833-33299 |
| Chr. 8 | 33300-33865 |
| Chr. 9 | 33866-34415 |
| Chr. 10 | 34416-34914 |
| Chr. 11 | 34915-35524 |
| Chr. 12 | 35525-36005 |
| Chr. 13 | 36006-36476 |
| Chr. 14 | 36477-36973 |
| Chr. 15 | 36974-37414 |
| Chr. 16 | 37415-37794 |
| Chr. 17 | 37795-38218 |
| Chr. 18 | 38219-38522 |
| Chr. 19 | 38523-38891 |
| Chr. 20 | 38892-39178 |
| Chr. 21 | 39179-39497 |
| Chr. 22 | 39498-39740 |
| Chr. 23 | 39741-40051 |
| Chr. 24 | 40052-40299 |
| Chr. 25 | 40300-40592 |
| Chr. 26 | 40593-40853 |
| Chr. 27 | 40854-41023 |
| Chr. 28 | 41024-41255 |
| Chr. 29 | 41256-41546 |

[0059] The present disclosure provides for, and includes, a diploid Bos taurus cell or a plurality of diploid Bos taurus cells comprising improved germplasm characterized by a genome having homozygous loci comprising 90% to 100% of the nucleic acid sequences characterizing the Animal Homozygous Phenotype.

### Phenotypic Traits and Indices

[0060] Predicted Transmitting Abilities (PTAs) can be computed for various traits, for example in the broad categories of production (milk and milk components), health/fitness, and type. Dairy cattle are evaluated for the traits of milk, fat, and protein yield, length of productive life, and somatic cell score (an indicator of mastitis). Evaluation procedures combine information from relatives of an evaluated animal, and from the animal itself in the case of cows. Additionally, numerous type or conformation traits are evaluated routinely.

[0061] An important aspect of Bos taurus breeding programs are genetic values for yield, management traits, and type that are reported as PTAs. These important traits include higher milk, protein and fat yield PTAs shown as added pounds of milk, fat, and protein expected per lactation for average daughters of individual sires. PTAs are also expressed as percentage traits that are represented as percentage point differences where plus values indicate higher concentration of fat and protein in milk. Bos taurus animals and cells obtained therefrom are also selected to provide increased numbers of daughters and herds contributing to production, improved reliability, improved productive life, improved somatic cell score (SCS). Desirable Bos taurus varieties provide higher daughter pregnancy rates (DPR) that are a genetic measure of the percentage of non-pregnant cows that become pregnant during each 21-day period (heat cycle). Another important and desirable PTA selected by breeders is the productive life (PL) that is the additional months of life in the milking string. Also included among the desirable PTAs are calving related traits such as the service sire calving ease and the service sire stillbirth.

[0062] Traits are typically combined into an index based on their relative economic weights. For example, the Net Merit index (NM$) computed by USDA AIPL in conjunction with CDCB estimates lifetime profit based on incomes and expenses relevant for today's dairy producers and is expressed as a dollar value. Traits included in NM$ are: protein (lb.), fat (lb.), productive life, somatic cell score, udder composite, feet/legs composite, body size composite and daughter pregnancy rate. Calving ability also is included in NM$ calculations for Holsteins and Brown Swiss. The traits incorporated into calving ability for Holsteins are daughter stillbirth, service sire stillbirth, daughter calving ease, and service sire calving ease. Only the two calving ease traits are available for inclusion in calving ability values of Brown Swiss. Net merit scores are a relative score calculated based on a comparison with a baseline average animal in 2015. A new baseline animal based on the average animal in 2020 is expected to begin use in 2025 and will reflect improvements to dairy herds generally. For example, NM$ scores in 2020 were reduced by 231 dollars compared to earlier NM$ scores. As used herein, NM$ scores are calculated using the 2015 baseline and persons of ordinary skill in the art will be to calculate or convert NM$ values based on the 2015 baseline population. Methods to calculate NM$ are known in the art. See VanRaden et al., “Net merit as a measure of lifetime profit: 2018 revision,” USDA AIP Research Report NM$7 (5-18) (2018) available at aipl(dot)arsusda(dot)gov/reference/nmcalc-2018.htm for exemplary purposes only (this recent publication uses updated baseline animals not necessarily in use by the industry for Net Merit calculations.) The NM$ incorporates production, management and important composite traits and is designed for dairies paid for protein plus fat and requiring more emphasis on management traits. The present disclosure provides for, and includes, increased NM$ of progeny cattle relative to parents. In an aspect, the NM$ of progeny cattle is increased by at least 10% over the parent generation. Also included are methods to improve NM$ in a herd comprising crossing an Animal of the present disclosure with individuals of a herd in need of improvement.

[0063] Trait parameters have been correlated with the underlying genetics and the heritabilities determined. The genetic and phenotypic correlations among the twelve PTA traits are also provided by VanRaden et al., 2018.

[0064] Holstein Association USA (HAU) calculates the Total Performance Index (TPI®; HAU, Brattleboro, Vt.)). It includes the traits of protein, fat, type, udder composite, feet and leg composite, daughter pregnancy rate, productive life, somatic cell score, daughter calving ease, daughter stillbirth and dairy form. Like Net Merit scores, TPI® is calculated based on a comparison with a baseline average animal in 2010, however, the Holstein Association USA has not announced plans to update the baseline animal. Accordingly, as used herein, TPI® scores are calculated using a 2010 baseline animal. However, should a new baseline year be adopted, persons of ordinary skill in the art will be able to calculate or convert TPI® values based on the 2010 baseline population for any future baseline animal using methods known in the art (Available on the internet at www(dot)holsteinusa(dot)com/genetic_evaluations/ss_tpi_formula.html.) TPI® (HAU, Brattleboro, Vt.) incorporates production, management, Type, and important linear and composite traits. TPI® focuses on dairies paid for protein plus fat and requiring more emphasis on Type.

[0065] Using a selection index can be an effective way to consider several traits when choosing breeding stock. Conventional animal husbandry strategies often rely on selection indexes, particularly for choosing service sires.

[0066] Breeding stock sires and sire lines are typically chosen based upon their size and fertility. Prior successes in mating as well as siring females are both traits that are often utilized in selecting sires and/or sire lines.

[0067] Also, knowing where service sires rank relative to other active bulls is typically considered to be helpful in determining if the sires meet a particular herd's genetic goals. Selection indexes can be particularly useful in monitoring such ranking. To maximize genetic improvement using a selection index, it is usually recommended that the service sires for a given herd average at or above the 80th percentile.

[0068] In order to provide the most up to date information, the Council of Dairy Cattle Breeding publishes updated sire information 3 times a year, in April, August, and December. Skilled persons refer to these publications as “Sire Summaries.”

[0069] In germplasm improvement programs, “Dams of Males” (DM) or more commonly, “bull mothers” represent a group of elite females that are selected based on estimated breeding values (EBV) or genomic breeding values (GEBV) and that usually rank among the top 1% of the population. These elite females are typically mated to elite bulls from the “Sires of Males” (SM) group for the purpose of producing elite bull calves.

[0070] “Sires of males” (SM) or “sires of sons” are elite males that are also selected by EBV or GEBV to be sires of the next generation of young elite bulls and represent <5% of the males. It is the SM semen that is marketed to dairy farmers and it is primarily through the distribution of SM semen that commercial herds are improved.

[0071] Sires of females (SF) or “active AI sires” represent a larger group of males that have been selected based on EBV or GEBV and whose semen is used to breed the general population and produce replacement females for commercial farms.

[0072] “Dams of Females” (DF) or “commercial cows” represent the large population of females that are primarily used to produce milk rather than breeding stock and are routinely mated to bulls from the “Sires of Females” (SF) group to initiate lactation, resulting in the next generation of replacement heifers.

[0073] Germplasm development programs are directed to the continued improvement of the elite (DM and SM) individuals that in turn improve the germplasm of the larger DF and SF populations. Distinct DM and SM lines have been developed to serve different markets and the resulting germplasms are distinct. That is, different DM and SM lines have distinctive sets of alleles as a result of multigenerational selections.

[0074] Ranchers and dairy farmers increase the value of a cow's calves by utilizing frozen semen from the most valuable SM bulls in the industry to breed their cows. Frozen semen can be shipped commercially around the world, the best bulls can be mated to thousands of cows instead of the usual 20 to 40 under natural pasture mating conditions. Once thawed, the semen can be used as an inseminate.

[0075] As used herein, daughter pregnancy rate (DPR) is a genetic measure of the percentage of non-pregnant cows or heifers eligible to become pregnant that actually become pregnant during each 21-day period (heat cycle). DPR is similar to, but not always the same as, pregnancy rates computed for herd management purposes. Daughters of sires which have larger PTA DPR are more likely to conceive during a given heat cycle and each 1% increase in PTA DPR is associated with a genetic decrease of 4 days open.

[0076] As used herein, Cow Livability (LIV) represents the probability value of a lactation not ending in death or euthanasia relative to the average of the breed. This trait is important because cows that die during lactation have no value and the farmer must pay to dispose of the carcass. The trait is similar to PL which includes cows culled from the herd for any reason. LIV values range from about −5 to +5, where 5% more of a bull's daughters will remain alive compared to the breed average.

[0077] As used herein, heifer conception rate (HCR) is the percentage of inseminated heifers that become pregnant at each service, shown as a deviation in percentage.

[0078] As used herein, cow conception rate (CCR) is the percentage of inseminated cows that become pregnant at each service, shown as a deviation in percentage.

[0079] As used herein, estimated future inbreeding (EFI) is the estimate of future progeny inbreeding, assuming that an animal is mated randomly within their given breed.

[0080] As used herein, kappa casein (K-casein) identify sires with homozygous BB genotype for Kappa Casein for preferred cheese production.

[0081] As used herein, predicted transmitting ability protein (PTAP) is a yield trait for protein measured in pounds that is the predicted difference of the protein yield of the offspring from the average. PTAP is shown as added pound of protein expected per lactation for average daughters of individual sires. Higher numbers are preferred.

[0082] As used herein, predicted transmitting ability fat (PTAF) is a yield trait for fat measured in pounds that is the predicted difference of the fat yield of the offspring from the average. PTAF is shown as added pound of fat expected per lactation for average daughters of individual sires. Higher numbers are preferred.

[0083] As used herein, predicted transmitting ability milk (MILK or PTA MILK) is a yield trait for milk measured in pounds that is the predicted difference of the milk yield of the offspring from the average. MILK is shown as added pounds of milk expected per lactation for average daughters of individual sires. Higher numbers are preferred.

[0084] As used herein, feed efficiency value (FE) recognizes cattle with the ability to produce large volumes of milk without having to consume a great deal of feed, based on the following formula: Feed Efficiency=(Dollar value of milk produced)−(Feed costs for extra milk)−(Extra maintenance costs).

[0085] As used herein, predicted transmitting ability type (PTAT or TYPE) is represented as differences in points from a base population physical conformation. Daughter final scores are collected by breed classifiers. Raw scores then are adjusted for cow age and used to derive Type PTAs (PTAT). These PTAT are represented as differences in points from the base population. TYPE values are normalized to enable comparisons across different base populations through time. Higher numbers correlate with more desirable physical conformations.

[0086] As used herein, STA dairy form (DF or DFM), formerly known as “dairy character”, refers to sharpness, angularity, flatness of bone, openness of rib and length of neck that provides an indication of ‘milkiness’ and reflects the ability of a dairy cow to produce milk from the feed over flesh and fat.

[0087] Dairy cattle are evaluated and described using criteria generally known as linear descriptive traits that are well known in the art. These linear descriptive traits include Stature (STA), Strength (STR), Body Depth (BDE), Rump Angle (RPA), Thurl Position, Rump Width, Fore Udder Height (FTA), Fore Udder Attachment (FUA), Rear Udder Height (RUH), Rear Udder Width (RUW), Udder Cleft (UCL), Udder Depth (UDP), Front Teat Placement (FTP), Rear Teat Placement (RTP), Teat Length (TLG), Udder Tilt (UT), Rear Legs (Side View) (RLS), Rear Legs (Rear View) (RLR), Feet Leg Score (FLS), Foot Angle, Thurl Width (TRW), and Body Condition. These linear trait criteria are well known to those skilled in the art. See for example, The Dairy Cow Today: U.S. Trends, Breeding, and Progress Since 1980, S. L. Spahr and G. W. Opperman, Chapter 9, Type and classification and trait appraisal, hereby incorporated by reference in its entirety.

[0088] Linear descriptive traits are often combined into composite indexes to simplify the process of describing the transmitting pattern for type traits. Composite indexes include the feet & legs composite (FLC), the udder composite index (UDC), the body form (BF) composite index, body size composite (BSC) index, and the dairy capacity (DC) composite index. The FLC composite is a combination of rear legs, side view and foot angle linear traits. The UDC incorporates the udder attachment, rear udder height, rear udder width, udder depth, udder cleft, front teat placement, and rear teat placement linear traits. The UDC is designed so that the association between UDC and herd life is maximized. Larger values are associated with longer herd life. The udder composite index describes a well formed capacious udder with strong attachment. Using breeding animals with a high UDC results in a lowering of the somatic cell score and daughters whose udders are trouble-free and capable of holding more milk. The BF index combines the linear traits of stature, body depth, rump angle, and rump width. The DC composite combines the linear traits of dairy form and strength. The BSC is another composite index calculated from four linear traits: stature, strength, body depth and rump width. Every 1.0 STA increase in the BSC correlates with a 24 pound predicted increase in mature body weight.

[0089] As used herein, “Productive Life” (PL) is a measure of how long dairy cows survive in a herd after they calve for the first time. It is based on calving dates, culling or death dates, and days in milk (based on dry dates) in each lactation for cows on DHI test. The PTA for Productive Life (PL) is expressed as additional months of life in the milking string. Bulls with larger PL are expected to sire daughters that have longer productive lives. Data used to compute PL include actual longevity, stage of lactation, and culling data supplemented with data from traits that are correlated with PL. By assigning the largest PL credits for months in peak production and by giving later lactations slightly more credit than first lactation, PL reflects the economic impact of cow longevity. The heritability of PL is low at 0.085 and the trait is expressed late in the life of dairy cow. Accordingly, PL is a difficult trait to improve through selection because of low heritability and expression of the trait late in life. Methods for calculating PL are known in the art. See VanRaden et al., Journal of Dairy Science 76:2758-2764 (1993), VanRaden et al., Journal of Dairy Science 78:631-638 (1995), Weigel et al., Journal of Dairy Science 81:2040-2044 (1998). Each of the foregoing references are hereby incorporated by reference in their entireties. See also VanRaden et al., “Methods used to compute multi-trait productive life,” USDA AIPL Research Report PLC (11-03) available at aipl(dot)arsusda(dot)gov/reference/multi-pl.htm. The present disclosure provides for, and includes, progeny cattle having an increased PL relative to a dam parent.

[0090] As used herein, “Somatic Cell Score” (SCS) is calculated from the Somatic Cell Count (SCC). When milk is produced, a small number of cells are also transferred to the milk (along with the proteins, fat, water, and minerals that make up milk.) Although all milk contains some of these cells, milk quality is affected if they are present in very high numbers. Milk processors limit the concentration of cells that they will allow in milk they buy from farmers. Also, knowing the SCS for an individual cow can help the farmer tell if the cow is healthy because irritation in the udder can cause higher SCS. Health management has the biggest effect on SCS, but just like some people inherit a higher chance of getting ear infections, cows can inherit traits which cause higher SCS. Next to traits like milk or protein production, SCS has a low heritability. Somatic Cell Score PTA is calculated using somatic cell score data from the first five lactations as an indicator of mastitis resistance. Bulls with the lowest PTA SCS are expected to sire daughters with the lowest SCS, the lowest somatic cell counts (SCC), and the fewest cases of mastitis. The present disclosure provides for, and includes, reduced SCS in progeny compared to a dam parent.

[0091] As used herein, “Fertility Index” (FI) combines several reproductive components into one overall index: ability to conceive as a heifer, ability to conceive as a lactating cow, and a cow's overall ability to start cycling again, show heat, conceive, and maintain a pregnancy. The Fertility Index is derived from the formula: Fertility Index=18% Heifer Conception Rate (HCR)+18% Cow Conception Rate (CCR)+64% Daughter Pregnancy Rate (DPR). The present disclosure provides for, and includes, an increased FI in progeny compared to a dam parent. Also included are methods to improve FI in an offspring comprising crossing an Animal of the present disclosure with dams of a herd in need of improvement.

[0092] As used herein, “Sire Calving Ease” (SCE) measures the tendency of calves from a particular sire to be born more or less easily and is expressed as a percent of difficult births in first calf heifers on a scale of 1 to 5 (1 is classified as “no problem”). The percent difficult birth among Holstein is about 8%. Generally, bulls having an SCE of 8% or less are considered “calving ease” bulls. Lower numbers are preferred. The present disclosure provides for, and includes, reduced SCE of progeny cattle. Also included are methods to improve SCE in a progeny comprising crossing an Animal of the present disclosure with individuals of a herd in need of improvement.

[0093] As used herein, “Daughter Calving Ease” (DCE), like SCE, is a measurement of the tendency of calve from a particular animal to be born more or less easily. Lower numbers are preferred. The present disclosure provides for, and includes, reduced DCE of progeny cattle. Also included are methods to improve DCE in a progeny comprising crossing an Animal of the present disclosure with individuals of a herd in need of improvement.

[0094] As used herein, “Service Sire Stillbirth” (SSB) expresses the proportion of stillborn calves expected from sires. The genetic base for Stillbirth is 8%. The present disclosure provides for, and includes, reduced SSB of progeny cattle relative to the genetic base. In an aspect, the progeny cattle have an SSB below 5%. Also included are methods to improve SSB in a progeny comprising crossing an Animal of the present disclosure with individuals of a herd in need of improvement.

[0095] As used herein, “Daughter Stillbirth” (DSB) is the tendency of calves from a sire to be stillborn and applies to the Holstein breed only. As discussed below, DSB can be related to certain haplotypes. The present disclosure provides for, and includes, reduced DSB of progeny cattle relative to the genetic base. In an aspect, the progeny cattle have a DSB below 5%. Also included are methods to improve DSB in a progeny comprising crossing an Animal of the present disclosure with individuals of a herd in need of improvement.

[0096] Breeders have developed merit measures for the evaluation of value of improved Bos taurus germplasm over the lifetime of offspring. Various merit measures account for the additional net profit that an offspring of an animal will provide over its lifetime. Income and expenses for a typical dairy operation have been estimated, so that a measure of overall net profit can be calculated. Three different values (Net, Fluid and Cheese) of lifetime profitability are available. The primary difference between the formulas is the emphasis that is placed on the components. When breeding, producers select the index that is closest to the milk payment in their area. Net merit is based upon the future anticipated average milk price for all of the United States. Fluid Merit would be for producers who do not receive any payment for protein. In the Fluid Merit formula, a negative value is placed on protein because additional feed is required to produce additional protein. Without a direct payment for the additional protein, this results in a negative value. Cheese Merit may be appropriate for farmers selling their milk directly to a cheese plant.

[0097] As used herein, grazing merit (GM$) is an index that incorporates economic values appropriate for grazing production in the U.S. The GM$ index is based upon appropriate costs and revenues to allow for selection of cows and bulls for more optimal genetic progress. GM$ is geared toward herds on pasture systems, with those breeders often demanding higher fertility, compared to conventional systems, due to seasonal calving requirements. Methods to calculate GM$ are known in the art. See Gay et al., J. Dairy Sci. 97:4568-4578 (2014), hereby incorporated by reference in its entirety. The present disclosure provides for, and includes, increased GM$ of progeny cattle relative to parents. In an aspect, the GM$ of progeny cattle is increased by at least 10% over the parent generation. Also included are methods to improve GM$ in a herd comprising crossing an Animal of the present disclosure with individuals of a herd in need of improvement.

[0098] As used herein cheese merit (CM$) is an index that incorporates economic values appropriate for milk sold to be made into cheese or other dairy products. The formula incorporates MILK, PTAF, PTAP, and various health and type traits. A discussion of CM$ is available on us(dot)altagenetics(dot)com. The present disclosure provides for, and includes, increased CM$ of progeny cattle relative to parents. In an aspect, the CM$ of progeny cattle is increased by at least 10% over the parent generation. Also included are methods to improve CM$ in a herd comprising crossing an Animal of the present disclosure with dams of a herd in need of improvement.

[0099] As used herein, fluid merit (FM$) is an index that incorporates economic values for dairy production wherein the producers do not receive any payment for protein. Methods for calculating FM$ are known in the art. The present disclosure provides for, and includes, increased FM$ of progeny cattle relative to parents. In an aspect, the FM$ of progeny cattle is increased by at least 10% over the parent generation. Also included are methods to improve FM$ in a herd comprising crossing an Animal of the present disclosure with individuals of a herd in need of improvement.

[0100] As used herein, a haplotype is a combination of alleles (DNA sequences) at different locations on a chromosome that are transmitted together as a group (linked). Haplotype tests are available that provide for the identification of recessive disorders that affect fertility and other traits. See Cole et al., “Haplotype tests for recessive disorders that affect fertility and other traits,” USDA AIP Research Report Genomic3 (09-13) updated Dec. 1, 2018, available at aipl(dot)arsusda(dot)gov/reference/recessive_haplotypes_ARR-G3.html. Certain haplotypes are undesirable in a Bos taurus germplasm as provided in the present specification. When the recessive haplotype is homozygous, fertility and other critical traits are significantly affected. The germplasm of the present disclosure can be used to improve herds and reduce the presence of these undesirable haplotypes.

[0101] Undesirable recessive haplotype mutations include polledness (lack of horns—haplotype HHP in Holsteins, RIP in Jerseys which is currently associated with other adverse phenotypes, but may become desirable as it removes the need to dehorn animals), and red coat color (Holsteins are supposed be black and white—haplotypes HBR, HDR, and HHR). Several haplotypes do not produce viable homozygous offspring: HH0, HH1, HH2, HH3, HH4, and HH5 in Holstein cows. HH0 causes Brachyspina syndrome (HH0), which is a congenital inherited lethal defect in Holstein cattle that causes embryonic death, stillbirth and other deformities. (e.g., TY). HH1 is a nonsense mutation in the APAF1 gene. HH3 is caused by an SNP in the SMC2 gene causing a single amino acid substitution. HH4 is caused by genetic lesions in the GART gene. HH5 is caused by genetic lesions in the TFB1M gene. JH1 is a mutation in CWC15. The genetic defect associated with HH2 is still unknown.

[0102] Cattle suffer from a number of genetic diseases that are monogenic disorders inherited in a Mendelian fashion. Various genetic diseases are known in the art. See for example, Garrick and Ruvinsky, “The Genetics of Cattle,” 2nd Edition, CAB International, Oxfordshire UK 2015; see also Parkinson et al., “Diseases of Cattle in Australasia,” ISBN 9780958363447 Jolly et al., “Genetic Diseases of Cattle,” Chapter 21, each hereby incorporated by reference in their entireties, and vetbook(dot) org/wiki/cow/index.php/Genetic_diseases_of_cows. The germplasm of the present disclosure can be used to reduce the presence of these recessive genes in herds and bovine populations.

[0103] Several other health traits are tracked in Holstein cattle, including hypocalcemia (milk fever), Displaced Abomasum (DA), ketosis, mastitis, metritis, and retained placenta. Genomic and genetic evaluations are provided for Holstein animals; the evaluation of each trait is expressed in percentage points of resistance above or below the breed average.

[0104] Animal Genotype provides for, and includes, a diploid Bos taurus cell or a plurality of diploid Bos taurus cells comprising improved germplasm characterized by a genome having 90% to 100% of homozygous loci characterizing the Animal Homozygous Genotype. The present disclosure provides for, and includes, a diploid Bos taurus cell or a plurality of diploid Bos taurus cells comprising improved germplasm characterized by a genome having 90% to 100% of homozygous loci characterizing the Animal Homozygous Genotype. In an aspect, the diploid Bos taurus cell or a plurality of diploid Bos taurus cells comprise a genome having 90% to 100% of homozygous loci characterizing the Animal Homozygous Genotype. In an aspect, the genome of said Bos taurus cell or cells further comprise at least 90% of heterozygous loci characterizing the Animal Heterozygous Genotype. In an aspect, the plurality of cells comprises a frozen vial, a cell culture, a tissue, a zygote, an embryo, a calf, or a mature adult. In some aspects, the Bos taurus cells are non-reproductive cells. In various aspects, the Bos taurus cells are gametes. In an aspect, the number of cells in a plurality of cells of the present disclosure is two or more, 100 or more, 1000 or more, 10⁴ or more, 10⁵ or more, or 10⁶ or more. In an aspect, the cells are in a container and comprise between 10⁴ and 10⁷ cells. In an aspect, the number of cells is between 10⁵ and 10⁷ cells.

[0105] In other aspects, the present disclosure provides for and includes, a diploid Bos taurus cell or a plurality of diploid Bos taurus cells comprising improved germplasm characterized by a genome comprising at least 95% of homozygous loci characterizing the Animal Homozygous Genotype. In an aspect, the diploid Bos taurus cell or plurality of diploid Bos taurus cells further comprise at least 95% of heterozygous loci characterizing the Animal Heterozygous Genotype. In another aspect, the diploid Bos taurus cell or plurality of diploid Bos taurus cells comprise a genome comprising 97% of homozygous loci characterizing the Animal Homozygous Genotype. In an aspect, the diploid Bos taurus cell or plurality of diploid Bos taurus cells further comprise 97% of heterozygous loci characterizing the Animal Heterozygous Genotype. In another aspect, the diploid Bos taurus cell or plurality of diploid Bos taurus cells comprise a genome comprising at least 98% of homozygous loci characterizing the Animal Homozygous Genotype. In an aspect, the diploid Bos taurus cell or plurality of diploid Bos taurus cells further comprise at least 98% of heterozygous loci characterizing Animal Heterozygous Genotype. In another aspect, the diploid Bos taurus cell or plurality of diploid Bos taurus cells comprise a genome comprising at least 99% of homozygous loci characterizing the Animal Homozygous Genotype. In an aspect, the diploid Bos taurus cell or plurality of diploid Bos taurus cells comprise at least 99% of heterozygous loci characterizing the Animal Heterozygous Genotype. In another aspect, the diploid Bos taurus cell or plurality of diploid Bos taurus cells comprise a genome comprising at least 99.5% of homozygous loci characterizing the Animal Homozygous Genotype. In an aspect, the diploid Bos taurus cell or plurality of diploid Bos taurus cells further comprise at least 99.5% of heterozygous loci characterizing the Animal Heterozygous Genotype. In an aspect, the diploid Bos taurus cell or plurality of diploid Bos taurus cells comprise a genome comprising homozygous loci characterizing the Animal Homozygous Genotype. In an aspect, the diploid Bos taurus cell or plurality of diploid Bos taurus cells further comprise heterozygous loci characterizing the Animal Heterozygous Genotype. In an aspect, the diploid Bos taurus cells comprise Bos taurus Animal, wherein a sample of cells of Animal comprises the Deposit. As provided herein, the plurality of cells may comprise a frozen vial, a cell culture, a tissue, a zygote, an embryo, a calf, or a mature adult. In some aspects, the Bos taurus cells are non-reproductive cells. In an aspect, the number of cells in a plurality of cells of the present disclosure is two or more, 100 or more, 1000 or more, 10⁴ or more, 10⁵ or more, or 10⁶ or more. In an aspect, the cells are in a container and comprise between 10⁴ and 10⁷ cells. In an aspect, the number of cells is between 10⁵ and 10⁷ cells.

[0106] The present disclosure provides for, and includes, tissue cultures comprising diploid Bos taurus cells comprising improved germplasm characterized by a genome comprising an Animal Genotype. In an aspect, the culture of Bos taurus cells comprises a genome comprising homozygous loci comprising the nucleic acid sequences of the Animal Homozygous Genotype. As provided above, tissue cultures may comprise cells having 95% of the recited homozygous loci, 97% of the recited homozygous loci, 98% of the recited homozygous loci, 99% of the recited homozygous loci, 99.5% of the recited homozygous loci, or 100% of the recited homozygous loci. In an aspect, the diploid Bos taurus cell culture comprises Bos taurus Animal, wherein a sample of cells of Animal comprises the Deposit. As provided herein, the cell culture may be prepared from frozen cells or obtained as a primary culture from an embryo, a calf, or a mature adult. In certain aspects, the Bos taurus cells are non-reproductive cells.

[0107] Also included, and provided for, are Bos taurus cells that are haploid. Animal Haploid Genotype provides for, and includes, a haploid Bos taurus cell or a plurality of haploid Bos taurus cells comprising improved germplasm characterized by a genome having 90% to 100% of loci characterizing the Animal Homozygous Genotype. As described below, haploid cells can be readily produced by somatic cell nuclear transfer of Bos taurus Animal, wherein a sample of cells of Animal comprises the Deposit. Mature animals prepared from Animal can be used to obtain haploid gametes through methods known in the art and discussed in detail below. As used herein, the term “gametes,” “sperm,” “spermatozoa,” “spermatid,” and “inseminate” are used interchangeably for haploid cells obtained from male animals and the terms will be understood by a person of ordinary skill in the art. As used herein, the term “gametes,” “ova,” and “ovum” are used interchangeably for haploid cells obtained from female animals. Haploid Bos taurus cells of the present disclosure comprise a haploid genome comprising a single copy of at least 90% of loci characterizing the Animal Homozygous Genotype. Haploid cells of the present disclosure include a haploid genome comprising a single copy of at least 95% of loci characterizing the Animal Homozygous Genotype. Haploid cells of the present disclosure also include a haploid genome comprising a single copy of at least 97% of loci characterizing the Animal Homozygous Genotype. Haploid cells of the present disclosure may also comprise a haploid genome comprising a single copy of at least 98% of loci characterizing the Animal Homozygous Genotype. Haploid cells of the present disclosure include a haploid genome comprising a single copy of at least 99% of loci characterizing the Animal Homozygous Genotype. In some aspects, haploid cells of the present disclosure comprise a haploid genome comprising a single copy of at least 99.5% of loci characterizing the Animal Homozygous Genotype. Haploid cells of the present disclosure also include cells comprising a haploid genome comprising a single copy of loci characterizing the Animal Homozygous Genotype. In an aspect, the number of haploid cells from male animals in a plurality of cells of the present disclosure is two or more, 100 or more, 1000 or more, 10⁴ or more, 10⁵ or more, or 10⁶ or more. In an aspect, the cells are in a container and comprise between 10⁴ and 10⁷ cells. In an aspect, the number of cells in a container is between 10⁵ and 10⁷ cells.

[0108] As provided herein, the plurality of haploid cells may be cells in fresh semen. Methods for the collection of sperm from mature bulls are well known in the art.

[0109] Bos taurus germplasms are often provided as frozen (cryopreserved) semen samples. A long-term semen storage system is advantageous by allowing movement of artificial insemination (AI) doses throughout the world without compromising semen viability. Long-term storage also enables specific health checks to be carried out on both the semen and individual males thus minimizing the risk of the spread of disease through AI. Cryopreservation techniques for semen are well known to those skilled in the art.

[0110] As provided herein, useful cryoprotectants are not limited to those acting by a particular mechanism. In an aspect, the cryoprotectant acts, at least in part, by reducing intracellular dehydration. Not to be limited by theory, freezing is accompanied by an increase in solute concentration in the medium surrounding sperm that draws water out of the cells leading to increases in intracellular electrolyte concentration. Cryoprotectants of the present disclosure include, but are not limited to glycerol (GLY), 1,1,1-tris(hydroxymethyl)ethane [2-hydroxymethyl-2-methyl-propane-1,3-diol] (THE), 1,1,1-tris(hydroxymethyl)propane [2-ethyl-2-hydroxymethyl-propane-1,3-diol] (THP), ethylene glycol (EG), propane-1,2-diol (PD2), propane-1,3-diol (PD3) and dimethylsulphoxide (DMSO), sucrose, trehalose, dextrose, raffinose, lactose, melibiose, melezitose, mannotriose, stachyose, dextran, hydroxy-ethyl starch, maltitol, lactitol, polyethyleneglycol, propylene glycol, polyvinvyl pyrrolidone, polyethylene oxide, and combinations thereof.

[0111] The present disclosure provides for, and includes, containers of Bos taurus inseminates comprising a plurality of sperm cells. Inseminates are prepared by combining fresh semen samples with a cryoprotectant and freezing the samples. Upon thawing, the sperm retain high levels of motility and fertility. In addition to the cryoprotectant, inseminates often include one or more additional components. In an aspect, the inseminate comprises 10⁴ or more, 10⁵ or more, or 10⁶ or more cells. In an aspect, the inseminate is provided in a container and comprises between 10⁴ and 10⁷ cells. In an aspect, the number of cells in the container is between 10⁵ and 10⁷ cells.

[0112] In general, about 5 ml to about 15 ml of semen is collected from a bull and optionally mixed with a suitable extender and cryoprotectant. For example, in an aspect, about 10 ml of semen is collected and mixed with about 240 ml of TRILADYL™ (Minitube, Verona, Wis.) solution, which is an off the shelf product that is available from Minitube of America in Verona, Wis. The TRILADYL™ contains an extender and a cryoprotectant, such as glycerol. The mixture of semen, extender and cryoprotectant is then placed in plastic straws and frozen. In the industry the contents of the frozen straw are generally referred to as frozen semen, although the contents also contain an extender and a cryoprotectant. A goal is to cryopreserve about 20 million motile sperm in a ½ ml semen straw.

[0113] As used herein, an inseminate refers to a composition of Bos taurus sperm having an Animal Haploid Genotype and a cryoprotectant. Also provided are inseminates further comprising a component selected from the group consisting of an extender, an antibiotic, a buffer, an energy source, an antioxidant, a protein source, and a combination thereof. Inseminates according to the present disclosure may be frozen or thawed.

[0114] The present disclosure further provides for, and includes, Bos taurus inseminates comprising a sperm having a genome comprising an Animal Haploid Genotype, the inseminate further comprising one or more extenders. The term “extender” refers to any medium that preserves sperm viability. The term “extension” refers to the dilution of sperm and cryoprotectant (e.g., an inseminate) with extender. An extender suitable for use in the selected sperm sample includes a physiologically acceptable carrier. The physiologically acceptable carrier is typically aqueous, and, in certain aspects, includes deionized water. Suitable extenders commonly comprise one or more of the following additional components: a component that maintains osmolality and buffers pH, an organic substance that prevents cold shock and preserves fertility of sperm, a detergent that acts synergistically with certain organic substances to enhance preservation of sperm, an energy source that can be readily utilized by sperm, an antioxidant, which protects sperm from cold shock, a substance that facilitates sperm capacitation, and one or more antibiotics. In aspects according to the present disclosure, the extender may be a commercial extender, such as BOVIPRO® CRYOGUARD® (MOFA Global, Wisconsin, USA), ANDROMED® (Minitube, Verona, Wis.), ANDROMED® CSS (Minitube, Verona, Wis.), TRILADYL® (Minitube, Verona, Wis.), BILADYL® (Minitube, Verona, Wis.), STERIDYL® (Minitube, Verona, Wis.), and BIOCIPHOS (IMV, France). See for example U.S. Patent Publication No. 2003/0157475 published Aug. 21, 2003.

[0115] The present disclosure further provides for, and includes, Bos taurus inseminates comprising at least one sperm having a genome comprising an Animal Haploid Genotype and further comprising extenders that are a source of protein. Suitable protein sources include, but are not limited to egg yolk, milk, BSA, and derivatives and combinations thereof. Inseminates comprising a protein source may further include one or more additional components selected from the group consisting of osmolytes, a buffer, and organic substances that prevent cold shock, detergents, energy sources, antioxidants, one or more antibiotics, and a combination thereof.

[0116] The present disclosure further provides for, and includes, Bos taurus inseminates comprising a sperm having a genome comprising an Animal Haploid Genotype wherein the osmolality of the inseminate is controlled. The term “osmolality,” as used herein, is a measure of the osmotic pressure of dissolved solute particles in an aqueous solution (e.g., an extender). The solute particles include both ions and non-ionized molecules. Osmolality is expressed as the concentration of osmotically active particles (i.e., osmoles) dissolved in 1 kg of water.

[0117] Substances helpful in maintaining osmolality and pH within these ranges are well known in the art and can be added to the extender as a solid or already in solution. A buffer containing a salt, a carbohydrate, or a combination thereof can be employed for this purpose. In aspects according to the present disclosure, the osmolality is between about 250 milliosmoles (mOsM) to about 350 mOsM. In certain aspects, the pH of the Bos taurus inseminate is between 6.9 and 7.5. Specific examples of osmolytes and buffers include sodium citrate, Tris[hydroxymethyl]aminomethane, and TES (N-Tris [Hydroxymethyl]methyl-2-aminoethanesulfonic acid), and monosodium glutamate buffers; milk; HEPES-buffered medium; and any combination thereof. The component employed to help maintain osmolality and provide buffering capacity in a particular application can vary depending on the other components of the extender and, in some cases, on the species from which the sperm are derived. The selection of such a component for use in the present teachings is, however, within the level of skill in the art. Inseminates comprising an osmolyte may further include one or more additional components selected from the group consisting of a protein source, a buffer, and organic substances that prevent cold shock, detergents, energy sources, antioxidants, and one or more antibiotics.

[0118] The present disclosure further provides for, and includes, Bos taurus inseminates comprising a sperm having a genome comprising an Animal Haploid Genotype; wherein the inseminate further comprises extenders that comprise an antibiotic, since substantial bacterial growth can threaten sperm viability and increase the risk of infection of the host in artificial insemination or in vitro fertilization procedures. Any of a variety of antibiotics useful in the cryopreservation of cells can also be employed in the extender. The selection of a suitable antibiotic depends on the species from which the sperm was obtained, the procedures involved in obtaining and handling the sperm sample, and the specific microorganism(s) to be targeted. Exemplary antibiotics include tylosin, gentamicin, lincomycin, spectinomycin, linco-spectin (a combination of lincomycin and spectinomycin), penicillin, streptomycin, and ticarcillin, which can be used alone or in combination. However, one skilled in the art can readily determine other antibiotics suitable for use in the extender. Inseminates comprising an osmolyte may further include one or more additional components selected from the group consisting of a protein source, a buffer, and organic substances that prevent cold shock, detergents, energy sources, antioxidants, and osmolytes.

[0119] The present disclosure provides for and includes Bos taurus inseminates comprising a sperm having a genome comprising an Animal Haploid Genotype and; wherein the inseminate further comprises organic stress reducing agents. Organic stress reducing agents (OSR) provide improved motility, viability, fertility, and integrity of sperm cells in the Bos taurus inseminates of the present disclosure. Suitable OSRs include, but are not limited to catalase, superoxide dismutase (SOD), a SOD mimic, glutathione, glutathione reductase, glutathione peroxidase, pyruvate, mercaptoethanol, butylated hydroxytoluene (BHT), lipoic acid, flavins, quinines, vitamin K (and related vitamers), vitamin B12 (and related vitamers), vitamin E (and related vitamers), tocopherols, tocotrienols, α-tocopheryl, alpha ketoglutarate (AKG), malondialdehyde (MDA), asymmetric dimethylarginine (ADMA) and biologically active derivatives thereof. Bos taurus inseminates and compositions according to the present disclosure can include one or more OSRs. Inseminates comprising a one or more OSRs may further include one or more additional components selected from the group consisting of a protein source, a buffer, and organic substances that prevent cold shock, detergents, energy sources, antioxidants, and osmolytes.

[0120] The present specification provides for, and includes, inseminates comprising a sperm having a genome comprising an Animal Haploid Genotype. In an aspect, the inseminate comprises Bos taurus sperm comprising at least 90% of each of the recited loci. In an aspect, the inseminate comprises at least 95% of the recited loci. In an aspect, the inseminate comprises at least 97% the recited loci. In an aspect, the inseminate comprises at least 98% of the recited loci. In an aspect, the inseminate comprises at least 99% of the recited loci. In an aspect, the inseminate comprises at least 99.5% of the recited loci. In an aspect, the inseminate comprises sperm cells from Bos taurus Animal, wherein a sample of cells of Animal comprises the Deposit. As provided herein, the inseminate may be fresh, frozen, or frozen and thawed and may further comprise a component selected from the group consisting of an extender, an antibiotic, a buffer, an energy source, an antioxidant, a protein source, and a combination thereof.

[0121] The present specification provides for, and includes, inseminates wherein the sperm have undergone one or more selections to prepare selected sperm inseminate. In some aspects, selected sperm inseminates may be selected based on sex-type. In some aspects, the sperm are sex selected prior to preparing the selected sperm inseminate. In various aspects, the inseminate is prepared and then subjected to a sex-type selection processes. In various aspects, the sex-type selection is performed prior to freezing the inseminate. In various aspects, the sex-type selection process is performed after thawing of a frozen inseminate.

[0122] Sex-type selection may be performed based on slight differences in the physical characteristics of sperm cells. Selection may also be performed based on nucleic acid sequence. A variety of methods are available for selecting cells including flow-cytometric methods. Importantly, the selection and subsequent processing of sperm creates challenges to maintain fertility and successful insemination when used in breeding. Methods of sex-type selection are known in the art.

[0123] The present disclosure provides for, and includes, sex selected inseminates comprising sperm having a genome comprising an Animal Haploid Genotype.

[0124] In an aspect, the sex selected inseminate comprises Bos taurus sperm comprising at least 90% of the recited loci. In an aspect, the sex selected inseminate comprises at least 95% of the recited loci. In another aspect, the sex selected inseminate comprises at least 97% of the recited loci. Other aspects provide sex selected inseminates comprising at least 98% of the recited loci. In an aspect, the sex selected inseminate comprises at least 99% of the recited loci. In a further aspect, the sex selected inseminate comprises at least 99.5% of the recited loci. In an aspect, the sex selected inseminate comprises sperm cells from Bos taurus Animal, wherein a sample of cells of Animal comprise the Deposit. As provided herein, the sex selected inseminate may be fresh, frozen, or frozen and thawed and may further comprise one or more components selected from the group consisting of an extender, an antibiotic, a buffer, an energy source, an antioxidant, and a protein source. As provided herein, the sex selected inseminate may be skewed toward X-chromosome bearing or Y-chromosome bearing populations of spermatozoa. In an aspect, the sex selected inseminate comprises 10⁴ or more, 10⁵ or more, or 10⁶ or more cells. In an aspect, the sex selected inseminate is provided in a container and comprises between 10⁴ and 10⁷ cells. In an aspect, the number of sex selected cells in the container is between 10⁵ and 10⁷ cells.

[0125] The present disclosure provides for, and includes, a container of a Bos taurus inseminate comprising a plurality of sperm cells having attributes of Bos taurus semen Animal, wherein a sample of cells of Animal comprises the Deposit.

[0126] The present disclosure provides for, and includes oocytes extracted from a cow or heifer comprising an Animal F1 germplasm. An average collection for IVF can result in an average of about 20 oocytes. The present disclosure further provides for treating the oocytes with TCM-99 (Sreenivas, D. 2013, J. Aller. Ther., 4(2)), or other oocyte maturation media known in the art. TC 199 stock solution is commercially available from Minitube (Verona, Wis.), and other vendors. The present disclosure further provides for and includes methods of capacitation of sperm known in the art (see, for example, Parrish, J J., 2014, Theriogenology, 81(1), 67-73). The present disclosure further provides for and includes methods of in vitro fertilization known in the art for fertilizing mature ova of Animal's F1 offspring.

[0127] The present disclosure provides for and includes methods of Embryo Transfer to increase the number of possible offspring for daughters of Animal. The present disclosure provides for and includes superovulation of Animal's daughters as described in Example 6. The present disclosure further provides for the released ova being fertilized by either artificial insemination or natural service.

[0128] The present disclosure provides for, and includes, the distinguishing attributes of Animal and the inseminates of the present disclosure in Table 2. The unexpected and desirable combination of attributes is particularly valuable for dairy herd improvement and breeding purposes. In the following tables, “T” means that the animal tested free of the associated genotype and “0” means there is no chance that the animal is a carrier. All values presented herein were current as of the April 2020 Sire Summary.

TABLE 2
Composite scores, linear trait scores and genomic results for Animal

| | | |
|---|---|---|
| | Sex | M |
| | id17 | HO840003210132823 |
| | Birth Date | 2019 Aug. 9 |
| Net Merit Score | NM$ | 928 |
| productive life | PL | 5.4 |
| somatic cell score | SCS | 2.79 |
| Daughter Pregnancy Rate | DPR | −0.4 |
| Cow Livability | LIV | 2.7 |
| PTA MILK | Milk | 1462 |
| PTAF | Fat | 122 |
| PTAP | Pro | 54 |
| Heifer Conception Rate | HCR | −0.5 |
| Cow Conception Rate | CCR | 0.7 |
| Stature | STA | −0.44 |
| Strength | STR | −0.5 |
| Body Depth | BDE | −0.36 |
| Daily Form | DFM | 1.11 |
| Rump Angle | RPA | −1.1 |
| Thurl Width | TRW | 0.15 |
| Rear Legs Side View | RLS | 0.25 |
| Rear Legs Rear View | RLR | 0.8 |
| Fore Udder Height | FTA | 0.12 |
| PTA Type | PTAT | 0.89 |
| Fore Udder Attachment | FUA | 0.93 |
| Rear Udder Height | RUH | 2.09 |
| Rear Udder Width | RUW | 1.92 |
| Udder Cleft | UCL | 0.49 |
| Udder Depth | UDP | 0.13 |
| Front Teat Placement | FTP | 0.6 |
| Teat Length | TLG | −0.62 |
| Feet Leg Score | FLS | 0.53 |
| Rear Teat Placement | RTP | 0.78 |
| Sire Calving Ease | SCE | 6.7 |
| Service Sire Stillbirth | SSB | 8.1 |
| Daughter Stillbirth | DSB | 5.8 |
| Daughter Calving Ease | DCE | 5.6 |
| Udder Composite Index | UDC | 1.37 |
| Feet & Legs Composite | FLC | 0.71 |
| Total Performance Index ® | TPI ® | 3032 |
| Brachyspina/FANCI | HH0 | T |
| APAF1 | HH1 | T |
| Unknown Lethal | HH2 | T |
| SMC2 | HH3 | T |
| GART | HH4 | T |
| TFB1M | HH5 | T |
| BLAD/ITGB2 | HHB | T |
| CVM/SLC35A3 | HHC | T |
| Cholesterol deficiency/APOB | HCD | 0 |
| Mulefoot/LRP4 | HHM | T |
| red color/MC1R | HHR | T |
| Polledness/POLLED | HHP | T |
| Black/Red Coat Color | HBR | T |
| Dominant Red Coat Color | HDR | T |
| | naab_code | 029HO19496 |
| | Dam ID | HO840003143328234 |
| | Sire ID | HO840003141494670 |
| Maternal Grand Sire | MGS ID | HO840003128557482 |
| Hypocalcemia | Milk Fever | 0.1 |
| Dispaced Abomasum | Dab | 0.4 |
| | Ketosis | 1.2 |
| | Mastitis | 0.5 |
| | Metritis | 1.1 |
| | Retained | 0 |
| | Placenta | |

[0129] The present disclosure provides for, and includes, F1 progeny animals, and parts thereof comprising a diploid or haploid genome wherein the diploid genome comprises 90% to 100% of loci characterizing the Animal Homozygous Genotype, and said F1 haploid genome having at least 50% of the loci characterizing the Animal Homozygous Genotype. F1 progeny animals are obtained by cloning a first parent animal prepared by somatic cell nuclear transfer or breeding of the Bos taurus cells of the present application with a second parent.

[0130] F1 progeny animals obtained from crosses of Bos taurus animals having the Animal Genotype of the present application with elite DM animals (or SM animals for female germplasm) are likely to retain many loci in their homozygous state. Moreover, as nearly all elite DM (and SM) animals are genotyped, a breeder can predict prior to the cross whether progeny will share the desired loci and estimate the expected number of homozygous loci. In most aspects, these valuable F1 progeny are subsequently screened and the most desirable elite F1 progeny identified and selected for maintaining the SM (or DM herd) and for further improvement. Thus, breeding strategies and decisions, informed by genomic data, can be made to continuously improve the germplasm and further, to lock in trait combinations by fixing homozygous alleles. Analysis and selection are necessary to not only make further improvements in breeding stock, but to maintain existing breeding stock quality. The animals of the present disclosure and those bred and selected from them do not occur naturally. Rather, under natural conditions, populations revert towards heterogeneity. See Park et al., Genome Biology 16: 234 (2015). Feral cattle (i.e., cattle not selected in breeding programs) are genetically distinct. See MacNeil et al., Animal Genetics 38:193-197 (2007).

[0131] Thus, the present disclosure provides for, and includes, methods of breeding and selection to retain the homozygous alleles of Animal Genotype and generate new homozygous alleles from among the heterozygous loci of the Animal Heterozygous Genotype. In select crosses with elite second parents (e.g., a DM or SM second parent), selection of preferred traits comprising at least 40% of homozygous loci characterizing the Animal Homozygous Genotype. Further, for an F1 progeny of Animal, the probability of any individual heterozygous locus becoming homozygous is 50% when crossed with a second parent that is homozygous at a locus. When the second parent is heterozygous at a locus, there is a 25% probability of an offspring being homozygous for a desired allele. Thus, over time, the total number of homozygous loci will increase in select crosses.

[0132] Also provided for, and included in, the present disclosure, are F1 progeny animals that have desirable EBV or GEBV scores. Such animals are important Sires of Females (SF) that are useful for breeding commercial herds and populations. Like breeding F1 progeny for the production of DM and SM animals, the second parent can be a select parent or an elite parent. Select parents for the production of F1 progeny animals that are either SF or DF animals have positive EBV scores for one or more PTA traits selected from the group consisting of productive life (PL), somatic cell score (SCS), Daughter Pregnancy Rate (DPR), PTA MILK (Milk), PTAF (Fat), and PTAP (Pro).

[0133] As used herein, the term “Animal F1 Diploid Genotype” provides for, and includes, a diploid F1 Bos taurus cells or a plurality of diploid Bos taurus cells comprising improved germplasm characterized by a genome having 90% to 100% of the loci characterizing the Animal Homozygous Genotype. In an aspect, an Animal F1 Diploid Genotype comprises at least 90% of the loci characterizing the Animal Homozygous Genotype. In another aspect, an Animal F1 Diploid Genotype comprises at least 95% of the loci characterizing Animal Homozygous Genotype. In other aspects, an Animal F1 Diploid Genotype comprises at least 97% of the loci of the Animal Homozygous Genotype. In a further aspect, an Animal F1 Diploid Genotype comprises at least 97% of the loci of the Animal Homozygous Genotype. In a further aspect, an Animal F1 Diploid Genotype comprises at least 98% of the loci characterizing the Animal Homozygous Genotype. In another aspect, an Animal F1 Diploid Genotype comprising at least 99% of the loci characterizing the Animal Homozygous Genotype. In another aspect, an Animal F1 Diploid Genotype comprises at least 99.5% of the loci characterizing the Animal Homozygous Genotype. In various aspects, an F1 progeny animal of the present disclosure comprises an Animal F1 Diploid Genotype that comprises the nucleic acid sequences of the Animal Homozygous Genotype. In an aspect, the F1 progeny animal, or part thereof, is an F1 progeny animal of Bos taurus Animal, wherein a sample of cells of Animal comprises the Deposit. As provided herein, the present specification provides for parts of F1 progeny animals including cells, cell cultures, and tissues. Also provided are frozen samples of parts of F1 progeny animals. Cells of F1 progeny animals include somatic cells and haploid germ cells (e.g., sperm and ova depending on the sex). In certain aspects, the Bos taurus cells of an F1 progeny animal are non-reproductive cells.

[0134] The present disclosure further provides for, and includes, F1 progeny animals, or parts thereof, comprising a diploid genome comprising between 40% and 80% of the homozygous loci characterizing the Animal Homozygous Genotype. In another aspect, the F1 progeny comprise at least 50% of the homozygous loci characterizing the Animal Homozygous Genotype. In another aspect, the F1 progeny comprise at least 60% of the homozygous loci characterizing the Animal Homozygous Genotype. In some crosses, the F1 progeny comprise at least 70% of the homozygous loci characterizing the Animal Homozygous Genotype. In an aspect, F1 progeny comprise at least 80% of the homozygous loci characterizing the Animal Homozygous Genotype. In certain aspects, F1 progeny comprise between 60 and 80% of loci of the Animal Homozygous Genotype that are homozygous. In certain aspects, an animal having an Animal Genotype is crossed to a DM or SM animal, wherein an F1 Animal arising from this cross comprises a genome having at least 90% of the loci characterizing the Animal Homozygous Genotype, and at least 45% of said loci are homozygous. In certain aspects, an animal having an Animal Genotype is crossed to a DM or SM animal, wherein the F1 Animal arising from this cross comprises a genome having at least 95% of the loci characterizing the Animal Homozygous Genotype, and at least 55% of said loci are homozygous. In various aspects, an animal having an Animal Genotype is crossed to a DM or SM animal, wherein the F1 Animal arising from this cross comprises a genome having at least 95% of the loci characterizing the Animal Homozygous Genotype, and at least 65% of said loci are homozygous.

[0135] The present disclosure further provides for, and includes, F1 progeny that are F1 hybrid animals. As used herein, an F1 hybrid animal is an animal comprising an Animal Haploid Genotype and a haploid genome of an animal of a different cattle breed. In an aspect, the second parent of the hybrid is a Bos indicus breed. In an aspect, the second parent is a member of a breed selected from the group consisting of Angus (ANG), Beef Shorthorn (SHR), Belgian Blue (BBL), Belted Galloway (BGA), Brahman (BRM), British Shorthorn (BSHN), Brown Swiss (BSW), Dutch Belted (DBE), Dutch Friesian (DFR), East Anatolian Red (EAR), English Longhorn (ELO), Finnish Ayrshire (FAY), French Brown Swiss (BRU), Galloway (GAL), Gascon (GAS), Guernsey (GNS), Hereford (HFD), Jersey (JER), Limousin (LMS), Longhorn (LHR), Milking Shorthorn (MSH), Normande (NOR), Norwegian Red (NRC), Red Angus (RGU), Texas Longhorn (TXL), Wagyu (WAG), and combinations of each.

[0136] In aspects according to the present disclosure, included are gametes obtained from F1 progeny of a first parent comprising a diploid genome comprising an Animal Genotype and a second parent having a Net Merit index (NM$) of at least 1000 or a TOTAL PERFORMANCE INDEX® (TPI®) of at least 2000. In an aspect, the second parent comprises a NM$ of at least 800. 400. In a further aspect, the second parent comprises a NM$ of at least 900. Crosses of Animal Genotype animals to improve select DM and SM animals, results in superior F1 animals having an Animal F1 Diploid Genotype. Improved F1 progeny having an Animal F1 Genotype that are produced from select DM animals having loci of the same allele as the Animal Homozygous Genotype. Accordingly, in addition to the at least 90% of the loci characterizing the Animal Homozygous Genotype provided by Animal, a DM animal provides loci comprising nucleic acids having the same allele as the Animal Homozygous Genotype provides for the generation of homozygous loci. In an aspect, the number of homozygous loci thus generated is at least 25%.

[0137] As used herein, the term “Animal F1 Haploid Genotype” provides for, and includes, haploid Bos taurus cells or a plurality of haploid Bos taurus cells comprising improved germplasm characterized by a genome comprising between 25% and 100% of the loci selected from the alleles of the Animal Homozygous Genotype. In aspects, an Animal F1 Haploid Genotype comprises between 25% and 50% of the loci selected from the alleles of the Animal Homozygous Genotype. In aspects, the genome comprises at least 30% of the selected loci. In some aspects, the F1 haploid genotype comprises between 25 and 35% of the alleles of the Animal Homozygous Genotype.

[0138] In an aspect, the gametes of an F1 progeny animal of the present disclosure comprises an Animal F1 Haploid Genotype having at least 45% of the loci characterizing the Animal Homozygous Genotype. In another aspect, the gamete of an F1 progeny animal of the present disclosure comprises an Animal F1 Haploid Genotype of at least 50% of the loci characterizing the Animal Homozygous Genotype. In yet another aspect, the gamete of an F1 progeny animal of the present disclosure comprises an Animal F1 Haploid Genotype of at least 55% of the loci characterizing the Animal Homozygous Genotype.

[0139] As provided herein, gametes of an F1 progeny animal comprise between 55% and 95% of the loci of an Animal F1 Haploid Genotype which in turn comprises the loci characterizing the Animal Homozygous Genotype. As will be understood by persons of skill in the art, the smaller the phylogenetic distance between the first parent and second parent, the greater the probability of obtaining progeny having desirable alleles at a large number of important loci. As discussed, given the availability of genomic data from a second parent, the expectation of obtaining F1 progeny that have a high number of homozygous loci can be determined and accordingly the probability of gametes having desired loci determined. In an aspect, gametes of an F1 progeny animal comprise 60% of the loci of the Animal F1 Haploid Genotype. In another aspect, gametes of an F1 progeny animal comprise 70% of the loci of the Animal F1 Haploid Genotype. In yet another aspect, gametes of an F1 progeny animal comprise 75% of the loci of the Animal F1 Haploid Genotype. Other aspects provide gametes of an F1 progeny animal that comprise 80% of the loci of the Animal F1 Haploid Genotype.

[0140] The present disclosure provides for, and includes, methods for improving bovine herds by selective breeding. Generally, selective breeding includes mating through natural service, artificial insemination, in vitro fertilization, and embryo transfer. As provided herein, selective breeding comprises crossing a bull of variety Animal, or a frozen inseminate thereof, to a second parent, by artificially inseminating or inseminating by natural service, and calving a progeny calf. In an aspect, the selective breeding comprises providing an inseminate comprising a sperm having a genome comprising an Animal Haploid Genotype. In another aspect, the disclosure provides for, and includes, providing an F1 inseminate comprising a sperm having a genome comprising an Animal F1 Haploid Genotype. In certain aspects, the second parent is an animal of a herd in need of improvement. In an aspect, a herd in need of improvement is a commercial herd.

[0141] In aspects according to the present disclosure, methods of improving herds further includes testing a second parent for the haplotypes HHB, HHC, HHD, HHM, HBR, and HDR and selecting a second parent lacking one or more haplotypes HHB, HHC, HHD, HHM, HBR, or HDR.

[0142] The present disclosure further provides for, and includes, a composition comprising a Bos taurus genome comprising an Animal Genotype as recited above. In some configurations, the present teachings include a Bos taurus genome further comprising 90% of the heterozygous loci characterizing the Animal Heterozygous Genotype. In various configurations, a composition of the present teachings comprises an isolated nucleus or plurality thereof, a cell or plurality thereof, or isolated genomic DNA. In some aspects, the composition comprises a Bos taurus genome from a non-reproductive cell.

[0143] In some embodiments, the present disclosure provides for and includes, a composition comprising a Bos taurus genome of Animal Genotype. In another aspect, a composition comprises an Animal Haploid Genotype. In a further aspect, a composition comprises an Animal F1 Diploid Genotype. In yet another aspect, a composition comprises an Animal F1 Haploid Genotype. In an aspect, the composition comprises a Bos taurus genome of Bos taurus Animal, wherein a sample of cells of Animal comprises the Deposit.

[0144] The present disclosure provides for and includes containers of Bos taurus inseminate comprising a plurality of sperm cells, wherein said plurality of sperm cells have the attributes of Bos taurus Animal, wherein a sample of cells of Animal comprises the Deposit. The present specification provides for and includes containers of inseminates comprising a sperm having a genome comprising an Animal Haploid Genotype. In a further aspect, the containers of inseminate comprise Bos taurus sperm comprising at least 90% of the recited Animal Haploid Genotype loci. In a further aspect, each of the containers of inseminate comprises at least 95% of the recited Animal Haploid Genotype loci. In an aspect, each of the containers of inseminate comprises at least 97% of the recited Animal Haploid Genotype loci. In an aspect, each of the containers of inseminate comprises at least 98% of the recited Animal Haploid Genotype loci. In an aspect, each of the containers of inseminate comprises at least 99% of the recited Animal Haploid Genotype loci. In an aspect, each of the inseminate comprises at least 99.5% of the recited Animal Haploid Genotype loci. In an aspect, the containers of inseminate comprises sperm cells from Bos taurus Animal, wherein a sample of cells of Animal comprises the Deposit. As provided herein, the inseminate in the containers may be fresh, frozen, or frozen and thawed and may further comprise a component selected from the group consisting of an extender, an antibiotic, a buffer, an energy source, an antioxidant, and a protein source.

[0145] Also included are containers of Holstein inseminates comprising a sperm having an Animal Haploid Genotype as recited above wherein the sperm of the inseminate is obtained from a Holstein bull having a NM$ of about 900 to about 1500. In an aspect, the sperm of the inseminate is obtained from a Holstein bull having a NM$ of about 1000 to about 1450. In an aspect, the sperm of the inseminate is obtained from a Holstein bull having a NM$ of about 1050 to about 1400. In an aspect, the sperm of the inseminate is obtained from a Holstein bull having a NM$ of about 1100 to about 1350. In an aspect, the sperm of the inseminate is obtained from a Holstein bull having a NM$ of about 1150 to about 1300. In an aspect, the sperm of the inseminate is obtained from a Holstein bull having a NM$ of about 1000. In various aspects, the sperm of the inseminate is obtained from a Holstein bull having a NM$ of about 950, about 1000, about 1050, about 1100, about 1150, about 1200, about 1250, about 1300, about 1350, about 1400, about 1450, or about 1500.

[0146] Also included are containers of inseminates comprising a sperm having an Animal Haploid Genotype as recited above wherein the sperm of the inseminate is obtained from a Holstein bull having a TPI® of about 2100 to about 3000. In an aspect, the sperm of the inseminate is obtained from a Holstein bull having a TPI® greater than 2100. In various aspects, the sperm of the inseminate is obtained from a Holstein bull having a TPI® of greater than 2200. In various aspects, the sperm in a container of inseminate is obtained from a Holstein bull having a TPI® of greater than 2300. In another aspect, the sperm of the inseminate is obtained from a Holstein bull having a TPI® greater than 2400. In various aspects, the sperm of the inseminate is obtained from a Holstein bull having a TPI® greater than 2500. In various aspects, the sperm of the inseminate is obtained from a Holstein bull having a TPI® greater than 2600. In various aspects, the sperm of the inseminate is obtained from a Holstein bull having a TPI® greater than 2700. In various aspects, the sperm of the inseminate is obtained from a Holstein bull having a TPI′ greater than 2800. In various aspects, the sperm of the inseminate is obtained from a Holstein bull having a TPI® greater than 2900.

[0147] In certain aspects, the present disclosure provides for methods of creating elite F1 Holstein progeny. In various aspects, a second Holstein parent is selected that comprises NM$ of at least 1000, a TPI® of at least 2000 in any given progeny generation. In aspects of the present disclosure, the F1 progeny animals comprise a NM$ of at least 1000 or a TPI® of at least 2000.

[0148] The present disclosure further provides for, and includes, methods to prepare improved F1 progeny Holstein animals comprising selecting a second Holstein parent having a NM$ of at least 1000 or a TPI® of at least 2000. In an aspect, the second parent comprises a NM$ of at least 800. In a further aspect, the second parent comprises a NM$ of at least 900.

[0149] The present disclosure further provides for, and includes, Holstein F1 progeny animals, or parts thereof, comprising a NM$ of at least 1000 or a TPI® of at least 2000. In an aspect, the Holstein F1 progeny animals, or parts thereof, comprise a NM$ of at least 800. In a further aspect, the F1 progeny animals, or parts thereof, comprise a NM$ of at least 900.

[0150] The present disclosure provides for, and includes, processes for storing spermatozoa comprising obtaining a Bos taurus ejaculate spermatozoa, each spermatozoa having an Animal Haploid Genotype as recited above, mixing the Bos taurus ejaculate with an antibiotic to form a sperm dispersion. In an aspect, the Bos taurus ejaculate is an ejaculate of a bull of Bos taurus Animal, wherein a sample of cells of Animal comprises the Deposit. In another aspect, the spermatozoa comprise an Animal F1 Haploid Genotype as recited above. In another aspect, the spermatozoa comprise an Animal F1 Haploid Genotype comprising at least 55% of the loci characterizing the Animal Homozygous Genotype. In another aspect, the spermatozoa comprise an Animal F1 Haploid Genotype comprising at least 60% of the loci characterizing the Animal Homozygous Genotype. In yet another aspect, the spermatozoa comprise an Animal F1 Haploid Genotype comprising at least 65% of the loci characterizing the Animal Homozygous Genotype. In yet another aspect, the spermatozoa comprise an Animal F1 Haploid Genotype comprising at least 70% of the loci characterizing the Animal Homozygous Genotype. In other aspects, the spermatozoa comprise an Animal F1 Haploid Genotype comprising at least 75% of the loci characterizing the Animal Homozygous Genotype. Other aspects provide for spermatozoa comprising an Animal F1 Haploid Genotype comprising at least 80% of the loci characterizing the Animal Homozygous Genotype. Further aspects provide for spermatozoa comprising an Animal F1 Haploid Genotype comprising at least 85% of the loci characterizing the Animal Homozygous Genotype. In addition, the disclosure provides spermatozoa comprising an Animal F1 Haploid Genotype comprising at least 90% of the loci characterizing the Animal Homozygous Genotype. Other aspects provide for obtaining a Bos taurus ejaculate comprising spermatozoa comprising an Animal F1 Haploid Genotype comprising at least 95% of the loci characterizing the Animal Homozygous Genotype. Further aspects provide for spermatozoa comprising an Animal F1 Haploid Genotype comprising at least 99% of the loci characterizing the Animal Homozygous Genotype. As provided herein, the sperm dispersions may further comprise one or more components selected from the group consisting of a cryoprotectant, an extender, an antibiotic, a buffer, an energy source, an antioxidant, and a protein source. In aspects of the present disclosure, the number of cells in a sperm dispersion comprise 1000 or more, 10⁴ or more, 10⁵ or more, or 10⁶ or more cells. In an aspect, the cells are in a container and comprise between 10⁴ and 10⁷ cells. In an aspect, the number of cells is between 10⁵ and 10⁷ cells.

[0151] The process for storing spermatozoa further includes preparing a container having a volume of sperm dispersion and freezing the sperm dispersion container prior to storing. As used herein, a “container” is any suitable container, including a straw or sheath. In an aspect, the volume of sperm dispersion is 0.25 milliliters (ml), 0.50 ml, or any volume between 0.1 and 1 ml. As provided by the present specification, the storing comprises maintaining the sperm dispersion at a temperature of −196° C. Also included, and provided for, in the process for storing spermatozoa is sorting said spermatozoa into X-chromosome or Y-chromosome enriched inseminate. In certain aspects, the process may further comprise removing immotile spermatozoa. In aspects of the present disclosure, the number of cells in a straw, sheath or container comprises between 10⁶ to 10⁸ cells. In an aspect, the number of cells in a straw, sheath or container comprises between 10⁴ and 10⁷ cells. In an aspect, the number of cells in a straw, sheath or container comprises between 10⁵ and 10⁷ cells. In an aspect, the concentration of spermatozoa in the sperm dispersion is between about 0.04×10⁶ sperm/ml to about 1.2×10⁸ sperm/ml.

[0152] The present disclosure provides for, and includes a combination comprising an elongated container for use in the insemination of a Bos taurus dam and a sperm dispersion comprising a plurality of sperm, each sperm comprising a genome comprising an Animal Haploid Genotype or an Animal F1 Haploid Genotype, wherein the sperm dispersion is contained in the elongated container. In an aspect, the concentration of spermatozoa in the sperm dispersion is between about 0.04×10⁶ sperm/ml to about 1.2×10⁸ sperm/ml.

[0153] The present disclosure provides for, and includes, methods of inseminating a Bos taurus dam comprising thawing a frozen inseminate comprising a plurality of sperm cells, each sperm cell having a genome comprising an Animal Haploid Genotype or an Animal F1 Haploid Genotype and artificially inseminating a dam with said thawed inseminate to produce an F1 bovine calf or an F2 bovine calf respectively. In an aspect, the method includes providing a plurality of sperm cells that comprise an Animal Haploid Genotype or an Animal F1 Haploid Genotype comprising at least 55% of the loci characterizing the Animal Homozygous Genotype. In another aspect, the method includes providing a plurality of sperm cells that comprise an Animal Haploid Genotype or an Animal F1 Haploid Genotype comprising at least 60% of the loci characterizing the Animal Homozygous Genotype. In yet another aspect, the method includes providing a plurality of sperm cells that comprise an Animal Haploid Genotype or an Animal F1 Haploid Genotype comprising at least 65% of the loci characterizing the Animal Homozygous Genotype. In yet another aspect, the method includes providing a plurality of sperm cells that comprise an Animal Haploid Genotype or an Animal F1 Haploid Genotype comprising at least 70% of the loci characterizing the Animal Homozygous Genotype. In other aspects, the method includes providing a plurality of sperm cells that comprise an Animal Haploid Genotype or an Animal F1 Haploid Genotype comprise at least 75% of the loci characterizing the Animal Homozygous Genotype. Other aspects of the method provide for sperm cells comprising an Animal Haploid Genotype or an Animal F1 Haploid Genotype comprising at least 80% of the loci characterizing the Animal Homozygous Genotype. Further aspects provide sperm cells comprising an Animal Haploid Genotype or an Animal F1 Haploid Genotype comprising at least 85% of the loci characterizing the Animal Homozygous Genotype. In addition, the methods provide sperm cells comprising an Animal Haploid Genotype or an Animal F1 Haploid Genotype comprising at least 90% of the loci characterizing the Animal Homozygous Genotype. Other aspects provide a frozen inseminate prepared from a Bos taurus ejaculate comprising spermatozoa comprising an Animal Haploid Genotype or an Animal F1 Haploid Genotype comprising at least 95% of the loci characterizing the Animal Homozygous Genotype. Further aspects provide for sperm cells comprising an Animal Haploid Genotype or an Animal F1 Haploid Genotype comprising at least 99% of the loci characterizing the Animal Homozygous Genotype. As provided herein, the inseminate suitable for the methods of insemination may further comprise one or more components selected from the group consisting of a cryoprotectant, an extender, an antibiotic, a buffer, an energy source, an antioxidant, and a protein source.

[0154] The present disclosure provides for, and includes, methods for preparing transgenic animals. Also provided for, and included, are transgenic animals having an Animal Genotype and an Animal F1 Diploid Genotype as recited above. Also included, and provided for, are haploid cells comprising a transgene comprising an Animal Haploid Genotype and an Animal F1 Haploid genotype as recited above.

[0155] As used herein, “transgenic animal, cell or tissue” includes reference to animals which comprise within their genomes a gene encoding a heterologous polynucleotide. Generally, the gene is stably integrated within the genome such that the expression of the polynucleotide is passed on to successive generations. The gene may be integrated into the genome alone or as part of a recombinant expression cassette. “Transgenic” is used herein to include any cell, cell line, tissue, or organ, the genotype of which has been altered by the presence of heterologous nucleic acid including those transgenics initially so altered as well as those created by sexual crosses or asexual propagation from the initial transgenic. The term “transgenic” as used herein does not encompass the alteration of the genome (chromosomal or extra-chromosomal) by conventional breeding methods or by naturally occurring events such as random cross-fertilization, non-recombinant viral infection, non-recombinant bacterial transformation, non-recombinant transposition, or spontaneous mutation. The transgene can be introduced into the genomes of the present disclosure directly or through breeding with a transgene containing animal. Methods to prepare transgenic animals are known in the art, for example by pronucleus injection as described by Gordon et al., Proc. Natl. Acad. Sci. USA 77:7380-7384 (1980). Pronucleus injection has been shown to be suitable for large domestic animals including pigs and cattle. See Hammer et al., Nature 315: 680-683 (1985) and Niemann, Proc. Natl. Acad. Sci. USA 101: 7211-7212 (2004). Other methods of generating transgenic animals are known in the art. See, such as and without limitation, Park, et al., Reprod. Fertil. Dev. 26:65-73 (2013).

[0156] Also provided for and included, are gene edited animals having an Animal Genotype. Gene edited animals are non-transgenic animals. The animals of the present disclosure can be gene-edited animals having an Animal Genotype, an Animal F1 Diploid Genotype, an Animal Haploid Genotype, or an Animal F1 Haploid Genotype as recited above. Suitable methods for gene editing are known in the art. Methods include, but are not limited to, the methods provided in International Patent Publication No. WO 2015/148761 published Oct. 1, 2015, U.S. Pat. No. 9,868,962, published Jan. 16, 2018, and International Patent Publication No. WO 2017/132239 published Mar. 8, 2017, and references cited therein, all of which are incorporated by reference.

[0157] The gene edited animals may contain edited chromosomal sequences. The edited chromosomal sequence may be (1) inactivated, (2) modified, or (3) comprise an integrated sequence resulting in a null mutation. An inactivated chromosomal sequence is altered such that a target protein function as it relates to an undesirable phenotype is impaired, reduced or eliminated. Thus, a genetically edited animal comprising an inactivated chromosomal sequence may be termed a “knock out” or a “conditional knock out.” Similarly, a genetically edited animal comprising an integrated sequence may be termed a “knock in” or a “conditional knock in.” Furthermore, a genetically edited animal comprising a modified chromosomal sequence may comprise a targeted point mutation(s) or other modification such that an altered protein product is produced. Briefly, the process can comprise introducing into an embryo or cell at least one RNA molecule encoding a targeted zinc finger nuclease and, optionally, at least one accessory polynucleotide. The method further comprises incubating the embryo or cell to allow expression of the zinc finger nuclease, wherein a double-stranded break introduced into the targeted chromosomal sequence by the zinc finger nuclease is repaired by an error-prone non-homologous end-joining DNA repair process or a homology-directed DNA repair process. The method of editing chromosomal sequences encoding a protein associated with germline development using targeted zinc finger nuclease technology is rapid, precise, and highly efficient.

[0158] Alternatively, the process can comprise using a CRISPR/Cas9 system to modify the genomic sequence. To use Cas9 to modify genomic sequences, the protein can be delivered directly to a cell. Alternatively, an mRNA that encodes Cas9 can be delivered to a cell, or a gene that provides for expression of an mRNA that encodes Cas9 can be delivered to a cell. In addition, either target specific crRNA and a tracrRNA can be delivered directly to a cell or target specific gRNA(s) can be to a cell (these RNAs can alternatively be produced by a gene constructed to express these RNAs). Selection of target sites and designed of crRNA/gRNA are well known in the art.

[0159] The animal or cell can be genetically edited using a homing endonuclease. The homing endonuclease can be a naturally occurring endonuclease but is preferably a rationally designed, non-naturally occurring homing endonuclease that has a DNA recognition sequence that has been designed so that the endonuclease targets a chromosomal sequence in a target gene. Thus, the homing endonuclease can be a designed homing endonuclease. The homing endonuclease can comprise, for example, a Clustered Regularly Interspaced Short Palindromic Repeats (CRISPR)/Cas9 system, a Transcription Activator-Like Effector Nuclease (TALEN), a Zinc Finger Nuclease (ZFN), a recombinase fusion protein, a meganuclease, or a combination thereof. The animal or cell is preferably an animal or cell that has been genetically edited using a CRISPR/Cas9 system.

[0160] The following are non-limiting exemplary embodiments of the present disclosure:

1. A Bos taurus cell of type Animal, a representative sample of cells of type Animal comprising the Deposit.
2. A frozen vial, a cell culture, a tissue, a zygote, or an embryo comprising a plurality of the Bos taurus cell according to embodiment 1.
3. A bull comprising a plurality of the Bos taurus cell according to embodiment 1.
4. The Bos taurus cell according to embodiment 1, wherein the cell is a sperm cell.
5. Semen comprising a plurality of the Bos taurus cell according to embodiment 4.
6. An embryo produced by contacting the cell according to embodiment 4 with a Bos taurus ovum.
7. A composition of matter comprising the cell according to embodiment 4 and a Bos taurus ovum.
8. A Bos taurus cell produced by somatic cell nuclear transfer of a Bos taurus cell of type Animal, a representative sample of cells of type Animal comprising the Deposit.
9. A frozen vial, a cell culture, a tissue, a zygote, or an embryo comprising a plurality of the Bos taurus cell according to embodiment 8.
10. A bull comprising a plurality of the Bos taurus cell according to embodiment 8.
11. A Bos taurus cell from an F1 offspring of a Bos taurus animal comprising a cell of type Animal, a representative sample of cells of type Animal comprising the Deposit.
12. A frozen vial, a cell culture, a tissue, a zygote, or an embryo comprising a plurality of the Bos taurus cell according to embodiment 11.
13. An animal comprising a plurality of the Bos taurus cell from an F1 offspring according to embodiment 11.
14. A container of semen produced by the animal of embodiment 13, wherein the animal is a bull.
15. The Bos taurus cell from an F1 offspring according to embodiment 11, wherein the F1 offspring is a gene edited animal.
16. The Bos taurus cell from an F1 offspring according to embodiment 11, wherein the cell is an ovum.
17. The Bos taurus cell from an F1 offspring according to embodiment 11, wherein the cell is a sperm cell.
18. Semen comprising a plurality of the Bos taurus cell according to embodiment 17.
19. An embryo produced from a gamete of the animal according to embodiment 13.
20. A composition of matter comprising a gamete from the animal according to embodiment 13 and a gamete cell from a second Bos taurus parent.

### EXAMPLES

### Example 1: Genomic Characterization of Bos taurus Cells

[0161] The genotype of Animal was determined using the ILLUMINA® Infinium HTS BeadChip (ILLUMINA®, Inc., San Diego, Calif.) microarray system using the BovineSNP50 v3 BeadChip microarray kit (BeadChip) according to manufacturer's instructions. The BeadChip contained 53,714 highly informative SNP probes uniformly distributed across the entire genome of major cattle breed types at a median spacing of 37.4 kb. The SNP probes were validated in 18 common beef and dairy breeds. The BeadChip is a collaboration of ILLUMINA®, Inc., the USDA-ARS, the University of Missouri, and the University of Alberta. More than 22,000 SNP probes target novel SNP loci found in pooled populations of economically important beef and dairy cattle. The BeadChip is well known and extensively used by those of skill in the art. Other suitable genotyping chips and technologies can be used, including but not limited to the GENESEEK® GENOMIC PROFILER™ High-Density array (GGP HD150K; Neogen Genomics, Lincoln Nebr.) and the NEOGEN® GGP Bovine 50k chip (Neogen Genomics, Lincoln Nebr.) that contain 139376 and 47843 SNPs respectively.

[0162] A wide variety of publicly available resources are known in the art including the bovine reference genome (Bovine Genome Sequencing and Analysis Consortium, Science 324(5926):522-8), Btau (available at ftp(dot)hgsc(dot)bcm.tmc.edu/pub/data/Btaurus/fasta), and the Bovine HapMap Consortium data set (Bovine HapMap Consortium, Science 324(5926):528-32 (2009) available on the internet at bovinehapmap(dot)org). Analysis tools and sequence data are maintained by the Bovine Genome Database (BGD) that is supported by the European Union's Seventh Framework Programme for research, technological development and demonstration (Grant Agreement No. 613689), and the USDA National Institute of Food and Agriculture. BGD is hosted at the University of Missouri.

TABLE 3
BovineSNP50 BeadChip Sources

| | BovineSNP50 | BovineSNP50 | BovineSNP50 |
|---|---|---|---|
| Source | v1 Probes | v2 Probes | v3 Probes |
| Novel SNPs ^{a} | 23,840 | 24,181 | 22,299 |
| Bovine HapMap Data | 12,298 | 12,342 | 11,607 |
| Set | | | |
| Btau Assembly SNPs | 9361 | 9404 | 9086 |
| Whole-Genome | 5808 | 6038 | 5485 |
| Shotgun Reads ^{b} | | | |
| Holstein BAC | 1409 | 1411 | 1238 |
| Sequence | | | |
| Parentage | 116 | 120 | 200 |
| Other | 1169 | 1113 | 3384 |
| Total | 54,001 | 54,609 | 53,218 |

^{a} Derived from sequencing common cattle breeds using the ILLUMINA ® GenomeAnalyzer.
^{b} Obtained from six breeds: Norwegian Red, Holstein, Brahman, Angus, Jersey, and Limousin.

### Example 2: Breeding and Selection of Animal

[0163] Animal was a progeny animal of a breeding program for the improvement of dairy herds and breeding purposes. Animal had the genotype as provided above in Table 1 and the predicted characteristics as provided above in Table 2. The definitions and abbreviations are provided above. Animal was an individual of the Holstein breed.

[0164] Animal was a cross between Sire and Dam. The composite scores and linear trait results of Sire and Dam are provided below in Table 4. Like Animal, Sire and Dam were SM and DM animals respectively. Sire comprised homozygous loci characterizing the Sire Homozygous Genotype and heterozygous loci characterizing the Sire Heterozygous Genotype. Dam comprised homozygous loci characterizing the Dam Homozygous Genotype and heterozygous loci characterizing the Dam Heterozygous Genotype.

[0165] Sire was the progeny of Paternal Grand-Sire and Paternal Grand-Dam. Dam was the progeny of Maternal Grand-Sire and Maternal Grand-Dam. The composite scores and linear trait results for Animal's grandparents are provided below.

[0166] The genomes, composite traits and other characteristics of the parents and grandparents were determined according to methods known in the art and are presented below in Tables 4 and 5.

TABLE 4
Genomic Report for Parents of Animal

| | Sire | Dam |
|---|---|---|
| Sex | M | F |
| id17 | HO840003141494670 | HO840003143328234 |
| Birth Date | 2017 Sep. 24 | 2017 Oct. 23 |
| NM$ | 832 | 805 |
| PL | 5.8 | 5.6 |
| SCS | 2.81 | 2.84 |
| DPR | 0.9 | −0.6 |
| LIV | 3.6 | 3 |
| Milk | 1225 | 1806 |
| Fat | 101 | 95 |
| Pro | 52 | 53 |
| HCR | 0.2 | 0.9 |
| CCR | 2.3 | 0.1 |
| STA | −0.36 | −0.61 |
| STR | −0.02 | −1.07 |
| BDE | −0.31 | −0.6 |
| DFM | 0.03 | 1.75 |
| RPA | −0.21 | −0.69 |
| TRW | 0.03 | 0.14 |
| RLS | −0.17 | 0.59 |
| RLR | 0.84 | 0.38 |
| FTA | −0.03 | −0.19 |
| PTAT | 0.39 | 0.9 |
| FUA | 0.6 | 0.37 |
| RUH | 0.76 | 1.74 |
| RUW | 0.7 | 1.6 |
| UCL | 0.18 | 0.63 |
| UDP | 0.09 | −0.26 |
| FTP | 0.61 | 0.62 |
| TLG | −0.23 | −0.73 |
| FLS | 0.25 | 0.53 |
| RTP | 0.89 | 1.03 |
| SCE | 7.3 | 6.8 |
| SSB | 8.2 | 7.6 |
| DSB | 5.6 | 6.8 |
| DCE | 5.9 | 6.7 |
| UDC | 0.66 | 1.06 |
| FLC | 0.47 | 0.62 |
| TPI ® | 2918 | 2880 |
| HH0 | T | T |
| HH1 | T | T |
| HH2 | T | T |
| HH3 | T | T |
| HH4 | T | T |
| HH5 | T | T |
| HHB | T | T |
| HHC | T | T |
| HCD | 0 | 0 |
| HHM | T | T |
| HHR | T | T |
| HHP | T | T |
| HBR | T | T |
| HDR | T | T |
| naab_code | 029HO18858 | NULL |
| Dam ID | HOUSA000074258448 | HO840003133318719 |
| Sire ID | HO840003129038181 | HO840003128557482 |
| MGS ID | HOUSA000072128125 | HOUSA000072128216 |
| Milk Fever | 0.2 | 0.1 |
| Dab | 0.4 | 0.2 |
| Ketosis | 0.9 | 1 |
| Mastitis | 1 | 1 |
| Metritis | 1 | 0.5 |
| Retained Placenta | 0.1 | −0.3 |

TABLE 8
Genomic Report for Grandparents of Animal

| | Paternal Grand Sire | Paternal Grand Dam | Maternal Grand Sire | Maternal Grand Dam |
|---|---|---|---|---|
| Sex | M | F | M | F |
| id17 | HO840003129038181 | HO840000074258448 | HO840003128557482 | HO840003133318719 |
| Birth Date | 2015 Jul. 28 | 2015 Nov. 1 | 2015 Nov. 15 | 2015 Nov. 10 |
| NM$ | 705 | 656 | 819 | 592 |
| PL | 5.2 | 5.4 | 5.2 | 5.7 |
| SCS | 2.78 | 2.83 | 2.77 | 2.74 |
| DPR | 1.3 | 0.5 | 0 | 0.2 |
| LIV | 2 | 2.9 | 3.9 | 4 |
| Milk | 1623 | 590 | 513 | 1272 |
| Fat | 77 | 71 | 113 | 51 |
| Pro | 56 | 37 | 33 | 39 |
| HCR | −2.4 | 1.8 | 1.4 | −0.5 |
| CCR | 1.6 | 2.3 | 0.7 | 0.4 |
| STA | −0.33 | −0.68 | −1.08 | −0.19 |
| STR | 0.24 | 0.04 | −0.81 | −0.38 |
| BDE | −0.26 | −0.34 | −1.01 | −0.46 |
| DFM | −0.39 | 0 | −0.07 | 0.55 |
| RPA | 0.01 | −0.88 | 0.01 | −0.62 |
| TRW | 0.33 | 0.35 | −0.22 | −0.34 |
| RLS | −1.73 | 0.8 | −1.17 | 0.12 |
| RLR | 1 | 1.16 | 0.91 | 0.42 |
| FTA | 0.64 | −0.44 | −0.38 | 0.97 |
| PTAT | 0.27 | 0.48 | 0.17 | 0.74 |
| FUA | 0.76 | 0.67 | 0.16 | 0.74 |
| RUH | 0.99 | 0.81 | 0.51 | 1.71 |
| RUW | 0.91 | 0.75 | 0.47 | 1.57 |
| UCL | −0.49 | −0.16 | −0.01 | 0.04 |
| UDP | 0.34 | −0.15 | −0.21 | 0.69 |
| FTP | −0.31 | 0.07 | 0.54 | −0.06 |
| TLG | 0.2 | 0.69 | −0.27 | −0.66 |
| FLS | −0.05 | 0.61 | 0.31 | 0.59 |
| RTP | −0.28 | 0 | 0.74 | −0.23 |
| SCE | 7.6 | 6.5 | 6.4 | 6.9 |
| SSB | 9 | 7 | 6.7 | 7.6 |
| DSB | 5.4 | 4.7 | 5.3 | 6.7 |
| DCE | 5.4 | 5.8 | 6.9 | 7.5 |
| UDC | 0.67 | 0.57 | 0.52 | 1.09 |
| FLC | 0.24 | 0.86 | 0.64 | 0.66 |
| TPI ® | 2808 | 2703 | 2835 | 2648 |
| HH0 | T | T | T | T |
| HH1 | T | T | T | T |
| HH2 | T | T | T | T |
| HH3 | T | T | T | T |
| HH4 | T | T | T | T |
| HH5 | T | T | C | T |
| HHB | T | T | T | T |
| HHC | T | T | T | T |
| HCD | 0 | 0 | 0 | 0 |
| HHM | T | T | T | T |
| HHR | T | T | T | T |
| HHP | T | T | T | T |
| HBR | T | T | T | T |
| HDR | T | T | T | T |
| naab_code | 200HO10729 | NULL | 029HO18296 | |
| Dam ID | HO840003012130340 | HOUSA000072754161 | HO840003013177242 | HOUSA000072606690 |
| Sire ID | HO840003013129308 | HOUSA000072128125 | HOUSA000072254526 | HOUSA000072128216 |
| MGS ID | HOUSA000070625790 | HOUSA000069981349 | HONLD000543756297 | HOUSA000069169951 |
| Milk Fever | 0 | 0.1 | 0.2 | 0.1 |
| Dab | 0.2 | 0.3 | 0.6 | 0.3 |
| Ketosis | 0.6 | 0.8 | 1.7 | 0.5 |
| Mastitis | 1.1 | 1.4 | 0.6 | 2.8 |
| Metritis | 1.1 | 0.3 | 0.8 | 0.2 |
| Retained Placenta | 0.2 | −0.3 | −0.2 | −0.3 |

[0167] Notably, selective breeding has increased the Sire NM$ from 832 to 928 in Animal. Dam had a NM$ of 805. As demonstrated in Table 9, other desirable traits are similarly improved.

TABLE 9
Comparison of Genomic Traits

| Trait | Animal | Sire | Dam |
|---|---|---|---|
| NM$ | 928 | 832 | 805 |
| Fat | 122 | 101 | 95 |
| TPI ® | 3032 | 2918 | 2880 |

### Example 3: Culture of Bos taurus Cells

[0168] Adult Bos taurus fibroblast cultures are established from ear punch or tail clip from Animal at an age of less than one year according to standard methods.

[0169] Briefly, an ear punch or tail clip is treated with collagenase and digested. The collagenase treated cells are then collected by centrifugation and washed with buffered saline. The washed cells are treated with trypsin and triturated and a suspension of cells plated on standard culture dishes and cultured under standard conditions to prepare a primary culture. The cells are cultured and either fed or split 1:4 to 1:6 and the culture expanded. Cells are harvested when the culture reaches at least 10 million. At confluence, cells are collected by trypsin/EDTA treatment and centrifugation. Cells are resuspended and counted and then collected and resuspended at a concentration of 1×10⁶-10⁷/mL. Cells are diluted with freezing medium (90% FBS+10% DMSO). Tubes are transferred to −80° C. overnight before being placed in liquid nitrogen for long term storage. Frozen cells prepared via this method are deposited with the ATCC under Accession No. PTA TBD.

### Example 4: Somatic Cell Nuclear Transfer (SCNT) of Animal Cells

[0170] Somatic cell nuclear transfer (SCNT) is performed according the method of Ross and Cibelli, Methods Mol Biol. 636. 155-77 (2010). See also U.S. Pat. No. 6,011,197 issued Jan. 4, 2000, to Strelchenko et al.

[0171] Briefly, five to seven days before performing SCNT, a culture of fibroblasts as described in Example 3 are plated in four well dishes at a density of 100,000 cells per well and cultured. The cells are synchronized in the G0 stage by contact inhibition. Oocytes are harvested from either slaughterhouse-derived ovaries or from live animals by ultrasound-guided oocyte aspiration. The oocytes are matured in vitro and enucleated. The cultured fibroblasts are injected into enucleated oocytes and oocyte-cell fusion is induced using a square DC pulse generator. Fused oocytes are activated using ionomycin and cultured under standard conditions. At 48 h after activation, noncleaved embryos are removed from culture and at 72 h after activation, the culture medium is supplemented with serum and cultured for seven days before being recovered and implanted in synchronized recipients. Calves are born normally to the surrogate mother and are genetically identical offspring to Animal. In addition to providing a source of inseminate for herd improvement, new cultures of cells as described in Example 1 can be prepared. The high availability of bovine oocytes and the relatively higher efficiency levels usually obtained in cattle provide for the use of SCNT for both commercial and research purposes.

### Example 5: Breeding of Animal Progeny

[0172] Mature bulls prepared by the methods of the present specification are used for breeding purposes using conventional artificial insemination methods. Alternatively, bulls prepared by SCNT can be used for natural service.

[0173] Frozen inseminate obtained as provided below in Example 6 is provided for artificial insemination for the improvement of existing herds. Breeding for the improvement of existing herds does not generally require consideration of the recipient heifer or cow. In an aspect, a dam is selected from a herd in need of improvement and artificially inseminated with Animal inseminate. In an aspect, a herd in need of improvement has an average NM$ index of less than 700. In an aspect, a herd in need of improvement has an average NM$ index of between 700 and 1000. After gestation, calves are born and evaluated for production, composite traits, and predicted transmitting abilities. In some cases, genomic testing is performed. The resulting calves have improved NM$ and other desirable traits as compared to the parent dam and as compared to other calves born in the herd.

[0174] The frozen inseminate obtained as provided below in Example 6 is also used for the generation of elite bulls and heifers. Frozen inseminate obtained as provided below in Example 6 is provided for artificial insemination to an elite DM animal having an NM$ index of at least 900. After gestation, the calf is genotyped and identified for predicted characteristics, composite traits, and predicted transmitting abilities. A calf having improved traits is selected and used for further breeding and for the improvement of existing herds.

### Example 6: Progeny Generation Using In Vitro Fertilization and Embryo Transfer

[0175] Semen from mature Animal bulls is collected by electroejaculation or by other methods known in the art: The collected semen is frozen in straws per methods known in the art. Progeny are generated by thawing a straw of frozen semen and the thawed semen used for artificial insemination. In short, about 5 ml to about 15 ml of semen is collected from a bull after being electroejaculated and mixed with a suitable extender and cryoprotectant. About 10 ml of semen is collected and mixed with about 240 ml of TRILADYL™ solution (Minitube of America, Verona, Wis.) The mixture of semen, extender and cryoprotectant is then placed in plastic straws. Straws containing about 20 million motile sperm in a volume of about ½ ml are obtained and frozen until needed. Prior to use, frozen straws are thawed.

[0176] The collected semen of the present specification may be frozen according to standard methods in the art as discussed above.

### Example 7: Generation of Multiple Embryos by Superovulation and In Vitro Fertilization

[0177] The Animal inseminate collected as provided in Example 6 is used for in vitro fertilization of oocytes collected from a heifer or cow to create multiple embryos. The heifer or cow is treated with follicle stimulating hormone to induce multiple ovulations. Following superovulation, the donor heifer or cow is bred using artificial insemination of the Animal inseminate. About seven days after insemination, embryos are non-surgically collected by ‘flushing’ from the donor's uterus and transferred into synchronous recipients that serve as surrogate mothers. Embryos may be frozen for implantation at a later date.

[0178] Embryos are also generated using IVF collection of unfertilized oocytes from the ovaries of a donor cow or heifer. Oocytes are fertilized in vitro and transferred seven days after fertilization following incubation under controlled conditions. IVF collection and fertilization allows for the generation of multiple embryos obtained from open cows, pregnant cows, heifers and females having difficulty in conventional breeding. IVF collection also provides for collection of oocytes from donors shortly after death.

[0179] Embryos are transferred to a surrogate and gestated until birth.

[0180] All publications are herein incorporated by reference, each in their entirety.

What is claimed is:

1. A Bos taurus cell of type HO840003210132823, a representative sample of cells of type HO840003210132823 having been deposited under ATCC accession number PTA-TBD.

2. A frozen vial, a cell culture, a tissue, a zygote, or an embryo comprising a plurality of the Bos taurus cell according to claim 1.

3. A bull comprising a plurality of the Bos taurus cell according to claim 1.

4. The Bos taurus cell according to claim 1, wherein the cell is a sperm cell.

5. Semen comprising a plurality of the Bos taurus cell according to claim 4.

6. An embryo produced by contacting the cell according to claim 4 with a Bos taurus ovum.

7. A composition of matter comprising the cell according to claim 4 and a Bos taurus ovum.

8. A Bos taurus cell produced by somatic cell nuclear transfer of a Bos taurus cell of type HO840003210132823, a representative sample of cells of type HO840003210132823 having been deposited under ATCC accession number TBD.

9. A frozen vial, a cell culture, a tissue, a zygote, or an embryo comprising a plurality of the Bos taurus cell according to claim 8.

10. A bull comprising a plurality of the Bos taurus cell according to claim 8.

11. A Bos taurus cell from an F1 offspring of a Bos taurus animal comprising a cell of type HO840003210132823, a representative sample of cells of type HO840003210132823 having been deposited under ATCC accession number TBD.

12. A frozen vial, a cell culture, a tissue, a zygote, or an embryo comprising a plurality of the Bos taurus cell according to claim 11.

13. An animal comprising a plurality of the Bos taurus cell from an F1 offspring according to claim 11.

14. A container of semen produced by the animal of claim 13, wherein the animal is a bull.

15. The Bos taurus cell from an F1 offspring according to claim 11, wherein the F1 offspring is a gene edited animal.

16. The Bos taurus cell from an F1 offspring according to claim 11, wherein the cell is an ovum.

17. The Bos taurus cell from an F1 offspring according to claim 11, wherein the cell is a sperm cell.

18. Semen comprising a plurality of the Bos taurus cell according to claim 17.

19. An embryo produced from a gamete of the animal according to claim 13.

20. A composition of matter comprising a gamete from the animal according to claim 13 and a gamete cell from a second Bos taurus parent.

The application's sequence listing, which the Patent Office published only in electronic form, follows.

SEQUENCE LISTING (41546 sequences)

SEQ ID NO: 1 - DNA, 201 bp, Bos taurus
tcccagacatttccccatttctgtattcactgaaccctatcttctgttctgaaaaccatgcacacctgttctctgggtacatctcactgaggcccagttcctccagtctctgggaggctctgtgtccatgcctacaaaacccacacagttattccagttcaggccgcctctccccgcatcccttgtctaagagaaaagcca

SEQ ID NO: 2 - DNA, 201 bp, Bos taurus
ataacctactaatttccctgtgtctttctatgtgggtgaattgttttctgcctctttgttctcctaaacatgaaaggagagacacaactgctgtatgtatgctgtgtgtctcaatgacctctggtttttcctcgcatttccccccagtttaggtatttcatcgatgggagcttttcttcttcctgtttctctttccttcaa

SEQ ID NO: 3 - DNA, 201 bp, Bos taurus
cctgagaattcccagaatccataggggcctcaaacacttccatgagaagaggatgggaagacattgtaattggaagagataattgggccaatggctggagcgtgactgttttgcaaaattgagtgtttcagctggtcctagtcatcggacaatggaagggccagcatttggatattcaatcacctcctgaagctgaggatt

SEQ ID NO: 4 - DNA, 201 bp, Bos taurus
gttgtccaaaagatacaaatgtgtgctaagtttgagaaccactgctcttgactgactgactagagcagtactttagactcacctgggagcttgcaaaaaaatactgcctggcctcacctgtctcccattagttcagttcagttcagtcactcagtcgtgtccgactctttgcgaccccatgaatcacagcaccccaggcct

SEQ ID NO: 5 - DNA, 201 bp, Bos taurus
tggcctccaggctattatttttttttttcaggcaaatttcctgccttttttttttccttctttttctggcttccatttgcttcagtggcagcaacagcagcagcagctggccctctagattagctttaatccgcttgctatttatagcacactctgtaaacctcatcatacttgtgattccctatttaaatgtgtcttcct

SEQ ID NO: 6 - DNA, 201 bp, Bos taurus
ttgaagttagaagttaaggtaggtttttaattgtgtacagtacatttcctgaggttgtttggcacttaaaatggactggaaagtgagagcagattatgtaaaactgcctatagtagaacctttatgtttattttcaaaatagactattactgaatccattcacaatttgacttctttttccagatgtaattattacatgtt

SEQ ID NO: 7 - DNA, 201 bp, Bos taurus
cttcttcttctctgtctctatgtagagttcagacgctgctttgattttctgcacccaggcagtccttggaaagaaagagacagaactcaggcgtcaggtcggtaccaattcagtttccaggactctgctttgttcttttgatttttacaacaaaggctcagcatagagagtctggttttatgtcacatggacctaaggatg

SEQ ID NO: 8 - DNA, 201 bp, Bos taurus
ggtgtgtgcacggggccccagggaggaaacatcttcattccctttaacggacgtttctcgggagtcatgggcggcatgaggaataatgcaagccatcagccccgctggccgccgttttgaaacactactgccaagggccgggaggtggtgctctgtggtgtcgggtagttggtggcaagttctctgagtggagccctgatg

SEQ ID NO: 9 - DNA, 201 bp, Bos taurus
aggtgagcaccgggagacgcgctacgtgtcttgggaaaccggcctttgggcggaagctcgggagacgccccgcgggaccgtccagccctggggcgcagggtggtttccgttgcaccccaaccttcttaacacctctcgggctcaggcctagctggcttagctgaggccgctgaggggagggagatacttgatttgcctatt

SEQ ID NO: 10 - DNA, 201 bp, Bos taurus
ctctgtccacaagtctgttctctgtgtctgcgtctgtgtccctgccctgccattttttaagcactacattttttatttcttaatgaaagtataggtagtaccaattcttatgatggaagataatctcaaaaatataagcaagttgtacatagactgaacatgcactgttagagtagatgggctttagagtcagactttcaa

SEQ ID NO: 11 - DNA, 201 bp, Bos taurus
ttctcattcatggcccaagtggctctgacagaaacgcaggactttgtgctgatcatcacacaacataccactgtcttttttaataacctctacaaaatttgaaaggggaggtggtggcattagccctgtggaacagatcttgcttgattaactcagtaacactggcccagtatctgtccagcagaacccattgtgaactag

SEQ ID NO: 12 - DNA, 201 bp, Bos taurus
cggaggcggagagggggaggggaagcgcggcggcagagctgaggaaggaactaggcccatccctggtggacaagcaggcctacagtagctagacggtaggtgatgcccaaacaggacagaaggctgagcatcttaagtcggttctagaagagagagcctgggattacctcggaaagggcgaagttcctcgccgggaaggga

SEQ ID NO: 13 - DNA, 201 bp, Bos taurus
cttgcttgttcacatgcctacccttgaagctgagaggtcatagcactagtgtggatggaagatttacaggagaagggagagaacactggcaggcactaacatatccactttatctacagtgctgtagcttttagttgaagttggcagtgtccgccttcagaaagtttctatgagtgagtaatgataagtaaaacaaactta

SEQ ID NO: 14 - DNA, 201 bp, Bos taurus
tttctaattcttttctcactgattgtcttcaattcctctccttcactctcacatcgtcttcagcgggaatgacttggcctcctctttcacctgccatcacgtaacattcggatgaagcccatgttcttatgtgatgtttccagagacctaaaaacgcacagacccgaatggcactttggtgtttctaaacggtggcacggc

SEQ ID NO: 15 - DNA, 201 bp, Bos taurus
accatccacgaggtcgcaaagagtcagacacaacataacaactgaacaaaaacagttccgtgacttccattttctctccttcactccttctcatcaacaataaaacattcccaggtctctcccatcttcaaaaagtatgtatcctttacttccccagaagtagtttttctttcctgtcatttacagccaagtttagctacc

SEQ ID NO: 16 - DNA, 201 bp, Bos taurus
cactggaaggaactctggcttctgaggctggaagacttggcagacttggctgtggaccagtgagaaatacaatgggggtgctggagaggggccagtggagcgagggtgaaggaggctccaggcgcccacaagcagattagggtcctcagatcatgaaattctccagtctgacccggattgtagagagttcattaaccatgg

SEQ ID NO: 17 - DNA, 201 bp, Bos taurus
ttgaagggattggctttctcagcactggtcagcttgcacatttagagtgtgggtggaagccgaaagacctcgaagaccaggtgaggagctggggtagacatcagggagtggtgacgactgtggcttagagtcatccttgcgtggctccaactctctgggcctgcagaagctgggctcatgtatggctgtgccttccaactt

SEQ ID NO: 18 - DNA, 201 bp, Bos taurus
taaaatttttgcagtggcagacgatgggaccccaaagcctcaatgggtgtgtggtaccacccaccacctctgtaagcacagacaggctgcgaagtccccccgacttccctggagacagtgccttcttgaagaaggctagctaagtgtaaaaagtcatctttgctgaaacgtgctgttgaaactggctggagcttgacgtgt

SEQ ID NO: 19 - DNA, 201 bp, Bos taurus
tttaaaaatgagaaaagagcctaaaagcctttgcaaggaatgtccaggatgagtctggggggaatgaggtttgggctgaggggttagggagtgtgcgtacttactcagagatggtatgtctgcagctggggaagcgtctgagattgaggtcaaaggcaaagcaaaaaagcaaaaaaaaaggcaacatcaccaattttgttt

SEQ ID NO: 20 - DNA, 201 bp, Bos taurus
caaggtccatggatggaacataaatgcattcataaggagatgttggcgtggtgacactggattctgttctgacccttttcaacaaatgggtatttggccccctccacttcagtatttgtcttcatggtaaaaatctagctctgagaaatgatgctaaatccacaagatcttgtctatgggacttgtcagggggacaaagat

SEQ ID NO: 21 - DNA, 201 bp, Bos taurus
cctgttccttcccctacaaaatgcccacagtggtgttcttaggatattctgaagccagaacgctatgtttagattcaagttggaaaggccatgtggtcctctctccctctgtgtatctctggagcccatcattgtcccttcccccattttcccttctaacccactgcccctgggtctggctggccaagcctggccctaacc

SEQ ID NO: 22 - DNA, 201 bp, Bos taurus
ttaaaccacagcagtggactgcctcacggtcctggaagctgggagtctgaggtcaaggtgtttgcaggtgcggtttcttctgaggccccccgccttggctcgcagatgtgggtcttcttgctgtggagggtctcagtcctcatctcctcttgcttcttggctgccttgggtctttgttgctgtgcacaggcctttctctag

SEQ ID NO: 23 - DNA, 201 bp, Bos taurus
ggaaatattgaaggcaggaggagaaggggacgacagaggtggactgggtggactccaagagttggtaatggacagggggcctggcatgtcacggttttacggggtcgcaaagagtaggacatgactgagcgactgaactgaactgaactgagcaggggacggaggggagatgggagcatgaaggtgaaggcctaccacgcc

SEQ ID NO: 24 - DNA, 201 bp, Bos taurus
aagctccaacctgctgtagggactcaaaggggaaagacagaaataagttgacctgaccagagcccaaacacaaaggcaggaggcctctgtggacatatcacggactgaatcctcccccagaggcatgaaatctcagagtcgtgcttacagggagggcagaaggacatgcagtcaagggcccatgaagacaacactggaggg

SEQ ID NO: 25 - DNA, 201 bp, Bos taurus
ttttctatctttcattccctttgtcagctctacttgactttattctttctgcaggcctttcccatggggctgtgaacatggcccctgcaagccccacattcataaccttgcagttaaagtcaacgataaggggtagctgttaagagtgctatagaaaattcccaaagaagactctcattggccgtgctgagtcacatgtcc

SEQ ID NO: 26 - DNA, 201 bp, Bos taurus
ggaaggagagggtgcaggagttctcactctgctccactcggaggtggaaatgcaaagggaattcatattctttctagagaagacccccaggaggaatacacgcctgggccctctgcagagttcatgctttgtttagaattccaggaaccactgctggggttagacgaaagtccagaacactggagaatccccaaggaccct

SEQ ID NO: 27 - DNA, 201 bp, Bos taurus
cacccaccaacccaaggaatccctcccagccctcccgcctccagccccgcggacggctgctgccccttcccacgagggcctcagtccgcgtctgctgaccggttcccagcgccacctgcacacaaggctgccttcctctctgcataaatcacgtgttaaatatcagggctggccccagcgcccatgctccttggaaagaga

SEQ ID NO: 28 - DNA, 201 bp, Bos taurus
cattccttcattctcagcaacccactttgaggcttcctcttggtggacaattagttttacataggatggttccagattactttttaagccctgttttatataatctaggtccagaactaatctcctcaactccatgggatttacatcctagctttctgatgatgtgaatttcttctaaatccttagaagtggtaggccttt

SEQ ID NO: 29 - DNA, 201 bp, Bos taurus
ctggaactttactgattaataataatacctggcctgtatatcttccttgagagtttcctaaacacttcctcatagactgtccctgtcacactttgcttctattaatcacactgggaaatagaaggcctgggcaatggtggctgtaaagacaggaattacacctgtcggaacttatacctgcagaggcaacagatgatgtca

SEQ ID NO: 30 - DNA, 201 bp, Bos taurus
ccggccaaccccggctgctcccagtctgggagctagcaagcaagggagcctgtgctgttttcactcctcactgctgcagcagcagccccaatacgccttgccaaaatttcttgtctggcctctagtcagtttctattgactggggaagaccaagaactctgctcagtaacaaagcctccagaaaacctccaaaagatagga

SEQ ID NO: 31 - DNA, 201 bp, Bos taurus
ctttgctggtcaagcagcatcaatctgtgtgatgaggactgaaggctttgatggaaacaggaagtgtggtaacaaagattcctcccagacagggagggcatgaggccgcagaatcacgcctggaagaaaaatcaagggttgacagatcttcgtggttttaattttggaaggaacagtggaggtaattacagttgcctgcat

SEQ ID NO: 32 - DNA, 201 bp, Bos taurus
agcacatttgcttctggctcagtccttatcggccagtgaccttgggaaagtcacttcatcactggctccttgtctgtccagggtgagtgacaccagcctctgacggggccagtaggagaaccaagtgggattccatacatagaagccttctgcagagtctataaaatgaacggaagtcttattttggtctcaacattacgt

SEQ ID NO: 33 - DNA, 201 bp, Bos taurus
acatcaagacaaaatggaaggtaattgctttccaagaggagattaaagattaaaaatttgcagctgagtctttaatgcttaaagaattaaaggggggagtgggaagtaaaatggataaaggtagtcagttacacgcttccaattataagctgattaagtcctaggtatgtaataaaaagatgagtctcctatacacacatt

SEQ ID NO: 34 - DNA, 201 bp, Bos taurus
aattttgatcctagaaaattcgatctgttttagaactgttttctttgggcgagtcattcagggtgtttccagagctggacacacgcctgtctgcagtgcccggagggagtctcacttggggtgtatataaataagactgaatccaaatgccttgtctatacactgacttgctcgcaaatgaactgttaacaactgtcccca

SEQ ID NO: 35 - DNA, 201 bp, Bos taurus
gcctggcaggccacagaccatggggtcacaaagagtcaggcaggactgagcagctaacagcagagcacgtagattcaagaaggggtgtggttgtttggtcggtgtgttcagggcagctcaggcctgctgggacatcccagtctagaaccttccagaaccgaagcccacgtggtcacccgaggagccccctggcacacgcca

SEQ ID NO: 36 - DNA, 201 bp, Bos taurus
cttatttttttttttttttggcttggaatccaactttaaaattctaaagctaaataagccatacctctttctgaactagactagatcagtgtgaaacctatagaagatatttttctgaggcctgtttcatatatttatagaaaatgtataggataaaaagtatcccagctgagctatattaaattcctaatagggaagaac

SEQ ID NO: 37 - DNA, 201 bp, Bos taurus
cctgttttacacatgatcatgaaacaggcccagggagtttcagtgagcagcctctggtcagacgatgagtcagtgggaaagtcgggggaaaaaacttgtggaacttttgacgtgcaccttgaatgtgctgccttaagaagggtgagcaattaatagatgagcaagataaatggagatccatttgaagaacagatttgcaat

SEQ ID NO: 38 - DNA, 201 bp, Bos taurus
cagtgaatgtaagaattccataaattcttaggagtctacctaagaaggggttgtggtttcattgcagcggtgaaggtcaaaaaggaggtttaaaaacttcggtatataaaaggaaagaatcgtgtctgttacttagaaggtatagtgaatgtaagttttatggaaaaaaccttagaaatgaattattttccttacccttct

SEQ ID NO: 39 - DNA, 201 bp, Bos taurus
ttattaaactttacatgtaaacaaagatttctacatggaactgggcagaagaaatatcacctaaagggaacaacaataattctgttctgtaacactccttacattgctgggataacaagggaaagtagaagactgattacagtattttgagagaaagtcttgctatatcaaggatttaaaatccaacacttttctaatact

SEQ ID NO: 40 - DNA, 201 bp, Bos taurus
tccttcttctctggagcagaggaaggactccggcttttggttctgtgacagggagatagagaatgactgcgctttctctgtcccctgacagggaaagatcgtcttcgaggggaaggagaactggatttgcatcttcttgggctttgagacggctccctgttttctcttctgctttatttttcttctttatccctcttatcc

SEQ ID NO: 41 - DNA, 201 bp, Bos taurus
ttacagttttccgtatcaggtaaacccaaaatgaacaaattaaaaagataataatcgcaaaaggaaatttggaattgcatgcaggagcattaaagaagacgaaataagagtgaattatgtgtaaatacacattgtgcacaattctaacaaaattcttaatctataagtgggagtacacagtaataaatttaagaatgatca

SEQ ID NO: 42 - DNA, 201 bp, Bos taurus
caatgtcaagtgtgccgtgagtttagaacaagggcccagactgggtagtgcattggctagagaagtaatcatgtatggtctttaagataagagcttaaaacattggccagcatagaaattagatttcaaagaaacagatggaaaaaacaagggaaaataatcttttaagacttgattttaagcaaagatttcttaaataca

SEQ ID NO: 43 - DNA, 201 bp, Bos taurus
ttaataaaactacataaaatattaaatatttgtatatttccctgaaaatatgcatatttatttaatcatgttgacaagatttgactttgggatacatttagtcttgaactctgagaagtgatttaacttctaaaacttgtaaaacttgtaaaaattgaaaataaaaattgagtgataaaaatttatcctgagttttttgta

SEQ ID NO: 44 - DNA, 201 bp, Bos taurus
cccaatgagatgttctaatcagattcttacatagggtggggttgggaaagggtagagagagaggagagaaatgaatcaaatttttattctcagacacagacgctgtaatacactctaagggcagtctgtgtctttgtattctgtaaatcaccagaatgggaactttagctatacaaacacaaaaccagtttctaatacttt

SEQ ID NO: 45 - DNA, 201 bp, Bos taurus
ttcatatttatttcttcctccattttatcagtgaccctgatttgcaaaagtcaggtcataatctctcttgacaaatgtgatggaatgtagacagatcaatcttctttatgacttgaataaacttttgaaacattctgttttttaaatgtccctgtcattgcaagggccaaattgatagcaaatgacacaatcatctccgtg

SEQ ID NO: 46 - DNA, 201 bp, Bos taurus
gcctactagacattatttttttaataagacagtttactttggcaacttctcctcctccttaaaagtactgttttttttcaatctctatatctctatgaaccactcagattttttggcccattaaattttcaaagtttaacaagtgagcaggaaacacacccttccataccctgagttaagctagtacaaggaaccacagaa

SEQ ID NO: 47 - DNA, 201 bp, Bos taurus
atgacttttactttgaaaactaggataggcctgagcaaaccaatacaatggtcatcttagtatggaggtgcagggattgacatgattaacaggctcccaggtgatgttgggccttgcgggtggctcagatggtaaagaatctgcctgcaatgaagaagacctgggttcaattcctgggttgggaagatcccctggagaagg

SEQ ID NO: 48 - DNA, 201 bp, Bos taurus
taagtgacaaagttcagatttcaagccttatcttattccacaatccacggtattaatcgtggcactctcttgcatgtaataaaggaagatgaacacaaatgcttgagtatcctttggtacaagtgctaaagtcagagttatatgaaatgctaagtgtatgttcactgcatctggaagagtgtggcaagaattcttttgaag

SEQ ID NO: 49 - DNA, 201 bp, Bos taurus
tcttgcttggagaatcccatggacagaggagcctggcaggctacaatccatggggtcacaaagagtcgggcatgactgagggactaagcacacagcacagcgcaaaacattagaggtttttttcaaagagtaatcttaataccgaaagccacaagtactgtctggtacctgtgaacagacagtatccttgacatgtttgtg

SEQ ID NO: 50 - DNA, 201 bp, Bos taurus
gagtcggggctactctccagttgcagtgtgggagctcctcattgccgtggctcctcatgtcgcagtgtgcaggccccagaggatgcaggccacagtatttgtggtacacctgctgagttgtcccccaacatgtggaatcgtcccagaccagggattgaacccatgtcccccacattggcaggcagattcttaaccactgga

SEQ ID NO: 51 - DNA, 201 bp, Bos taurus
aatcaggcataatatttccgggcaggtattcttgttgattatgttggtttgtgtgtggaaagtgaaggataagacctatggatcaaactgttattctaatgtctaatttacatacgagtgaaattacaaggcaaatgcagagaaagaaagggcagtttctttgcttagagttgcttatgtaagcttagaaaatatgctgtt

SEQ ID NO: 52 - DNA, 201 bp, Bos taurus
acaaagatcagtgggcagcttatcgagctttcttggcttgatggattcattccttaagataaagatcctgttcttgtccttctacctttgctctcaccaacgaccatatgcttttatttgggttctagaagtccagaaagactttgtacaaatccctgacttccttcccacattgacctcctattataaatacagcataaa

SEQ ID NO: 53 - DNA, 201 bp, Bos taurus
tatacacaatgttgagagcagtggcacccaaagacaacttctccttttatgttagagcactaaggtcctaatcttctccatgtctcgtaaaaagtaggacatgtgaaaaattactttctctccttgtaattattaattccattagttacctttggacaaatggaatagcccaaactttggtctacattgacagtttagcaa

SEQ ID NO: 54 - DNA, 201 bp, Bos taurus
aagatgtaaatcttagcacttgtgactggagaacacataagctccaactaggctccatctactagtttgactttgacacctcggccaaaactttacaaagcatatccctttcagcaaaacttattttcagacattcatgctaaggatgagagtctattctgtgcatgggcctgagacatgtaaagaatctctggataaaag

SEQ ID NO: 55 - DNA, 201 bp, Bos taurus
gaacccgacaaataacatgaactgggtaaaaatgtttttctccatttcattctaaccccttctttctcatgttctaatccaggaggagtgactagcaggaagtacaaagaagagaaaggagtataagaaggaaagactgcacccctttcttagataatagctcaaacctgagccaggggaaaggagagaagctcagaattg

SEQ ID NO: 56 - DNA, 201 bp, Bos taurus
atgtctgacttgatggaagacagctggattctcacgtctgcttctgctttcagttgcctgccatctgttgactgaagtatattttttaaaaactaggcccgcacaggtatgtagaggttacattttctgtcaacaaaagaatatacattttgacatgtgttactagaaatgagttttcagttgtcacaagattacaattaa

SEQ ID NO: 57 - DNA, 201 bp, Bos taurus
gcatggttacccgtgtggacagtggggctcagcgaggctcagtaaggcgaccacagtcacagggtcagaaagactgactgggcttccccgtctgggtctcgcagcttaggactggactccgcttccccagaaggctttcctccccaggctgcagcaactccctgtatctgagcattacttccaattcatctcctccgcctc

SEQ ID NO: 58 - DNA, 201 bp, Bos taurus
attcattagaagttggaggatgagtgaagatagactgatatcatagaatattaagaagagaagttttatgggaaaccctccctgaactaatttcccagggtagccctgtaggtgaatgtagtcaaagggcagaggagcgtggcatatcggacagggaatgtggcaggagagtgtgtcctgtctccagcactcccaagggga

SEQ ID NO: 59 - DNA, 201 bp, Bos taurus
catgttaatctaactttcaatgtttcagtatctttctctatcaaatatgtttgaactgctgttgctattcaaatcttcattatctcatgggtctgtatcctgtaatagctccattcatttatttattcacttatttaaaattttgtgttgggcaattactattctaccagcaaatatggtaggtggttcagtggttacagt

SEQ ID NO: 60 - DNA, 201 bp, Bos taurus
ggtgggcctcattccatcagttgaaagcctgattagaatgacagaatcaaccagcggatggcttttgggcttgaactgcaacactggttcttcttagctctccagtctgctggcccatcctgaagaatttggacttgccagtttctataatcttgtgaactaattccttaaaataaatctctttatacttatatacacatc

SEQ ID NO: 61 - DNA, 201 bp, Bos taurus
ataacaagagcttgacacttcagtttgtgtcttggcctaatactttcctatatattgtctgccaatgaaaagaatttgaaatgccatgtataatgtttacttttgaaataaagtcttctttggtgaaatttttattgttttgaagatggacaagtaacttctctatggttaatgagcctgaaacaggaagtggttttgact

SEQ ID NO: 62 - DNA, 201 bp, Bos taurus
ctattcctaaccataatgaattagtcaacaagtccaccttgattgcttcacatctgtgatgcaatggaaagagtcaaccttttgttggcctttcttggtgtgtttgtttggtttgttttgcacatgtaaatccagaaaagaattgcaagagaataacagggccacactatagccaggagcaaaactgataacaatgaagaa

SEQ ID NO: 63 - DNA, 201 bp, Bos taurus
caaaaatagttacatgaaaagaaaattacctaatttatatttcccgaagagtatcctgcatatttaaaaactttagcattctcttatgtagggtttcccttgttgctcagatggtaaagcatttgcctgcaatgcaggagacccggggttcaatccctgggttgggaagatcccgtggggaagaaaatggcaacccactcc

SEQ ID NO: 64 - DNA, 201 bp, Bos taurus
caattgtgtacaaaatgagggatatacctcaggcctaaattctgtactttcaacaatacggacatctctccgtaagtgtagaataggtgcttgatgaaagtgggaaaaagaaagactttgggaagctgtgaccatcattaaatctctctcccagatctcaccatttgggggcaagctggagaaaatggcattttttcatta

SEQ ID NO: 65 - DNA, 201 bp, Bos taurus
tttaggtatctaattactgttttcatttgcatttctttaataaaatgatgtgaaacattttttaatatgcttagcttttatctggtgatgtgtctgttaaagtcattgcttcaattcaaaattttgaagttgtttaaaaaaaatcattatgcccaaggtcatctaagttttctcctgtgttatattctatgagaattttat

SEQ ID NO: 66 - DNA, 201 bp, Bos taurus
tggtactgagaagcccagttcattaatgctaaatattccctgctcatcttgtaatttgacagatactagatactaatagtctagaatggcctgacatccagtggaaatggcaaacagaaaaagagctttaactcagatggcagtggctatttggctaagagaatcaggaatacaataagagaaagtggtggcccatctcca

SEQ ID NO: 67 - DNA, 201 bp, Bos taurus
tcaacttttgatgcctctaaggcctaaaatcaggtcagcatattctcttttggcagaatttcattctgaggcttaattctgtcttgtagtattcattttattcatgaacccttgggccaccggcattcatttgtcatatcctagcaagaaggccatttccatgagcaggcattggacttaactgggtctcagagaatttgt

SEQ ID NO: 68 - DNA, 201 bp, Bos taurus
ttaaatctgcatgagtcagactattttgatcactgctttgactctgctgtatgttatggtagccacacccacctggccttttgggatggaaagttgccatttcacccctgtcacctctgaatccaattactttcattgcttttattttcccaattcatggctgcagttcctactgtaaggcctgaactataggaaagagga

SEQ ID NO: 69 - DNA, 201 bp, Bos taurus
atattggtgctttaggtatttcttaaatgcaaatgggtatatcctcaatatataccatttactcgcagaactagtgaacattcacaacttactgaataacggaaagaaatgaaagagtgacgcaagctaacatttgcatgaaaccaggaagttgctaagttcacttctttcttttctcttctagtcatctcttatatggct

SEQ ID NO: 70 - DNA, 201 bp, Bos taurus
tccaatgtttataggactgaaatctgaattcaatgcatgaggtattcaccaggaggaacctatagaaacgaattttggtggccatgagaatgcactttgcggaactctagctaaagacagtgcaattgacataggacccttgaggctgctctctgaaacccattgccatgcttgagtcgacaccatgctttcctaggttgt

SEQ ID NO: 71 - DNA, 201 bp, Bos taurus
atctgggtggtggtacccaagggcctggggtgcttaagattggcagtgcccaaaacaaaacatcacgtgctgcccctagagatagtgagagattttcataagcgttagtctgaggtctagagtggcctgtctcaagaaagtgcttccagatgttgagaatctggcttaatgacttctccgtagtcatctcttttgaaattg

SEQ ID NO: 72 - DNA, 201 bp, Bos taurus
ttaagatgcagagaaagcactttataaagaaatcctatgtcagcctgccttataatatctgtgcattgtgatgatttcagttggcctatctgtttagctttgtttaaaacatgtggtgtcaaagacataatcacttatttaaaatttggattatatcccaaaacacctgccttataatatctgtgcattgtgatgatttca

SEQ ID NO: 73 - DNA, 201 bp, Bos taurus
gcttctgacacgatattcacccccacccagccacctcctagggaggctctgacttttctaaaagaacaaaactgggccctgcagaagactggagatggggagtttctaacgttttgattttgtgggaggtatttttgttgctatagaagtaagcagaacatccccccggcccccttcaataataaatctggccatcacccc

SEQ ID NO: 74 - DNA, 201 bp, Bos taurus
tgaacctgggtctcctgcattgcggcggattctttaccaactgaactaccagggaagcccaatcataaggaagtgaaatctgccaatgagcatgaacgaggttggcagcagagttttattcagaacctccagtcaagaattgagcccagctgactccttgatttcagccttgtgatagataccctgggtagacaacccagc

SEQ ID NO: 75 - DNA, 201 bp, Bos taurus
caaaacaaccacagaaacctttccaactccagcacattaatcctaggttcacagtggatacaaactaaccacagaggcttctccaactctggcctagaacccttgatgtatggctgtgtcctcaactgaccttaggtagcagggagcctgttcagttcagttcagtcgttcagttgtgtctgactctttgtgattccatga

SEQ ID NO: 76 - DNA, 201 bp, Bos taurus
ttataatataaagtatagatcacttaaaaaaaaagattcagtgaaaattatggaattacatagatatcaaaaaaatgtttttacaaataaattagtttagataattctgttacaacagataaatcccaaatatttagtagttgcttatatttttacccatgtgaagtccaaatcagctttcctgataggcatacgactttc

SEQ ID NO: 77 - DNA, 201 bp, Bos taurus
cgtgaaaaaaaggtttatcagacttccacggtggcccagtggttaagactccatgcttccactacaggggacatgggtttgatgcctggccagtggaagtcaaattccacaagctacacactcctgccctacaccaaaataccaaagaaacagatagaagcagggccccagaaagaatggagaaagtgccctggatttcaa

SEQ ID NO: 78 - DNA, 201 bp, Bos taurus
ccactggctgtgtactctgtggatacatttgttattcatcttgctctccccgtgagtagggttatataagctcaactcaaatagaaaattcatcacactggaatcatcaccctgcactcaaaccccactgtaccacctgcttttggagtctctgttatgtaggcaccagagagatggatcccttgatcatggggggtcttc

SEQ ID NO: 79 - DNA, 201 bp, Bos taurus
agtctagtcgccatccatcactatactgttgaccctgttcacccacccttcaaatcccttcccctctggtttatgctctttatgagtttttattttaatacctattttgaaatataattttgaaatcatataaatacttgctttgagaggccataatgttgaacagatgtagcttaaggtatagtttaacaataatcttat

SEQ ID NO: 80 - DNA, 201 bp, Bos taurus
aagattcaaggtctatatgtattctgacttcagaattcaacagaaactgatttttcaaatgccttaatattaatagtactgtccaatgtagcttccttttgttatctctttacatatgttttcaccaaaagcctcaagaatgctttcaaaagcacacagaagtgccctgatgaaaaataactttattttcagttcagttac

SEQ ID NO: 81 - DNA, 201 bp, Bos taurus
ccatgctgaaaaccacccttttgcttggcctccttagagatcatgtggatgatggaaacttgaaagcccagcagtagagagaagccggaaatggctatcaatggatccattcttaggccagaagctgatacgaacatgtcattgatgatgctgacttcaaagtgttccttcagagtcctgaaaagaagcagtaagaaatag

SEQ ID NO: 82 - DNA, 201 bp, Bos taurus
tgggatgggaatagaaataataaaaaaagtgagtattatagtaaagacaggaatatcatcagcacatgagttttgaaaaatagatgaataaataaaacaaataatgctcagaagagtaatacgttttatgaaggttaaaagaggatagagtgcaaaaaggaaaataatccaataatatactacagaaaaaaactgtctgca

SEQ ID NO: 83 - DNA, 201 bp, Bos taurus
atcatatagtaaatgcttacaaaaatatgtttttgggtgaatggttttgtaaatatagaagaaatttctgataaaatttctgattctaaggcttgaaggacataatatttgtgaagttactgctatcatagcaggggttcaataaatggtagcttgcttctccccaggagccctctgaattattttcccaactctgctctg

SEQ ID NO: 84 - DNA, 201 bp, Bos taurus
accaaatcaaaaggggatactattgatgagatttgggggtgtgattgttatctatggagtggtttataaactgatacatttttaaaaggatcacatcaacttgcagtgaaaaggaaatagacaatataaattaatattatttttgacccatgcacttctataagcaaacaaaataatgaaaaaaaaaaaaaagaaaaaaca

SEQ ID NO: 85 - DNA, 201 bp, Bos taurus
catggggtctcaaagagtcggacacaactgagcgactgaactgaactgaactgatattactctgagatgggtgcccttgcaatagtgatgaattaccagactggtcatggccaggcatcctgatctccacgggcaaaacaatcacaatgtgtcttcaaggacatcactgattttcaggaatgaatgtcacctgcagcctca

SEQ ID NO: 86 - DNA, 201 bp, Bos taurus
ggagagctaagaagagatttattggcaagaaggaatccacttgctaaactgttctcacagcaggtgaaaggaattttgtggccagagggagtttgaggaactggtccactaagcacccagcatgctacctatccatcttagataataagcaaaatcaaaaacagaaaaaaaattgtcacccagagatatttgaaatttcag

SEQ ID NO: 87 - DNA, 201 bp, Bos taurus
agaagaaaggttataataaagagtaattcatgtataaatgtaaatgaccattcacattcagataaaatcaaattgattgatttccttggaacaggtaataaattgaaaagaaatagtacaatttgagagttagggatatgtcaggccattgttcactatttgcactaatttaaaattttaaattttactccaaaagttttg

SEQ ID NO: 88 - DNA, 201 bp, Bos taurus
tgtttgaaaaaataaataaagtagaaaatgcaaaaggtagaaatgatataaaatgtatgcatggcacatggaaggcctcatgatttgtttactgaatacattgatcttacataggatactcttgtcctaagaagttgccctaagaagtttcctactctctagacccagagctctgctcttttcttttttccaagttttggc

SEQ ID NO: 89 - DNA, 201 bp, Bos taurus
caccagagcagtgaactagaacagcagacgtgggaacagaatacagacgtcttccatttgaagtccttaccacgtggatgctttacttgctgtatagccctttgttacttttgattcacatgccagtgttctctgccttgtcacctgccgcatgtgcatgacctgttctaaggacatcagtgggctccttgtgccctaggg

SEQ ID NO: 90 - DNA, 201 bp, Bos taurus
tttcttattgatttgtactatggaggttgtttagacacatttatgttttgggtttgtttaagtttttgcttttaagtttcattatgtggccagccacttactcaaaataaccatatatcttatatctgaatatcatcatttcattgttgttgtcagtcactcacttgtgttcaactctgcaaccccatggcctgcagcaca

SEQ ID NO: 91 - DNA, 201 bp, Bos taurus
cagttttgcttaggcaattgcaagtaatacagattcaaagaagcattggaataaaaactgtaaagtgtaatttggagtaatgtcaaaatatattttagctattgagaaactagaagattatttaagcaaaaacaagcaaataaaccaaagaacccctttagatccatttcatcacaagtggtaggcaaagaagtttgttaa

SEQ ID NO: 92 - DNA, 201 bp, Bos taurus
atgtgaattgagattattttataaagcaataaatataggtgattataatatagaaaactttatgtatcaggatataagggatattcttaaaaataattatctgagagaaagacatgtatgaatatatgattgtattgtatgaatgtatggatttttactatatcaacaatataatacaaacatgccatgtatatatctatt

SEQ ID NO: 93 - DNA, 201 bp, Bos taurus
agaaagaaataactgtataaaacagaaaacttcaggcatgcgaggagaaattgtacaatccttagaaactgagaggagagttagaacgaaaagtgaatcagagaacaggttgaatacccattgtcaataaccaacaaggacattattctggtctccagcaaaggaaaaggtaagaataggtctccagtccatcatttagtt

SEQ ID NO: 94 - DNA, 201 bp, Bos taurus
ctctacctttacaaaattgagggtcacctataattttcccccagttttgacattctctggtccctgtgtaaaacagtcattccctccttgctgatactcttgtctgcattggtatctggggccctgtgctaccttgaatcccctcatccttctcctgtttctctttctccaactctatttcactttagtggattatttttg

SEQ ID NO: 95 - DNA, 201 bp, Bos taurus
gactttaggaagggatttttcccacagtgttttactaaaatttatttcaacttttattactatagttaatataaagagcaatttggtgatgtcttccacctcaggaaaattatctccttgatttacatgatgaatgcaggggttgaagtatcattaaccataaggagaataatttttgaaatcctggtttgtaagtagtta

SEQ ID NO: 96 - DNA, 201 bp, Bos taurus
tattagacttaacatctaacatttatcaacactacatacatagaaacacacatacacattagcacacacaggatttcaaggcttgcagctcaaatcacttgagatatgaatttaaaccacttatattgcttagacatacaattattgtaaactcaaggcttctccagcatcgacttctggggtcatactacttgagaatat

SEQ ID NO: 97 - DNA, 201 bp, Bos taurus
cactcatttaaataaaaaacactttagagaggacattcaatgtgctttatagtaattaggctataaaacataaaaaaacactctaagggcttaaagtccaatgatatgtagaaatataaacaggtcatttaatgaaatatagaaaatgttaacaccaaggtacttacaaagaactttgaaagcattaagggctacttgatt

SEQ ID NO: 98 - DNA, 201 bp, Bos taurus
gcaaattattgtccagatttctgatttctaattgccaattctcagtcagtatggcccatataaaggaggaacagaagcagagagaatcttcctcagtcaacgataattttaagttgtttttgtaatggagtttccctgtaggtagctgaacatgaaaatatacaattcactacttaagctttgggtgaaggcatattttta

SEQ ID NO: 99 - DNA, 201 bp, Bos taurus
catggactgcagcctacaaggctactccatccatgggattttccaggcaagagtactggagtggggtgccattgccttctccataaaatgtcataaacaggattaaaataaaaatagcatataatatgcaaaaacatgacactgaaagttaataaaattaatcattaaaaacatggatatcaataaagaaatgcaaacaat

SEQ ID NO: 100 - DNA, 201 bp, Bos taurus
aacaagaaacagattgcataatttctaaagtttcattcaggtttattatttctctgactggataaagacatctttcagaagggttctataaaataaacatgcttttcacatatcgttatttaacataaatgtgcttgcttcattgctgtttataacaatacttataaattttaaaaagtggtaattttgagggttacagat

SEQ ID NO: 101 - DNA, 201 bp, Bos taurus
tgaagctttagcttcagcatgagtccttccaatgaatattcagggttgattccctttaggattgactggtaattttaccttaactaccttttaagggctctatgtccaagggcaaacacatctgaagtactgggggattaggattttaacaaatgaattctgaggctgtagtactgaatctgtaatatgaagtacaatggc

SEQ ID NO: 102 - DNA, 201 bp, Bos taurus
aaacaacaggtaatggatttttaatagtttttttttttcagctgttccttctgtaggaaattgagttaagagcgtcaatgttggcaattactcttgtactccacagcatttgtttggaactactacttaataaatttactgcagcgtttatattcttttagactattccttccaagccccttgcatagattcctgaacaaa

SEQ ID NO: 103 - DNA, 201 bp, Bos taurus
tattaataaaatatacatttccttatatttcaattgaatatgtctactctaaagaatttgtccattagacaacatgaatgcctgtgatcaaatacttaccatgtatgttctagaaacattgaattgctctgattgtgcttatcatctcacatggatcttgggtcatgtttcgtgttttttgatttggtcttttctaaaatt

SEQ ID NO: 104 - DNA, 201 bp, Bos taurus
gctgtattattttaaataactgtaatagtgccttctgtttttagagttctgtaaagttcatggtagactttgagatactaaaggggaaaataaacaattttaataactctttgcactattttaaccttgttgcaacatttgcattatcttctgtaaaatgaagcatataatcttgctttgattccccatttcaccatgatt

SEQ ID NO: 105 - DNA, 201 bp, Bos taurus
agtggtcagccagagacttgggctgagtttacacgtagacattaaaacagtctttccctggctctctcccctctgattcccactttctgctaactctgattgctctgtttttcttgccctgtttccttagtcggtaagctagtgggctttctagccatgttggaatcctccctgcaccactgccacggttactgacactgc

SEQ ID NO: 106 - DNA, 201 bp, Bos taurus
ctttccccttcttcccatttgcttccaaaaatggatctgctattaaactcattttgtagatgctgtagatgttgacatgagcttctttcacatttttatgatgctgacaccagcaaaagttaagaggaagttgaaactgttggggttttatgtgactttggtgacctatatatttaaggctttcttttctgtctgtgaatt

SEQ ID NO: 107 - DNA, 201 bp, Bos taurus
aaagtagatcattattggccaaaagcactccaattactttagaatttacagaggaaagaaaggaagaaaagtccaaattgttacttggaaaagatggtccccatatctccctaaaacttatatttttagaaagctttgtaataactattctagacataacaggcattattcaagattgatatatttcaggaggcaggttat

SEQ ID NO: 108 - DNA, 201 bp, Bos taurus
atcatcaaaggctttgttgcaaagtgccaggatgctattgaataagttaacaatgaggcagggaggggacttttaatttgccccaaacttctcttacagcgtcttggtaacaagctctgatgtattcttgtagggaaggggaagggaggagtggttggtgagggggagtaagtcattgatgtggtgcattttccaaatctc

SEQ ID NO: 109 - DNA, 201 bp, Bos taurus
aattattagattttgatcatatttaatttcctcatttgaaaagtgagtaatttccaagttgatttctctaatgttctttataaatccaaatgagaattgagtatatttgggcatggtgctagtttgcattaaaatactactccgagtgtctaggattggtcctgctctagtttaatatttccatgatttgatggcttaaat

SEQ ID NO: 110 - DNA, 201 bp, Bos taurus
ggactgtccccctgtcactgctaccctggacatggctttcttgggacatatgaagccataggtaaaagccaatggctcaagtacaatttggtcatgtttttaagactataaatctcatactggtcaaatatggtcaagccataactatcagaaacaagacagaaaacttggctatcaggcttccaggagaagagaggagag

SEQ ID NO: 111 - DNA, 201 bp, Bos taurus
gttatgtttaaagttttctgcattgttttctttttgctgtttaaaaggagagcagacacttctgataaagtttgtgtcattagtctgcataattttcattttgtttgtttttgctaataatcatgattctgggatggttttcttatcacaaccagttagtgctgttatatatttcgcctgaggcttacgcggtgttctaca

SEQ ID NO: 112 - DNA, 201 bp, Bos taurus
ttggccaacccgtggacacccctaccttcaccccatatgaggaacaagctcaggtcccctcagggaaggagctggcaagggaatctgttatttgttctcgatccccactgctgcagcagggccccagtaaattgcctaaatttcttgtctggactctgattaattcccattgattaaggaggccaagaaacttagtcagta

SEQ ID NO: 113 - DNA, 201 bp, Bos taurus
ggacgaggtttcattcattcattgttttgggaacacttgttattttgtcttacataggctgggatacccatacattctaaatggatttctttattcaatcatttattcacttattaaatcaacaaatatttattaaagtagactagggtccagcctgggcttcctgggtggctcagtgagtaaagaatctacctgtgatac

SEQ ID NO: 114 - DNA, 201 bp, Bos taurus
gcttgagcaattgggtgggtgagggtatttaacaagggtgggtgctgaaataaggctggaagtatttctactggagaaggttgattccaggccagaaagtaagcccctcataaaattctactagaggaatataaaagtcctcaccaaacataaatctcatttccttccccctgcaaattgctggccactcctcctaggctc

SEQ ID NO: 115 - DNA, 201 bp, Bos taurus
aaagaagcagatgcagaggacattattggagaactatctatgttgagaagcaaggatgactcaggtttttggcttgagcaatggggtagactttagtgttgttttttttttttttaaaacaggtctaggaagagacagacacacttgtacatagtgaagcagaaggagaatgggagggaagactactattttggccatttg

SEQ ID NO: 116 - DNA, 201 bp, Bos taurus
tcacaaactaaaaccagctgtgcataatgtacaaaacatgtcatgaccaagttaggtctatctcaggcatacagtgctggcttacactgaaaaatcaatccatacaatttgccacattaacattttaaagagaatattgcatcactagctttaatatagaaaaacatctattagaattcaacatccctttatgatttaaaa

SEQ ID NO: 117 - DNA, 201 bp, Bos taurus
taagtatcttttctcacttattttttcagatctgcctgcctattaactctttagtattcgctttatagaggcagaccccccaatgtgggagggcctgtggttgaaatagtaactgtgactgaccggattgctaacccttcctaatacagaagttaagccttatcaaggccacttacccagcgagatgtaagtttcattgac

SEQ ID NO: 118 - DNA, 201 bp, Bos taurus
ctttttcctccttggataggggagtgggctctaatcatagtggctggtttttctgaggcacagcccccatcctgaagcaatctattccccccaaccaggagttatctcattaacatacaaaaggcagcaaatttctgtggcagaaaccaaaggaaaaggctaaatatttatttaatctttcactgtatcatttagattaaa

SEQ ID NO: 119 - DNA, 201 bp, Bos taurus
catttccatttcttctcctctcaaaactcaacaacctaacatccaggagaaaaaaaaaaaacccaaatacatgaaaaccaacaaatttgaagagctatttaaaaaattagaataaatctgtaatcccaaggcacagtgttggaagactgcagtaaacagaaaaataactgagaacaatggaaatagtaaaatcttaaggat

SEQ ID NO: 120 - DNA, 201 bp, Bos taurus
cagaaaaatgttaatggggtgatggtcaggggtagaaaggtagttggaaaatatattgttgggtgagttggggataggaactgaaacctgggaaagattttattattctagtaacagaaacagggcatgagagagaaaaccaaaatcataatttattatgaattcagattctaatttgttccaatagctgtctccaaagcc

SEQ ID NO: 121 - DNA, 201 bp, Bos taurus
gtgtagctaaagtagaaccagggcacatacttctggaaggtggacataacatactgtgcttatttgaactgatacgttggactttggggcccacagataatgaagcttccggggatgccatgatgaatggtattagaagaacagtttagaactgtctagacttcttattctggaccattttgctcctgtcaagaagcagta

SEQ ID NO: 122 - DNA, 201 bp, Bos taurus
ttagctgttcaaatgcctgcatttcctttccccatcttacccagtgcaatctttctttcctgtgaataaccataacattttatttgtatctttcatatgatatgccttttcctccagatgtgtttttgaccagctcttcagttcccatgtattgagcatgttaaagaccctggttgagatgtacaaaatagctctggaact

SEQ ID NO: 123 - DNA, 201 bp, Bos taurus
gactcccatttttaacttttctaattatcaggttatttttcagtaccaccagcctattttgaaaatattataagcttgaaatgaaatgaagttcttaagacagaacatatataaagtctgtaatgtccgatatccaccatctcaaacaatatataaaattaaatagtgagaaaatatcaatttttgattccatgactaaag

SEQ ID NO: 124 - DNA, 201 bp, Bos taurus
tgatgccagctgtggccgttttgaaactttgcaagagaaaaaaaatgcaagaccttcaagagtatataaaacctctccctattccctagaaagggaatcacagttcttgagaaactagcctgctgtgtttcctttttgcctggcaaaaataataaagctactctttttctatttcctccaaactctgtctccaatattttt

SEQ ID NO: 125 - DNA, 201 bp, Bos taurus
tacttgtacctgagcagccactggatggtccagggactgcttcaaggactcatacagaaaagagctcttgatgcttctctgtgggccagctatggttcttatccttctgcatagatgggttcctagtaagtcctgtggtgtcggaatacgatttacaactaaggggactctctagggagcactgtgagaggcaaggagtga

SEQ ID NO: 126 - DNA, 201 bp, Bos taurus
ttgattcttatattgaaatataactaatttagggatattgtatctgttcttctctttttgtctaatctcataggcacttaaaaatcttaataatattaccgattatttctgggctatagattattcatctatcttcttcttgagtaagaaacctcattttatgtcacttttcatatgtagaaaatgtatctgttgaattat

SEQ ID NO: 127 - DNA, 201 bp, Bos taurus
ctttaaaacaagctttttctatttgcttaaaaagtctgtgattattttcaggacagtgtctgagataataaactattaagtgctatggcaagatattgaagtgattcatcattacaaattcgatgcatctttttaaagacaatattaatcttactgtgcagtaaaaatataacttattttaaaacatatctattatatatt

SEQ ID NO: 128 - DNA, 201 bp, Bos taurus
gctgaactaagtgtctcatctccataaactcagaggcacaaggtttacagaaactgcaacttcaacattctttgacagtaaatatgactataaatcaaggggtacatttattttcttccagggttctggttttatgccatctgctcacgtggcatcttgcccatttggaacaatgtcagattgtgtaggatagaggtgttg

SEQ ID NO: 129 - DNA, 201 bp, Bos taurus
gcctcattcaaacagcatgaagttctccaagaaagtgagtccttctttgtccaggcagagtgcagtttctgttcttatcaaatgtaccttcagtgccaccatctgggggactcttgagatgttcaagtataacagcatcattgatgctgcatatgaggctaactctggttgggcatttgactctcaccgaattttccaagg

SEQ ID NO: 130 - DNA, 201 bp, Bos taurus
attcccacatgaactgactttcccctaggactaccttgaagccttcaacataattaatacttttggtagccacataatccatcttcaccctctcccaccctacaaatacaatggattcttgtttctctacactttccattcaagagctgacattattttgaaactgaattcttatatcctatatcccattaaccacatcca

SEQ ID NO: 131 - DNA, 201 bp, Bos taurus
tgtgaagttatatattttatgattcttatatgtattcaataattgtcatttgtcagcatttgtacaaaccatcttgtacagttttaagaaaaatatatgtacctaaagaaatagtttataaagaccttcataaaacttgcatgtaagttagttttaattaatattttcatttaaatttgctatgcattttagctttcatac

SEQ ID NO: 132 - DNA, 201 bp, Bos taurus
aatttcaggctgtgtgtagcccagccaggcccagaaatttgagttatttgagcatgatactaacatctaccacaaagacagaatagtgtaaggcataccccaggcccttaaacatcatccttttgttatttggttgagtaacaatgaagagagtttaaggtgtgagtgaaatgctatccactgtttccgtgataggatttc

SEQ ID NO: 133 - DNA, 201 bp, Bos taurus
tttaaaaattaatgatattaggaaagtgattaaaaatccaaacctaaataaagcaggtgacttagctccagttacgttataagcgtatttgcggggtggagatgggtaatgtggagaaggcaatggcaacccaacccactccagtactcttgcctggaaaatgccatggatggaggagcctggtaggctgcagtccatggg

SEQ ID NO: 134 - DNA, 201 bp, Bos taurus
attttcagtgtgaattctgtttcattgtttctatgcatttgagttcaaattccacatagtagacatataaatactgaggttgatgaaggcctattaactacgttgaagctactatactctttttttatttttcttagtttttgctaattatctcacaaggattgcttagaaattaaattaaggcccttagtcactaggtgg

SEQ ID NO: 135 - DNA, 201 bp, Bos taurus
caccaagagagctgaggcctaactggttcagatagagtttcagtttgaactccgatgctccctgtgtttggagcaggaggagctcgcgggtcctcacacagattgaggctgactctgatgcagcctgggtcagtggcagcccctagagatggcagctgtagccccaggtggtaaatatatgacagcagcttgatctatcga

SEQ ID NO: 136 - DNA, 201 bp, Bos taurus
ttcttgggtttattgaagaacagggcattttatgtgtgtagtgatgaattttgttctttttcttttttgcactaacatcatatacagactgcaaaactgattgagcatgaaattgtttttagaaattgtgagagctagtttagatggcaagaatcagatgaacagttgttagtaaaaatgtgtgtgtggaaaggatgatgg

SEQ ID NO: 137 - DNA, 201 bp, Bos taurus
ggctttcctggaaatataataactggagtttagcaggaaatacttgggcaggatgctgctgtttctgctataggcactgtcactaggagacaagagaggactccttggcttccacagtgtaagaagaggtatcctgttgcatcgacaccgcatgtggtgggggtgcctcaaacgaggagggaagtagggcgctggcaggca

SEQ ID NO: 138 - DNA, 201 bp, Bos taurus
aaatagaccaaagtagtattttagatatattcactttggatagaaagatggtcaaatgatgtatttcctttatcctcgtttaagcaatgcatggatctgtgtctttgaaagaaagggttggagtgaagtagattgactacctttgatttctgttggactgtggagaaggtgaattgaatcaaatggatgtataactttcct

SEQ ID NO: 139 - DNA, 201 bp, Bos taurus
agagacagaaaattaaaagataggcttgggagatgtctaaatttaggactccctgttactgcttcagatccttactctatgtactttttaaccttcattcgggacctatctagatgttgcccatagacagtaatataaaatagggtcctggcaagaaggaagaaaagatacaagcaattcactcaatcttgcttttctctt

SEQ ID NO: 140 - DNA, 201 bp, Bos taurus
aattaagtgacataaaagtatagttctactaattaatgaagctcattctggagaacagattttatatcagtgggctcaggacctcctaatagtgattctcatttcagagaattcatctgttatgtcaaaattatttctggagtcctgtttgggggagggggtgggggacaggcttcttctacgatatgacaaaggtcagaa

SEQ ID NO: 141 - DNA, 201 bp, Bos taurus
ttacattaaatttttgtccttaaaacaaaagaattaaaggagaatttaattgcaagaatatgaatcaccaaaaacttagtttaattatctcagatggctaaaaagtgttatcctaaatcagtgaaaatagatgtattttctgaacccctataagtactatggggtcaaattatgcaggagggacatgatgtcatactagtg

SEQ ID NO: 142 - DNA, 201 bp, Bos taurus
gtttgcttctgagactgtcctacccttccaggttggtagataatcccaaaacactgtatagtgttggtgccaaagaattagatgtttcctcaatgagaaacaaaggaacaactagttaaagtataggcatgaaaagtggaaacttggcttttgatagtcccatttctcactgggatggaagctctccttttcagagtagaa

SEQ ID NO: 143 - DNA, 201 bp, Bos taurus
atactggagtgggtagcctatcccttctccagtggatcttcccaacccaggaactgaaccggggtctcctgcattgcaggtggattctttaccaactgagcaatcagggaagccctatgacaagtgccaattggtagttgacacacaagaaccagacccaaatggccctgtcctttttctaaaaagacactgagctgtttt

SEQ ID NO: 144 - DNA, 201 bp, Bos taurus
attatgaaaagaactagaaaaaaggaagctatggataagaaagtcatggatctaagaaatgaacatatcagtaagggaactagccctggaggaacaacaccatcttcttccatgtgagacaaactccagggaacggaaaccagtagcaatctatagtcactgtgttccagttactccccaggtgataatcataatcaaatg

SEQ ID NO: 145 - DNA, 201 bp, Bos taurus
aattgaagaatggaatttggtggtccaccagcaatatagccttacaaataaattttaaaaggtgctctatgtacattttagtcaattaattaatcacaaagttttacctttgtttctcattaatttcaatctctttctcttggtcatacacacatacacacacacacacacataagtgtgcatgcctataatttatggttc

SEQ ID NO: 146 - DNA, 201 bp, Bos taurus
actgaaagaaaggtgtggccttgagagttttgacccaaccccaagggtctcactagcaacctatttcttatctaagcagaaaattagacatagtttcacgcgggtggccccactgtctaagagtaattggggcaatggttttattaacacctgaagatttaaaaataattaatggatgaaatcttactgtattgacttctc

SEQ ID NO: 147 - DNA, 201 bp, Bos taurus
aagaaaatgcagattttaagttagccagtgttgtcacatggacttgagccacttgcccattatttccagccattagcaaacatactcatttatacaacttcaccacttacatattatgtgtgctgtactgtagagatgtttgagaagcatcaatatatggcacctgtttggtaccaagggacttgaaattctgcttgggca

SEQ ID NO: 148 - DNA, 201 bp, Bos taurus
catggtggtgaatctatagatgtagaactgcatatacagaagcttattgtgggaactgagaatcctaggactctggaattcaagcgggccatggaaccaacgctgaaggacacacagtgaccactgtatatttaatttgtgctgtgtgtgcttagtcactcagtcgtgtctgactctttgctaccccatggactgtggccc

SEQ ID NO: 149 - DNA, 201 bp, Bos taurus
agcatgtcaaacaaaaattcagtaggcagcaatggagtatttttcagaggtagagacacagcatggaaaatggtggtatactttaaagaggcagggagggcgagccagggccattagtgctattctgttctgctatttcttgtttttaaccattttcagctgtttactatacaaagtaaatttactgcacaaaaagtacaa

SEQ ID NO: 150 - DNA, 201 bp, Bos taurus
tagcctgtcatatgcaaacaattcttaactcctgtggttaattaaaggtatattttctttaatgtacacaagtaaatataaacaaatacctttatacatattgctttctttgcttggtaaactcctactctccttcaaaacctttcctggacactccagagagtgttaggcatttgtcctccgtttttcagaataaatatc

SEQ ID NO: 151 - DNA, 201 bp, Bos taurus
ctcacagccagaggacagacacctctaactatctagcatgtcaagtttctttttaggccatctggtctcccatccctccccttctcactccccctagaagacttcattccttcattctctctccccgagcacattcctttctcattctccaagtggctctgtgtccacaggaaggcgtttccttctcccttgcttctcttt

SEQ ID NO: 152 - DNA, 201 bp, Bos taurus
tacaggttttattgacatgcaagttttccaaattgttaaacaaaaatacagtatagatggcgcttctagcacatccaaatgacacaggaattataacctctgcctaaagggttttgaatgtgtatgttgttaataaaattcaggtttgagaatccatatctgctcagctgttttgaaaacaaacatgttgatgaaatattt

SEQ ID NO: 153 - DNA, 201 bp, Bos taurus
tatgtcatctactaacaaacctaaaattcaataaagattagtccctttgattattctttcaagatatcttacaatcataataaagctgtaacttatctagtattcaaacaactgaaaactttttagcataaaaagtcattttctctacacatttgacccatgaaactgataatcataaaaatgatgttatgatattaatac

SEQ ID NO: 154 - DNA, 201 bp, Bos taurus
cccaccaaaaaaaagataccccatgtccaagggcaaaggagaagccacaacaagacaggagcaggcatgcaataacttttaaaatcaaaccccataaccaccagagatgtttggagcatacaaacaaaaccttgtgtgcatcaggacccagagaaaggagcattgacctccacaagagactgagccagaccagcctttgag

SEQ ID NO: 155 - DNA, 201 bp, Bos taurus
aggaaatagaggcttctgtcattatgctcacaagatgtctcaatcttccagcagacatattttactcctcctttctacatccaaatctcaggaggggcccagtgcagccaagcttcaagataatttggaaaatgaacttcttgctttttacttcttttttattttaaaaatatctatcttcctcttttatgtttaaaatat

SEQ ID NO: 156 - DNA, 201 bp, Bos taurus
gattatcaacaaaccatatcagctgagagattgatgtgcaagcagttcagtttatttttttaactataatatcacttcatgttaggttaggcagaaaactagcagaaattcatcaaagttgagcatgctagctgagagcaattgctctgaaagcacgagagctgtactgaaaactggcgacagtgccaatccaaaatctca

SEQ ID NO: 157 - DNA, 201 bp, Bos taurus
gtacatcaagtgcttaacagagtccctagcactgggagaagtgcccaagttattaactgctctttatattattattattattattggccctggaccattttaactgctagcttaagtgatcaaaactaaaagtatgtcaacttattctcttactttttaatccaacttggccttttctttctttctgacctttattcccct

SEQ ID NO: 158 - DNA, 201 bp, Bos taurus
catattgagtagcatatgattttagtagtaaaaaaaaaaatttctcacttgctaaatatttagaaaacttcaagttacatatataagaaatatatatgcaaacttggtttctgattatcgcattctggattatcacctagaggatatacccagaaaccatctaatgacaatttattcctcaagggatctactaaagcacac

SEQ ID NO: 159 - DNA, 201 bp, Bos taurus
ctcctagattcctctacccatgaaatttgccagtgttattaactatcttgtctccttgtgattgattttactatactcacagggcaaaacctcaacctaaaatcaatgaatatgccttctccattccttcatccagactgcttctggggaataccaaaaagaacaacaacaaaacctcaataactataggaacaaaaacct

SEQ ID NO: 160 - DNA, 201 bp, Bos taurus
gaaggtaagtaaagacatgtctcaggaatgaaagattttaagctagaaaaactttaagtgggtgtctataggcatatgtctcagatattaaaaaatacaattcactgaaatatgttacagatgtttaaaatggcctcatgtttcagagatgaaagctgatggtctccagagaactctaaactgattctccttttataaaaa

SEQ ID NO: 161 - DNA, 201 bp, Bos taurus
tatagaaatatggtcagggataccaaatgttcagctgaataattcaagcattgaaggcataagagcatggtctatagaaatggagaggaacttctccatcagatcttaattgtctgtataaattttttgatcagttcagtatttcagtgacttgtcagggcagtaccttatgcattcaagtctgtaagagatattgctacc

SEQ ID NO: 162 - DNA, 201 bp, Bos taurus
gaaggaagacgtgtgaggacacacagggagaaggccacgtgaagacagagcattgtagtgatatgttacaaaaagttggacaagacttagtgactaaaacgataatctccaagccaaatggccaccagacactaggacagaggcatggttacaacagttctaggaaactagaaatcaaatacagattttcattattctaag

SEQ ID NO: 163 - DNA, 201 bp, Bos taurus
aacacctctcttttactttctattttgtgggtggcactcttggggcctcggtgccatcattcccctcacccattcccacatgtgtttcggccattgggctatggggctgggtacaggggtggatgtggcaggcaaggtggaggcaccataactggagttaaggggatggagggccactaccacagaatgacattgcccgtt

SEQ ID NO: 164 - DNA, 201 bp, Bos taurus
actttcacttctgcattaacctcatcatagacttcatggtattgatttggtaatttattcagagtttgcttttgaagattaatggtatataatacaaagtgggacacaaattttctgtttgaacacaggagatatttttctgtcatagtagaaacagtggtttcatgtgcctacacaaaaataagcagacttcattttgtt

SEQ ID NO: 165 - DNA, 201 bp, Bos taurus
aaggatccagcctggaaattccaaagtcatctttttttgactctcctaaaaactctacttatgcttaaaaaatataataactttctgtgaaagaaaagtatatgatttcctcatccaaataccaccctttttgaactaggtcttatttatttagccctacatttttttgtattttcagtaaaccagagctaatattgatgt

SEQ ID NO: 166 - DNA, 201 bp, Bos taurus
caaaatgtgacagtgtgctaaaagagaaagtttgtaaattcacattggtaaaaaacaaacttatgctgatatttcatacctcagcaatgaaagtgagctaccttaattttacataaaatttaaccagttaatggatgaaaacacctctctgtaatataaaatgcttcattttacagtttttttccctcaaaaaactctggg

SEQ ID NO: 167 - DNA, 201 bp, Bos taurus
gaaatatgagcttttagtctttcagtctattattcagataaacttaagtgaaggccacagcaatcatctgggtagttctctttaggtagtttttcaagctagatcattcaggtcaaatacaaatgtttttcatttgtgcagtttttttttttccttccttgatttaatttcctcatcattccacttcacattgcctatgta

SEQ ID NO: 168 - DNA, 201 bp, Bos taurus
aaggaaaagagcagaaatatagagtccagaaaggtgattttaccaggtttaaaaatggaataaagctttaaatgatttaatttctttacccttttgcgctacctatttctatatgcattttcatatatctcatttcttttcacagctccaatccttcaaatcttagaagtaagctataaagggagtaagggtacaagtacg

SEQ ID NO: 169 - DNA, 201 bp, Bos taurus
caccccatgtcctacatgttctattataatattgttcataaatggttattgcttttttattttcctttttttattctttggaatgtatcatttctactgacaaatctggtcttattcttaccttttgatttccttacttattgtaggggaatcagaaaactcccattctgctgttgttttctttaggttattttatcagta

SEQ ID NO: 170 - DNA, 201 bp, Bos taurus
attatttttaccttgcatcttaagagttcagtgccaccatgtgactacttttattctaaaaccctgccattccattgtcataatgagtccagcttcatgattgcatttccaattccatcaaccttgaactacaagagacagctacctttgaattccttatcacttaggtaaaggagatcctctggaccaatatagacttct

SEQ ID NO: 171 - DNA, 201 bp, Bos taurus
cttcttgggaaaatttaggagttatttggagtggacattccagtcatacccagataagggagctgagtcatagcccaactgacttgtgtgtgtagctcctgtcctgtttggccagatgggatggtaggaatgcctggagattacatagcacagcaagctccaacagagagatgagaaggaagaactaaccatccacaaaat

SEQ ID NO: 172 - DNA, 201 bp, Bos taurus
tatttttagtatcagccacaatgtggcttttgtcatataattcttagagaattcaaagtattgtgtcctccaaaaattcctcagaatgcaatatgctttttaataaaataaaattttcccagtgcttaaatctataagataaaacatagaaagataatattatcttatcatatcactgtcatgttgctaagtcacttcagt

SEQ ID NO: 173 - DNA, 201 bp, Bos taurus
atgagtaacacacatttttgattacttcacaggttggcactcttcatactgacccctactcagatcactaaggtggacttccttctgataagtgaggtgtttgagagcagcaaaaaatattatctggtggcaaaatcttggtgttttcaatttcagctgatactaacacttagataaagtaatccttatgatttgaagcta

SEQ ID NO: 174 - DNA, 201 bp, Bos taurus
tgcatttgaattctctacatccttcttaaaatttactgtcaaaaatgtggcataatgactcaaataaatgtaatggtattttaagaaggcaggcctatcagctttctaactctggatatacatgtcaagatagatttaaaaaataccatatttaatggttcagttcagttcagtcgctcagttgtgtctgattctttgtgg

SEQ ID NO: 175 - DNA, 201 bp, Bos taurus
agaatgataagtgaactcctaccagactgtgtcaatattatcaaataaatggggaattaatttgacaaaattgcaggtgtcaggtcaagagctcaatgaagtcagaaaaggtttaaataaaatcaatttgtgtgtgtgtgtggcggggggtggggggtggggaggagttggtgctgaggaaactgtagagtagatttccat

SEQ ID NO: 176 - DNA, 201 bp, Bos taurus
gcaggaccttaagagagtaggctgggccctgctcagaccacatatttctcatttccaaagtcagaagatctacccaaacacacaagaacagaaaaggctccttggaggccaagtggggagcaatgtcaagggatgttctacccagatgcttctttagtagaatccatcttggccaagagatgcatgtgcacatatgagatc

SEQ ID NO: 177 - DNA, 201 bp, Bos taurus
tgattaacaacttgagcactctaccaaattatcaagaatttatcagccacaatgtcaacaactacattgtgttcactttaccagtttctgcacttcagaatgaaaggcacttctttgtgccaaagtgagttagagattctagtctgtaagaaccactgtgggtgatggacacctaagtgatcttctgctgctggccttgga

SEQ ID NO: 178 - DNA, 201 bp, Bos taurus
taataactcaccacaggtgagaatttagtacatttcaacttctatggtttgatttatagaaacaatatttcacttattttacactcaaatatattttatcggtcgatatgctattaaagctacctctctgagaatgaacaggttggaaaaatagcaagagtgtttcccagctgggaactaccctgtgtcagatggccaata

SEQ ID NO: 179 - DNA, 201 bp, Bos taurus
acatttatttctgtcccattatttatcttttcaaggcttttctcttgctctttcagttgaaagtagtacctctgtctttttgttttacataactttcttcgtctctgtcaatttaagtgaagtcagttatctattcttgtcttaaagtagtgtccttatgttgtagctttccaatacagattttgtgtatccagtgccatg

SEQ ID NO: 180 - DNA, 201 bp, Bos taurus
gtatcctaacatcagttgtaagaccccactggagaaaatgataggccatacagatgaatacatttatccatggataattttcacacagagatggttattagtatttatcattgttgataactggcccccttccccacaactaatcaaaatcattcttgtcttccttaacttttgagcctatcttctggttcctagttcagt

SEQ ID NO: 181 - DNA, 201 bp, Bos taurus
gtttctaccgtaatagagccaaaattgtcaatttttcaaatagtaacttgttttctatgccctaaggtttgaaagaaaatagtctcataatggaaagtagtaagctggctttctgaatccataaatagcttgatttttatcagggtatggtttgctacctgtctagaggtgtttagaaggtttcctaacaataggatatga

SEQ ID NO: 182 - DNA, 201 bp, Bos taurus
gtcaaatttagtccaagtcaccagctgtggcctgagtggagaagctgtgtcccatttcccttagtgattctcttttacctggcacatttttagacacttaggaatatttttgttcttgctattggcacatacatttgttagattattttacaaagaaaaaaatctatattgacatatgccaggtttcatataatctaagca

SEQ ID NO: 183 - DNA, 201 bp, Bos taurus
ggtatgtaatgaatgtttcattttaattacttactgttttgtttccatatctgcccagaagtgagagctacaacctcatttgggagctcccatgtatcccgagttttcctgccataatatatgaattcttgattctaaaagctgaattactgagatgaaatggctttgagttgaatcatttcactctggaaagtagttgtg

SEQ ID NO: 184 - DNA, 201 bp, Bos taurus
tataaaatattttaaaatgtgctgcaatttaagttgttttttgttttgttttttaaaaatatatcaatcttctaaaacctattgaatacaacaaaatagatgcattatttctcccttttttagtatcagattgaagatttccccagggatttcaattttaaacagttatgtcccacccaatccatttttttttttttgtct

SEQ ID NO: 185 - DNA, 201 bp, Bos taurus
cttgatttgtggcctaaaatatatgatctgtcctagagaatgtcccatgcatgcttgaaaactgtgtattctgttgcttttagatgaatgttctgtatgtctgttaagtctgtctggccaaacatgtcctagaaagtcaatgtttctttatggctttctgtatggatgatttatccattgacgaaggtttggtattaaagt

SEQ ID NO: 186 - DNA, 201 bp, Bos taurus
gacagccaaatggataggaaagattataatggcacctaagcatctgctaaaactaactgtatcaatgatctgtgaaccaagccatgcttttgtgatggacagttaccacttcagagatgtaattatggactatacggtcaaacatttacttgtttaaaagagcacctaagtataaaattatacattgccgtatatcatttt

SEQ ID NO: 187 - DNA, 201 bp, Bos taurus
ctactgacataagaggtagttatacaggaatgtaaagtatacactttcagctgccactataatgattcatctttcattcatttaataattcatttgactaatatctactgaacaatcactgtgtacagagccttcactagatgctggcctaatggatgtgaatgaaaagctagttaaaacaataccctggcacacaagatc

SEQ ID NO: 188 - DNA, 201 bp, Bos taurus
atcatgagataccacatagaaaggattctttactctttttgaagtgagagatggcattttggaggaagtgatctgaaagaacacctaatcagaaggaaaagagagtgcagaatttgggcagtctgtgaagagatcgttggaaggataaaaggtgggagacttgaaaatgttccacaggagagaagagcattttcaaaacat

SEQ ID NO: 189 - DNA, 201 bp, Bos taurus
aaaatggtatctctaatacattctatagtactactctccaagtaagggatagaccataggagtgctaagctatgcaagtttaagttgggcaatctaaagctcctgagacaaaatataggaccatgtttagaatccaagtttctgggccccaatttagtctctattgcatgttttcattctactggaaattctcaaacttat

SEQ ID NO: 190 - DNA, 201 bp, Bos taurus
taataatatatgaaattgagtagtcattgaatgaactataatgactatcacaaatacttttggaaccaataacaaaggacaataagatgtttgaggcatagtggaatggctttcaaagagggctctgggcagttttagtaagatttatttttatactaatactgatgttacatgactacagtataataggctttataaatt

SEQ ID NO: 191 - DNA, 201 bp, Bos taurus
attagtaccaaaatatctaaataccataatatctaaaatggcaactgttttgcttcagatatactgttttccaaaaggattgtactgtacatagtactgtcatggaacatgaagaaacaagaaattaggaattttgttatgtattaagactgctgaataactgatgagattcttgactaaagattaataataataaaataa

SEQ ID NO: 192 - DNA, 201 bp, Bos taurus
caacaacattctgtagtggaattaatgattcagctctatgtcccttacatggcctgaccatgctcccgatcatgtagctttccccagtcttcctgttacctgagcagtagttcaaagctaggagcagtcataagcaacaattgtaagtatttaacctccttttgtagacagagagagtctaccaaagccctagttcttcac

SEQ ID NO: 193 - DNA, 201 bp, Bos taurus
tacaacaatatttccatctctgcttcctatgatataaacatccacattttacttaattgatggattcttatggaaaactgctttctattgaaactagaagctttatactttttgtcttctcattttcctgttgaaatcttgacagtcataacatatttagaatgaatagtctatttgtttcctacacgtagaaatggttca

SEQ ID NO: 194 - DNA, 201 bp, Bos taurus
gatacacccacagagaactgtaagtcttataactgcccagtcttgagataggagacagcaagagagacatgaatggtttattggatagggaatcccatctatctgaagcaaaaggtcctagagcaacaccccatcatgtatggcagacggccggtaggcagaacaccacttaacagcaatctccccactcctctattcaaa

SEQ ID NO: 195 - DNA, 201 bp, Bos taurus
ttggatccatttaatttggtctatccctcatgagagatggcagtgtgagtaggtggtagtttttaggttatggtgataattgttcttcctgatgaaatggcgaaagactatagataattacatgaaatttgaacacaaggaattaaatggctagcaaatgttaattgagtctggggtctgagggcaaggtagtgtagtaga

SEQ ID NO: 196 - DNA, 201 bp, Bos taurus
tggcaaacctgaccaatcattatcgcttttcacagtaacaaggctctaaattgtgtgacaaggaagatgtctatgggactcttctttgaagagaatatttaggtaggatgggatctaccagaatctaaatttaaatgaagcttctaggaagctcaattgtagtagtaagcctaatttaagatctctaatttggcctaaatt

SEQ ID NO: 197 - DNA, 201 bp, Bos taurus
actcgcgggccggattgggccgagccggctgcccgggtgcggtccctgaccatggcgtccctcttcaagaagaaaaccgtggatggtgagttccgtgcctagctgaaaaggcctagctctgcgtttcccaggcttatttgggggacttccggccttgactcttgttgctgtccctgggggcggggctggatcaagtggccc

SEQ ID NO: 198 - DNA, 201 bp, Bos taurus
tctcagttctaaaaggttacctgacatttgcttttctgaagtagaagtcagtgtagcttagtataaataggatcttttttttccaccttcctgggagcagtggaaacaaagataatgcaaagccaaaggaaagaaccagggacttgcaaataatttaaatagaaataagcaaatttcaaaaaagtgtgagttttccatcat

SEQ ID NO: 199 - DNA, 201 bp, Bos taurus
cagatcaatgtgagtatttggtgcaagcaatgaactgaaagtgtagaatgtgaacaattattttgtgattaaatcagtttaactagaacatttggtgtgcgtaagtgaacagggaaacaagctggtaaagatatgggggctagcatgagacattttgagtgggagactgagaaatgtgcgtttattccaacagaagaatat

SEQ ID NO: 200 - DNA, 201 bp, Bos taurus
gtcctgatcttccaaattacctaaatatgatgaacttaagaaacccagagatgagctcactagatcttatttgtccttaaaatgaagcctacagagaggagaacaatgagccactggttgtgtatcatactccactgtgacactacaacactctcatctttcacctgtaaggtgcaaaccttgcaactgcctctcttgata

SEQ ID NO: 201 - DNA, 201 bp, Bos taurus
cccactgatttatacaatctttaatgaagacttcaagaaagcattccaaaaacttgtgcgatgtcgatgttagttcaaagaagtttattatgaaaaggttgggattctattgaggagaagtaactaaatgaaggttaaataaagcatttaaatttttagaaggaattaaagcttctaagatgatattaatatgtattttaa

SEQ ID NO: 202 - DNA, 201 bp, Bos taurus
atatgactcccagtggtaaattcttataatgttccctaaaatgtatgattcctatcatgttttagaggtgactactgattgagctggcaggagataattccttagggggaaaacttgaatttttttttttttaatgttaaggttgactttatcccattaaaagtgatggtatattaagttaaaatatcttttaaaaaatga

SEQ ID NO: 203 - DNA, 201 bp, Bos taurus
ctccaacaccacagttcaaaagcatcaattcttcagtgctcagctttctttatagtccagctctcacatccatagtgtagagaagattattattaataaaattcctgaccagaattaaggaggaaggggaccactgacttctttagtagccatcctagaaaattgtagaaaatgggcatttgttgtcaaaaaatctaaagg

SEQ ID NO: 204 - DNA, 201 bp, Bos taurus
aacaagggagaaggaaagatccccaccttcgccttagagcctccagaggaattgctgttctgtcagcactttgattttaggccctggcttccagaactacgggagaatacattttcttgttctaagccaaccagtttgtgatggtttgtcatggcagctcaaggaaacgaatacatgggccatgtgatttctgtcataact

SEQ ID NO: 205 - DNA, 201 bp, Bos taurus
aatgggttgccatgtccttcttcaggggatcttccacactcagggatcaaactcatatatcctgtgttggcaggcggattcttgactgctgagccaccagaaagccctattattcatgcaggcagaagcaaaatgaagaagttctttgggttaggagtgactgtctctcaccagcaagagtttgcttttggatttgtggca

SEQ ID NO: 206 - DNA, 201 bp, Bos taurus
acaaggccataacagagagtgggctgatgcttcacatatatccctttatgtgtacgagtgatattacatcattacagaagcctctaggaattctgttgaagcagctgttgatggaaggttaatagaaccagtgataaagaacagtgattttctttcctcccaaactgtgtcatactttaaagcatttcagtcataatcttt

SEQ ID NO: 207 - DNA, 201 bp, Bos taurus
atacagtccaggttatttctaaataaaatatatatttttttatttttgtcatcttttatatgccagtaacatgaaactatgctctagacacccctatatgagctggaagagccacagacatattaataaatggttttaataaaccctggtattgttaaaaacatcagaaagaaaccttgtctttagacaatctaccaattg

SEQ ID NO: 208 - DNA, 201 bp, Bos taurus
gatttttctgcttcactacctcttttgtaggtgcccaaaataactgctgattgtgccaagttgtatctttatcacctgtcaaagagctcagtgctctgtcgtgtggtgcctaaggtaaatatgcatttattctcgcctttacttttcttattgagctctattcataaagcttcacttcttttcattggcctttgtcatctg

SEQ ID NO: 209 - DNA, 201 bp, Bos taurus
aagttgtggctgccaccacagtcactttttctcccggcttgtcccttttatctgccttcccaaagtaggtgggtggcactgccgggcctttgcacccaccgctgtgggttgatggcagctgcagactctgcccctgttggatacatgcagctctggtcaaattagccattataaaactcagaaatgcagcaaacttaggct

SEQ ID NO: 210 - DNA, 201 bp, Bos taurus
ctgaatcttttcattttctcagttatgtaagaagcaaggtcatccactgaaagtgaaggtgagtaagaagtattggagggttaggaaataagaggagtataaagtctttaaggtgatagaagaatgggaggattggaaagtatagttttattagtttaaagtatcaggagcccatttacagttcctggtcatggtttcaag

SEQ ID NO: 211 - DNA, 201 bp, Bos taurus
acagtggccattttaaaaagcatgaggtgaaaactaattgtgatttttgacttgcatttccctaaatgtgatacctagtgatgctgagcacctttcataggcttgttggccatttgtacgtcttccttggagaactctttattccaggtctttgtccgcttttaaatcagattatctcttcttgttgctgtgcattatagg

SEQ ID NO: 212 - DNA, 201 bp, Bos taurus
acccccttaaaccactgactggcctactgattaaacatgagttagcttctcctaggaaagatgtcatgttttcccaataccacctccaccctgtagcacatggcctttgactatttatttaacaaagctattctgctggggaaaaaaaatgccaaacacttagaaaaatgcatttaaatgcttgattatcttgatgatttt

SEQ ID NO: 213 - DNA, 201 bp, Bos taurus
cacccagtagccctatatatgtcaaatcatgtcacttctctgtccaaaccatacactgagttccttcttgtctgacaataaaatccaaagtctctcacatggccaacatggacctacttgattttgtagtcaacttcctctcaggtctaaggtttcaccacttcattcctggatcactctgtttcagccacagtggcctcc

SEQ ID NO: 214 - DNA, 201 bp, Bos taurus
taaaaatatgtgctttgattaaaaataaacaggcatgaaaaaaaaaatctttcttccccagaatatttcccaagttgtaacaataatgctttttaaaaaccaagcaggaaaacatattgccttcccctttatatatttgtaatttttgtgtacacaacatatagatattctcatcacttattaatttctgttaatattgtt

SEQ ID NO: 215 - DNA, 201 bp, Bos taurus
gaattaaaagtataaaataaaagacaagatggttatttacctctttcagttccattgtaaattatctatttcccttgtagtagaaaaccaatgtgaggctcattaatctttgttgaactactttgcaggacctccgtctgcaccgagaaatgtgatatctaatataaacgagacctcggttatcctggactggagttggcc

SEQ ID NO: 216 - DNA, 201 bp, Bos taurus
tgaatgaaaagttttgtcttgtatcacattgcccatggcaaattaacacctatttgatttttagaagataaaaccaaatgaaaacttatctcaggcattacatgttaaggaatcttattttacgtaataatttattccatattttttctctgtgattctgccaagttaatgccagaaatattctactaccactttgtctta

SEQ ID NO: 217 - DNA, 201 bp, Bos taurus
agatactaaataaacaacttatattatactatcacctattcttaagtgatctgatgctagaaaataaagttataagcaagtttaagacataattttcctttaaaaggcttatgatcggtttcaaaagagagaaatgcacaattgataaatattaattagttttattttataatttataatttcatgtgttaaaagctagta

SEQ ID NO: 218 - DNA, 201 bp, Bos taurus
taagaaaagtattgtgaaattacctaatatacacatagtgatgactgctgtctgtaaattgttataactgaaacatttctcctggaggtgacattgagaaggttcatgtgggcactcacaaaacaggctgcaaccgctttgtctttatacagtttattatgccctaccagaaatgaagttttattttatatcttaaataaa

SEQ ID NO: 219 - DNA, 201 bp, Bos taurus
ccacaactacagggttgtttcgtttcaagtcacggactctggataccaaccaaactggcagatgaaaaataactcagccggggccatttcacccaccagtgatctctgtgtgtgagataattcctccctgaggtttctttctctcctccactgtgtttttaaaggcctaaggcagggcagcaggctggtgccactgtctaa

SEQ ID NO: 220 - DNA, 201 bp, Bos taurus
aattaaaccaacacaaacgtctgtaatacagtataaaatacaacaattgggacaagaagagtctaaataaagtgaaaagccaaaggcaataaaagtgcatgtagatatcagtccagaaagaaaggccttacatgtagctagttgagacacggacatgataaagtacgtactccatttacttcattgaacattctttagatc

SEQ ID NO: 221 - DNA, 201 bp, Bos taurus
gtagtggactcagggaagtggcaactgggccttcagcctatcatgctacctgcagcaagttctcctgaaggaaatctaagttgcatatctcacaaagtcacccaaaccctactctaaggatagagcttacgctaaggtatgaaattcctctgtgactcctatcggtgcaggagtatatgtgtgttttcaaccagccatcag

SEQ ID NO: 222 - DNA, 201 bp, Bos taurus
cacactgtgtatacaacttggcctaagtaaaataactcggctgacccatatttacatttcactgctagtgtcctaaacacaacgaggatgggcccggtggatggtcttggcacacagcacgatgtttgtgtctttcttccctgggtgccccagacgttagcttcatttctgattggcattagcatctgcagctgtttctgc

SEQ ID NO: 223 - DNA, 201 bp, Bos taurus
ctgatgggggggtcatgctcagtaaatctttaatccaattttctgttgatgggcagggctgcgtccctccctattgtttgacctgaggccaagatatggcagagttaatgaggaaaatggttcttcaaaaggtcccatgcatgcattactgcactgagtgcccccaatcctgcagcaggccaccaccaacccatgcctctg

SEQ ID NO: 224 - DNA, 201 bp, Bos taurus
gccattctcaacatcaataatgcaattggccctggaactgctaatgcacatgcagtgcagtgaagttttgcaaaggagaccagagccttgaagatgaggaacacaatggatggccattggatgttgacaataaccagttgcaagccatcactgaagctgttcctcttacaactaaatgagaagcttccaaagaactcaatg

SEQ ID NO: 225 - DNA, 201 bp, Bos taurus
gcagtttttatttttatcacttggtttaatttttatcagtctaaggtggtgtctgccaggtttctccattataaggttatattttcatgtgtaattaatatgtatcttgtgaggagacattttgtaactatggaaatatcctgtttcttatcatatttttgtctactagttttagcatccatctgtgactcttgcctgata

SEQ ID NO: 226 - DNA, 201 bp, Bos taurus
ggcaaagaatccaagtgttgtaattctttagaatacatttaatatgaatttttgcaattataacttaatggccatggggagaaaaaaaatctcttaaaaagatctatttatactaactatggcctttttgtttccagatgaagaagtttggatcaaaactcgtttgggagtggtatattatcagtggcaagttttggttct

SEQ ID NO: 227 - DNA, 201 bp, Bos taurus
atcttgaaattgttctttttaaattgaacattgcctcagtaactattttacatgtcctcatattttgaaaaaaggttattttgttttccaataaattacaatatttaagagggagcaagagatacctggactaacaggaaagtttggccttggagtacaaaatgaagcagggcgaaggctaacagagttttgccaagagac

SEQ ID NO: 228 - DNA, 201 bp, Bos taurus
caaaggatttgaggatgtgcactaatatcataaactgtcaaaaattcaactaacattttaccattaaattgacaaatgtttattgaccaacataatgggtttgaacttattgtgcatatagtcccaagctaatgatatgcatcttcccatttgacttttgaaaagatattctgcaagacttacaatagcttagggaaaaat

SEQ ID NO: 229 - DNA, 201 bp, Bos taurus
agtggagtaattcatcagagttttggccttatcttaaagcagggatccccaaactctaagccagggatgagtaccagtccatggtctgttattaattgggccacacagcagaacatgaatggcagttgaaaccaaaaccaaccccctgccagcccatagaaaaactatcttccacaaaaccggtaccaaaaatgttggaga

SEQ ID NO: 230 - DNA, 201 bp, Bos taurus
tagtgagttggttcaaggccagccaccttattaagtgtgtgaagagttacagaaaaccctgtttttgcttttacccccatattcatctgtactatggggacagtaatagtttctacctcatagggccattgtgaatacagatagtatgtttcttcaaatgtaataaaatcgataaacattgaccctcgataaacgtttgtg

SEQ ID NO: 231 - DNA, 201 bp, Bos taurus
attatttacaaactcagattcacttttcaatcttaagattcatcctgtttaaatctacatataactctgttacaggcaaactctaacatgacaaagtttctggcatgtaacattttttggagggaaggtgctatatttgaattaatgcattattctgatatgtactatttaatgctgtcaaatgaggcaaacttttgtctt

SEQ ID NO: 232 - DNA, 201 bp, Bos taurus
atacttgagtgggtggcctttcccttctacaggggttcttcccaacatagtaaagggtctactaaataataataataacctgagttctgaatcattcagtaggccgcatgtcctctaacccatgaggctcatctgcccatggaattttccaggcaaaaaatggtggagtgggttgccatttccttctccagaaaatcttcc

SEQ ID NO: 233 - DNA, 201 bp, Bos taurus
agtaatacacagaaggaaacttcaaaaatagaaatatctacaatgttacactaataattttattactattctagtgaaaggctgtttaactttacttccacttctttgctcagtggttaatccttttcctttgatcttccttccctggaattttttattttaacattcttgtttctcaagggaatgttcttgagatcacaa

SEQ ID NO: 234 - DNA, 201 bp, Bos taurus
gaagttatatccatcccacaggcaaaatacaagtatcctgtctcaatgtttccaaaagcctctatccattacaatatcaactaaaagtcccaaagctcatctaaatctcaatagctcaaaaggtccaaatttcatcttatagattacctaaatcaaatacaggtgaccaaatataaagaccgaaaagcagagacattactt

SEQ ID NO: 235 - DNA, 201 bp, Bos taurus
gctggacagctggtgtttttcaagtggaataaaattgaagctttgttttccctagatactccaaggacaaagctaatggtaggagctgagctctgctggagtagagataagagggccactcccaaggtcaaggaaacctctctgactatgtatgcataggaaggctcactggagatccaaatggtcgggggcaacaccctg

SEQ ID NO: 236 - DNA, 201 bp, Bos taurus
ttagatatttttagtcaaggaagcatgttaaaatgtagcaatatacaataaaataacatgaatagaatgtacaaagatacaaaatccacataaggaaagagaaagaaagaaaaaaatgcaactgttataaaggaaagcaaaacaaagagagtaacccaaaaaagggataatatttgaaaacacaaactaagcactcaataa

SEQ ID NO: 237 - DNA, 201 bp, Bos taurus
attgttttgggatgtcatctgttacatttttaattggttactcttttttgtatagggacattattgtttttcttcttttgaaattgcttctggccacttttctggaatatcttaaaccacattttttttttttttggttatttgattttattaatttctgcagaaacaagtacatcatctgaaaatactatttggccctac

SEQ ID NO: 238 - DNA, 201 bp, Bos taurus
ctgtttttatgcatccaggctgttatatctattgaagtaacagctatataaataagcccagtgggtgcatattctttcaacataggtgtttcctgaatcttggattgctccactggttggggtggttgctgttcttttgcttttctctgtattagagtctaaggacatgagccactttgtttcaccctcaatcaccataat

SEQ ID NO: 239 - DNA, 201 bp, Bos taurus
cataaggtgaaaatattattctgctggcaatttttctgatataaataaacatagcccccaattcaaataaaatctttaaaatgcagaataacatgtatctttcttcaggattattgatgtaggcatattttaagttgtaagggtgaacgagtctattcgtccagatgcttggaaaacaatgagtatcactctttggctatg

SEQ ID NO: 240 - DNA, 201 bp, Bos taurus
atgtcactaacaaaaaaaatcaagcagaaatgtgcattaaaatgatatataacataactacatttacttaagaatgtattgcaatatcaagcagcagattcaacaatgcagaactgcatcaacctaacactagcaatttagtaaagataaagggaaataattttaaaaactataacaaaaaatcttgagttacatatggga

SEQ ID NO: 241 - DNA, 201 bp, Bos taurus
tatcccgtcattttcaacttgtcatcatagagctgccagcactcatgattgtcaactgatctcatattttcattagtgaaaatatagtgtggagaagttatacagaatgttcttgggcaaactgttgttattattttacctataagccttcagttcagttcagtcactcagtcgtgtccgactctttgcctccccatgaat

SEQ ID NO: 242 - DNA, 201 bp, Bos taurus
cctgccagaaatgctcagagggctcagagaaaccttgtgtgcaccaggacacagagacgccaacagacactgagatagaccccacagagactgagacataataagacctataatgagaattaaataaattactggtgtcctcgatcatgcatgtggccttttaagtaaatagttctcctttttgtacttgaatttttccct

SEQ ID NO: 243 - DNA, 201 bp, Bos taurus
tctattacattggatagcatgatgagcattataatattcagtaattgcattgagtaatatgaacattctatgtgcatggtcttttaatattttaaaacatgtctatataattccaaagaatttacataataaaaatatgaaaataacataatttataaatttgacacctcaactgaaaggaaacctactccataaaaaaat

SEQ ID NO: 244 - DNA, 201 bp, Bos taurus
catcatacaacaaattctcagtatctattttacatatggtaaaatgtatttttcaagctcctctcaatccatcacaacctctccttccccagctgttctctgtgtctgtgcctctattactgccctacaagtaggtttgtcagtactatttttctagattccatatatatgaattaatatatgatatttttatttcccttt

SEQ ID NO: 245 - DNA, 201 bp, Bos taurus
aaattatatcttgttaaaacttcagtaatgcagagaatgaattaattgaaataaaaagattcctggaaggttaggaaaacatgcagcccttgcagtttcaattttgtcaatgaaagaagttatatgctataaacatataatctatacttttgttcaaacaagggagcttttacatatcatgtttttaatgaattaaaaatg

SEQ ID NO: 246 - DNA, 201 bp, Bos taurus
caccatctactaggttattaaatctctttgctgttaagtttgatcatctagaagatagagacagtaactactattatatcagagttgtttcaaggattaagtgagataatacttctaatgagcttataactgtgattggtgtgtagtatttagggaatgttagatattttttccctgtaagaatatggtaataattgacgt

SEQ ID NO: 247 - DNA, 201 bp, Bos taurus
gcactgacagtatttctgagccctcatactatgagctgcatttttcatatagatggaaaatattgataaagatttttttggtacaatgttatcaaaagaaattcagagcaaaaagaattgtaaagacagagctccctgatgttggtcagcttacttggaggtatctcaagccctcatgttcatcttaagaaagatgttaac

SEQ ID NO: 248 - DNA, 201 bp, Bos taurus
tggttcctccttagactcttatgggcagcaattttaggcaacttgcaatttcctgaacacattatgctgttcaatcctcagtgctgtgtaattcactgttcgctctgaaaggaggccctggcctatttgtcttactcatcaaactcctacttttcttttaactctgcctaaaacactacctttattatgacacgttctgct

SEQ ID NO: 249 - DNA, 201 bp, Bos taurus
ggtctttttcaacacttttttggccagagggagaggggaaatggtagtcaaatttaaacatactggatgttttcatagttaggagaaatttaattactgaagtaatttttggaataaattatggccttaatatgtgcttgctacctttattctcagcaatgcaaatagccatatgacatcaacttaatatcaaaattaaaa

SEQ ID NO: 250 - DNA, 201 bp, Bos taurus
ccagcagtgttctgaggcctctgctgagcacacagaagcaaggaagagagcacatgcccaacttttggacctcgagagtgatttctgtaaaaaggctgttgcattgattggggaggcctttaattctgtcagggaagagctaaaatccaaacactcagtcggtacctgccaggaacatagagccatagacagcataatgaa

SEQ ID NO: 251 - DNA, 201 bp, Bos taurus
ttttcagcacatgtgcttctaggactcactgttccagacgtcctttccgactttaatgaactgtaaaaactggaaaccttaaaagagacccagaggtttctgtgatgcagagtttctgttcagggtgatgacaatgtttcagaaacagacagtggggatggctgcacaacagcgtgaatgcaattagtgtcactcaactgg

SEQ ID NO: 252 - DNA, 201 bp, Bos taurus
gcgggcaaacttggactgatttttctcatctggaaggacccccatcttcacacccccatgtactcattcctgggcagcttggcctttgcagatgcttgctcatcatcttctgtgattcccaaaatgcttgtcaacatcttagacaagagtcaaatgatgtctctctttgagtgcatggcccaatactatttttttggttcc

SEQ ID NO: 253 - DNA, 201 bp, Bos taurus
tatgtatatgtgtgtatatatatacctttaaaaaagactttgcttctgaaaattatttataatatttatcgcaccatgtagttcagttatgtccaattcacagtactctgaagtgtgttttaaaaaaaagagactacttcagtcagagcatcagaaacagaggaagacattaccatccaatacatgttttcatgaatattg

SEQ ID NO: 254 - DNA, 201 bp, Bos taurus
ataaaaagaaaaaatgagaaaggagttaaataaatgaaagtcagaacaaattataagaggatgtttttagcccagtgggtgtccataaataatgagaagatgggagctgcctctcattgtccatgataccttgaaagacactgtctagttttcttgtgtattatacagtaatctgaaaagcttcactaattcagaaagcta

SEQ ID NO: 255 - DNA, 201 bp, Bos taurus
gtctagatactttgtcatctgatgaatagctcctgggcacactcaaccttgtacttttttatctgataaattctagctcatattctggcctcttggtcacattatgtcccaaagtaaaaagctcttagggtagttttttttttttttttaatagtttataattctttgctgcagtcaacaaggccttgctcaaaaaccata

SEQ ID NO: 256 - DNA, 201 bp, Bos taurus
aatggcctatgattgctatgtggccatctgcaaaacactgcagcaccacactatgatatcaaagaaactctacattcagatgaccacaggggcctacatatctggaaacattcatactatgattcatgtagggtttctctttaggttaactatctgtcagtcagtcactcagtcatgtccaactctttgagaccccatgga

SEQ ID NO: 257 - DNA, 201 bp, Bos taurus
caaaggaggaagctggagctatatttggcatgtttgcaataaatctggagatgattataataaatctttaataaattaatacaataaattattataataagtccataacaagtagactaaaagagttgcttgaggttatcacagttagggacgacaggacaaattggtttatccatctctggataaagattagctgaagag

SEQ ID NO: 258 - DNA, 201 bp, Bos taurus
ttggggctgactcatttgttttatcatttcttgtgaaaacgagaggtggcaactatcactggagagcaaagggtgacttggtgactgatctctttaccaaactgagggaagcaatcacacgcgaggttcagaagctccccactccctgagaaacccagcagcttggtagaaagggagtaaattctatacaagcagacaggt

SEQ ID NO: 259 - DNA, 201 bp, Bos taurus
tatcctagactacccccacaaaagtgaatgtcaatggtgacctattctatagacttctctgaagtgttctttggttaatggtgaacactctattgcagtgataacatttctcaccaaacttcttagtttctctggaagttgaagaaaataatcgggtagaaaagctatcagccttgctgctattggactcactgtagaacc

SEQ ID NO: 260 - DNA, 201 bp, Bos taurus
ttacacgtggatgaaatggtaattttttctgaaggatagactgctagattgtaaaagtggctataatacatcgtagcttcttccaccaggagatgtctatttttccaccctttgaatctagacagatattatgactcatttcaccattcatgtacaacaaaattgataccacaccaatataaggcacctttcatttcataa

SEQ ID NO: 261 - DNA, 201 bp, Bos taurus
tcctaagagttgttttgaaacgtctgctgtagggttgccagtgtcttagcatggtaaactgagaacattactttagatcagaagtttgatgggccatgtatagcacaggaacagacagagagaccaaaggaatcaggactcctcccctgggtaacagttactccataagaggagaccactgagctgagtgacctgaaggct

SEQ ID NO: 262 - DNA, 201 bp, Bos taurus
ccaagatggagagaggcactcatctagccagtctgtgtgacttgtgcttagaactacgagcagggagaaaccccgctttgtagcaggaaaatgacaagatcttgaagtgattcagggcaatggcaggagtgggatgaagggaaagactgagcctacaccagcatcttccatgaatgaggctggggctgggcaggtgtgttg

SEQ ID NO: 263 - DNA, 201 bp, Bos taurus
atactttataaatcaactatatttcaattaagaaaaaactctagagagtattcaaattttccacatttgcaatgcttttttttttcaatttgtttaaaccataatccaaattaggtctatatgtcacaatttaaattcctttagatctataaattttccaatatttcccatcaatttgtttattgaagagagtagaggttt

SEQ ID NO: 264 - DNA, 201 bp, Bos taurus
gcacgtagaaggctccagaagggagttgcaagtgaggagtgttagaagaaacccaacacacagaagagggaagctcacagacatgaacagaaaacaggatgccagggaatctgggttaagtaatgacaccatactctctgggtttagctctgtggacaacaggctttgaaaaataatatgaaggctaaacattcaaaattc

SEQ ID NO: 265 - DNA, 201 bp, Bos taurus
ccaggtatgctgaagtccatcgggttgcaaagagtcagacaggacttagcaactgaacaataagaaaactaatcactctatatttctgggccagctcttatcttctgaaatgtcatacattctgcctatggagtaggtatgttttttgttgtttttttttttaattggccataccacgtgacatgtggaatcttagttccc

SEQ ID NO: 266 - DNA, 201 bp, Bos taurus
cctaaaatttctcagatgaggcaaaataaatttaaacaataggctgcatcctcaaaacaatagtcatgggttatatttttgattgaagacctgcactcaaattttaatagaatttaccacaatattaaaaaatattagtgggatgctttattcaatttagtactaacctttttatagtgtgtgaaaattttaaaaagagaa

SEQ ID NO: 267 - DNA, 201 bp, Bos taurus
catactgtgccgcagctgaccaagctcattctgtcttatccatttgcagtagcttcctttctgggctgtcctgaattttgaatggttggccttttcttgacattaagacctaggttcagacatactaaataggaagcccttcctgttcagtcagtctagagtagctatccacttacattatcatgttatagtaatcctcat

SEQ ID NO: 268 - DNA, 201 bp, Bos taurus
ttttttggacaggacagcttattaaagtacttgatggtgactgtaaattaatgagagtatttcatagcaagacaaatgatgtcctgagttctctttaagaattcatttcttactatgttttcctcccttaggggaaaatgagttttatgatatagcagagtctttttcacatgtatgttgcccatttgggactatgctttt

SEQ ID NO: 269 - DNA, 201 bp, Bos taurus
tgtgtgttttccacctcagcccacagctgacttcctgttatacaaatgcaccataattaaatcagtcttctcccagttgaccctggtagttttccagttcgttttactattgcaaatagcagtggctatctttgtgtgtgtgtgtgtgcgtacatgaatgtatattcacatatatctaggtgaacttttgcaagtgtatct

SEQ ID NO: 270 - DNA, 201 bp, Bos taurus
tctctgtcaacctccatgtattgatgtgagaggaaaacatgagaagcagttctgacaccctggttgaaatggctgggccccttaaactgagaattgactacatggtttgagtttccttattgtcatttccaaacagtgagcacagaggagctagaaagtctctttttcttccagggccttcagggacctgggctctgatca

SEQ ID NO: 271 - DNA, 201 bp, Bos taurus
ttcatcaagggagggtgagaaagatcaaatactcataattcccaggaaccaacatgccaccttgttactttctgctcttgtttccagggcctgacacagtaagaaccattaatgatgacttgtcagtcagtcagttcagtcgctcagttgtgtccgactctttgcgaccccatgaatcgcagcacgccaggcctccctgtc

SEQ ID NO: 272 - DNA, 201 bp, Bos taurus
ctctcctcgttcttccatcagtcagttagtgacatttacttggcgcccactgggttcagaaggccaaatacaggaactcaaacaaaggcccacaattactctcacaggagctcaggacgctgagagtacttttcagtttaccccttggctttttctgcaggagcacatctggccttctgaatagagttaatactgggttac

SEQ ID NO: 273 - DNA, 201 bp, Bos taurus
taatcccttcatttacattacagtgagttttatctcattctgtaaaagtttccagacctacaccataacattcagcatcaagttcagaactacagtatcactttttattcaaatatttatcaaatgccaatattttttgtaccatctaatttggacacagttttactgaatactaaaggtactgtattgatacaaggatcc

SEQ ID NO: 274 - DNA, 201 bp, Bos taurus
tagcctgccagaggggactggaggaatcgctttcagtgaccttctctttcacctgcactacaaaaagataaacttttttacataggtggccccatggagaaatggcttctatatgtactgaaaatttagaaaggagctggactttatataatcattgtaaggagcttggaaaatacagattacacttatatctacctatag

SEQ ID NO: 275 - DNA, 201 bp, Bos taurus
ccccttaatgatatcgataagttaatgaaaaatggcatagctggcactcaaaaaaaaatcaggcagtcctatgcaaagaactaattctaatactgtagttcggtgtttcactaaggaattccctgaagtatcaaagaccaaaccttccagctctatttgttaatcaaatcagtcacatttaatatcctttctatattttta

SEQ ID NO: 276 - DNA, 201 bp, Bos taurus
ttttacttattaaacagctgctgctgggattccatttatgtgctgttactgggctggatgagatggacatccatggaaatacacacgtggcatctgccatgaatgagcttataatttaaagaaggagactaaacacacacataccatctttaaataaacttcacaaatctagcagcatgtgagcaagcactcaaataaaga

SEQ ID NO: 277 - DNA, 201 bp, Bos taurus
ctgatttcttttttgtacgctttcttcaactcaacttcatttttcttccagaaagtaccttatctttttcttaattgagagggaaatatctaaaaaaaaaccatagtcattcagttgaattgtaatttccatctcaaaatgttcctttatgtccaatctttctctgtccctccgtaattttgagctcggtctgctaccttc

SEQ ID NO: 278 - DNA, 201 bp, Bos taurus
ctgttaaggtataatcaatccctttatatccattttgttgagagttttaattataaataaatgttggattttgtcaaaagctttttctgcatgtatcaagataataatatggggcccactcttggtaaaaacttctgctattgcgctcttaaaattctccataattttatctttgaaactgtattttgtaagtgaggtctc

SEQ ID NO: 279 - DNA, 201 bp, Bos taurus
ttgatatgatagtgaatgaaactgtcattatagcaggagtcaagagggactcacaaccaactgtgtgactgttttgcttctgctgaactttgtctttgcttatgcatcttttagagtctaggagtgtgtgtgtgtgtgagtgaacaagtaagagatataactgtctaatctaataatacaataattacaactagataagac

SEQ ID NO: 280 - DNA, 201 bp, Bos taurus
ctttactaagctgctgttagtggcctgtttcaagtaacatgtgtttcttaaccatttttggtaaacatatatgtgtccagtttagcctgtaataataattctcaattcttccacaatgaggccctcctctctgattttaaaaaataattttcttcctcacaatgcccatattataaaatacatctattaaacaaattgcat

SEQ ID NO: 281 - DNA, 201 bp, Bos taurus
acccagggtcttaggtaacatacaaagcagtaacaattggtgatataccagaaagaatactgaacaagaagttgagagactgacattcactttgacaaatcgtaatttctctaaaattccattcgatcccttatttttgtgctttattaatttcctgttggaaatgcaatcagcatttcttctacttcatgtgtcaaacta

SEQ ID NO: 282 - DNA, 201 bp, Bos taurus
agctgtttcctgtattttgttggtacaaacgaagactggatcttaccgtaaagataatttcccagcccaaagaagggtatagcattgcaaagataaaaatctcttatgaaaatctttatcagtctaagttgtctaaaaattctgaaattgttgaaatgcagagcaagaaattagttaaatgccatgttgaattgcagctgt

SEQ ID NO: 283 - DNA, 201 bp, Bos taurus
ctgaatgggctgtttattactgagtcatcacatgtaatacagggttgcagcataaacttgtattggctcctgctgtgattaggcaatcttcagagtatacggaggatgtgctcacaataaccaatgccaccagccaacatttccaagaatgtaagttcatcctgctgctcttcattgcaaagatgagtgatgttggatcag

SEQ ID NO: 284 - DNA, 201 bp, Bos taurus
aaggcggagaaaagcaaccagagctttggttatgtcataattatgatatgaaataaaattccttttcctctgggaagttttccctggtaatcaagaggaagttatgtcttccacttctgactttccagtgtatctcctaaagtacttagaaccttgtatggtagtgatttatggatactctccagggtcttatgatactgc

SEQ ID NO: 285 - DNA, 201 bp, Bos taurus
tcaggatagttccaataaaatgaactaccaagatatattagtgtaactctttgccagcagggaagcaccctggatcatttcctttgtttcaagcaattctgttcttatctcaatagactcttctcaagggatgagtggggagcagttcaaaaatagcttatgagttcttctagatcttggagggcatttttctatacaaat

SEQ ID NO: 286 - DNA, 201 bp, Bos taurus
ttttattcaggttgttaatgaattaaatgctagttcacctaactgtgggtcaggattcataactaaaattctcagttgtgtaatagcaaagttgagtgtgattttctccaagtcctcaaggggaaaaaaaaaaattggcttaaaaacatgaaccatattttgttaaaagttcaggctcaaagctcttatcagagtctcctt

SEQ ID NO: 287 - DNA, 201 bp, Bos taurus
agtaaggcaattgccaagtaccactaaactagtaaatgatttaaccagaatcagaagctgtgcagtacgacagcaatgtccatgtttttatatgcaacattatttttgccttgccagaaagtctgtagaataaaaagagtaaggggaaagaaagtactaatacaagttttctgctattgtggcttcatctactaataaaat

SEQ ID NO: 288 - DNA, 201 bp, Bos taurus
cagctggcacaatccaccagaagccccaggatgtggccccacccatcagtgggccatcactagccctggatccaggcctcagccatcaggcaaagggcaccagccctggacacaatcacctgtgagcctgcactagcttcaggatctggccccatctaccagaggtgcaatggcaccccactccagtacttttgcctagaa

SEQ ID NO: 289 - DNA, 201 bp, Bos taurus
acaagatctgttaagcattctcagttctagaagaagcagcctaagaataaggttgtgaaaaataccttctgtgatctagagtttgttaagaaaattggctgcagaaagatcttaactttctacattcttattttagagagaaaatagggaagttaagaaatttaccaaggtcatatcatttgggaatgcaaagcaaaatta

SEQ ID NO: 290 - DNA, 201 bp, Bos taurus
agtatgtatttctaagccattcctaaaataccacacaagaattgaaatcaatactgtccaattataggtcttaggcatggtcatagttaaatcactgtatatataaaatggtgttgctaacaataatcctcttcacagataacagtaacatttctatttgtgtcaacacctattttctgtgactgacacagagtatttttg

SEQ ID NO: 291 - DNA, 201 bp, Bos taurus
aactgcctgccttggccaggcatgataataactgctggcatgagttgtgtcacaacaggagaggcttgataagaaatatggggctgtcaacaaaactagccgggagaattcaggagggccaaaaagaaggaggaaacgctggtccataatttgccttgccaatctcctagaaaccttcaagaatctctctcgtctgtgaga

SEQ ID NO: 292 - DNA, 201 bp, Bos taurus
tgttcttaggatatagtggtgacttccaagtttcttatatgctgacccttgtttactatacagtacggctttttgagcatggccaatacatctgtgtctctgccatcctctatccagtccatggctgatgatgttaatctcataacttactaaagtgcatatcatctgtagccagagcggccctttgcaggccttctgttt

SEQ ID NO: 293 - DNA, 201 bp, Bos taurus
cattttgagtaaatataaactcataatcactgtctaatctaacaataatgtgtaacctaaggttaaaagtaataattaaaggtagagctacaataagtgacaataatgtagtgtgaaacgaaaataattagattatttatgagaataagaattaataatgagaatgattagaaataaagttgtctagtgcctttctatttc

SEQ ID NO: 294 - DNA, 201 bp, Bos taurus
agaataagcaagtacagagagaatgccatgtgaagatgaaggcagaggtaatggtgatgcaggtataagtcaaggtatgccaaagattgccagcaaacctcagaagctagtgaagaggcatgggacacattctctctcagctctcagaatgaatcaacctgtattaacaggtttttaggctccagaaatgtgacatagtac

SEQ ID NO: 295 - DNA, 201 bp, Bos taurus
taagataatattgcattcctcaatagtttatcttaatgctactatattaaaactaatattgaggcatacgtaatgtctttaataatgataggaaatatgcatagcatatatatatgtatgtgtgtatttatgcaatgtaacagcttagaaaaaatatagatagtcatcatgactttgaaaaaagttttaatttaaaatgac

SEQ ID NO: 296 - DNA, 201 bp, Bos taurus
taatcttgaacagccttttaggtcaagatattcccactggggaaaaatggtatatagagaagatataatctgagtctttgagaaacttatactcaactgatatatgcagatgaataataagataattatagtgtggtgcttatcataagcttcagtgttaaagaaagtatttcttcaaaacttgtatttgagcccaaaaaa

SEQ ID NO: 297 - DNA, 201 bp, Bos taurus
aatccctcaatagctgacctttgtctttaggataatcacaaattatttaatgacatctaaagcctttctccattgagatattatcttccttttatatgctgtaaagaagaaaatttaaactaacttcaggagaagagtgagtataagaaaaaataaaaccactggcaagtttcaaagtaattgcctcagtgccttgcgagt

SEQ ID NO: 298 - DNA, 201 bp, Bos taurus
aatctacataataccttatcagctcacttagttttccaaaaataaacatcacagttaataataataatgatactatttgcctattttattttcttaatatctgccctgatgcttcaaaagcaaaagtgggtgaaactgctgatgcctaagcataaaatgaagcaataacatcaaataatattagtagtcattatattcttc

SEQ ID NO: 299 - DNA, 201 bp, Bos taurus
aacacaagttctaaatattagatatgacttttcttgcaggctcaccattttttaagtccagaatcagataattgattttgttttcatgtttacatatactttttaactgtggtaactaaaggttcttaacagtgtagttgctacggtggccaaagttcacagatcagcctctatggcaatgcatcgaatcaggtttctgct

SEQ ID NO: 300 - DNA, 201 bp, Bos taurus
taatctgctcttcataagcagacaaatataaaatgtagaatgatgatagcaagtggtttgatgtggattctaaatccacacagagggtgttcctgaacacatccaatatagggacacttgtgttgcccattatatttagcttgatagaggaaagcaatgggctatatcttgccatcatacatggtcatgaagggccatttt

SEQ ID NO: 301 - DNA, 201 bp, Bos taurus
ccaaatacttttaaattaatgaatgaaaaagtgaaactgcatattttgaatagaaataaaatgtttgacccctttgaaaattatagaatgcccagagaatatcttttttaaggtgatctaccttggtcacacaaacctgcccattagcagaaaggctgtccacagccatattaagcccatagacattcctaaacacactac

SEQ ID NO: 302 - DNA, 201 bp, Bos taurus
cattgtttggcttgggaggggtggattcagtcagtaacatcacacccattactcccttctcccaggccagcccctgagtccatcatcttctgtgtatatatcttgagggctgtggatgagagtgctgctcctagaatgagtcctgcagaggtttgctaggtgggttttagaatatggaggcatttagttaatacctgttgc

SEQ ID NO: 303 - DNA, 201 bp, Bos taurus
tgtccacacaacacatggaaaaaacctatatttcctagtttacctttcgaacatttgccaaccgattcatcatcaaggactcttcccggtcatcatcatcatccaagtccagcatcggcattccaaaagggtcgatgatgctacagcaccttgatccttcatccctcggatcaaaggggtccacgatgatgggctccgttc

SEQ ID NO: 304 - DNA, 201 bp, Bos taurus
atatatgctaaattgaggcaaaaaaatatacaatttccaataacacctctaaattctcacaggagaaactacatacataatattgggcataagtaggctccccaaaatttcttttatttaagggaaacaactaatgactgcagataaacaaggcaagaacaaagttacacagaaaacctattactgtcatttcctactgat

SEQ ID NO: 305 - DNA, 201 bp, Bos taurus
ttctttcaatgataagctcttatctggcgttaacaggtatgttgataaaaacttcaaattacatacaaatttctagaaaaacaaaatatacataaaaccatgaaccccaacctgaaactataaaccgagtaacgtcctttggacatccatggataattctaaaagaaatccctgatatgatctgactcactgggaaattgg

SEQ ID NO: 306 - DNA, 201 bp, Bos taurus
ggagaatggcgtaactcctaacaaagagccttccttccatgcaccataacagccaagaagtgaattatataaacaaactgattgtaagtttatgtgagacccttccctcaggactcccagaaaaaaactgggagatgctatggcagaggtgctgagaaactataatggcagacatgaacccttgttatttgagcattaata

SEQ ID NO: 307 - DNA, 201 bp, Bos taurus
tacttccacctccagaggagagaggaagcaaggagagagagtgagaatctgagtccaagtttgaagtgtctgaggaaaattacggccatgctgagaaactgaaagaaggctgaggtggctagagctcagagatgaaggaggaagggctggaatcactgacagatctgctcctgggcctgtctacttattcaccttaattgt

SEQ ID NO: 308 - DNA, 201 bp, Bos taurus
tttttttacatttaaagaaatgccaatgactgccaagggccccattcccagttatttggtttggttatttagggacggggcctggtaatcagtatttttagtgctcttggatgattgtgatatgtagtctagcttgagaatcaccaatgtgatagttacagtggttataaactgtaaaatgaatcaaatattccagtatgg

SEQ ID NO: 309 - DNA, 201 bp, Bos taurus
tacagtttttcattgatattatgtgcagccttctatactaaggcccagaatttgacctatcatgaggcaaatatacaataaactcagtgactagcacttcgtatttgtaagctatggcctgagcagaaatttgttgatctctgcattttctactttttctattggacctgtgctgtattctcctatgttctgattctgtga

SEQ ID NO: 310 - DNA, 201 bp, Bos taurus
ccctcccactgccttgttaagcatgacccattattctagacggatgttttgtctcaggaactttccatcatttggacaagctttctctggacaaacaaaatttctagtctacaactacctatcctgtcctgctttcaccttttatctttcaaagggatttgcctcaatacatttcttgcatgtcttattccatatcggtgt

SEQ ID NO: 311 - DNA, 201 bp, Bos taurus
agagcaggtatgtgttgcatcccaaacaccactagcttgctttcttcctggtgtcaaggacaaatttaatttgtagaccctgccctcttcacactaagctgacagggataaaagagccaatttcaaatggattttcagctttcaaaaacgaaagcatataaaatatactctagaatttttgacttcagaatattatttcaa

SEQ ID NO: 312 - DNA, 201 bp, Bos taurus
gactgtcaaagaaaataaattgcctggggtcataaggaaataggagaaacggagtgtgcattgtaaattctgcccatagtgctttcaagaggccagtatggctggtaaaaatccagataactcatggctgatgaccatgggctacagagagctgaacaagatagtgcacccatccatgtggctgtgcccaacaatgccacc

SEQ ID NO: 313 - DNA, 201 bp, Bos taurus
gatttttgtgtagctttatttttttcatcttatatttttatatattcttattgggaggcagatagctaggtgtctgcaatcgccttcagtcctcagtcacgttttataacgtttgtaaaggtatatggggcttcccaagtactttatctgtgtggctatttatccactgagccacttgggtaaagaaacccctgcaaagca

SEQ ID NO: 314 - DNA, 201 bp, Bos taurus
atctcaaaaaacctcaactatgtaaataaaatccacttcaaccccaaaaccattcttgcaaacaagccaaaatcaaagcaaggataggagacaaatgatacctacctccttccattgtattcaaagcattttcctacattatcaaatattattactatgagatttgaatcttcttttatattaacagaactcctggaaatt

SEQ ID NO: 315 - DNA, 201 bp, Bos taurus
atcccttgttcaagaccacccacaagctattattgacatcctacaatcattttaatgcaaaatctggtaaaataaacatgaaacactatcttggccactatttttggacatatgctaagtgtcaaagcccgtgtaagtgttcagtcctggtccttcatttctcatggtcctcctcagcctgaccaccagccagtgcagaat

SEQ ID NO: 316 - DNA, 201 bp, Bos taurus
acaagaaaaaaaaaaggaggggtggatagaaatgttcctttgggaaaaaaagaaataaaggcaagacacaaaatcagatttcaatatgccatataggaaggtggcataggatctttaaaagggtataagcttacagtttaggtctacttcatagatttctgaagattatataaaatagtataagaaaaacagaataaattg

SEQ ID NO: 317 - DNA, 201 bp, Bos taurus
tctagtattctaaactggccacttgagttccttttccaaagtctgtgtacctggtaatcttcacctccaaaggctttgcaaaatatttcttgagcaactttaggccatctgtctgctgttttctttactaaatctcatcagataattagtgataaggacatgggttgaaacttgtaaaggtctgataaatagcactgtttt

SEQ ID NO: 318 - DNA, 201 bp, Bos taurus
gctgagctggggggtcccatccctcactcagctctgaaggtgccactgccactaaaagggttaggagagtttcattactgctttacacatggcctcctccggaccaaggagcagggttggggtgggctctttgctactgggtggtagtcaaagtcctgatgtgtcttcactgggcctcttctgaaaccacccaagtgggga

SEQ ID NO: 319 - DNA, 201 bp, Bos taurus
tgccatgatagtttctcagggaattctgagctgtggcagttcaggcctggcttcgtgttcatcctgtgggaggcagtttcatgggtgggaaatgggccttcggaaaggagcaggttcttaatgagctagtgggactgaagtccttgggagttgggaatccaaggccctgtttgggtggaagggagggctgagaggaagcac

SEQ ID NO: 320 - DNA, 201 bp, Bos taurus
ggctttgatgcagggcaggcatttaaagtggatagtctggtagcaatgaacagcatcagtaagagagtcggacctgagttccaggaatcaagaaaggctgagagaacaagtgtaaagcagagtgtagtttaagatttcaggtacttcctgcccctcagtgttactgtttccagaaggcggtcagtcactgacaagggagcc

SEQ ID NO: 321 - DNA, 201 bp, Bos taurus
gcatatgtaatagggagaggcacggagattggtgacttgtatcacaagtgagtgctcatcccactgagtgacttcatatatggacgggatccttggaggccgcatgcagttagtttttgaaaagtgtatgtcatcttatgaaatagttttattttaaatctaaaacatttgattcttacaaagcattcgttttacttaata

SEQ ID NO: 322 - DNA, 201 bp, Bos taurus
acgtctttcatgcggggaatggactgggttgactgatctctagaggctgaatgtcttgctggtggggcacaagctgtccaacacagtcaccaaacaaagcatgtgacaagcacagagagatggaatacatttatggtgttcatgtagggttccctagagtcacatcaagtctcagtctccctaaaaagattgggaaccaaa

SEQ ID NO: 323 - DNA, 201 bp, Bos taurus
ctatagggaccttcacaagtccacccatttcatgagttggaattttaaatgagtttgcaacagtgggttttgacactgaaatgaaacagattgaaaaccatggccccagattgttggggcctgtacaagtccccccgctaatataaggggccctaagagcacttgtctctgctcatcccgttggaagttttaatttttcag

SEQ ID NO: 324 - DNA, 201 bp, Bos taurus
aaaagaagtggaatgcaaaaaagaaaaaatgtgtgaagggcctatataattgctgaaaggtaagttctgtaaggctagaaatcaacggaaagggtgaatgctatggaaagatttttaagtacttattcagaagaaactaaatagaaaatcaatcaggaaaataaaaaattcataaacccaattgcttctaattggctcaga

SEQ ID NO: 325 - DNA, 201 bp, Bos taurus
agaggctgcagaactatatagaaaggatgacaaaatatggcttaaattgggcttttccaagcacatgtattttcctgggaagttcaaactgggaaaaattgagagagggaaataattaatacttaaaagaacaacatcctgaagtatagttgacacattatattcatttcagtgtacaatatagggaatgaacatttatat

SEQ ID NO: 326 - DNA, 201 bp, Bos taurus
catgttggttcttgtggctacaatgtgccaagaagtgttagaaacagaggtctaatttcctgagatgtgtgtcttctgttgttttctgccagaaagtatgctgttttcctgccaaaacaacaagaccatctgaagacacagagagaacaactcccactgagggtggcagcaaaaaaagaaatgccaaagtgaagacaggga

SEQ ID NO: 327 - DNA, 201 bp, Bos taurus
gttttcactgtgatgtataggttttaattgccactgtatcatataatacacatctatatttttacttattttctaaggacaattgagtacccagggttctttgctgatctcgcttcatcatagccttttattttcatcatagccttggggcttcgatcttattattttggtcagactgtgacaccggggccatcaggctga

SEQ ID NO: 328 - DNA, 201 bp, Bos taurus
tgggtgggaattcaaaggtgacaatctctcgctttctataccaatacaaaaagacagcggtgggagcgaggagttgccctttgttttcgaagctgagaccgctacagtctcggccaccaagtgaacgaaggctacagggaagtccgtctcgtccgccatccccggagccccttacttacctctaagtgccgcaaaagctga

SEQ ID NO: 329 - DNA, 201 bp, Bos taurus
ccaaacccattagcagtccaatcagtgtaaaactgactcctttaccagttactatggtaagattttgttctcaggtagtaactctttgagaatctcaaatcacttcacaaaaccaaatgctattaccagcttattttcaataggctgaatgccaccaaaggcttagtacagtggttataaggaatatagtattctctcctc

SEQ ID NO: 330 - DNA, 201 bp, Bos taurus
cctctctcctatttatttctactctcctgaaatactcttgctactttgcatcatttactgattcatttatttacttatctaacaaacactatgaccatctctctctggcctagtcaaggcagaaatacaaagaggactgagacgtagtcccttctccatagagcgttacattcaggaaaagtgataaatatccactgtatt

SEQ ID NO: 331 - DNA, 201 bp, Bos taurus
cctgttcttattttgtaggtaaaaaaaaaaagtgcacagaactgtggtgacatatctcactttaaattttgtaaccagtaatctctcacatgggcctttggctttgccaaggtcaactatatttctctaatcctttccttccatcactcttctagagaggcatttagtactctcccctttcacaaacctcacatagctcct

SEQ ID NO: 332 - DNA, 201 bp, Bos taurus
gcgttcaagaaaatgcattgaggatgcctgaatgtcaaggttggtacaagacagtggcttaacctctttcagtcagtgctagtttttcttaagtgggcagaggagccctcaaaagaccaggaaccccattattgagaagtcctatgagctgctggggcttccctggtggctcagtgataaacaattcacctcccagtgcag

SEQ ID NO: 333 - DNA, 201 bp, Bos taurus
gactcaggatagccatcaaatagccaaattctagccactgtgccttatgatagctacagtagttaaaacaggtattattccctgagaaattcacccacaccaatgttatcaatttgtttccctgtttgttaagcaagaaagacaatatctgatgattcatctgcatgtcactatttcttcagctgaggatgtgaagtttat

SEQ ID NO: 334 - DNA, 201 bp, Bos taurus
tcatcttcatcctcccagctaccattgtgctcaggatttcatttcttctcccctgaagcactgtatagcctcctttttgctctccttatctttattcagtttcccctttctaaaccatcctccacacaaggcttactatagaaggctgtgctgtccacctccaggagacataggcctgaatggtgttccctggagtccttt

SEQ ID NO: 335 - DNA, 201 bp, Bos taurus
atgtagatcacaaattgttagaggttgggtagtgggcaactttgggacagataaaagaagtagtggactgtaagggcaaaaggaggccattagatgctagcattttgtttattttatttttttttattttcaggtggcaccacacagcttgtgggattttaattccccaaccagggattgaacccaggcctgggccactgc

SEQ ID NO: 336 - DNA, 201 bp, Bos taurus
aggggtcagactctcaagacaattgggactgacagtgcctggggtccccacatgagctcctgtcctaattacacctgaggaaaccagcatattaataactatggagggccaatcagtcgatttcttttggacactggggcaaatttctctgtgctcactgaagcccttggtctgctttcctcccaatccactcctataatg

SEQ ID NO: 337 - DNA, 201 bp, Bos taurus
aagtgaagagaaagtggattaggaccttcctttcctcttactctgcagtcttggccgagtcaatcattcccacttaatcctccccttttcttctattacctgatgacgatataagttatgaagaactcacaagtaatatatttgaaaaagctttgagtattataaaataacaaatagttattgttcatatgtttatcacat

SEQ ID NO: 338 - DNA, 201 bp, Bos taurus
tcatatatataaaatgtggagaatccttgaagacaaataaaagtacatactcatccttagaaagacctagcaaaagatgtaatgccttcacccataatccgtagcaaagtctgttctaaaaataaaaatttgaagatatactgaagtgtataataagatgcaaagaataagttagtcttcaaaagataaacatttgttttt

SEQ ID NO: 339 - DNA, 201 bp, Bos taurus
ttgtggatatagatgattttactacttttgtatcttttaacctttctactaggttaataagtggttggtctacgttttctgtatactttcctttaccagtgaaaatttttcttcaaaattttcgtatttctatttgtggccttttcttttctgctgagaagattccctttaacatttcttgtagagctgatttagtggtgc

SEQ ID NO: 340 - DNA, 201 bp, Bos taurus
ctctgggagtactgaaaaatgagagaacataataactgagctgaaattttaggaatgagttatagttaataggcaactgtgaacatgggaaaaacgtaacgtaggaggaaggcataagatgtgcaaaggactaatggcaagagagagcatgacttacaggaggaaatgtgaaaaggctgatttcctgaagagcaggaagga

SEQ ID NO: 341 - DNA, 201 bp, Bos taurus
aaagtcaagtaaaaagtaattcattttgttgaaagaaacattctttatggtatatggtagggcatttataatctattgtatggaatattgatttcactgctagagataccctgcaataagacttagcaaaactggatgactgattataaatggtgcacaaagatgagggaggattcaaaaaaaaatgtctagttaggaatg

SEQ ID NO: 342 - DNA, 201 bp, Bos taurus
gtgtgaaatagaattaaataagctacgggagataatccaagcacaatttttatgacataacataagcatacattttagtgcattgtccttgtgaatctttcactatccaagtatatttttgcttatttcatatgtctatggacagcattaccgaagaagtatctctgaggaatacattatgaagtttaatatacacctaga

SEQ ID NO: 343 - DNA, 201 bp, Bos taurus
agaggtcaccaccactgcccttttgagttgagactgtgatggtgatgtaaccccactttcttgagactacgcagtagatacgtagggattagaggataaagggtgggggaataagaggaacttcttatttctgaaaatgtgtttgaccacacgtgaacaaaaatgaatggatactatgttttaaacaaatgtacagaaacc

SEQ ID NO: 344 - DNA, 201 bp, Bos taurus
actcccggagtccacccaaacccatgtccatcgagttggtgatgccatccaaccatctcatcctctgtcatccccttctcctcctgccctcaatctttccagcatcagggccatttcaaatgagtaagctctttgcaacaggtggccaaagtattggagtttcagcttcaacatcagtccttccaatgaacaccaggactg

SEQ ID NO: 345 - DNA, 201 bp, Bos taurus
attattttctgaagaattcagacatttttgtcctaagactttttcaaactggatgttgtagatttcattcccatggcaacatttagcacatttctccagcttcttgatttcccataaactgataattagttttagagacttcagcagattcaggttcaatttttagaaagaatagtatctaaggctatatttatttaaata

SEQ ID NO: 346 - DNA, 201 bp, Bos taurus
ctgacccagggatctaccttgcatctcctgcatctcctccattggcaggcaggctctttaccatgagccatcagggaaggctggactgacttaggccccatccaaaattatatatttaaatcctaacccctagaatctcagattgtgattgtaatgggagaaaaggtctttaaagaagaaacataagttaaatgcggtcat

SEQ ID NO: 347 - DNA, 201 bp, Bos taurus
gactttatagacccccagaggctggccaggcccccagaagcttaagaaatttcaagacccactccttttcttaaagtgctgcttgacttgctggcaataattggtgtatttgcaggccagcatgtagttcagttagggtccaggcagggtcagaatccagtcagaggcctgctcttccacttctgaaccctgaacaagact

SEQ ID NO: 348 - DNA, 201 bp, Bos taurus
accattctccccacaccttcatgtgttcatggcctgtaagctctttaaaccccatccttgtggatatttatggaagcttcattacacaagcaaaattgactaaatcactggcccctggcaacaggcaactgactcaacctccagcccttcttcactcctgggaagccaggaggatggaactgaaaggtttcaatcctctaa

SEQ ID NO: 349 - DNA, 201 bp, Bos taurus
taaatattttatttagcccagaaactgagaacggcatttcagagatgcatagacatgggtttctatctcaactcaatcacactgtggccatgtgatcttaggcaaactaatatatctaaatatatagaatataggactaacaatatgtactacaaagggttattgagaaggccaaataagaaaatatgtgaagagcatcta

SEQ ID NO: 350 - DNA, 201 bp, Bos taurus
accgtggaccatggttcacacaacagatacttatttttcacagttctgggggcaggcacagggagtttctggtgagaaacacttccggccttgcagacaattgcccccactgaatgctcaggttgtggggagggggaagcaaggaagaggatctctcttctatccttgtaaggccactgatctcttaggacttaacccatg

SEQ ID NO: 351 - DNA, 201 bp, Bos taurus
aaagccctgcagaccagggccagggcagaggaaaactctggaagttaagcacaggatactaatactggtgctcagagggaccagctccgtcagagacaaacctcaaaaggtgctctggggccaaaggaattgatgttgaaagaagagcagagctagcaaggataatttactttcacttatacttcacttttaccttcactt

SEQ ID NO: 352 - DNA, 201 bp, Bos taurus
ggatatatgcatctcaacatatgctttagtggttataacctaagcatgaaagaaaaactagatcttataagtatgtagtgtagaaaggcctgatttatgttcatttggggtgaaactcaaaatatttaagaaatgacactctgtggtcatccagatacctagaccaaccaattagagaggcatgccaaccacaaaaaactg

SEQ ID NO: 353 - DNA, 201 bp, Bos taurus
ccatttgacaatactggaagccaaaggttgactcccagttaagcaccaaatatgtggctttgcagtattagtctctaggccttcagttttgtcaccgacaggattaatgcagcctgaccctgaggagcagctgtgaggattccttgttaatgagcagaaagcaattacaagtatttttcaattatagtgctctaggccctc

SEQ ID NO: 354 - DNA, 201 bp, Bos taurus
attcagtgagagacaaataggttaagaagtggatttatttagagaaatacacattccatagacagaatgagattcctctcaaaaggctagagcggccttaaggcgtaggggtcatcttggaaagtgagagaagccaagggagaaacacattccacagaaggcatctcagaaggcaagaggccctgaaatttggagtgattg

SEQ ID NO: 355 - DNA, 201 bp, Bos taurus
gttatcaggaggccttgatttaaatgttagtgacccttgttatggaggcaacaaggtccagtagaataacactaatctagaaatatggagacttgaattccagtcttgggcctatcgtcatttacataaactaatttcggcaagtatttggcctctctagatgtcagcttgtacaactataaaatagaccccactgtatct

SEQ ID NO: 356 - DNA, 201 bp, Bos taurus
tcatggggaaggtttagaaagattaattcacctgggtcaggaaagaatggaggtatattaccaggcaaccacagtagtacaagggtaaggtaaagcaattactttgataataacaaagatgtcaggagtgatttcagaatgatggtgtataggatttgatacctaactggaaatgagacaagggagagagaaaaatgggag

SEQ ID NO: 357 - DNA, 201 bp, Bos taurus
ccttcagtcactgaggttttgcactgagctgcttctccaaagacccagcagtaaacctcgttgagagcagcgctatttgtgcctccaggcatcttccacacggccccaaagacatgttcttaaccatttaagaatggcctttcaattgatcagccaacagattattgagcaccatgcctggggcccttaagatgcttaaaa

SEQ ID NO: 358 - DNA, 201 bp, Bos taurus
gcacagtttatagtcaggtttcctactggaccagtttggtcacccactgaatttcgagaaacgtcaaggattaccgctcactgtgtacactgaatctcttgcttttctgattgatttcaaaataaagattgctatacctggtggataatgctgctctaccaggtgccctgttccccttggggaatcctgggaacctgtgat

SEQ ID NO: 359 - DNA, 201 bp, Bos taurus
ttttctcgctacctgttgtgatagcccatgcctcttctactctttgccaaaataatacacttttgtgccctgtttcccaagagtcctgttttttttctttctactattggacatctcaccagtccctattacttctacccaatgctctctgtttttcattatttatctctgctactacaagggctttccttgtggctcagc

SEQ ID NO: 360 - DNA, 201 bp, Bos taurus
ggatgtttatggctacacatatttctgtaaatgttaaagaaaaaagtctggaaggacagtggatagctttcagagctgaagtcagaaataagaaggaaatttttggtttttactttatcccttttcctcaaaggcagacattttaggatagtgggtgatttttctttcctttttgtgatttttctgtttttccaaatttcc

SEQ ID NO: 361 - DNA, 201 bp, Bos taurus
taactgagctcagatccactagcttcctcagggtcaccaaggggctgctccttgtacatatttcatgttaatgccacgggctggccaaagaatgcttatggtaaagtataatcaacagcccagtgctgtttctttctattcagcaaaacactcatttggctgtaacgggatttctgggctaaggccattctatgtaatctt

SEQ ID NO: 362 - DNA, 201 bp, Bos taurus
acagagctgtcagcagaaaggaacatccttgaagctctccttggagttaaagaaataatgaaatcagtgttgcatttaaagatgcttcttatccccagtataactggcttgtgggattgtattggaatgcattctgtggcttccccacagtgcagccattggagatggaaaggaccagctctgagtaaaaaggtgtcttgc

SEQ ID NO: 363 - DNA, 201 bp, Bos taurus
tagacattcactttgtgtttaatgaaattccacgaagattttaagacagatagtcttggattcaagttctgtctgttatttcctaggcattcttggaaaaaattattcaaacatgctaaatatccatttcatttttataacattatagacttaaaaagagtagtttaaaaggttaaatcatatagccattaaaaatatttt

SEQ ID NO: 364 - DNA, 201 bp, Bos taurus
tagtgtgacggttatatttgtgatcatatggaacaaagggtagcacagggaaattcctgagaattctccactaagacattggtggcacttctgttgcttttggaagtgtcctttttctgtcctttggccaagaacatttagtagtgctggtggctttttagcagtgtttgtttctgagtaatagtgattttaaaaagagag

SEQ ID NO: 365 - DNA, 201 bp, Bos taurus
ctgttcaagaggtggattttttgttgtttctttctttttctttgtctgtttttttgtccagggtaagcagaacacttttacagagcaggaataagataggaatacattctaattccactgtcaaattatattctttcatctgtctcatttacagcataaatgatctaaaaaaggtttatgtataaccttaaggtaagagtt

SEQ ID NO: 366 - DNA, 201 bp, Bos taurus
agacctgctaagttatttctgtaaggggaagaaggggaaaatggagacgttttccatccatatggaggatatctgtaaagaccagaaatgagagtgaggtatgtgctgaaagtatgaaaagaagttcagtatgattggagcatgggcttcccttgtggctcagctggtaaagaattcgcctgcaatgtgggagacctaggt

SEQ ID NO: 367 - DNA, 201 bp, Bos taurus
tgaaaaaaagaaattctcttgaatcccataaccttaaaaatatcttgtataacaaaaaggtataatgtgtagattctcactaggtagaagtctgaatgccgagcatatcatattacagaataaagatgggtattttctgggatgctatctagtttttataaattccactgctgtcctcacctaaaatgactatggaaatgg

SEQ ID NO: 368 - DNA, 201 bp, Bos taurus
agattctttaccactgtgccacctgggccttagcccaaatggaaaaatcaaagtatagccataggaacgtatggctcctatgctatagcctctgaaaacataggcccttcttaaggagacagtacatacttcagagttccaaggagtgaccagtggcactttgaacagtggccagtaaatggtgaagagtgaatagtaaaa

SEQ ID NO: 369 - DNA, 201 bp, Bos taurus
atgaaaaccaagaacttcttgaagttcaacctaggtttagaaaaggcagaggaaacagagatcaaattgccaaacagagatcaaattcactggcatattcgatcatagagaaaggaaaggaatttctgaaaaacatctacctctgtttcatcaactacactaaagcctttgactatgtggataacaaactgtggaaagctc

SEQ ID NO: 370 - DNA, 201 bp, Bos taurus
tgtttaatacttaaggaaaagaggtctttatttggctagaaaatgttctattcttagcaattcaaaatttacaccagtgacttgaatgaaggaatatatcgtgtaccatatagcacacatgagttctagataaaatatatctcactaaaacaattttatgtagctcttgttttgccactcacactgttcactgaatccagg

SEQ ID NO: 371 - DNA, 201 bp, Bos taurus
accttgtggttccttatggttgtaagactgagacacttactcttgttggctcttaggcagagtacactttgagatcttagaggccacccacaattacttatcacacaatctctttcataagtgcttaaaatctctgtaacttcaaaaaggacctactttcctttaagagttcacctaattgggtcaggcccacccataatc

SEQ ID NO: 372 - DNA, 201 bp, Bos taurus
tagttaatagctctatgatttaaccccccccccccttttcttttttaactccaatgaccattgtctattatgatgtctccaagggcctaagttttggactggttaaactgagattagaaaaaatatttagtgtttttatatcaagagcaatgtgctctaataagcacctgaaattattgtgggccagtatgacagagaaga

SEQ ID NO: 373 - DNA, 201 bp, Bos taurus
acatcctgcagtgttcgagatatatggtgcattaaaatatgctgcaacatatatttcaaacactacaggctgttattattgtgggtaagtggaattgaagtgttgttttgtttaataaaagtattaatttaaagtaaactctagtaagtcaaaaatgtacattgccatgtttatggtaaccattaaaagaaggtttttaaa

SEQ ID NO: 374 - DNA, 201 bp, Bos taurus
ctttgcagacaggtagggtcaaaagtgtgcgtcttggccaatgaattatgagtggaagtgaagttatgagctagtgacctaccgtgtccccgcctctccccgcatcacagtgatcttggaggccacgtttacagccatagggtggcagagctacacgatgaagaatgatacacatgggactgtaatattagggtgtggagt

SEQ ID NO: 375 - DNA, 201 bp, Bos taurus
ctccataagcacctcagggcaggagaagggagtggatgcgggcccctacatcagatgcaaaatgatgcgtatgaaacagacacagacttgaagatatagataacaaaccaggggttaccagtagggagacggaccaggggacagacaagacaaggggatggatttaagaggtacagattcctatgtataaaataagacaca

SEQ ID NO: 376 - DNA, 201 bp, Bos taurus
atcagagggaggcaagctggggtttaatttttttcttctcagaaggaagagattctattgcgtttttaacagcattgttcctctgtgccagccccagtcatatggaaacctatttgggatgcagccaaggggctacgctgtccatgatggaggatggctacaccagagagcaagcaaagattaatcaatccaagacaacat

SEQ ID NO: 377 - DNA, 201 bp, Bos taurus
gaatctgaccacatcttgtgaactttaggacaacatacacattcgtcaaagccaccactgactctcatatgcatgattccaacagcctcctaccatgttgctctgctttcactacttttcccctatttattctccccagagtagagaacagctggaattattttttgacatcctaaattaagatcgtgtccctcctctgct

SEQ ID NO: 378 - DNA, 201 bp, Bos taurus
ttggtaagataggtctccatctatcatcacacaacgtgtgtgcatgcttctttgtctctatctctatctctctgttctcctcctcctcccacctctccctctctcacacacataaacacacacacacttcagaccatctttgcaatcagaactctgtagacataaatcagcataatatcattaagaataaggctcagttac

SEQ ID NO: 379 - DNA, 201 bp, Bos taurus
taattaaaaatatgttgctaatgatttcttttctcgtcctcttttggagaaactgcttcacagggctgacctaggttgtgtttctttggtacgcaccaaagttaaatgcagcaagagtgaggaatctctgcattctagttctgggtccctatgtccttctctcacggtcacagacaggatgacaatgttggatgggaatgc

SEQ ID NO: 380 - DNA, 201 bp, Bos taurus
tcggtgattatcctgcatgggggactttctatgattgcaacccactgaaatactcctcagttcaggctgaatggctttcaaagacaatttatacactgaagtcaggtggcacctacatccttggtaacctaaggaagtttaatagaagtctgaatgggaagctacaaactggagctgtctgggtaagctgatttacaccgg

SEQ ID NO: 381 - DNA, 201 bp, Bos taurus
gatatctctgtaacacaaagaactgatcacatttaacagcagatcattctgttagaaagttctgtatactgaggcagggtgatcggcctcataactaccacccactgtcccagtttggcagcctcggttcagaaccaaatatcaaatgtcccactgggcagctcttcaattagatgaaggcagccatcaggccttcatgct

SEQ ID NO: 382 - DNA, 201 bp, Bos taurus
ttggacagggcctaattacagctctgtaaatgcaagctaattggtgactaaaagtttaagacaaaagattgacttccactcttgtaattgaagaatttgaagtgttaggccatgtgtcttatgtatatattgtttctattaggataacggctaaaatttaataacaaatatgttagcaaaataatctcaatattgatatat

SEQ ID NO: 383 - DNA, 201 bp, Bos taurus
actttcttcagttcttttaaaggcaggtggccagggaaccatgggaaagagttagaccattcaaactgaaaacagaggtgaaagagagagaacacactgcgtactgggcaatatggccagtctcccaagtctcaagtggctcttccttacaccaagaagcctagcaataattctttctactgccaccacatgcaaccaaaa

SEQ ID NO: 384 - DNA, 201 bp, Bos taurus
atcagtcagaattttagattgggttttaattttaggtaactgagcagttatagcactgctagagttattcaatacactttaagggccaacccatattcctagtaagcaatgcactgctatctgcctaacaaggatggagcgcagggaataatgcataagtattggtgaatgatcttggtggccacaaacaaatgacaagag

SEQ ID NO: 385 - DNA, 201 bp, Bos taurus
acacaatatgggtagatgaagggaacgaggacattattttaaaattcttaagttgtatgaatggtgtgcagtagtacagcactaattaaagcatggcccaggtctaagactattcaaacacttccctgggcagttatatataaccatctttcagttcagttcagtcgctgagtcatgaccaactctttgcgaccccatgga

SEQ ID NO: 386 - DNA, 201 bp, Bos taurus
accaggatgccctacgctgaagatgcaaatccctcaatgagctctttttctagcaggtattggcatggaggccatggatgtagtctatcgatcgaatcatttaatttaggaaagaaaaagcaaataagccagtgtactttgaaacttacagttttccagggtagggagaagtaattatgagtccaggtagttgagttaact

SEQ ID NO: 387 - DNA, 201 bp, Bos taurus
aaaagagcaggaatgggaaacctttgtaagatttgccaaaaattatcatgaaaacacacagccaaaagattaataaatctaattacagtggccacacacagaggtctccttgtgactccatggcaaaagggattcaaaaatgagaatgcatacaaattcactttataacatgcacagtggtttcaactattacaatggcca

SEQ ID NO: 388 - DNA, 201 bp, Bos taurus
ttaaagaaggtgaaagtgaatgatcatgttcatatcaaaaggacaaattctatagttattcaaggttgacagttctgctggttcatctaaaataaaagtatgtattttctgtttgccttgcaatcaagaaccatgtttgtaccaaaacccactgaatcacacatgttaaatgggtgaattgtgagatatgtgaaataggta

SEQ ID NO: 389 - DNA, 201 bp, Bos taurus
agaccattgccaggtgtgcctctccagcatggcagcttgtttcatcaaagggcacatggagaagtccaaggggagagagtccagcaagatggaaatcacaactttcataatttaatcatgaaaggagcatcctggcacttttttcagattctgtcctttagaagcaaatcacaaggtccgacccacaccaaagaataggct

SEQ ID NO: 390 - DNA, 201 bp, Bos taurus
tcttttgtgagtctgttatggaaaacttaaatgtctttaaggcactgttaacagaagtctcattgtcttagataaggctgctgctgaggacattcaggaacgtgacctaaatgttattgaacactggaagaagggagatccttcttatatagtggtagaaagttcaacatggacaccatccatcatgttgaaagtaggaaa

SEQ ID NO: 391 - DNA, 201 bp, Bos taurus
tgcccacacatgacttcctgcactcaggatcagcactgcacacaaggctcagatagaaaaccaactgggacataaagtaggaaataagtggcccaaagcttctgttgggtaggtcgtgagagagatcgaagaggtgagactgagatggcaagtaccacgttgtggagggccctgaacaccacatgcagaagtggaacatgc

SEQ ID NO: 392 - DNA, 201 bp, Bos taurus
agacatgtgattataagattagactgtataaatataaaatgaaaattgtaatcaagctctagggatgcaagcaaggtaattgaaagtgagaagggacccaatattagaaatcttagttctaccatgcttagttactttgagaaagtgtgtgtgttacactaaagtcttaagaactgtttctcaagcaagactatataataa

SEQ ID NO: 393 - DNA, 201 bp, Bos taurus
atgacttaaaaacaaatacaagaaaccaccacccctaaaaatatcttcctgttgtcaccatccacctacctttcctattctgccctcattgcattttttcctcttcaacatgttcatcccacccagggaaaaggagaatcaggagacttactttttcttttgatgaaatgtatttgtattcatattcttcattgagtggct

SEQ ID NO: 394 - DNA, 201 bp, Bos taurus
aaactttaagaacttttttcaaaaaaagcagcttgtagtttaaaggtggcaatgcttctctactgaaaactgaaaaaccaatagaaaatagcagagtcctaaccccacagtaggccttcaacaaacttttatgaaatctaatcaagtgtcaggccccagcccaagttactatgctatgaaatattcccagaggggctttct

SEQ ID NO: 395 - DNA, 201 bp, Bos taurus
taatggcactagactgcttaaggtaagaaaataacatgcttaaattcctaaattctgggctcaaggcatgaaactcagatgctttctaagagtgtactaagataacctctaagatttagggttgaaaaagattcatttcagaaataaggtctgtaacctcaataatctcatttcttcctgtgtcatttatatagttatgat

SEQ ID NO: 396 - DNA, 201 bp, Bos taurus
ttatcccattattccaaactctgggacacgaaactcctttactcctttcaaggacaaatcagttaagagacctcacctttgatgatggttagacgctcttttacccaagacagacaaacagccacaaagagaggggagtctggagggcagaggcctcgtccacccccccagactcacctggtggatgacgtagatgccata

SEQ ID NO: 397 - DNA, 201 bp, Bos taurus
cccaggcacgctgagctggtaaggggcctgtgggggacctgaagcttctctcctgtgcctctggaatatgctcatccaaagatgattgagtaggagcaccgggcatgttgaggaaggctggaatggacagggaggagagtgcagagggagatcatggggcgtcgggggcctgacaacaactgtgtatggggaaaacaattt

SEQ ID NO: 398 - DNA, 201 bp, Bos taurus
ttcatcttttcttcctccaatgtaagaaaccacagagcagacagcagatctgtcattcttagcaattctgctcccaggtggcgtcttgagcttggccccgcgagctcccattcccttcctagctaggtgctcccactcagagcggtgtcttctcccacccgcctgggtccccgaatcggagacctcagcgtcccctggagg

SEQ ID NO: 399 - DNA, 201 bp, Bos taurus
ctcaactgggaataccagaattgtttctgggtctaattaagcagtatttcccctttgtcttcccttgtttgattttggcaccgaatccccgtttgaggccgtgttagcctcaaacagcactccccctggtagccttttagctgcgttggtctccaactataacctgctactaaggcctgccctccctgaaactctgtctct

SEQ ID NO: 400 - DNA, 201 bp, Bos taurus
gtagtggtttcaaccactcatgttaaggctttccactaaggactggcacagtgtttatttgtatatgtatcagggctctagcttcaccttaaactagttacgagtcacaggaagcctatttatacaagggactgaggaatcttctgggaagattaatcgtcagaggagtcaggcccagggagcttgacttcgtaaggctat

SEQ ID NO: 401 - DNA, 201 bp, Bos taurus
cctgagtttgttttgtgtgtgtgaaatcagcatattttaagcatatgttaaccaaatattaaggtcaattaaactttaaatactgagtatcaccaccactcagtgctggtcctttaatttatttcaaagattttagcccccaaactgtgttccctaggtgcctgctgggtcttaaaggcagaaagatgccagccgccattt

SEQ ID NO: 402 - DNA, 201 bp, Bos taurus
tgttgtagcagaagccctgaggatcaggtcaaagctggctccattccttccaagtgtacactctcccccttcctagcactggcgcgcttgccccagatgaaaataatgctggagcaaggagggtggcaggggtagttggcatggattagagtgcaaaccttggcacaggccatagtggtcctagtaggaccagagatctgg

SEQ ID NO: 403 - DNA, 201 bp, Bos taurus
aaccatggccgccttttggaggcagggcacgtgcaagtcaggtgctgaaaagcgggaagcctcacagacctaacgttattctgcagttctgctgagtcacaatatcttttgttcctgccagagctcatctcagtagaaatagcctcacttatcatttgccaaaagtggcatgcttttaaagattcctgcttttattcaata

SEQ ID NO: 404 - DNA, 201 bp, Bos taurus
gtgtttcttagtttagagctgtgcctaaagtaaaaattgcccttacagactccagaagccaggcggtcctgccacctttcttccgtcttttgatcacacaagagatccagaggagaaggaatccagaagatccctgcggaaacctgagagcagtttctctacttttatgaccactgagtggctctcagtttctgctcctcc

SEQ ID NO: 405 - DNA, 201 bp, Bos taurus
ccctccaggtgaaaattggggaggacatctagagtacagctttatgaatgggttcgagttctttactcatttacccctcagcttgacaggggcctgggtactctctctctgcattgtgagcctggctcctctctctctcctcatctgcttatttactcaattgaaaacaggttttctgctcagcctttccagttctctctg

SEQ ID NO: 406 - DNA, 201 bp, Bos taurus
ggcctccaccttctcctccttggatcacttggtctaggggaagccagctgccacaacatgagacacttgtatagtgctacagagaggttcacacaatgacgggctgggccttctgcaaatgccagtacagattcactccccacaggaatgagccatcctggaagtaaagcttccaaccccaggcaacaatccttcagatgc

SEQ ID NO: 407 - DNA, 201 bp, Bos taurus
actttgtttcaaaacaaaaaaaggattttcagtgtagaaagtactcttataaatagtctcataatctaatgagctctgtagtagtaaccagttctgctttcagcctaggtggatagccaaatgttacatgagcctttatcattaggaaacttaagcctctcagacgcctctgtgccttgtcacagtctgcatgtcctttcc

SEQ ID NO: 408 - DNA, 201 bp, Bos taurus
aggcatagtaggctgaacccttgacagtctcatcctcaatttgctcacaggaacagctcccatgctgggagggccaacttgtgaagactagggggtgccactgctattgcccctcttttggtgccttctcatacagtgggggtgtaactctgggaaaagtgagtcctcatccagttctagggtaggagtgcaggagttctg

SEQ ID NO: 409 - DNA, 201 bp, Bos taurus
agactcactggaaatcacaaactattaaaagaggccacattaaaactactatactaactccaagtaatgactctgttattactattatcaatctgcttctaagaaaaggccgacaggaaaaggtactactggctgcccagattacgaaattaactgtaactagagacaaagttctaaaaatctttaaaaacattctggtgc

SEQ ID NO: 410 - DNA, 201 bp, Bos taurus
aaatatgagtatctttccaaaaagctttttaacaaaacaattaagattaaattgtgaaatttattaaatgtttttttaatccactgtttttgatccttgctacaatgagattataaatctaactcatctgggtatgttccaagtgactttatcataattttatctgttgtagttcagcaaatgtgatcgtttatctctaat

SEQ ID NO: 411 - DNA, 201 bp, Bos taurus
tactgaagtgggttgccatttccttctccacaacagtccccatatctttccacaaaaatctgccctatccttttacacataatttctggctattgaaaaattagtcctacaattattgtcctttaaaaagttgttttgcagttggtagaacttctgcttctgttcatgaagcattaactgctattggaattgccttcctgc

SEQ ID NO: 412 - DNA, 201 bp, Bos taurus
aaaaacaagtccagtgccttgtcttgggctctcaaagaaggctcctgcacaggaggcctcctggggctttcatggaaggggtttcagaaaggagccaggatataaatatttgtccggagtaagtttgggaggggaatctggtgatttttcattttcataggagttgtggttacactttgcactattctatgaaattaaaga

SEQ ID NO: 413 - DNA, 201 bp, Bos taurus
atattatgtgcccggaaatgactactttcaaatttcaaatgggacaaggctgtttaccttaatcactgtctttattattttacagattctgtcacattctctgagcgctggccctgtcagacaaggatctacactgccaccttcatatggaagccctcccactttcccagctgctcagcaccatctctggaattgcctctc

SEQ ID NO: 414 - DNA, 201 bp, Bos taurus
gcaaggtctatctcctctttctgtctcagaggttcatgaaataccctagtagtcttccaataaatttttattattattattattttgcttaagatatcttaagtggttctggcccttgtgaataaatggactcccatcaagccccctggcgggtctgtggtaacaggtgctctggggcatgcatgagctgtctcctctgag

SEQ ID NO: 415 - DNA, 201 bp, Bos taurus
ttactctttccagtatatcctatagtaggccccacaatagcctctctgaggcagaaactaataagtattcactgaatcacaataacaacaataatatctatatctgcccgtgttcactagaggccaaaagcagtttgagtgctttcaacgcacggtctcattttgtgttgttttagtcagagtcgtgtccagttcttttga

SEQ ID NO: 416 - DNA, 201 bp, Bos taurus
gaataatattcatagtttatggactgtagttaagggacattttaggagttgacttttccttcaaaaataaaaataaaaactgaagagggtataaatcccttttcctgcccttgtgcaggtcttagagttcaccttgcctattttcaaacagaaaacagtaatagggtgcagagctggaacctaaggagtgaagggtttagt

SEQ ID NO: 417 - DNA, 201 bp, Bos taurus
atcaatttccttatttatagtttgtgaaaatattaaattctgtaagtcttattttcataattaagcacagccatgcattatattggtcccattagacttcaggcaacaaaataagaacacagtaatgaatgaaggataccacaaaataaaacttttctccttttttccttcaattcagttatgaacacttctgcagtgcat

SEQ ID NO: 418 - DNA, 201 bp, Bos taurus
atagagtagccttgtttgatgttgtttttctgtgaaattgttcatgttcaacaggagagcaccatggcctgcctaactgttagtacagggcaagctccagtagacagctgttagaggctgctattttttttatcttttggcaatttattacttttaaagtagcttttggtaagcaggcctggttcaatatttagacaagag

SEQ ID NO: 419 - DNA, 201 bp, Bos taurus
gcctggcaggctacagtccatggggtcgtagagtcggacacgacagagactaaaccaccaagcttcatgaaggggaaacattaaaggcattgttcctgctcacaaaggagtttagaacttacttgggaagaccaaagggcaataatcattcttcagtaattttgaataagtgctaaactgtggtgttggcttagaatttaa

SEQ ID NO: 420 - DNA, 201 bp, Bos taurus
tatatgagattgtacatggagattgtatataaatgaagtagcaaacttgtagacaatgaaccagttttgactcatgggtatgttttgtttgcccatcaaaatatttaagtatattctgaattattagtttccagtatttaagaactagtagaatagagatgaaaaattgaatttccagcttttcatgaaaacaattcctaa

SEQ ID NO: 421 - DNA, 201 bp, Bos taurus
aaggagataaaattttacagcctcttatatgcctatagagagttgaagccaaaggtagtatgatctaggtcagaaaaattacatgtttcttaagtgttatcgctataataattctgtgttaaaatatttttcctttggaatatagaatgatatatcaactttcttcctcctctacttgtttttaattgttatttcattagg

SEQ ID NO: 422 - DNA, 201 bp, Bos taurus
cagttttaatcttttgttgttggccaaatcttttcctcttcttttcccctaatttgtgcttctgcctcaggcaacatcatgcactaaagaaatgtctttactcccaggtggaaggtggctggcctctcacaactgctgaagccagtagaagttgaactgcttaatgtagacccttcctggcccctgtttcccaacctaact

SEQ ID NO: 423 - DNA, 201 bp, Bos taurus
ctttacatataataataaaccttcaagagtttgttaatgataataatatccatcaggataataatgaatttgggaaggccttccatatcaggagtttgggcttattagataggtcttggaaacaacattttaatttggcagcagattagaaggaggagaagcaaacagggattgaaaaactagttggtggccattttgaaa

SEQ ID NO: 424 - DNA, 201 bp, Bos taurus
ctcattcactctgcctcttactgatttttgacatctttaaatctcttgaaaaaaagatactctgttcattcatcagcacctctatcatttgttcatgaaggcatggcccagttctcttttctctgtttatattctcctgagccgtttgttctcaaccttgtctaaaaagttcagtttcataccatggaatttctctgaagt

SEQ ID NO: 425 - DNA, 201 bp, Bos taurus
tactggagaaggaggtgggctcctaaggggctggggctgtatatgaccatggttaagagcttggagtctgaaatcagacatttatgcatctaattataatgaagtatgatcagtcttccaagactggaactccaagatacaagatataaaaaactgtaacaggtggacctacctaatctgagagaccctgaagagtcctct

SEQ ID NO: 426 - DNA, 201 bp, Bos taurus
gaggataactcagcagctctggttgcaaagcaaatgaaccaggcagtaaggagtgagggatccccatcccccacaagcctgggacaaaaaccagagcagccaacttccaccagggcagcaatgagagcactaaaggggtcaccacacagacagcaggtgactgaggcgcccaggtgctgtgtctctatgcacatgtggcca

SEQ ID NO: 427 - DNA, 201 bp, Bos taurus
gacgccatcccttagaaccataatcgctcactggacagttgggagccacttaggttcttaatctgagcagcagtagggtcagacctatattacgtaaactgttgatttgaagactgtagcactgaactgtaggattgattacagagggttaagagtgctagcaggagaccagaaaggatgcagtgaccactgcatggtcat

SEQ ID NO: 428 - DNA, 201 bp, Bos taurus
aatttatttaagcccttgtttttcaggtctcaggtatcattaaccaagcaccattcctattccacacaattggatttctcatgcctacaacccacatgcccaagacaatcaggaatttctctttctaatatgtttaggtggtctggatttctccactggcagtgtgtagtggaggccatgccaccttcctgaggcttgcag

SEQ ID NO: 429 - DNA, 201 bp, Bos taurus
agaaccatgtcattctctctgagaaccatggtaaagccacagtgatcctggatgggtcagaaagaatgtgtgtggccaagaaaacctatgccactgtccctagaaggggatctgaatcttgagaagagaatcctgggttgtaaccaagaagaggcccaagcccggcacttagaggacctgcgcagggccagacctctggac

SEQ ID NO: 430 - DNA, 201 bp, Bos taurus
aaagtggaattaccacgtggagaagcagaaatgcttttaagatacttgattaattgtgccaaatagcttttcaaaagaattgtactggcttaagtctttgccagcactatatgacagtcaggtgtcatattttaagagattcactaacagtgtttttcaattttttttaaaacctgtgatacaaaaatcaagattggtgtt

SEQ ID NO: 431 - DNA, 201 bp, Bos taurus
tttaccaggtttcccccacatcctggttcgtgggtcgcagtgttcccacctttcctgctgccctgcacttcttccctgggcctctccattggctgctcatggcttacggcagccaaatgcagaaggatgaggaggatggtccagccttcctagttctccagatgactctcagaagcccaggagagaagggccaaatgctgc

SEQ ID NO: 432 - DNA, 201 bp, Bos taurus
tgatagtaattttcaatccgtgtgccctttggccaggaaattctacttcaaggaatctgtcctacctaaatattcatatatgacagtctttacaacatcagtggttgtaatggcctgaaaagggaagataaacatccattagtagaaagtgattcaatcacttacagtaatccatattaccatatgccactgtgaaaaaga

SEQ ID NO: 433 - DNA, 201 bp, Bos taurus
ataacatacttatgagctgagagaacagagccagtagagaggaagcatatgaaaaacagatgaatagctacaggctggggaaacatggggcagaggtttaaagagagacaaaagtgggagtcagtgggggcagggtggacaggagatgggattaagggtggggcagggaagaaagggctgaagtaaagagttcaaatgttt

SEQ ID NO: 434 - DNA, 201 bp, Bos taurus
ggtcacaagtcacctctggggcttttccccctaatatggattggcagccgcctttccctttgctggctaaagtccccagccctcccagggaaacctcctcattgttgtccagcaggccactctctcctgtctccaggacctgctggaagcctgtccacatccatctcagccaactccaggatccgcaatgcccgggagtct

SEQ ID NO: 435 - DNA, 201 bp, Bos taurus
tggccattttgggcactaaaaagaagagatacaacatactgaaaaacaccaaatatgctaaaattcatgaggtcacaatgataagaagcaaagaccttcactgtccctttgacatggcctgatctatgctgtttggaggaaggggtgaatgtgtgtgtgtgtgtgtgtgtgtgtgtgtgtgtgtgtgtatgtatctgagtg

SEQ ID NO: 436 - DNA, 201 bp, Bos taurus
acatgggcccaggccttgaggcagggctgaacctctctccatccctgccttgcagcctaatagtgctggcaggctgccttgggacctagcacccactatacaggctgcatgagaagtctgagggccaactgggtcctgggcacctgactccctcagcaatgacagctgagcagggtttggggacatggccttgaaggagca

SEQ ID NO: 437 - DNA, 201 bp, Bos taurus
tttataaggccacaagtcatagtggattacagcccacccaactccagtctgacctcaactaattctaccttcattgacactatttctttaaaaaaaaagtcacattctcaggtactggccattaaggttgcaacatacctttttggaagaacagaactcaacccataacagccccctaacatagaattatccagcccaaaa

SEQ ID NO: 438 - DNA, 201 bp, Bos taurus
attgctcaagagctgattggaaagacagaatcccagacttaggaatctgaacctcattttatcttcaagtaaattatgtgcactttaaagtttgagaagcggtattcttggccacagctgtaccttttcaaggccttattacagaaggggaaaactgatggagaaccttgtctggactcaaggtttcaccctatagcttgt

SEQ ID NO: 439 - DNA, 201 bp, Bos taurus
atgtcacctgagaccaaggacagtcccagcagctgtgttgcctggtcagctcatcacaggctaacaccaccaccactgtgactcacttcccttctctcctgctgtctgctctctgctttcacttctgctctgcaaaaagctacccagaaccctgtctctatggtccacgttcccagaaaatccacccagcatgttgcccct

SEQ ID NO: 440 - DNA, 201 bp, Bos taurus
tgaccttctcacacgcagggaccacatcagagcatggcaagtgtgaaagggagtctcagatatgccctgtgggagggtgggggagggcctggcacatcgacctctaggaacctgagaaaagctgacaccccacccaacagccttagaggacatgggttgggccacccaaaggcaggctgccttgttcaactcagcttgtcc

SEQ ID NO: 441 - DNA, 201 bp, Bos taurus
atgtcccaggattcatgattatggcactcagccacactcaccctgttaaggggcagtctagaaagccccaaactcagctttgagactactcaggccctggagaaagttcacccccaaaggggatgggaagctgcattcccacgcaggtatcacaggaggttcattagccaagactaaggccataagcacagacagagccca

SEQ ID NO: 442 - DNA, 201 bp, Bos taurus
gtctttgcagctgaaatgagagagcaacaacttttctctaaaagttttgagctctcccttccacatgctgggcagttcgtgctcctgtggccatctccagctgggatcatttgagactctgttaatgtatctgagagcacatgcctggtctcagagtggagagatgctgagaggagttgtcaaaaagagcagttcttagag

SEQ ID NO: 443 - DNA, 201 bp, Bos taurus
tgaacagccataagctttaaatgctatacattttctcaagttttgtaaattaggccagctgaacttctttctgctccacacttatttctcccaccattagttgtaacaacacatcttggtgcagttcacactgcacttatattgaaatatgttttctcaggtactttttaaaaaaagctttgaaatttaatttacatacca

SEQ ID NO: 444 - DNA, 201 bp, Bos taurus
gtcattctcaaatatataattccataatgcttttttgtggtgtaccaattttgagaccagaattcaacaaggcagttagaaaaaacctgttatgatggttgaaccatttatgaattcattgcctttactgccccacttctgttactggaacatgtctcttaccagttggcttaatattaggctttgtcagcagagggagct

SEQ ID NO: 445 - DNA, 201 bp, Bos taurus
agcctaagatgaggctggccaccagagcaggtggtctgaagacccccactgcgtcctccccagtcctcaagtcccagtgctccaggcccctcaaccctacgctcctgggggcaggaggcagccactcctgagaacagctcaaagaactgccctgtgtggtcagggctgggggagacccaggggcccctcccctgaagaagt

SEQ ID NO: 446 - DNA, 201 bp, Bos taurus
ggcacatgttactacacgaatgaaccttaatgacatcatgttaagcgaaataagccaatcacaaaaagacaaagacacgaggtacctggggtgatcagtacgtggagacagacagtaggaaagtgctgcaggtgtgggtgtggagagctgttattcaacgggtagggtttccgctttgtaggatgaagagagtcctggagt

SEQ ID NO: 447 - DNA, 201 bp, Bos taurus
agaatcacaagggggacactcaacaggccccacaagagaaacacatagaaaacagtcatgtttcttaactactttgcaattccagctactaggaaatccaggaggccccactatagtctttaactaaacctcactccttttccaggcaataatttcagttgggtttctactgcaagcagctatggaacagagaagccttga

SEQ ID NO: 448 - DNA, 201 bp, Bos taurus
ggggcccaccttctcaaaatctctaaggtaagaaagcccgagtagcctcggttaacacgattgggagaccatacaaataccttaccttctcgactcatccagcaggtagtccgagggccactgcctcccgccctcctgcccgccctcgcgttctcccatcctcctcgccaccctcccccccaccacctcccacccccgcct

SEQ ID NO: 449 - DNA, 201 bp, Bos taurus
atgtgaggagtatgccctaggtctgcctccctcagctgtgtgatcctacattacttgcttaaatcccctaagcctcatgtttctcacctataaaatgggggtagtaatacctgcctgcctacctcagaagagatgtctgtagtatataaaaatcagtaattgttaccatgaaacacaatagcattaaacaatattacttgt

SEQ ID NO: 450 - DNA, 201 bp, Bos taurus
gcttaacacaccctcctggcctagcgccatcctcctggtggcccctcaattccacctttcctgtctctcctccctttgttacttctcaggcacccagtctactggctctcaactaatgcaggccagtttcctgagagaatacatgcttcccttaggaagacatcccagaatggggagagtgtgggctaaagagggaaaatt

SEQ ID NO: 451 - DNA, 201 bp, Bos taurus
tctttgcgtctcgggcctcccaggcctcctctcaaatgaagatttaacccctactgccctgggagaggtgaggatcaagtgccacctcgtgtactgcaggcagccctgtgctgctgtggccgttgttgtgtgtccggtctcacaacactcttctactctgctgacttctgggaactcagccctggcgggccctgtagccat

SEQ ID NO: 452 - DNA, 201 bp, Bos taurus
ggatgagttgactgcatctccaggcatttttcagatttcattttctagtggccagaccctctccctgtcacactgttgggcagggaggtggaacgtctgactgcaatgcagaacatgtatagtggcctccaggcgatgctggagccagtgccaggcccctagacttgctgagggtcctcacttcgtgaccagaccctttaa

SEQ ID NO: 453 - DNA, 201 bp, Bos taurus
ctgttccctcagcctagcatgctctccctccatcccgctcttctgtttgccctgcttatcctttgaggcccccatttccagagagcccctgagggcctccgtggtcccagctgtaactcccactcctcagcactagctgccctgagttatgagcaacagctcataactcagcggccagatgcttcctgtgtgtgtgtcccc

SEQ ID NO: 454 - DNA, 201 bp, Bos taurus
actgctgttagctcacagagaaaagaattggggagaggttcaccactgcctcaaggcctgggccgaaatgtcaccaagaaaggaaaagttaggccccgtgggaataccttggtttccatgcaaccttatgtgcagacacgggcagatccctgcaggggtaggcatctacagtggccagatgagagacctgtagttaatgca

SEQ ID NO: 455 - DNA, 201 bp, Bos taurus
gatgctctaggttgtcacggccgagtgcttcagccaagagagatggaaatgtccgaggaggacagacacaggtggcgatagtaatgtggcttctgcagggcggccttgcaggtaaccacccatgtttgggtttccaaggtggcaccagtactagagatcctgcctgccaatgcagaagacccaagacatgcaggtttgatc

SEQ ID NO: 456 - DNA, 201 bp, Bos taurus
cggcctcctgggcttcagaaaagagcctccaccctcgggagtacctgagacagtggtgagcagccaggaagtttgccaacagggaggcccagagactgttcttgttcatccaaaatcagtgggaagcatagagtaagggctgtctgctttattgggaaggcaaggtgctggttggccaggaggcaggatggtctcgtcatc

SEQ ID NO: 457 - DNA, 201 bp, Bos taurus
tgccttctctttttcctttttaagtagttaacttcatttttcccaggctatcaaagtaatatgtaaccttaacataattttttttaattttagaaaaatacgttttatgctaattactcaaagtatcactcctcagagacagtcactattcacattttagcctatttctcttcagtcttttttcttagcatttcccccttt

SEQ ID NO: 458 - DNA, 201 bp, Bos taurus
gaaggaattccagtgtttgatggagacaggtgtgaggctggatcatgccctttaagatcccttctccctcacatggcctgtgattactctaccttgccccaggttgacctgggcaaatatgggtgtaacccactgcccagactctggcctccggagacactggccatggccttgttgagctgctttgaacaaaaaggaaga

SEQ ID NO: 459 - DNA, 201 bp, Bos taurus
gggcctgatggattcccctggggtcctaaagatgccaaacctgtaaccttggatggattttggctccaacaaggatctgtccgtggtaagagttcagggtcgttttgtaatcttcagaggcctggcctagactctctcctgctgtcctgtgacgctggtgacattccaggaatgctcaggccacgtgaggggaggaacctc

SEQ ID NO: 460 - DNA, 201 bp, Bos taurus
ctacagacagaaggccagggaagagatgaggaaggtcagtacagatcctgcaccttctagcagagcctctggaagtaaaggtctgagcctcaaattggacctcgaaaagggcctgggggcgaccccggggatccaggcagccgcaagcttggaccagtttccctaccgcctcagccgcacatctggccagagcccagctgg

SEQ ID NO: 461 - DNA, 201 bp, Bos taurus
ttctttctgacacatatgaagtgtcagtgagaaggtactgccttgagcaagtaaccataggacgggctggcctgtaggtcaactggaactaggactcaaaaccctcagagttgctcctgtaaccttggaggttactcctccatccctccattgcagccagagctccaggaccccagccccatccaggccccaagaccaaaa

SEQ ID NO: 462 - DNA, 201 bp, Bos taurus
gattatagtccatggggtcacaaagagtcggacacgactgatgaactgatgaacacacacacacacacacacagatggtatttatatactttccttttagatatcagccttggggaacaaaccttctaacacttgggggttggaaacttctggtctcttccaaagagttcctcacttgtcctgccttgtagtactcgacag

SEQ ID NO: 463 - DNA, 201 bp, Bos taurus
gttctgctgattaaatctcctagttgcctgctaatcctgtctcaaagagggtcagtcccagagtttgaacaaacaaaactcataggccacaggggtggtttagatcatttttaaaatgaagcttgggatccagactggaattcttggatctgtcatttgaaaaattccctaaactcctaagagttggccaaacatctcttg

SEQ ID NO: 464 - DNA, 201 bp, Bos taurus
tgtataaaatgctatgggaatagtccccaaatcaaagtcagtggactcgagggcagtgaaggccaccaagcctgggacatataaagcattaggaaaatactagagtgtaatagagtaaataatatactagagtaaataaatgatagagtaaatagagtaaatattatataatagactgaagagacaacatttaaaaaatct

SEQ ID NO: 465 - DNA, 201 bp, Bos taurus
aaacataatttccattagaatgtttactccaagaaggagaggctccttttttgtccagttttgtaactgccatatgcttgccttttaaactagtttctggaataataatagatgctcaataaatatttgttgaacaagcaattggctttaatgaccacttgtgtcctaataattccctatttggcacctctctgccaaaaa

SEQ ID NO: 466 - DNA, 201 bp, Bos taurus
tggcaggtgggttgtttactactgagccacctgggaagccctgaagtagaaaaagccttgacttattctaagatgagttagaagggcaatgtgtcaagagtaagatgagggaaaacggtaggaaaggatattgcttttatattgtaggctgtggcaagtattttggaatttattttgagggttatgcaaagtcatagaagg

SEQ ID NO: 467 - DNA, 201 bp, Bos taurus
aatgtcatcttaacccactccctcagcagtctgagcttctgtgtatgcatatataaatcaggtatataataatactaatgatagttattagctgatggccatgaggattgaatgggagtcatgctcttcataatagttttcattttttaaaaataaagcctgtcatgatctttaattaaaaaattaaatcttataccagag

SEQ ID NO: 468 - DNA, 201 bp, Bos taurus
cgttgatgaaatagtaaatttcaggagtaaacaaaaataattacgatcttaaggcagaagctactaaaatctgttattttatatccagttagtatggcctgttattgtataaagggaagatatgtgcaaaatactagagttatctctgcacagtaaataactcatattaggggaaaatgaaattcttcatattgttgtgca

SEQ ID NO: 469 - DNA, 201 bp, Bos taurus
ggcagggtacagtggccactcccatacagatgtgagccagggcccgggggctgtgtctgggttgcagagtcaggggtgtcaagggcagtgatagccttagtcgcagggtaacggtggggctggggccccaggcctcctgcagctcctcctgcccagacacaatgacttcacttggaggcacatcaacccagttagaaactc

SEQ ID NO: 470 - DNA, 201 bp, Bos taurus
tattttagtgggctagcccattgtcatgaggaaatgtaaaataatagatctgatctagtcttcagtagtcttttctgagcatgtgacatttgtagtatcagtaggagtcaaaccattgtgttgttaaaagtgagagaaagaatacttcaagaagaagaaaaagcaaatccaaaggtcctgaagtaggttggagcaaaacct

SEQ ID NO: 471 - DNA, 201 bp, Bos taurus
aggatgcccctccctcacctgtgttttaatactttgctgaaacccttcatggagtttgggtctttgaggcacatgaggcctctgctctccttgcttggtctttcaatgtaccttgctctgctccaaactctgatgtttcagcattgtttggcctcactgtgtggtgacagttggaattaataagaaagaaagaacctaact

SEQ ID NO: 472 - DNA, 201 bp, Bos taurus
aatgagttaaacgccagagttgagcaatggaaaaatctcgcatttatagatggaaagtgtttgttgaaacccttgagaaagaatatactagaattaaccattcatatcttggttagaaaccaaaagacctaagagtaatataaacgcatacataagaaagtgagtttcaagttcgtttcaggtcactaacatgtacaggga

SEQ ID NO: 473 - DNA, 201 bp, Bos taurus
gttcaatattaatttagaggagatgcttgattattgtgtcaggggagggatctgggccaaagaagagacaacagctggtactatttctaatctaactacgaaaaatagactatttttaagaggaagagattgagacacctttatttgtcaaggtcaagtgctgaaaaaatttgtcagttgccatagaggttgatagtatgc

SEQ ID NO: 474 - DNA, 201 bp, Bos taurus
ttttttaacatctaaaccacgagggaagccctgaaagcaagcacaactatatccaaataactaaaataagttatgtttaacagagtaaagaaagctgagacggcaatatctcatctaatggtgaataccaataaagagatagaaatcataaaaaaaagaatcaaatgaaaactgttgaaatttccagagtattttcaaata

SEQ ID NO: 475 - DNA, 201 bp, Bos taurus
gaaccagtccctccagatagggtcaaggaaagttaaacaaagtgctactatttttagccaaatatgactattaaaaaacagagtaggtaaagtctgtgccgattaaaggaaaatactgaaggaaagcttctatttaatacatttagttctttagttctgtattttgtgttgtaagagacataaagaaattgcaaataaagc

SEQ ID NO: 476 - DNA, 201 bp, Bos taurus
cggcgccgtcaccgcgggtcctgatgctcgggccagtgggatgcgcagcgaaccctcattcgcgcggattttgaagccgcgttgcacacccggagcgcggcgggcccgccgtgaacccgccgtgaatacactgcccggaaccccgagccgttgatcctgggtctggggagcaggtcgccgagagtgccagtgactttggct

SEQ ID NO: 477 - DNA, 201 bp, Bos taurus
gaacaaaaatggcttttgaatttttttatactagagttctgaacttttaatttttatattttattttctttttcttactattctagggcctaaaagaacataagacaggtatttataaggatgaggaagcaagattaaaataaacttaataaatgtcatctttcccttctagtccatttacatatcatgaatttatttgct

SEQ ID NO: 478 - DNA, 201 bp, Bos taurus
ttaaaaatgtggtccctcttagacacccagaaacacctcctagttcttaagctttatttttgtgttacttattgttcaatgagaataattaagaagttaataatatcagagacattttagtatgtgttcataaaattatatttggtataaatattcagtcagtttctaatttatcaattggctggtatattaatgatatga

SEQ ID NO: 479 - DNA, 201 bp, Bos taurus
tggaggctgcttcctaacagcatttaagattttctaattctttccactccttttgctacttttctggctcaaatcagcagtgtattttgactaatctgctatgatagcctccctcctggtcctcatgttctgatcaggttttattctgtagagcagacaggacagttttcaaaaaatgggacttctgtttatagacatact

SEQ ID NO: 480 - DNA, 201 bp, Bos taurus
aaggagagagctcaggtctggcatggggattggcataagagaaagcaacctttcagaaatcatactccatctaaggaccaaattcagacatgggattctccgtggctatctgagtggacagatgactgaatatacgtgaggccccccaaacacaagctaaatatcagacaaagaaatggaaaagcctgagtggactgagac

SEQ ID NO: 481 - DNA, 201 bp, Bos taurus
accttcacccacataggctggccccagcctacctctcgagctgctgcctcctatccgcgaccacagcttcaggcagaatagcagagccctgtcttcaggcaagcaaagcaggctggcctctgtgttcttagctccgctgctccactgcctctccggaaagtctgctctcttccccactgaaccatctgcctggtcatttgc

SEQ ID NO: 482 - DNA, 201 bp, Bos taurus
aaatagtgagaaaactgaagtaagaaatcaagcttatttctccttctataggaattcaaggctgggtgtcttctgtgtcatcattcaggaacctctgcttctatcttgtacctctcccagtctctgtggtctcaaagtcctctcacttcagccagcatagaggaaaaaagagggaatgtggaattatgcaatgcctttttg

SEQ ID NO: 483 - DNA, 201 bp, Bos taurus
tcctggatctttaagaatttgccttctcgaacagattcatttcaggagctttctcttcattaaaactgttagatctgaaatggaagctaggaactgggctatggggaagaagggattttcaccagctccctgggaagtccctctggtttctacattccatctctcagttcattttatgaagctcttaatacagctggtcct

SEQ ID NO: 484 - DNA, 201 bp, Bos taurus
tgtccagaaccaggacagctctggcagccaggccataggttccttcttctacttccaaacctggatgcagtgcaaacccatggggtatggaacctggcttccccaaggatgaagtacaagagggtgtctctgtaatgagaagtttgagtgacaggtggttgtaaggaactgattaattcctctcccctcctccttccagag

SEQ ID NO: 485 - DNA, 201 bp, Bos taurus
tggttgcatgaagaatgctgtttgtacactgacactgcaagtaccaataacaggaactggaaagaatcaaaattaaaaatttttcacttgagatacacagaggtagagagagtagtgagggtagagagagtaaccacgattctccaggttttacttaatcctcttttgcctagattatcatctgtataaactacatttagt

SEQ ID NO: 486 - DNA, 201 bp, Bos taurus
ggattgaacccgcatctcctgcactggcagatagattctttaccaccaagccaccatgaactgcatcctcccaaaattcatgttgaagcccaaactcacaatggaacggtacttgcagatggggcccttgggagacaattggttttagatgacttaaagaggctggggtcctcgctgtgagattagtatctttataaaagc

SEQ ID NO: 487 - DNA, 201 bp, Bos taurus
attgtaaatgtactttctcactcagtgctaccaaaaagagcaaaatgaaccctataattaaggctacttcttttagattttaagtatatgaagattgaaagaaatcctgcaagctcacataaaacttcttcatttccatgttcttatttgaatcttgtaactaaagcccagaggagacaattctcttcttttaacaagtta

SEQ ID NO: 488 - DNA, 201 bp, Bos taurus
actctacacaaacagactatgtaccgttgaacaacacataatacacagctggacttatggtaaaagaagaaaagttagaaatgatagctgctgataacagcgagaaaactaacattaagaatacatctcctcatgatagtaagatttcacattttataggtccctgatgaagaaagtctcagacaaactgtcctatcttct

SEQ ID NO: 489 - DNA, 201 bp, Bos taurus
ttatagtatttgactgagaaaggccctccagaggaaaagagatcagacttgctctgtgtcaactcagaaagcaataggcttaagaaggcagaatccaatatgagagatatattttcagcgtatgattcaccgaacaaacaaacaggctccagggagtcatgaaacacttatcaccttggctgtatgagcattaatacagga

SEQ ID NO: 490 - DNA, 201 bp, Bos taurus
aactgtgggattctgtcatccgaataccttctacactagtaattctaacaaagtcagcaactccccaaagagtcttcaaaaatagattgtctgtgtagacaagaaagctagacgtccaaggagagaaggaaaaataccttctttaagtaaaagaaatcatatagccaaagagaattcaagtataacgcgatttcacattaa

SEQ ID NO: 491 - DNA, 201 bp, Bos taurus
tcccaccactctgttcctgctggcctttcaaacttaggccttcttccctacatctgttggcatacgcctaacaggttcatctctatctgtcttttttccatttaggcaactcatatttggccctaaaggctctctttaggcaccactccttctggtagcttccctgaggttgaaccacttcagtgcaaccaaaacatagcc

SEQ ID NO: 492 - DNA, 201 bp, Bos taurus
gaatggaccttctgatactgaactcagggttgtgttgatttacccatcttgccaccggcagtgctggacaagagtggcctcctacaagtccaaggccttggctgccatgtttacactggagaagagcaatcgagaacatatactctgagggcagactgcaaagagagagaattggaaaaacgcacaggccacgaccccact

SEQ ID NO: 493 - DNA, 201 bp, Bos taurus
gacatgactgagcatatatgcacaacacatttttaaggcctacataatgtaacgctgtataaatgaatacgtcatgtttttcaaaaagccaatttcttttcgttggctatttgattttttcaaattactttggttgtgaaaaacatggtaagcatttttgtaaatgaatctgtgcacataacaattattacttccttacag

SEQ ID NO: 494 - DNA, 201 bp, Bos taurus
caaaagatggcaagggtaactcatgatccatacctcatggaggtgcctgtggattagtcacacccaggctacaataagcattcagctccctagagttgggcgcaaccattaagtatttataaaaaacacctgagtattacaaaaggcgctgctttccaattctcaggtggaaggaccctccttccatgcagtggggagaat

SEQ ID NO: 495 - DNA, 201 bp, Bos taurus
cacacaggagagaaaccttaccatgtgcgtgagccccttgtggccactggctggcctgggaggggcggggaggtggggttggggccacagggctgttcgcgtcaatctcaggcatgcagtgggaggaccactgaactcgcatggtcctaagaccagatttcactctgattttcaaagacagccagcttgaggttggcctga

SEQ ID NO: 496 - DNA, 201 bp, Bos taurus
gtggcctgctgtccatagggtcgcatagagttggacacgactgaaatgacttagcatccatgcatgctagggtaatcagtaaggaattaatgtctcctgagtctgagaggccctttgcctcagttgcttgggtaaatttgagagtcctgagaggtttcattgctgcttatttttctatttgagaacccacatgactgagtt

SEQ ID NO: 497 - DNA, 201 bp, Bos taurus
gtctcgtactgccctctctccatcttccctggaaacatacacagctgcgatgctttctgtaaggatagtggtgtcccagaaggtttaacagagccacctctccaggttctggctggggcggggcaagcccacacattctcagggggctgactgtgtaggaagcagattttaacaaacaggccccaggtggggaggagaggg

SEQ ID NO: 498 - DNA, 201 bp, Bos taurus
agaaacaacagtcctccaggttcctcagggatagttggtgcccagaagtcaaagagcttctgacactgggaatcacctccttattctcagcacctgtcagaacaggccttctctcagcctgtcagacttattcatccaaatgtccctaatggctgaagagaatgaatatggacaccccacatggaaatgggaataggtgtg

SEQ ID NO: 499 - DNA, 201 bp, Bos taurus
tggggaaagtgaaccaggccaggaagaattactgcctgcaaacacagctgagcttgtggctatctgggagcctgccaataaggaacctcctccaggaaactggagcaaagtgcccccagggccagagaacaatgaaactgcttacctgcctgcctcatttacatgaaggaggcccctactctccatctctctctggccagc

SEQ ID NO: 500 - DNA, 201 bp, Bos taurus
gttttcaataaactttactttgaatgaataactgccttttcagcccaagagccaactccaacccagaaattgtcttggtgaatgggaggaataatccattcatcactgagtaagacagaataatattactcacacaccatatcttccaccttcctgatcctacccatcctcaagggacagctcaaagcccatctgctccag

SEQ ID NO: 501 - DNA, 201 bp, Bos taurus
cacttagaacaatacatggcatcataagcacgggtaagtgatggctattatcaacctatgagtgcatcataaattattcagccattttactgcagttggacattaggtcattttcaattttcccactattataaatagttctgcaacaaaccatttacagcatgcatgacaggaagaaaagtggattgaaagtccattgtg

SEQ ID NO: 502 - DNA, 201 bp, Bos taurus
gatgcactatgtttattagggaccaacacctatataaggaagaggggagaagcaggatcaggcgcagggagcagatgaactgtgactcaggcctaatgggaagctctggactcaggacatctgttggtgtctcaggtcgcacacagaggtccggagctttgtaccaccgctttactccatccctggacataggcttccctg

SEQ ID NO: 503 - DNA, 201 bp, Bos taurus
ctggggaaagattttgcatgctaattttgaggactgaggtgagggaacatttctggggtggtgtgaggcagagccagattaagattattaaaggccttgggttccaaatgattttgaagctccaacctgtatgtgattcaaattcaatatatcagaaaataaatactaactaggagagattgggcttctcaggtggtacaa

SEQ ID NO: 504 - DNA, 201 bp, Bos taurus
ccagaaacaatgtgagtgaacgaaatactattcaggtatacatacacatataatagaacaaataaacaaggagtggcaacagagacgaaactcaggatacgacgtagtcaccttggaagggaggtgggggatgggatagggaagtagcatgtaggtagatacaagtcatggtttattgttttattaagttctggggctgag

SEQ ID NO: 505 - DNA, 201 bp, Bos taurus
tgatccagagctgtgatttgacgtgtaagtaggagtgcctattttaattagccctcttgattttattggatgttaaaattagtgttgttctttggacagccgtgtctgtattgtagtggaaagtactcggactcaggaattagtacagaccatgccacttactgtgtgacactgaaggtgtcatctgatctatcgcttggc

SEQ ID NO: 506 - DNA, 201 bp, Bos taurus
gaattcttttaaattagacccaatttaggagtcttgatgttttgatttcagtggttcctccctccagtgcaagtatatcaggtacacttagtaaaccagagtcttttctctccactgccctttcacatcagcatcagcatgtgagcatcattgtgagctgagctgtcctgtctctgaactgcatggtgcttagtgtacact

SEQ ID NO: 507 - DNA, 201 bp, Bos taurus
gtctccacataaaggcaccagtctgcttaggtcctaaggcaatgatcaaggctgtgctcctcgtggggccactgtcatcatgcctggctgtctgtgcaccggctcttgggtcatgattgatggagaatcttccctggcacatttatcaaagggaggccgttcctccattgacagtcacggtcccaagggcagaagctccta

SEQ ID NO: 508 - DNA, 201 bp, Bos taurus
ggttttgaggtggaagaagaaaaaagcatattctggccccaggaggagaccagcatttgaaaaagcacgtgggtttctctagagaccattagcagaggagtcaagcacaggaataggtctggccactatggccagcccaaaccagaggggcccagaaataagtaggtttcagtccagcacgttggactccatgtacctgac

SEQ ID NO: 509 - DNA, 201 bp, Bos taurus
ttgttgttctgtgtcttcacaacacacccctgtgccgtgagtagtattgacccaattctacagaaggggaattcaaggtacagaaagatttagtgcctcctcgaaagccgcatggcatggcgtgatgtggcagcacttccatgtttggcaatttcttatcaaagtaaacatgcctctactctgtgatccagcaatttcaat

SEQ ID NO: 510 - DNA, 201 bp, Bos taurus
cttttgtaagtaaagatttgataggcagaaaaacttattaataagctgtcagatataatgctcaggcctaactgaaacatctagttgggttttatatatagataatagttaatttggggctttgttcatgatttatataacaactcatatcttttgaaggcaaaagagcgtgccaatggaatggagcttgatggacgtagg

SEQ ID NO: 511 - DNA, 201 bp, Bos taurus
atctatgaatgagaatctttgaccaaacctgtgttctgttgcctagacgtgcaaaggcagagaccacctgtaccatctcctgtcccattcaaaagggtgcattttgctgttgcatcaggattttacaaagtgtgctcaatgcctaaggcaaactgcttgcattctctatgggaaggaaaattattgttcttggtcaagtga

SEQ ID NO: 512 - DNA, 201 bp, Bos taurus
cctcttttggagcatgtgtagcagctcagggtttggaatctgcctgatccaaatgggacaagttcctgagtaataacaggccatgaaacagcaactccatggctgacgttatgccctcgtaggactgtcatctccctgagcctctttgcccttctctgaaagtctgacccagagatagtaaatttgactatcatggtggga

SEQ ID NO: 513 - DNA, 201 bp, Bos taurus
atcctcatctagttagtaaaaaggaaaaaaaaaacaacaaaacttttgacgatattatttgtatatatctactcttaagatttttctcccacataggccactacagcataatgaatagagttcccaaacagtaaactctcaaatgcaaagtcaagaggtcttttggcttctaaggtacaatttcattttcatgtgtaaagg

SEQ ID NO: 514 - DNA, 201 bp, Bos taurus
ggggagcagctctcaacagctgtgagataaatggagcttctggagggtacggagtgctggaagacatgggatactaacttctaaggtgaaaaggccttgataaacacctgggtgtccactgagaccaaaagaaaaaagccatgtattaggatcagggatattctagatctggccaaacaaaggttaaaagcaagcctcaaa

SEQ ID NO: 515 - DNA, 201 bp, Bos taurus
ggctaacagaagctaaaagaactttgagaaagggaaacagaacattatcattatttggctgtttgaaaagagaagtagaaaaattaagagggctgattacgagaacagcaacagagaccaggagagtgatactgaaggaatgaacgaggggattggagggggccaagaggaggactcacatataagagataaccaagaggt

SEQ ID NO: 516 - DNA, 201 bp, Bos taurus
cactcctgctccgagaaaggggagggagcggggagaatgaacggcagggggccttgccaaggcccgaggcgacggcaaggcccgagtcctgtctgcccttcgcctcccatttccagccgtgacacttggatggagggaaaccgtgtaccctcccaggggaccctcagacctgacccctactccatatgcattgaggagcgg

SEQ ID NO: 517 - DNA, 201 bp, Bos taurus
gatgctcggtgggtgcggggcagcaccttctgcccaccatccagaaaaggaagaagtagtgtgacctctgaagtttccagcttcggaaacacaagggaagaaggagacatgtagaggataagaccaaacgttgcgggtgtgtctgtgggacctcctaggggtaggacgccctccccccagctcttggcaggtgtgaaggcc

SEQ ID NO: 518 - DNA, 201 bp, Bos taurus
ttggcatcttcaatccatctctcccttccaccccaaccttgtatttaagctccagcgggtcctaccataaaacacccacttctccctcctgcccagccccctctcccatcttcttttaccaccgacactcctccttctgacctgctgccatcaatccggggacccttgtttagtttccttccccgaggcctgtcactttga

SEQ ID NO: 519 - DNA, 201 bp, Bos taurus
gcccaaggtcacagaatcaggtctggtgacttgagggtctgtaacgtcacccaaacccagtgttccagaacttagtacagttgtgaaggccatcgagggaggtcagttagaacactttagagatgtcaaggactataggaatgtaacattcaagaaacagaggcccagaaaggtaaactgtcttgctcaaagtcacagcaa

SEQ ID NO: 520 - DNA, 201 bp, Bos taurus
taggcttggaataaggatagggatctgggacggaatttctcatttaaacagatttctcattaaatggatttctcattttacagatggggcctgttgaaagtcagcgtctcccttctgagaagttcaagaaggttcccaagggtgtggcttgaatgacaaagagggaagaggcaggaaggaaaggttgggcctggcaggggc

SEQ ID NO: 521 - DNA, 201 bp, Bos taurus
aagggcagacccgtgccaacagtgaggggcaaaggttaaaatcccaggcctagaatctaagcaaggaacagagtgaggcgcaacccacatgcaccatcacgcctccaaaagagccacttccacccaggagtgactcagaggctttgggcaccttcccctgtgtgggagcacaggtgcggccagatcaggagaatctcccca

SEQ ID NO: 522 - DNA, 201 bp, Bos taurus
gtggctggcacagcagagcatgaagctggagtgggcagccacagccttggcccttgctgtgatagtgctggaaacggtggccctcattgagaacaggaacgccctggagttccgagtgcacaccatgctgatgctgccttccttcctgctggccctggtgctcaccatcaaggtctgggcccctgaccagcccccattctg

SEQ ID NO: 523 - DNA, 201 bp, Bos taurus
ttcatgggcccacaggagccacacagatggattgaagagatacttcagtatttctttattgtccagtgagagcactgaagactctctgtaatatacaggagccatctcttcacattgtttatggccaaggttgtcattcttagctaacttcataaatctcacagggaggaaagggtagcaaggctaccgtttactcagagt

SEQ ID NO: 524 - DNA, 201 bp, Bos taurus
tttgttccttttccattctatggttatcaccagttcttttttgagtgaggcattatgcatggatgagtaaaatagattccatgatcaaaaccatttgaaatacactgttctaaattctttgaggagattgttaatgctcaccctcacaatccttaaacattgtacaatagtagcaaagtaaccaacatgggactctccctc

SEQ ID NO: 525 - DNA, 201 bp, Bos taurus
tccattgctaagttatagaaactagtctcagaaaaaaatagttttttcagcctgagtattcaaactttggagttttctggtgaccagtcaacatctaaacggaatttgaaaacatttctatggcattggattcaatagagaaaaacctttgaaacatggagagaaatcaacctcattcaggttgagatctacatagactaa

SEQ ID NO: 526 - DNA, 201 bp, Bos taurus
ggtgcgggccacagtggaggtcctctgcgcagtcctgctccctggcctgtcccgtgcaagtgctgcctggaggtgtcgccccatccctggtgaaacccactgagaaacctctgcaagccctgggagactgagcagttttaatcctcttccatgagttaaaaaaggggagcaaaacatgcgtgccttcttcctgaaataagg

SEQ ID NO: 527 - DNA, 201 bp, Bos taurus
tcaatgtcatatttgcttcataaatggcattttgaagttctctttcagtttttaggctcagaaactattcttgtgggattaggactttatagccattgacgatttgaattcccctgtgaaattcccctgtgaatttgggccttgataactgtctctgtttcctctatggacttgagtttgtttaaactttatatttttaat

SEQ ID NO: 528 - DNA, 201 bp, Bos taurus
cacccatctgtgcctctgaggcagcagggacaagcccagtacctccatctctttcttctctgtgaagccgaggcaggtgggggcagtatcacttcccagcgtcgtggccagcctgtaacatctgttactctgacttcaattgcagcggatgaatgcatcagtgacagaaacaggagagaaatccctgtggccgtgggcctg

SEQ ID NO: 529 - DNA, 201 bp, Bos taurus
aaatcagtccacctacttatgaataaataattgtctagctcttttatgacattctgtccaatgttacaaaaaaaatttatttccagtagcaggaaataactgcccagtagtagtgaagagctagttctctgtctcttgttctaaagaaacaattgagtttctgagaacatttcctaattgaaataattgtctcagctattg

SEQ ID NO: 530 - DNA, 201 bp, Bos taurus
aacagattgccaagagtgtggttcatcttttcacacacacaccccgttctcacctccatgttttgcttgttgagttgggttaagatataaagtaatggaccaatctggatggttgcagctgggctgaaagacttgtgatcctcactgcctaaacctataatcagggcttcaaaagcaaccactggaaatgcatctcttctc

SEQ ID NO: 531 - DNA, 201 bp, Bos taurus
accacccacctcttacacacacacacacacacacacacacacatatattccatggcagttttattaagtttgtcttcattattgataaatattttcttctgcctttctacaatgttcagttagaagatcgaccacaagccaaatattaaaaaaaaaaaaaacaacagctatgaacataaaagttttctgagaaagaaagaa

SEQ ID NO: 532 - DNA, 201 bp, Bos taurus
aaaaagaactaaacaaaactattaaacaatttggggagaaaattcttatctagaggatacatttaaaaacaattatttatgaattttataatttgttaagcatttaacacctgtgatatccctaatagaaaaagagaaactaccaacaaggatctactgtataacatatggaattttgcacagtgttatgtggcagcctgg

SEQ ID NO: 533 - DNA, 201 bp, Bos taurus
tgccttcagggagcttgggcctcaaagccctaagacacaaagcaaaagacacaagctgtgagcacaattcctggtgtccagatggtcactgttaatgatagaggctccagagacccaaaggccacagactgaagagttccactccaggccgttccttcatctcttccaattccagggcccttcgctgctttgtctccatcc

SEQ ID NO: 534 - DNA, 201 bp, Bos taurus
ataaatgcataattagtgggacttatattttgatgtatactgaaaacatttcagcatttccagaactttcatactctagtgttctcccctccaaattatatatcagtgatgtctgcaagaccaaaaataatatttggacttgatcaattctgtcaacaaatgaagtatgcaatacttaaatattctgacttcattagagtt

SEQ ID NO: 535 - DNA, 201 bp, Bos taurus
aggacaccatgaatgaagtaagagttctacaatgcactgggagagtaccagatgtctgtttttatgtcaagtgctggaggagaggattccaggaagagagttttgtggaaggagaggccagaataagactgtcctggggccagagcagtaggtaggtgtgaagagagccctggtgcttcctcttcccttcctccatgctac

SEQ ID NO: 536 - DNA, 201 bp, Bos taurus
cttatataattttcctattaaaaatttctagcctggacttactcataaagaaataggcagacccaactgagagatattctggaaaacaactggcagatattttccaaaagcatctatggcacgaaagaaaaagaaagatcaaggaactactacaaattaaaggagacaacagaagcataacaactaaagggcaatgcataa

SEQ ID NO: 537 - DNA, 201 bp, Bos taurus
ctggaagtattcttttctgtgtgttgtattaccgttttgacaggaaaaccctagaaaaggatgctttgctggcacactaccctcttaaggaaaagcccacgggcctagccctggcctttgtgagcaagggagtcctttaaaatgcacataaaattccaaatttatggacatttctaagtgctccatattgctatggatgga

SEQ ID NO: 538 - DNA, 201 bp, Bos taurus
gtatatatatatatatgtttttacattcttcagataaatatacatatatatgcaaacataaacatttctgttatgtttggccatattaatatattattaagtaatgatcttttgtaagtttgtccacgttgcatcgtctctgtatctttcaagttaacctaccttactgttccaacagatgttttacctatttgcttatgg

SEQ ID NO: 539 - DNA, 201 bp, Bos taurus
gggggcaggtctacgcactaggagcaattaggtccctgtcccaagctccagctggatgtgctcccttgctctcactcaggttagggcctgcagaaggcctggttttatagggaagcctttacagaaggagggagttggttttctgagggctttctgcagaccactagaaaatggcctggctgcagactgttcacactgctt

SEQ ID NO: 540 - DNA, 201 bp, Bos taurus
tttttccagtacaggcaagattctcttagaaaggaaagtgtacagttgtttatttccactgatattagaataataggaagtggctttcacactgcagcacagaagatttaaattaggatgattgaaaaaaaaacttataagtaatgtgaactgtaaaacattgcaaatgattactaattaatactatgcaacatttgtaga

SEQ ID NO: 541 - DNA, 201 bp, Bos taurus
ccctcccaccctatactttaaccatgtgagagtatttatgcatccccacttatctttttaggcctgactcaaatgaagcctcttaggtaatgcttttaattatttctcttgggtagatttcatcatctttttgctcccatggtacattgtccacaccacagttattacgttgcatattctagttattttgtatctccatga

SEQ ID NO: 542 - DNA, 201 bp, Bos taurus
gcagttttggtatcgcgaaattgagcgagattacggaagccgggaggattggggcaacattttccggagtttagggccggttgtggcgctgaggtagtgaagtgtgtaacaagttttcgttttaaaatttctgtggtgttattacattgaaatggcccaagctctgatctgtggtaaataataattcatccttgtgtttag

SEQ ID NO: 543 - DNA, 201 bp, Bos taurus
tttcaattcatttaacaaacatttactaagtgtatacagtgttctagaatgtaccatgtgctgggacacaacggtaaacaaaacagtttttgtcctaaatgctcattgtgtaggatttacataacagcctcagaaagtccagatactttcagcaattgaaggagaaaattatttctgaaaatatacatgtctctatagtat

SEQ ID NO: 544 - DNA, 201 bp, Bos taurus
ggaactcaaaagtaacaaaataccccactgaaacctcaaagttaaaaacaccaccaaaaattaaactgctacttttggacatatcatttatataagagacaagggaaagaaagccagcttttgctcctttatatatgtcttcagacatcactttaaaaataaaaaagggattttaaaaacagagaaaagaaaatccatata

SEQ ID NO: 545 - DNA, 201 bp, Bos taurus
ctatttcagtttcaggaatcctactctttcctcacatgtgccattacttggatattaaagtaaaaaagacagaattttcagtggtagaatttaatgttcaggactcttactctacagctgcaagcaggaagcaattatttttatcttgattacttaaatattttgagattcatcctgttccttgaagactttaaagttttg

SEQ ID NO: 546 - DNA, 201 bp, Bos taurus
tgtcagatatgttacatggaacagcacagattcattataagaaaactgttgtcttacagcgtgtttactgccgcttattggtaaagggatagttaaggcagtttcaattcatcctggctaaaaccaaatcatttatcttctgccacttttcccctccaaattgtcttcttccacaccaaaaagtagcccagttcctttgtg

SEQ ID NO: 547 - DNA, 201 bp, Bos taurus
ggcctctctgtaccatgggccaaaccaaaggttaatagtccacagatagtctaccagggtcaacctttaagggacagagcgggcagacataggagtaaagcggatctggaagggccaaggagaggtatccagtacacagaggtacaccatttttttcatacattaaacaacattatatttcatggaatttgggaagaaatt

SEQ ID NO: 548 - DNA, 201 bp, Bos taurus
acgtactatgctgccttgggttgctttgcagcaactcttgggcttcccacttatataggtcagtgccaacaccatgttatgggactgttacacagcccaaggaactgaacagagtcaaagctttatgctcttcaattgcttcactagaacaattgaaaccattttggaatcagaagaatttcatccatgtgataataatga

SEQ ID NO: 549 - DNA, 201 bp, Bos taurus
accagttggtgacctttgtgttgggcttggttcactggacagcccccttgtgaaagaatttatcacctcctttgctagtacagagcagagaaagggaagagatggagggccttgtttgtggagctgtgtgaagacagagaagaggtgggcgaggggagaagccacagcgagaccctcgctgttctgagcagactgggcccc

SEQ ID NO: 550 - DNA, 201 bp, Bos taurus
tgaaagagacagacttcaagaacaaaattctgcttgtcagtgggaagagacagttagggactttggaatggacatgtacacactgttatactttaaatggataaccaacaaggatccactgtatatggaactctattcaatgctgtggtcagcctggataggagaagggtttgggggagaatggatacatgtatatgttgg

SEQ ID NO: 551 - DNA, 201 bp, Bos taurus
aggtgccctgcctctaatgcgaaagctttgtcacatgctgacagacattagatgttagtaaaatggatcttgtctggtcactgctgctgagaagcttccactggagcgacactgcccacctgcaggataacaagtacaaactctttcgtctaaccccaaagacccttcttaatagcattgcaacaacctaccttttcaaat

SEQ ID NO: 552 - DNA, 201 bp, Bos taurus
acagtttgattaagtcaggtatgagactgaaacaagatagagttaagtctaatttttctctattctacacaaactgttaatgttgctacaccttgctaagtgtgtagggattccaggtggttttcctgtcattaagcagtcatggctcactagcatgcttcctcttctaaggtggaattagaaacatatactaatatcttt

SEQ ID NO: 553 - DNA, 201 bp, Bos taurus
gagcaccatgaagcttaagctgagtgtatataccccttctcattatcactgggactaccttttgttgtcaatgggaatcgtggtggttctcctcccaagtctccttctagtaggagagattgtattacataagggaaatattgaaagagaagccaggagatcttatttggtaaatcacaaatttcctatttgggcctctaa

SEQ ID NO: 554 - DNA, 201 bp, Bos taurus
ctatcattttaatatttattttttgattcagtgtgagatccagataatttttctatagctattcaattgacccaatgttatttattgataacaaaagcacacaaattgtaacctctactatttgagtcacctttgtaataaatcaagttttcacatatgtgtggacatttttactcttctcataacagaggctaggaattc

SEQ ID NO: 555 - DNA, 201 bp, Bos taurus
ctccttataaggaggccaattctttttatatcagaacacgtttatggtgctttgcaattgatacaactcttctgcccacttcatctcacttactttatcaaagcaatgctttatggtgtggccataggtactgtattcactagggatatgtcccaagatttgtgggaatctcatacttgagaatctcgaataacatcacat

SEQ ID NO: 556 - DNA, 201 bp, Bos taurus
tttttaggtggtcacaactgaatcatatatgagttctgttcaaggaatacatacagtgataatacatcagtctcagtagataagtgcaggtggaaacttgcgagggccatgaaaggggcagaactaagacgccatggaaagaaattatttgcagcagtggtccaagaaaacttcaggaaggggttgaatttaagttaatat

SEQ ID NO: 557 - DNA, 201 bp, Bos taurus
cctgaggctggatgctacccatttaaacctccaggggacagaggtcaagcagaggaggccaggtggtgaggactctggtaaattacagcagaatcccataaagcattcaatccccctcaaaagcaaaacagtaacaagacaaaacaaaaacaacaatgtgtactaaataaaacttatcttccattgtctcctgctcacagg

SEQ ID NO: 558 - DNA, 201 bp, Bos taurus
agtgagaggggggatttggaacaacggccggccctagtgctacaacaacagccccatccccggagctcgatgtgtcaaggacaccatgctccccccactcgctacagagggcccatttaaccagctgcaatagcaaaagcagggcttcagaggctcagttgtaaagaatccacctgacaatgcagaagaggcagattcaat

SEQ ID NO: 559 - DNA, 201 bp, Bos taurus
gacaaacactgcaaatgggatttgggagaggagtgtagactgagttgcatttggggccaaagatgctgtggaaacgtttaaccttccttttctttttcaggagtgatctacattcttttctcataataccatctaaatttgcataaaactagtatactcaaagggtttgttgcctgattttttggtttaccattgttatct

SEQ ID NO: 560 - DNA, 201 bp, Bos taurus
acaatcacaaagtcaaagaaaccggccttgaccattctcttatctccactttgtccccactttgcttgtccctcatccctcttgtcacctgccagaggcatatgtctgcattccatggcccttccagtcaagagaagcccaaatttcacagttcctactatctcatcatcctggttcagctagcaaacagtaaaaccatga

SEQ ID NO: 561 - DNA, 201 bp, Bos taurus
tgctgtcagcttcctcagatgattgattttccagggccagttggcctctatcatctggctatatcacaccatacaatctgtatgtgagtactaatagctgcaagtatgcagaaccaaatacaacatgtacatgttctgatatagtttcatgaccctcctagacatggacgtgctgagatctactttcaggcatttgctgac

SEQ ID NO: 562 - DNA, 201 bp, Bos taurus
caatagggattaaagtgaaaaggagggaaacatggaaatcatctttcccataccctgaatctcactgaagcagagaagtgagacatatgacaaggtctcagttgcttcatctgtgaaatagagggtgtttgcacacagagatgccgagtcccaccaacagaatgacagtcaccagcagtgtgctcctgtactgtcccaagc

SEQ ID NO: 563 - DNA, 201 bp, Bos taurus
gagagatttggagaggcattttatgtgattaaaaattctgtcagtggttgctcctcctaaccacaactgtctttgttttctatagctgtgcaatgagttcatacacgctagtgacttacacaatacccattgtcccctcacatgttcagtaggtcagaagtccaggaaggcacgctaggttatcagcacaggctcccacaa

SEQ ID NO: 564 - DNA, 201 bp, Bos taurus
tgaagataagttaattcacttgttcaaggccacagaaggatcaaatgatgcactagtattcagacctttgtttgagccctagtccgttttatgtgtagatgactttagctgggcctaagttttgtcagttgtatctgtaggtatcctttgaaaaactactgtttttaatgaagtttataattctataattggggttgctac

SEQ ID NO: 565 - DNA, 201 bp, Bos taurus
atattggtgttctaaaataatagcatgccatttagtattcacgctgacggaatttgttgttaaggatcacacacagggatgtcaagataaggcagaattcagaacagtgcctgtcctgtgctggtcaggagccctgttacaggtatcaccttcttgcattcccacaggctgaactctgagaaccacaggacagccaggctc

SEQ ID NO: 566 - DNA, 201 bp, Bos taurus
tttttataaaagatacacacattatgaaactcaattggcaggcttataggtaatatttatgctcactgcagtgtaaaccaagcaacttgtttagggtaaagttaaattatactttattttagttaatttatcatatgtatgtgaggacatatgtatgtgaagctatgtaggacaaaaataagtaccagaattttatggata

SEQ ID NO: 567 - DNA, 201 bp, Bos taurus
aaactaaacatttgctctaaattacattgttgttacatttctaaagtgcctctttgaaagattatctgtgcctatttaaaatttgtctcaatcttattttctgtgcttaacacttataaacagtgaaaaatttctatgagcagttttttaaaaagagacactaaaaactttaaggacatttttgttttaactaagttactt

SEQ ID NO: 568 - DNA, 201 bp, Bos taurus
gtataatatccataaagtatattatgtgtactttagtgtttgggaaaagaagcaaaaataaatgtgatttacagattagactatctagtatatgtctgacctaaccgtgtccattcagcttgtgaacaaattgattcacatgttcaagttttccccacaataaaatgggaataattttaatagtgattttgtaagaaagag

SEQ ID NO: 569 - DNA, 201 bp, Bos taurus
tatgggcttggcaatctgagtatcctgtaaaatcatctttcttgatcttaaaaaatatgtgagcactagtcagtgtaaaatagaaatccatatactatgccaagtttatgctatattataaagaatcgaacaataaaaagtgtttttaatatattaaccacacctttataatttctattggatgaattaatttgacagagt

SEQ ID NO: 570 - DNA, 201 bp, Bos taurus
agagaggagacataaacagaagacagagaaagcaggtgaatgattagcagatgatttaatggggaaagaaatcacaataaattatgtgtaaagagggtacaagccaagagagtcgattcaccaaggagaaacccaaatgcaggacatgaaggacccaggatggcacaggttaagagtgagcctgagttggaaaatgggaat

SEQ ID NO: 571 - DNA, 201 bp, Bos taurus
aaccttgagtattaaaccttctctagcattttcttgatcttcactaaccatatcaaggtagcatagtcttatctgcaaattactaaaaataatcagctctaagaagtgaccttggatgaagcagtattaaattggcgaggaaatttttttgaggcatcactgttattaactcacaattttttcatttcactctgccactga

SEQ ID NO: 572 - DNA, 201 bp, Bos taurus
gccctcgcccccgagcggtggccccggcgcctccgccgcgagcgtcagccgcttggcaaggagcgagctgggctgagtcataataaaagacacgtttgcccagcgaggtgggaagggggcctcgagtagcggtgttaaatggcgacaggctcaaagagaaagctttttttttgtttctttttaatgggctgaactggaaaa

SEQ ID NO: 573 - DNA, 201 bp, Bos taurus
tattgtgcaggagctgatcacaaaccctataactagcctccctacttggcctttaaaagtgctttcctgaaacccattgaggaatttgggttttttgagcataagctgccctggactccttttctggcagcttatactgaatggtgtactttccttcacaatctggtgtcagtagattggcctttctgtgagtaggcaaga

SEQ ID NO: 574 - DNA, 201 bp, Bos taurus
gctaagtatatggcttcatgtacatggaagtattgaggtgataaccaaacaagatgggccatgttgctttcctatttctccctgtttctcttatatactgtgtaaaaactattcatttttactttactagtcccttataatctattcattcttcagggcttctgcaaactgaccttctcgttcactactttccaatatggt

SEQ ID NO: 575 - DNA, 201 bp, Bos taurus
gccttttgtgtagcttaaaatctttacagatatgtgtgcttttcatctaaccagattttgcacatctattatagcacaccctcaatcaaaagatgtttctgcattgcctaccaagtaaaggctaaatcaatataaaattatattcctcaaaaaatgcttttaattcttgtgggaagaagattacatacatagataaagata

SEQ ID NO: 576 - DNA, 201 bp, Bos taurus
gctgctctggggaatgctgttgcttagtctttggggtggcatccagatcgctgtattggcagttaagttctggctctaaccataccttatccttaggtagcttggctccatttcatggggactcagcagcaccttgttgggccagttcctgtaacaagcataagcagctgccatactcagcatactcagcaggtactcatg

SEQ ID NO: 577 - DNA, 201 bp, Bos taurus
ttaatcatcttttgcctcctctttggttaaaaaaaaaaaagaaaatagtatttttttcagaggctttctctgccttgatgaggttaataatttatttgaacacactataatggcataaatagctttttttgtaccttcattttgataaaaagaaagaaaaggagggcatattcgtttccatgatcaattttgctgaaaatt

SEQ ID NO: 578 - DNA, 201 bp, Bos taurus
ataaaataatatgaaacaaaatgtctacatttacaaaaacaagtcaacaatcacctagaaaattcagtaaaacagtctattgctagtttgtttaaaggcattattgcatggtggaaatactgagtatgactatattctcaatagcaatcacaggattcaaatatattatctcttattaggggataataatgactataagaa

SEQ ID NO: 579 - DNA, 201 bp, Bos taurus
tggatttaaaacatagttttagaacttattgtcaaataagttagtaccctctcttcaggcaagttccttacctgaaaattaggagtaaaatatttaataagatatcatcaataaaagacaatatcgagtgcaatactatatgaacttagcacaatgccaaacacacagtcaacactcaatatctgctggctattataatta

SEQ ID NO: 580 - DNA, 201 bp, Bos taurus
gtggacactgtgtctggcctaacccaagctttcccctgtcgctttgcaaaccagggttagtggaaaggaagaatggaatattaaagcagcagattagattgcaggtaaaaccaccttggccagggggactacagcactatctcaggctttaatacatgtgaatgactagccaggaggaccttctgcctcatatgccagact

SEQ ID NO: 581 - DNA, 201 bp, Bos taurus
gtttaacaatttgaaaaaagcccaattagtacaaaagaattctcataggaggctctcaagtcagtgtctattcctggaactttccccacttcagggaacctaggagcaggatagcaaacccacccaatcattccacttcattcccatcccccatgtcacaccccgccccatacaccctcccctcacctctctctctctccc

SEQ ID NO: 582 - DNA, 201 bp, Bos taurus
ctatctctctctgctatccctccatcatttttagttttgcttgctccttgggtctgccttccccttgagccttagcccaggtcccacacacaggcctgaaggtctaccacagtcaactctgacacaactgttaggacccaaaggaaagagtgaaggctcgagggaatgaggggctctggggacagaaagaggcaaaaaaga

SEQ ID NO: 583 - DNA, 201 bp, Bos taurus
gaaaggaaaaaacagccaataaatgaagaggactaaagggaactgtcagtcggattccacaatgtccttctggtaaaggtgaaacctgagccacctggccagagtatccaggcactgctaggtgaggctaccaaggtgctgtgaacgggagctgaagatcagaaactgaggtgggccaatccaatcaaaggcacataatga

SEQ ID NO: 584 - DNA, 201 bp, Bos taurus
gcgcagcaccctccagatacaggtaggtaggtattcattaaaacataaatttccagaggtactgcttatctgtttttgctcatcttaatataaaaatcttaacagttatggttcgagttcacctggatgagatttctatgtgtaaccatacctaaaggggttctttaattaaaactcttatgaacactcagaagtgttgag

SEQ ID NO: 585 - DNA, 201 bp, Bos taurus
ttgtgatttctgtttctcctgcctgtaaccttttccctagataattataaatcttgttactttatttcattctggtctctgcttaagtgtcatctccccagagaggccttttttggccaccctatgtaaggagagtgtcccctcaccccatgctctccacttgtttactctgctttggttttcttcttagcacttagcatt

SEQ ID NO: 586 - DNA, 201 bp, Bos taurus
taatttcagtcagatggggtcaagctgatgttgaagaatatcaaaggaatgtcataaaaacccactggttccagtttggaaacagtttatggtaaattgacgctataaattctgggagagcattgaatgtgctctttttgttttaaaaagtaaataactgaagcagtgtaggctcaccaatgactactttgcattcatatt

SEQ ID NO: 587 - DNA, 201 bp, Bos taurus
cttataaactcttccacggatgatttgaacttttgcgtgactgtctgggattttttttccaaagctccgagcatggccgcctgtggtatcaaggtgttgcaaaacagtatctgtgttgcgcttcctgttttaacctacctcgtttcgttcgtttcgtttcactgttcatcacagcagtgttatctccaggagacatataga

SEQ ID NO: 588 - DNA, 201 bp, Bos taurus
ttaccccttctaagttggtaaactcacctaaaagttgaggacctactttttttaaaaggaaaaaaggagtgtattataatgatttttctatactatttgtgttcttagtcactcagtcatgtccgactctttgcaatcccatggactgtagcccaccgggctcctctgtccatggggattccccaggcaagaattctggag

SEQ ID NO: 589 - DNA, 201 bp, Bos taurus
ccacaggaatgattttgtataattactttttagttaatagaacataatcatccttcccataaacataatttttattgagtacctcgtgtagatttaccataatttacttcaatcatttctctattattagacatttttggttattttaacttaatacagtatagcaattaacataatgttttgttttaaacatgtgagatt

SEQ ID NO: 590 - DNA, 201 bp, Bos taurus
aagagagtgaatgctacggagaggcagtttctgcctgcagagaatgtccaagctgggtctgtggcagatggaacacaggtgggcccagtggcccctctgagtgaaggagatgaagtggggaatctgggatagccaaggtagctggtgttcccgggaaagagtgggagagaggagaaagtcgcacacagagaacttcagaca

SEQ ID NO: 591 - DNA, 201 bp, Bos taurus
gaggagcctggcgggctacagttcatgaggccacaaagaatcaggcatgactgagcacacacacacagattgagccaggtatcactgtggttgactgggatttaggccctgagagaaccactggaggcagtataaacatgccttggatatcccaccctaggcacaggggccctggggtcttcattcaccgactcctgttag

SEQ ID NO: 592 - DNA, 201 bp, Bos taurus
ttcacttcaattacattatctgcctggttcctgaataggtttgagttccgacctcatttcttaagcactgcgcctaagaaagaaagaatgcatagggccagtgttcaggtgctcagtgtgacatagagaaaagcaggcatgaatgttaaccacttcactgagaatgtcttttgtcactcccaatatccaccatcagcttgg

SEQ ID NO: 593 - DNA, 201 bp, Bos taurus
cattgcctattgttgcagagagtcaatggttggtggcaatggcaacagaaataagcttgttactgttgggctcaggagccctactggtgggcccagggactcttaattcagcagaagctattcaacccttgtcaatgctgcactgaatatggctgctcaccaggcccattctccagctgtccccaggagaagctcatgact

SEQ ID NO: 594 - DNA, 201 bp, Bos taurus
gagatgctaggcctctgagcagtttatagtcttgtgtgaatcacggaaataagagaggactggaagagcagcaagcatgagggccaggaggagaggaaggtggaaggtgggagcctacctaagtctaaggaactgctaaacaagcccccgtcattcaatcacccttgatggtcttctctatcttctccagtgagtaactgg

SEQ ID NO: 595 - DNA, 201 bp, Bos taurus
accagggtaagaaggatcataggggaatcaacagaccttaatgaaaagtttaaccttttatttgaatgaggcaaaggctttataaggttttatagatttcactggaaaattagggcacttaataactatttagggagaaagaactatgagttatactataaaagaataaggctgtttcatcaaagaactaattaaatttac

SEQ ID NO: 596 - DNA, 201 bp, Bos taurus
gatgggtttgccaactcagaagttctccaaacccctttgcttggggttttcatggagattccattacacaggcaggactgattaaatcactggccatgggcgactgaattcaattctccagcacctcttcccttctgggggtggggaagaaggggctgagaattccaaccctgtaatcacgtgcttggttcctccaacaac

SEQ ID NO: 597 - DNA, 201 bp, Bos taurus
ggactctcttactaccaaagtgttttgatattggtttaaattgtaaaccttcagacttgtcaatagctctgaaatatgtttagaaattatgaaacattaataagtaaggctggtgttggaagtaatggtggtttatgaaactgtggctatcttttcaatgtgtctgaacagaaaatcaacttcaatatcttcaaaaataat

SEQ ID NO: 598 - DNA, 201 bp, Bos taurus
tggccactggctcttaccgtgttcccaaggtactcagagcttggcagagccctattcccaagcgctgggtacatcgtccgttcactgccgtccccccacgacccctccaatcatctcgaaaccaggccgggtgggatttgggggtggagctggggaggccctagagaggagggaggtagtgctcaccagagcgccctcccc

SEQ ID NO: 599 - DNA, 201 bp, Bos taurus
ttccttttgatttgtaagttctgcgtagatagggcctcagaaaagcaaataaaaataagaacttcgggatgagctaacagataggttgccatgactttcataaagtgtttgagggccataatgcttaactgtgatattggcaggtagcacagctttgctggagtttgcacgtgggagctgtgacttgggctaatcctagtg

SEQ ID NO: 600 - DNA, 201 bp, Bos taurus
ttttagagaaaggaaatgctggacttacattctgtcattatgtgcttccacccttaaatcttcaatctggcactattcaattgcctacttcattcccatgcattaaacttcaggggtaatgacatccatctctgggataatagaatcatgcatttggtaatgattcagtatttggcctccaggcaggtgaagacacaaacc

SEQ ID NO: 601 - DNA, 201 bp, Bos taurus
aatgttaataacatgcaaatggtttatcatcaatataataataggcactattcactgctaatcctgccagaatccctgatggtaaggacaatatacttgacgtttaacttgaaatatcatctgccttcagtaatctggtgccttgttttggttgaaaagtttcagattgcctggccctttaaggcaaatctctggtattca

SEQ ID NO: 602 - DNA, 201 bp, Bos taurus
ttggagttcagagtgttttaggctgatttgaagagaaggaaatggtctatttgtataagccctaaaggacactccatctcctggataactgtcctagacagactagcagtatcttttatttcccatcttataacttaaaatgcccacatgcttcaccacacattgggtaagtcttcacaaaattcaaagacacactctgct

SEQ ID NO: 603 - DNA, 201 bp, Bos taurus
ttcagtataactttaatggcatgtggaaatgactcaagtgtaactgagatgaaaaaatcttgaaagcaccttttattctctatatttccatctactcaaaatcttatgtatatttgatacaaattcagacaaatccggagaaggcaatggcaccccaatccagtactcttgcctggaaaatcccatggatggaggagcctg

SEQ ID NO: 604 - DNA, 201 bp, Bos taurus
tttactcccaaagctcatattaaaaatagaggactttggatatgaaatttgccaatatagaagcatggatccttacaacctttgttctaccaaagaatcaatggttactgtatctaatcttagcaattcatagatggagaagttgaggcccagtatggtgaagtcatgtcttctttgattccttagtattcctggctttgc

SEQ ID NO: 605 - DNA, 201 bp, Bos taurus
acatctttacatatgcatgtagctgttgtaaatgtagtatatgcatatttttaatcaaatgatataagaaaatctgctatgttttaatattctcaaaattgacaaaggatagcaaaagatgaggcatgtgtatagagcttgggaatatagcaatcacccactcagatcactgaaaaagtacctatgggagcacagtggtag

SEQ ID NO: 606 - DNA, 201 bp, Bos taurus
catccccattttagttctactaatttagtgtctaatgttatttaaactaataaatgagtgatattttctttactgttctctcatgtacttaaaactcattgatttcctctccacatttttccattaagtccaaaaaatttttaaattgtcaagaaagtagttgccaggccatttcacttttttttttttaaaaaaaaaagg

SEQ ID NO: 607 - DNA, 201 bp, Bos taurus
aaagcatttaatgaaatatttctcattcaaagcagaattcttttccattgaagactaactgctttagtggtgttttgagatcctaaatagtttcatttagagcagaataaaaattttgaccaatcagtaataaaatcaggactcattttactgcttgtaagagtgaattcttgtcactttaatgtccacatcagaagctca

SEQ ID NO: 608 - DNA, 201 bp, Bos taurus
tcgtggcatttcagaggtgactggaagtggatgtttgtgatattcttacttccttcacatcgttgtcagtaaatacataagagcatcagccccatttcactgtgacgtgatgaaaggtactccctaatgaaaggctcacaatcagaaaaaataaaatgtgtgtctttaaagccctctgataaattcaaaagccatgagctg

SEQ ID NO: 609 - DNA, 201 bp, Bos taurus
aagctgtctggattcaggctgataaggctgaatttgtctagggatggattctcttgaaattcgtacttgatgctcaagaggctgtaccaagaattatcagtggtaagaaggcactctaatttagcttataaagcagttattgctctggttgaatggacattgattagaaattggaagaatgtgctccagtaggtcaggttt

SEQ ID NO: 610 - DNA, 201 bp, Bos taurus
gcctcccacattattttggttgacagtacaaactggaatctaaataaatgacccctgttattaggagtattacacaagttgtctctcagtatctgtgggggattggtttcaattcccctacagatgccaaaatctgtggatgtcaagtgccttatataaaatggcatagtttcatttttattaatggctgagaatttgcag

SEQ ID NO: 611 - DNA, 201 bp, Bos taurus
caatatgttcagaagatgatggaatgggtttcaatgagggaaaaaaaaaattgattcagatagctcaagtgcgtacagaagacccagatggactgacaatctaatacctgccagccctgacatgcagcagagacaaggaaggcttctgccttatacatcagctgctttccagtgcagggtaaaggcaggctgtggagatga

SEQ ID NO: 612 - DNA, 201 bp, Bos taurus
atcacaagtgcccggaggatggaggcaggctccataggattggatcccagggtaataagagtgatagtcaccgtggtgaacttggctcccccacacttctcatctctctctggcacattgtccttggtccaaaattaggggcttaaacagtcccttacctttggatggttctttctcagactcctctgcaacttggggtat

SEQ ID NO: 613 - DNA, 201 bp, Bos taurus
ccacttggcttcctttagagcacgatcttgactacattgcctgttcacctttctttgaaagtgatgcacatgcttgctgaagttgtccatgatacgtcccgttagtgcactcatttagcataataaaggtatacttaagccccattacctggcatgtttatgttcctgtgagccactgcccagactgtggggactttggcc

SEQ ID NO: 614 - DNA, 201 bp, Bos taurus
ggacttggtagatgccaccagcttcattggagccatcactaaattcccctaaaaaaggacagaaaggagaaaaaaggcctccatcaaggcttgaataaaacgtttatatttgttataactttcttccaaagttatgtatagaatataaaaaattcaggcatctgagaagaagacaatttattttaaagtaggccctgaaat

SEQ ID NO: 615 - DNA, 201 bp, Bos taurus
agccaaaaaaaaaaagaaaaagaaaaaagcaaagtacatgggtagagagctattaggtaggggtctgtggtagtgagaggctgtgccaatcttttgatagattctctttttttccatgaaataggatgcaaagtcattagctgagaacaagtctgggagcatgtgctagagaacctccttaaggacatctttcactgcatt

SEQ ID NO: 616 - DNA, 201 bp, Bos taurus
agtagtcttccacataattttatataaaattgtgatcatacctgagagtgtgcacatttttaggcaatgttttagtgggatattcttacagtagttagatggctctgcttatttttttgctagacaacttagcaatcccagaaactgattcttttagagccagttattggacttactatgtacagaacagatgattgcact

SEQ ID NO: 617 - DNA, 201 bp, Bos taurus
gctcactttctcaatgttgactacttctgaaggagtatttattctgagatattctagatctgccaccaaagaagaatcttccttgccagtattactactgaaacttctcttccctttgtcaagcatcatatttgtctcttcagccatcacgtgcaggtggactcttcctcgtgtaatttgcaagctcctcagttcaggctc

SEQ ID NO: 618 - DNA, 201 bp, Bos taurus
atcccatgaagcaaaaagaaaactttccactcttacttctcattatctcatcgtgtgaatcatagatatagtaacacagccctggtttacattatagcaacatgaaattgtacctgcatattcaaaattttagatatattgttaaattaaatactcaaaaataggtttcacctcacaaagcctgcaattttcttgcagaga

SEQ ID NO: 619 - DNA, 201 bp, Bos taurus
tagattttcttttttttaactttagcatgaagaattaattgaggcaatggctggagagaattgaaagtgtatgaagaaaatattcattaatattctgcaaggtagtatcattactttatttcttaaaccattatggaaatactgtcaatctgatattcttgaaaactaaacccaaataaataatgctaaaaaaacccaagg

SEQ ID NO: 620 - DNA, 201 bp, Bos taurus
ttcctgggaatgtgccattgttgatgggaggagagtggggcacaggccagctgcttcatctccttcctcctcatcaccctcctaaacttggggattatcgctcaagtcagtggcttgacttggccagaaaaaaaaaaaaaagtcctcattgttttactttcagctttcctgttgggatttttttttttttttttttcctca

SEQ ID NO: 621 - DNA, 201 bp, Bos taurus
atggcttaatttcctaaatgaaaactcattgattttgtagccagaaaaaataaactaagctagtattgaaaaggaaactgctactcccttttcttctcagaaagctttctgtatttaggaagaccatgagcacaattaaaagcctttctctcagaaaatttaactattttgtcaggagcttgttttggtatatttctgtca

SEQ ID NO: 622 - DNA, 201 bp, Bos taurus
tcaataaggctaaaataaaactggaaatgcccccataaaatactccctacacaccatattagcaagcactaagtaccaattgacagtgatctaccctgggaagggggcaagagtttggaaacagattctttcttaagttttggctaataggaaaagactaaaattgagaaaaagcctccagcagtccaacccttacttagg

SEQ ID NO: 623 - DNA, 201 bp, Bos taurus
gtaattcttttaaaaatttgctcattttacatttaaaaaatattgcaaaatgtaaatctctttatcttcaataattatatactctgacagaagaagttccctgggtctcatgtctgacagaagaagtaccctgtttttgttttttcccccctgcagcccgtatcctgaactagccctggtggccaagacattagaagctat

SEQ ID NO: 624 - DNA, 201 bp, Bos taurus
caggggatactcttcattgtgatgctgggactttccattgtggtggcttcttttgttgcagaacatggggtctaggtacgagctttagtagttatggcacacaggctcagaagttgtggttcccgggctccaaaagacagtctcactagttatggtgcacaggtctagttactcctcagcatgtggagtcttcccggacca

SEQ ID NO: 625 - DNA, 201 bp, Bos taurus
cacatccatcgagtcagtgatgccatccagccatctcatcctctgttatccccttctcctcctgcccccaatccctcccagcatcattatacccaaataagtcttcctgctttctttatgtaaagcttcttttagaatgaacaacttgatcagtatacttgaatacagtagtctaacaaagactatcatctcaggttttgc

SEQ ID NO: 626 - DNA, 201 bp, Bos taurus
ggacagatcagtgttacagctccatgttacagttcagttttatttagaaaataaaagaaaaatacatccttgaggagtgagggcatgccaactcaaaagatgctaagagaagagagccctgtcccattggttcctcttttatatgtcttttcctccccctaggcctgccatatgtaaactgggctagccaggagtgctgtt

SEQ ID NO: 627 - DNA, 201 bp, Bos taurus
gatacatataattttgaagggagaaataaagtttatagactctgtatttattttgtgtttgtatctgtctggttctaatcaagaaacaataaaatgtttggttacttgaaacaagttattttaaagtgagagacacagagaaagaagcagaatagttaacgtaggcttaattatcataaaaagcttcatgggaacagtagg

SEQ ID NO: 628 - DNA, 201 bp, Bos taurus
tgaattgttaacacattcttaaaattacatgcttttttatttgtcagaatcaaacttttgtaaataactaggccccaagataaagtcctacacaattctcggccttggattaataggccacacatacttgaaattaagtgtcaagtctatatgcttattacctagtaaactttttagaaggtgattctcatattactgtgc

SEQ ID NO: 629 - DNA, 201 bp, Bos taurus
agttttgttaatagaggaggtccccctccaaagcctctccagtactctaccctgtgaatttcctacatatacagaggcctgaagcccagctttagatgcatcttaagcttgaggagccacacactctctcttgtcaactcaaacactcgtacttttactgaatgccacatcactactgttgggcccatcattatgacagat

SEQ ID NO: 630 - DNA, 201 bp, Bos taurus
ggcccactcacagaacaaagggctaagcagagctagccagctgcagaccagcccatcacccgcctcctgtgacaggcaggcgagggtagccagagctggaaggggttagtcgcggccccagagaagcatcatgtaccaaactgcaagcaggcttcattgctaaccaagacttcttgggattttggacagtcaacatccgcc

SEQ ID NO: 631 - DNA, 201 bp, Bos taurus
actaagctctgcaactgatgggcaatcttcattgccatgtgacattcaggctctcattagtgatttcaggccagcagaggagacagtaaaatttgatacaagctgtcaaggtgaagttttaagagttatgattctgaatttattgttaagagtcatataagactaatacatgacaaacagatttagaaatgtctttacaca

SEQ ID NO: 632 - DNA, 201 bp, Bos taurus
tgaatgggttaataaacacgtgaaaagtattacatttcaggtagtgcaaaaattgaccaccaggagattccatttcagaaaatatataaatccaaattgtgaagtttcaatcatactgaaggttgagaatatagcaaaacagggacactctcgtgtgtcctggacagtttccagtgtggtacatctccagtgtggtacaaa

SEQ ID NO: 633 - DNA, 201 bp, Bos taurus
attgtcagttagtttttcagaagttcactatgcccttgaatactatttaactgaaaactgagacacaaaatttctaggaaaaaaaatggttgaaagaaagattggagggtatagctatcaaagagaatttttgtataaaaaagagatttggaagcttaacagtaataactactgaactcttaatatatgctagacattttt

SEQ ID NO: 634 - DNA, 201 bp, Bos taurus
agtcaaatattcatgatgcacttttaccattgatgcagttttaattttgacattaggtgattttttttttgctgcatgcattagtaagaatttttccacaaaagaatggttggcccttgtgcagctcattaatgtcagtgcttaaaacaaaatgaaagggtaggaactttatcatgttttccgtttgtgatattttccttg

SEQ ID NO: 635 - DNA, 201 bp, Bos taurus
ctacttgacctttagtaaactggaatcctactgttattacaaaaaggcagagagattatttcaaatattatgtcttcctcctgtatgtctagtcttcagaggatatccaataaactcttcaaagattttagtgctttcaaaactactatttttctcaagctttggtgaatgggacgtctcctggaataatattagtgattc

SEQ ID NO: 636 - DNA, 201 bp, Bos taurus
tccttaatgaaaaatcaaattataattgtgtctagagaaataagagatttgagcagaaatttcaaacagatgctcttgggagaaacacattgaaaataaggtgaaagtgtaacccacttggactatctgaggagcaatatacagcccagttctaaatgcacttatgtatataaaagtgtatttatttggtgacaggttgtg

SEQ ID NO: 637 - DNA, 201 bp, Bos taurus
aaaagtaagtaaactgttattaagaaagaaagaaaatgcaattaaataactcagatttttactctccctcagggaagattaaatgcatttaattataatacctgtggtatcaatttatgctttccaaaaatgggtgggagaaattaaataatatcattatcataatgatatttttgccaaagccatagagaatagcaagca

SEQ ID NO: 638 - DNA, 201 bp, Bos taurus
ctagtgttaaatctccactgggcctggcctctctccctcttttccctttctccagtaaaggatccattttagactctgctcttagacagctgacatgggagtgaaggcattacatccaagttagggccatcttctctgggaatttgtcctaaatcattatagacaatgactcatacagggcataaagacttttaatccaga

SEQ ID NO: 639 - DNA, 201 bp, Bos taurus
gagggccatacaagggcataagtagaaagccagaatctgcaagccaaagaaaaaggcttcaggagaaacaaaacctgagtgaagtcagcaatacagcagaataggaaggcccggattccttcatcagcagagaaactgacttaaaaacggtgtaaacaagcctttatgagtattccagaaactagttaagaagtctcagtg

SEQ ID NO: 640 - DNA, 201 bp, Bos taurus
cactgtgcctccatctctcactccacatctagtcttctggaaaatctgttgtcttttaagataaatgcatcatatggccacatttcactatgtccactatatcccaatccaactatgcagtgatcttttcgtctgcatgtgtgagtgtgaagtcccttcagttgtgtccgactctttgagactctatggacagtagctggc

SEQ ID NO: 641 - DNA, 201 bp, Bos taurus
tctgtgggtcagtaaggatatattgtctttaatcaaaaagaataatgaattgaggcacacacagtagcataggctgaaaatctgcagtgaaatttgtccttccctcatactattaacctaattaccatacaatttaaagttaataataaataacaggcttaaattagaccagactaaagtatgggcaattataccaagaac

SEQ ID NO: 642 - DNA, 201 bp, Bos taurus
tacttctcagtaaattttatacaatcactgccttcagatgactgcttcaggaataacaaaaagcaattgaaactaaaacctcagtactaggagtggaactttattttgtattatgggttttgggggtattgacctttggtttattttcttgaaatatacttaccgtaaggaagtatgactctttatttgaattgtctttca

SEQ ID NO: 643 - DNA, 201 bp, Bos taurus
aattggaagtcattgcctctgaaatgatttctaaccttaggtcaacagtttcatacagtctgcttgctggtgggtatgtcttagttgcctgattaaactatattacctagatacaccttggaagtgactgaacacttaaccctctggtgtttaaattgttttgcagaataatggactataaataaatatagccattattat

SEQ ID NO: 644 - DNA, 201 bp, Bos taurus
atctcaaactctagatgagaaccacagtatggccaacaattatctggatcacagcattgtgtgagcctcagcataaaatccagtaatgctggacccagactattggcctgcagagctgaagcactcagttatcttgtttcaagtcattaagtttgttacacactaacaaattatatacagtatataacagtaagttacata

SEQ ID NO: 645 - DNA, 201 bp, Bos taurus
tacctaagaatattcaaataaatcttaaaatattttaccacatttaagtgtattccagaaacctaatttctttgatatgtattgtctaagataaactaatgtttatattattgactatttattgaaaagataattgaataatcaaagtaaaaatgatacaaaatattattcaaactgtaaagtagagtaacactgatttgt

SEQ ID NO: 646 - DNA, 201 bp, Bos taurus
cactaacctcctatttacaattctttgagtaaggtgctttagttaccagcactttggaaatgacaaaactgtgactcagaaaattaaggaatttgcacaagagcacatagtggagaggaaatgaagatagaattcacactgagctagaccagacctaaagcctgcaatctaatcactgcaaagtaccagctccatagaaca

SEQ ID NO: 647 - DNA, 201 bp, Bos taurus
aaactcacacaataacaaagacaatataaaaagctgtgcacctatgaaagaaattgaatcaataattaacttttccaaaacagaaatgaaaggcccagaaggttcactgattaattatatcaaatatttcaagaagaaattacaccaatgctctagtaatctctaccagaagatagaagtagagggaatacttcctaactt

SEQ ID NO: 648 - DNA, 201 bp, Bos taurus
gtggctacttatttatatatgtaatggattctcttcaatggaatttcaagtgtaagtcaccactagaaataagtcaaggattgaagggcagaggccaagtatatgtaggtggtcacagattttccattaagtatctcaaggcacagttcacaaaggtgaaggtagttcctctttgagggcctttatggggaggtgttgagc

SEQ ID NO: 649 - DNA, 201 bp, Bos taurus
attcaatcactgaccttcttaaatgcattgaccttcttaaaatcctccttctaaaaataagaattaaaataaatgtgaatagacacagtaaagcttaataaaggatattgcgaagcactgccccaggatgtcacttcaaaggtaagcatttcctctgagcaatcaaaataataaatgcagggtccaaaagatataatcgac

SEQ ID NO: 650 - DNA, 201 bp, Bos taurus
caccactgggcctgacccaaacgtgctcaaaatctgcagcaagaccagcttcagtagcccagtgagcagccgccggagctgacgccggtacagtgcagattacgcgatagaagggttcgaaatcccgcgagtcgcgagacgagactcacagctgcgggtgggggcggaggaaggggaaggcgctggggaacgttgggcgga

SEQ ID NO: 651 - DNA, 201 bp, Bos taurus
ctttgtccgatttacagtttttgaagaaacctctgggatagtttcaagtaatttctgagctaattctttgcattcattgtgatcctctggactatgtgatgtaaagtccattaaagggcttttctttcctgctttctctcttcattcccttgctttgttttcagaatgtaacagctgtattagttgatacagatcggaaaa

SEQ ID NO: 652 - DNA, 201 bp, Bos taurus
acataaaaattttgaatctctatgttgcacacctgaaactaatatgaagttagtaagatttttctgggtggttggttttttgtgtatttttaaaaccataataagattggaagaatcgaaagaaagtataagtaaaattagccaaatcatccttttagtaagtgtatatttcatctgaagaatgaaagaaaatgcatatag

SEQ ID NO: 653 - DNA, 201 bp, Bos taurus
acttatcatgtccagtttgacttgagcaacaatggcagtaacgatttgctttcattggagtaaaccactgagagctcgggttgctctgttgctgcagctccgtgttaattacctggactaatgtgtcttgctaattacagcttgctgaatctgtcataattactgctattaataatatctgttggggaattccctggcagt

SEQ ID NO: 654 - DNA, 201 bp, Bos taurus
tggctctgggctaaacttccaagagcacagtggccacggctctggaattcaatagtccaggagttatacaacttctccttgggccactggcaagtggatggtttttgacctttgctctgggctgtccctggtgacttggaaaaggcgatggcaccccactccagtactcttgcctggagaatcccatggacggacgggcct

SEQ ID NO: 655 - DNA, 201 bp, Bos taurus
gactgagcagggcagagccggggtggggatgcaaacaccaggtcaggcagtggaaggaccagttaattgaatgcgggagctgtccaggcccttcatttcccggaagtgctctatgggagggaggaggctggagaagcaggtgaggagaccttggagtgagtgggcgagcagccctctgtaggaaccaggaggagggattgg

SEQ ID NO: 656 - DNA, 201 bp, Bos taurus
gatccgaggcctatttttagaagggccctcagtcttcctaagttaccttgttccccaccctctgctctgagaaggcagaaccctgcttgtttgccatcgtttcttggccagacagtctcctctgcttgaatgcccctagtgggcaactgccctggcaggacaaggcatcactgaggtcttcaagcaaatgatctaacaatt

SEQ ID NO: 657 - DNA, 201 bp, Bos taurus
ttatgcatataagatctaaactgccatattttacattattatatataaagatctattaagacagatcttctatctcaatctagggggaaaaaaagtgacatatttgatcaaattaaaaatttaggagcaagttctactgttttaggtcatctgcttctgagggaaagaggtctttctttccaggtcctgatttttcatact

SEQ ID NO: 658 - DNA, 201 bp, Bos taurus
gaagaaagaggcatgaacaagggtgaggaggctgtcactgctttgatggacagaactcaatattattccattcaaaccaaaccaaaccaaagcctgtctgtgagaagagactcataaagtcatgggattttgatgatctcctactttacttgtccttaacactgaggaaacacaagagaggacctgccattaggaaaccct

SEQ ID NO: 659 - DNA, 201 bp, Bos taurus
agcaagggccacccaggaagctggaatcacagtggatccacccagaaaagcaggaaccatgcatcagaagcagctgctgctccaggagccaccaaggcatgggagaggagacggcatggcctggcttctcactttcttttgcatcctgtctctttcaggtatctcccactgcctaaacctagctggaagccatttgcaaag

SEQ ID NO: 660 - DNA, 201 bp, Bos taurus
accaggcttccccgtccctgggattctccaggcaagaacactggagtgggttgccatttccttctccagagatgtgtagttactggccccaaatctcacagcccatcactttagtttccgaaagcatcactcattctgctctaccaaaatgtagtccctcaaagatttctggagtgcttttccctccactaataagtgctt

SEQ ID NO: 661 - DNA, 201 bp, Bos taurus
tttatctgattttctctaaaatgaagtccattattctatcttactgttctctcaacatagagaaaaggcacagagacacttttactctttatgttaaacaatttatttaagtcccaagatattcatcccagttaaatagagacgccaaccataggacaacatcattcaaatcctgccaccagataatccaacaagctctag

SEQ ID NO: 662 - DNA, 201 bp, Bos taurus
gactgtcttgatttaattaaatgcccccactaataaaaggaatctaagcagactcgggcatgcccaaagcactgctctcacatttgagcaggtgttgacaaccttgagtataccctgaactctggattttatttctgcttgagttaaagactcagaagcctattttctctacaagtttctgagtcttggggccctaaagaa

SEQ ID NO: 663 - DNA, 201 bp, Bos taurus
tcaagcctttaactccggggcagagtgatttctcatactcagtttccatcactcagatcaaggcttccgagtcgtttactttgtaccttctattaacatttacagcgaaggtatcctaaacactcaattttcacattctttttcactgacaaatcaagaattaaatacaaactttgctaaacgcagaccttttccaaagtg

SEQ ID NO: 664 - DNA, 201 bp, Bos taurus
ttcctttcgtcccgtgttccacatttcaaggtgaagccctgccttcccaaggccaatcccgtaatgtaagtggatagtgaggagggtttctacaaacaccatcaacctccacggctgaagggggccaatgtaactgaccctttccgatcacaatagcatgcatctccctcacatccttcttctgtccatcccacctccaca

SEQ ID NO: 665 - DNA, 201 bp, Bos taurus
agaatcacaggtatagagaacaaaccaatggttaccagtgaggaaagggaatgggggaggagcaatatcaaggtggggaaataagaggtacaaactattatgtataaaataaactataaataaatattgcaaaacacagggaatacagccaaaaattacagttttataataactataaatgaagtaaactttttaaaatta

SEQ ID NO: 666 - DNA, 201 bp, Bos taurus
caatacctgctttcatttggagggaaaaaattataaactgtctgtcagtcttcatcgccacctagtggttcattggccaaataacaccaaactatctagttgatttgaaacacaggaaaagtaattcaaactactaactcctgtaatccaccatctaattaaatgtaccttggggccccattttgaaaacttattgaaaga

SEQ ID NO: 667 - DNA, 201 bp, Bos taurus
tagaaaacattggttttctctgtttttaatgttttgtgcctctacactagatttatgttttgtggttaccatgcagtttatataaaatgtcttggtaaaatagtcctttttctgctgatggcatcttatgttcgtttatctatatgagttctatcctttccctccttcccctttgtgtcttgtctcaaattatttcttttc

SEQ ID NO: 668 - DNA, 201 bp, Bos taurus
gtactggctgtcttggggcagtgggaccagacagcaaccccatgccaggaagaagagtgtgggcgctatcagatggcccatgctgctgctctcccatgggctcagttataagctgcaatttaggagtagaatgctgagaaaagcaggttaccatagggccagagtgggaaggcagaaaaagacatccgaagatagccaggt

SEQ ID NO: 669 - DNA, 201 bp, Bos taurus
ttgaccaatccctggatgaaaagtgctttgagtttgaggcccatcccccattccttttctttcaccatttggcctaaagtctccccaagaatcattaaaaggggcaaaacatctgctcctccttcactggacttccagtgatggacccagaggagggtggctgaaagaatcccaaggtcatttatctttctctattcactg

SEQ ID NO: 670 - DNA, 201 bp, Bos taurus
gtcacagcttaggaatccttagtacataaggattctcatgtactatgggttcgttcagtgtaaacaagcatatggatcctctaggtcagcctacgtctccgggccttgtacttaggacagtgaggtggtctcaagcactgccttcccttggagcaatggctctcagaccttcatggatgtcagatcacctggaggacctgt

SEQ ID NO: 671 - DNA, 201 bp, Bos taurus
agcaccctgcactctatactttgggggagaccctgaggtgagatgtcctaccctttctcaccaacaggtcggtggctgggagccaggcccacccctttccttgctctccctttttgctctggcaagcctgtactgtggagaagatgactttctccccattatgctcctttccagggttcctatgaccatgggcctgtatta

SEQ ID NO: 672 - DNA, 201 bp, Bos taurus
gcacacccacagtagtcagcactgccacaacagaaggcccacacagtctacataagaatatccatacagagtatagctttcatgatcagaggagagtgtgcttgttgggccccataggacatcttctacataaggccacttctcctagatcagaagatataatcagcctacctaatacataaaaaaaacatagagaattaa

SEQ ID NO: 673 - DNA, 201 bp, Bos taurus
aaaagattggaaggacacttcctccagtccctctgccagcgacctacagcttcaccattcacctcacgatacccccgggtgatggcccagttctcaggcattctgcaccccaccaccgtcggggaaaccgccccgctcccgactcatgactccgtctgggctcggatctcggccgggggtccgagggacgcctcctgccgg

SEQ ID NO: 674 - DNA, 201 bp, Bos taurus
ggaaagtcacaaatgaccctggatgcccatgtgaagactgcagcaaagttcaaactagctcacagagttgtagattctggtaatcattatcttactgctatccgccccctccaccccgttgtcccctgggagaaagcctatgtgtggtagaagagaatttagttaaataggaaaaagtaacaatgaaaaatgagaggggag

SEQ ID NO: 675 - DNA, 201 bp, Bos taurus
ctcctggactcaggggctgcacgcagcctctgtgggcctccgtgatctgtccggaatcgtggtgggtggcatcccaggaaagtcattgtagcacgttgtaaaagtaggctagctcattcccaggcctcaggtctgcggattgtgagttactggttctgggatggcggcctcaaatctgtttttgaaccaacacccgggtta

SEQ ID NO: 676 - DNA, 201 bp, Bos taurus
ggtggacactgaagacacagtacccatgtgctttgacttatcactgagccctgtcctggagctccaaacctgctctagggtccagaagaaggttgtagccgctgtgacttctccagaaaaagaagtgaggcctctttgcagccctgtctgtcctcagcgtagagcttgaaatgccctcttataaaagatattcggtttctt

SEQ ID NO: 677 - DNA, 201 bp, Bos taurus
gcatggagctgtgatgagagatgcctgatgaactagaaattacctttctaagcaactcttaccagccccacagccatgtgtggccattaaactagtttttgacgatggacagagattagatcataaaagatcttacagagcatggtaaagagtttagattttattctgcagttggtaggcaatcattggattgttttaagc

SEQ ID NO: 678 - DNA, 201 bp, Bos taurus
atatatctttctaaaacaacaatctcatcaaatcaccagtgcctcctgagtcaagcccaagcacatgataacacaacaccttccatgatctggccactgatctcctccaaacctcattacacactctttcatctctccacagcatttttcccaacaatacagcctgcgtatggcaacccactccagtactcttgcctggaa

SEQ ID NO: 679 - DNA, 201 bp, Bos taurus
aaaaacaaagcttccaaaatttaagacatttggctagattttttgatgttcttttgagcttaaaaatttttataatcaaattaggtttactatcccatcttgttctttactgctttgaggacctctagcctttccttttacaatttctgatgtcctaatatttgcattgatgtaagttctctgttgaacatctagaaggtt

SEQ ID NO: 680 - DNA, 201 bp, Bos taurus
ttcattgcagggctgctgtaggagggcctgagcatcgtgcgtcggttcctccatcactgagggcagcagggctctgtgagacaggcctctcctcatctggtgacatccaactgacttttttgcgtcttcatggctaataaatggttagtgacagggaggcctggcgtgctgcgattcatggggttgcaaagagtcagatat

SEQ ID NO: 681 - DNA, 201 bp, Bos taurus
ctagttgcttaataaatatggatgttctgtccaggggattttcactctcattatggaactgatgttgcattgccattataatcggtttacagctttccctattatctctgggagcgctatcagggtggaacatttctaagttccactgtgaaaagctgtcatgttaacctctcagctggtcctcagatctgaccaactctt

SEQ ID NO: 682 - DNA, 201 bp, Bos taurus
aggccttacgtgctgcagtccatgggtcagaaagagtcagacacgattgagcgactgaaatgatctgaactctaacatctgtcaggtaaaatgtatcttcggaggagaagggccacatgaactagcacaaaggagctttacaggagattgaagtagaagacagatgataagcacatgagaagagctgggaatctgaaatca

SEQ ID NO: 683 - DNA, 201 bp, Bos taurus
aaaggaaactctaagaaggccagcccacgccatgctccatgtgctctcctgccctgaggtcctcattcatgtgctcctttctctgtttaggggtgtgtacatgtcccctccacccagtggcccttgctgggcttaacagacctgagaaaactattactctctcaggcaatcatttgtttgactaaaacagtcaagctggag

SEQ ID NO: 684 - DNA, 201 bp, Bos taurus
ggcctctctctctctcaattcccctctcattccaatcaaggaaaaaaaaaatctctctttataacagacttcccattgtaccacaccagaactggctcacgtggcctcctgtagctataggtgagcctgacaaagtaagcatttgaagttttcagcctttcttatgagaagcaggctctgccagtgtagaaaatcgggtag

SEQ ID NO: 685 - DNA, 201 bp, Bos taurus
tggacaaggaatcatagcatctcaggaattcaaaggaatggttttagaagggtgacataggctccaggtggcatatcacgtacctcatggactccgtgccgtggggaggagtgaggccagagaaggaccaataagcacacaacagaaacacagaacaggactcaacagggtcaaatctaagtgtaatacagactggagtgc

SEQ ID NO: 686 - DNA, 201 bp, Bos taurus
agacatggtcctccccaccagaggggtcgagacttggctctacccatcggtaggcaggcaccagcccttctagccagaaggcctgcacaggcctctagaccagccttacctaccagcgcattgacaccagaagcaagaaaactatgatcctgcagcccacagaatgagactgccaacaataagtcagaccataccctggga

SEQ ID NO: 687 - DNA, 201 bp, Bos taurus
acccagtaaatagtttgttgaataatgcatttttatgagttagaaccggaagaaatgtggtgactggtggccgatgagaagtaagacagaaaaatacagaatatgttaatctgtataatctgttatcatggtctcttttcttttctcagtgttcactaaccccagttgctacagaatggaatcatgattacctaactctgt

SEQ ID NO: 688 - DNA, 201 bp, Bos taurus
ccattcttcctctggaagcaccaggagacaacccattcccttctctttcacctcctagtagctgccagaattttgtgacttgtggccatattactccaaactctaccttcatggtcacacttccttctccttttctgtaatctcagatttgacacatgatctctctttgcctctcttctaaggacacttatgattggattt

SEQ ID NO: 689 - DNA, 201 bp, Bos taurus
tagacatagatgatggaggggagtcaattccgtacatcattagaacatatccaatagaaaaaataactcagaagttctagtatcccaatacaaatatacatgatgatcagagatatagaagcctgtagccaacattcaactgaaaggagtatttagtatgatagctcctctaacagtgatagaaggagggcattttcagat

SEQ ID NO: 690 - DNA, 201 bp, Bos taurus
aatctagactgcaggtgaacacttgacaagtttgtgggactatgcctagtagttgagatatagaagtgaatgggaatagtgatgggacaggcctgaaatccgtagaccattgcttctcaaacctgaatcacctggtatcttgtaaaaatgtagaactcgcgcgggctcagatacagcttttctcacaggctcccagatgac

SEQ ID NO: 691 - DNA, 201 bp, Bos taurus
aaataaccataatttaaattgcaaaaaaaaaaaaaaaaaagcgtactggtttctaagcgtacacaggataaaattcaaaatcctctccaaggccctataggacttggcaactgagcacaagcacaccaacaggaagtgcttacctctgtagcctagactcccccaacccctgcacttgttccttcactagttttaggccgt

SEQ ID NO: 692 - DNA, 201 bp, Bos taurus
agacagattggttggcaaacttcccaaggtcatatagagtccaagaccggatctgataccatgtggagcccattctcactaaccaggaagctgtggaagagagaaacaggtgtagggatcctcagtagagttccctgatgaggtgggctttaccttgatgtggaaggatctggaaggttttctgagtcatgcttcattttc

SEQ ID NO: 693 - DNA, 201 bp, Bos taurus
ttgtatttcctcatggtttgactatttatgtgttttcagccaatgaaagctactctacgcatggtactttacactcttggccaatgagttttcttcatcacactcccctcatcatcagaaatgagtgaattctgcaatacgtagtttccaactcttggtctttatttctattatatattttggcccctagtggcttacagg

SEQ ID NO: 694 - DNA, 201 bp, Bos taurus
atcagccctctcccccagtcttgaaggagtggacttattgaaatagtatcttgtggggctcagaagttagttctcaactggccaccagagtcagcactcagggggtgcccactatgtgggttatatgtcagggtatagtagggctatagtaactcctgctatagtagggctacagctgctatagggtacttagtggaaggg

SEQ ID NO: 695 - DNA, 201 bp, Bos taurus
gcaaatgtgtacatttctaaatatgtaccagttctaaattattatggaggaagaagagtcattttgtgttccttgtctagtagaattgggctacccatgcataaaaactctgattttgtacatgttcccagaaaatcagaccagtttcctctctcattaatcccttcccaccaacaccagcctccctcaaggtcccatacc

SEQ ID NO: 696 - DNA, 201 bp, Bos taurus
gatgacccatagaatcatgatcttacaaaatggtggctcttttatgccactaagtttttggaaggtttgttgtgcagcagtacatctttagaacagttttaaatatctgtggatattttcttagttctacttatactgcattagctaatatgatctcacattacttttctatcacctaaacactgagggttcagacctcta

SEQ ID NO: 697 - DNA, 201 bp, Bos taurus
gattttctgcttctcatttccaaagctaccaataacttatcacccaatcattaattttttttttcctttttcacattgattctttctttttactgaggtgtgccatgcccaagttgtggtcttccatttctttatcttccaccttgcacagctcagttaattccactttttattgtttagttgctcagtcatatcccactc

SEQ ID NO: 698 - DNA, 201 bp, Bos taurus
tattgccatttattttaaagacagggagtatgcataatataatatctttcaaaagggaccagcataaaagctgtggctttgtaagtagtcaaaatgcctgataccattcagaattaataacgaacaacgcaagaaagaaattctgtttcagggagtgagtgactcaagagtcaaatgtttaaccaaggtgtagttttgatt

SEQ ID NO: 699 - DNA, 201 bp, Bos taurus
agaatcccaattcaccaccaagtctgggtcctctgtacagttctctcatgactttctataacacccaccttctccagcaaggcctgatgactggtccccagatcctggtcctacatacatagtttctgtttttctatctcaaggtattatgtcaaagtcatgcagtaaccagaaggaaaacccacttctgagtgggttttt

SEQ ID NO: 700 - DNA, 201 bp, Bos taurus
tctttgctctgtgctttagcagaagaaattttcacgaaacctctgtcatttgtgctgctatcacacacatctcccacattgggttccgctgctccctctcagagcagatacattaccctcctactgcccaaaggcagaaaatgacatggaatcaaatcaaactcagggaaataagaaacctgaagttttaataatataact

SEQ ID NO: 701 - DNA, 201 bp, Bos taurus
gtgcggtttccacgattataaattatcctaaaagaaattgagtttttaggtggggagaaatgattctcggcagcaggattccagtgagtaaattgccaggcccaaaggtcagagagtcattctggtcatgttcctttttaaatgtcgttgttgttatggttcttcttccttctgtaagtcaccttttggtttggcaaagat

SEQ ID NO: 702 - DNA, 201 bp, Bos taurus
cttccccatgtgattttcaggcaaattgtatgaaccaagtttgcaaatcctaatgataaggtcagaagaaggaaggtgtacaggtataagaaactggaaggaaaaatggaaatgtgggacagtcaggaatgtgaagggcaatgtcagaaatctgtgaagggtagctgaagcagttacataacacatctcctcctagctgtg

SEQ ID NO: 703 - DNA, 201 bp, Bos taurus
attttaagtgaataaataatatgtccctcaaccttaatcctgagacctaaacctcgacatcattgaactgtaatcttgttgaatttaatctcatggcctgtatccttcctttcttctgaatcccttgtccaatcatttttcaaccttttaaagccatgaaagaaattggtactgagtgcatcccaaggcagacttgggatg

SEQ ID NO: 704 - DNA, 201 bp, Bos taurus
agtggattgtcgtttcttcctcaaagttcaggtaattaatttcaaactttggtgggcatatcacacatgcagatgaatatacttccttccacccttctttccttcttaccttcctctctttctttacttccttcctttaaaaaacctcagtccataaaacaccacattcttatcaatcacatgtatgcatgcctgctgttt

SEQ ID NO: 705 - DNA, 201 bp, Bos taurus
tgatagatgcctacataatcttgcatgatcatagccagtgggctactctttaacacacacataaaacaaatgcttttgaatgaggaacaataaatgaaggaataaagttgaaaatcctaaaagaggttggcattctgagtgcttaaagcacacacacacacttcaaaacagatcaaacagggaaatgttaatgacattgta

SEQ ID NO: 706 - DNA, 201 bp, Bos taurus
agaagttcaagttatctcttgagtagggcatcaaattttaatggtgaaggcaagagggtagggatggggaggaccataaagatttttttattttaatctcctaactagttctgacacagtcccttctctcatgttaagaatagctactttatactgacttgcctctgtggaaacactcttatttaaataggtctaacttag

SEQ ID NO: 707 - DNA, 201 bp, Bos taurus
agcaaatacatctcttatgaaaaccagagccctctggacttgggggccatactctggaaaccatgtcaagtttgagcactgtggaatctcaggccagctgcgagattttttttcccctcaagttggcatacaggttcaggagaaccaaaactggacagagtcatttttgccaaatctggcaaacagttggatcgattccac

SEQ ID NO: 708 - DNA, 201 bp, Bos taurus
cactgtcaggagtggcctaatcaaaactcaaattaagcaccatagggataaccattcattcatttttagggggaagataaggaaaagctccgcaggtggtcgagtctggcctgtgttttaagaaatgcacaagaggtcaacaggtagagatggaaggaaggggccaatccagcaaacctgaacaaagtcagtggtggaaga

SEQ ID NO: 709 - DNA, 201 bp, Bos taurus
tttggcttccacgatttgacactgagaatgttttgtctcagaatgtctgaataagatgtcatcagaattacagtcacattaattaattttcaccttgaacaaactagtacatgttttccagggtaaaagccataatactaatctaaatccttgatcaattttctatagggcaaatatttccatttttgttttatactccca

SEQ ID NO: 710 - DNA, 201 bp, Bos taurus
aagtgctaagatgctagatatcatgtccttccttacagacgacagacaacttaatagacagctttaggagtatctggccggccccaaactccccttttcagaattctttccatcggacaaggatgggcaacaagtagccatgtttgcattgatcaaggcagccagcctggccttagcgtttagacaaggaacagtcagctg

SEQ ID NO: 711 - DNA, 201 bp, Bos taurus
tgactgaacaacatgagcttcatgtaagggttattgttcttttatggccaagcatcctggaccccctttacaggagaccttagttttcctttgagaaatatccaggggtgagaataatttggttctggtgatccgattaaaaactgactaatttaggacttccctggtggcacagtgaataagaatccacctgccacagca

SEQ ID NO: 712 - DNA, 201 bp, Bos taurus
ctctgatctttccttggagcaagaggcacctgatgatgggaatggaatgttcatcatggaggcaaagatgatacaaagactcccgaccaacttccttcacaaatgtcagaagattgcctatgtaattttgcctatccatcatttcttttacgtaatactattgtccttcctaaattatctgtcagcttctagttttacccc

SEQ ID NO: 713 - DNA, 201 bp, Bos taurus
taatgtttctagttggctgataattttcatagcaaccatggtatttggcatgtcctaaacacctttcattagaggccttcagatctctttgaagcagttcattatactctgaaacagttcagagaataagagagaataatccacaagttttgctgatattctatagctgtgtagagggcatcacgtagcaaatactgaaaa

SEQ ID NO: 714 - DNA, 201 bp, Bos taurus
atttaagtggtaaatccattaagaaaagcaaaaaaagtaaataccttaggagtcagaattttctttagtgaagaatgtaagagttgtgattagaaaagaatcatgggtggggattttctgaggtgtttatagtatattatttctttttacttttcctttaaaaatcattcttattgcggtttaactcacatttaatgaaac

SEQ ID NO: 715 - DNA, 201 bp, Bos taurus
tggcctggagatgactggcaaaccctgatagggtcgtgcaagcagagggcccagggcaaggccctgggggaagcttttagcagggtggccaagttgctgtgttggggcagggggatgtgactgaggtatgcctcagtgattacaaggaggctgggaggtcatgactgactctaaagacttcatttgctgggggcaaattcg

SEQ ID NO: 716 - DNA, 201 bp, Bos taurus
ccttaaacctaaagcgttttgctttatgatgaagaaaatgtgttggtaatatccccaactgggctgaaattaggaagaactagtaaaaacaacatataaactatagtggaagcttttttaaagctatggattattattgttataataaaatataagtttaccaggtacatttacaaacctgcttgtataaagcctcacaaa

SEQ ID NO: 717 - DNA, 201 bp, Bos taurus
agctccagcttggttaaataggagaggcataaagtagccttttatgggtaccactgacccaagtttcatttttcaatactttcccccagatcatcaaaagtcaagagtattccagacaaactgcattgtctgactgtcttgggtaatatcaagaaaacataaattaaaagaagtaactttcccttattcccccttccttga

SEQ ID NO: 718 - DNA, 201 bp, Bos taurus
gttgatgttgaggtaacagggcagttaacattatcaattcttagagacccgtagtttgagacagcgggtgggtagctagtcatgatcaccaagtacttaacgtcttccattgttggtggtttttgcatctgaaaaactcaggaaatgtgcattaaatactattctctaggtacttcagagataagctatcgcagaggatat

SEQ ID NO: 719 - DNA, 201 bp, Bos taurus
atgtagagttctgatcctggtaatggcagaaagcttttatcagacaaatcttcctgcatgtaacaatgggaaactttagacaaaacataaaaactgctattataaggcaccagagaacaaccaaacttggcagacgcaggagagaataaggaaggatgaaagccgcatttatacgttttgccctgaaagcacagcccagcc

SEQ ID NO: 720 - DNA, 201 bp, Bos taurus
aatactccaaagaaattttgcttttctgtcatacaaatatggtttgcattaaccttatgatacaagttattaatacatgtcagctttctttccccactttagtgggaagatatattttgaacaatttgtctgcagattccattaaatggatagagctaggtatttacttagaccagtggttttcagcatagactgccattg

SEQ ID NO: 721 - DNA, 201 bp, Bos taurus
aaattaagtcatgtcctgtatagaacatagtccttgcagacaggccacctgaattggatctttgcttctctactttttagtagtaactttggtaagttacgtaacctcccagggcctcagatttctcacctgtaaagtgggagtaatgtgcacacctggtacagtggtgaggcatcatgaagtcatagtgcttggcacaaa

SEQ ID NO: 722 - DNA, 201 bp, Bos taurus
atgaagacttccaggagagtaacagaatgtattgtaagattacacagtatctgttaactttatcttatttttctcagtccatgaattatgctaaccttattcccttacatgaataagtagtgtattctaatctatgcccttggtaacaaagcatattgggtatgcaaatagatattcagctaaacaggtccaatcagaact

SEQ ID NO: 723 - DNA, 201 bp, Bos taurus
ggaggccagaggccagggcagagtaaacaggggcagaatgtgaggagatgggatccaggcagggcagggagccaggtgcaggaggagggaggaggacctcagaggccgtggttacaatgttgtatttcattctgaaatcccatgtgagggtttaggttgaagagtgatgatctgatgaatagtttttaaaggactggtctg

SEQ ID NO: 724 - DNA, 201 bp, Bos taurus
gctttagtaagactatagacccagatgaagaggccaatcaggaagaaggcttacacgtaatatgtttagattagacatcagtcatgactttttgatggttccatcagcacctgtgagaactcatccgagcattcagtcataagacaatatcagtgatagtgagattattacatgccagccctggagcacaatgcttgctct

SEQ ID NO: 725 - DNA, 201 bp, Bos taurus
gtatgtgctcttgcacatactacatttctggaaataatgctgaagtcagtagtttacaagtctgagaatccaggcttgtagtaatatatgctgactggcctggaagtagtttataaaataatatttgttttattgaaatcaaatttggttgtcagcgttttatcatttttatctaattagtttttaataacttaacttatc

SEQ ID NO: 726 - DNA, 201 bp, Bos taurus
ttatataacactgaatattaaatttaacatatattgttgatggcctcatatacctattgctgtgagttgaattgtgtctccccaaaagatatgttgatcctaaacccagtacttgtaaatgtggccttatttagaaatagggtatttctattaatagatataatcaagtgacaaaaacggtccactggagaagggaatggc

SEQ ID NO: 727 - DNA, 201 bp, Bos taurus
gtccctaaaatagtctctgaaaactattagtgctttaggattgctgtaagaaagtgctataaagtggatggcttaaaactacagaagtatactatctcctgcttctggagaagtccaaaatcaaggtattggcaggaccgagctccctttgagacctgctaggaggttcttccttgcctcctcccagcttttagtgatttg

SEQ ID NO: 728 - DNA, 201 bp, Bos taurus
taaaccattatcagagtgtttcataaatctagtagcatattcacttttgattaatatttccaaaagacacctctttcagtatgtggttattttgatagattaaagaaaaaagacagtcttgtgtttcatgtgtcctaagccttgcatgcatgtatgctgtcgtttcagccgtgtctgcttctttgtgaccctatggactgt

SEQ ID NO: 729 - DNA, 201 bp, Bos taurus
cattaacacaggaaaaattgcatgactctgagaaaataatcattatagcttcattaacacatggagtattttacacatgctatagtatgaggttctttccggccaagaaagatataatttatgagccaaggatctggagaagcaaaaaatctgagcaatccatccttgaatgtgaaaaagaatagacagatgcatttagaa

SEQ ID NO: 730 - DNA, 201 bp, Bos taurus
tgagcacatgacatgaaaagaaacctaaaaacatttaaaaatcaaatttacatgctcatgtatttatagttattttataataaccatatgttaattttaagtaaaggaaaaaattgatttctctcctggtatgcccatagttttaaccagcttaaaatacaaacaagggaaaatttgaaaaaaaaaaaaaagaaaagggtc

SEQ ID NO: 731 - DNA, 201 bp, Bos taurus
taatgtgactccaacgtggaagcagctcacaaaatcatcaagttcaagtccattattttattagagtcagactcagacaagctacttgcaaaacatcccatgatttgtgaggtgacagaaaacttctttattagagttccctcctctatctcctatcaactcccagaaatatttgacaggggtttgagagccctctgacac

SEQ ID NO: 732 - DNA, 201 bp, Bos taurus
tactgttacgctgcattgtaggtttcatttagtcacacgatgaaataatttaaggaaagaatttgggaattatgatgctactttctgctatgtttaggcattccttttttcccccacagtgttaataataaagataataaaaaagtgtttaattttgaagcttgtggagatataactactgaaagatcttgagctcaaaat

SEQ ID NO: 733 - DNA, 201 bp, Bos taurus
ttaattcacaccaaaataaaaaggacactgtaagtacaattttcagtttccatctacaagccacactgctctagagaaaaatgtcagcaactggcacacttattgatggtaggaatataaatttctggagaaaatttggtaaagtgtcaaaagtctttttttttaaattacatacgttttgatagagcaattttacttctg

SEQ ID NO: 734 - DNA, 201 bp, Bos taurus
tacaatgcagtgtaacatattctatgaattgtgctttaaaggagatgagagaaacagtaagagggaaagagaaattgattctgacccagccacaaggtgacaagtttctgagtgtttaagacagtcatgttatcctcataaatatagcacctggtttaaatcaggtggtaaataagtgcatatgtatactgcgactaccat

SEQ ID NO: 735 - DNA, 201 bp, Bos taurus
gaataaccactgctactggagatgactggaccaggatctagccctggaaaggaaagggctagactgcttccaatgttggtctagggctcaatctcaggtctagggctgttttgtaccctaggggagatttgagttcaaggcaggaaaacctggcacagccaacacatgtagaatcccaatctatgggaagatcagtcagga

SEQ ID NO: 736 - DNA, 201 bp, Bos taurus
ccatacactttgttcaaaaaagatatagtggagccactcagagtcttttctgtttcctgtaaggggaatttggatcctgcctcacggtagtcataaaaatcttatctgcaaggtgaagttttctctagaggctgtactgctttcaccagggagaacaaatattgaacccacctcgcctgcttttcaaaaaaaagaaaaaac

SEQ ID NO: 737 - DNA, 201 bp, Bos taurus
ctaatttgtccttttgcattgtaacaacgttttcaaggccctttctatttttccaaaccacatttttataaagaacataaatcgccccccgaaaacaaaaggggcgcgtccgggccaactggcgccatcacgcttcagtgtttcgcggttctagaaagtttgttgcgtctagaagctaccctcactgcaaacgatgcgctg

SEQ ID NO: 738 - DNA, 201 bp, Bos taurus
ttgattactttgcaaaatcacatgacgggattataaattaggtttttactcacttatctatgagaattttgtatacaaaattttgagatattgagaaaataaagaccttagttgtcattcaagttgtttattttcacttctagaactgtagatgacatgattttagacacccaaagtaaatttcctgtgtgtttaagaaag

SEQ ID NO: 739 - DNA, 201 bp, Bos taurus
ctgaaaaaagtcaaaggaaaaaacccttagctacagaggaacaaagataaaggttatattcaacttctccttcttgcactcaaggggatagtgaattaaagtatttaaagcattgagagaaaaaagtcaccagcccagacccaactgagtgacttcactttcacttttcactttcatgcattggagaaggaaatggcaacc

SEQ ID NO: 740 - DNA, 201 bp, Bos taurus
tcgccaacgattcccaggcctctcctggagttgttccagggatagagccttgagagagtaaggtgttgtggaaaccatctaatggtacacatgactaaaccagttaaggcctctataaaaaaacttttaagatcctgggcaaagatctacttgtcttgaagcccccaaagacaaacctcctaagtaagttcttctgtttat

SEQ ID NO: 741 - DNA, 201 bp, Bos taurus
tctttccatagatcaaagaagtagaaataaagaataagtaattaacagatgaccaggtttctttcctacctcccccttcagtaatctggcaaacaaattgtgtgaacaaaatagcatctaaaaaaagatcaggaagagtcacaaggcttcatactgtgggagctggcaatgctctgatcccctatctcaatgattaattga

SEQ ID NO: 742 - DNA, 201 bp, Bos taurus
aacttcccttaaaattaacatttctttgtgagagtacctcgtggcttaataacaacatgagaaaagaaattccctgtcactgaaatcaagtgagaattcatatcattgtcacatttcataccatggaagctccatgaggaaagagattctgtcctgttcattcactgatacattttgtgccagatgcagtaggtactcagt

SEQ ID NO: 743 - DNA, 201 bp, Bos taurus
aagaagagtctgtttcattaaaataattaaccttcatattattataaaatagttgatgtattcatgtctctcaaatataagcgtgagatttttccacaggatatataatcctgaaaagcccagtctttcttctccatagcaagtccctgaatgcctctgtcacaccagtggcgacagcactatggcgggttacagtttatg

SEQ ID NO: 744 - DNA, 201 bp, Bos taurus
atccttctcagtctatgttgcttcccagcaacgtaggacattttccttcccctcccagccacactctttagagactgttgctcttcccaccacccaggaacggctcctgccaaagtgttgtgatatccttgttaaggagtagacacgaaggagctctcacttatctttcatccaaagataacatttgctgatgttcatccc

SEQ ID NO: 745 - DNA, 201 bp, Bos taurus
ctgaatttgcttttatcagaatctccagtttttgaaggagatggctaatgacaaaaaccacatcagctcccaagtggaaaatagtgctcagggcttccaggggtcaccacgtctcttccagtattataaaatggagccctccccaactctctcttgtattaaaatagttaacagctgtataaaataaaagcagacacaata

SEQ ID NO: 746 - DNA, 201 bp, Bos taurus
cttatcaatttctgggtggccatgtaagttactgccaatagcgtgcaggactctgtctggggcacagatgtgtttagagaagtgaagtccaatctgttctattggccactgagtgcattactggcagcctggggaaggatgggaattgtgagaagggtgacttgggctccagactatgaaaggtgtaggcaatggctcatc

SEQ ID NO: 747 - DNA, 201 bp, Bos taurus
tgttataacctctagaaagtttgagcactcatcttagatctagaagagatggagagaaaaaacctccatgtcagggcacagtagaacccttgtaccctgacatttacaaaatgtgtgtctgcaatttataccaggggtccttagggctggattaaatattcagattcccaagatacttgtctgcagtctactgtgcacaga

SEQ ID NO: 748 - DNA, 201 bp, Bos taurus
ttgactgttgataataatatgcttgaacagggaaatgcaaaaaaaaatgtatatgagaattaaacataataagaatgtctatatttgaaagcttggtacacgttggtggtatctcagatggataaaacaaccaattaacttttcacataaaatatccttgcttgacagttatcttcttatagcacaaaacaaatataacaa

SEQ ID NO: 749 - DNA, 201 bp, Bos taurus
ttgatgatatcttttggattcagattgttaatctcatcattatacataggtgaataaaacaaaataccttttagctgctatggaaaaaaagaataaatcccgtgacagcaggttcttataatgaaacagatcatgcatagaggactttgaaatttgatgctaaggcaataacagcttctgtcagatctgggtaacttcatt

SEQ ID NO: 750 - DNA, 201 bp, Bos taurus
cagtacaccaagtaacatatagaatttggttcaatcatttgtcatctgaaaaaaatgcatagcatcaaagttgaaaattatgttttatttggtggacaaagcagaggacttaaatatgggacacagtacctcagatagctctgagagactgctctgaaaagtctcagaattatctggagaagccaggatatataggagttt

SEQ ID NO: 751 - DNA, 201 bp, Bos taurus
gacattaacaaaataccattgactgggtggcttaaacaatagaaatttattttctcatagccttagaggacagaagttcaagatcacgttggccctgaatgactatgtggaactaagctcccacatctacccaataaagatgaaaagaaatgtttacatgaagcgccactgaggccctaggttatataatatgcataaaac

SEQ ID NO: 752 - DNA, 201 bp, Bos taurus
atatatagtagttgtcagatttaaatccaaaaaaaatgaaatttgttttttagtaactaaaaatttcatactcacaaatggagaatttcctcagagtttccatttattcttgtgattgtccattgtatctctgtcctttgcatcatttatatttgctaaaatagaattttgtctttacaaatgccaccctctcttaagtca

SEQ ID NO: 753 - DNA, 201 bp, Bos taurus
ttactgaattcattacaatattgcttctgttttacattttggtgggatctcaactccctcaccagggattgaacctgcaccctctgcttaggaatgcacagtcttaaacgctggacctctagagaagtcctaatccttatttcttgagtttttatcttcatctagctctttgtagtcctttgcctcttcatctcatgatgt

SEQ ID NO: 754 - DNA, 201 bp, Bos taurus
ttagaaataagggggggggggggaacactaacataaatagtataaatagaactaactgaaaaagagaaaaatggaaagaaatgtcatgatattgtggtactgaaaagcacaaaacaagatgtaatgaataattccaaatttgtcagtaaccagaaaagtgatagtcaaccaagctgttagttatgaggcaaagattttaag

SEQ ID NO: 755 - DNA, 201 bp, Bos taurus
agaatgtaagttccatatggtcaggtatgaagttagtacatcctttgtttcttcctccctttttttccttccttaatttcctatttgcagtctcttttttccccatgatttattccactttggtcatgtatattgatatgtattattaaattaaaacacaaaggaaaagttggataatttccaattataagtttgagaaac

SEQ ID NO: 756 - DNA, 201 bp, Bos taurus
acctgacaggggcaactatgaatatgtcaacacctcctgggtaccaggtggacaggaagctctccagcccggcagtcccttcacttggagctatggagctgcacacgtaccaatcactgtcatgtgatgaggcactgaggaagtgacaaggtaatggctgtcagtgtttgttcctctctagagtaactttggattggggag

SEQ ID NO: 757 - DNA, 201 bp, Bos taurus
tgcatgcccaaatctgaggcttgtcaaaaaaacaatgaacacaccactcatcacaagctaacaaggtacagattacaagtagaaacataatattgctgacgaaggggcaagaaaggaacaagaacatgtagagatactgtgttaaaggcactgcaaactgaaaatcaaaatctcagaatctagcatttctttggtaaacca

SEQ ID NO: 758 - DNA, 201 bp, Bos taurus
tagaaaatgatatgtatgtttcacctggtgtaagtggaggtgcttaggttccctgtgagctggggatctcatgctaagtttacctgtggcctgtttatcacacaagaaatttctacagtagattctgagcacattaagaatagggtattcatcttcaagtccacagctcctaaaacagggccctcaataagaacatgtaaa

SEQ ID NO: 759 - DNA, 201 bp, Bos taurus
aaagaatcagacatgactgaatgactttcactttctttttattttcactttccccataaatcagcccacacttgcatctacgtaacctggatgggcctctgccagctcagtcaccctttggggtcttcacagtttcaaaatggcatctaacatgccatccctctatggcatcccctcacatgccatgccttgctttcagga

SEQ ID NO: 760 - DNA, 201 bp, Bos taurus
agtctttctttttacttgattattctggctgcagagtccagaaggcaaaactcttctgctaacagggacagcttgatcagaaagagttattagaccatgagataaatatgtgcacttagtgctgggacactttgggggaggataaagtaaagacaggaaaggaatgtctaaaaccgttctggccacaatgagagaagcaag

SEQ ID NO: 761 - DNA, 201 bp, Bos taurus
tttttggctcctggactctaaaagcctactcagcctgttttaatggtagcatctaggtttaccagtttggcagtggccctactatgcttcatctctattatagtatcagggtcctaagaatagcactaaaagctgagctctttatggctactgggaaactttccctctggtaagtttccattatatggtggccaccttccc

SEQ ID NO: 762 - DNA, 201 bp, Bos taurus
tgtgctcggcaacaagaaaagccaccaaaatggcccatgcactgcaacaaagacccagcacagccaaagatagatagataaaatcatctgcaaaaagagagagaggccagggcaggtaagagtcctagccactctagacaaggcagttgaccaagggccaattaagtcacaagagacttgcttttaaagaaaagaccaccc

SEQ ID NO: 763 - DNA, 201 bp, Bos taurus
actttgacacccccatctaggcctccatctccccactctgtgtctgggctgaccttctctgttgctttgagcaagagaatgcagcttgtgccactttgagtctaggccttaagaggtcatgcagtttccagcctcctcctctctgaagtcctgtgacccacatggcaagaagaactccaggatgaaagctcacgtggagag

SEQ ID NO: 764 - DNA, 201 bp, Bos taurus
ccaattaccctcacattactaaccttggcagtcttccctcatcctattccctggccactccttctgtgaatactgcacactgctgctcagctctggtaatctgtataactttttttttttttttactttgcatttgggcaaagaatccagcgcctcatcctattttatactatttcccaggctcttttcacatatacccta

SEQ ID NO: 765 - DNA, 201 bp, Bos taurus
cccagagaggcccctgggtctcaggggagtcagccctgcccctgcccccgctaccaccctcctccccagggacctaatgaggccaggccacaggtattactacctcagttttttactttgtattatgctctattggaatctatgagccactgcttaggaagagcagctagaagcctaccctcccaggaactgaatttccag

SEQ ID NO: 766 - DNA, 201 bp, Bos taurus
aggaaccgagggtttggggacagagggcagacgagggacgcaggctgaagaagcacagtccctgtcaaaccaagcaggcctgtgctgtgtggtgtgagggcgccgccaacagccccttcctgaggctcctgggggctagccttcctggctctgttctgaagtcattcagagcagaaatgcgcgtgcccggccccaagtccg

SEQ ID NO: 767 - DNA, 201 bp, Bos taurus
aaaacttgagaaaaaatatatacacttaagcaactaatttgtttccatcattatgcctgtactatttttatggtaattaatttcagcgggttgtttgtaacaatgacttttgtattagcctacattatcatgtctaaaaacatggattagggacataatgcacagaaaaactgctcgtattggtggcaaacaagtggctgt

SEQ ID NO: 768 - DNA, 201 bp, Bos taurus
acatgctacaacacagatgaaccttgaagacatcatgctacatgaaataagccagtcacagaaaaacaaatattatatgattctacttatatacgttacctagtgtaaccaaactcatacaaacagaaagtagaatggcggtagtcccagaggacaggggttggggaaaggtggactgttgaggagttagtttttaacagt

SEQ ID NO: 769 - DNA, 201 bp, Bos taurus
agaagatgcaaccaaaataaaattgataaagtcctaagtaggtaattaacagaaaaagaaatccaaatgattaataggcatatgagtagatgcttgaactcgttggcaaggagacaaatgcatttatatatatacataagctcgatgttcttctctggtccctgtaaccttgcgtcaggtggtttcttggccactcctccc

SEQ ID NO: 770 - DNA, 201 bp, Bos taurus
gctatctggcatgcccccctcccccaaaaaagaggaattgaatgaagaatttaaaaagagaaatggacaaaaaagcaaggtatgaaacaagaggtgactggactgaagaaagaaattgaagaaatgaaggttaaattataaggagcatacaggaggaatatatatgactaaaactttaggaaggagcattgaagaaaggca

SEQ ID NO: 771 - DNA, 201 bp, Bos taurus
aacaaaaaatacaaaagggaaagaggaaaaggacagatcctatgtagttaaatgaagataagatcctatcagcagcaaaagtactattttatctatgagaggtttcatacagattccatgagaaccacaaaatgtaaatctagagtagaagcatgaaacataaaaaagtaggaaactatgaaagacagaaaacctctaaac

SEQ ID NO: 772 - DNA, 201 bp, Bos taurus
atatgaaaactgtataaacattctgtaatttctaaagatgctaccatactaaaagtgcaccagaatgcagaatcctgtagtttgggggaaaagcagtacgcaacatttcatgaggttttaaaacctaaacaattttaataataaatttgggggtatgttttattacagaagatttaaaataattcatagtaattacaaagc

SEQ ID NO: 773 - DNA, 201 bp, Bos taurus
tcacagatttctgtgatagtttataaacatctactttgacatatttatcaaagcattaaatggaaaaatggaatattcataattgtcagtcactgtctgtttatcttttttccagacaatgtagaagaagagatggaagatgatgacctatttgaaaccgagtttaggcaatataaaagaacatattacatgacaaagatg

SEQ ID NO: 774 - DNA, 201 bp, Bos taurus
aaacactgtgactcagattggccttgagtggaaactgggaaacaattacattcatttgacttaatgatttgtgtaaaactttttctgactgttttatcatctaaattacctcaaggttagagtaattctcagtctaccatctagttattttttttgtttgtttttaggctttctgtaacaatatgaagcattttttcatat

SEQ ID NO: 775 - DNA, 201 bp, Bos taurus
tccagagctctgtacagaaccacagaaaagacaaaggacactggtccactgcagctactcaaagatcattcattctttgacaagaaaaggtgtgttactaccacagcagtgtggttatactcagttctcaagttaaatgagtggccaatgtgtagttgctaagaggagaggtggccttcagagcctagtttaactacaaaa

SEQ ID NO: 776 - DNA, 201 bp, Bos taurus
cctggggtctggggtgggtgacactggcagagaacaggcctgagcagatcctggaaggggacagggaatcttaggtcctgcgtgttcagagtgtggtgtgggggatggctcagactctgggctggcccatctctgctggcccttcagactctttgccctaaggggagggggcctcttgcctggtataagaacaatgctgag

SEQ ID NO: 777 - DNA, 201 bp, Bos taurus
cccccacaccctccccctgggctggggcctgccaggcgcaggtgtcagggaacaagatggcgccccacagtgaagggcgcggtgtgagggggtctgggggcggcctgcacttactccgaggcgctggctcctctgaaacccagacgctgccaattccctgggctcaggagttctaaccgccttcttgctctgggttcttca

SEQ ID NO: 778 - DNA, 201 bp, Bos taurus
ctgcttctattactttgactatgattactttgcagagatccagctacagaattcctaaatcccagactttcagagtcttagctatggggccataacatatcgtggaaagcagaacaaggttgttaatacttactgagaggagagatgcagaagggaatccctatctggctgccaaatgcggtgagaggccaattgctcctt

SEQ ID NO: 779 - DNA, 201 bp, Bos taurus
agggaagggcatgcggccagggctggagtttgtgcagagcactgcccagcaaccagagggtaggaggggctgggaaggcagtccttgaagcactgagcagggcaggagagggcccaggattgggcagagagccaatgggcagtttccctgcccatcctgggtagattgccccacgccctgccccctcacccacctcctttg

SEQ ID NO: 780 - DNA, 201 bp, Bos taurus
gggaaatgaggagacacaaagcgtggatgtcgcacttcgtaaggagcctcagctgtttgcaaaatgtgatactcaagtgttcagaggcccaggaccccaaatcccattctcggagtcttgtctgctagacttagtcaggcatggggtctgccaggagacaggactgctgcaggattgatgatgactgggtgaaatgccctc

SEQ ID NO: 781 - DNA, 201 bp, Bos taurus
tccagtccgttacaagaactggtggcaagctgaattgggcccatgattaatgtttcctcaacccttgctctggatcgtagcaggcttcctattaggaaaaaccctcttatgtttgcacggccctgacacgccacttcctatactctgtacctacaaccccaaagtgaaataaaccattgatttgcttttcccaccacttgt

SEQ ID NO: 782 - DNA, 201 bp, Bos taurus
tggcccccagcactgccttttctgtgccattcttcatgaagtgggggaggagatgggatctgtttgtataacttggggtccagagaagaaagcctggaaggaggccccctacaatagagagcaaaggcacaaaagtgcgggatgaacccttcagggtcttcacagggtggaagatgagagctgagtgggcaggaggaatgg

SEQ ID NO: 783 - DNA, 201 bp, Bos taurus
tgtggaatgctttctggcctccatggtgtcctgtggttggagctgccagtagggcagccctgcaggtctcagtggctgccagcaaggcaggttctcagagcgctttggcgggaaccaggccctgctgtggccaaggacctattcttggttttggacttttcatataagcttctatggcctcaagaagaacaaaggaaaagg

SEQ ID NO: 784 - DNA, 201 bp, Bos taurus
aatgaggtgagaagtgcttcctcgtcccttagttcctgaagcgtttgtgaaggtctggtgttatcttctttaaatatgtgatgggattcaccagtgaaatcagctgggcctgggctttcttcgtgggaagatatttcattactgctaatgctgctaggtcgcttcagtcgtgtccgactctatgtgacgccatggacggca

SEQ ID NO: 785 - DNA, 201 bp, Bos taurus
aaaagttctcttaattacaacagaattaaatagagcattcttcagccttaaccttgttatttttcaaggtgagttattactaactcaattctaggatggcgttcagtagcctctctttgtagcagctgtctgcagagctatttagaagggatgtatctcaggctagatgcagctggagatggatggagtataactagatga

SEQ ID NO: 786 - DNA, 201 bp, Bos taurus
agcctccatgactgcatgaatcaatgcactcacacacacacacacacacacacacacacacaacccacacccacacaggttctgtttctctggacaaccctgatgaatagacactgagctaaaaaaaaaaaaaagcatgaatacttaaagagtcagtactaagctgtctcctagaaatcatctgatccacatctcttattt

SEQ ID NO: 787 - DNA, 201 bp, Bos taurus
acttcagagaaaagaggagccactgtctaatgggagaagcagggaagcttgcttctgctggagggtttaggtacaggtgtactcagagtattcctgtcacgctggagagatgaatatgcagacgtctgatccaagagtccctgcttaaggcaccaagcaagtctgcactgatactgggcacagggagcgctcccctgaaat

SEQ ID NO: 788 - DNA, 201 bp, Bos taurus
aaactggccatctagctcatgtcaagcgagtgaagattcctcggcattcagggttgtcttccccggggacagccctgtggctgggatcaactgccccaagtctgccccagctcctggccaatttgtgaatacagcattgaactccatcatttacaagttttaaagaactgacaacaggcaggttagatccctaacactcag

SEQ ID NO: 789 - DNA, 201 bp, Bos taurus
tcaagaaaatgcagtgtaatgtggctattttatacactgtcagtagggttataaaatgatacaagtattttgaaaagcaatctggaatcatcttgcaaatttggatagtcacccacccaaaggccatcaacagcaaaatggacaaataaagtatgtatatgtcaaactgaaatatagatacacacagtaacatcttaaagt

SEQ ID NO: 790 - DNA, 201 bp, Bos taurus
ccaaacagcctgctcaaccaggaacaggagctggtgttttgggatcagggctgaaacagacccagccttggtgaagtgaactttacaaagagcactattccagcctgagaaattcctaaggcaaaaggacacttaccagcaaaaataaattaagtgattttttttttttttaattaagagcttaagcttatcagggaatct

SEQ ID NO: 791 - DNA, 201 bp, Bos taurus
aggtgtgtgggtcagagagaggaaaacccagaacctgatgtggctgaacaaagcgcagataggaggaagaaccagcaggcgttgagattttaggattttagcctctctgatctttctgtttccaaaaaagatgaaaaccaaactgaccaatcagttgccccagccttagatcaatgcctgaacttgatctaacgcctgaac

SEQ ID NO: 792 - DNA, 201 bp, Bos taurus
cttttccatctccctagtttctgactcagttgaagaaataccaggaaccgaagccgctgttaagacatctggagaagacccactgtctcctttcctgcagtggtgggatagccctctggaatctcatctccttctggacttccctgactctttttaggctgagttttacagtgtataccctgctgcttcagcttgcccttt

SEQ ID NO: 793 - DNA, 201 bp, Bos taurus
caccttctctgggacagataatgaggtgtcagaacatgcagagaggttacaggcctgatcctgttaatctgaacaacaggacccagaagtgatgctgggcgggaggttatgttttccagccccaagctaaaagcacactcaactttatcacatctaagagaatcaaaacatgtatatttactccacaaacactgtggagtc

SEQ ID NO: 794 - DNA, 201 bp, Bos taurus
acttccgagaagagggaacagcactgcaaaggcctggggcgcttggaggattgtaagcggctccctgggctcagttggctgatgcaggatgaggtgggcacatccggacacgtggccagcactcgggtgaggcaagtgaagactaaatagataggatccaaccctgcccttgtacgatttcccttactcccctctaatcct

SEQ ID NO: 795 - DNA, 201 bp, Bos taurus
ttcacagcccaaggaccttgagaataaagaggcagggctgaagatagtagagttcacacacttgccaccaacagttcttccagcttgggacagggcccaacgctgatcctcagccatgtcaaaaccaaagttctggggtgggggagaccccaaagtagagggcagggcctggggctcccctaatcagagagggaaggtagc

SEQ ID NO: 796 - DNA, 201 bp, Bos taurus
aagattctgacaagctgagttacacagccaattaaaagaaagaaagagactgatcagaagagaaaatcaggtccctctatgctgggcccccagtaactgcctttatctcaggacaggaccacgttcccttggaaggggagctcacagtgacaattcatagggcccagaacaatgatgagcccaaatgtgaaactactaagg

SEQ ID NO: 797 - DNA, 201 bp, Bos taurus
ccaaacacccagcccagcctgcagatgtagattattgcaatggttcccagcctttctggaaccagagaccagttttgtggaagacagcttttgcatggcctggaagtggtggggatggtttcgggacaattcaagcaggttacatttattgtgcactgcacttctaatctaatgcctccactgatctgacagaaggtacca

SEQ ID NO: 798 - DNA, 201 bp, Bos taurus
tttgcaatccagctatgcctctctgaccttggaataaggtgtttattttctttctcagggtctgagcttcctgtttgtagtgtggggttggtaataactgctgtactcaattctgtggaacaggctagtttaagactgaatggaaacatgtgctgagtcccaactcaaaggcaatctcatttatttctctgcttccccctc

SEQ ID NO: 799 - DNA, 201 bp, Bos taurus
aggaaggaccaagctgtctagttgttgctgttgcagtgcccaaactgtttgccctgcccactgtttattgatgccattacaatatcaaacttggagcaccgtggaagttgttttcatcctttattgtagttctttcctattctgttctttgtaagtgttggggaatggttataacttcatcaatctgattccttttgtttt

SEQ ID NO: 800 - DNA, 201 bp, Bos taurus
gtaacagattaacacttctaataactgtagtgagctaatttctgtcttcacaagacaagacagtttatataatagcagcttctcacttacagcccactctttgcctactactgacacttcacaacatacatgatggtacagaagaaagaagaatccacccaatctgcctcagggctctcaaaaaatctgctctttcatgat

SEQ ID NO: 801 - DNA, 201 bp, Bos taurus
tcatcatctaattcatattcatgtaataagtgttctgcctgttgctgaatattaggagggctagaattaccttgtaatggcaaaatcacggcttcaatatgagcccacaggggccaaaaatctatcgggatattttttccctgtctggtggcacgttcaatattctctttggcccagtgccaaatttctaaatcaaaactg

SEQ ID NO: 802 - DNA, 201 bp, Bos taurus
tcaccgttttctccccatgggacctcctgggccgtgtcctgagaaaactgttcctatctgcatggacacagtgtcatgttgtcctcaaattgaaacctcagcaggtcctcagaagaccgagcactgacagcgctgacctgtggtatgtggaagtgaaacccgtactggtgctgaaggaggctgagctccgcaacagagcga

SEQ ID NO: 803 - DNA, 201 bp, Bos taurus
cgttgctgacccccatcaatacacagaggggtcagctgcccagagggctgcttccctggctgggagcaggagcctcaaggccttctcttctgaatccagcacatcctttctccatggattcctcttcagtgactgcttaaggctctctaagtagggctgtgctataaaactcagagaattgcctggtcattcagtgtttgg

SEQ ID NO: 804 - DNA, 201 bp, Bos taurus
gtggacatgtgactgaagctggccagtcagtaagtttcacctccttgattacaatgattgtattgtggatgggcataaaatacaaaccaggtcagagactcgatttggggcatcttgttgggccaaaggggttgttttcactaggtccatttgcattgagtctgatgaacacttgaagatggtagaaccaattattgaata

SEQ ID NO: 805 - DNA, 201 bp, Bos taurus
tttgaatcaataaccccagttttattctggctgttgaaggcatgcatgccacatgtaataagtttaaagctcacacaattaaaagaaattatttataatctgtgttccctagtaacaaggttgtggtttctctgacctaattctggctctggtgaggaatattgtgtcttaagacaatggtagtcatgaaatctggagtct

SEQ ID NO: 806 - DNA, 201 bp, Bos taurus
ggtgggggctggggattagggagaggcttaggacccccacgtgactggtgcttttgcttccatttgcttctttgtgaagttctgtaatgaatgggccttgaggagaatctctttcccccttgcatttccttttctttgctaatcttgccacaaagaggtcctcagtggagggccaagcactgaggggaaggagctggggag

SEQ ID NO: 807 - DNA, 201 bp, Bos taurus
cgaagtcccttcagtgcctgcctcgaaggcggggatcccgaatgcattgcttctcccagcccaagagtaaaaaagtttggaaacggccaccggctgccagagtagcgcaactcctccacttggcagcaaagaggaagctcgtggacttctttcggtctctatccggcctaggcacctgctcccttttccaactcgtaccaa

SEQ ID NO: 808 - DNA, 201 bp, Bos taurus
ccagcccctgtcctggccccacatggttaaaaagggaatgattcagggctctgtagattaggacttcagggatgtgatggaagcaggaagcagaattgtattagtcactaaggccccatgcctctgacaccaactccaagaacactagcagccagaattttccctcccaaccagggatgagaggagaaacaagatgccaaa

SEQ ID NO: 809 - DNA, 201 bp, Bos taurus
agaccagactgagaaatattcttaaacgttttcgacagtgatccaaggcaaattttctcttaaaaagaatgccagtctatcaagaccttttattcagtggttttcaggaccagattggaatacagaattatgaaatctatattcatcttctaatatctggactttttataaacatataataatatagataatagatgccta

SEQ ID NO: 810 - DNA, 201 bp, Bos taurus
ttaccatctgagccaccagggaacatcccctaaacatctgagctaccagggaacattctctaaacaccagggtttagggaagggaggggaaaaaccaattcaggcatttacagagattggggttttatctgcatcacattccaggctgcagagaattccttagcaaaaggaaaaaaaaaaatgccacaattccagggatgt

SEQ ID NO: 811 - DNA, 201 bp, Bos taurus
gtttctcaatcttggagaagtggccttatgtagatgtcctgtggggtacattcttctctggtcaccagtgttatatgctctagggttgccccttgtgtgggcttcatgggcccttctcttgtggtgaggccaacttcactgataggtggggatggattcaacccagccggctaccaggatttgcttggtgtgatggctttt

SEQ ID NO: 812 - DNA, 201 bp, Bos taurus
aaataataaaactcaaaataaaatagagtattttgtctcattagcctcccatgtttgtcatggaagattatataattttgttacataactggcctattggtaaggtagagttttgccactggaatcaactgtgtgtgtgtgtgtgtgtgctgtcatgtccaattctctgaggccccatggactatagtctgccacgctcct

SEQ ID NO: 813 - DNA, 201 bp, Bos taurus
gaatcttggagaacattaaaaggatgtagaccaattgctatatcaagaactccatccagcccacccacacctgctagggacacctggcccacagatccccataactggtccacaggcaatgttctgtgcacctcacccacacataaccccacccagtagtcaggcctcaaggtgaactaccaataacagatcaagaagcaa

SEQ ID NO: 814 - DNA, 201 bp, Bos taurus
ttccctcccatcaggaaggttccacaagcctttagaccagcctcactcaccagggagcagacaactgaagcaaaaaacatacagtcttacaccctgtggatctgagtccacaaataggtcagaacttaaaatgggaacagctggtacctgatcattgcgttatgagagggaattgtactgctagaacacctaggacatact

SEQ ID NO: 815 - DNA, 201 bp, Bos taurus
tctgacgacagtgaggtgagcctcaaggcccctcacctgacatggtggtgtgggtcctggcacccccgagttcctcctgagtaacgtcctcattggtgacagacttcacaacgtcagggccagtgatgaataagtaggaggtgtcctgaaaccagagaattccagaaagttcagtctcagagaaggtggtgacatggtggc

SEQ ID NO: 816 - DNA, 201 bp, Bos taurus
aaagaatccacctgtcagtgcaggagacatgagacgtgggtttgatccctaggttgggaagttcccctggagtaggaaatggcaaccccttccatggtgtcgcaaagagacggacactactttagtgacttagcaggctatggagtagtctgaacttccatcatttttcataacaagaatgagtaattccaaagaagcaga

SEQ ID NO: 817 - DNA, 201 bp, Bos taurus
gccatgttgagtatcagtgaacgcacagtggcagtactgtaacataccttgcccccctaaataccttgccccggtgtctttgtggggggtgtgcatgtgttcggtttctcagtaatttggggtgaattaagagatgtcagaagagaaggctagaattgatggtcaaagaccctagggatgatctttatgttgcaaatataa

SEQ ID NO: 818 - DNA, 201 bp, Bos taurus
aaaatttccctccacatctcaccacaacaagggttatctggcccaggccaggattccaaactcagggactcatgggcctgcacaactttaaaacggaaacgccaaacaggaaaatctaacttccaaactcttgaaagttcagaagctctgccaagcccagtccacatggcaacacggggctggagccagtgctggccccac

SEQ ID NO: 819 - DNA, 201 bp, Bos taurus
accgaaaagttggcctgaaactatgtttgccagggctatatgtgttggtagtgggcttcactgtagggaaaacaagcttggtcctttcactggggacccaactctcagtatttgttggcctggttgctttttcctgtgagacacctgccaacattttgcccaggatgcttcagccaggttacctgcattctgggagctgaa

SEQ ID NO: 820 - DNA, 201 bp, Bos taurus
ctctgtaaagctgaggctggatacttttagatgggttcattgtgaccctaaacaaccaggaagcagtgagaaactgttgggtaggcaaccagtggtgcccgtcacagctggcctctaacaattttaggtctgacctgacctagtttcttttcaaaaaggcattctctgaacttcttatctaagtatcacctctctgccacc

SEQ ID NO: 821 - DNA, 201 bp, Bos taurus
aggatggaatcccagcccagagcactgtgtcagaaacagcacaggtttcagtaagtgtttgcccattacctggcagactgaccaggggaaacatgtgtcacgggccaccaaccccagctgcagcagggcagctggtcaggtccctgctggggtgcgtgtgtatgcatgtgtgttcagaagttgactcttacccactgtaat

SEQ ID NO: 822 - DNA, 201 bp, Bos taurus
tattgctcctattttatgttttggttcttttggccatgaggctgcacccccggctttggaaggtgaaatctttcaaaattcttccatgccgatcctgtcatgagggccctcagttttccttttgaatatcagcttttccggggttcctggaagctctctgttctactgttttctgttttgcaatgactcagaagagggaac

SEQ ID NO: 823 - DNA, 201 bp, Bos taurus
actggcaagcacaaccaccagtccccacaccctggtggccaggcagcccccttttccctttaaggtgtttaacctgatggccatcacttctggccacaacctccatgccatgtctccccgtcagctccagccatcaaggccactggcccctccattcaccatgtcagggtactttctggtttaggttggtttacttgctgc

SEQ ID NO: 824 - DNA, 201 bp, Bos taurus
tagggagggcatgccccttctccctggagaacatggcctctgtcctcacccctctcactatttagggggtcagtcccactcttctgcatcattctcttccgcaccctctgcctggccctctacagtccctgtcacctgcacataggtatcctctggtgctcacagacctgctgtgtctttcttccttctgactctcccacc

SEQ ID NO: 825 - DNA, 201 bp, Bos taurus
gagccccaggccagctctgctgctgagaagtgtgagtccctctccggactacactcacccttttggtgaaatgaatggctaaaatggagtcaatggcccatctattcctctaacacatactcgcccttacagtcatccacctatcttctccctacttggcacgctcctttactaagcaggggcccagcaacacacacaggc

SEQ ID NO: 826 - DNA, 201 bp, Bos taurus
ggttttggggggcatcagcatggtgtgggccacagaaggacaatgaatgggatgcaggacagggcatccactgttcccggaatgaatttcctgcagctcctgcccctcttctggccaggaactggggattttctgaggctctcacaccgcaggcccctctgtgacatgcagcctgggctgaaagtctgcacacatgcttcc

SEQ ID NO: 827 - DNA, 201 bp, Bos taurus
gagagcctgttcccagagtcccaattaaatcagaaccaatcaatactttctctggttcctgctgttctgctcaggaaataatgagaaaaacaagggccccagccagcaagcgtgggatggcagccctttgaagtctggagaaatcacccctgctatcaagagtgtgcctggcagctgtggcacctgcaactaaactcagcc

SEQ ID NO: 828 - DNA, 201 bp, Bos taurus
attccttatctacattcttttccttttatctcagctccctttcccattccagcgtctatatttcctgatccttcaagctggccagacaccctcaaatccacgtgcacctctcctacgtctgaaaataccccatagccagagaactgagaagaaaagtgtgtctcacccatcctggctggggagctctggccctccacagca

SEQ ID NO: 829 - DNA, 201 bp, Bos taurus
cccctctccccagactgcagaaaggccatggtacagtggcagacacatacctgctctctaaacctgagccctcttcccagatggatgctcactccatttcccaggtcctgtccagctgggaccacgagaggaggggcagtgaggtgtcagctccaggctgggaaggtaagaacgggtggactcctcctccaccagcacagt

SEQ ID NO: 830 - DNA, 201 bp, Bos taurus
aggtacaaagagatggaaggatcttggatttgattgacgatgcttggcgagaagacaagctgccttatgaggatgttgcaataccactggtaggctgtaacgtgtgctgagggtgatgggttaaaggtctgatctggtagaccctagtagctgtaggttatcaatggacaaataaactgaagtcaaagaaatcaaaactat

SEQ ID NO: 831 - DNA, 201 bp, Bos taurus
tgttccacaattatgtgtgtccatgttggtgcgtatgtctgtgtgtgtttgcagccccagaaaccccatatcctcatcctggccccctgctcatctcagggtgggtctctcctgtgctggtcctgggaaggcttagagctgcaggcgtaggtgttggcatgtgacccaaagatagggatgaggggttagtttctgtgcctg

SEQ ID NO: 832 - DNA, 201 bp, Bos taurus
ttccattcacagagccccgcctcacccttccctcactgctaaggataaggcctgtccctctcttatctcctgggaaaggttaagcccatcctggcccccaagggtagatgtctctttctgaaaagaccggttctcccccgctgttaacctgtgactcaatacaatctactagaagcctgcaagtcactcttgggcctgcaa

SEQ ID NO: 833 - DNA, 201 bp, Bos taurus
ttaatggctttataatatgatattgtatggatgtatgatgtatggttaagtgcttcattgacgtatggatttttagtaacatttctcttccctgttacaaatagtttcattcatttggcagaaaaattttatggtaaagggatggtaaaaacaattggtagtcatcttttgttgctgtttctagcattattattaatgaat

SEQ ID NO: 834 - DNA, 201 bp, Bos taurus
aagcatttccatttcatgcttgaaatctaggttcatccaaggccacatatccagtcagtggcaaagcaggaattcccacaggtgtcagctcactccaaccccctccttcccatggccacagaatgcctctcagttccagatactcttgtccatgaacatttgggtctgagcttagtgatctctgaggtccttttaggttct

SEQ ID NO: 835 - DNA, 201 bp, Bos taurus
ggtttatggtgtcagctttgctggaatgcccttcccattcctcctctctgctgtgaaatgttcttctgactcaccaaggctcaagtgcatgtctgcctgttgttgggccgtgccatgctctgtgccccatggttgggccgtgccatgctctgtgcctgtggttgggctttccccatactctgtgccccatggttgggtcgt

SEQ ID NO: 836 - DNA, 201 bp, Bos taurus
gggggacctgcagagtcagactcctcagaggagccgtagaagggctggggttagggctgagccttggagcaagaggcttctcacagatggccttcagcaggtcagtggacttgggtggaaacaactgcacctgtctctgcaccaccccctgagagattggcagcattttctgtggccacgagcgtagcaacaggactccgt

SEQ ID NO: 837 - DNA, 201 bp, Bos taurus
agtcagccaggcacccaatgccaagctaactctgggctctatacctccttccttctttcttctcaacctggtcaaagtgaccctggcccatcagatattacctatttttctcttcattgttctttattctttatcccatcaaagcttcctgccttctgcagttttccagttctctgaatggcccacttaaagaagtgctaa

SEQ ID NO: 838 - DNA, 201 bp, Bos taurus
gatagtgaaggacagggaagcctggcctgctgcagtacatggggtctcaaagagtcagacatgacttagagactgaacaacaacaacccaggttaagtaggaggcccatactcttaggtctttttcacatggatgggttataatgtgcatttgttctggaaaacttctctcgggttttgtttcatttttagggcctagatg

SEQ ID NO: 839 - DNA, 201 bp, Bos taurus
gtggatgggacaccagagagcacgtgactggggctggaccgataatcggacttttccctggcagctggggagcgagagcgtctggccttttagggccctaacttggatggctggctttcatgtttatatttaaagttcatttagtgagggcttaacctatgtcgagggccgcagatgacctcagggaccttaatcgttctg

SEQ ID NO: 840 - DNA, 201 bp, Bos taurus
ttcatttatttattggcctgccctcctctctctcactccacttgggttttgtgaggttttacgacatctcttctttaatcaggaccaaatgacctgtgacgttgcgcatgcctttatgtttattggccaacaccaaaaggaggatattatactctgacatccctggtgtcatacatagattgatattcactccaggcacac

SEQ ID NO: 841 - DNA, 201 bp, Bos taurus
aatcctcctggggaggccagagtcttgtttagtctaattcactgatccttcctatgggggtaggggtggaggtggagagggagacgaggaagaaaaagaggggaggagaccagaagggagggcctatgagacagaatgatgagagaaaatgagagggagatgagtgagagaaggagagagataaaaggagacagaaataca

SEQ ID NO: 842 - DNA, 201 bp, Bos taurus
gcccaggggtcccaggctctgataaggagtactctcaggccagaagaccatccacgtgtaatagccaaaagaaaggatgatgacagtaacccagaacagatggctcctctggaagtaggcctcatctcctctcgacttccccatcgctgcagagcacatcatgggatgcctggcaggccactggcagtgtgcggggagata

SEQ ID NO: 843 - DNA, 201 bp, Bos taurus
gcaaccccactccagtattcttctctgggaaatcccatggatagaggggcctggtgggttatagtccatgggattgcaaaagagttggacatgacttagcgactaaacagcagaagcagtgggccctacattaactttcagaagctccactcatgccacatttaacatgttaaaatgtacccacatcctacaatttaatat

SEQ ID NO: 844 - DNA, 201 bp, Bos taurus
aggatactgagacaactaaaaatcgaaacttgaggctaaaacagctgtcagagaagagatccctggtatatggcaaagtggggccctggccagcagcccaagctttagaaatctggtgaccagagctgggagaagggtgagtagaggaggatgcaccactgtgggcaaaattctccaaaggctcacagattcaggccactg

SEQ ID NO: 845 - DNA, 201 bp, Bos taurus
accccaggataaaataatgcccacaggctcaaggtaatggcccaagactgggcagctctacagtgttcattctgagcttcctccagggaaatttcagttcttagagaaccagagatcttgttcatcctcagctataagagttgaattatcagtacatatgcttccatttagaaaaccaggtttatccatcaacaatgttgt

SEQ ID NO: 846 - DNA, 201 bp, Bos taurus
ataaaactggggcctgtaaaccagaaggccatgtaaaaaacagtcaatgtttatacagttcatgaatttgaatccaggtatcagagcagcacagcagaagcatgctgggcccatgaatttgaacttattaatgaaataaaaagaaagggctagttgctcagtcatatttgactcttcactaccccatggtctgtaccccag

SEQ ID NO: 847 - DNA, 201 bp, Bos taurus
attggagatggctgccttcttgctgcgtcctcacatggccttttctctttgggtgcacctctgtgttgtctcttcctcttcttataagaatccaagtcctgttggattagggcccactccactgacctcagttaaccttaattatcactttaaagaccctgtctccaaatatagtcaccttgtgagcaactgagggttagg

SEQ ID NO: 848 - DNA, 201 bp, Bos taurus
gcttgatctgcttgatctcctcccactagaatacaggcacaagtcacccttaacaagaagttaatacaaaccactcaactaacctttctgtccaaggggggaaaaaaaaaaaagaaagaaggaatacaaccctaaagcttgggaaaaggagacctcaagcagaacaagttagagaaaagaagatgaaaaaaaaaacagaaa

SEQ ID NO: 849 - DNA, 201 bp, Bos taurus
cactccctgcccctgctctgtgaagtccaggggccctgattccctgacgggctgcccaggaagctagagagttgaatgcgtcatgtgatgccctgccacaaataagaggagaaggcctcctgccgcatttctggtggagggccagcagtgcccaggcttttgcccagatatcctccagagctccaagccctgggtcatgag

SEQ ID NO: 850 - DNA, 201 bp, Bos taurus
aaatagtgggcagccgggcctggtcctattgatatagtatgggggagggaaagaagcagtggtgaccttaatgaaccagatcgcatctgcgtgggcccttttctcatggagatcagagaagagaagatgctgcttggtatcctttctcagctgaactcagcctccaggtggacaggcatctttcagaatcatgagctgaga

SEQ ID NO: 851 - DNA, 201 bp, Bos taurus
cattaacatttccccaactgcatttggataaatcatgtggattcttcttagggccagcaactggtttccacagaggtgtaaatactgatgatgataaaatgtgaatgggtagggaaggcagaaatggtaacagctctcagaacttgtacatgatggttgaatcaaagaatctcaaactgtcagtgctcagaggaaatttcc

SEQ ID NO: 852 - DNA, 201 bp, Bos taurus
catctggttctgaccttttgttacatatttttgattatagaagtggccctggagggcttggagcactaacaatggataagttaaggaccctcaggggcccgtaaggatgggaagtttaactctccatgtcccaggctcaccaagcaagccacaggcaagcaggaatctttgatctggggccaggcctggaatagatggagt

SEQ ID NO: 853 - DNA, 201 bp, Bos taurus
aaaatatgattgatcaccatgcatttgttatgtcaatccatcatggagttaaatacgtgttacccttgggcactattataaataatgatatggcaaacacagctaggtttaatggtcctttgcattcagctattaaattgatgacacagcatcagtattgatgaacagagattttctctatcaaggataatttgtatccct

SEQ ID NO: 854 - DNA, 201 bp, Bos taurus
gagaattcacttcaaccttcaaggagatgagaggagcaatggaaggcaaacaggtacgtggtgagccccctgtggtatttctcccagattcgcctgtcacgatgcctcgttagcacccagacagagcagctagaggtgaaatattagtgtataattaaatgaggccaggagggagcatggagggatccataacccaggttc

SEQ ID NO: 855 - DNA, 201 bp, Bos taurus
ggctctctatcctgctctgttgatctatatgtctgtttttgtgccagtacttcattgctttgattaccatagctttgtatagagtttaaaatcagggagcatgatacctccagctttgttgttctttctaaaaaccgttttgtctattctgggttttttgtatttccatataaattttaggatttctgttttgggtctgtg

SEQ ID NO: 856 - DNA, 201 bp, Bos taurus
ctaacaaaacagtggtgtgtgggatgggatcaagaagccgatcctcctgttgcagggaagaaagtgcatccaagtccctgggacaggccaccaagtgtaggtttttggctttttgcaggaaagaatttgagagcaagccatagtaaagtgaaagatttattcatggagatgcacacttcataaagtgtgggccatcttaga

SEQ ID NO: 857 - DNA, 201 bp, Bos taurus
ctaaaagatcccacatgtcacaacttagacctagtacagccaaataaataaaatcaataaaaataaacattaatggaggccccagacctactggtacctacagattgatgatgttaactgctctgttatctcaaaatcaaccaatcaaagaatcaagcaggagctgatcacacaccctagaaccaccctctctcacttggc

SEQ ID NO: 858 - DNA, 201 bp, Bos taurus
accagagtggcctcaaaaagcaactggtctggtgcataatcactgctgatacaatagcttgacactgcccccttgagaatgagctgcgactaaagttcaagtggccaggatgacttgtcattcactgggcctctaacacccacctctgtctggaaggcacttcgatggccatctgtgccgcctgcacacacacccaggagc

SEQ ID NO: 859 - DNA, 201 bp, Bos taurus
tcagcatgttacaagacaaaacccccaactccacactcttgaaatcttccagcaggctgtaattcagattcttctcctccacctccttcatgaggctccagcctatctgtcctgccctcaaattaggcgaggccttgccatagccctaaactcctgtgattttcacctgtcccttccagactccaccaacactctgcagag

SEQ ID NO: 860 - DNA, 201 bp, Bos taurus
aacaacacactagttaccttcaagttcccatgggaggggcctgggcacagctgggttagaggctatgcccagggtctactactcagggtctcacaaggctgtgtcacagtgtcagatgggccacattcttgtctggattcttgcctggggaagactccacctccaagctcagtctctttgttgacaaagttcatttccttg

SEQ ID NO: 861 - DNA, 201 bp, Bos taurus
caccctggcccttaggacacctcctgcaacatctggtgccgggcggggctcagcctgcaaagcaagttaaagtcaggtcacgatgcgcccactgacggacgggactggaagggccctgccgtggaaaccccaggatgcagcgccacctagaggctcctcggtgacactgtttcccaacttggatagaacagaacaccaggc

SEQ ID NO: 862 - DNA, 201 bp, Bos taurus
tcacccaaatgagcacagcaatctcctaattgtcttcctccttctgtcttcatcctgttactgcccatcctcaacaggccactgatggatctttaaaacctgtcagatgtgtccttctctaaaaatgcttcacaggttcccatctgactcaaaggccaaggcccaagaggcccagaggagctgatctcactggtctttctc

SEQ ID NO: 863 - DNA, 201 bp, Bos taurus
ttcagccactttctctgagctcagaatatcagttcccaaacccttcaccttggtccatgagaaccttatttaaggcttcaggaaactgctgatggcctgagaaacctcactggctcagtcattctaattggtagtgaattccctgggagcaccatttttcaagcttcaaagaacttctaatcagctctctaatttgcatga

SEQ ID NO: 864 - DNA, 201 bp, Bos taurus
ggagagttatgtcaaggatgttctacccacaggccttttcagtaggattcatcttggctaggagatgcgtgcatacacatgggaggttcctgagatatacaaaatatggcctgtgaaccagaacaaatcagaatgactggccaaatggaacccaaaagaaatagcccacaagaataatttaaatgccacgagggtgagact

SEQ ID NO: 865 - DNA, 201 bp, Bos taurus
gcagagatttcctttaattaaagggacttgtctgagctcagttacaacttgaaatcaacctgatgacagttcttctctatacccaccctttgaaaagggtttgctcacaaatccacatctgggttcctgtagcacttggggtgttcccataccccagccggggggctgatgctgagcttttaggaatggcctcattctgtc

SEQ ID NO: 866 - DNA, 201 bp, Bos taurus
cggtgtctacaatgagtggaggcaggagagatttcattttcctcaatgggaaagaattgaaaatttttgcacatgaatatgaaaggaaatattgagtctgaaaaaaagttcatttgagtgttttcctaagatattacagaaaaaccgaaatgaattttttggtcaacccagtatgagtgagggggtgaggcttttgtaaat

SEQ ID NO: 867 - DNA, 201 bp, Bos taurus
ttgcctgatctgagccaactgatgaaatctcaggtacttcaggatgggtcctcagacaacacggcagtatttgatcgagggccaccaccttggacttgaccgagctgtgttaagtgctgttatgcctgaagcaaccttgaatccagcaacggcatcccaggcctcagaatttaggagccacgaggtcagatatttctgctc

SEQ ID NO: 868 - DNA, 201 bp, Bos taurus
gttctggaggcaggatgctttgctggggggagagcagggccagggtgaagcccccgcaaagatgcctgaggtccagtgtctcctgggggctaccagccagtggcagactttcaagggccacaattgagaagtcgcagcagatggctagtgaaaataagagaaatgtttgctcctgtgtggtccccgtgcacttggaaagtt

SEQ ID NO: 869 - DNA, 201 bp, Bos taurus
aattaggatgacagggaggaactccaggcactgcatgatgcagaggcagttgctaaccagccccaggaggaagctgacacctgtagggtttgacggctcttcccaggccattatggagccttctggaactggcatagccatggaaacgtgccatactccctaaagtgtgtctaggagatggctgagagcttgcagggatat

SEQ ID NO: 870 - DNA, 201 bp, Bos taurus
tgttactgttagatataatccatgctttaacaaaaagaaaactgtatcaatgaactagcatacactaacagagaaggtacatttatacagtaacataaggttatgaaaattttaaagtctaagtgattagtaaatctacataatttccaaagaataaattaaaagcaagctcattacaattctcattggaattaggtatct

SEQ ID NO: 871 - DNA, 201 bp, Bos taurus
ggaggtagcacttcactgggccggggaggtggcccctttcaggttcggggcttcaccagttccctgggcaaactcaggccggagcaaaaccaaagtggaccatagatgatgagctttgtctgagatagttctgggtttaatgtcaccaccagtcaggcctttagactctggacaaggggctaagatgagcctcaatttcca

SEQ ID NO: 872 - DNA, 201 bp, Bos taurus
ctgcttaaaaaatgcaaacgatgcctttgcctccgtgtggcctgtctctgccaagaaggcagtgaaaggaagagaacgccccactgccgagtgtgccgattgcccaccccaggcccgagaaaacaacagagggtgaccacagccgtcagtggaggtgactgaaaatctgtaaaggcaggtgactgaaaatctgtaaaggca

SEQ ID NO: 873 - DNA, 201 bp, Bos taurus
ctgctgttcattctgtttccaagtccaacccctatgtggccctgtacggtatgggtctttttcacctgggttgtgattatacctgactaaaataatgctgccgatctcacctgtccaggccaggagtcaatgttgggtcatccccataacggatgattcactccatctccaaaggtgaaaaggagacatcaatataggtgc

SEQ ID NO: 874 - DNA, 201 bp, Bos taurus
cagaaacgttagtctactagttttcagagaatacatctcaccctccatcctaaaacaatgaaagttctctggttgaaaataaatcccaagacagacgcattaatttctttcagtagtttttctgcctgttatagattggaagctcccaggaggcaggacagggttgtattaactcatgtagtcagaggacaattacaaact

SEQ ID NO: 875 - DNA, 201 bp, Bos taurus
acatctataatagcagccatttttaggtacctaccatgtgccaaaaatgactatatgaagatgactcagaagcctgtgaaatcttgacttctaacagaacgttttgtgcctaatagtttctatgctttcccccggctttcatcctgggaggagcattgtacctccaacaaggtacctccatcaccttcagtccaagaaaat

SEQ ID NO: 876 - DNA, 201 bp, Bos taurus
tttctttcttagaatagctcctgaaatttccctgaggaaaaagagtcttagaattctatgttaagttcttcgtggtgccccttcagctgctgatctcctcgtgtgtctgggagcatcttgtctgcacgtatttggggggaaaaagctaagactgacgtatcttggtagctagtgcaggttcattctggagccagtttagtg

SEQ ID NO: 877 - DNA, 201 bp, Bos taurus
aggaattgagagggggctcagctgggtggtcctggcccagagtctcttatggggctgcagaaacctgaagtctagaggggcgcttccaagctcactcacttggttgttggccagagccctctttccttgccatgtggagctcatcactaaccagcccaaatgttcacaaggcagggcactgatcacgccagaacaatgacc

SEQ ID NO: 878 - DNA, 201 bp, Bos taurus
caggtgggtagaggatgctttcctggcctcaggaccaggttcaaagacagagcacaactcctacaggcctcagggccctggaatcctctgttactttgggctccgcacagagtttgacctacattcctcagtccccaaggctacgggccactgtgagtgacacatccactcagaatcagcagcaaaggaagatcacgtgga

SEQ ID NO: 879 - DNA, 201 bp, Bos taurus
aagaaacgatgttctttgagacgcatccgtatttcaggtaagattctttacgacagccttggactcgatggaaaccagccctgcctaccagaattggccaagatgattaccatatttaaaaattatacaattaacatcagttcagttcagtcactcagtcatgtccagcttttttactctttgtgatcccatggactgcag

SEQ ID NO: 880 - DNA, 201 bp, Bos taurus
acctgttaaggatttccaacagagaggcccctagagcttccctggtgatccagtggtgaaaaatccacctgccaatgcaaagaacataagtttgatccctggtctgggaatagcccatgtgccacagctaccaaagcccatatgtcctaaagccaatgctctgcaataagaaaagccattgccaagagaagcctgcccact

SEQ ID NO: 881 - DNA, 201 bp, Bos taurus
ccaggcaggctacagtccacagggtcaaaaagaattggacatgactgagcgacaaacactttcgctttcattaaccattttcatctggcctccctttctgctgttgttattgttactgtgtggtcacaaacaccctcacatatctctgtgcaagcgtgtctgttgggctgtttcctaggcaaaaatatccactttttaaag

SEQ ID NO: 882 - DNA, 201 bp, Bos taurus
agcgggcgtgggctccctcccggcaggtgctgagtcaggctcggccctgagaagtggggacacgcacacgtatgtcacagctagtacaatgcacacagacacagacagtgcccagggcccggggaattgatgacagcttgcaaggaagcagacatacgttcagactttgctcacatcacttgaggaactctgacaaagccc

SEQ ID NO: 883 - DNA, 201 bp, Bos taurus
ggtcacctcgtgccctccattgacagagatcttcaaagaaatgcaaacctgaacacactaacaatggccaatcccagcgggcggcccctggtttttagttatattatacctcatgcttttctgctttataaacttaccgaaaaatagatcagaactaacaggccttgagtgaagacaacagaaggcgtccctccagggctt

SEQ ID NO: 884 - DNA, 201 bp, Bos taurus
gtttgcttgagggtgacgaggacgacagcttaaagtataaacttgtgcccgcgttgcccgatggacagacgtactgacggatgggcagcctgggccccagcggggctgtgatgggccacttggaaatgcaaacgcgcagcttcttcctctgtgtttgacagaagacattccgagaattccttcttagcgaaatgcctttta

SEQ ID NO: 885 - DNA, 201 bp, Bos taurus
cttgtcatgatcaggcccagaggctttctggaggcagaggagtaatcttcatcagtggttgcatcttgtcttcagttcagatgaaaaacaaggtctaggtcggcctcaccaacttctccacgcaggaagctttgtcctgttcaccccattgctccacggtgaccctgctcgctgcacatcttctccagctcccgtcccagt

SEQ ID NO: 886 - DNA, 201 bp, Bos taurus
tgctgtggccacggtggccaagctgagggagggccagcctgccgggtgctcgccatcagcgacccttggtggtccttggggccagtggggcactggcagctcctcccactgtgaagcccttatacaggcaccagggggagtgtgaacttgaaccagagcgcgtggcaggaagcctggctgtgctggaggtgggccagcggg

SEQ ID NO: 887 - DNA, 201 bp, Bos taurus
gtaaaatctgagacttcagaaataaaaaagagtgaagacactgtacagttggtggacgtcaacttagctgaacgtttcttgggtatgagggaggaacagggaaacacatggggccttcctgaggtcacgaggctgtaagtctcgagtgagagggcgagtccagccctgtgtccccgtcttgggctgtgaggacccactacc

SEQ ID NO: 888 - DNA, 201 bp, Bos taurus
ttctaactgaaagaaaggttgggaaagtgagtctttccattgttctttatagggtgaggtcagggaagaaagagggaaataatggatagtagtcacggggaaatgggcctgctgtgtcctgggagaaagcccttctctcaggagctgggggatgtagggagcacaaggagctggggcggaccagctgggcctcaagaaggg

SEQ ID NO: 889 - DNA, 201 bp, Bos taurus
gacaggaaagagatgcctgcctgctacgtcctgctcagcagatgaaggcttggaaatcccaggactgcagcccagttcctggccctcagtcagttccctccacccctcaggatggtcctttgttgggtgtgccctccaatgaccctgttttgaaagaaccatctgtttctctctgggatcctgatctcagagggctgtgca

SEQ ID NO: 890 - DNA, 201 bp, Bos taurus
tgggacttcctcttcctttttcttctacaaacgtctatgtaccaacatgtcacctaagagacactgacatattccgaggccccagtaggtcctgtttcagactgaccttgatgtgcacataaccaggcaggcgtcggcggcggttgaagggcgtctcctttcagctggccccggcgcactaatcaggcctggtcccctccc

SEQ ID NO: 891 - DNA, 201 bp, Bos taurus
ctccgcacatccttctctcctccgctcttcccatcctgtctcctcctccacctctggcccgcaagcccagagccttcttgtcctccctccctggcctggggtataaacaccctcccctcctgactggtctccaggaatcacagctgcctgagttttctgtgccctgcagattgcaggcccccttgctgccacacagcccct

SEQ ID NO: 892 - DNA, 201 bp, Bos taurus
catggtgaactcatccagctcactgataacactgcacaaatttaacagggaccttaaagggggacagaccacctctctgtgaagggccggagcctaagtatttcagactgtgcaggcaaccccgcaactcagctgctgcagccctgaagctggcgctgagcacccctaatcgagcaggtgtggttgtggcccagtgagatt

SEQ ID NO: 893 - DNA, 201 bp, Bos taurus
acgtaccatcagtgtggctgtcatttttcttcaactctttgaagatgttaaaacacaaaccattcttggtgtgggccttacaaaaagaggcagagagcggatttgtctgagagccacagttttaagttttaacaccccagtgttatggggcagccacaggccatttaattcagtgaagggtgggctaaactagtttgcttc

SEQ ID NO: 894 - DNA, 201 bp, Bos taurus
cagcgaatggtcagagtaccctgctgctgggtgcccttggctggcaactgtcctcgtcttggtgtgtcagcctcactggtctactcactgtttctgggaggtttgcagactgtgccggatgctggcccagccaactctttgtgtgacgaggtggcttcagactctggatgtggaagctctgtggctctgaaggtcacttct

SEQ ID NO: 895 - DNA, 201 bp, Bos taurus
cccccgtccagtcccaggtatttacgtcagggctgcacgcctgttggggcactgcggtgttggcaggggtgaagcgtatccaaggccactagccctgtcaagatcggggtgggtgggggctgtacttggctgtcctgctctgaggagcccccaggtctccaaacatggcctgtgctgggaacacacacggcccctcaggcc

SEQ ID NO: 896 - DNA, 201 bp, Bos taurus
gggcctgcagtccaatgatgggtgtgcttaggagaagtagacacaggtgcccaggaagaagccatgtgatgacagaggcagagatgagctcacaaaccactggaggccaaggaccgctggtcttagccagacactggaaggaacaaggaaggagctgtcagatgggccccagagctgtcagatggaccacaaccctgcctg

SEQ ID NO: 897 - DNA, 201 bp, Bos taurus
cctgtctgtggccggccttgaccgtcatgccaggtctccagacccagaaggtcgtgtggcttaaatgcctcttgcccgaacctgccagactttcccattgtgttggccaaaccctcccagagcgccagcggccgcgtgcaaggtttcaactccatttcacagctggacctccccctaagtggctgttttataagagtctgg

SEQ ID NO: 898 - DNA, 201 bp, Bos taurus
cctccacatcctcacagctcagggccactgcacagccttcccgcaccacccctcatcacagagctctgatggctcttcctccgcctcactcaggtctccactgcccacagagaagaaccacttggccccgggagccctctcaccacccagtctttactagaagatttccaccactctgctggtcatcaggtctcccgaact

SEQ ID NO: 899 - DNA, 201 bp, Bos taurus
atagagactgatctgaattacaaaaaaaaagggaagttaactattttgcacacttgaatgaaatacgtttctactaaaaacattaaaaattatgatgaacggatgggggcaaaattttaggttcaattggaggtaagggagaagaggagaaagagtaaagaaattttttattccaaagaaaatgaaaaacattacatatac

SEQ ID NO: 900 - DNA, 201 bp, Bos taurus
tgaacaacagtgactatggataagaaaaattcactaatttcacagtttaaaccaatctctgacagccagcttttgcttaggacacagtaaactgaaaagagcgacacctccattctttaaaaagaggcaggtagataattgaaaaatcacaacttatcctgaacacatcagagttgaggttgcagaatcaaccgactgaca

SEQ ID NO: 901 - DNA, 201 bp, Bos taurus
gagggccgacctgaggctggcctgcccatcttccggggaggaggcagtggaacaaagacttgaaggtggcatggtacaagggttcaagtccaactgacccacctggccagctccctatgatctttgagcacccgtggagataaggtgaggcccttggccctcccattcccaccagcgggggtgcagaccatgggggcagcc

SEQ ID NO: 902 - DNA, 201 bp, Bos taurus
attcttcacgcagcccctgaaggataaggtgtgtgggtggcgtgttgaatgtttttggcttcagagctgcatacttgtagaatttcacttgggatttcccataacggttacaaacctggacccgcaggaggactgaggctctgactcaggccagttggtgccgaccctgtccttccagaagctgggggaaatgatacaacc

SEQ ID NO: 903 - DNA, 201 bp, Bos taurus
aggcccaccgtgctgggggagggatctgcaggtgtgcacaccctggggcagtggggaggaggtcgcgaccagggtagcatcctgggtcgcctgagatccagtgccataggccccatgtcctctttctctcctaagtcttaccctcagcctgacccaggagcagaagattcctgcccctagagagctgcttgccctgggagc

SEQ ID NO: 904 - DNA, 201 bp, Bos taurus
cgtctctagggcgatgtcacccagccagcgtttctgtttgtctgttgccctgtgtgcattcctgtgggatcgtactctaagggccagcactgtccctaaatgcaagagctttccttgaacctaaaagagatgttcgagggaaacaagcatcgggaggagggtgacgtgctcggtgaactttaagctgaacttgagggcctc

SEQ ID NO: 905 - DNA, 201 bp, Bos taurus
tcaggtctggagctgcctttccacactcggttccggcctgcctgaagtggtctcccgctggcttgtgtgttaatttacattcagaagcatgtccttggaaacacagggaccccagggccaaggcaggtgggtgctagacagaggctggcctgtgagtgctggttgcattgtccacctgtggccccttctcagcttcagcgc

SEQ ID NO: 906 - DNA, 201 bp, Bos taurus
gtcctgatgaggccgggcaccctgttctttctgccccgtggggaaccagagggtaactgggcctcgagccgggaggccgtcatgaccgcagccgtgacgtattttggctttcaggtcctctttctgttctccgttcctttaactctcttctccacgtttcatggaagtcctcttacgctggcctctcgggcccagcacatc

SEQ ID NO: 907 - DNA, 201 bp, Bos taurus
cgggaggggtgggagacaatgaggaggtggtgcctggcattcagggataaatggaatctgctggacctcgtcctcctgagcctgagccctgtcgctctcacggcccctcccctgcagccttggccacagctgtgtctgtcctgtccctcctccagggtcagctgcttctccttccaaggacccccttgccagcttggcttc

SEQ ID NO: 908 - DNA, 201 bp, Bos taurus
ctgctcctgtcgctgcagcaacacccccaccccaaggccccccagctcctcctgagtggaggacgtgctttcaccaccagggactcaagtgcccctcccacgtgaccaagggccccggttagagatactggcccaagttattcttaaaaacaaaataaatgagacccaaacactggatgcctggttcaaacactggatgcc

SEQ ID NO: 909 - DNA, 201 bp, Bos taurus
ggaggccagacagagtggatgctgtgcctgtcatttctgaatctcgctggtgccccaggaggcacagcagtgggcacctctggaggagagggtcctggcagggcagaggggccacaggacactgactggttctggttccgacccaggtatatgacccaggtgcagctcatggacacgcatcagaaggtgtgcctgtgacag

SEQ ID NO: 910 - DNA, 201 bp, Bos taurus
aggcccactgactgctctctggactggccttcggcccatggtcacacccaccacagccctggggggacgccttctggtggggacgggcctcagtgtgtccgactctgcacctctggtgaactctgtgcccatttcaagccatcgctgcacaaatgagtcagggaggccctgctgtggcttcgggcagccctgcctggacgt

SEQ ID NO: 911 - DNA, 201 bp, Bos taurus
tttcccacagttctagaggctgggagtggaggtcaggtgtgggcagggtggtcccttctgaagcctctgcctctgcttgtccctggccgcctcattccacgtcctcaggtggtctttcctcagagtgtgcagggaaggaggggtttctagttctcctcttacaggggcactaatgctgccatgtctgggccccaccctacg

SEQ ID NO: 912 - DNA, 201 bp, Bos taurus
gcagcctggtggccacagtaccagagggtggggtgggggccacacccacatggacagaggtcccctgacctgaagcaagctgcagctcccagactgccaactgatcagacggccttgccgcgtgagcccagcagggggtgttgtgcccacactgactcccaggaacccgcctgtgggcctcattcagcgccaggactcccc

SEQ ID NO: 913 - DNA, 201 bp, Bos taurus
aaccgtgttactgcatctgcggtggcctcgggtcctcccagtgaaagaccctgagcagcaggatgcaaggaatcccacgtccctgtgtgagcgcgctgcccgggcctaagcatggggtctgtgaggcacgtgatcattggatgctgcactcatggaacgggaggcagaaacatgtgttctatttgtttcaaattctagtga

SEQ ID NO: 914 - DNA, 201 bp, Bos taurus
tccccccaagcccccactgcttccaggggccccacagtggctccctgccctcaagcagtactcaaggatgcagtcatgccctcctgggaggacctgtgggtggccttcagagtcggtcctcttagcgtcatttctggactcaatggccttttccagacatacactctgggagtgaggtgtcttgctggcttcctggggtca

SEQ ID NO: 915 - DNA, 201 bp, Bos taurus
ctcaggtggacgcccaggtatgggccccccagcgaggagcccagcttgacctggtgaagggggaccaaactggctgagctggtgacaggcaggcaggattcagggcctgatggggtctgtccctggactgattaccaatgtcctcaggtttacactaggatggggctccctgatgatgagcagtagcttgggtaactgggg

SEQ ID NO: 916 - DNA, 201 bp, Bos taurus
taccacaacatccagcatcctcagaaatcctggcattttgggaaaatggattctgagttgtccccacagcccccgtaaggggcccttgaggctcagggccgatgagaagcgaggtaagtgctcactgccagtggactcttctctaggttcctttccaagacaggtctgaggccacaggcagcaccaacccctgggagctga

SEQ ID NO: 917 - DNA, 201 bp, Bos taurus
tgtgggcgacgggggtgagctcgccagccaaggcatttatgggcagggagttgagaatcccagctcatctcctgtcaaatatggaaacaatagtcaaatcacctggtatcttgcggttttcaaatgtttcaatcagtcatgtaaacaacagcatgggtgtaaatgaagcccatgtgtaatggtcacacacacggaccatcc

SEQ ID NO: 918 - DNA, 201 bp, Bos taurus
cccagccgaaccccgcgggcctggacacctggctcccaaacccgcaaggggaggcagttctgctgattcggtatgggctagtggggaagggggcccaacaaggagctccaaggactatggcacctgcacgctctgggtgggctggaagacaactgcttccagattcccgctggccttctgagacctgcggcccggacaccc

SEQ ID NO: 919 - DNA, 201 bp, Bos taurus
ggcagatgataaagagaaaagtaacacatttgttggaaaaaacagagtacctgcggaaagatgcatgagtgtgctctgtgacagggtcttgagagtcgcccttggggaagtttattaacagatacacagcacaacaagtgggacagctcccagagaaacagcgtgtttagttcagacagaagcaaggcagagatgcgcacc

SEQ ID NO: 920 - DNA, 201 bp, Bos taurus
tacagctgggtgacttttgacagctgtgcacaactgttagacaggaacttcccatcaccccggaagattccttctgtccaggtatcgtccattccctgctcttcctctggattgcgggaaagcacagagatactttttgtcattttagagtagtttgtattctttattaatgtaatcgtacactatgtactcttttctgtc

SEQ ID NO: 921 - DNA, 201 bp, Bos taurus
gtcccctgagtgcagcccccaacacacggacccggcctggagctgaggaagtgggtgagtggtgccagaaccagaaggccatgtcctgtcagcacccaggtggatgggggtagggtctgctgggcagcaccatggggccctccctccctgctgttcagcctcaggtcctgctgctcaggggccttgtctcccgaagcttgt

SEQ ID NO: 922 - DNA, 201 bp, Bos taurus
ttgttgtaataaaggtgataagtgagagcccagttatcacgactgtggactcaaaaccatgctgcctggatttggagctccgctactagctgagcacctcagacaaggtacctatcttggtctcagtttcctcatctgtgaaatggaggttatattggcactaatatccaagggctgttgtaaaggttaaaagtctgcagt

SEQ ID NO: 923 - DNA, 201 bp, Bos taurus
gggctgcctgtctctgggcatcttgcaggaggctggagatgcgccggcggacctaaagacacaggagcgctgtcatcactgctcacctgccacccacccacgggcccagcctccctgccggttccctgggctatccactctgggtggccccgagcctctgacctggaactccagatcctcacaggtctctcgtggggatgg

SEQ ID NO: 924 - DNA, 201 bp, Bos taurus
ctgcttgtggaaagtcttcagcgcctgcatcactgctgaggtgcactccacgtacgtgtagtcaatcatgatgtcccctggaaaacggaaggaaagactcaggcaatccaggccaaaccatgagacaggagagtgccgtaacacacggtgcctgactgtcctccagaggaaaggaggagatgtcaccggcgaccagcctgg

SEQ ID NO: 925 - DNA, 201 bp, Bos taurus
agtgacaagccatcaagacccatgaaaaccctccaggccttctcctctctgcgggtgggtgtccaacagtcacagatcttcagggcatagcaggtggtggcggggaggggcccacacgcgggcctttatggctcctacaacgacctgaatgatacacaatcatgctgcaatgtttggtcgaaggatcgacctcttaaaaga

SEQ ID NO: 926 - DNA, 201 bp, Bos taurus
gtcctgggcctggatgtggtgggtgtagcgcctggccccagagcgtgtcatccacctgagaacgcctcttactccctgggttgtctcccctgagcttcctctctgctgtcgtcttcattcttattgaccacatgttggacctcctggacttaaaactttctctttttccacatctttgttttcttgttctcatattcaaga

SEQ ID NO: 927 - DNA, 201 bp, Bos taurus
atgacagaggatgagacggttggatgatatcactgactcaatgcacatgagtttgggtaaactccgggagttggtgatggacagggaggcctgcagaagtgtatctgaaagtgcagattgccatactgcagttaccagaagaggtgacattcaactggaaatgggccagcagctagccattgagagccgcctgcttgcctc

SEQ ID NO: 928 - DNA, 201 bp, Bos taurus
taaagatctcctcttccatttgcaggctggctgtgatggtgagagtattagaaattgcccattttcttagcgtctctttatgattctctggctaaagggcattatatttaatgtgacaacaggggacttgaaaaggtaagaccaggtttctgcagtaatgaaataactatccccaattccctatacacacaggcacatgga

SEQ ID NO: 929 - DNA, 201 bp, Bos taurus
tatgtatgaagggcgctggtatacctattgtacagatgaggagagtgaggccacacacctaagtgtgcaagcagcaagcaggccacctgctcatactttgtcacactaccttccaaagagctgcagaatcggcacaaacagatgcatgtgtagttatcaggaaacggaggactatcaattgggacatgatggctgtggggg

SEQ ID NO: 930 - DNA, 201 bp, Bos taurus
tcctctgtccatggaatttttacctgcaacctacttcctatggtcacttgcaattcaaaactgtttgaaagcttctggcctaaaatgtcttttttccttgatacttattttgttaaagtgactcagagggggagcctgtatgagtctctgtgggtcccctaacctggctgtgcctctgttaccaccctggccaagtctaga

SEQ ID NO: 931 - DNA, 201 bp, Bos taurus
catcagcttccatgttgctactgtaacatctcctatattcaggcccaaatggatttccatgccagaaaaaattctgcagccactcatcacagaggccccgctcactggatctctgtgtctcctgccttcctcctcttgagtctcatgctctagttgtactgactcttttgtgttttcctagcacatcaggccttcactcac

SEQ ID NO: 932 - DNA, 201 bp, Bos taurus
aggctacagctctgcaaagagagggtatgagaacacatctggccaggatcatctggtgactgatgagcagacacagatggcagtctgaaatgagtttgagcggtgacatcccagctgtctccaggccctgctaatcatcttgaaagtgactggtgagccctacaggactctaacgtgtgggtatcacatgtctcctgagct

SEQ ID NO: 933 - DNA, 201 bp, Bos taurus
cagcagaaacacacctacctgggaactgacaagttatcgtttctactgcattctatcggctgaagcaagtgagcaggccgcgcaccgttgaaggggtaggagagtaagctgcatatctcaatgggaagagcagcagaatcccattataaaggacatgtccaccaggaggggtgaagagctgtggccatctttaaaatcaat

SEQ ID NO: 934 - DNA, 201 bp, Bos taurus
taaaacaacagaaatgtattttctcacagctatggaggccagaagtttagcaggttcactgggctaaatccaagggagagataggacctagctcctgccaaagggagagtgagcttctggtggccactggcactccttggcttgtggccacataactccaatctctgcctctgtctttacacaactttcgccttttctgtg

SEQ ID NO: 935 - DNA, 201 bp, Bos taurus
ggggaccatgtgttacacttcattgtacaaataccatgcgttgccttcaaaaaccagagtaaacgggcttcttctcctgaagccaatttctgccttcatacagctgtgtttggatatgcagatatggtacagaaatttggaaaattaccacgtgaaattattgtttatcttttcttctcaggggaacaaagttttaaagaa

SEQ ID NO: 936 - DNA, 201 bp, Bos taurus
ccttcctgggactcccacagccgccatctttgtgacataacctccaccaccttccctcatcttttgtatttatagaacttcatcgtaaatggctgcaggatgggatgggactcacacctggtggatgccgagtgaaccttacagtcagtgcacagtgcagaaagaatgccccaaatatgattgtttgggtctctgcagaga

SEQ ID NO: 937 - DNA, 201 bp, Bos taurus
ggggactcaccttctgcccttgactgctgggctcatctctccctctcccacctcccgcaggctgcctggggttctagagaagagggatccagattcatagccagggccaaactgagcactgagtgcttctggccagccaataatctagccccttataacaatatgaagtgtctgttttacatttttttaatgggaacatgt

SEQ ID NO: 938 - DNA, 201 bp, Bos taurus
tgtatgagcagggagcagacagcagcaaagaatccttttcagttgaggacagcatgatgggacttcaggaagaaagtggcccttgaacctcttaaaggatgagcaggactcagatggtgagtgacaaagaagggcaccctgatcagagcagggagacaggatggccagcatgcatggctcattccaggagaagcatgggac

SEQ ID NO: 939 - DNA, 201 bp, Bos taurus
tttaaaaatacatactatataattaaataaaaccataaaacacaaatcaatagtgaaagtccgaagatggaagaaaggagggttcaaaaaggggccagatcaaaggattaccaagggaaatgagaaacttcttagggtgataaataccgttcacatcttgaccttggtaatggcctcctgtgtgtatacatatgtcaaatt

SEQ ID NO: 940 - DNA, 201 bp, Bos taurus
tcaaagcaccccacgctgacccccaggacccaacttggctccaggctacaagcttgcctccagggaggtcctgtcctcagaggcctctgttccgtcagccctactgttcttcaccagagtctccaaacctctggtgtcctctcctctgtcctcggaggccatagccctacactatgcttcttgccttgcaaacatctctcc

SEQ ID NO: 941 - DNA, 201 bp, Bos taurus
tctggtattcttgcctggaaatcccatggacagaggagcctggtgggccacagtccagagggtcataaagagtcgggcacgactaagcatgcacacggccggtccattggtaaggcagagaaagggtgtgggtgtcccatctagtgaggagagcagcagagagacggttaaatcatctgtgtagggcagttcctccaggtc

SEQ ID NO: 942 - DNA, 201 bp, Bos taurus
acccacgttagaagtactgttataagtaaaccggaagtagaaatctccagtttgtttatgagtaagccttatattcatggccttcttaaggcttttgtgagtacttttcagttttttttccctttggctatttagaaaaattatttttggccatgctgggtgtttgttgcagcaagggcattctctagttgcggggagcag

SEQ ID NO: 943 - DNA, 201 bp, Bos taurus
acattataatatataatgaaataattatacagttgtcacttgctgctcagtgatagagtttgcatatgagtctgcaggcagttgattcttcatggtctcctgcagtcctcctccccaagccactccccagagctcacatcatggcctgagctccacctcggatcatcaggcattaaattctcacaaggagcctaccacctg

SEQ ID NO: 944 - DNA, 201 bp, Bos taurus
agatggtgaagggccttctgcatagtagacgctcactgagcatcaggaatggtgaaataaaattcatatttttggcaagacaagaaagtttagacgtaacgttttcttggctcctttgggcctcctccctccccttccgtgtgtcttatgctgcattaaccagacttccttaacttcctgcttaatttcataaagggtcac

SEQ ID NO: 945 - DNA, 201 bp, Bos taurus
agggcatctgagcagctggcagctagacaattactgtgtcctttgggatgagcctgtgtgggcacacatgtcatttggttggatggttaactgccctgtctgctgggccaaggcagacattcagaaccaaccagaaatgccatctctgccctttggaaaaaacgcctgatacatcagggcatcatcatctcctccctaaaa

SEQ ID NO: 946 - DNA, 201 bp, Bos taurus
tctcctactgggcccttcctttatttatttagaggactcagcctttcctctgagtaaatattgaacagatcttttcataccacccagttaaacagtggcaaattgttatcttgtctccacctggccctgtgcatggctacggtgcttcctgctttaggccctaacttccttggtggagcaggcggagcccctgctctgtgg

SEQ ID NO: 947 - DNA, 201 bp, Bos taurus
tctcccaggccccaggaagtcacccctgcccccactatctgacgattccattggaggattaagagggaccggaagttgcgatttagaaagagtaacgaatttgaagctgggaagaatttggacttttctgtgcaatcaatccctggggcttccctggtggctcagacagtaaagaatctgcccacaatgtggaagactggg

SEQ ID NO: 948 - DNA, 201 bp, Bos taurus
tcttagagcctttggaaaggaaaactggcctgctgatacctggattttagcccaaccagactcatctctgatctccagaaccgtaacaaattgtgtctcactttaggccactttctggtaaattgctacagtagcaatagcaaacgaacagagttacctcgatgtcttcctctagttgacaaaaattacaaaagaactaat

SEQ ID NO: 949 - DNA, 201 bp, Bos taurus
aagataggccatgaacctccgggacaggtcctcggggacgggctccccggtggcgatgaccagcagcagacagttgtctggccacgggtccctgagagcgttttctggaggcaggtggtacagagtgtaacagtccgtgtccacacagtcggccagggcagatcggacctgctggagcctgtcctggccatcccgagagtc

SEQ ID NO: 950 - DNA, 201 bp, Bos taurus
aacgtcaccagcaagaccttgatttagttttaggtaattttttctctcatctttccttttctccatgatactgctgaattactgctcccatgatacgcactccccgccccctacaatgttgggcgattgttcctccgggtcctttatgtgtgacggttcttggatgcagacaacagaaactcaggctcggcaaatataggc

SEQ ID NO: 951 - DNA, 201 bp, Bos taurus
gcacttccggtgcggggtggttctgagatgggggtgctccgccgccatcccccgaaagagcccctcctctctgtccacagcagaagagccacccaagctccgtggggatgtcagggcctcgtcccttgcttcttcttttctccttcctctaaagggaccctgtccccaggtgagggtttatcaggggaccagagtgaacca

SEQ ID NO: 952 - DNA, 201 bp, Bos taurus
aaaaagtgtcaatgcatatgctacttaagtgccttttaaaaacgaacaaaaatgggagcagagaaagctaaaggtccagggagtggaatggaaaggtggccttgaagtagggaagaacaaatctgactccacgttgcactggtttcttttactttatcctttggattcaattgcttttgctacaagctaagaatgttgccc

SEQ ID NO: 953 - DNA, 201 bp, Bos taurus
ggtccgcacttgtttaccatccacggccacagccgtgtgcacctgctgacctcagaggtctcgccaccaagatgcgggtggtccctgctatggcctggggcggaaaaagccacgcccccctgggtcctcggggacccatctagttgcatttttggattagagctgctcatctgtggccctgcttgcacgtcaggatctcag

SEQ ID NO: 954 - DNA, 201 bp, Bos taurus
gagtatgcattagcatcaggcctaaaagaaatacccatatttaaatttaaaaaatacttttttttgctaaaaagatgctaaccaccatctgagccttcagcgagttgtaaactttttgcttgtagagggtttgaaatatggtgagacttagcagaattctgacatagaaacaggaagtgagtaaatgctattgaaaaaaat

SEQ ID NO: 955 - DNA, 201 bp, Bos taurus
gggaccatttctctgttgggggttgataattctgagtcaagatgctaggtcttcttccctatcaatgtccagctgtttccagtatttcttttcaagtttgccttgcccgaggctgacggacgaaagtgacaaagtaaaatctgtatgctcccctctgccccccaaccaaagccactccttgagatctaagactcaaggtcc

SEQ ID NO: 956 - DNA, 201 bp, Bos taurus
accaccaatgacaggtggaggagggaatacggaagcctagcatttggccattttaacccccagcgtccccataaggtcaactgatgctgtctcccgtcattccacacatgcgtttcttctcccttgacaggtgtcaatctccagggtactcattagtaaacatcctatactttaaactccatttcagagtctgccccccgg

SEQ ID NO: 957 - DNA, 201 bp, Bos taurus
aaggacagaggggaggggatagttagggagtttgggctggacatggacacactgctgtatttaaaatggataaccaacagggcctgctgtataacatatgaagctctgttcagtgctacgcagcagcctggatgggaggggagtgtgagggagaatgcgtacatgtgtatggctgagtcccttcgttggccacccgaaacc

SEQ ID NO: 958 - DNA, 201 bp, Bos taurus
tgaggaaaaattcatttgactatttaatgaatatttaagtctttcttaaatgattgagtcacaaccataactgtttgggccattatccccgacacatcctcatgaagtaggaagtctgcaccacagcactgctctcccgccagggtcctgctgttcccttagaatactgaaagtgaaagtcgctcggccgtgtctgactct

SEQ ID NO: 959 - DNA, 201 bp, Bos taurus
gaaaagaactttcaggatggatgagatgcctggtgttgagatgcatgttggtaaagaggaaagttgagggatgtccttcccttggaggggggcctcctctcattcagaggctagcaagtcagctcttcctaggcaagctcaggactctgacccacagtgtctggccaagtgggcccaggagggggtcaccttctcagctgg

SEQ ID NO: 960 - DNA, 201 bp, Bos taurus
gtgtatatatgtatgatggaataatactcaatcataaaaagaatggaatgttgccacttgaaggtacatggatagacttggagaatattaatccttagttaagtaagtctgactcattggaaaagaccctgatgctgggagggattgggggcaggaggagaaggggacaacagaggatgagatggctggatggcatcaccg

SEQ ID NO: 961 - DNA, 201 bp, Bos taurus
aggcaattttcctttcactgctttgctttctttctttttaatgaggattgtttgcagtaaaagcaggaggcctcacccatggccgcaggttgctgaaagtgaaagtgaacgaaagtggctcagttgtgtctgactctttgcaactccatggactgtggccagccaggctcctctgtccacgggattctccaggccagaaca

SEQ ID NO: 962 - DNA, 201 bp, Bos taurus
attttgagacattagtctgccatcttctcagtcagctggctttccaaataaagttgttattccttaccgtaacacctcatatctcagatttaccggcctattgtggatcaagagcagagtgagtttggattcagtaacagcttctaaagaatgaggacacttcagctgaggcctggacgtttcactgaccacattcagacc

SEQ ID NO: 963 - DNA, 201 bp, Bos taurus
ttctcctggagaaaatcacgagaaccatctaagaccccctgaggaaaattcacaggaaaattctcagtgtttgaaatatcaatacacccccttagaagaattgaaaggactgttcaagaagggcccaggtaagtaactcttctaacacaacatgctcagatacatattactctatttttgtccttcttaatgtaataatga

SEQ ID NO: 964 - DNA, 201 bp, Bos taurus
gcagggcatccgggaggccgtggtcctccgtgaaggtgatgaccgcagcagcaatgtccagcgcactgagctctagcatggcggtgctgatagaacctgcatccggggtcgggcccgcctggaagaacactgccaccttcctcaggaggcggcccgcacgcacgcgcttgaatacgtgtctagccacaaacctcatggcgt

SEQ ID NO: 965 - DNA, 201 bp, Bos taurus
ggggctcggtcatcaggggctccggagccctccagagccaggtgtgtgcatcaggacagcaggagaacgaggacctcagccatctggccccttcccaaacattccagcttagctggtggacgcaggagaatccaggatccggaaggattaagcagaaacagattctgaggctcacacacatttctgtggccagaaaactcg

SEQ ID NO: 966 - DNA, 201 bp, Bos taurus
acaggcttggggtggagatggggccagactgaagaggaacctacataaacttaatttccttccaacaaccaccgtcaagagcgcccactacacacgcctgcagctgccctgcttgagagcccaggccagtatgaaaacacccccccgccgtctctgtatcaagagaactggcttcagcttgagatcaagagacctaaattc

SEQ ID NO: 967 - DNA, 201 bp, Bos taurus
gatgtttctatttctgtaggtgtggagaggaactccagcttatgtaataaacactcaaggaaaatcttgccgtgttcaaggggcctcactctcctgtcttcgggggaagggagggtctccaactgtgtttaagtgttgtcagcctgttttgggaaaagagaaagtgaccttttccccaaaactcttgaacaatctgggagc

SEQ ID NO: 968 - DNA, 201 bp, Bos taurus
cctaaaccaatctacagactcaatgcaacccctataaatacaccaatggcctttttcacagaagtgggacaaatcatcttaaaatatgcacggagctgtgaaagaccccaaatagtcaaagcaatcataaggaagaacaacactgagcgtatcatactccctgatttcaaactataccacaaagctctaataatcaaagtt

SEQ ID NO: 969 - DNA, 201 bp, Bos taurus
actgaggaaagagaacccaaagttacagtacacaacacccacctaatgaagaaacaaactaaaaggtccagaacaggaaacaaggcctctgccccctcggagtagacgattcaccagtgagctgataacccgaagccactgatgcctcgtctgtgtccaacactgggtaacctggtgtggagaaaacagcagcataagggc

SEQ ID NO: 970 - DNA, 201 bp, Bos taurus
catcttgcccacatggccctggggctctctcggcagtgtgcaaggagttctcaaatccttcgtgtgggatggcgaggccagagtttgtctccaactccatcctaagggagggagtcttaagccttgcctgagccttagcaatctgcaaggccactaagacgggttcccctcgcagatgacacaggaagtcacaccgtctta

SEQ ID NO: 971 - DNA, 201 bp, Bos taurus
cttgagtcaaatggcctggaggtgtgctcactacctgactgcccctcagtcaggcgtgccatcctgggatgagggtcctggtctccagccccggtgtgacagtaacgtgggccatggctttggacagctcccttctgtgctcggggttggttttcccacgtgtaaaatggagtgaaacaggagggaagggggcagagcaca

SEQ ID NO: 972 - DNA, 201 bp, Bos taurus
aagagaaacatatgtttgcagctgcagaggcctcagaggccttggctgtaaatgaaatgacacatgtaaggcacctttcacacagtctggcctataaatgtgaggttccaggttccctgtgtaaagtgcagggttggtgcgtgccttttcccctacctgccccaggctctctccaccatgtcaggacacctcccacatcag

SEQ ID NO: 973 - DNA, 201 bp, Bos taurus
ctaaatcattagctcaatcacctttagtggcaccaatcatctccactctccctccttaacctgatgtttgaaagcactaacctatcgctgaaaccagttgatgttcagtcgctcagtcatctccaactctttgcgactccatggactacagcatgccaggtttacatccttcaccatctcccggagcttgctcaaactcac

SEQ ID NO: 974 - DNA, 201 bp, Bos taurus
ctctgtgaggatgagccctcaccttaggcctagactgcaggcttgctgttagacttgaaaactcagagtctgctgtctttgttcttggttttggggccacattgtagtcagctcagcggttgtaacaaaaaaccacaggttgggcggcttaaccaatatgagatttattttctcctgttgctggacctcatttagccttaa

SEQ ID NO: 975 - DNA, 201 bp, Bos taurus
cctctcttcctggttaacgtggcccctgggggtgtcagctcttttcgggcaccttataggctgtgagggcagagagcttccaagcttcagaggaggcctccgggcaggaaagcagagaggactgggctcgaccatcacgcagtgcaagatgagtctgagcctgcgtggcaaggtgccctagggctgaaacccaggcacggc

SEQ ID NO: 976 - DNA, 201 bp, Bos taurus
gaggactagatgagactgtacacaacgtggccgctcggcctggggcacactctaggtgctgagtttctttcgcaaatgagagacctgggccccctccagccggtgacaggctgggcagcaagtcactggctgagctgcccgcgtggggagggggtgctcggggcaggggtggttttctgaggtcctgggcctgccgttcct

SEQ ID NO: 977 - DNA, 201 bp, Bos taurus
tgtggtttgctcgattccaaagcctttgttttttcaagagctgacagaattttgctaccacaaggatgtgccagagctctctctggccggtggtgggtgacggacagcctcagagcctggtctcatagagtgggcgtgctctgaccacaaggctgtgttccccgcctgtgtgttttgggtgcatcccagtggagttgcagt

SEQ ID NO: 978 - DNA, 201 bp, Bos taurus
gattaattcactcactacttacttcctcagtatcttactgagtaagacattacttactcagttacttactatgtgctgagaacgaggtcctggggaagcacacaggcaccatccttgacctcctggatgcaacactttttggtctcactctagagactctgaagagtccatctgatctccttctcaacctgcctgcgctta

SEQ ID NO: 979 - DNA, 201 bp, Bos taurus
gtctctcccctgggccgcttacaacacggcagccggctgctctcagaagccggaagcacaggagcgggagagaccgagacgcaggccagcgtctttgtacaatgaagtctcagaagtggcatcccctcactttcccgaggagcgggtcgtcactgggttctcctacacccagggcagcaggctccacagaggggtggccac

SEQ ID NO: 980 - DNA, 201 bp, Bos taurus
tgataggtccaccacgtgtgacctctagtctcgagggcaccttgtggtccaagatagaggcctggttccatccatcatgtctgcactctggccagagacgcgaaggacgagaagacacagagcaacaggtgactgccagccggcttggacggaagcttcagaggcccctgcaggacgtgctgaagccctgtgtgtgcagca

SEQ ID NO: 981 - DNA, 201 bp, Bos taurus
gccgaccctggaacatgacccccgccctccgttttctccatcatggcttgtgtaacaaccataattacctcgccccttgtacagtcaagttgtcaccgtccgactgtaagctccgtgaggccaggctggggctctgttccggtgctgtgtctccagagcccagtgcagctcctggcacgtggcgggtatttttacctctta

SEQ ID NO: 982 - DNA, 201 bp, Bos taurus
cccagtatcccccatatgggaagtgtgggtagtccctctgtgcccaagaagttcctggaggacactgaaagctgagcccagagaagcctgtggtcaggaatgtgaggcctggatgggatacatgtttctccatggaaactagtgtggaaagatgatggctgagacgagattcccatattcaccagcatctttaaccccagt

SEQ ID NO: 983 - DNA, 201 bp, Bos taurus
ctcttaaagttgccacagtacttagagggagaagaagatgagaggggaaagttgtgattgtctgagcttcagcaaaggggccaggactgggctgttagtgacgtgacagagtcagcagctggtgacctagggctggggggagacacttcacagagggcaccggggttgttcaacatcgagaacatccctcctaacctgtgg

SEQ ID NO: 984 - DNA, 201 bp, Bos taurus
cgccctcggctctggggggcctcgcccggctgagggccagtcaggtgggctgatggtgagggctctgcaccccttcacggacattcatgctccgtctgtctaccaagtacaacccttgaggggcccaggctgcttagaggaggagattctttgggccttgtgctcccaggacgtccacgtgtctacaggggcatgactgga

SEQ ID NO: 985 - DNA, 201 bp, Bos taurus
ctgggctgactggggcacgactgtgcgctggcacctcggtcaggttctggactgtgtggtggtgggtgtgtgtgtgggatgcagggcgggttaatggtattgattaccagctccttccactgccttgttagtggaatccttgagataagtgagggcacccgtgaaggaacccaggcacgcacggcaagctttcacggcctt

SEQ ID NO: 986 - DNA, 201 bp, Bos taurus
aatcaccaccagcaccacctgtgactcaatgacggtcagatgcagggcttaccgtcccacgcaacagcatcaactcttctctcattacgctttaagaagcgctgcagaggagaagcctgaggaagctcctctgccgattttacgattagcctctgtacgcaaaaccacgctccctttctttccccaaacctgctctcagga

SEQ ID NO: 987 - DNA, 201 bp, Bos taurus
ctccttagacattttcaagagggcctcattattttcactccaggaaaaacaaaacaatccacattctttagccaggtgggcagtctttccctcacgtggtcagcctgctctcactgtgcttgcagaaaccctggtctgccattctctacgtgaagcatccctcccagtgtttcctctgaagggcccccacgtgtactgtca

SEQ ID NO: 988 - DNA, 201 bp, Bos taurus
cgcacacgcccgaggaagacaagcagacgtgtgcatataaaggagagaccactcacagggtcttccagtcgagtgaccaagggactgttccaggtttttggaaaaggtagggtcagtaaagaatagaaattagttatttaaacccaagagggattcactaaaggtactgtgagaaaaagcaagcacaaggttagtcagttt

SEQ ID NO: 989 - DNA, 201 bp, Bos taurus
agaacccaggcccaactacaaacaagcaacagtgcaaaacaccgaacaaaaagggccttgtcacgggtgacaagtcaaaacaggactcgagagagggtgaggtcaaggtaaaccacatttttcagaaagatttcacggagtgtgcaggacatgagctccaagttaggaagaaagtacgcaagctttagaagagcatgttta

SEQ ID NO: 990 - DNA, 201 bp, Bos taurus
gccagtgttaataatttgaatgttaataatttcaaccttttctctttattccctcagtccagggagcagtggctagttcctgaagttgctaccatcaagacaccttacagttcttcctatccttttatttagtcagtgaacaaatatattaaaatttctatttggataactggcatcatttttgcctctggagtgggttct

SEQ ID NO: 991 - DNA, 201 bp, Bos taurus
gaaacaactgttttgttgatgggtttgttgggcaagacctggctcctacctctagaatatctggtttgtagaacgtggccagttagctgccttagaaaagaacatgaagatagattgagaagctactaggagggaagcaaagggttaagtgtacatgttgtttccatccacgcgcacctgggcccttctcccacggatgtg

SEQ ID NO: 992 - DNA, 201 bp, Bos taurus
ctgagagacacaaagtgcactgtgtgcagtgagtcaacaacagaggtcaccgcacagctcggggaaatactcagccagtattgtgtaacatgtaaacggtataatctataaaaaattggatcactgtgctgtgcacttggaaatgacacagttgtaagtcaattgtgcttcagtaaaaatagcaatactagcactttgatt

SEQ ID NO: 993 - DNA, 201 bp, Bos taurus
gacagaaaggccttctatagggggcaccgtttaggtggagagaaggatccagccaagtaaagagatggaaaaataaagcgcattccagcaaaagaaactgggggtgccatggccctgaggtgagagagcacacagctcgtctgagctcttgaaatgggtcagttggattggaggaagggatgctgtggggtgagactaagc

SEQ ID NO: 994 - DNA, 201 bp, Bos taurus
tattttatgaaatgtagtgtctggtgctggacatacatattatttcagtttttttaatgcagtacttaaacttgcagaaatctgaaatagctcttcccagtgattattttcttgcgttccattcatatgtacaacagtgacaaaaacataatggatatacctagactcactggataaacaactcataaatgcagggttgta

SEQ ID NO: 995 - DNA, 201 bp, Bos taurus
gatgctcagctttacatctagaaaatgagggagtctcccaccagagttcttattgccctccaccaaaattcatcctacaataataataaatctccgtctcatttcaaaaacccctgacagtatgccaggcatctcagaggaaaacatatgaccccatgaaagaaaaaaaaaaaaaaaagtgggtgggggggggttgaacca

SEQ ID NO: 996 - DNA, 201 bp, Bos taurus
acgtcgccagtcactggggacgcccaccccagggtcacgtaaattccaggggattctcctccagtgctcctgggagcatcctccccaagagggttgtgcacgaggccactggaagtaaatagcaaggagcaggaagaaatcactgagacggctgaaggaactcaagggatctgggtggggcagtcacagcgcctgccccgt

SEQ ID NO: 997 - DNA, 201 bp, Bos taurus
atggactgcaacacaccaaccttccctgtccccgtaaagcttgacttgagttaaaggggaattcgacttttgaaactgacacacacacttaaagataactcaagaatttgctgattgtttctggcctgaatttttattccttttgacgaaaggggcttcccctgtggctcagctggtaaagaatccacctgcagtgcggga

SEQ ID NO: 998 - DNA, 201 bp, Bos taurus
aggagaatagtgatgtaacggctgctaagaatattcttcaacaaatattaaagtacttctgatagattcaccaaatgtttatagtaacaattacctttcattcacagcaattaaataaaatttaaattattggctttcttagttcacataaacattgactcccaggtacccaggtgagttcctgttaaagacagaagtcac

SEQ ID NO: 999 - DNA, 201 bp, Bos taurus
acccactccagtatcctggcctggagaatcccatggcgtgtacagttcatggggtcccaaagagcgacttccactttatttccttagggcttctctggcggcttagctgataaagaacctgccggccaatgcaagagatgcacattggatccctgggtggggatgatcctctgcagaaggaaatggcaacctgctccagtg

SEQ ID NO: 1000 - DNA, 201 bp, Bos taurus
caacatgaaggccactcaggaccttgacaagggttctcttttcaccaagtgcggagaatgaaacttgtctagagattgggagagaatgagaggagaaaacgtgagaagtgtgagtacagacacttgttctctataaagaaaaggggaggaaagggtagcgttgagacagtttatcctttagacatttatatgcagatgagt

SEQ ID NO: 1001 - DNA, 201 bp, Bos taurus
atcctccctacaagtacctaggtaatgcgcctcacctgcctaaaattcttcaagcatgctacagactgaaaaataatatgtgtccaagtataactgaatcacctttctgtgtgcctgaaaacatggtaagtcaactacacttcaataagatatatgtattaaaaaaaaaagaatgctacagacaatatttgtgtctccctc

SEQ ID NO: 1002 - DNA, 201 bp, Bos taurus
cgcagttgggactcagtaacgggaaattcgggaaattgtgagcaactaagtaaaaagctccttagagttgccctgctaagggccaaaaggccacatccacaaacatccactcctcactggttgagagatggtcctgggtatccgcagcccctcacctccagggagcgtccgcaggcctgctgagcacgcttacgtggcttc

SEQ ID NO: 1003 - DNA, 201 bp, Bos taurus
ctactccaggctgcttgttttcagtagatcaaagatatttttttaatcccagcagaagtgtttttaaaagtgtaaaccaaccaagtgatattaatttgacatctgatgaggtaaaaggaataaaatgtataaaactggcttctctgaagggattcttttttcctggataactctgtgggggataagatgtctccaatctat

SEQ ID NO: 1004 - DNA, 201 bp, Bos taurus
catgttttgaaatacagatctccagaatttaggccttggttggagaaaacccttcaacaaaacatgtgaagattatttcttaggtttttgttaacgggtcttataagtcctctgggccaagcctttgctgctcactgtggtcccctttctatagcatttgtgtccgtcacccatctcagtgtaagtattcttggtaacagg

SEQ ID NO: 1005 - DNA, 201 bp, Bos taurus
ttttgaagacactgccattgctttgcagcactgcaatggtgacatgccaaggaaactgtttgaaaataacagcaaaacaccgtggcaggaggcaggggccgtgtcagtcgaatgctctgcttctgaaagggtttgtaggtcaggctcagagggcttcgtcgtctctgaaatctgggtgacccagaaagaccccacggctgg

SEQ ID NO: 1006 - DNA, 201 bp, Bos taurus
ccagggatcaaacctgcatctcctgcatttcaagtaggttctttatcattgagccaccagggaagcccatcactgagatgattatatgattattattcttcaatttgttaatgtgctagtgtgatgttggttaatttgtgaatattgaaccaccttgcatccttgtgctaaatccaacttaatcacagtgtatgacttttc

SEQ ID NO: 1007 - DNA, 201 bp, Bos taurus
atcagtgctgctcatcttaaacttagactcacctttttttcattgaagtacagttgatttataatattatattagtttcaggtatacagcatagtaattccggctttttttttgcagattcgactccactgtaggttattacaggtaacggctagaatgccctctgcgtgcagtataaagtttgtaatttattttatgcag

SEQ ID NO: 1008 - DNA, 201 bp, Bos taurus
tgcccaggccagaactggcacgagacaagcaaggtctagaacttgggcactaggtgcctttcttgtcacaagtaagtgcccctaggttggcagtgtcaacgtaggagtggccttgttggttagcagtgttgacccaaagattcttggtgaaaaacctaagaactatgggggaaacacagccttcaaaagagattttttaaa

SEQ ID NO: 1009 - DNA, 201 bp, Bos taurus
attccagctaaatggttggggtagagaattagggaaggggcgggtggggagaggcaggaagtgaaggatgtggatggcctgggaggtgtgtgctgcttctccagagtggatttctagtacctgtggcactaaatatagaagatcatgggtctggttgattcagaaaggtaatgtgccaagagggccttgatcttgacagca

SEQ ID NO: 1010 - DNA, 201 bp, Bos taurus
gataggacattttgaaaaaggtgaaactacaggacaaaaagcagaccagctgttgtagggccgagtaggaaggggaaggacaacattctgagaagtggcacgacgcgcctgtgttttgtctgtgatggtggtcgcacacccccgtgcatttgtcaacacccatagacttgcatactttaaaagagtagattttaatgtaca

SEQ ID NO: 1011 - DNA, 201 bp, Bos taurus
cattgcccatgtgaccagtaaaaagtgttctttggttatgttagtgctcatcagcctgagtgcccgcaggcggtttgaggatctgggccagtcagtaggtgtcttccaagtaggttttctgaacacaatcctccaactccatctctgcttttcttctaatcttaaaatctggcttgtgctggccaaatctggattagttca

SEQ ID NO: 1012 - DNA, 201 bp, Bos taurus
tggtgcttagtaaataatttgtacactatttcgtgtgcagttggtagggatattaatgatttttgtcttaaaagtcagtaccaggtagtttaaactagtggtccagtgttcaacagcattctttcttctgtatgtgagtttttaatttattggtctgtgatctacagttttcaactaagtatatgctctcttcaaatttct

SEQ ID NO: 1013 - DNA, 201 bp, Bos taurus
atatgcagctgtttaagaaaaaaaaagaaatttagaaaatacagaaactaaaacccacccataaatgtgtagggaacaccaattactgcagcaactggccaccacacacgggaacacacaagtgtgtttttcttctacaaaaactttcagcctccccctcttcccaccggcctctgctctgctcaccaagaagactacgct

SEQ ID NO: 1014 - DNA, 201 bp, Bos taurus
tattggcatgtggggttcacatggaggggaagttatatggaggagaagtgcccactgaaaacactttcagattcccaggattacctgggtagtttattggtgcagagatgtctgtgagagaattcacagtgaaaagtgaagatttcacatcccaagaagcatgttcagagtaccagtttcctggaacttcagcatgttcaa

SEQ ID NO: 1015 - DNA, 201 bp, Bos taurus
caggcctgtacccgcccctccgaggccgctcgctctccagctaggccaggctgcggagccccgcccccacactcctaccccagtcccctgagactccatcaccctggcaacagccagagaaaggcccagctaaaatatttatggctcaaaacagtccagaggcttcagctggggagagagggggaaaagctgatgtcattc

SEQ ID NO: 1016 - DNA, 201 bp, Bos taurus
ctcatgaccaggggatagtgcagaaggtcacagatggccacgcagcagtcagtggctcccagcataaggaagaagcacatttgtgtagcacaagtgaaaaaagaaatggttcctgtctgggcccaaaggtcgacgagcatcctgggaagagtgacagatacctaacagatttctaggaaagaaaaactgccaagggaaaaa

SEQ ID NO: 1017 - DNA, 201 bp, Bos taurus
gttatgtggtatttaggagactggggcccaagatctgcaaggcacacacaaatttcaggagaaagtggttccaattcccatgttagttgtgtctgttgctcggccacctgtccctccacccttgcctgcacatggccttaatctggatagaggtgcctctcaaacctgtacatagctactaatgcaactcaagaaggacat

SEQ ID NO: 1018 - DNA, 201 bp, Bos taurus
gatcctggccccctggtcatgggcttaggggttgccttgggagccactatcttccttccccacctactgccaagatttgcagtttggctggcccccactcgtctttccattcaccctccaaggaagccaatcttgctaaatcagtctgtgatgcagaatcaggaggaaaggagcctggcatctcactgggccaagctaacc

SEQ ID NO: 1019 - DNA, 201 bp, Bos taurus
tgtctacacaaggagtagagaacaggaggccattctccagtaaatttggatgaaaaccaattcccactcaaaattaaacttctaggactagttctcttggtaaccatgccaggggtcaggcctgcagttctatggagggatcaccaaatacaagctgttggactaacagagaatttcatgtgccagtgaatatttatcagt

SEQ ID NO: 1020 - DNA, 201 bp, Bos taurus
tggcagactgaggcaccaactacaccgcagcactgctgtcctgacagagacgccagacacaaggcggcagcagggagccaggggaggggccagggccggggtggggtggggagacacctgcaccctacactgagagaaacctggaaaacccagggtgaagacgacagggaagcggagtgggtgccaactccacccggggaa

SEQ ID NO: 1021 - DNA, 201 bp, Bos taurus
acaccatttaaatggtcaatactagtgattatattttgattactattttaaaaacaaacaatacactgttacagtaattaacttccaaagtttttaaactgagaaaaacttaatgagaccattctctattctttcagaaatgattattttaatctatttttccttgtatttagataataaaggttatcttagtaagaagtt

SEQ ID NO: 1022 - DNA, 201 bp, Bos taurus
atgttaaagctaaaagtaattaaggcacagaaatcccaggcagcacttagtagctttgccacatgcccagcagaaccacagataggccccatggagtagtgcagaggaatccagaactcagaacagacaggcacaagggaagcacagaccatagcataggccgtgtcatccacatcctccaccacctcctcgtctgaacat

SEQ ID NO: 1023 - DNA, 201 bp, Bos taurus
ggtccctattgtttatcccttttaaatatagcagtgtgtacatgttcatcctaaactccttaactatcttattccccatccttccccctgcaatcttaagcttgttctctaagaccgtgagtctctgtttcataagttatttcatttgtatcatttctttttagatttcacatatatgggctgtcatatggtatttctcct

SEQ ID NO: 1024 - DNA, 201 bp, Bos taurus
aatatacctctccagtggctgccaaggccaggtaatggtgaccatctgaatgggcagcaatttttacaatgtttctggaggcaagcccctggaccaactggggggcctaaaaaaggtaaaaacaggaggaaaattagtaagcaatccaaggacaagaaaactgcatgacttgcctcactcgtgtgtcttactctagtaagc

SEQ ID NO: 1025 - DNA, 201 bp, Bos taurus
accagcaaaagcatacgctctatagtagtgttgtacgatagtgaaagccgtgaaagaggagagtctcagtgggtccccttgtactggcatccttgaactgcaggaggattgcccacattctagctgctgctgtagcagtggtcccatgccctcagcatagacccccaacagaaaaggttgtgactgattccttgatttcta

SEQ ID NO: 1026 - DNA, 201 bp, Bos taurus
cttccactgtcatatctcattctttgactctgatacccccgcctccctcttacaaggacccttgtgattattttgggcccacctggacaatccaggattatcttaagatgcttaacttaatcatactcacaaggttctgaggatgaggactgtagatatctttggggggccataatactccccacctgatccactcaacat

SEQ ID NO: 1027 - DNA, 201 bp, Bos taurus
gttggcagtcttccctcaacacacgtactttgagaagcatgtgtttctcactgggcgtcaggtacattctattctcatagtaatccacacagagattcacaatgtctgctaagagctcttcataaccagatatcacttcaagctgctgctgcagagactgaaacacaaagatctatgtcactgaccactctctgcccctca

SEQ ID NO: 1028 - DNA, 201 bp, Bos taurus
cagtgcgctggtgggccctgggggaactcagggaggaaagcatgcctgccatctaacagccattgcactgcagtcactcagatgctgagccctgaggaaccgcggatgtgaaaacaggatcctggccctagacagctgaggcgcgtatcaaaggaatgacttcagtgagctcagactcttgcatctgctcatgtgtagaaa

SEQ ID NO: 1029 - DNA, 201 bp, Bos taurus
cctcgcgggatcccacctcctctggagtctgggtgcccgctctcaccatccagaacttctggagtccgtcctgagactcgctacagaacgagaagggagactggacctttggcggccccggcccggccctctgcccgcccacccgctgcagcatgcaaggctcctcacctggtgccgacgcggacctggggctccatgtgg

SEQ ID NO: 1030 - DNA, 201 bp, Bos taurus
gtcccaagggcctgcttgctggagtgagcaaggtcctagccggggccaagcaggagaccaagtcttcatcctgtgacccctctctggagtgtgtgccagtctctggggaacgagggacacaaggccaccctgaaggctcattttcccctttagggtctgcagccgccatgggatccaacacattcaggaagaacaaagtcc

SEQ ID NO: 1031 - DNA, 201 bp, Bos taurus
acatgcagtgttctgctcctattttgctgaaggattggtgtgaagcatttcgcactggagtttgctggcttttgggtggagcttggtcttagtggaggcctttgggagaactcttgcctattaaggttctgtggagttgggagttcactagtggtccaaggtcctagaatcaagtctcctgcctctggtgttcaggcctga

SEQ ID NO: 1032 - DNA, 201 bp, Bos taurus
ctgcgaagtcacatattcatacagcataaatcaagacttattgcaagaacacactttagttgattctatggacagaacaatggaaatgaaatctaccaatgtttcgtttacatgtagaatatgaaaggcttatttataaacctacaacattctcaaaatctaggaaaaactattctgattcaagaaaccgtaatctctgtg

SEQ ID NO: 1033 - DNA, 201 bp, Bos taurus
atcctgaagcgcctctgtgcttgttaccatgagtggccctgaccctgacgctggctgcacccctcacagatagcaagctgatgggaggatcatcactcatcggaaaatgttcagtcacctggcccagatccaaacaaaagaaacatatctcctaaaccttagaggagggctgtagaacagaatttttcaaaaatacccatg

SEQ ID NO: 1034 - DNA, 201 bp, Bos taurus
caatcacctgagggtaaaactgaactccaatagcaaaaaacaacaataagacaaaaagtaaaaagccaggggagaggccttagccagggaagggcttaggggaaggtggggtttaggtgggggcaaggtctagggtcaggacccatgccactggaaaggccttgggtgagttggagggcaaggcccaggctcagcccctcc

SEQ ID NO: 1035 - DNA, 201 bp, Bos taurus
ggtcttgtttcttacactgccaagcctgtttgatgaaggccgttttgtggtcctttttcaaaatggctctgctcttgtcttcctgtcttgttaccacacatccccaccactggctaggcctggttcccagtacctccactgactcagctcagaatatctaggggattcagcattacttctgcaagatttttctcctaggca

SEQ ID NO: 1036 - DNA, 201 bp, Bos taurus
attatcatagtgtatcctttcacgcccagtagtgccctggtttgaatgataaattacagttttatcctacttgagaggaaagtggccaccagccaacctgcctttctgctggtagccttgcctcccagatgctggggcttcttctctacatgacaagtgtatccacatctgacctggtttcacaccaggagcaatagcacc

SEQ ID NO: 1037 - DNA, 201 bp, Bos taurus
acattgggagacagacaccggggcctgttggagggtgggctggagaatcttttgcattggcaaaaacatccaggatgtttcatgcttctgtcccttctggaacatccttcccaccctgctatggcctccactgtgggcctggggattgcccgttcatcattccatttcagcaccctcttcagtctcccctgacagccaggt

SEQ ID NO: 1038 - DNA, 201 bp, Bos taurus
agcacatcaagaaaaaacacaattggccttggatgattgactaaatggtgttccctgcacctaggctttgccagccttcagctgacgatgctacctttactgggtgagataagaaggcagggtaaaatgggcacaggccagtagagtcttgcaacaaagtcattaagcaatgccctcggtagactcagatgaagcacagta

SEQ ID NO: 1039 - DNA, 201 bp, Bos taurus
aagctagtttgagaccttggggatgaaataacagcagcagggtgttttacaacctcccacccaaaggatgaaggcaacccagatctatagcctagcaacagagggcagcccagatagtctcattccttaccaaggtcaaataggagtcatgccaacaacataaggtaagtcaactctctagtaagggggatcaggttggac

SEQ ID NO: 1040 - DNA, 201 bp, Bos taurus
tcccatctccacctccaaaaaggtctccttaaaaggccatgtgtgaacattgtaagaagtgaccatctttaaaacttactacaaagataatcagactctgctattggcctaagattagacatatagatcagtaggaaagaatttagagtccagaaaaaagccattacatttactgtcaattgaattttgtcaaggatgcca

SEQ ID NO: 1041 - DNA, 201 bp, Bos taurus
ggcacacatcagccaaccatggtgcagccagctcagagggagaaggaggagccctctgcaccagcagagagggagggcagggggagggggcccctgtcaacgtcttccttatcctggtgccaatgacttttcctccagccagcgtgagacttccaagtgacaggcagcagggaacatggcctgtctacccagctacccctt

SEQ ID NO: 1042 - DNA, 201 bp, Bos taurus
tgacttctgcacatgccccagcatcaggaaggagcccctctgagtgctgggctaggttcaagggtgaacattccaaggtcagaacggccacactgcccacgccttgcccagcatcagactcaggctgggagggagcctgccactctctactcccagaccccaggcctatagcccacttgaatcgatacagttctcaggccc

SEQ ID NO: 1043 - DNA, 201 bp, Bos taurus
aggcctttcctcagctggtgagatggacacacatcctcaggagagcagcctggtatggactgcacacacaggtacacacacatgcatacacacctcgacagcccctggccagggccctctgtcctcacctagtagggaaacgtcagctcggagtcccagagctctgtgtctgggcctcggctctgttcccagtgtaagcca

SEQ ID NO: 1044 - DNA, 201 bp, Bos taurus
aatcctcagactgcctcaaatccaaagaagtataatgggcagaatcccataaaacgtgtattccctaatgaacaatatgacaaattcatgcatatatactgaaataaccaaacatgactaaccgaagaaatctttcatagagatgaccagatgcaacggagaaaatattaattatgtcatctttgtcttgtttcacttcct

SEQ ID NO: 1045 - DNA, 201 bp, Bos taurus
aagattccagaatgcagaggaaaaaaaggcctctctgtggaggcatcccccaatagatcgtaaggtgtcagaggacaggggaaagcctgtctttgtacacgtctttgtaaagggtgcatctttaataaaggctggccaaataaataaaggaacactcaattaattaaaaaaaaagcctctgactgaatctctaaactataa

SEQ ID NO: 1046 - DNA, 201 bp, Bos taurus
tcatacacaaatttcttgttctcattctacctcagtttctgtcttgcctacagcctccttccccctaccccaagctccaccccagatatgagataaatacgctttggggatgaccctgactactagtttaaatttgtcgtttctgttagtgtagctcaaaagtgaatactgcaatgagtagaaattacagtaattattttt

SEQ ID NO: 1047 - DNA, 201 bp, Bos taurus
ttgatcaataccctcacctttggagggccctaagctttggcatcttccccctaactccacaagacccccaaaattacagctaaaattcctaatgcactttgccagcacgttgtgactttgatgggccctttggatgagaacccacagggatttcttcctcctctcatccccatttttcctccccagggggtgtactttggg

SEQ ID NO: 1048 - DNA, 201 bp, Bos taurus
atagctgcacacagagttttggttttcttcaaaataaaaccctgaatggagttcaggttgggacaacgtttaagtccagagttagagagtggagactgagcggaaggcctggctgtggggttaggaggttcaggatgggccccaccccagcctgtgtctgtgtcagattccctcctgtgagaagtgaggacggtgcccagc

SEQ ID NO: 1049 - DNA, 201 bp, Bos taurus
ggggagcctggtgggctgccgtctatggggtcgcacagagtcggacacgactgaagtgacttagcagcagtagcagcaggataaatgatgcttagacatgtagttctatcaacttgcaaagcccctcaggtcagtcagtcggttaacaaacagtgccacttaacggcaagagtcagaccaagcagcatctctaacctgtgg

SEQ ID NO: 1050 - DNA, 201 bp, Bos taurus
atgaagcccttcatttgtatataagcgtttgctgttctaatcaaatgcaacttgagatagactttaattttaacacatttaagtgttaacacattttattgtatactggattattgcacatcataataattagacataaatactaactttgtatttttgtcttctcattttgccatttcttcaacatgcaaaaactaaggt

SEQ ID NO: 1051 - DNA, 201 bp, Bos taurus
gagcaggaggatcaccaggcaggccatgccaattcctcggaaggttgcagcagcccctgtgaaaacaagtgacactctagagagtagttcctggaaaggcgggtagccctcacccaggcctgtagatgttctaaagctgacaaaggcagcagagcagagaatggcaagtggccgttagcttcataccgaaggaaaaacaag

SEQ ID NO: 1052 - DNA, 201 bp, Bos taurus
tttttctgtgattgctctcaccccctcccttggctttaatcccggaatatttaaggatgcccccaacccctctctccagggcagctcctctcctggtgccggacccatgtggccaattccacagggtgtttgtttcacaggcgcccatctaccacccctcccccactggcttttacttctgggttcccaaaccgccctggg

SEQ ID NO: 1053 - DNA, 201 bp, Bos taurus
gttgtcagctcagtgtcaacaaggccttgctgacaataacagaaaggagggacactcacaacgcagtgagcttcctgtcactgaagtgccccccgcagagtgtggccagtctgtcaggagagcaatagagggaatgttaaaatggaccggacgttggtcaatgattttaaagtatccttttgttgtaagaccgtgggccta

SEQ ID NO: 1054 - DNA, 201 bp, Bos taurus
acagtccaactcaggttgtgttttgttttcaaagtgggcgttttgacgaggtatccgggtcagctggcagctctgaggcctggctcaatttgcaatctccttgccctgtccacacgcagaacagacccttccctgcactctgaggggttctctcctctcctggaggcctaagtcatctgctcttcccacagaattagaatc

SEQ ID NO: 1055 - DNA, 201 bp, Bos taurus
tggcccataaactgtgtagaaataaggactgtaatcatcatgtatattttctttttttttttttcattttcatttgcttccctgaggtctatcggtatccaaatctaattatggactaggcctgtgtctggaagcaatgagaagcaatgggtttgactttgaggagattccttatcctctgacaaatcaactatcttgggt

SEQ ID NO: 1056 - DNA, 201 bp, Bos taurus
tccacagaaattgtgattatcccagaaacagtgaccactaccatgctaaattaatagttctcagtcctcatcttacttgacgtctcaaggcttgaccacttgaaaccctttctcctctccaatgcctggacaccacacttcttgccaattccaccctcatttaactggagctcctttgagatctcctttgcatacatttta

SEQ ID NO: 1057 - DNA, 201 bp, Bos taurus
aggtgcaagacctgaaattataagcagtgttttgatgttgatgagtccaggactttatatgtagaggtgtgatttttcaggcctttggagaagttttaacatatgatgtggcgttcgggggacagtaccaatgtttgtcacagtggcgcatctcagaaaacagatgcttacattcaaggccagcagacaggttcaccctgt

SEQ ID NO: 1058 - DNA, 201 bp, Bos taurus
atgcacttttctttttttgtatccagggaccaaatcaggattattatagatttaggacattaatgctagattaagtgaaatctatttgggccaattataacgagtagtggttatattaatgattgatttgagaagtgaaatcaaagtactctcagattcaaggaagatgtttcaagagatgttctctctctctcatctata

SEQ ID NO: 1059 - DNA, 201 bp, Bos taurus
gactgattagaaggacaaacataaactgtttagaaccaaatgggtcccagatgacagacaaagcaacttccactagatcttgagcctgagtatacagtcactgaagcacatcagcaagctaaatgacatacctggaaatgccctgactattctgaggtgaaccatcaaagaccaagaagtgggcagtgacccaattcctgg

SEQ ID NO: 1060 - DNA, 201 bp, Bos taurus
ttaagcatgctgtgttcatttctgttttagggcccataaaatatgacccataattgatctaagggtctgttagcctgagctattcagaagtgtctagataattggcctttgttctacttttgcagaaataaattcagaaaagtacttaggacagggtgtcctggcatgagagtggtaaataagagccttattaatgctgca

SEQ ID NO: 1061 - DNA, 201 bp, Bos taurus
ttccccaaaagggctgaagatctgaaaatcagttgacttgctactagaaggtaaggttgattaaaaaaaaatggaaattattggttaaatttataattgtcaaaatatatttcagctggtagcaataaaaaaaagcatgggttattgctcccccaagtataatttgtgatatctaaccattttgaccacccagtccatttt

SEQ ID NO: 1062 - DNA, 201 bp, Bos taurus
cctaggagggaggtaagagaaaagagcatggaagcaaaaggaatgctcctagagaagaagagagtgaaggagggagcaaggtaggaaagaaaggaggaagacagcaaaggagaaagagaaaaagaaagactaggtacaaagtatgagaaattagtattttgtaaaatgtatcagataaaggtcgggtattaccccctctgc

SEQ ID NO: 1063 - DNA, 201 bp, Bos taurus
aatgtatcagccactatcaatgccagaatgaattccatggtgcctgtttcttgtcattaacttctgattggaagatttacctctgaacctctgatcaacagggcctgggtcatacaagtctttgatacacaagacgctgaggaagcaagattctagtttctattctgggaaatgactcctaaggaaggattttcccaaaga

SEQ ID NO: 1064 - DNA, 201 bp, Bos taurus
aaaaccatgagaaccatagataacacatgtccagccattcaacatagcccattaaaaagtgattacagagtcataggaaaggatgcacttcgactaaatgcgagctttgtaatgatccaagctactgtcttcctaatctttgcagtggcctactagaacaggagagaagtgatcttttgcatatcacaaacatctattggg

SEQ ID NO: 1065 - DNA, 201 bp, Bos taurus
attaaattatgaagacactgtgaggatgaccagtttgcattggtcagtagcacagatacagtagcacagttacttcttagaatgggttactttgcagtatcaaatatagtcaagaagtgtgccccattttactaagccttatatataagtctcattcttcagtagtggatgaagcattttttctccagtggatagatcttt

SEQ ID NO: 1066 - DNA, 201 bp, Bos taurus
ttaagcttggcataaaagcaacagaaacacccaacttcaagaagtcatgagggctttgacaagaggtgctcaatatgaacccaaggtcatgtattctaaacggagaagaggagaccccataaaatatgattttgactgcatttaccaagagtcaaatgagcaatggcattgaggaagtatgatttagagaaatagagttaa

SEQ ID NO: 1067 - DNA, 201 bp, Bos taurus
actcagtccaaggtttttaaccatcagtgcagatttttactaaagacagtagtcaaaattttcttctacctgcttcagctttcacttctgcaacagaaacatcacttaaattgagagaacccagagccttttaacgaaccaaagtattaaacacacacacacacagcttgagcgcctatgtgcaacaatataatgaagtat

SEQ ID NO: 1068 - DNA, 201 bp, Bos taurus
agctgaggcttttgtatctaattttacaaatggatattaaatatcttgatcattctttgggccccctataacatactagacataataggtggcaacaaatgtgcccacacttagaataacgtcttgcaaatattgaaagtgtagattctgaactcatatacagcattcttccctctatttcttgctggtctctggccctac

SEQ ID NO: 1069 - DNA, 201 bp, Bos taurus
gagatggttagatagcatcactgacttaatggacatgaattggagcaaaagccaagaaacagtggaggatagaggagcctgaggtactacaggccataggattgcaaagagttgaacatgactttgtgactgagcaaaatatagattaaaaataaatggatggcatgaattgctctagtaattatctatgctggacatctt

SEQ ID NO: 1070 - DNA, 201 bp, Bos taurus
gttgaattctcttgagtaaatttttgtgtatgatactagattgggtaatacatatttttaacagggccagctagtaagacagtagagtgcagaaaggtacaaggatgtataagaagtgagtcaattagtacacagcttcagtttgggtttgttatttatcttgtcactttgcaatgtaatgcatcttgaaatttaaaaaat

SEQ ID NO: 1071 - DNA, 201 bp, Bos taurus
taagatcactcaatattacattagaaagagctagtaacaacagaattctaccagatgattcactccctagacatactttgctccttttacactaaccaccgcttcaaacaatcctaagccaaatcatatctgaacaaagagagtcaactctgtgtcatgtgcctgcctgattttgattgatgtaacttttgtgtgcttctg

SEQ ID NO: 1072 - DNA, 201 bp, Bos taurus
aagtgtatttataaagtatattcaaacataattactatttaagaataagtaaattttcatgggaacaaaatgataaattgttctaagaatgcaaatgacccgctgcttggtacaaaaactagactgttatttgaatggattaaaacttcataatttgaaatagaaggcacataagtaacatctttcttccccaaatcgtaa

SEQ ID NO: 1073 - DNA, 201 bp, Bos taurus
aacctcaagtcccagctattagcatataatttcagtgatttcatagaatcatggacaccaaactacacctgtggatgacctaggagtacttaaccttccacatatatccttagcttacattttcagcaatgttgaatggatattatgttgcttctaaattctacttatattttcttctctcagaccccagctagcaggcat

SEQ ID NO: 1074 - DNA, 201 bp, Bos taurus
tccttgggttttccaaatatctgtgtagaagttcttccttaagcaatgaaatatttctatgcatttttagagcaaatagaagattcaaatgggaagaaatttaatttttttgctatgttgattttggtctcctgattggcctctcgtgtcatttctcagatgtagctgaaatcaagagtagtcagttgacttaatgagtca

SEQ ID NO: 1075 - DNA, 201 bp, Bos taurus
ctagaatatatatacaccatattcataacatacctatgcaaagataaaacaaagagatttagggagatgtttctaattaacacaatgccaacttttaaatacattttaaacacccaaattcactgtgggaattttcaggaagaattacatgctccgtgctattttcagaatatgaagtttaagctagtacatctgttaaat

SEQ ID NO: 1076 - DNA, 201 bp, Bos taurus
cagtgtggccactgttgataacttgttgggaaccactgatgtgtgctagatctattgatttaatagaaagtatcatgttgtgcttcccacaagagttcttggttctgtttctttccattcttgaggtcattgattcctgcattcattaatattgtctttattttgtgccctttctctagaagtaaacagattcctatgtta

SEQ ID NO: 1077 - DNA, 201 bp, Bos taurus
tgcatattaggataaagaaatccatctataaaaagaaagctaaaaggtgattttatgaagtgtagataaagcagcactgccatatagtttaacatttttctagcatgtagttgaaggatccctgatgagctgttaaatacctcctaacgccacccctttcctttcctatagttcctacacgttaatttcccttgagaatgt

SEQ ID NO: 1078 - DNA, 201 bp, Bos taurus
aaaaaccaagtggaaaaaagaattcttttcagtctgcaaatgtcaagggtgataatatgtagctgtgttcttaccactgagcttaaaatcttgcaactcaggcttttgtagaaatacgaggaagaaaagaaacttctcattgccacttctaatgaattcagttcagttcagttcagttcagttgctcagtcatgtccgact

SEQ ID NO: 1079 - DNA, 201 bp, Bos taurus
tgaaaagctgccagacatccaggctagtctcctagagacacgtggcccagccaacagccagcaacagtctccagatgtgagtggggggcctttaaaccatccaggtgcagtgtgactcacggaacacaaaccagggctctgtaataatctagaggagtgggctggtgagggaggtgagagggaagttcaggagagaggggc

SEQ ID NO: 1080 - DNA, 201 bp, Bos taurus
aatgaaaaatgggcctctgagtatggactgggggaaggtgagatttttactttttcttatgttttataaagtatggaacatctacacaagactcagtagtggagtgactatttctggcctgtggaggaacattagggcattgttctaaattatggaattgagaatatttgatttgaatgaaaattatccatgaattataca

SEQ ID NO: 1081 - DNA, 201 bp, Bos taurus
agtccaaaatctctaacaatatgctattagttatttgttctgctattgaagtactgtcacatgccagattaccaccacaggtcacttttgatttatattgctgtaaaacaccataataaactgagtcaacaatcctactaacggtttctttatggattggtggaaaacatagcctttcttcagaattccgtaaaacagtga

SEQ ID NO: 1082 - DNA, 201 bp, Bos taurus
aattttgtacttggcccttcatattcatagttcttccaaatcttcagtttcaaccaatgacagacactgtaatactgaaataatttctattgaagaatatcttcatataagtggccctgtacacttcaaacccatgttgtttaaggatcagctgctcttttagactatattagaacatatcactgcagatggtgattgcag

SEQ ID NO: 1083 - DNA, 201 bp, Bos taurus
aatggggaaccttatgtagattttattgccaggctaagtcaaaatttaaataaaatagtctcacaaccaggtttgagagatatgctgatgcaagttcttatttatgacaatgctaactcaaaatgtaaaaaggtgattcagcctctcaaaacacagggtgcccctctagaaaaatatcttaaagttttccaggatattggg

SEQ ID NO: 1084 - DNA, 201 bp, Bos taurus
acagggccttgtctctcatactaagtatgaatgtgtgacatccaagcatccttctggaacaagaccattgataccaaacgagatgtggtttattctaggatggtgaaagtcatctgtggcccttaggaaagctagattcatggacctcaccattgatactagtagttttgaagaaattgctttagtagttatgaagtgaag

SEQ ID NO: 1085 - DNA, 201 bp, Bos taurus
agtaaacctttaatccaattttctgttgatgggtggaggtgtgttccctgcctgctgtttacctggtgccaaactatggtggaggttatgaagataatggcgacctcctttgaaatatcccatgaatgcactgctatactcactgccccaaccctgcagcaggccaccactgacccccgcctccactggaatctcctagac

SEQ ID NO: 1086 - DNA, 201 bp, Bos taurus
gctgtttgctgatcacttacatgtcatttttatagtttgtatagtttagcaatagttccgatactacacttaagaattattctatatattagtgtaaaccaatatccaatgcttccaggggaaataaattagtggagaataaacagatgaacaggtaaaaaaaatacaagatagggtaaagtaaatgcatttttcaggtgg

SEQ ID NO: 1087 - DNA, 201 bp, Bos taurus
aaacttttggagtagttgatggacagggaggcctggcatgctgtagcccatggggtcacaaagagtcagacatgactgagcaactaatctgaaccaaatagcaactaaaccaaataaacaagtggccctttgaagcccatatattttgtcactgcaaataattgtttactgctgtagatagtctctcttcatgaatcattt

SEQ ID NO: 1088 - DNA, 201 bp, Bos taurus
tctgatgaaagaccacaatgtgggaagaaaaatccaagaggtggtcttctaattccccttgggaggaaggatgtctttgtttgacaaaaaaaaataatgtgtcattttatttggaaagattgttctcagggtagcacttgaataactcaaagaacaaacttttgagaaaaaaaaaataaagaataatgtaggggttagtag

SEQ ID NO: 1089 - DNA, 201 bp, Bos taurus
aaaataaagaacacatctgaatcagttctaatgaaatacatgaaactggaatctgttacagagagagaagtaaatcagaaagagaaacgccaatacagtgtattaagaaatatatatgaaacttagaaagacagtaatggcgaccctatatgcaagacagcaaaagaaatacagatgtaaagaacagacttttggactatg

SEQ ID NO: 1090 - DNA, 201 bp, Bos taurus
ccactccttggtcttttgatagtgccttggaactgtcatggcgcctctgggtgtgtcatttagcttgtagattgaagatcaaggtttagttgaattttacctgtctgccatcatggacccattcgatttaatgggtttatgttatgcccttgggctatgtcattctttcaaaggttgtgccctgccctcttctgttctgtt

SEQ ID NO: 1091 - DNA, 201 bp, Bos taurus
catatgcaaaagactgaattttttgtgatataatcataaggagagagattactaaaagtagtattattgatgaaaaaattttactgtctttgaaataaagtattctaacatatttcctgtgagataacatgtaagatatcttggtaggtactgagcaaccaatattttagtgatatgtcctggaagaaataagagaaagaa

SEQ ID NO: 1092 - DNA, 201 bp, Bos taurus
tgtaacaaagccttcaagttaattttattattacacaagaagcagatgccaagggtttacaagtattttcctaatggtaacacaaactatcccaccccttctggtttttgataggactatatgcaaatttaacatgatagaaatttattcaaaattattataatgaccttataactacccttgtctctatgttattagtga

SEQ ID NO: 1093 - DNA, 201 bp, Bos taurus
ggggaccccagtgtgtggcagggaggctcccagtggggacggtagtgggtcttttaaaaaaaaaaaaagtgcctcttagcagaccttgaacagtatccatcaatgtctctaaacctccatttcttcatcagaaattacaggtaagaatacctacccagtagtattcctatttggagaaggcaatggcaccccactccagta

SEQ ID NO: 1094 - DNA, 201 bp, Bos taurus
aatgagacttactaaatgatcatggctgaaattatgtaataggacatagctctgctacagcctcagaggaggagatttctaaatgttctcccttcaaacataagaggatcttagcacctggaaaccacctctagattcacatttttcgttaagtcatactaattcaggcatgtaagtaggttggcaggaaagaagcttaat

SEQ ID NO: 1095 - DNA, 201 bp, Bos taurus
tcatgttttctctaagatcattaacttaaggcccatgtacccagggcttccggtgctgggtttctcactccatagagtgggaaactctcactacataactatgtgcccaagaaggaggccaccagagaaaggcatagctgagagatagtacagactgtgcaccagtaagtcagggagaactacacagagatgtctttttta

SEQ ID NO: 1096 - DNA, 201 bp, Bos taurus
ttaccaactcaggccactgagagccagaaggccttcacagcagtgtttaaagtgactctcatctcttagggccaaaggccggactgagactggaactgaattgtgacggtagacaagatgcaaaagaggtggagagaatagccaagacaggtctaagttggagtcagggccctgagagtgaggacttgagaaataggatga

SEQ ID NO: 1097 - DNA, 201 bp, Bos taurus
taacagacattttctcaaagtcctaaagactgaacatgcaaaatcaaagtgtaagcaagtttgatttcttccgaggcctctcccctaggcttccagatggctgacttcttgctgtgtcctcagtgacctttttccttgcttgagcataccttggagtctcttcctggtcttacaaggacatcagtcatgttggattagggc

SEQ ID NO: 1098 - DNA, 201 bp, Bos taurus
cggaagtcaacgatggtggcccagtcccaaataggtaatactgacaactggtggtcgtggagagcgagtgtgagcctgttagttttcaaatgaatacacagtgttgttcactcatgaaaatccactccatatgcatgataaatttaatctttagactgatctatatgggggtgaatggtaagaattttgaaacgttctcac

SEQ ID NO: 1099 - DNA, 201 bp, Bos taurus
tatccaactggtgatttgtgggacgaaatttttcctggaaagatttccttttaaattttaaaagataaaaatttatcaccagtttttagaccattttctacgaagtcaaaagagaaaacgattggctacaatgctaatgctgttaacacgcatgcatgctatacatacatggagtatgtgtgtatttctaacttaaacgat

SEQ ID NO: 1100 - DNA, 201 bp, Bos taurus
aaagtatatgaaatttgtctagatggattatagatctaacccagtttgggaatctttttatgcccatctaaaatggacatatctttgcacataaagtacacgtatacaattgttttctaagagcattgagttgtttaggtaataataagagttatgctgtttttataacgttcaatacagtatatttacaagttccttcaa

SEQ ID NO: 1101 - DNA, 201 bp, Bos taurus
ggccaaacttaaccacccctctccaggcctgactgtattttatcaccatccttcctttttttaactctcagcttctcaactgtgcaaaaactaggaaagcaaaagcccaggccacatggttagataccatcttactccacatagtcactccatatccagaacctctgaaaggaagtatggcattgaaggacagtgcttcag

SEQ ID NO: 1102 - DNA, 201 bp, Bos taurus
gcaggccttcggggtagctgaagccctcttccctctcgcccccagcaccccctctgaagctctcctaagactgagaaatgagggccagggcacatccccgtgggcacggtgggctaggctgtcggggcaactgctgggagaatggcaacacttggtcgcccgcgcgtgtcctgggacctccaagttggggaccggcccctg

SEQ ID NO: 1103 - DNA, 201 bp, Bos taurus
ttaaatagattatttaactgtcgtatgttgcaaatatttcttcccagttggattttgtttatgacttctatttatgggtctttaggaccttattggcattaaataacctttatgttatgcatctcagtctatgtctgcctttattgccgtactatggctttactagtttatggttatataaagttctttgtaatctagaaa

SEQ ID NO: 1104 - DNA, 201 bp, Bos taurus
ggaaggagagaggataggttggagttggttgggggaaggttctgggtgttattttcaggggttcaggctttctcctcaggcagagataggccctggagctttgaaccagtgcagggctgctgggaactagaagatctgaggatgcagtggaaggggtatgctacaagacacctgtgagtagccagagagagatggctaggg

SEQ ID NO: 1105 - DNA, 201 bp, Bos taurus
taagtgatttcaaccttccttgaagattgaagtatctgagtttgataccaaaataaaaatctgaaatttttattgttcttccaatggctatgtcatttctgtagtgacctctaacaaaacctagttttagatttgatggctgttcaaaatgaagtgatcacggacatctaactgaagtatcagaatacctaagtagttata

SEQ ID NO: 1106 - DNA, 201 bp, Bos taurus
tgctggagccagaggctgccatccactgggctgaccagtaacgctgtcctcttcgagccgtctcactcctttctccccgagcaccaagcaaagtatggcttttcaattttattgtcttttgtattttcccagacacaagaagaagacggcctccaagctttatttgcgtaaatctgtattttccaggagatcaaagagcct

SEQ ID NO: 1107 - DNA, 201 bp, Bos taurus
ataacgtactatgaaagagagtcaaaacttgataggaaatctaactcatactctactttgggctattcaattaaaaaaaaaaaaaattcttcaaaatttgttattttcattcctactacattctggtagtgctggtagaatgtcaactagctctcagaccttcaaagttaaaaaaggggaggtctggaggtcaggcaggct

SEQ ID NO: 1108 - DNA, 201 bp, Bos taurus
aggttaagtttcactgaggttgggttaagttggggctcatgggtttatcagattcagacatttagaataagcagctttagaaagaaaaaagattagtcaacacaattttcttttttaaaatgacaagaaaagtatcatttgttggctgtatggaaatccctaactttttaatatcaaagcctgcaagaaaaaaatctctcc

SEQ ID NO: 1109 - DNA, 201 bp, Bos taurus
gggaccaaagtacaaaattaaccattaacacacattctgaatggtccctgagactgatgacctagagaaatagtatctgttacctgtgagtttagaaaacgctttcatagtaaattacaactaataaaagggagttcttgagctgcgagtaaggcatgctccttgtgcacatgtgctcagaagcacacgtgacaatgtata

SEQ ID NO: 1110 - DNA, 201 bp, Bos taurus
aaacatcacagagtgatgtgagtgggttaaaaaaaagtgataaatacttctcagtaagactatgtattcaatgtatggtggccataagtagaaacttggcttcgttctaagaaatgactgtttattaccaattcttaaattccaagaaaaggatattgaaaaactgaattttaatcaaggaaactgtctcagagacactta

SEQ ID NO: 1111 - DNA, 201 bp, Bos taurus
cgagctttctcatctttcaaaactgaaaactcgatgcccgttaaacagttaaacagttccctctttcctgacctgctatgcagccccgggaaccaccattctactttctacttgtataaatttgactagatacctgatataagtggaatcagatagtatttgtcttcatgtcacacaaattaaataatcttatttttctca

SEQ ID NO: 1112 - DNA, 201 bp, Bos taurus
aaaagaagatcaaatataccaacttgtacaggtctggtcgatggagatgccatccatctgcagtgttgagtgacctaatggaggacaggccatgatctcatatgggctcaaaaatgaatatgtaagataagcaaagaataagctttagctgtgttaaggccatgggatttcagagtaaattttcattgcagcatagcatag

SEQ ID NO: 1113 - DNA, 201 bp, Bos taurus
gtctgggatacccaatcaaatttgtcatactttgggaacttttttttgaaaagtgtaggactttatgtgaaagtggaagtgtcaatctctcagtcatgtctgactctttgcaacaccatggactgtagccctccaggctcctctgtacatgatattttccaggcaagaatactggagtaggttgccattcccttctccaag

SEQ ID NO: 1114 - DNA, 201 bp, Bos taurus
agtaccatttagaacccttatgagttttttgaaattcagaaaaatcacaacaattttgatcatattagaaaatgcttttctccttgggataaacccagcttttgaaaaatattgatactaaggtggtaggcaaaggctgactcatataataacacaattacaagcaaagggaacaaaggtccacaggcaaggaccaggttt

SEQ ID NO: 1115 - DNA, 201 bp, Bos taurus
ttgaaaaagcctttgacctagctcttccagaactaagctgtttcctttgaactgactggtattcaggcttgcaagctgtttgaactgagctgactgtgctgtaagctgcttaaattgtttcaaaattgttctttactgtagaggaaaggcctctagggaatgggatcccaattatctaaatataatgagggctcccccggc

SEQ ID NO: 1116 - DNA, 201 bp, Bos taurus
agataagagcagggtttgaaatccttatcaattgcagcaattacaattttatttcagattaaaaggaagattaaaacagatgttgccagcattggatttgtaatttccatcattattatgatacactgtaaatcctggaatataagcttggaatcttgaagaaaaaactactatgatcaccagccaacttattccaagttg

SEQ ID NO: 1117 - DNA, 201 bp, Bos taurus
ttccaattaaacagcaaaataggttcaaaaccaaagagtctcccaatccctcatagacaaaagtgcttaacatccatctgtcagagagcccgtgtgtgttcattttaaatgtaaactgaatctaaataatgatttcaaatgttcatcatttcctaacttatgttgatccaaatgcagagactgcttaaattattaataagt

SEQ ID NO: 1118 - DNA, 201 bp, Bos taurus
gttccattggcctttcatgggttacataagatctgagcatcagtaactctgagtagtaacattgattagatcttcttttagggatagccaggcatgaatgccagcccttgtgacttggcctagaatggggaaatcccctaagggaccttaagatactccagtgggggtggaaaaatatatagactcataggtaaggtagat

SEQ ID NO: 1119 - DNA, 201 bp, Bos taurus
ggcttaatcgtcttgcctcattcataggttctctggctcttgtccttgttgctttcattccttaattaaggagattcccagataatgaagtcaggttaatcgtgttgctatttaacaatgtctcagtttcacttgaagatttgcccaggatttagaagctgttgacacctcagatacagtactgaggacagcaaagtgcta

SEQ ID NO: 1120 - DNA, 201 bp, Bos taurus
gaagaggcatagcttgccctttccttcttccccattacatcatttctgattcttaccctttccaatctttagggatgggagaaggaatggaagggagggcaaatactttggtacttaaggacaactattgatgccttctgcatgggaggtatccagatgcttctcaaagaccatgagtaaggtctccacgtggttcaattc

SEQ ID NO: 1121 - DNA, 201 bp, Bos taurus
aggaatgaataatcatcttcattctacaagccatgaggtgccagacactagtgctaagaatactaaaataaagagactctcaccaggccctaaaggagcttattaagcccttcaaggaaagtaaaaattgagtagtagattccttttcacatgtgtctatttgttttaacttgacttattttgtttctgataatgctgaaa

SEQ ID NO: 1122 - DNA, 201 bp, Bos taurus
tgcagggaagaaaaaggatcagataagggagagttcttcaggttcagagtttctttactaaagctatctttcttttacagtcctataaacataagagaaattgctcaatctttctctgtatcttttctcatctgtaagaaggaacagtagacactatttgcaaaaagtaagtttttaaattctacttttccacccaaaatt

SEQ ID NO: 1123 - DNA, 201 bp, Bos taurus
tgttttgttttttcaaacaaaagtaataaatgctcatggtgaaaatacaaactcttcaggcaggtgtaaaggaaaactggaaagttattcatccttgttagggaacaactagactgaagtcaggaggagaaggagacaacagaggatggcatggttggctggcatcaccaacttaatagacatgagtttgagcaagctcta

SEQ ID NO: 1124 - DNA, 201 bp, Bos taurus
agtctctgaggaaggtgttccagagagccaagctcctgttaccagaagaacaataccaccaccaaaaggtacaagtgagaagacagtcggccttcttatctcctgattgttgttgttcttaacacctgtgaaaatactaatatcttaaaagctctagttgctaccagggaggccacttcaaagtgtgtcccccaaattagc

SEQ ID NO: 1125 - DNA, 201 bp, Bos taurus
gctttaccaatgtattagatactgaatttacagtgagtggacttgtggaagaccaaagatatgaatttagagtaattgcaagaaacgcagctggcaacttcagtgaaccatccgagagtactggcgccattaccgcaagagatgaaattgacgcaccaaatgcctcactggatcccaaatataaagatgtcatcgttgttc

SEQ ID NO: 1126 - DNA, 201 bp, Bos taurus
aatgactgcctaaaagtcacttacacttacacaaaagtcagtgtacagaggagaggcctgggggacacatgccagaagggtggttatccctgggagagcagggggtttcaaggcaaaccttcactttattcacactgtctaaatgattactttatatacagtcacagtaactgaatatatttaaataaagtaaatatattc

SEQ ID NO: 1127 - DNA, 201 bp, Bos taurus
tcccaggcctaacaaccccatatgaaggaggaaaagagccatggcaaaaccattagaccgaaagttcttagagcttttgcttgtaggcaggacatgctacttaaactcacaattttttttggccagagcaagtcatatggacaaactgaagtctatgaggcatggaagtataattctctcagtgattacttggacacagta

SEQ ID NO: 1128 - DNA, 201 bp, Bos taurus
aagactgtctggagtggggcgagactgaaaggggaggctaattacgaggccataataaataattctaagaaaagagtatctgggtttcccgataaccccatataaagatgccaccaaggctgctattttggggaaatgggggaaggattccataatagatggaaagaatttctgctccattctgggcatcgtgtggtatga

SEQ ID NO: 1129 - DNA, 201 bp, Bos taurus
ccagagactgagacacagtcatccacttgttagaagcactgcacacaaacagccaattttcctagaattttattattgattcacacaaagtaaaacaaatgtgttttggatagcagagtaatgaggtcatttggaataagcagaacaggtaaaaatctctttaaaacaggcattaattacatagtaagaagcccagtgaat

SEQ ID NO: 1130 - DNA, 201 bp, Bos taurus
aaaatccttagatagggagatgtaggtaacaaaaccactcttccccagttaaaacgaacatgaaaatcaaagctccaaagcacataaatctaccattaaaaaacactgccacaaaatcaataatcagaaaaataatctgaaataataccataacttaaagaaaacaatgtttcatattctcagaggtgaagcaatacatac

SEQ ID NO: 1131 - DNA, 201 bp, Bos taurus
gcgctgacaatctcattttacagttgagaaaactgaagttcagagacttccaaaatcaaacattcagtcagtgttcgtcttcaaagctagacactttgccgcacccctgaaatggaaacgacattgtgaatcagctatactccgataaaaagtaaaaactaggactagaacgtgggtcctgatttccaaataactgatttt

SEQ ID NO: 1132 - DNA, 201 bp, Bos taurus
gaggcctggcatgctgcggtttatggggtcgcaaagagtcggacacaattaagtgactgaactgaactgaatgctttaaatatgcttctttctgagtacataagtgactacttgactgcgaactaaatatcatgacttttttcattcactgtagtgtagagcctaacacaaggttttctattcaattgaataattatcact

SEQ ID NO: 1133 - DNA, 201 bp, Bos taurus
ttaacaaaaattctttatattccaattttttttttaacctgcaagatttagtaggaaattataccatatcaaaactatggtgctgtggtgtggagacaataaacgactgataaattttcatggttttcttttgtccatttgttaataatttgaatatatgatgttactcctttctttaactgattaataacacttattaat

SEQ ID NO: 1134 - DNA, 201 bp, Bos taurus
atgtatcagaactgacaccacagatgaaaccatgcaatatttaaggctactggtaaactggttagtcctgttggaaatgatatacaggcttacagctaggggtctacattgtaaacaagaactcttttaacaaaagaattatctcttggttttaaagaatgaaacaaatacataatgcaagatagatatctccttccagtt

SEQ ID NO: 1135 - DNA, 201 bp, Bos taurus
agatttccttggcccaacttgaaaaaaatatccctccctgaatccacgccccttgtcattctttgctgtaagcgtctcattcccctatggcttgtcctggtctcgcgtcagggcctgattgttgcagagacagaagaccagtccgtggcaaggccttacgcgtgccctgggacacagaggggcacacgctgccctgtctcc

SEQ ID NO: 1136 - DNA, 201 bp, Bos taurus
ggcaaaaattctgactttgctgcaggttggaggaggagcaaagtgggagctgggtaggaaagagagtcaggcaaagtagtgcagcgacagccacgcctccacctcaggtacccggccccgcctctgtggggctcctacctacttcatggctccaggtctctcccttctcctcccacctaaccttgctgttaggaaggtgcc

SEQ ID NO: 1137 - DNA, 201 bp, Bos taurus
tggtagatagaaaacaaaatggcagcaagaggcacttggaagaacatgtgggtttccctttgttatagcaatatagtaatttatagaccttttctttcatttccctaaaaaaatgaatgaacatgtaataataaaacatagagtcaaggaaaaccctgtttcctttggattaatctctgtccttgcctacatgggcaccct

SEQ ID NO: 1138 - DNA, 201 bp, Bos taurus
ctctatagtaaatatgtgtctgatgtccactacatgccaggcgcctagtgatgctccagggatatggagatgaatgcaatagacagagtcccactcagatggagccagtgggctaataattttccaacgatgctggggcttttcttgtttcctcagagggctacagggtccttgcccttctcacagtccagtgtccttgga

SEQ ID NO: 1139 - DNA, 201 bp, Bos taurus
aaaacccaacctgattcacatcccagtgcaacactctcctccggcaaaagagacagaaagaccatccccatttcttgggcttcaccctttccatattttcccacttgctttcctaagcaaggccctccccaaatatccttcctgggcttcatcaacaacctcctgatagacttcctttctcaatagacgtacagtgtaaac

SEQ ID NO: 1140 - DNA, 201 bp, Bos taurus
accatatttacaggagaacactgtttagaaaaaattcttattggtagagacagtcctctcaatcttagaacataatcaccatcagtttgataggtcctctttgaaaatgaagacaatatgtcctctcaagcttgatttggagggtcactcactatttctgattacttgcaaaattctttactatcatctgattacttcata

SEQ ID NO: 1141 - DNA, 201 bp, Bos taurus
atttaagaatgtagaataaaagtatagcagaacttttcttgtaagaacaacatagaggacctactttaaggaacagaaaattgcaaagtggtataaatatacacttttaaaatgccttgctacttaaaaagtccttccagcattattttcacttttaaatatgttctgccttgaaagaaagattttttaaaaggtggacta

SEQ ID NO: 1142 - DNA, 201 bp, Bos taurus
cttctccaggggattttcccaacctaggaatcgaaccaggttctcctgcattgcaggtagattttttaccaactgagctatgaaggaagcccaattttatgggcaaggaaactgaaatctacggaggtgaagtgactcacctaaggtcaggtagttagcaacaaacctatttggggtttgttaacctaacccaaaccctct

SEQ ID NO: 1143 - DNA, 201 bp, Bos taurus
ctagttcattttataaagccattttggctgttggctagtttcattaaaacagggctcataattataggatgattagctaaaatgtcagtgttactatgatatctttcctgggggaaggacaacagctaagtgctggcagccccagccttgctgctgttgcagtacatgttctactagagcatgccagagtccagctgccct

SEQ ID NO: 1144 - DNA, 201 bp, Bos taurus
atgggaattcagaacgatttatctcggcctcctcggtgaccatctctttgtcagttccacatgcactctgtttgcttttggtgcttctctcctactacagacaagttacactcaagctctcaaggcctcagcttttacaactgcagattgggaacagctgtccacaggactgtgctgatcaagtgagacaatgtgtaggac

SEQ ID NO: 1145 - DNA, 201 bp, Bos taurus
ttaaaacttttcattataagtcatttaaaaatagcttaagatgagcaaaagatttcacggagcttctgcattgaggcctgcctggagagggtttgtatgggtgtgggaccatgacagttaacaacttaggtattccaaaagggtgaagataatgtagctcacaaggttgaccataaggcatggccatagagctccctgaag

SEQ ID NO: 1146 - DNA, 201 bp, Bos taurus
cttccccaccactcccactccttttggtttccacgggcctctgggtacaggctgggagaaatcctcagaaaggttctcacattctcttagcctaagacctgggggaggaggtggggccctgggcctctgtgaagggtaagcgaagacaatgagaattcgatgctctaaacctacagtgtgccagcatgccatttaaaaacc

SEQ ID NO: 1147 - DNA, 201 bp, Bos taurus
aaccaagctaagtagtaggacttcttgatgaaagtcctagtctggtggcttctcagagctctcaaggcatgaatccgtggggccagggttctgaagtaaacgtagcaaatgcaggctgttctctttgggaaactctgcaaatgtccaaatcagctctgggggaataagggtgaaacccttgacaggccaacatttttgaat

SEQ ID NO: 1148 - DNA, 201 bp, Bos taurus
aaataccaagatcatgagaatgattctttgggtagtctctgctgcagcctaatgtaatgacagtaattaacagcctgtgattagcagccactccagaaagtgtttgaatgttaatttgcttcaactaatatgcagcacttctgtgtaatgagatctaagctataggttcatggggaaagcaaattattttccagcatttaa

SEQ ID NO: 1149 - DNA, 201 bp, Bos taurus
tgtttctcctagtcctgtggaagttctgtaatcagatcccactggccttcaaagtcaagttccctgtggattcccagtccctttgccagaccctcaggttagaaagtctgatgtggggcctagaactatctatactattggcttcataatcagtagaaagggttcagtgaccctacaaacacataggtgtcatcaactgaa

SEQ ID NO: 1150 - DNA, 201 bp, Bos taurus
cagacagttttcaactaagtggtctggtgatgaattagaagagatgagaaccagggagaggggattatttcagcatcatccactgagttggtgataggagggtgagctgtgtcctcctagctctgagttcccagatcgtttgcaaagtagtgagagttctgccattgtgtgagaccataatccgaggtctaattgggctaa

SEQ ID NO: 1151 - DNA, 201 bp, Bos taurus
cattatacatttgtccaaacccatggaatgtacaccaggagtgagccctgatgtaaattatggactctagatgataatccagtgtaatgtgacaaatgttttattttggtgcaaaacactggtagtgaaggaggctacagagtgtatggtgatggaggtaatatgagagctcttaattttgctatgaacacgaagctgctc

SEQ ID NO: 1152 - DNA, 201 bp, Bos taurus
gaaggacagggaagcctggcatgctgcagtctatggggttacaaagagtcagacacagcgagctgaaaaaaaaatgatttctgacttttcaagatattgataccattctaagtacagttgatttttgatgaacacaggtttgaactgcatgggttgacttacgtgaatttttttcagtagtatatacaatattactgcgtc

SEQ ID NO: 1153 - DNA, 201 bp, Bos taurus
atactctaggaaaattcctgggatctactgttttctacaaaattgcactggctctcaccaaatgtacatatagtttaggggttttgtttgtctttaagcacattaaaccatagatatttgctacctgtgttactcttctaaaaaaacaaatttcctatgtaatatttataatcaaaaagtaactcatctgaataagaaaat

SEQ ID NO: 1154 - DNA, 201 bp, Bos taurus
tgtaatgtcctattttgataagatgcacaatgttggaaccagctggtagtcttgaataaatggccaattttgtccatcgtacacaaatctgtaacaaataacatagctgggaatgcattaggaacattcataatatataacccatagctttcatttttatgatttagtgatatttcaggatatttgtaaatctgaagattg

SEQ ID NO: 1155 - DNA, 201 bp, Bos taurus
tttgtagacttttaaataatggccattctgacctgtgtgaagtgatacctcattatagctttgatttgcgtctctctaataactagcagtgctgagcatcctttcatgggcctgtggatcatatgtatgtcttcttttaggtctgtttaggtcttctgcccatttttttaaagatttatttatttttttggctgtgatggg

SEQ ID NO: 1156 - DNA, 201 bp, Bos taurus
agttaaaaagtttgtactcaactgacatctctcctagacgttgagtctcatgaattctcaggcacttagaagtgattgttaactcagattgttgcccacacatgaggtcctaaggcatttttataagcaaagttctcgtaactgggaaaccctggattatttaggacctgaagaacattccagcttggtctaaggttattg

SEQ ID NO: 1157 - DNA, 201 bp, Bos taurus
ttttttttttaatgaccacataataactctcagaatgctcaggagtaagcataaagcctcactgctgtaccaggagacttagagtgatagcaataaagattctaattcatatgcatgcaagcaacacaaactcaagtggggaatttgttttgcttgtgaacaggtcatattacacatgttatttgcatgaagggaattgga

SEQ ID NO: 1158 - DNA, 201 bp, Bos taurus
actcctaaagggtctctcaaaaacaaaataaaaaatactctgctgtatcaaataggaaagcaaataatgatgttatattctgaatttgaatgtgatgaaaaacaaactggccaatttcctaatccacttgctgattcaagctaaaaaatcttttcatttaaaaaaaaacacctattgaataatgtctcaccagtgaataga

SEQ ID NO: 1159 - DNA, 201 bp, Bos taurus
tgagaaggagttcatagtacaatctttaccagtgattcctagtgtttatgggatcataggccttcttagaaaatggccacacttacggaattggtggaggaagaggagttgtcaaggagactgacatagaaactcagtgtcaagatggtgaaaacagaggcaggccagaggttcagtcagaagaaaagacaaaagattttg

SEQ ID NO: 1160 - DNA, 201 bp, Bos taurus
ttgtaacatgcatcttaagtgcacagcttaaattttacacgagggcccacagggtcaccaccacccagaggaaggtttgcactgctccctgacaccccacatgcctctcctgctttccatgcgattgctatcctgactgccaccttctctttaggaaggtaacaaaaatgaacaggggcagggtgtttgggagagaatgga

SEQ ID NO: 1161 - DNA, 201 bp, Bos taurus
ttaactgctattagggcataatcaatggttcagctgtccataggacggtctgacacaaaagcacccactatcagtcaaaccaatctaagctcgagcattacagctctctttccttaccaggtacagttttctggtcacagctggaactctgcttaaggttagtagccacacaagaagtagcctaaatgatccctgcagtat

SEQ ID NO: 1162 - DNA, 201 bp, Bos taurus
cctgttgtaggggtccactcttctcaactctccctgccgaggaagactctgaaccctccccaccggtgccaagtggaggatactatttcagaaaccagctatgcttacatgccctggccccagcctctctctctctctctaagtctggaggttctcccgtattagtcagtgcccacaaactcactgtgctttgtgctcact

SEQ ID NO: 1163 - DNA, 201 bp, Bos taurus
ctccctccctgctcccttaagtaggcactcctgccctcaacagtttatgtctttccttctattgccccttgagacctttgcccaccttgttcttaaaggttggccagactgctctctcctttcttctttctgccccttctgacttgactctgcccccatcctgtcagatacaggacctcagtcaattactcccagcttacc

SEQ ID NO: 1164 - DNA, 201 bp, Bos taurus
tccatgtggttcctatggaaaatgtcctaggtcgctgggatcaatgataattcctggattacttctttcaccaatatcattggccttaggatttctatccggagaaggcaatggcacctcactccagtactcttgcctgcaaaatcccatggacgcagaagcctggtaggctgcagtccatggggccgctaagagttggcc

SEQ ID NO: 1165 - DNA, 201 bp, Bos taurus
ggccacgcagaagcatgtgactgctccaggctgctcgataactgataacactgtgtgctttctctgactgttgagtcaactgtgtgcttagcagaaaggcctagcatggcttcgaggagggcagaggaggaggacaagccggtagcagccttcagcttcaccgctgctccctcaggcaattcggcaacggcccgtatttgc

SEQ ID NO: 1166 - DNA, 201 bp, Bos taurus
cctgaccagggatcaaacccgagcctccctgcatggaaatgtggaatcttaaccaccagactacgaaggaagtccctgaagctgcatcatttttgtggctcagcttacaaagccacatatcaccactttcatcattccccactgaccagggctgtcgcaagccctgtctagacgcaaagaagagtacctacatgccctctc

SEQ ID NO: 1167 - DNA, 201 bp, Bos taurus
ctggactataaaataagcacttcccctgcccgcctccaaaacacatgctgagaacatggtgaactgccttaggaattcttcacaatcaaggaggaagtcaatgagacttgggtttgaaagatgtggccagccatttatggcatgtgcttggatatccgtttatcaccttgtatttgggaatgttagcaagtacatgtacag

SEQ ID NO: 1168 - DNA, 201 bp, Bos taurus
agaaaaccttcatgctggccaaaagtttgtgcttttctgatatgctgaatttacccatgatcgaatctaaatgagaaagtcagttctttcttgtctaacttatctcagggaatgaggtgaagcagcccaaggctttcaggaaggtccttcctcatatgaggtcttatcagatgtcttttatactggggctgagagtaggga

SEQ ID NO: 1169 - DNA, 201 bp, Bos taurus
atttattggagaattactataatcatcttcattaatttaagtgaaaggaatgaccactatcattttttaacagtgttctgaaagtgctagaaaatgcaaactggaaagagaacaaaataagaggcatatttataaaaaaaggaagtgaataaaaaactaagaaaatcagctgaaaccactctccaaaaacagtagaagaat

SEQ ID NO: 1170 - DNA, 201 bp, Bos taurus
aatattgctttatggaatttttatttcagtgtgtcctggggttgtgatttaaaaacatattttttactactcaagtctgggacaatgaagttggaaagcccccaatggaaaagccaataaacaaagaggtatttacaacacaatgtgataaatattatggtgaaaaggggagttaaggattgtattctggaggagggattc

SEQ ID NO: 1171 - DNA, 201 bp, Bos taurus
aggaagattatcttgcttctttgttccctgttttgttttataagtgaaaggtgtggttgtgaaatccttcttgagtgtcctgccgctgatgaatctcagcgtggccccagggagctggggcacaggaaacggctgacaaggccttttgatgatcagttcccctactgttccctaactggttgcctggcctcctctgcttca

SEQ ID NO: 1172 - DNA, 201 bp, Bos taurus
tttatgttttaaatgagatactgtaccctcattttggctattttgcttactttctatctaacagatctaacatttctcatttaacatatctaattatatagctcccaaaagacagacatttcagtactttgaacacattagtaaaataatattttctggaaattatagaatcctatagtattagctttctccatactggta

SEQ ID NO: 1173 - DNA, 201 bp, Bos taurus
ttgtagaacttatttctgacctctccttcacttgattcattttcttacttaaccagcacttactggccaatccatgggccaggcactgtgctaaggttggagatacagaggaccagaaagtggtcacagcccccagctgaagggatcagttaggccgatgaagcacataaactggttacaccagctggttaaatgcttaca

SEQ ID NO: 1174 - DNA, 201 bp, Bos taurus
ttgaggccccaacccaataggactgagatccttataagaagaggaagagacaccagagatctctctctttctctctctactacattcgtacagagaagagactatatgaggacacagtgaggccatcacacaggtgattgtctacaagccaggaagagaggtcttaccagactaccaactctgctggcacccagatcttgc

SEQ ID NO: 1175 - DNA, 201 bp, Bos taurus
caggatgtagctcaggataaaggacacttcaagtaggcatctctggccagcttcagttctgactcaggagaacggcactgtccttacaatttcttcctgcgatggacatggaggtaaatttggaaggccttagggagtgcttcttgttagaggattcatgagggtcccaagggcagaactaggtttgatggagcttgaaaa

SEQ ID NO: 1176 - DNA, 201 bp, Bos taurus
gtaaagtgtttatatatatttatatatacatacttttatacatgtgtttatatatatatccaaacacatatgtatgtatgaacaaatgaatgaatgaaaacgaatgagacctgactctgaattctgtcagttatctgaactaagttaagcttcttaagtgctctcagacttggcatcctcacccctagaataaagaataaa

SEQ ID NO: 1177 - DNA, 201 bp, Bos taurus
tcatatcatttatctactcaaaagtatctggtggtttctctgctcactcagagagaaagctaaggtccttaagctgtggtaagatgctctgcagtctgcacggtccctgacctgtaagctctctgacctcatctcctatcacacgtcccctggcttaatctgctccggttctgctgcctttcttgctgttcccagtcaggt

SEQ ID NO: 1178 - DNA, 201 bp, Bos taurus
ttcccagcttgcatgttttgatgaaggaagtggccatgttggagggactcatgtattaagaaaccgtgggtcgtctccagaatatagccaacaaagaaccgaggccctcagtccaacaccccacagagaactgagtcctgccagtagtcacttaagtctggcagtgtatcattccctgggccagccttcagatgaggccct

SEQ ID NO: 1179 - DNA, 201 bp, Bos taurus
caatgcaaatattttgccttatattggtattcgtctttagaaatggcttttttccttataccagttacaagatctctgaagccaggcactaaatatttctattctaaatatttctattctcattcattaattcaaaaattatttcttcagcaccttctacaagacttgtgaagagctctacaaatgtgtgtgtgtggttag

SEQ ID NO: 1180 - DNA, 201 bp, Bos taurus
agagatttacaactttactgggttttcacagaaatgacttcatataacataatgaatattatttccctttagtaaacatggccatgggtttcatagggctgtttcatatatcaataacatgtttaatcccaactgatatcttgtatcaaagaaccatcaagtaaaaacattctccctgggtggccaaggaaacacagagtt

SEQ ID NO: 1181 - DNA, 201 bp, Bos taurus
ggtcatctaatcaatattgtttcaagatcttaaatcaaatggttaacaggcaaaatgttagatgagggtccagtagcagctagagctctgataagtggacgtatttctctttaaacacaatcttctaacactactcagacctataaagtggaaaaacagtaaccttccattttgacacattttgaataatgtcaaatctgc

SEQ ID NO: 1182 - DNA, 201 bp, Bos taurus
actctctgagcatatacccagattattgccatggtatttaatctggatgcttaggcagttaaaccttctctgggaatcaaagactgtccagtgatgatgagtaaaagcaattaatccttcacctttggactgctaaagatggctggtccccatgaatcaaggttagcaaagggtaagaactgggaagagcagaaacaatta

SEQ ID NO: 1183 - DNA, 201 bp, Bos taurus
cacatgagaatatctttaagtattttccacctaacatttctctgaagaattcccagattccaggacgtgatttgaagtttttcagaaaatgttatggtttctcaggacaatgatactctttcatccaatagaagtttgattgtgcccttaataggatcaggttttatgacaattacatctttgggtacagtttatatgctt

SEQ ID NO: 1184 - DNA, 201 bp, Bos taurus
atctggagtgcgtttcaaaatggaacagataaaaaactagtaagtacataagtacatatctactggcctttgatctgactagttccccagtctcaggtctgtttgctgttaatcaccagtgagagaaggtcctaccctatcttaagtggttctcatgtctccctctgggccatccatacttaaaagccctggatgttccta

SEQ ID NO: 1185 - DNA, 201 bp, Bos taurus
tgtttgttttttcctttgtggattcaaatatcttcatccatgaggatatttcaaacttcattcagggaaataaaataaaaagtcttctagttcagaatgcgcctatctttgcagaatctaatgcagaatgaggtccaatgactccctattctaccacaactacctaagacacatttgctcagatcgccagactattttctt

SEQ ID NO: 1186 - DNA, 201 bp, Bos taurus
aacaatggaccctttaagaagtctaaagaaagccttagttgttgagtgcgtcttattctggacccttgtaaataaggtaaaccagaaagcttgatagatacattactcagcattttgtgacaacgagctttagttaactttctgctgaggaatggggaaaagagactagtaagtgctgattgcagaaggcaggctttcagg

SEQ ID NO: 1187 - DNA, 201 bp, Bos taurus
gtctgagggcacggacccccgcagcccaccatcaccagaagagacgatttgcaaccaaagtcctggggaaagaatcgggtgtcttagacaccatgtgtgaggatggggccactaggagaaaccttgtccctaacggaagtgggaatgagcagaactggttgagaatttttccctgtcctggggctactgcatttcctgaac

SEQ ID NO: 1188 - DNA, 201 bp, Bos taurus
attttgattcagcgtgcctaaagcaaatcaggctgtacagtacatagatagataaagacaacattttattaggcttataaagattagcaacagtattaggtagatcatggatatcaccacatcttacattacaatgataaaataatgctttggggctcagacctgatagatgttcttccaacaatattttgtacctaaaca

SEQ ID NO: 1189 - DNA, 201 bp, Bos taurus
ctgagtgaactccgggagttggtgatggacagggaggcctggcatgctgcgattcatggggtcgcaaagagtcgtacatgactgagcgactgaactgaattgaactgaaagagactcaaagaagtaaatatgcattatacttgaatttataatgcacacattcaggctggggaggaataatctctgtggtctccaggtttc

SEQ ID NO: 1190 - DNA, 201 bp, Bos taurus
ttattgtattgaggagctcatgttcacagggaggagattggtgattggggggtgttacttttcctattttaaagctgaaagaacagttggccaaaggttacagttattgatttaactggacagatgttcccagagtataaggtcattgttttcattatttaaaaaaattttaattcgttgcttttaggcaggttagaatgc

SEQ ID NO: 1191 - DNA, 201 bp, Bos taurus
tctcagtgattgcctcaatgcttttttgccacagagaaaaagcatggtccagtaacaatgctgcttctttacctgtcttcttacaccttattcaacaaccttaaccatggctagttcagacacctaagaacagaagacaaattggcacaattagcttatcaggtactgtgcatctatgccaagccaatggatgcttgaaga

SEQ ID NO: 1192 - DNA, 201 bp, Bos taurus
gatgtgaacaccaagattttaattaacttgatggacagcacttttgatatgtttcaaagctataattatacgatgttctataaaaggaaataactgccaagtatttaggtctatcactgaagattaattttgaaatcttattttccttcctttttctccatttttctccacttcctctgtaaaagaagatttaacaaatac

SEQ ID NO: 1193 - DNA, 201 bp, Bos taurus
tccataacaccatgtccgtatgtttgggggtcacaggactacagtatattcccacccagctggatttgattgtgcagctgcctatgggtgcagagaggaagattgagtcttgcctcctccgaccaaacaagtgctggcataccccagggaacatgtgtgaaatcctagtctgtcgtacaccaagaggagattatagctgcc

SEQ ID NO: 1194 - DNA, 201 bp, Bos taurus
ccgcttctctctgtacagagtggccacccacagacgccctgggcccaggtggacatgtttgtctcaggcaacacaattttcctccaactcggctgactaggtcagagatctaggcctggccatctctagactggcttgtggcaccagagataacttgcctgagagcctgtgtagtaactaaactaatcaaatcctctccct

SEQ ID NO: 1195 - DNA, 201 bp, Bos taurus
aattatccctggaaaatagtcataggaattccaatgattttaagaaggagcattaggcagagatacaatgttgcaaaacaaaagatgatggagttaccaaatcattctcaacaacagcaatgacaggaagctacaagtgagtaacctgactccatatggttagaggatccttcaaacagcaagaaggaagggaaagcgcct

SEQ ID NO: 1196 - DNA, 201 bp, Bos taurus
aattgggttcaatcatacacatcaaatcatactctagtcatgccacatcaggaaatatatgcattattttactcagtcatggaattttagtcaatcaactaaaccagaatattatttacaacaatactgtcttgaatgaaaagagatgtatagaaattcacaatacacccagcaaaagcagacaacctacaatttattgag

SEQ ID NO: 1197 - DNA, 201 bp, Bos taurus
agaggaaggcaaagtcgagctgcaaattaaattcattctttgaagacttattagtaggcaaagaaagtcaatgagcaatgtagaaaatgatttaagcccgccgctgccattttatctaggggcaagctctgtcaaagactatttagtgcttcgccctattaccacaaacttatcaccatctgttccttttgtacatccctc

SEQ ID NO: 1198 - DNA, 201 bp, Bos taurus
attcaattactgttgactgccatttcaacctgtgtcatgtcatttgtatctgagataactataagagtagatccaggttttatgtggcctgaatcttatacaagtttaggatccctattaaaaagaaaaggagataagactaaaagtccaaaattagatttgtatgtaatagactcacagaagtgacaggccttgaagctt

SEQ ID NO: 1199 - DNA, 201 bp, Bos taurus
agtctcatagtagggaaccaatctgctttggcttaacagctgtagcctgcaaaacaaataagaaagggaagaagagacccaagaaactgcagattatttcctttacctggaatatggttcccaaaaacatgaacaaaggtttataaacagtcttcctttcaaacattactgtgtttgcaagatggaaaatctgggaaatgg

SEQ ID NO: 1200 - DNA, 201 bp, Bos taurus
agagaagtcatcttacaatcattctgagaaggccagaaggtggaccacatactcataatccatgcctccttttctccttctttcattactaataaagtgcgctgaatggaaacttggggttctggggagatgactggagtgttaattgacaagtttccttttgtgtgataccatacagcaagtcggctttccctccttctt

SEQ ID NO: 1201 - DNA, 201 bp, Bos taurus
gtagtagcagctattgctcctttgtcacaagaaaacacatatcatgccagagtccagtgggtaatgcactctgaaaaaatcccatccaagactgaaaaaagttcagaacataagaagtctttatgaaaaaattctctctttattttgtatctagattggcaactattctaggagcctcttcatagtaggtggatttatact

SEQ ID NO: 1202 - DNA, 201 bp, Bos taurus
tcattattgtagcgtctgccacgtgcctcccacttgtgcagcttcttaacctttctatacctgggggtgctttgaactctcagatcttccaaagacccacagttgtttgaaatggcccagtctgcattcctgcttgaagttctgtgctgtaacttgccggcttgcctggtctccactttgcctgctcttaactcctgaacc

SEQ ID NO: 1203 - DNA, 201 bp, Bos taurus
cagagtctgcttctgaaagtcctctgaaacctcacgtgtttctccaaccatcctgttgactggaccctgggttaaaccaggcctagagctttgtgtatctgttgatgttttagtgtttttggtatttttaggactcttgacagggaaagcctcaatcttctggtagtcattcctcagttggccagtttcagtctgttgctt

SEQ ID NO: 1204 - DNA, 201 bp, Bos taurus
taaaaaaagaggagacttccttgatggtccagtggttaagactctgcacttccaaagaaggggtacaggtttgattcttgattggggaactaagatcccacaggcccagcaacatgatccccccaaaaacacccagactcgcatcttctcatacagagaaaagtgctaaattcattaacttaggatgtttgcttttacttt

SEQ ID NO: 1205 - DNA, 201 bp, Bos taurus
cccaacgacatagaagcctgcaagtactcaatctccttagtaaatgccaccctagctattgcttacttatcatattaaaatatttctaatacaggtaaggcttatgctttctctaaggagaactggctttatttttattatgtacttaaggaacatcttaactttccagaaaattagtgaagaagggaatatattaagatg

SEQ ID NO: 1206 - DNA, 201 bp, Bos taurus
aataagtagggatgaaaaacaaactgtaactgaaagatcgatatttttcgcttttgcagacaaaacagctaaccctgatctgcagacaaaggagacagcagtatgttgtctgagatcatagccacacccttatctctacgttctcttttgaacagtagtgtatattacaaccagaattatattttaagaaaatataacaat

SEQ ID NO: 1207 - DNA, 201 bp, Bos taurus
gagttaaggcacatggcagaatacaagatagccataaaaataattgtgtttctatacaccaacaagattacttctcagacttcccaggaagtgaggacaaagagactgagctatgatgtctccttatgactgcccttcctttagggaaggacctgcccacaggatgctgttccctgacacaaaaacacaaaggaaagcaaa

SEQ ID NO: 1208 - DNA, 201 bp, Bos taurus
ctgcatgcacaccagggtctcacacttttcccctcatctctgcatttgggaagcccaataactttggtggaaaactcctttaagcctctcctttgcggtcacggcttttgtaactgccctcaggccatcgcatccctcttgcaggggtagtgttgcagtttaggccttcctccacaaagcttcttgaagagatttttagat

SEQ ID NO: 1209 - DNA, 201 bp, Bos taurus
cgggaagtatcccaagttcttaaatgcaggtgcatctagctatgtcagtgcaacagaggaagattgtgaataataaacactttacttatagcagggctctatgtgctgttactttgcctgctattgacaaatgagtatctctgagcagaaatcattgagatcaaattaatattagtgtcagtccatgtatgccttacgtcc

SEQ ID NO: 1210 - DNA, 201 bp, Bos taurus
ccagagcctgagaaaccaggagatggatgtaaggagagagaaaatctggatactttgaggtgagaaaaaaacatatattagctgttagggaaagcaaaaactctgcctccaggcttacctctgaatggaagggttctcctccccagggaggtggaggcagtgtctttgggatggaggcactttctcttagtcactgtgagg

SEQ ID NO: 1211 - DNA, 201 bp, Bos taurus
ctccaggaacatgcgattgacctggtaggcaagacagtatctgaaaccattcactctccaacaaaacagaaatgggttaaattgatgttaagtgttggaggaattcatagaaatcatagcagtcaggggaagctgcatagaggagtgggagaaaacaggacccagttgctgagatgtgtcagtgacaactttgaaggcttg

SEQ ID NO: 1212 - DNA, 201 bp, Bos taurus
atagcgtaggaaccataataaatgatctcacaaccaaagagaccatgggtagtaaacagcgtaaactgtggaaaactggagatgcacacacaggccaaggtgggaagccactacttaggtccaggtcatttcacctccatgttctcccaatataacccactctaaaatctggccaatgccccattcacattcagaagcaat

SEQ ID NO: 1213 - DNA, 201 bp, Bos taurus
atgagcacgacaatttgcacagtaccaaggtaaaagcagacaccgatagtgcagaaagcatagatgaaagtcgccgcctactaacttctggaaatattcaaacaagcccacctagggaaaaaggaaagaaaaaaagaaagaaaggaataaaatgtctggtattagaagtgcaaggcttgcaaataaagattaactaattcc

SEQ ID NO: 1214 - DNA, 201 bp, Bos taurus
tctctgccttctattctcttcttccaatgtatgccagatatataagtgaaatcaaaccaaatctaaaatacaaaccaacgacattttctctgtttttcttctatgtagccctgtgattgtttcttcctgttccatgcattcctgcatcttctgaaatcaagcaagttatatctggaattgtagtggttttaaaattatttg

SEQ ID NO: 1215 - DNA, 201 bp, Bos taurus
aagtgaagtgatatagagatgaaccatttctacaatttcacagtcactgatattgacaaaattaaaattgacaccaacaaagcaaaacatctgttattggtgacatatttaaacacacagtagacaacagaataatagctgtgtgaaagaagagttacagggcacatgtccttagttttcagttctttgacttgaggtttc

SEQ ID NO: 1216 - DNA, 201 bp, Bos taurus
atggaccactttttctgattctgtataacttttttctcctatccaaagaccaaaagatactatcttcatatgaaaaccaaactatcctgtattataactacacaagctatattagatgctattattatccacagaatgaactgaacatgtattaaattgatcatagtttatggaggtggggggaatcacattttttatact

SEQ ID NO: 1217 - DNA, 201 bp, Bos taurus
ccctttgggaaagtgtagcattttccttcaaatgttcccccaattcagtttcttttccgatagttaatcggaacacagcagtgctctcaagagaccatgaccattcagaaaagaatcgggaaggaaaagtctgttttatagctaatgaatgagagttgtacagttttcttgatttgagagtagaaaaatcatttttacccc

SEQ ID NO: 1218 - DNA, 201 bp, Bos taurus
ccatgctttgtggtgatgatgtctctgtctttgtagagctcataacccaaaatcttgagagccaaggaaaataatgtttaactctccaacttatttacctcttcaactaatgtttaattattaactatttcccaagaggaagccacatgaaaaaagccagttttttcatgaggaaaaaccctcatgaaaaaaatctcaaaa

SEQ ID NO: 1219 - DNA, 201 bp, Bos taurus
aaaatagtgcattaagttggaaataccttttaggccaacagaatcatacaggcaggcagctgtatacttgatgtgttatgggccctgatttggcagtctcttcacagataaagctctcattgcttccagaacgagctggatgtgaatcaacacagaaagcaggccctaaatgatgatcctataattgtatcctatttatta

SEQ ID NO: 1220 - DNA, 201 bp, Bos taurus
ttttcactcataaatgtttgataggaaatatgcccaaaggggaagaggaatcttagcattaccattttctaattgttcagttgtacctgtgataagagaactgcctttgatgactcctttgcaagagacttttttgaatttcttgttcattttgtgagggcaaatttcattaagactggacaatgtaatctgtaaatctgt

SEQ ID NO: 1221 - DNA, 201 bp, Bos taurus
caccaccaccaatctcatgactccaaacagagaatagaggtaaaaaatcatttgaatgctctctctccaagcatctttttctttttggccaagcctcccattgattttacccagaaggcaaaagaaccaggacagtttacagttgacagagatcaacctcctggggccaaaccagggagaagatgaatgaagaaatgtctg

SEQ ID NO: 1222 - DNA, 201 bp, Bos taurus
attcatcctggaatttggcttagaagtttctggttttattgtcatctaatcaagcacctacctagaaattcccatgggttattacatcaaataagacagattacatttgacattttctcaaagcattttgaaatttcccttcctgcctccacccatgtattttattttcacctagtgaaagggggtccatcagtttaagat

SEQ ID NO: 1223 - DNA, 201 bp, Bos taurus
tctctcatttatgacattataattgctaaaagtttatactatgcaaaacatgattctaacaccatgtacagtatacccacaactttattttcatactttactgtataaaagataatattttcataaaattttataatgatggcgagctttaaatttagaagaaaaaaatccagattagaatagtaggattttttcccatca

SEQ ID NO: 1224 - DNA, 201 bp, Bos taurus
gattcaccagtctttttactgagcacctactatgtgctaagtaccatgctaaggctggagaaagaatgagagaataggacacactctggccttccttgccattttcatttctcttgctcttggtgcttcttcctcaggattcagctcctccttctcttctgatcttcttggccgctgtcatttcactgaacatgcagacac

SEQ ID NO: 1225 - DNA, 201 bp, Bos taurus
ttcacctctgctcttgactttctggcttagttatacataactttacctacaaactcctttcttaatatttggaaagactgtggtacccaaggagataaagggcaatagaaatgcaagaagctagtgatagtgtacttaacctttttattttgatcagttacatattgactcaacttccttagaattttccagaatttcttg

SEQ ID NO: 1226 - DNA, 201 bp, Bos taurus
catatagcattataaataagtatatatatagatggaaacattgttcaaagggtgattatctcgaaaaaaatcttttcaaagtgatatgaacaagttaacactttggaactcagcgttaaaaagtataataataatacaataacagagatgcatgtagtccatacatattcatatgtacatgtgtgtatacacatacacaca

SEQ ID NO: 1227 - DNA, 201 bp, Bos taurus
ggtgataactttatgttatatagaaccatgtctttaagaatgccttctttcatcttaggttacatgtccatgttatctgagcacatgaaatccagtgcttatgttttatattcctgaatagatagtattgtcattcccttgtgaatacatcagtatgtcccacaagttcataatctccttgaaggcaagaattgcattact

SEQ ID NO: 1228 - DNA, 201 bp, Bos taurus
gcaacctcttgtatcagagtagcaccttcatagcctggaaccacacagcctgaaagcataaaagctggcctctaaccagggaaaaatcaactcccatcacaatagacagaataaaatacaatgcactttgttttaaccagagcttccgcaagtttaaagcgtggagggagcttgtaaacccacattcctataagtaattga

SEQ ID NO: 1229 - DNA, 201 bp, Bos taurus
gcataagagactcttttccaagatatataaagaactctcaaaactcaacaatatcatcaatgaaactatgaaaaaaatgatcaaaggccttaaaagacatattaccaaagaagatatacagatggcaaataagggagatgtaaattaaaatgttatagcactatataccttttagaatggccaaaatctggaacacagaca

SEQ ID NO: 1230 - DNA, 201 bp, Bos taurus
gagattatgatcctgtcctaacaatctcaggaatgttggtatttgatgtcttcctgaaagaccagattgttgcacatgccttcaaataactgtcatttttaaaaattaattggttgtaagtcatagagtagtgatatttgacttgaaaaaatgtgaggttatctgttaaaaggtattttttgaaggcagttttcaaatttt

SEQ ID NO: 1231 - DNA, 201 bp, Bos taurus
agaacagtgttaatactctgaaatcctcactcagctcagctttatatttatgactttgttttgtgtttttctgtcttgcccttcattcctctattatctaggccagagaaatctctgctggagacttgtggcttcagtttgtctaacttcttaaagccaagacatgggtctctgcttctctctcactcggcttcttttatt

SEQ ID NO: 1232 - DNA, 201 bp, Bos taurus
acattgtaagttatgttcacacaattcaaaattccatatattaaatatcattgagacaaatatatttcagttatacacacacaccatttacctaccattgtccaaacagacacaactgtaactcagctatacagctatacagtctatgctgtcacattttggatggcttccttaccccatcaatataaatatcatcatcat

SEQ ID NO: 1233 - DNA, 201 bp, Bos taurus
ggacatagagaacagttcattggaatcgtcttttgcagattcttctatagtttcaggtacttggcgcacacacatactttactgcactaattaactactttcagaaaaatcaattgttgcattgataacattaggatctattaaacagagggaggaaatttgggctttggggttttgtatttgtattcagataatatttct

SEQ ID NO: 1234 - DNA, 201 bp, Bos taurus
acttagtgaaaaattgggacaaattaaatacctgcctttaaatatctatccctaattgtcaaacttaatgatctattcatagaagtatgcataaactgtggaagtttctaattttcatacatactctatgcatttcaaaattgcatgttttgttctgtgcctttttgttgttgttgttctgtgtgatactcaggttccagg

SEQ ID NO: 1235 - DNA, 201 bp, Bos taurus
ctttgatgtctcactacagctactgactatttttcaagagaaaccagccctttgctaaaatagtagcttgttccacaggcctctgggtcatttatttatacggttaagatgtttctaactttcaactgtttctcatcactttggattacactgattaaagtcagtcaacatagtgaggaataaaagccttgtcaatattaa

SEQ ID NO: 1236 - DNA, 201 bp, Bos taurus
ttcaactagaagtaagatttgcctgtacaataattaggccatgcttcctaaatccacaactgatgctgatctttcttagcataagatatgctctctaatacgtataatcttggccttgctcacgagcctgcttcagacagatcgtaagtcccacttgcacccctccatttcttccccatagcatatatgttggagtgaacc

SEQ ID NO: 1237 - DNA, 201 bp, Bos taurus
gtttagttcctctctctcatacagggtacaatcattctctgacattcttgataccctttattctgaatatccacagaatcctaatttatgtatctattcaagtttggaaatacagataagccttttagtctcatttttgtaaaataactccactttgatctgtaaagaaatatctctattttaagcaggcaggctaattgg

SEQ ID NO: 1238 - DNA, 201 bp, Bos taurus
tgttgcctagagaatcccatggacagagcagccgggcaggctacagtctatggggtcacaaacagtcagacatgactgagcaactaacactgtacattatcagattgatttgctaatattttttaaggattgttgcatgtgtgttcatgagagatacaggtctgtcgttttctagcaatgtctgcttggtttgtataaggt

SEQ ID NO: 1239 - DNA, 201 bp, Bos taurus
gtcagggcctaaagcctccatgggccaattcttcctcattcctcccttctcactcactcctctcacttcctctactgctccttccggtcttcttctctaaatacgtgtccatcccttaatgcaacttaaaactatttcatatgatcatcatctagggtttattttagctataattaattaaaagccaaactaacaatgact

SEQ ID NO: 1240 - DNA, 201 bp, Bos taurus
gactagaaaaatagttagtgtcacggccccagtagctgctccatactgggatctattgagcatctccagcaggcaaggttgtaaccttaaattacactgatgtggccagttgcaatttatggataactttttccactgcctggcttccctgatagctcagttggtaaagattctgcctgcaatgcaggagaccccggttcg

SEQ ID NO: 1241 - DNA, 201 bp, Bos taurus
agcaatatcagtggttaggagcagttggtgtttgggactccagggttgactctattcttagtgattccaaatcagaggtgtgggagaaaatgggaaatgtctggtaagtctagccaaatgttgaggaaactagaattcagatctagtccaatctatacacacacacacacacacacacacacacacacatacatatatgta

SEQ ID NO: 1242 - DNA, 201 bp, Bos taurus
aactcacttctctttggccttcaaatagaattcctcagaacttgataagactgattttcttgactactttgaacattattctagtgcatttttcccaccagtattctaaaactaattagaacattggcagcactatggaataatatcaagatgagagattaatgcattctagtttattagaaatagtttcattgctttgga

SEQ ID NO: 1243 - DNA, 201 bp, Bos taurus
atatcattttgggtccttcaggaaatagacatcaagacagtatcagacaagctcaactatgaggaaactcctatggaagataaaggagaagggagcaggagtaggtagcaatgagcccacagtgcaggtctgacacctgtgaagggagaacaagaaggaaggattgggtagaaagtctcgaactgtagtacagcttcaaga

SEQ ID NO: 1244 - DNA, 201 bp, Bos taurus
cttttccatcatggctaagcactgtgccagctgcaaagcagaaatgttacaaggtccatctctattttcatagagcagataatgaagggtagatttggagttgagagacaataaattagtaactggtatagttatacagtttagccagcttctgagtggattttcacaaaagataaattaaaaatagatctttcattttgt

SEQ ID NO: 1245 - DNA, 201 bp, Bos taurus
agcctggtgggctgctgtctatggggtcgcacagagttggacatgactgaagcgacttagcagcagcagcaagcatacttatagtgtctagctgtcaggacaggtgatgcagacatatgtacagggaactagtagagctgcagcaagtcttcagagcagcagtctcctagtgagggttgagcctcttctctggccctccca

SEQ ID NO: 1246 - DNA, 201 bp, Bos taurus
ctggcttttgataaaggtaccccaggccacctttttaatcccaaactgagttaaggcttgggtctaggactgagactgctcagagcccttgatggaaaggcagtgcccctgggccatgcggtatagacctgagagttttggttgcagaaaccctggtagtcatctaatcatctttaggatctgctcatctccatcatctcg

SEQ ID NO: 1247 - DNA, 201 bp, Bos taurus
ccctgtctgcttacagtatctttgcctctgcccccgtaaagtgtactagaaaagcagaggcttggaagcccttggacaagtttttccctccctagagcctcaattgtgtaatctgtaaaatggggccctctatctacaaaactgatgcgtgagaaagatgcgagagagaaaagaaaataccttctgtttggtaggaggcat

SEQ ID NO: 1248 - DNA, 201 bp, Bos taurus
aatattttaatgtgtggagctccctgtctgttccgcacccatgaaatcaggccatacatgtagaacgtgtatgcagatagccatttacagattgagcaccgaatgatggaacggcccgtcgatacctcatctgagttggtcaaaaggcggaaataattctcctattatttctgtcactgtcagggttcagttgaatctcta

SEQ ID NO: 1249 - DNA, 201 bp, Bos taurus
aagtttttggctctttttctgcttaatgtgcactggccagctctctggatggtaggcatccataggagggttttcagtggacagtcagtgatataggaaaccctgccacaggaaggcctgcaagccactcagcctcctgctgctgaggtctgctccttcagcagccagccctcatgcatggaacgtggtaagagagcacaa

SEQ ID NO: 1250 - DNA, 201 bp, Bos taurus
cagggccaatccaggcagctctgggtagtgaggggattgtaggagtgtctgcttagagactccaaagtgatagatcttcttggagccattccatttggacgtggcctgtttaacacctttctccactcagttgggaatatttagggcttctctgctgctgctgctaagtcacttcagtcgtgtccaactctgtgtgacccc

SEQ ID NO: 1251 - DNA, 201 bp, Bos taurus
cagcctggaaagaaaagtcaacaagcagtcatcttcattgttgtgtgactgggacactcagggtgctgccgtgtacctttgctttcaaaggccctttaacgttaaaaccaaacatagcctacatgggaggaatggcatatagtggctgaccttggtgacattttgtgtacaaggcctttggcctctccttaaatcattcag

SEQ ID NO: 1252 - DNA, 201 bp, Bos taurus
tttgatcgtcagtggttaaggctgaaggtggtgggtggtgaagattaggaaacacactatccatagtgatgtgagataacaaaacagcaacactttttaatgaacatcaagtctccaaagtggataatatggctggtattaactctgctgtgaagatttcagattctcaacttaaatcaactgactttttttttttttttc

SEQ ID NO: 1253 - DNA, 201 bp, Bos taurus
aaggcaatgggaaatttaaaaaaaagaaagaaagaaatggatgacatgttcattccctttgagaacagcacccagttgttttatatgctattttcacttaaacccaaatggccaaaactgagttgcatgatcatatttagcagccagagaagctaaaaaatgtaatatttgtgcttggcagctacatgttcatctgaggtt

SEQ ID NO: 1254 - DNA, 201 bp, Bos taurus
aactgacaaggaacacttcagcttctgcccaggagtgctatttggaactcagtatggataggatcatgggaagattaggtactagaggaaaggctgctgcttggaaggcctagcaaaggcagcctctgaggaatcaacaggaattcccagaccagaaagtcatctttatagagtaccaagaatcagagaatgtgcagcaat

SEQ ID NO: 1255 - DNA, 201 bp, Bos taurus
agtgatgcaccccaatccactacttgttaacaatggagtgtaaaaaaggagggaggcagaggtggggaaggaggaaggacttaccaaatgaggtttggggtattatctgtggatttcatttaaacattctctatctcaccctcaatataatggaaaaagtaaagttgggctttattcacgtatatgaatatgtgaaattca

SEQ ID NO: 1256 - DNA, 201 bp, Bos taurus
cctcgccccaaccgcttccatctcccccgctttcccttctggccccccaacatgacgagacagggggctttagccggccgggggcgaccgctttgtgcgttgcggggagcgggacccgcccaaggcgcgcccagcgggggacgcggtgaccgaggggccgggagcgccgggcaggtaacgtatcctggaccaggagctggg

SEQ ID NO: 1257 - DNA, 201 bp, Bos taurus
acttctctttgtctgacttgctttacttagtatgataatctctacgtctatctgtaatgttttaaatgttaataattattttaagaaagcttatagagtactgtagacttaatccattaattttcactcctccaggcaatgtaagaagaaagcttatgctattattacaattttataggttaggaccttaagaaatccaaa

SEQ ID NO: 1258 - DNA, 201 bp, Bos taurus
aaatgatgtcatagtgtggggccctaatccaatgactgatgaccttatagatcatcagggatacatcagggatacacatgcatagaggaaagactatgtggggtctcagcagaaggtggccgtctgcaagccaaagagagagacctcaggagaaacaaaacttgttaacaccttgatcttggacttccagcctccagaaac

SEQ ID NO: 1259 - DNA, 201 bp, Bos taurus
tattttttattcctttattcttctcactacaatttgggattctctaaactcaatgtttacatgtttgtggcaatgtaagagctgtacattcccaaatggcgaattatactcttcttagaacttttaatttttattgcattaataatggcattttataacttggcatagttttctgtgtatctgaatttttaaaatgctcca

SEQ ID NO: 1260 - DNA, 201 bp, Bos taurus
aggtgttgaggtcttctctgaaaaaaaagaaaaagaaaattccatcctaaatcaattaagacctggcccttacagacttagccctttaacaataccaacaaaattacagatagaaacactaattctcaacaaaccttggtgtatattaatcagatttttcttcttacccagaccagtgaggtaaggaactacaggtaaaag

SEQ ID NO: 1261 - DNA, 201 bp, Bos taurus
tgaaagacaagaggtgagcatgtacacacctggggcaaataaggccagacagtagtaagaattcaggtaaaaatgtagtgtgtaggtcaacaaaagaatatagaaaccacagaggccacagatataagggaaatacacactcatattctactccacaaaagtcacaggagctcacaaaagaacactggtgacaggagtgac

SEQ ID NO: 1262 - DNA, 201 bp, Bos taurus
ctcctttcatcagccaagggtctttgttctctcttgtaagtgtcagtttcttctcttgataatgagggactttcaggcagcatttcaggttttttttactaatctaatagtctatgaacttttccccctgttggggagttaaaaggtggatgaatgtgtgtacatctctgcagacaggctgcttttcctactgtagcattc

SEQ ID NO: 1263 - DNA, 201 bp, Bos taurus
agggatggcctctagaaactgaagacatcaaggaaattaattctcttctagagcttccagacagaacttaagccctggtaacatattgattttagcccaacgaggcctatgtcaaacttctacctatagaccatagtattatacatttgtgctactgaggcttcaagtttgtagtgtatgtggatgtgtgccgagtcactt

SEQ ID NO: 1264 - DNA, 201 bp, Bos taurus
gcctgcatgcctacagtccatgctctgcaacaagagaaaccaccacaactagagaaaacccacacacagcaacacagacccagagcagccaaaaataaacagataaataagtaaaataaaaaccaataccctctgagtgatactgcagaaagcacttcctacactagagctttagtctaccagatgaaaattataaaatag

SEQ ID NO: 1265 - DNA, 201 bp, Bos taurus
gagggcctggatagaataaaaaaggcagaggaaatttgaattggttctctgcttaaccactaggctgggtcatggattttattgcccccctgcactccttattctcaggcctttagttccaagactggaatccacaccattagctccttgctttcaagctttcaaattacataacttgctttcctgggtcttcaacttgca

SEQ ID NO: 1266 - DNA, 201 bp, Bos taurus
taaatgttcctattgttcagtaaacagaataaataatagttactactattgcccaagctcttaactataacacttcatagtatattcagattccatatctgtataagcaggacccataagatggctgctgtcttattctctgtacaatccctgcttgacctggccctgtctcacccttatcttaagggcatgattgccttg

SEQ ID NO: 1267 - DNA, 201 bp, Bos taurus
agatgcagtgatcttagtttctgaatgttcaggggtttttttctttttttaaccattaggttatggtgattagtacttgcatttccataagcatttgtagggggcacataataaatatatgagaataaacatctttggaagaatgtgtctgtgacatatctggattagctaggtggtcaagattgcatgtgattttgttat

SEQ ID NO: 1268 - DNA, 201 bp, Bos taurus
ggctcctcatgactgcttaacactggtgcaccacctcctgtcccctcataatgatctacagtaaattccattggataatgttgacttttcaaggttcaccaatggtttttattttaaagatgacaatggcaaatagtgtgctgagtatgctgtcataatttgttttgatgttgctgaggcagcatctttaatttgtggcta

SEQ ID NO: 1269 - DNA, 201 bp, Bos taurus
aatttacattcccaccagcactgtaggaagaacccatttctccacaccttctccagcatctattatttatagcctttttgatgatggccattctgactgacgtgaagttgtattcatcgtagttttgatttgcattctttaataataagcaatgttgaggatattttcatatacctgttggccatctggatgtcttctttg

SEQ ID NO: 1270 - DNA, 201 bp, Bos taurus
gtcctcgaagatcacaagtacagctgctgaaaccaatctaatttaaccctttactaaacattcccttgctagcgggacctctgcataaagaagaggtaaactgtcttgtcttcctcatctaggaaaactatgtgttgttttgaagttcaggacaataatatccagaaataaaatttgctgtgtctatatttctaaataatc

SEQ ID NO: 1271 - DNA, 201 bp, Bos taurus
tacaaaaaatattacattgtttaaaaaaacaaaaacaaagcacagatgtgcgtatataacatggtcccacttatttaaagaaagcagagagaagacatatacatatgtttgtttatatatacttttttttcctggaaggataaacaaggacctgttagtactggttatctctggcaaaggaagatgaattacgaggtagaa

SEQ ID NO: 1272 - DNA, 201 bp, Bos taurus
tattcctttccttcctatttaatgcaatataatgaaaagtacacaggactgactgtgtactaagtctctaattttggatggccactaacaaatttgggcacgtcacactgcctatttctcagtttttttccaaatataaaatgagagatcttaatgatgccccagatcttttcaagacctatgggtattctttgttttact

SEQ ID NO: 1273 - DNA, 201 bp, Bos taurus
tttgcccaccttccactacctcatctaatacctggttattacaacagccttctagctcattcctctacttcatacttgttctcctgcaatccattctccatcttgtagccaaagtaatgcttttgagtcataaatttgttgtgtatgtcagctgttcagtcatgtctgactctatgaccacatggactgtagcctgccagg

SEQ ID NO: 1274 - DNA, 201 bp, Bos taurus
gatgccaaagtgaaaaaataaaaaaacttaaaaaaatttttgtggtcacttcattcttccattcatccagaacatattatgcaagacaccgttcaaaaagtacaaaacgaaacaaattggattctaaagtgttaaatctcatctgaaatacaacagatacttctgtaatacaaagtagaatatgatcagagccatgtgtga

SEQ ID NO: 1275 - DNA, 201 bp, Bos taurus
taaaatgccttcagatgtgagtgtgctcatgtaaggaacagcatgcaagtggctggatctgtttaacatgtatattctggtacagttagctcagtcacacgggggatgatgagaccagatcttgatgcaaatagcctggctctgagatcctgacagtgctctgtgttttctgaatagaaaagagtgaaattcaaggaattg

SEQ ID NO: 1276 - DNA, 201 bp, Bos taurus
ctcccaacctgctgtgtcccacagcagtgccagctgcgtggagatacgtccacacagcacaggagggctcctgctgggggttctgtgggccaaattaaggcatctgggcgccccaccactgcattgtgtcctggttgcttcagacacagctgtcttgcaaacatgtcaatacgtttggcctttcttaggagctccttacct

SEQ ID NO: 1277 - DNA, 201 bp, Bos taurus
cctgctccacctgggtttcatgcatctggcacatcaccctcaggtctctacaccggtgttaccttcttggtgcaatcttccctggccactccacataaataggtcccagcctctcaccgttgctattatctattgtgatactttggttgtttctttggccacctgatgtgaagaactgactcatttgaaaagaccgtgatg

SEQ ID NO: 1278 - DNA, 201 bp, Bos taurus
gaggctcgagccaatccaacagggggcggagtgcccaaatcatcgatcgcctccattccccgccttgttgtcccgccctacccctcaggtcaccttgcggagtggggagggaggttgggcccaaattttaccatctagaaacttgaaattcaaaatgtaagcggatcgccaagttcaccagactaaatttagtggatcttc

SEQ ID NO: 1279 - DNA, 201 bp, Bos taurus
atgagtctgggtggactctgggagttggtgatggacagggaggcctggcgtgctgcggttcatggggtcacaaagagtcagacacaattaagcaactgaactaaactccagatcaaacagtacagaggatttataatgtaagcacaagagtcttctgcctccataggcttcttccagctctcagcctcaccattctgagtg

SEQ ID NO: 1280 - DNA, 201 bp, Bos taurus
aggcctcagcatcagttgtgctcagttttaagtgtttattctagaaagctttctagcacctactgtgattttgtgactgacagtgcacactgcagagaggggcatggccttagtctggtggccaggagagttccttctaagaccacttctacagttattgcttcttacattactaactatacagaaaaaaggatgacagtt

SEQ ID NO: 1281 - DNA, 201 bp, Bos taurus
agtattgtggcaggacccaggaaccagaatatttgataaaccagcatcccactatgtagctactgaaatgaaaggggatttcctgtctggtgatgatgaggtaaaggaaggagataggggatagccaaaaattgaataatcaagagcaacacatgagcctgaacactgttcttacaccctgcccactacaaggtcctgtaa

SEQ ID NO: 1282 - DNA, 201 bp, Bos taurus
gtacatctttgatttttgtaatattttaaaaatatgaggtcgtttggcccccagttttgctgctacctggtataaacccatataagttgaatacaagcatatttctgacttgctaaatcttggccatgacatgcaattgaatcagtcctgccagccatggggttttactaccaaggagtcagtacacttttttgctgcagg

SEQ ID NO: 1283 - DNA, 201 bp, Bos taurus
accccattactgctttcaaggaatctatgtcatttcaggataagaaaataaagtaataaggcttgccttccaaagatggttcatggaattcaggtttgtttttctgctatcattaatcaactgtgagggcgtgtagtcaatatttctcatttttgtttaggaaatgaataatagaagctaacagaaaatataatcagaata

SEQ ID NO: 1284 - DNA, 201 bp, Bos taurus
tctaaggagagcttgtggatctgagccagtggacacagctctgctaccctcacttccctgctgatctcatcactggggcctgggcatcacaggctgtgggtaccagaacaccacttcctacagactgaaaggaaggtaccatcattgtttggcaacaagaggccaaacagaagcttggagaaggcatggtgagggtggtgg

SEQ ID NO: 1285 - DNA, 201 bp, Bos taurus
gcaaagagtaggacatgactgagcaagtttcactttcaagtgatcattaataattgtggatatcacaaaggagagggcctctgttttactatttatttttaatggtcagaaattgcattgcatttttaaatttattatttatttggttgcactgtttcttcactgtggcatgcaggatctttagtgcggcaagtgggattt

SEQ ID NO: 1286 - DNA, 201 bp, Bos taurus
catctcaccctatttctctcacttgctcgcctttctacccttgactcaattaaaagctttttctcttatattcgtggccagccctattgcctgtatccaatggaggctatgccaagtttatgtcatgaccttccttcctggctaaatacattttaggtgggagttcactggttaagagttggcattttcactgctatgggc

SEQ ID NO: 1287 - DNA, 201 bp, Bos taurus
actaaaaggaaagttgaatccaaaagggctgtgtagaaaagtacagccaaacagaaaataaaggaccttttcctaattcccctgtcagactagaagacagacaaaataaaccaatggtgggcctttggctcgcatttgtagttatcaggtcttggtactgtgtacatctgtggacatgctttccatcaccatagttgtcac

SEQ ID NO: 1288 - DNA, 201 bp, Bos taurus
gtcccgattacctcgctgggcctcattctgttacttcaggccctctgctgtctggctctggagccctgcatcagccaagatcctagccagctgaagaagattgagaggcaggcctcgcacttgagcctgggaactgtcactctgtttctctttagacttgtgacaggatacgcctttccaacgggctgtcagtttgattcc

SEQ ID NO: 1289 - DNA, 201 bp, Bos taurus
cttcctcatcccttatttagagtatggcccatgtgcctaactttagcttggactttcaaccagctgaatgccagagatgctcagtgaggtctcatcactcggggtgggcctgaaattcatgttccccagcactgtatgacccctgataacactattcagctgcagccttgcagctggcactctgctagacctcaaggaatc

SEQ ID NO: 1290 - DNA, 201 bp, Bos taurus
caccatgttcacattggcaagtataaaatatttagccattcaaatgtttggacttgttaaatgtagacagtgttgatgtaatattaaacgatgtaactattttttaacgatttcaacattatttaaacttaagtttataatctattcaagtgtgaacaattctcaaagtcaccaataagagacagtttcttaagtgctgtc

SEQ ID NO: 1291 - DNA, 201 bp, Bos taurus
tctcccacacggtgtcacagaaggttgaaagcactggtgttggccaatacaccctgagtcattgtgccacgagggccagtgagcaagacctcactcttgtgggggggtaggctttccccacactcagaaggcactgctaacaatctgggttgcttttggaacaggaagtaaggcttggagaggtgggccttagactcagga

SEQ ID NO: 1292 - DNA, 201 bp, Bos taurus
acagatttgttcatacatatctatctatctcaatacttatgtgctcagcattttgctaattctgaagcatttactattatgaacacatcaccaagtacttcggaatcgcaagtcagaacccctaattttcctcacgtcatctcagacaaaagcccatccattcaatacaccattactgacacctagtacataacagacatt

SEQ ID NO: 1293 - DNA, 201 bp, Bos taurus
cgagaactcagaaagcaaaaaccatttaatgtactttgaagacccaggccagggtcccccagccctttactgtgcctgtggcctaagccagtgccctaccgcgacccacacaggtggcagggactgtgacggggctacagcccctgcacacgctcagcaggctggcctcagaacagtgggactgatgcccgctcgagcttc

SEQ ID NO: 1294 - DNA, 201 bp, Bos taurus
acctctgcagtgcatgcttatagcacttaccaagattattaagtgctctggtgacattattacaagagggggcaggaccagtgtcagcctaatgaggcggtggatgatatctgatggtctccatctgaaaatcagcagaggccagcctgtgcactaatcaagtcaccgaaggcccttcacccgggacaagagcagcctttg

SEQ ID NO: 1295 - DNA, 201 bp, Bos taurus
tgtccactgggacatgcaattctgataccacctgctgtgcatacccacaaagatgactgctgccagcaccaccctcactggtgacctctgcctgtggccccttgtaattggctaggaagccccttaggcacacatgtgcactcacaaagccactggcacagaaacccacagaagccatgtccccaacctgcaggtaattga

SEQ ID NO: 1296 - DNA, 201 bp, Bos taurus
gagatgaagggcaacaaagaggaagagaagaaaatggtgagagagtgtgttacatctatgagaggggtgggactggggccatgaaccatagccacttgctctaattgtatcatatgagccaatccatagcattttagcaacaaagcagaaaacactctaaagcacaaaagagaaaacatacttaggccctctgcaagggaa

SEQ ID NO: 1297 - DNA, 201 bp, Bos taurus
atggcgctcccactggcctatcaaccagagaaggtattgctgaggctcctcatataagacagggggcattgaaatgtaaggaaagagggccaggatttctgtctgtccaggaccaattctaactgttagaaagaatgaactcagtaagaggccacctccatgcacagcccacccacaggagaggcaagaagaccctaccta

SEQ ID NO: 1298 - DNA, 201 bp, Bos taurus
aacgcctgcagtgagggttaacgtttgagactgccagatgcaacaagtgcacttgaacctgtctcccaaacttcagagaattatgtagtgacgatagatacttctaatttcaaaactagagttcttaaaaattaaccttataaaatttaaccaaggcagcacacatttcccaagtgacaggtctgtgcaaaatattggtgc

SEQ ID NO: 1299 - DNA, 201 bp, Bos taurus
tgatagggctaggtatggagtgctaaaggaacacaaagggcaagtctagttttcagggaaaggaggaggcaggatacatttaaggatgcacagaggttacgcaggcaaagaaaggttactgggagacctgaaactttagctaatctgtgaaaatgatcttagtgtgaaaagattaatattgaagattttatatttgtttgg

SEQ ID NO: 1300 - DNA, 201 bp, Bos taurus
gtttccatttgggtaaacatttatcttaacatttaagcttcagactcctgagatgacccttgggataaaatgacagactcaggtttgatttcttctgacaattcaaacaatactccacaaactaaggatcttttttttttttggaggataaatgactggctaggagcattaatgtcctcaggctttgctagaggcctgtaa

SEQ ID NO: 1301 - DNA, 201 bp, Bos taurus
tgatgaatgtgttaattaacccaatagagggaatcctttcagaggtatacctttcaagggtatatacattatacccttgaaatatcttatattttccagagttatgcttcagtaaaactggaggaaatagtttggtgaggccagtagggcagaaaagctaatttctgggattccactactaaatgtaactgttgcagctta

SEQ ID NO: 1302 - DNA, 201 bp, Bos taurus
caagaaaacattgtattaactctttttcttccctctggatattctaaacttaagaggaataacaggaagatgtaacatgctggccaaagtcactgaatacataatcttattcaatcaatgtaattctatgaagtagatgctatttctgcccattttatggatgaagaaactgcaacttgggtggttttaatttgccaagaa

SEQ ID NO: 1303 - DNA, 201 bp, Bos taurus
gaccaggaggaattaacacattgtggggattaatagtttcctggtatgaagtttgacacacttgttggtaggtaatttctagagaactaagatatcatggaaaaaaaagtggcaaaataatatataaaacccactaacaactaataacttttaatttatatggaggttaattatataaccaatgataaatgctatttccct

SEQ ID NO: 1304 - DNA, 201 bp, Bos taurus
cgattcctattcctgtttgctttctgtcccgtctctctctccagcatcacttctgtcttttgatagtaacagttaatttcagttgcagcagttgagttcaaaattttcagtttgccagcacacccaaaactgacgcatttctacccacttagacacacaagtacaacctcaggcaggtacttcttagaaattcaggaagga

SEQ ID NO: 1305 - DNA, 201 bp, Bos taurus
tggatttagagaagccaaatagtaagtacaaggtgagattctgcctatggacatagttaccctcatgggtaaaaaatccgtttcccttgaacctgattttgattcaaatggaatttgatgacaattcatataatattggccatcttgtggacttggtggtatactgcttaaaatgttgaggagtaggaagaagaacatgac

SEQ ID NO: 1306 - DNA, 201 bp, Bos taurus
gggatgtggcgccagccagggagccggccacaaggtgctcttgcacgtgcagtgtctgctgttgcccctggatggctcacttgatctgctcataggccatgaatttgatgtctgactcaggtgcaatcttgagcacgttaatccattgccacgccacagggagcgcacgcccctctcttggatcatgctccttccggaggc

SEQ ID NO: 1307 - DNA, 201 bp, Bos taurus
tacactaatgaatgaatcataataagaattttatgacatacagtattacagttgtactcataatacagtattggaaacattgttacatttttagaaactacttgtgatgatagtctgatactcagcttctccaattaggagacagagagaggtatactgcataatcacataattctttgaaagcaaagtattacacagtaa

SEQ ID NO: 1308 - DNA, 201 bp, Bos taurus
aaatctaattaaacttaaaagcttttgcacagcaaaggaaaccataaacaaagcaaaccaccaaaggggagaaaatagttacaaatgaagcaaccttcaagaattaatatccaggatttccctggtgctccagtggttaggaatctgtttgccagtgcaggggccatgggttcaacaccatggggcaactaatcccatgct

SEQ ID NO: 1309 - DNA, 201 bp, Bos taurus
tttccctacactagggttaagcaggtattaagatgtgttgagttcgcttttcagaaggttctgtttcttaggcaaacgtttgtggaattgcaggtgagaacgtgatcctaatgaaatatagatgaggatgttttgaaagttgtggatatgaatggagagatgttcaggagtgagaaagatggtcagaagagggataccaga

SEQ ID NO: 1310 - DNA, 201 bp, Bos taurus
ggaaaggaagaggatcactctgataccaaaccaaagaaatggagctgatgcctctgtgaaagagagatatcaattagcccgaggggaggctgagttttattgtattcagtggagttactgagagtgctgggaggctgaacattgaaccaaatagagctcaaaggtcttgcatgcccatcaagaaaataaataaagcttaag

SEQ ID NO: 1311 - DNA, 201 bp, Bos taurus
ttaaataaatgtgtgatctttgaagtcttctttcacacatttgagaaaaatttctcacttcatctattagttaaatattcggcccatgtacattttatgtatgtaggagagtcatgatttttactccaacaagtcaatctctgatgaccttcaccaacctctactctaggtgcaagtgcacttccctggcctctggtgttg

SEQ ID NO: 1312 - DNA, 201 bp, Bos taurus
agtcccttccttcaggattatagtagatttaagggaactgttcacattaggtcaacactcctccttggggacaaggccacatttgatgactaagaggtaatggtatacaaaagtctggtctttttgcttcaatttgagataatactgcaaggccatctaaggaagatggtattgatctattatcaattcttattataagta

SEQ ID NO: 1313 - DNA, 201 bp, Bos taurus
ttagatagaggcctaatattcttaatattttatggttctctttactttcacaactttttttgataggcttaatgagatacaatacctgagaagtgaggatgagattattttccttaatatttaaagtaataagcatgcaatatttactttaaattgcataaattaattaatcaaactgttaattatagtgccaagcatttt

SEQ ID NO: 1314 - DNA, 201 bp, Bos taurus
ctcagtaatcttctttactggcttcagggcctcctactaaacccccgaagtgcaattcctctccaacacacctaattttcttttaactcctgtatgaaaataagctatcatatctagacgagtttcttctccaacattcttactcaactcctttagagggtaatttaaaatctatatcctttgagaaatcttttgcaatta

SEQ ID NO: 1315 - DNA, 201 bp, Bos taurus
cttctgacctgcacagtccatgtagggtggtaactacagcatctaccagctggtaaaacctgctggagaaaatctcatgtgcaggcacattgattctttgacaagtgtatttgtatcacctatgccctaagtccttcttgatcatcttttttatttcatctttctttgccgttttccagatcctatgctcaaattttacca

SEQ ID NO: 1316 - DNA, 201 bp, Bos taurus
tttctttctttcaggacagcatgaggcccactgtcaggtcctagggcccattggcagaattcccggtggcttggtccatccatgcccctctgagtcagccggatgagtcatgcccctctgtggccagctggtggaattgctagtggctgaaactgtctatgccctgctggatgagtgggggtagggctctctgacccactg

SEQ ID NO: 1317 - DNA, 201 bp, Bos taurus
acttaaccttctattttgaaattataaataggttggtatatattttgaaacccaaaataaatacaacatattctttagaactcagtgtgtctatatattaatatgtatgcatccatttgactagctaatagtaagttatttggaatataatgtgaaatgctcctaattttactgataggaagattgaagggagtgagctaa

SEQ ID NO: 1318 - DNA, 201 bp, Bos taurus
gaagacattccataaatgatttggccccaaggatggtatcctcccttatggacagctgtggctgctcagctctgagtctgtgtattacatctatttactcaggccagtattctgtgcccctctggtgaaggcaaactctattccttccaatctgcactttgttcctttgcgctttatgtgacagtgagttcctaaactgaa

SEQ ID NO: 1319 - DNA, 201 bp, Bos taurus
ggacacttgaggatataagaggtttggaggaaagctgtggtgatgaatcaaagttttcttacattctttgctttctcctctttctgagaaacccggccatcgtagcccagcacagagtagggaaagttttcatatgcaaaagtatcaagtaaagaaagggaccacagccctactggcctgattagtagggtggacctggga

SEQ ID NO: 1320 - DNA, 201 bp, Bos taurus
atggcaaggctccaacaaagaatgcccagaatactttttatgaggtagcaaaatgattcctgttttgatcttgacacttgtgttattttcctagttatttcttgtgccttgcctcttcttttcatgatggtacctgctcatcacacatatctcttgtttctagaaccatcatccaaattcccctaaagaatcaccagtcac

SEQ ID NO: 1321 - DNA, 201 bp, Bos taurus
gagactcctagaaaaacagcggtcttggtaagcagatggagtttcagtcagaataataatacaaaatttttattcaagcttacgtcctcccatttacatcctcttttttcttatctgtgccatatctggaatctaaggtacagaatttagattgtttagcaatttgcagtacaagttagtttgggtaatgctgacttacgg

SEQ ID NO: 1322 - DNA, 201 bp, Bos taurus
tgagacttaaaattcaacaataaatttgatctaatttatgaatttaataataagtttaaaagcttaaagaaaagccatttttccttcccttgtttccctcagcctacttctacaagagctcttagcccttgttaagactagagttctcttttaaagactcggtagaaaaataaccatccaaagatttcctccatcagagaa

SEQ ID NO: 1323 - DNA, 201 bp, Bos taurus
ttcccttagtaggggtaaatctgtcttattgctttactgaaaacaaactaattaaaagtcattacatgatctacaaacatgagttctaaataagatgtacgtaccaggatcatcacttaacaaaatatgacaattcttccaactagttatcattcttcactaactttcttaaaagattatttatgcttttctcaaaagatt

SEQ ID NO: 1324 - DNA, 201 bp, Bos taurus
tgagagagagaaagagaaatattttgactaaaatctaatattaactactgttgtacaaattatcaatctaacagagaggtgatatatcatttctattaaacttataagagtataaagttaattccctccaggaaagcctttctaaaaaaatataaattgtattttgagagttaatcaatttgctttttctctttggcagtt

SEQ ID NO: 1325 - DNA, 201 bp, Bos taurus
ttctcgttataggtttgtggctcatgtcagtgctaagaagagggaaatgagaaaggaaaacataaattgggaaacagtgtcagagggcaggccgagataatgcaagtaccagaaagcagaggaaaagggtgttgtgtgggaaccaaaaccttgcttcaggtaggaaatgtcagagaaaaatacagtcacgttttgaaatta

SEQ ID NO: 1326 - DNA, 201 bp, Bos taurus
gatgaatgcatagactcttcccaagagaaggaaaatcagcattaaacacttgccatcttcatataacattgggtcttgttggtacagtagcagtcaagtaggaactatactgttacgcctgacccctcctcccctccctgtctttgatctgggtgggctcagaaaacttgaaagacggcagaagagaaacttgtgagaaga

SEQ ID NO: 1327 - DNA, 201 bp, Bos taurus
cattagccttttccccctttatttaaacttctaacttcctcatgcacttatttaagcttctagctataggtataaggggttaagggagccagcactttaattgaattctcgatgcttttaagtctgaatgcaaatgaaatagcctacttaaaaggctttgaaaaataatttaaaacactaaacaaacatataaaatcgaac

SEQ ID NO: 1328 - DNA, 201 bp, Bos taurus
aggaaaaaaggaataaactaggaggcaccaaaatcattctttctactctgacatttgaatgactgttactgtagtatttgaatccagtcttatcttgatacgtttgataatctgaacatccaatatggatgtatttcaaaacccattttaaccaggtacctcttttactgaagatgagtgctattgtagtttggtagcttt

SEQ ID NO: 1329 - DNA, 201 bp, Bos taurus
ttcattttattctcttttacattaatcattaaaccaattttaatcttaaatgtctttaaaagtctgcccattatcaaccctgacacagtgttcaggatgcttgtcccaaatttacctaacctgtgtttctggcaaggtgtttctgtaataaacagaagagcacctagttcttaatatacttatttataccaggttaatcgg

SEQ ID NO: 1330 - DNA, 201 bp, Bos taurus
aattccacctatggatatatttatttattcttggatgtgcctgaagggctcacggttgtgtgaaagtgtggagttttcacacaccactcatgtcaccatcatagttcacccccacacgtcctcagggaactgttgccccaactctgtcagatctacagttgtttcccttttctttaaattaaaacactccattacattgta

SEQ ID NO: 1331 - DNA, 201 bp, Bos taurus
ctacctaagtctgctctgtagtttcagttaggtaaagtattgttcacttcttgcactaaactgctgtgttttgtggctacagacagctaattagctggtatttttcaggtggctgcgttcctgatgaacagaacatctctctggctctctctctccctgcccccactatctccgtggccacagtccattttcttttatatg

SEQ ID NO: 1332 - DNA, 201 bp, Bos taurus
gggcagtggctgatggaggacaaaaataatattctcaagatgggtaatttcagcaatttaggtgatttcatcctttgactttaaacagtaagcgacatgtagtttccctttgtgagtaggtttccagacccaaacttttagattacttatcaaggaatcctatctctattcttatattttctccagttccattcttgcatt

SEQ ID NO: 1333 - DNA, 201 bp, Bos taurus
tatctttatgatactagttactttcatagaaatatccctaattcatcaactctatcttctgttgagaatgcgtggaattcagcaattttaataagcagttaaaattatattaaaaatgtaccacccaagaaaaatgaccagaaacctaaatactattcacacattccatcataaaaaactaaagttgaaaatatacaccat

SEQ ID NO: 1334 - DNA, 201 bp, Bos taurus
tttactgacaaaagtagtctctgcatacttaatctattcttaaactgttaactttagtaactatgatatgtttactgacctgataactttaataataattccatgtttactgtctccaaatattctcctacggagaccctgatggccttcaagaaagtccagtaaaatacataaaaagagcagggacaggtagctaaatgt

SEQ ID NO: 1335 - DNA, 201 bp, Bos taurus
tacagagtgttttaccaagtcttatactcatattggaatgatgtgactctttcagtcactatatatttttatttcccttttgtgtaaccttatttctttcctgatcctatttttgatactttaatatacttgattatttttttcaaagatatgcttataacagtacagagaaaaatggcagtctttgatggtgtcccctaa

SEQ ID NO: 1336 - DNA, 201 bp, Bos taurus
tgaaatggcaatctccttagatacagaagagaaccataaggggtataagtaatgcaatcttctctctgcttcctctgtcagttttgacctaatctagcaagaaatgctgagccattttccgcctcttgcgtacaagtatcaattaagggaaaacagggtgactatcttagggcagcggacgatgaaatgtcacttacacag

SEQ ID NO: 1337 - DNA, 201 bp, Bos taurus
ggcagataatcatatcctgacttcttttgttctctgttctctacttgagttagatgtccctcctgccaaattgactttggactcctaaaagtcaaatgctgtatttttttcagtgttgatacactgtactggaccaagaacatttggtgcctgactgaaattctttgtttctaatttttccagtattaaaatgagcatttg

SEQ ID NO: 1338 - DNA, 201 bp, Bos taurus
ttccgctcatcttcagatcattctcatagatagttgctttgtgagtagtcataattctggtgtgtcaacaggaggaagtgagttcagtttcttctcactccaccatcttagctacctctctctccatattacagaaattatcagaaacaaagtgtaggttactatttccagattttagattacaataaggtaccactgtga

SEQ ID NO: 1339 - DNA, 201 bp, Bos taurus
gaggtttgaaagggtttcagaaccagatatttactctgtccccaaatccctggaaatagtgacagttctaaaatggaattcaactagaaactatttgcctgttataatttggctataatgtggagaactcaaaaggtagaatatgcctcctgacagggaagtgtatgagaggatcattttcatgaattcaaggcaaaaaaa

SEQ ID NO: 1340 - DNA, 201 bp, Bos taurus
cacagtttttaaactaatacttcagttaccatataaagtgagatgaaggaagaagactttgagaataagcagactataagaactaaggaggaagagaaaggcaattgttcatgagtattattcatattattgttagatagcctgcagcttgcctctttcttgacttccaatataaatgctaaagacaaaagtctttatcat

SEQ ID NO: 1341 - DNA, 201 bp, Bos taurus
ttcccaagttttcattcaggaacttggagtcaactcaggccagtttgagctcaaaccagttaaaactggttggggtcactgggcatgtgacagcatctaataggtgaacttttgatgttagagggccaaaatgtccactctcaggtcatgctgctactgctaagtcacttcagtcgtgtccgactctgtgcgaccccatag

SEQ ID NO: 1342 - DNA, 201 bp, Bos taurus
ttatctgcatatctattaaaaaagggaggagaaaataaaactaaaattttaattgaaactcacttaaagaaacctcagggagctattttaattgtggccccgataaagaatatttgttaagacatttcttagagctctctgtccctccagttcagttcagtcgctcagttgtgtacaactctttgcaaccccatggacttt

SEQ ID NO: 1343 - DNA, 201 bp, Bos taurus
caggacctgctgctaatttgactggccaactagtgaaagacttaagtgctttcatgttaaaatgactcagcagaggtagaattatgcactagagcattaataaaaaggccatttgttctaacaaaaagttttgcagtttcctagttattctctgaaagtttagtgagacttctagattacagatctcacaatttgcataat

SEQ ID NO: 1344 - DNA, 201 bp, Bos taurus
gtttaaatatcatcttaagtaaattagtgtgtataggcatgatttgtgtaattacagcagttagtaattagtataaatggagatcatatcaccactagcaaacataattaaagctcataacaagtctaaaaaaaactatatattttgaaacaaaaagttaattagatgaattccagaatcatactttggaacaaacttaca

SEQ ID NO: 1345 - DNA, 201 bp, Bos taurus
gaataaaaattacaaaggcaaaatccttatttatgacaaagttattaagtaatgaataaggagataaagaaactgtatcaaaagatctcaaaaacatttccccacagaagtctcaaataatacaagcagacaatccagaaaaaaagaaagaaaaacaaatgaccaatgaacgttttaaatcgtttgaactggctacaaata

SEQ ID NO: 1346 - DNA, 201 bp, Bos taurus
ttttcagattctagcatgcagagatctacttctgttgagatcactttagacaggcttaattcataaatccccttgcttattaaacctgccacatactaatccaaagtgctctgtctctccctggggccagttttgaatttcatccagggtacccccaaagttatgaaccaacaaatatcagaatgtaaaactagcaggtaa

SEQ ID NO: 1347 - DNA, 201 bp, Bos taurus
catgtgacaaaaaaatgaaagttttaaagtctggtatattttatatctttatgacatacagttatgaagaacgtggattagctctgaagtcaaaggtttaagtttgtttccggtctccaaattcactacttcctaagagtgatggtgaacaagtcttaatctctttataactggaggttgtttttttttttattttttagt

SEQ ID NO: 1348 - DNA, 201 bp, Bos taurus
atatatacagtatggaattatatgtatatatataatatatattatatatatatataatcattgtgcattgaaataaaacagtaaaaaaagccccactttttagctttttaacattagcatctaggagtggtatcttatagcagtcgtcctttgaattaatctctgctatgctcttttattcctaatgattatctgcaagaa

SEQ ID NO: 1349 - DNA, 201 bp, Bos taurus
gaaaatatgtgttgggataagaaagaacatgaaagacttaaaattatgctgcaaccataaaaaattgtctttgacaagtctataacaacaaaattgtgacatcatctgagataaaaataggtttcaacgagactgaggaacatttggatttcaaatatctaataaattgtggctgggaaaagctaaattacttcaatgaca

SEQ ID NO: 1350 - DNA, 201 bp, Bos taurus
ctactataggctgtcttcaaattctctctgtgatacttctaatttattaggtataaaaagagtggtcagctataaagaaaatatttttccattgtattatcgagatggcataggtttttaatctgtagattattttttgtccctcaaacaaaagttttatagaacatagatgagctgtaccatcatgatgttagattctta

SEQ ID NO: 1351 - DNA, 201 bp, Bos taurus
cattttaaaagttcctgttgaaaagtattgctagtctctttctaaattaaaatgagttcaccatgctacatacagaatggaatttcagcatgcagaatccaataacagaggtatggagaagactgaaaattgcaagcagtgttatgcaaagtgtatctgtcagcaacataaagcttgacacatgtggagggaaacttcaca

SEQ ID NO: 1352 - DNA, 201 bp, Bos taurus
tttttcttccagttagaccgttttctgatgaaaacactgaggctctttggatcaagattttatgaaggggattaaaaatagtttgtctgctttatcattctctatatcctgaaacactaagctattccttatgtattacccatgttagctcttatttatagtcagttgtagcagataatagcagataattttgttaacaga

SEQ ID NO: 1353 - DNA, 201 bp, Bos taurus
atgtcgaggtataaggttttgaaaatcttatctctagtgcatttatttcatcgatacagtttttaggcaaccagagtcagctttatctttgtttattgagattaccatataattttttattctttattttgttaacatgatgtgtcacattgattgatttatagacattgaactatccttgaatcccttgcataattaaca

SEQ ID NO: 1354 - DNA, 201 bp, Bos taurus
taaatcatatttatttattcttcatagaaaatactgaagcatttattttactgatctgaaaatactctgtattaataagagctgctactcttgattttagatgtgaatagattaataaataatgctcatgtattgattcttatgcttttcctttgttgaatttgattcaaaaatatttattgtgcatttaatatattatgc

SEQ ID NO: 1355 - DNA, 201 bp, Bos taurus
actggaaagtaaatgttatctagaatcacacatgtcaaggccatcttattttctagaaacctgtccctacctaactccttattataaacatacctgtggctttagaatccaaatttctgcttaaaaatgtaataataaataagttctgtcttgtgcacctgagaaagggacttttaacaaatgttttgccttcatgcaaga

SEQ ID NO: 1356 - DNA, 201 bp, Bos taurus
gatatttgtgacatttttctaaagggagctccaagtcttctgggaacttcctctaggaagtatgtagtacagttaagcagttgtgcataaatgatactgattgatagactaaaaacatttcagcttaatctcattgaactttagagccttcattctcctgtctttcactcttaaacaactcaatagctgtcattttttatg

SEQ ID NO: 1357 - DNA, 201 bp, Bos taurus
gcctagaggcaggaagctgttaatcctataggcaatattagactaaatgttatacttaggatggaggactgggaatgagactgaagaggaaagctctgatgctgatgattgtagtaaaaaaaagtcatggtatttgagtttagtgacttgggaatttagttattttcaaactttttattaattctacttagaataacattt

SEQ ID NO: 1358 - DNA, 201 bp, Bos taurus
ggtgggaatctttctatgacatatttaaggagcaataaaagaaaaaatttgcaagctaaaaatgaagaaaaaaaattttttggctaataaaaccataccacaagcaaattctgaaggcagataacaaagaagaaagtctttgaatgtatatcaaagataaaggattaacattcctaatatattcaggaacgtagtcttgag

SEQ ID NO: 1359 - DNA, 201 bp, Bos taurus
caggagtagctagcagagaaggcgccgagcacttatggctccttactcagatgcacatgcctggtctccccttacttgtcaccaaggtgccaaagggctgcgttaggggcggagctaagggcagctcctggaatcctgggaccctgtaacactgtgcaggtgccttgggtgggtcagtttaagtgctgtcctgccttgtcc

SEQ ID NO: 1360 - DNA, 201 bp, Bos taurus
gtgttgctggcaaatgaaatggtctgttctcccactggacaatgccctacctagcatgggtgcctgatacttggacactaaaattctctcaccatcaataataatgtgttagagcaaggctctggaatgactttgagttatctggtaaatgagataatgaatttttcatattgtttaaaccacttagaatgtgtgtcttat

SEQ ID NO: 1361 - DNA, 201 bp, Bos taurus
cttaaagacattctcatgtctgtaaatgtctagaagtttatgccttcatttcctaaaatcatttttattcatcgctcttcttttttcttagaacttggaacaggaaatgcaacatttaaaaatattcactatcttaccccaaaccataactcccttatagactttcttttgttccccttgttggacacaaataagttcgat

SEQ ID NO: 1362 - DNA, 201 bp, Bos taurus
aacactttctttataaattaaagcattcatttctcaatgccaataaacaaaattctatgagtacatttcattaattttaaagaatgataccttcattttggttgttttatagaatgtcactgctgcttggcaatacttattaagagtcaaaaatactgccttttgaagcaatataagcccaagaaataaatgagatatatg

SEQ ID NO: 1363 - DNA, 201 bp, Bos taurus
aagttgcaaacaagaggatcagcaatacttatgtagcatagagatacatttttggctaataaaattctaaaaagaagatttattttgccaacattaaaatccaagaattatacataaactctggcattttggagttcaaacgcatgaaaataaatgttagtcagaactgagtgtatgtagagcaaatattccacaatttgc

SEQ ID NO: 1364 - DNA, 201 bp, Bos taurus
gtttaatattgaaataatgttgaaaatctgcttcttaattttgccttcttaagcctagttgtttcttcgctaaattaaggccttatgcctaagttccactatcttttaaagcatcctacttcagttcagttcagttcagtcactcagtcgtgtccgactctttgcgaccccatgaatcgcagcatgccaggcctccctgtc

SEQ ID NO: 1365 - DNA, 201 bp, Bos taurus
gtaaaagcaaccaactctcggagttttttccatggaggctgcctctgaaacatgccatccatagttgagtaaaaggttattaaaataattccatcagcacctctcaataataagccctagcctgcatcagcactaactagcactgcacagtgacccatacatataagacccaattgggtgggccatgacgtctgagaagag

SEQ ID NO: 1366 - DNA, 201 bp, Bos taurus
tccttggacatttccaggcattggacttttccatcttaggagtcttaactccaaatttttagtatcatagcataactggaatgcatataattcatcaggacactatgcagctcatttctgtatttcattgctgctaaatatttcaagaaactttttttgttttcttctctcttaagtgaggctcctacttataaacccctg

SEQ ID NO: 1367 - DNA, 201 bp, Bos taurus
agtttcatttaattctctgtcacacctcctttcattccaacaacaaaacaagacattcaatttatcgctaaatatcagcttcaggaggggacacaatagaggtctcaggtgctctctgaaacaaagctagggttttccaaccacactgcagatgaactattttcttaaaacacatatttctaagtcaataaaattacaaag

SEQ ID NO: 1368 - DNA, 201 bp, Bos taurus
aattttctaactgggagtctaactaaacacacactcagggtccaagtattgacacacaaacatcttcaaatattttaaatgaaatctaagagacaattatctaaaaatacacagaactaattatgctctaaagccagatcattctcctgaataaatgtgtcatttactaggctgatttatgtattgttcctgtttagacgg

SEQ ID NO: 1369 - DNA, 201 bp, Bos taurus
cctacagcaggctggtacctaccctgggccctctggactccacaaacagcaataccaagggtcccatccaccagcagtccagaagcctctggacaacacatggcctggcagacagctaggatgaagtcagctctgccaagcagcatgcccagaggagttggcctcacaacagaaaggcccatgaagcccccgtgggggtac

SEQ ID NO: 1370 - DNA, 201 bp, Bos taurus
cactggtgcatgcatggcagtggaggcagtgcagggaatcaggccagggatgtgcagctgaaggggctagctgtagatcagcccaatggtacaggtcaatgactagagatggggccaaatctagacccacaggcatttgtgggggcattggccatcatcataaattcccatggcatcatgatctcaacactggcaggtaca

SEQ ID NO: 1371 - DNA, 201 bp, Bos taurus
atgcaaataatgattttaagtcttaggacaagcagaagtgggttgttgctactgcagcctttgcatgggtcctataattcaccagtcacccttggccaagagttaggaaggatatataatccttttttgactcttcctccacagggaatggagttgtatatcccacccacagcctcagagacaacacctctcaaagtcaca

SEQ ID NO: 1372 - DNA, 201 bp, Bos taurus
aaaaaaaactagaagaatccactataatttgatatttagaaaattttccattgtacacaggatttcatttcattctgtgaggccattcaactttgttctatagtaaatatttatattatcacattataaatatctgggtttaaaagtttaagaactggcctgtaaataaagtaagagaaattacagttatagaaaaacagt

SEQ ID NO: 1373 - DNA, 201 bp, Bos taurus
ctcaagatatgagagtggaaattaaaaagggcaggcacccaggtgcacaagctattaaaaaatgtactctcgggtctggggcagagcatccgagcaccgtgtattgactctgggcaaagacagatgctggagtgccatttcctccatttgaatctgtataagtgttgtgacccaggaaagttatgtaacctgtcatctctc

SEQ ID NO: 1374 - DNA, 201 bp, Bos taurus
actcagccgtacatacacatgtattcattctgccccaatccccctcccgtccaggctgacacataacgttgagcagatgtactatacaataggtctttgttgttatccgttttaaatatagcagtgtgtacatgaccttcccaaagcccctaactatcccttccctctgatagccatgagtttgttttctaagtctgtgag

SEQ ID NO: 1375 - DNA, 201 bp, Bos taurus
cacggtgtgtgagacatggtgtgctctgcctggcgggagcccggcctctgaggagtgtccctggggacctgggaggcccggctccctattaatttgtgatggaagacttctcacccttctgtgcccttgtatagggctggcaaggaagcctccatacagccatgtgctgagcccacatcagttgtggggccaaacctgagc

SEQ ID NO: 1376 - DNA, 201 bp, Bos taurus
caataaaaagcaattgatttatttgcctagtataaggttttacttggtagatagccaaatcaaaatccagaatatctgaccccaaattcagtgtttatccacaataacaggctgtcaggtgagtaagttcactgggaaagtgaggctatgtacgtgtatatgccatgagcataagagtgtgtccagtgaaatatagttaaa

SEQ ID NO: 1377 - DNA, 201 bp, Bos taurus
tcagcatgaaatctcggatcagttggtgaatttatttcctggaaatgaatgaactaaactagttaacccaatggaaaaaaagctggttagtatcacaggcggagaaggcaatggcaccccactccagtcctcttgcttggaaaatcccatggatggaggagcctggtaggctgcagtccatgaggttgctaggaattggac

SEQ ID NO: 1378 - DNA, 201 bp, Bos taurus
tgacctgtaagattcttttcagaataatcaccttgggcctcatgtgcattcagagaatctgtcataacagggggacaccgagctccctgtgcactgatgctcagggttctcatctcagggcctgacctagcacttccttccctgcttgacacctgaaggtctcagtagagttcccccacttggtaagggcactgcttttct

SEQ ID NO: 1379 - DNA, 201 bp, Bos taurus
atactagccaaattcctgaaagaaaaaaaaaggtcagcagaaaatggaagggcatatttaagttgctgaaagaaaaaaaaaaatctttatcaagtaaaccatccttcaaaccagaagacaaactaaaaacatttgcaataaataaagtacagaattcatctctagtactttgtgttgtgagaagtgctagaaagaatcttt

SEQ ID NO: 1380 - DNA, 201 bp, Bos taurus
aagtagggccctgagatcccaggaacggtcccttctcacctagaacgtcaaacaaattactttattgcacatactgtgcctaaatgactaagtgcctctgcagcagtttcaggcctgtgccagctgtactgccagacagcagaaactaccaccccaccccagccccactccgggtcagagaaaggactggaaattgggggt

SEQ ID NO: 1381 - DNA, 201 bp, Bos taurus
agcagtatctggccaatctgtcctgtttttgccattagcagtttgtttcccttaactgagcttctgtgactttccttacacacagctcaagtagtttccatgacactgtggataaggcccagagcttatcatcatggtgccctgagatgaagttaatcaggtttaagttgtccatgacagcaacacaaactggactgaatt

SEQ ID NO: 1382 - DNA, 201 bp, Bos taurus
aggcagcagtagtggccagagagggtagaatgtacacactcagcagcaggacccagctgcaggttccagtgtaatgacagaagctgatgtgcacgcacacatacgcagtggcaaaggcctcaaccagcaagggttagggccaactctgggttagcactagctgctgtcggggccctgattgtgagtgtactcctgtgggtt

SEQ ID NO: 1383 - DNA, 201 bp, Bos taurus
gcaggcagctcagcttctgcacatggccgctgaattccaagaaggtaagactcaaagtccctgaggtctgagcatggaagtcacacataactttcctgcactattggctagaacatgtcagaaggccagcccagcttcaggatgtctggaaataggctccacctcctgatgaaagaaactttcactaatttctggccaagt

SEQ ID NO: 1384 - DNA, 201 bp, Bos taurus
ttccaggcgctgccacacaaatcagaatttgcgaatttgtcagaccctggtcagtggaaataaattctgaagagccggcctttcctctaccccaaataatttgggttatcaaaagatgaacatcaaagctgatgactgaaattttcccagccaagtaggcctttgatttgcttttactacttacacactaagacgttagtt

SEQ ID NO: 1385 - DNA, 201 bp, Bos taurus
aatcttggcggggggctcatggggtccaccgagggccaggaagccctggagcctgtggaggtgaatgtgcgggaatgagcccggtgcttgacagatgctcaggctaggggccgcctgcgttgcttacggcactgaacgcactccctccatctcttccttccttcccttccaacgccccaaatccctcttttctttcttttt

SEQ ID NO: 1386 - DNA, 201 bp, Bos taurus
cattgacttgttgctgacttgtgggtggtgcagctgtcactaagtcctgtatttccttccttcttcctcacaaggtggcccacatggtcctcaaggcgcacgccagggcttggcaccactacaacagccaccaccgcccacagcagcaggggcgtgtgggcatcgtgctgaactcagactgggcagaacccctgtccccag

SEQ ID NO: 1387 - DNA, 201 bp, Bos taurus
tgctcagaaaacaggctgaaaggttaaaaacagaccactgcggcctaaatgtgtcacctggctccttcaggagctctgctaatcagtctatctaggcagtgatcacagaaagactggccggtggcagagagctatcacgagggaaggtcagaaaaccaagaggctgcctggcaacatggagctgccttttttatggaattt

SEQ ID NO: 1388 - DNA, 201 bp, Bos taurus
tgccctatgagccatgagcctcaggtaactcgcctctgtttgtgagtcagggatccccaaatgtgggaaagagcagaacccctggcatcttggcctctgggactcctgaaacatgaacaccctccttctgaaccaggaacaacccaactaacaggacagggtacaagttgtggacagaggcctcagcatctcagaaaaagg

SEQ ID NO: 1389 - DNA, 201 bp, Bos taurus
cttttctgattcttgcattgggaagaagataaaatgagatgaactttaagttctctccctaatctaagactttatggatacaattaaccacagtgattcttaagatttattgcctttctgatcggaaaggcaatttaaatttatatacatgccatataatgtctataagatgataattaccttgataatttcatatatctt

SEQ ID NO: 1390 - DNA, 201 bp, Bos taurus
attgtcgaatgcaatttgagaatgggttacctagtccccccactttacagaaaaagtattgggttggtcaaaaaactcattcatatttttttcagtaaatgttatggaaaaacccaaacaaactttttggccaacctgatggttaataatcagcagggttaaatgctttccctgaggctacacaactggatacaaccaaga

SEQ ID NO: 1391 - DNA, 201 bp, Bos taurus
tcccaccccaagagtttctgattcagtaggcctgggtagggccatgaatttccatgtctaacaatttcccaggagatgctgattctggtgctgatggactgggatgtacaccttgaggcccatgaggtttgtcaatattaagttgtcacaaaagaaccacaaggctgagagagaatttctggagaagttgctatatgcttg

SEQ ID NO: 1392 - DNA, 201 bp, Bos taurus
ttgcctatgttagaacctgagggatggcaactcagggctaaaaagaaatgttctgatacattctgttctctaacacaaaggagggtgtttgggatagtgaactgtgtgccagtacaagtgtccaggcagagcctgggtgaccgtctttcagaggtcgtgtccaggggattctccttcagtggatggggagaggtcaggtgc

SEQ ID NO: 1393 - DNA, 201 bp, Bos taurus
attacaaaacctataaggccaaataaagtcatgagtctgagaccctgataatctacaactgaatattaactaccaaaggtcagctgagactatgggccttcgagtaacattcagccagaaactgccctacttgatatgtcttcacaaatgttataaactgaatgggactccagcaatttgtcccattagagtcagggccta

SEQ ID NO: 1394 - DNA, 201 bp, Bos taurus
gcatgaactccaatgaaggaatctattctccaggaattaatagtaacagcctgaaggaatatccaccctgcaaacccacagacacaaggagcccctgcacggatccccacaaggcatttgtttatgacacggattctcatgacgaggctgatgaggacgcttcctccttagcctctgtccaagcggttccaaaccagggct

SEQ ID NO: 1395 - DNA, 201 bp, Bos taurus
ccacagacacaaggagcccctgcacggatccccacaaggcatttgtttatgacacggattctcatgacgaggctgatgaggacgcttcctccttagcctctgtccaagcggttccaaaccagggctgcaggctgcacagttgtaaattaacccacagtgtctctgacagcctctttggctgggagctgaatggcaaacact

SEQ ID NO: 1396 - DNA, 201 bp, Bos taurus
atgtgtatcagaatcccatggaagcttgaagacacacattactgtgccctattcccaaagtttttggttccttgggtctggagtggggcctgaaattgtgcatttctaactagttctctcattccatagttcatcaggcactctatctatcagatctaggcccttcaatctatttctcacttccactgtataatcataagg

SEQ ID NO: 1397 - DNA, 201 bp, Bos taurus
gcagggtggcagaggggccctggttatgttctctggcactgaaattccccagtccccccccaccagtaaatcctttcactatcccagctgtcagcaaagagggcccaggaaacctgctccccttccttattaatttccaagggtttctcctgtccagattcagcccaaacttgaaatacaaaccaatttgcttctttcctt

SEQ ID NO: 1398 - DNA, 201 bp, Bos taurus
ctgggcgcactcccaggggcatggaggatccagcgtaaggaattcttacgagaagcgagtggagccagagttcacaggtaaggccatatgctgcttccaccaggttgcctgggtcactatgacagggtaacagctgcccctccccacaagatttccttgttcagaggtgggatcctggccccaccagcttctcccagctcg

SEQ ID NO: 1399 - DNA, 201 bp, Bos taurus
catgtttaccttgtccactgcgtatctgctgtgccagttagagtgctgacatgtaggaaatgcttagtaaatacttgtggaagggatggccaaatgccatggttgattagagaggtctgttacaggtagtggagggaccagtcatgatgtcagtacaaacttttgttatcacaggattggttaataatggccaaacaattc

SEQ ID NO: 1400 - DNA, 201 bp, Bos taurus
agatctgagcttgcagatggccacaaaacgaaagatagaagtaaggcaggaagataaacaagggatcaaggaaaactgcatgctgagtggggttaccctctaggccccttgcctttcccagcaactggcatgcaggcagccatatgtaagaatgcaggcttggagattggaggacttctgcctggagacatcatctagggt

SEQ ID NO: 1401 - DNA, 201 bp, Bos taurus
gtctcggcaaaaggctcatgtagtgtacaggcctctgctaaggcagatggtttttctggaccagatcacaagctgggattaaacttttgcaaatgaataatgacttggcctcctgcatagctggtgtccaaactgaaagttcttatttaactatcagcacaaatcgcgggcagtacccaactcacccatgtgaggagttcc

SEQ ID NO: 1402 - DNA, 201 bp, Bos taurus
taatggttgatgttctcaaaatgctgtattctggtaagcaaaggctcctttactgctgagtgaagctgaattttttgtccgtggcctcccatatggacaacactggatagcttttgtataaatcttcatttttcttaatggaggttgaatgtgggccttagggatctctgaccaattaggcatcaactgtttatagcattc

SEQ ID NO: 1403 - DNA, 201 bp, Bos taurus
tggtaacgataaccctgtatacgagacagcatgctttgtatttttgttattaaacttctaccagataaatagtgatgcctgggttacaaccttgtgatctttaatattagtcttccaaaagcttaactaagaagataaaactcaacaatttccactcagttttattattatccttttcgatagaactttttgttaaaacat

SEQ ID NO: 1404 - DNA, 201 bp, Bos taurus
gctgtgattcatggggtcgcaaagagttggaaacgactgagcaactgaactgaactaaactgaaaaatgaatggattttgttagctttaaactcaatctggaatggccagaaataggcatgtccccccttaatatgttttaaatgacaacctttcagtgcacccttttcaaaatagtcataatttagcttgataacctaaa

SEQ ID NO: 1405 - DNA, 201 bp, Bos taurus
tgcattctttcataatagttactgctattatttccatttcagggatgagaaatctgaagcttagataggtcaagtgacttaactaaagtgacacaaccagtaagtaggagaggtggaatttgaattcagtcaatctgggtcctgatccttacccttgcttacgtaagatacaataataagttaatagcatgaatagagaca

SEQ ID NO: 1406 - DNA, 201 bp, Bos taurus
tacactgaacacatatttatacatgcacacaaacagggagtcagtctaccaacttgtttgtggtgggaatacaaagttgtagtgatttttttctctcaaagatcttgcagtttagatggaagtaacttaaaatacaaataagattgccttccatgggcaaggcactcaatgaatatttgtagaataaataaatacataaaa

SEQ ID NO: 1407 - DNA, 201 bp, Bos taurus
agtctttaggtgattattaagattaaattagatcataagagtgggccctagttcaatgagatcatgaccttttaagaaggagaaagcaatttgtcttcacctacatgtactgcagaaaggccatgagaagaaaacactgtgagaaggtagccttatgcaagccaagacaagaggcttcagaatgaaatctaccttgttggc

SEQ ID NO: 1408 - DNA, 201 bp, Bos taurus
gaccccaaataatgatctcatttctcattgtttccttggaggccctgcctccaaacacagccacactggaggttccgaactccatgtgggaatgtagggggaagcacaaaccttcaggccataatgccagataagtcttaataaaatatgaatttaaaatcaatttaaaatataaatcagtattttattttttatatagtg

SEQ ID NO: 1409 - DNA, 201 bp, Bos taurus
gcaaaaacaagaccaggagctgactgtggctcagatcatgaactccttattgcaaaattcagactgaaattgaagaaagtagggaaaaccactagaccaatcagatatgacctaaatcaaatcaaaactgaatttgggtattggccacctggtgatatctatgtgtagagtcatctcttgtgttgtttgctatgaccagtg

SEQ ID NO: 1410 - DNA, 201 bp, Bos taurus
gaacacagatctgaaaattataaagttttactatgcatatagtaaaagatgctcaagtttctccttctctgtcagtcataccttcttgccaatattatgcatgctgcccagggagaagatgttgttatctattgctatggaagcaattgtttaatttagttactacatcctcttgatttttatgagtagtggtaaaagagg

SEQ ID NO: 1411 - DNA, 201 bp, Bos taurus
agtgtttaattttcaagtatttgctctttcttcttgactttagcatcttctgtacctcattctggaaacttcttttggctactcttttggaacataaattttatttgtttaaaaatacaaggtctttaatactcaaattaatatatcttcattcatggaaaaaccttggacagagtaagtctatttaaaagagatctttaa

SEQ ID NO: 1412 - DNA, 201 bp, Bos taurus
taaccactagtttgctctctatatctgtgaatctacttctttttttgttatatgttttagattctctatataagggatatcacatagtatttccttttctctgtctgacttattcacttttagtggttgtcattcttattacctgacacatcttcatccctttaggatagcaagtgtggattttaaaaatctgtatgttgt

SEQ ID NO: 1413 - DNA, 201 bp, Bos taurus
aaggggaatatcttttttaaagattaaagtttattcaaagaaagcttgacagagactaagagaatctccccattcatttattgtgatcagccaatggtcagggaattttgcccatgatactctccaaacactgacttttggggtgttcccagagttctttataaaatctaaattttgcctcaatatagaagcaaataaaat

SEQ ID NO: 1414 - DNA, 201 bp, Bos taurus
atgggattctccaggccagaatactggagtgagttgccatgccctcctccaggggatctactcaacccagggatccaacctgagtcacagatatctcctgcataaaaaactggcaggccagttctttaccactagcaccaccttttatctctgctgctgctgctaagtcacttcagtcgtgtccgactctgtgcgacccca

SEQ ID NO: 1415 - DNA, 201 bp, Bos taurus
tagacctgtgtgtgtatgagtgtatgtgtccccatcaataaaagctaagataaataagatatggtaaatgcatatcatagaatacttttacaagataaaggaaagaaattaggttgatgcactctgccaaaatggatagtttcatccaagtgtttatttgaaaaaaaaaaaaaagtttttagtactgtgtctacaattggc

SEQ ID NO: 1416 - DNA, 201 bp, Bos taurus
ttaaagtactgcctaattttttggcacttcagcttttctccaaggtctgaaccactggtaataaattttaggagaagtataaacacttaatacagacatacagtcagatatagccatcccctctaactttttaagaagtctctgaatgctattctttcctccttacttctttgcatttaatcattcaggagacaaacttag

SEQ ID NO: 1417 - DNA, 201 bp, Bos taurus
tggcaggtggtcacgcctggcctaccagacttctctgcatgccctgagttttccagttgaaccactgtttaggtgaactgggtagtgacttttaactgatcctctagctcaccttgtggccttagtttccaagttccaaaactcctccaaaatatagttcccaaacgcctctcttaattgtgttatggttagttcctatca

SEQ ID NO: 1418 - DNA, 201 bp, Bos taurus
tgcatatttcctgagttaacagatgctaaaacaccaccaaatgaaagaaattaactagttgatgagcatcaacatgtagagcccagacctactggtgccctagaattaatcatgttaacctctatgacactgccttgttacctcaccatcaaccaatcagaggattgtgtaccagttgatcatataccctgagttccctct

SEQ ID NO: 1419 - DNA, 201 bp, Bos taurus
gggaggcaggaatgggggttgggagatggaaggtaggaaggtgggaggtagaggtgaggggtttagcaggtgctggccgcgaagtctgatggtttgatggcaggcattctgcttccatcctgagttccatctggactaaccatcaggtgtgggtataatggataaacaaagtgcagcatcctttgttcactaataggccag

SEQ ID NO: 1420 - DNA, 201 bp, Bos taurus
agagatagttacattacaattattcagcaactctgcttttccaacatgtatctaagtataggaatttccctattagctttggtttttgttataacttgcaaatttttatatatcacagcttcataatctttcatttcaaaatgttttttccttatttttttacaattctcatttttcatgggttattttttaatgtatttc

SEQ ID NO: 1421 - DNA, 201 bp, Bos taurus
atctgatctttcctcatttatttaaaattattcaccttttccccaggaacttaatctcaaatcctgaggtatcttcatagcctttttatttctactcctcacatctaaataactcaaatgggatttctctatgtctagcatatcaatgtgactgtaacctgaactcttttctgccaactcacatagccatatatcttctaa

SEQ ID NO: 1422 - DNA, 201 bp, Bos taurus
gtttgtacatttatatttttattgacataaaacaagccagttatttcttcatatcagtcattctggcaaagagattatggcatctgaaaatcattattgagtttcttaatcagaatatccataaaagaatttctgggcagcatatttgaatttaaagtgtaaggaatgctatactattctgccaaattaaggcattgagat

SEQ ID NO: 1423 - DNA, 201 bp, Bos taurus
aagtacaggattcctgctcataggccctcatttgcagaaagggctatcagatcaggtggcctgggagttacccacagccatagacatgaggcccctgggatagaaggcgctgccaggaagtataagactcagccagcacctccagcaaccagggcagaattcattgaccaggtcacaagttattacctccacagaataagt

SEQ ID NO: 1424 - DNA, 201 bp, Bos taurus
actattgaagattcacaggagaaaatatgaaataacaacctgagaaagtccagcgagctgcagagcgtcgagactattaaaacaaggggctcaatgggttcccttgtgatcgatcagaaacactgtagcccccagctcgaatcaagtgctgtgtgggcaactgtgaatcactccccaaatccccacctcctcatctccaag

SEQ ID NO: 1425 - DNA, 201 bp, Bos taurus
gggcagtggggaggcaggggcttaggaaggtcctgcctgggggtgagctggggtcttatgataagggaacaggtggccagtctgggaaaatctggcgtgcatgagcttgtatcccaagctgaggtggcacgagctgtcctctgatgtggagtgtgaccttagggcccctgttggtcagcaataggcaatgaagttgctgtg

SEQ ID NO: 1426 - DNA, 201 bp, Bos taurus
atcttgtcctgtaatttgccccagggccctgaaaaccactgtgacccagtgtgttaactctcccaagtaatggcctgtgaaaaacagatgatttacctgtagttctgaattaatagtggtggtagagttgagcagagtgaatctcctggaaagactgacctgcacttggtgaggagtgactccatctctgggtagactacc

SEQ ID NO: 1427 - DNA, 201 bp, Bos taurus
ctggcctgccagactagttgctaataaatggtgtccttctggaggatttactttgtgcttgagacagtgttatgtgcttctacacagtatccctttcaattcccccagcaatccttcaagagaggccaccatcaccctcatttcccagacagctctgcaggatgcagtgctcagccaagttcacacagccagcaaggggca

SEQ ID NO: 1428 - DNA, 201 bp, Bos taurus
ggcgggacctttgacaacccgtaggagctgtcctgccgccattaagccaggtccagagggcgcgagagagtcctttcctggccgccagagtcgagcggtccgggcatcttatagctgtcctgagccaagtaagtcagggtgcggatacccgcgaggccctggcttttgagctcagggaaacctccgttttcgatttccacg

SEQ ID NO: 1429 - DNA, 201 bp, Bos taurus
aactgaaaagtttcacagctcagggccccagcttacatccttctggctggcagccccaggagaaagaaggctctcttcctccacagggacagaagtcgctgtccatgcagccctaacgccagaatgccacgtgtctgacagtgtttgtgaggggtgctctctgaaggacagctgaggggtggaagccaggagaacaaagat

SEQ ID NO: 1430 - DNA, 201 bp, Bos taurus
tgggcaagccccaaaggttcacctgggccacaaatgagatgggtgggggaggagccagacaatgaggggagccaggcatgggggaagagaatgactgtttctaaacggcccccaaggtgccaggctctgggtcttgtaagtgtcataacctctccatgcggagatccctttataactgactgacatgaaggagcctgaggc

SEQ ID NO: 1431 - DNA, 201 bp, Bos taurus
atctgttctgtttccagcctcgttctctagccacctgccagttttgtaagctcctaatagcacttcatccaattccctttttgatgaagtctaccagaggcttttgtggcctgcaagcaaagaaggctgactgatgcttcttcaaaggaacacaaagtcacagccctgaaaaagcacaactgagaggaagaaagcgataga

SEQ ID NO: 1432 - DNA, 201 bp, Bos taurus
aaatctgcagtcccttcgatggagcaggttatacaaggaaacaataaatgtgagaggcagcagcactccttaagaggtctaaattgaattgcattgactttttacaaagccacaaattgcttatcttattcaagtgcctgagtgtttgctttttgatgagctcagtacaaagataccttgaagtttggcagcagcgtgagt

SEQ ID NO: 1433 - DNA, 201 bp, Bos taurus
ggggggttgtagccccaggcaggaggcttgcgaggcctgtggccccctgcctgactgaccttgggctgtccctccgcagagctggtagagatggctgttaggctcacgggctgggccaggcagagccctcacagtccctcaggccctggtggggagtcacccccttggccttccttgcttgatcccaggtggacctccctc

SEQ ID NO: 1434 - DNA, 201 bp, Bos taurus
attcccgggggttcatatgtgggccaggaaccaccagctgatatcagtaaacacagagactttaccagatgcacaaacagaaaatacaagggatgttggcgctatcgggccacaataatcctttaaccagataaaagaggtaacttctaagactaatgaaaaaatagcctgaagctgaagaaggaatccttggggcccagc

SEQ ID NO: 1435 - DNA, 201 bp, Bos taurus
acttaggttgcagcatgctttatttgatgataaagggaaatatccctacagtggcaggatatgagagggaaaaggcagccctggggccagcctcatggagtttcacctgtagtgggataaacagcaaaaaacaaggaagtagaaaaaaaaaaaggaactgcaggctgtagtcagggcaggggatgggggatgtgaggtccg

SEQ ID NO: 1436 - DNA, 201 bp, Bos taurus
ggcacaaagccttgcagcgattctccaccctctcagaaaacagagagctccattaaacacagaagacaaaacaacccaaaccagcacacacccgctggagcggggccattcagggagtgtgttgccaggggcacacccctctttgaacctcccatccacctgtcttctgggctccccagagagaaggctgctaaccagcat

SEQ ID NO: 1437 - DNA, 201 bp, Bos taurus
tgctggcggggaggccagggtctcagtcccggccctgccacctcttcagcccgtaggggcccttggcattaagcaattaccgtgtaacccatggccggagcgccttgaggactcctccctccgaagctgagtctcccgggggcgccagggtgtccatgagtgcggctggcagcatggcggggccatggctggcagctgggc

SEQ ID NO: 1438 - DNA, 201 bp, Bos taurus
tgcccacctgcagaggttcacgtgcctggttgaacttggcccaaaccccactgaggacccagtgtttgcagtactgctgctgtagggtgttcatggccacgttgggaaggttgactgccttctcaaccaccctgggagtaaggaggatgctcagtgttacacgggaggctcagagagggaaatccacctggtcagacacac

SEQ ID NO: 1439 - DNA, 201 bp, Bos taurus
cagcttcttcatgcgacactcaggcaagagagcagaggcccaggggaggacagctgctgcttgaaggtacctaagttggtagcatctgaccttccatgaaagagaaaggaaaatggccaaagccattccacaaacaagcacagacacacagaggtattcttccaccagccaagacacctgccatcaggggtcaccggcctc

SEQ ID NO: 1440 - DNA, 201 bp, Bos taurus
gtaagaatgggcctgatacaacaggaggcctgtctttataagagagacgtcaagagagctctctctgtctgcaaaatgggatgagaaccctcaccagagctggccatgctggcaccctgatctaggactgccagaaacaagtttcacttgttcaagcctccccgtctatggtattctgccatggtagcctgagctgaataa

SEQ ID NO: 1441 - DNA, 201 bp, Bos taurus
tgccacccaccccatcccagcacccactcacatctctgccccaaagccatgttctcagccaggcccactctgaccaccttaaagaacattgtgggcatgtacacatgcccttggcccactcaggctgtatttttctaaaaagcagctctttccatttcccagtagtctataaaattcactcagttaacttgcttatgggtt

SEQ ID NO: 1442 - DNA, 201 bp, Bos taurus
cagaggagagaagaagtgaggcgcacacagagatgccagcccagaagtgaggggcccgcctcagggtgctgactcctgagcacgaggagcagaggcctcatcaacaggtacaagagctgtggtgtgagtccagggctctgatcccaatttctgggctgtccatggaggcccctcggagaaggcaatggcaccccactccag

SEQ ID NO: 1443 - DNA, 201 bp, Bos taurus
agaagaagtggcctcactatgtgggtgtggtgactggaaaagaaatgggtgtcaaccacctacctccactcactggtggatttttaaaagaaaataatgacaacagctgtcttttatttattaatttatttcgccttaccttgaggcacgcagaatcttagttccccaaccagggatcgaaactgtgctcccttaagtgga

SEQ ID NO: 1444 - DNA, 201 bp, Bos taurus
gtgcatcatctctctggtacattctgattgcctgggcctcttctttgtgatcttctggtcagaaagctgtggttttaattacctgctctgctgtgtactttctctgactgccattgctcctggggccaagtagtaggaatacagagagtaaaaaggcaagggcaatttgctcccactttcttgggttcatcactcacctga

SEQ ID NO: 1445 - DNA, 201 bp, Bos taurus
caggttttctctctatggctgtgggcttacaatttcatgaacttgagtccagaagtaaaataagttccccttttctaaggcctgagtttgggtctttctgatgcatccctggtctaatttctgtggctgggttgggggagggggttgtgtccagtgttttgattggccagacctagatcttgtatccacctccagaaacaa

SEQ ID NO: 1446 - DNA, 201 bp, Bos taurus
agaagatacatattactgtaaaagatggctatctttgtgaagtctaaaatcagtgtaggtgtgctgtgtgggatggccctctgtttgttaccccttcctgtgctaccctgtagagtctccagctccctctgccccgtgctccaggagttcagttctggcaattcttcccttgctctctggcttttgtttggcccatggaag

SEQ ID NO: 1447 - DNA, 201 bp, Bos taurus
agttgactgtatcaatttaaaggagagctcagcaatatgtcttaattaaaactaagcatacaaactctgaggatatacacacagggattaggaaagcttacttagataaaccagaaggagaatggatacactgacttcaaagaaacaactccaaagaagctgtgttatatttgaagacaaaatacccatccagggttcatg

SEQ ID NO: 1448 - DNA, 201 bp, Bos taurus
ttgaattgaagagattgttgtgaggtagggatggtgtgatagggatccaatttcattcttttgcaggtagatatccagttatccctgaaccaattcttgaagagactattctaccttttatgtaacattttatcccataaggatgcccagtatccaaggcatcttatctgtacaactgtgattcccaaaccaagtgaggat

SEQ ID NO: 1449 - DNA, 201 bp, Bos taurus
gttctggagagcaatgacaagtgttagaaaaagcatagaatatggtctaccatttgatgctgtgatagcagggaaatcataaaggccagaatcctgtcctaaatcataaccatccctcttccaggtgagatatctatagaagacacacacaggatccaccctgctgatctcaggtaaactgagttaaagcatgtggggagg

SEQ ID NO: 1450 - DNA, 201 bp, Bos taurus
ggcattagccaggtacaagggaagcagtgctggtctctaagggaacagactgggctcaggaacaaccctgttattttactctgcatcattccagtgtgggactgattcagctggagttctgcactcactagaagcttggtgagtcacctgcctgagtctcattttcatggatctataagatgatagtgacttctaggattt

SEQ ID NO: 1451 - DNA, 201 bp, Bos taurus
acaagtagtggctttaaacaactgaagttaatgaactatccctcacagtgtctttagttcagaaactaatgagtggcttggttacaaagttctggaatagaggctttctagttggctgcagagagatggctcctatggcttcagtcatctgagttttgacgggggctgatggatccatttttcaggtggctcactcacatg

SEQ ID NO: 1452 - DNA, 201 bp, Bos taurus
tgttgtgatttcagtttcaaatctctgttttgcaggtatctaactccaaaatttcctttccttttaagaacaacaatttcttatttaaatacccatttccaatgcattcccaacttcctttacattagtatggcagttgactgtgctgtcttcaagtctccttttgtctgataccaggaaattttaattatttatactcat

SEQ ID NO: 1453 - DNA, 201 bp, Bos taurus
agagttggacacaactgaagcaagttagaatgcacacacaagacgtaaaatgactccatttgaaagaaaatgatttccctctcacaaaagagttaaaaactgatatccctggacaaattgcaactttaatccctgtggttatgcacagacccaggttccattcaatcattaggatgatccctttgcactgtctatatccag

SEQ ID NO: 1454 - DNA, 201 bp, Bos taurus
caacagtatagaagggttccctttttccacaccctctacagcatttatcatctgtagatatttttttttaataatggccatccagactgatgtgaggtgatacttcattgaatttctctaataatcagtggtgttgaccatcttttcatgggccatttggtccattgacagaggatgggtaaagaaggtgtggcatatgca

SEQ ID NO: 1455 - DNA, 201 bp, Bos taurus
atataggccaatagcctgaaagcaaagcttcaatatattgttcatactatttctcccttgtattctgtattcaacttgtgccatttcttcaaggctcttcagtgctgtagaagggcctgtgtagaagagaggaaatttatttcccttttgccctccaatccttttgctataaccttcttctggccctcttttcacaagggt

SEQ ID NO: 1456 - DNA, 201 bp, Bos taurus
acagcggttcctttctgaatgcggctgcctcgctccgatttgcagtatgccctgtgcctccttatccatggctttcagctctcccctaggcagaaggctctagttgggataccttgcaaccaatggtcatctgtttaatagggttgggagttttggcctaaaagtcatgggccgatgtagtcaaacgacaagatcaatggc

SEQ ID NO: 1457 - DNA, 201 bp, Bos taurus
tctaggctacactgcctcattttgaagataatgttagcatagttatgattattaagaataaagaaataactagattttaaggatcatagaaaagaaagtgaattgggaggtcacagtgaaaaataactgtgcttatggatttttctggagtggtcctgacatgaaatttcctagcttacacggtcacctcgcatctgccct

SEQ ID NO: 1458 - DNA, 201 bp, Bos taurus
ttaaaaaatcaagacattggaaagtgcacacgcacaagaaaaggagatgaaaataaacactacatgcttcacacccagagaaaattatgaatcatatctcataccatatgcttcctaaacgttttttacacactgtcatgattatttagtggcacagtctttttaatatagcagtatgtttgaacttatttctatgacaat

SEQ ID NO: 1459 - DNA, 201 bp, Bos taurus
gcccaaagtaggtcaaatacacatgacctgatattcctggggaatatggggccttctgctttgtatatgttttatatatgacaggtccttagcttccatgtcgcctttgtgtcagtctgagttggtgtccttttgaacttatacagataatgttccttacgtcacttctgatgcccttttctgtttttattatattttgtt

SEQ ID NO: 1460 - DNA, 201 bp, Bos taurus
ttcatctcaatttcagagaaatagctggtcagatggggccacccataccatttattggtcatgtcagcctagtttccatcccccacatatgaaaaccagacaaagagaggcctactgataaattaagggggatggtaattgggaactgaaagtattttcatttctcaatttcagaattcaaatttgtgtactctcaaaatg

SEQ ID NO: 1461 - DNA, 201 bp, Bos taurus
agatgttgagatctcaatattgcaagggagtgagggtcagaaagaatagattgtatgcccaatattacacaatgatgccacgatgctgaccatttggatgcgaatccaggattccctcttcagaacatgtggcacctgaggattccaagctccccaaataaacctttcatttagaattttacaaccaggatttcaatatat

SEQ ID NO: 1462 - DNA, 201 bp, Bos taurus
ctgttactgaatgcatgttcctgtgtctgatgcacaatgaggccaaacaataccagaatgttggagtttggagcagagaaagttttactgtaggcccaaaaaaggagaacaggtggctcgtgtcccacaaaacttcaaactcctggaaaggtttcagcaaaccattgttttaaggccaagtgaaggaggggcatggttggt

SEQ ID NO: 1463 - DNA, 201 bp, Bos taurus
ccaacacccatttgtggaacacctactgtgacaaggagagtcactgagaatacagtggtactcactatccatttccaaaaatattcatcctaggaacagagaatacaatttaacctattccctcatctgacttagcatttgagagcaagagtgataccttattcatctttgtgtgcccagcatctatgactaattcagatt

SEQ ID NO: 1464 - DNA, 201 bp, Bos taurus
caaatcaagacttggttccaaaaaagtaagatttgtttcctgatacagctagttcattatttatgcgttgagtctttcctttctctctttaaaatcatgacattctagaactttgtgaaaaagcaaattttgttcctttcaactatgactttgcatgaggaaatcacctcaggaaggttgatgagtctaagctacagagtc

SEQ ID NO: 1465 - DNA, 201 bp, Bos taurus
tgggaacagttggggaactacttggggctggctagaaggtggacacaatgaatgacatgttcccagaatggaggtatacatgcacaactgtcccctgatgatcacactggccctagcccctgaattaattatttgcttgcatgactgtaatgaaaaagatgtgatgcctcatttattaatgtatccattttccagtagttc

SEQ ID NO: 1466 - DNA, 201 bp, Bos taurus
aagcctggtgtctagggcttactcaaaagaaaaaggtttgttcaatttccttccttttcctatctcttttaatctcatttaatgacttgacaaggccactactatcctcagttctaagatcaacaaagctactttaccagctgagccaccagggaagcccttctccaggccagattacaaattttaggcatctaagcttga

SEQ ID NO: 1467 - DNA, 201 bp, Bos taurus
taaggatcctagggctggttttttcaaaacagtttttatgcccttgagtaataacagagatggtactaacctgacttccttcttttgttagactattgcccactacagggtagcaggagcaggatcagaacaaaagaagaaaactggtctgtacttcattcatggagtaattattacccaatactctaagggctgtgttgg

SEQ ID NO: 1468 - DNA, 201 bp, Bos taurus
ttctagactgtgagtcattgtcaactgggagcatccatttcgtttttaataatgtagaagataaagcaaaatgtttgttgaatgagtgaataagtgataaacctttcttatattcatagacttttccccccttcaggttaggcattcagcattgtgagttttatcttgtgaacactactatgaatatgaagctgcagaata

SEQ ID NO: 1469 - DNA, 201 bp, Bos taurus
tcacacaattatgttagttttaggtgtaaaacatagtggttcaatattctgatagattgcacttcataaattattacaaatattggctatattacttattcttacaacatatctgttttgtatatattatttattttatacatagttgtttgtatctcttaatcccataacactatctcaccccctctcagcttcaaatgt

SEQ ID NO: 1470 - DNA, 201 bp, Bos taurus
attgagataaatactgttgaaataaagtgtaaacctatgaaactgatgccaggggttagaagcaccacccagaggatgtgacaaaccaaccaagttgcccgggggctgggtcaaagctagggggcatgggtgacaatacccatgtgacaatggacacatgtgacaatggacacattccaggcagattgtattggagagaga

SEQ ID NO: 1471 - DNA, 201 bp, Bos taurus
cagttctaactgttgggatgtaaatattctacctgatcttcctagattgttttgtgtctgtgtttttgattgttcacattttaggaaacttggccttgagagtaaactctgaatttaggttatatcctcccggactcatatatggggaagtcctttgcatcttgttggtctgaatcgctgttgtaatatatttaattggtg

SEQ ID NO: 1472 - DNA, 201 bp, Bos taurus
tcatttacagaattccatctgtgctgtatattctgcttcactcttaggagatatgcagaatttttcagaatgaacactacttaatgttaggaaattaggagggaaatcatctcattcctttttcctggagcagtagctgaaaatctttgaaaagttgagagattcatgaaactcagtatattgaagcaagatatcaggaat

SEQ ID NO: 1473 - DNA, 201 bp, Bos taurus
caaattgcctttttcttgatacagcattcccttgtatgctttagctattttccagagttttgacaaagttggttctgacagtttctgctttcttctcatttttcctgcaaagggtactagagcttgaagctacctgctctaccattttgccaacatcatacagttactgtttttgaagatcataacctctgctttatgcac

SEQ ID NO: 1474 - DNA, 201 bp, Bos taurus
aggtgtaagcataaaaacaggaattaacatagaatatgctaattaatgtagcaattagttgagcagaagcagtgggaatttgtgggataattagggtaagttggctatagtcagtgttgagggttttgaaaaacaagatggggagtctggttatcatataaagacaataggaatttctttttttgtttataagaattccag

SEQ ID NO: 1475 - DNA, 201 bp, Bos taurus
tttatttctgattgctgaaattctgtctgctttcaaaatttcactcagatactttcatatagtcaaaaaaacttccttagtcacactgtaaaatttgactctgaggagtctcatgacacattacattcttctgcattttatctacatatatgtgtgtcttatcagtcctacctgacaattacgttttgtgaagacataaca

SEQ ID NO: 1476 - DNA, 201 bp, Bos taurus
gacctcctccaatagggctaatgacacaacctgttctactgcacccagatcccctgcccctgggacaggccactgccaacccttacctctgcaagaaacattcaagcattcaaggttaggtctggcacagtctctgtggggtctcctggtgcacacaagattttgtttgagcatctctggagggcatgaggtttgattctt

SEQ ID NO: 1477 - DNA, 201 bp, Bos taurus
tcaaaaccttgcttatgctggcttcaattttttgtacattagttaatgaatcagcatttcaggacatgccagattggcactctgctgtccatcagttgaactggttattttcacaactgttagcacagtactgttttgtgaatgtcattgctgcccacttttatgacttaaaaaaggaagaaaatggaaaaatgaaaatgc

SEQ ID NO: 1478 - DNA, 201 bp, Bos taurus
ttatcatcatggttttcaagatagtaaaatcattaaagactcagcaagagtattgctggaagtaagattgcattggtaggatgaaataaaatagattgtttacaacctcaaatgcaggagaagaatttggatttggagaattaggctatcattgaagattttgaagatcaatatatttattttagcagcagaatgttctaa

SEQ ID NO: 1479 - DNA, 201 bp, Bos taurus
ctttgaaatagtcacaaatggggagaaagattgacacttaaatttactaaaagtattaatctattaaagccattgacagtttatgcccaccagataactttaggaaattttttaggctttttttttagctaataaatagatgtctgtaaaattttacaaataatataggatagaacatgaagatatattatcttataattt

SEQ ID NO: 1480 - DNA, 201 bp, Bos taurus
tgtgctgccacttgaatttcgatcccaactcagcccccagggtggccagggtatatgactcagtgcaaagcaatagccccttggtggtgaccagcctgacggatgagcttaagaagctggccaagcagggctggtactggggacccatcacaagctgggaggtggagggcaagctggtcaacatgcctgatggctccttcc

SEQ ID NO: 1481 - DNA, 201 bp, Bos taurus
tgcataaatatgttaatatcctttggagaataaggcttatgcatatggattgagatccattattcaaaagacaggtataataatgaagtgatgtagaaaggcttagtattagaaaggtcttgaatagagtttctgtgtcctgtctcttatatgttacaaggccctttattcactgtaacaaaatttatgattctttgttgc

SEQ ID NO: 1482 - DNA, 201 bp, Bos taurus
ctttaaaacttgaaacaaatggcttccagagagtctcttgccatcaaatttctgtgtaactgtttcagactcagggaaattccttagccctgttcttctaggtttctataaagtccaaggtcatgtgtctgtatctcatctgaagagtgtacttcctctatgcatctggttaccttaatctcacaatgtcctatgcatgta

SEQ ID NO: 1483 - DNA, 201 bp, Bos taurus
aagtagtagatttcaagaccccacttccaacaatgaacagatcatccaaacagaaagtcagtaagaaaacaccagacctgaactacgttttagaacaaatgggcctaacatatatagagaatatccatccaatgacaaaatacacattttctcaatcatacacagaaggctctttgagaaagattatatattaggccacaa

SEQ ID NO: 1484 - DNA, 201 bp, Bos taurus
ttggtttctgacgggaggaaagtcacatttttttgatatgatggggctggtcatgtggagaaggataagatgggtgtgggcccatgcctgttcttttcttatgtggagggaagatgatttctgttcttgctggatgggatctgcactcaggcctccccactggtttcattgcacatggacatggggtggcagcatgagcag

SEQ ID NO: 1485 - DNA, 201 bp, Bos taurus
cttaagaaaaacacagctctccacgttgaaaccgtgcactcgcttttcctcccaaatggcttccagttttaaccatatggccatggttttctaaattacactttgaatctgcctttgcctcggtggaaggtgctagacaagcccagagccatccctctgctttgatgaccagaacgagatgcctacccaggcctgggaccc

SEQ ID NO: 1486 - DNA, 201 bp, Bos taurus
tgtgtctatatccttcctgtctcagtttacatcactaccccacccccagaaccagatattacaatggagaggacctgctgctccctcccagccaggccccggctatccaactgggtgcataaacccaaaggcaacaattattgcggaggagttatgtgcagaaatcaatcgccttgcccttgatggggaggatcaggctca

SEQ ID NO: 1487 - DNA, 201 bp, Bos taurus
aaaaaggtgggaaatatgtaagtaaatctaaacgaaagctaaattgataaaacaataataataatgtcttgtgagcttagaaacatagtacaactgaaatgatggacatcaacaccacatttataaaggagagctaaaattaaaatattcttgggttttgtattgtttaggaaaatgacaataatattaattaaattttga

SEQ ID NO: 1488 - DNA, 201 bp, Bos taurus
agaggactgactcataggtggccacagggaactgctgcctgctgtcttaagggagtataaagccatgggtaaacccactcttgttctcaccaagctgccaaaagttagcttcttgtacccagaaaagaagacaagatctgccattttgttcagttcagtttagtcgcttagtcgtgtctgactctttcgactccatggacc

SEQ ID NO: 1489 - DNA, 201 bp, Bos taurus
ttaatgtcactactaaagtttcgggcaatcttgataattccagttaacaaatatttattgtgcacctgccgtatatttgggtacagcatgatgaacaagagaaagaaggtgccttcaaagactttagtgggaaagatgaaaaatacaaaacttatgtaaacacaggatctataatgcaagggcatatgatatgtaacagct

SEQ ID NO: 1490 - DNA, 201 bp, Bos taurus
ctgattgtgagcaaactgtcagcaaattaactgatcagcaatttcccaaacatccacattttccattgacatttccggtcacacatatgttgatacacatcgcttcaaatctaggatctttttcttggtgccaacaactgggagaaaggagcataatatctttcacttctcaggcaaagagtgattgcctttcatttatcc

SEQ ID NO: 1491 - DNA, 201 bp, Bos taurus
ccaggagaaaggagcagtgaccccacatgagactgacccagacttgcccatgagagtccaggagtcttcgctggaggcgtgggtcagtggtggcctacagcggggtagggcacactgcgtgcagcagtgcatgaatgggaccttttgaaggaggtccccattatctccattacctccaccatagtttggcctcaggtcaaa

SEQ ID NO: 1492 - DNA, 201 bp, Bos taurus
aataatagaacccaccccatggaatgagagttaattgaaagtagagtttactcaacaacgaatattgtaattacattagagaaaaatctaaaacaggcataatggtgttaactgaatctccaatctctcttcagcaaggaagtcacataactcttgacaaacccctgtcttcttagttctttgtggcctctgatttttatt

SEQ ID NO: 1493 - DNA, 201 bp, Bos taurus
taaaaagaattattatttccaaattctgagatgtttgaagtatctataagtaaaacatctaatttttaaaaatttcatcaagatttattatgtgtataaacatactggcagaaatagtgctaaaggaaatacagtttcaaaaagagtgaataatagtccatatttcttaagcattttttccattggatattagccataaat

SEQ ID NO: 1494 - DNA, 201 bp, Bos taurus
atgtgttggaaatattacacgtgggagctggtgaacacagcaagaaagcagcatctgtctcacacactcaagctgtgtgttctttcacctccaatctttggatgttattgtcaactcccagctcccaagactcctcctctaagtagtatcacacctgctgcaaggcttagggactctctgtaaccagcttgtagcagtact

SEQ ID NO: 1495 - DNA, 201 bp, Bos taurus
ctcattctagttgagatttacaactttagcaaatttttacttttccattggagaaaataacttttattccaactgcaaatctctgttggttttagagttataacagctccacccttactacacaaacctacaaagtaactcttctacaacccacaaaataggcatgatatgagctccccctactggtacaagactgttccc

SEQ ID NO: 1496 - DNA, 201 bp, Bos taurus
agcttcactttttgtggcgtatgaagtgatagaattgatttatgaagtgttctatagccttatcatctcaattgtataatatttttaaatattcattattattaaacagtatgtaaaactccattgttgtgaacgttacttgtttcaaatactttcagaaacccaaacatagtgttaaacatcatttataccgtgacattc

SEQ ID NO: 1497 - DNA, 201 bp, Bos taurus
gaaatatatgctataagtctgacctcagtgatacatatctgtaaaatccatgctcctaaaatattgtttttaaatttctaggacttaaaggatatgtatgcagatgaaagaaactttccattttgcttgcaattcattaacactactcacagtaagtcagtactagtataaagactagagatgtcttcaagaaaattagtg

SEQ ID NO: 1498 - DNA, 201 bp, Bos taurus
tcttttgggacaagagaggaattagacatgcatagaaaggctccttacggatcaaaaataaggggacaatgccaggccataataagcgttgttcctcccagaagccttcagttcaagatccatcttggttgaggggtgagcatgcacccaggcaaggtcctagggtagatcaggcatggaaaaagacaccaaatatctggc

SEQ ID NO: 1499 - DNA, 201 bp, Bos taurus
ctattgtcttcttaaatgaaaaaaaaaatgtagataaaaataaattttaaaacatactcaccattcagttttgagataataagagtataatagaagtgagtaagagatagaagtgagtaagaaagagtgttcctaaaggatttgtatagcttaatgaaaatttaaaaatttagcagaataagacattcattgactacttgt

SEQ ID NO: 1500 - DNA, 201 bp, Bos taurus
atgtggttgcaagagtttgacatgacttagtgactaaactaccaccactacacattaaactgactcatttttatatggtaattatttctcaataaagctgggagaaaactcctcctagttactgtgtggcaacaattgagatttcactgccttgatcagtagagtaaacctcttttctcaggaaaggtcagtggcattgaa

SEQ ID NO: 1501 - DNA, 201 bp, Bos taurus
caatagaaaaggtctggcctctacgacctgaggccctcagtccaatagctataagaaactaacccagtccaatctaaatgtgcttgaagagttccaaatgtgaaggccatcatcccagcacctgattgcagccttgtgagacctgagcagaggactcagtcaagccacgtcgtaaatcctaactgacagaaattgtgaaat

SEQ ID NO: 1502 - DNA, 201 bp, Bos taurus
gaatacagaagcctggcaggttacagtccatagggtcacaagagcccaacatgactgagggagtaaatatgggggaaactggattaagcacggaaattgagtccaggttctttctgtactatctttacaatttcctgtcaatctataatattttaaactaaaaacaaactaaaaacaaaaagctttcctttttccattgta

SEQ ID NO: 1503 - DNA, 201 bp, Bos taurus
caacccagcctctggcccttgcatcagctatagactcttgtcactgactatttgccaccactgtcatcacacttctgctgctgccatccaccctggtcccgtgctccacacttttatttgggtactaagctttttttttttttttgagaaggaaatggcaacccactccagtgttcttgcctggagaatccgagggacggg

SEQ ID NO: 1504 - DNA, 201 bp, Bos taurus
gccaggcaggagccagagtcagcctggggggtgatggagccgaggccatcactggtctgacggtggaccagtatgacatgttgtataaggtgactgtgccacctgccaccttctcttcaactggcctcccatctgtagtgaacatgagccccttgccacccacaaaaaaaagaaaaagaaaaaatccaaaagaatctacag

SEQ ID NO: 1505 - DNA, 201 bp, Bos taurus
ggctaagtaaggatctccaaaaacctaatcctccatgaaaacaatgagaacactggcaaaaaaaaaaattgtaaaactccattttttcacaattctggaaatcaacaataggattaccacactatgagaatgattaagtcacaaaaaatggttgtgtcacagtaaaaacagagaacttagtggcattttcattttccctat

SEQ ID NO: 1506 - DNA, 201 bp, Bos taurus
cagttctgcctgagaatcaggggtcctttcctctaaaatgccatcttctagggcatgttcagaacctttagggcttttttcagtgtggcctttgagactccttgagcctcttgcgggcaaggggagcaaacttgtagaccccaggtttttctgttgagagctgtggtgaactggggccgctgtggtcttcagcagaggggg

SEQ ID NO: 1507 - DNA, 201 bp, Bos taurus
ctttgagttattaggggacttttcacatataaatattgcagtgcatgccaggggatgtggtgtaaaaatgaattatgaagaagctaaagtagagcgaatccacagagccaaaatttggctcttttagaagacttttttaaaaaatcgacaaaacttgggaagctggtaaagaaatcaaatgagaaagcataaatagacagt

SEQ ID NO: 1508 - DNA, 201 bp, Bos taurus
tacatcaacatgaatcagccatgggtatacatatatcccctctctcttgaaacttcttcccacatcccaccccatcccatccctctaggttgtcatagagtactggatttgcgttccctacctcttaacagcacattcccattgggtatctatttaacatatggtaatgtatatgttaaaagatgcttactccttggaagg

SEQ ID NO: 1509 - DNA, 201 bp, Bos taurus
ctttgcctctcgagttctgtgtgaagagttaggcctggtgtagggggctggatttttttctagactacttaactgcccggcatgattgtgcatttgggcagaggcccattggacaggacactctagatataagtatacattacatacaatacgtacatcgaatgcatacactacccttggaatccatttcttaaactgtca

SEQ ID NO: 1510 - DNA, 201 bp, Bos taurus
atagttttgagggttaaatgaattaatacaaataagtgcttcaaacaaacagcagagactcattgaatgttgaaaactaagcaaaaatccattatgtttatatacattctgaataagtaaatctactcccataccattcaggaaagagtataaaattcatgtatgtgtatgtgtgtatgtgaaagttttgtttttctttct

SEQ ID NO: 1511 - DNA, 201 bp, Bos taurus
gcatctttcagtctatgtctaggatgagagttccatgaacagggggactttgttccacttaccgttgcaactctagggcctatctgcctgacacatagaaagcattcaagtaaatgataattgtttgagactctatgatctttacagatgtagagtattggccaaactgcaacatcctttataaacaactaagaagattct

SEQ ID NO: 1512 - DNA, 201 bp, Bos taurus
gggaagcagcctctagccttggaatgtcctgcttgatgagtgtttttgtttatttggtcccttgagccacaacagtctctgctaacaaagtaatttatgactgggggccccttagccaggcagtatcagctcaatctctgaaaaggctagaggttaaggtcagtgatggagccaatcaaccatgtttatgtgactgattcc

SEQ ID NO: 1513 - DNA, 201 bp, Bos taurus
ttcttacaaggcagaggactctgggccatgttcaaacaaggaggagtgtttcagtaggaaaagaaagtgcttttttttttttttcttttctttttgcatcatgccaagggcccagggttcaaagttctttagcacacacacccagcttccatatctcaggtcacagcatccatctcttcccagccagggctctgacttagc

SEQ ID NO: 1514 - DNA, 201 bp, Bos taurus
aaatatccctcaagtgtagtgcagaaatgctgtctaatgttctcaagagaaagaaagccatgatatatcttacaagagacagtatggcttctagataagccttatccaggcacaagttatagtgctattggccatgagttcactgttgatgaacccacaacgtatatcacatagaatgtcttcaaacaggaatacacatac

SEQ ID NO: 1515 - DNA, 201 bp, Bos taurus
gatgcatctggttcccagcagggcacagagctaatgcagctgaaaaagcatacagctgtgactccaggcatcttgtgaatgaccaggcctggcttgggctccctgcctaagttcaaagcatgggttttcatctgggagtcaggttgcggtgggaggtgggaggaaataagtgaatggctcggaggatctcttcaaaccaca

SEQ ID NO: 1516 - DNA, 201 bp, Bos taurus
ctcataaagatattaaaaggtaatctcctttctgatatggaattctagactcctgtattagagggcacaataaagatcagatacctctagaggctaaaacctggaggccataggctcttgactaaggccagtaaaaaattaacacccaagtaaggatcagaccccaagactgccgatgaacatgccctgtggcgtttcctc

SEQ ID NO: 1517 - DNA, 201 bp, Bos taurus
tgcatagttgtgttattctgagctaaatgtaagaaaagtcatatggtgctgttgagctagcatccagatattccaggggtacagaattcaggtgggcccacgttggtttggcaatgtttggtagtagttctccactccagctagaatgttcatggggatgattctgggacttcctggacagtgtggcagcaatccaggggt

SEQ ID NO: 1518 - DNA, 201 bp, Bos taurus
tgccctgcttaggagactagaggaggccacacagccctacagccccttgattcccctcataattgcccagacacatgggaaggaagggctcagacagcccatgtggcccctgatctcctattcacaccaaagtcaaatatcctctccatgcttcacccacaacccagaggaccagctgtcctccagattcatggtcttcaa

SEQ ID NO: 1519 - DNA, 201 bp, Bos taurus
aagactttctccatcccaccaagccccctatatttcctccaacagggccaggacaaaaggaaagagatctggcccaaggtctgcaaactggctggtggccggtcaccaaggcacacgtctcccatgtccagtccagaacgcccatctttactgccattccctgtccccccaggcccaacccactggctgtccaactggctt

SEQ ID NO: 1520 - DNA, 201 bp, Bos taurus
catggatgcctgctgcagtctaaatccggccatcgatattgggcaggtaggtgctgccccacctggatggatgcctctttttgagagtcattgtggggtcggtaaaggccttctgaaaagcacataatatcagagcttggcattttccctcttcagattgaaggtgcgtttattcagggaatgggcctttataccactgaa

SEQ ID NO: 1521 - DNA, 201 bp, Bos taurus
agagataattaggagtaaatgaggtcatcagggagtggcctaattcaatttagctggtgtctttctaaaaagagactaggaaacacacccagaggaatgatgaggttaagaaaggagatggccatctacaagcctcaagagtaaacaactctgcccacaccttgacctcccaacttctagtctctagaactttctagaaaa

SEQ ID NO: 1522 - DNA, 201 bp, Bos taurus
atcagtgaaaatgtctttttacatttaagttttaagatcagctttattaaaatatcacttacagtaaaattgaccctattttaaatgtatcattctgtgcattttgacagatatgtacggttatgtgaccactaccacagtcatgatacagaatacttctagcataccaaaaagctccctcatgatcctttgtactcagtg

SEQ ID NO: 1523 - DNA, 201 bp, Bos taurus
caggatgcagtgcatgtccaaaatataatccaggagagccattgcataagttctcaggggagttttccattacctacaggccctttggaaatgtggcaggataggttttatacagatgcctcccctgcaagtttattaacatgttcttgttatgatctgtatgttttcatactgggttgaggcattcccaaggagaagggc

SEQ ID NO: 1524 - DNA, 201 bp, Bos taurus
taggtgaccctctgttctaacacattgggtcctctggctggtgtctcaggaggaatggacactgccagctgggataagggttggggggccaggacttctcccctctgtgcagtcacacaacaatgtggggtgacaggaggaatgtgagaattacaatgtgaagtctctccatcgaaataatctctaaatatgtcttcagta

SEQ ID NO: 1525 - DNA, 201 bp, Bos taurus
ttgtttccttctggccacttattctagccattccacatataaaagcaagtccaagacattttctcttgagcctgttaactaccctctctctcttcccattataaatggccttgccacagaaggcaatccagtttggggtaggagttcttagttaaaatagaaacttctctcattggattacatcctgagttcttgtgttta

SEQ ID NO: 1526 - DNA, 201 bp, Bos taurus
ctacagttcagattcttggagcagaaaaggcactcttcagagccctcaagtctagacgagatacccctaagtatggtctcatttatcatgcttcacttgtcggccagacgagccccaaacacaaaggaaaggtgagttacaattttcctggcgcaggcctttttttcctccaaatgattttgatcttattctatagtggtc

SEQ ID NO: 1527 - DNA, 201 bp, Bos taurus
gatgacaatatatagtcttgacgtactccttttcctctttggaaccagtctgttgttccatgtccaattctaactgttacttcctaacctgcatataggtttctcaagaggtaggacagataactctaaattatgtataacagcttttctgtagtaaatcacttttttatgctagaaaatttcaagcaccttcttataatc

SEQ ID NO: 1528 - DNA, 201 bp, Bos taurus
agtttttatagctgttctacttaagatctctctataaactccagtgtcttcttgagcctttctcttcacattaacttcattgttgtgtgatgtgaacataatattacagaatctaagtgtggagatcttttgatgattatagggaaagggttgttgtgtgaggaatcaaccagagagaatggaaacaaattgatagttgct

SEQ ID NO: 1529 - DNA, 201 bp, Bos taurus
gagtaaagatatccttaatctagaataagaatttgtatacatcttatacttccaaagcagcaatccacaaaatcacctctgtgatccttatatgtagttacgagatacataaggaatttaactatataattagatgccatgtagttaaactttaaacctgattttattatataaaattttatagaaatggtcaagcaaata

SEQ ID NO: 1530 - DNA, 201 bp, Bos taurus
gttgctagcccagaaccctttgtcatactgttccaccgcaaagtcctcaccatcaagaccacatccttgacattcactcctgcgttgccttgtgacatcattcacaaggtttcaaacaagggaatgtgatccatggcaatctgtgaactgtaagggggaaggtaagctattgctacctcaattctcacgtgctggtgactt

SEQ ID NO: 1531 - DNA, 201 bp, Bos taurus
attcagattgaaggctgggctggaaaacaaaatattgctttactgtttatttttatcacaccggtttttattaaccagatctcctgtgatgagggccaggcatctcggcagcatgattctgctgatggagaacatgtgtagttaatctccacatgctctgatccataggccaggcttgggaaagccagtgtgccgacaagt

SEQ ID NO: 1532 - DNA, 201 bp, Bos taurus
ctcacattcttttcctaattgattttttctcatgtttgtgcttgatttatctcagtaacgtggaacactgttctgagttcagggccagcttataagctttgtagtcagtgttaccctttctgtcttgaaaaagtgaaagtgaaagtcgttcaattgtgtctgactctgcgatcgcatgaactatacagtctatggaattct

SEQ ID NO: 1533 - DNA, 201 bp, Bos taurus
caggtgaaagaagtaaggaaactctctgggcctcttttaataagggcactagtcctatttaccagggctccaccctcatgatataagcacacttttaaataccatcatattgggccattatgattaacatgaactttggacacaaacattccgtctatggcaatcatgactaaagagcctcttgatgaaagtgaaagagga

SEQ ID NO: 1534 - DNA, 201 bp, Bos taurus
caaactaattttttaagttctggctaattttcaaattagtgggccaaagataacatgtaaaactaaatattttaaggcaatgaatctaggcatcaattttcagataaaattcttctggcctaatttggcaaaaaaaaaagaattgtatgcttttagcttattacattcctaaccaatacgaagagaagtgaaaagcaaagg

SEQ ID NO: 1535 - DNA, 201 bp, Bos taurus
ccagggctccttggacttggggtacttacataaccaccatttagtaagggccttctttacatcagacttccctgatacaaacagagacctgcaatgcgagagacctgtgtttgatccctgggccaggaagatcccttggagaagggaatggcaacccactctagtattcttgcctggagaattccatggacagaggagcct

SEQ ID NO: 1536 - DNA, 201 bp, Bos taurus
tttatttctctgatgatatccacacacttgatcttcttcacattttcttctgcacgcagtgagggcctgatcaatgaggaatgactatctgttgattacctcacagctttcacccactgtattgcagttcatgcatcctgctgtcctgcttcctttttaaatagcaccattatcctgatggctcctgcacagtgggtggcc

SEQ ID NO: 1537 - DNA, 201 bp, Bos taurus
acaactgaaagcatttttaacaattctgaataaaacatgccctcacagctgcggcctcaagccccaactcctcacttctgtacctctacgtttgtgccaaacacattttgccatccaaagagtggcccagagccactcttattacagcagcattacctgggaacttgttagaaatgcagactatccaatggcaccctagac

SEQ ID NO: 1538 - DNA, 201 bp, Bos taurus
ataaaacacatgtgtaagtgtgggccaaattcagacccacattccaccttagtataagtcaaggggaaactcaagttccgagaagataagaaacatgcataggccgagactagcaggttcggtggctagggttcaaattgtgctcggttggaccccaaagctgagcacgtgggagcctgggaaaggacaaggcaatcattc

SEQ ID NO: 1539 - DNA, 201 bp, Bos taurus
agtgtttaagaaagagcaagaaggccagtgttgctggagggtgaggagatggtgtaagatgaagctggagaggtttctagggccagatgaggaagtgcctcacaggcacaattaagaattttgaactggattctagatgtgatgtaaagccaatggaagggttttgagcagggaactaaaacgatcagatctatattctga

SEQ ID NO: 1540 - DNA, 201 bp, Bos taurus
tttaatgtgtatgtataaattttgtaaggagaaaaatgtgaaaaagacaaactaaacaggttccccatggcatgagtctatagccctatttcttcccaaaatgtggctttaacatagttacatcagaatcactttaactggtagctgaaaaagtttaatcctgtcccatcccttccaaaactactaacctagaatctcaaa

SEQ ID NO: 1541 - DNA, 201 bp, Bos taurus
tttgaccttggcttcttggtcaaatgatttttccattctaattgctcttgtgaatttgctacattgtcctacttttcacctgctttcatcttccaaggccccttttctgtgatcttttccgccccccctgccttctccaccagaatctcagccctgtagagacagatgccttccaaatcgaatatttccacccttttgctt

SEQ ID NO: 1542 - DNA, 201 bp, Bos taurus
gcctcctgccccattttccttttgtgaatgaatcagagaaggagttcagaactgtggctgcagaagactgaggcaaatttgccttcactgcagcccagggtgggccatcctggcttccatccaggctttcatcttggcttctgagttggcttgactcttctttttttaataacagaaaaataaaaataaaacatttttatt

SEQ ID NO: 1543 - DNA, 201 bp, Bos taurus
ctccttttgctcaccaccattgctatcactcagacaccaactcactcatccattttgccgagttcaaatttcttgagagagcaagagaaagctctgattgtttctccttgagtcaggtgtgtccatttgggcccaattagtcgaggctgatgtggtaaggacatttgaacaaacgtggccacctaggcccatgtcttaggg

SEQ ID NO: 1544 - DNA, 201 bp, Bos taurus
cgtctggagatgtttctctgctctccctgcccccaatttccctgagtcttgaagaacttgctgttttctctctaggcacttactactcgaagtgtggtccatggaccagcagcatcagtctcacctggcagcttgttaaaaatccaattctcgggcatcagaacttgagttttccttaagtaaagtgatgttcttaaaaat

SEQ ID NO: 1545 - DNA, 201 bp, Bos taurus
acaaacccatgtctggtgcccaggacacctggagatcctaaggttaatgggtgagtcactcggcttccctcccaggcctgcctgcctctctatacctccttgttggcatggatgccacttctcggaacagagagaagcccttccccccacaaggctaaaggacgaaaaagaagaaaccacgtgcggccaacttgtaccact

SEQ ID NO: 1546 - DNA, 201 bp, Bos taurus
aacagtgggcccccatctcttgcattagagatgggagcagacactccagatgtcctgcaccatagcccccacctacatttatgcccattcaagcttactcccatggccacctctctctgcttttcagccttagggccctttctgaagctgtaggagcttcgcacaaggaaagctcaaacagaggagttaatgctcccctcc

SEQ ID NO: 1547 - DNA, 201 bp, Bos taurus
gattgaagatactccccgtctatgcccatgcaccactctatgcatgccctgcagaaagtgaaggctccatacatacctaaatctgctgagttttagcattggtgtaccctcgacacaaagatggctgccaactaaaaaaacctctaagaagggctgaaccactgggccacactgtgttgggggaagcagttgagaaggaaa

SEQ ID NO: 1548 - DNA, 201 bp, Bos taurus
gagaacacaccccaactgcattgtaggaaaggagttagtcaactggttaatccgaaatggacacattgctacaaggtaatgggtcttaagaaaaatttatgaatttatttttaatgacatgtcataaaggaaacagcttgctttgtgagtaggatgctgtttgatttctgcatttggtgtttggggtgttagttactcaac

SEQ ID NO: 1549 - DNA, 201 bp, Bos taurus
ttgtgatgaaaacccaaaaggtacacatcagacttctttgtataccaacaatgtcatatgttgcttgaaccaggttggaattgtcagggccactgagaaagtttcagctccattgtttataaatcaaacaaacaatatagatagattaatataacaaaataactaaaccaaaaataggtgctaaaaacagggcctgacact

SEQ ID NO: 1550 - DNA, 201 bp, Bos taurus
ctacagtgagtggagctggagatggtggaggagatgaaggaggaggtggtgatggaggaggtggaggaggtgatggaggaggaggtggaggaggtggaggtggcccctatgagaagaatgataagaaccaagacaaggtatgaatgaaccagcttttgcatactcatgaaatgttattctgatttctttccatatttttgc

SEQ ID NO: 1551 - DNA, 201 bp, Bos taurus
atgaagacagttaccagggttgccgtgctcctgccagggaagccctgagttacccacctgcccccaagaaggcatgatggccactgtgtgctgctggccgcgtctgcagctgcttctcccaagtggttttgccaaaagatttttatataatacctattcatctcagtgagtgttcattgggcacctgctgttggcataata

SEQ ID NO: 1552 - DNA, 201 bp, Bos taurus
ctgagctgttcttgacaatacttgccttgtgctccttctccagcctggcatgagaaacacttccttctgtagagcagacagatgcaggaagtgcgagtcaattaactattgtttgctctttctgcatggtaaggaaaagaaacttctttttccttcctttcacttcccccaccccttaatttttacttagcctggtttgcc

SEQ ID NO: 1553 - DNA, 201 bp, Bos taurus
atgaattgataaagttggtgccttcgaagtggaacaggcctacagaggctctaacagcctcctgcaatgtcggcagtgttccacaactgcactgggacagtagtcacacgcggccactaagaactcacaatgcagttaatgccactaagaaacaatttttaattttagctgacttaaatagcgacatgaggctagtggcta

SEQ ID NO: 1554 - DNA, 201 bp, Bos taurus
gaattgtgacattatcaaaatgtaactaatttctgttgtttctttcccataagtctgtaagctccataggaaaggagactctattttctcccctagtttatctctggtggctaacataataacttatatatggtaggtgctatatacacattcattgaatgtattaattgatgcttaagaaatatttattaattaattttg

SEQ ID NO: 1555 - DNA, 201 bp, Bos taurus
cgaacttaaaaaataaatgagtagccctttagagtttctgtaagaaaatgcagcaagacatttatattctctgcattttactgaacaaaatacatatgcaggtttatttatggcctattttgcttttcagtacattttgatacctaggattctgattgaatgaactaaggaatggacagagacctacaagtttaatctcac

SEQ ID NO: 1556 - DNA, 201 bp, Bos taurus
gcccgactgccaaaaaaaaaaaaaaaagaaatcactctaccagacctctgaagacattcatgtttgaaatccttgaggcatatgacaggatgatgtaaaataagtaaggattttatccactaaatttgttctggcaaatgtgctctacattggatggtttccatttttctagctacaaaaattgatcaacattttataagg

SEQ ID NO: 1557 - DNA, 201 bp, Bos taurus
tttacctgcatcagccttgactgaatacttttattgtgggttgggtggggagatgccctacacatttataagtaacgctaagtagaatcttgcaaaacttcaagagtgtagtctgaattgtgggatttacgtatgaggtactggacagattgttcactgctatccattttcaaatagacaaatttcaaaagtactaaaatg

SEQ ID NO: 1558 - DNA, 201 bp, Bos taurus
tgtcttcaagtttccaagtcttatgaacaacatagagtcctgccatgtcagggagtgaacatatctgagagatgagcatgaatttatttgggatattagacaggaaaggaggcctggcctaaagagagcagcaaatggataagagttggcaagaaaaggtaattatagcctacaaaaaccaccaaaaaaccctttttttta

SEQ ID NO: 1559 - DNA, 201 bp, Bos taurus
tcaccttctattcagctcatcaatcatacagagaaacagtgcctcaaataatgggactttaacagatttagagttggtgttctaaagaaaataggcaaggaagaataaaatatttgataaagtggcttaataaatactttaaagtctatactaaagttgtttttcaaataatggttattcagtcttaagtgttacatacat

SEQ ID NO: 1560 - DNA, 201 bp, Bos taurus
caaagtattcagcatacttaaagaaactgttctgcctttcttatttggtcccttttgtttaattttctggggaatgtctgcactttgagtgcattagctacaggccagtgcttgcctagtgcattgggaacaaaggtaggatgcatgaaaagctagaagaagaaatgggatggggggcaactgaatattctgaaagcttca

SEQ ID NO: 1561 - DNA, 201 bp, Bos taurus
tttgcaaccattcatgagcatgaaaaccttcaccccataaagaagagaaaggaaactgaattaagggttagtaatagagaactatagaggccaaagtagtgttgtatctgttacccatgggactccttgcctgcaattaaatgcttatagtagaagaattagggccaaaaaaaatgatggaacttcatgagaaatgaaatt

SEQ ID NO: 1562 - DNA, 201 bp, Bos taurus
ttaatgtgatttttaaataattatttttgtagcctataattcactctgtactcattcggttttttataattatatcaaaaacacagtgtctggccctgggggcaaaagaatactgtagttttagagatagcaattgagaggctagaaagaaagaaggaaggacatggcttgaacagtgatgtctctttgggggccacttga

SEQ ID NO: 1563 - DNA, 201 bp, Bos taurus
atttccttgaaataagttagtgacagatcacctggcaaatgctaatggtatttgctactaggagagtcattatctatggaccactgtcaccggatatctacggtgcttgtggaaaacaaacatacaatctatggatttatgtggcatggccctagggtaaaatgtaaattttttaaattatccaaatagttccttttgggc

SEQ ID NO: 1564 - DNA, 201 bp, Bos taurus
agaagattcagatcgtatatccagggtggccttgcaggaaaaacgttacatctccctgaagaggggctaagatttcctgtggcaggttttaccatggtcccggggcctgaaatgtcaatcagcagcatgttgtctttcacccctccccattaaaactggtgtaccagaacactaacagtctcctaactaagggaattgtag

SEQ ID NO: 1565 - DNA, 201 bp, Bos taurus
ttttcccagcaccagttattgaagagactattttatccattgtagatttttgcctcctttgttgtagataaattgaccacaaaggcagggtgtttctttttttttgtctgacttctctattcttctccattgtcttatgctggtacatactgttttaattactgtggctttgtagtatggttttaggtcagagaggttata

SEQ ID NO: 1566 - DNA, 201 bp, Bos taurus
ggatggcccttcagagttgtcccaagtcaaagataggggatggtggctgtgacccctgcataaaccagtcattctgtgttgagtggccttaggaagggggcaaaatcttgagcaaggaagtttatttttagctgagagctatgcctgtacctgttcccaggtgtagatcctaaaatgccagtactcagcagctagggtagt

SEQ ID NO: 1567 - DNA, 201 bp, Bos taurus
tttgttttgttttttcgtgtattagtgtccatttctcttaaatagcagcatcttgacttcctttgggtaagttttgtacagtctcagtttttgtagtgggtactgagtcctggcctggtacatcatatctttccacctaccagccacagtagttggtccaggggtaagcacatggttatagcttgacaaggagggacagtt

SEQ ID NO: 1568 - DNA, 201 bp, Bos taurus
cttggagacaaaataatacctgtgagtgtctcggcccatcagggatgcagagagttccttttaaagttcacttttggaggttgtttattccacagcaattcaagcctgggccaaacagattatttttctggcttaaaatacattgtggaccacaagggaaagaacatgaatagtttgcaaacttccagcctttaaacaaaa

SEQ ID NO: 1569 - DNA, 201 bp, Bos taurus
tgcatgggtcaaaagccttttctgaatttagcattttcactcactggctgttccctcactgacatgaaaatatttatctagttcactttggaagattaccgtaaaggtcaagtctataaaacatcaaagtactagtatttgcattcattttgcacagtctatgacaatacaaagtacatgtttatcaaacaatccaaagcg

SEQ ID NO: 1570 - DNA, 201 bp, Bos taurus
tcttacaagcagccagacgaccagaaaccaacagaaccaaaggtctgttggaattttctcttcttagattggagtttcttccctcaagaactttcagtcatggtgtaggtatggagacatttctctgctctgtgagaaagaacaatgtgggcatgacgataaatttgttcacttatctgacaaatgtttatcaggtgcctg

SEQ ID NO: 1571 - DNA, 201 bp, Bos taurus
caaagagaaaattgttttttcctttatttttattgtatgtacatgagatgataggtggtaactaaatctactatggtgatcatttcgtaatgtgtgtgtgtgcgttcagttgcttcagttcagttcagtcgtgcagtcgtgtccgactctttgcgaccccatgaactgtagcacgccaggcctccctgtctatcaccaact

SEQ ID NO: 1572 - DNA, 201 bp, Bos taurus
agttaccataatttatctgaaatgcgatttgatttctcataaatcttatttacaagctttttaggagatggctgctttgtgaaacatgagacatctgactagactttactcttctccaagaaactgactccaaagtttaaaaacaaaagtaagaacaaccttggtcaaatctgaggggttaaaagctcatcctgctcaatt

SEQ ID NO: 1573 - DNA, 201 bp, Bos taurus
ctcagacatatagagaacaaactagtggttactagtgcaggaagagaagggaggagaggcaaaatagggatatgggagtaagagacacagctgctacctataaaataatcaacaaggacatattgtatagcacaaggaaatatacccattattttgtaataacttgaaatgaattacaatctataaaaatattgaatcact

SEQ ID NO: 1574 - DNA, 201 bp, Bos taurus
ggaattccatcacctccactagctttgttcatagtgatgcttaccaccagggaaaaaatcactggccattagtgatttagttccccctacaacccttttcttcttcctggaggtataggggtaggaaggaaagttccaaccctttaattttgagttttctggcgaccagaatgtatctaagggttcccagctactgatacc

SEQ ID NO: 1575 - DNA, 201 bp, Bos taurus
ttgttactgatggcctgggaacttggccggctgtatctcccactcctttccgactgagaaactcccctcaagccaagagagtttgctttcagaaacatgagctgcctcccctgtggtcatgctcacaccctcacccattgtcatttcccctcatgtatatgtccctgttctctgctggtaattttaatcgaattgcatata

SEQ ID NO: 1576 - DNA, 201 bp, Bos taurus
tatacaatattaccctcagccatttctttaaatatagaataatctagaaagaaatacacccatcccttgatgtctggaggggtttggttccacatcctcctccataccctgccacccacctaccaactccccactgacaccaaagttcagatgttcaggtcccttatataaagttgttcagtacagagggccatagatact

SEQ ID NO: 1577 - DNA, 201 bp, Bos taurus
tcaaatattaggtgtgaccagatccttatcctggacaatgttgtgatatggagatttaattttaccctgcagtttgatggaactttcatggccagagtcaatttcaagtaaaattatctgtcccagcttaatctaagtgaaaggaaacattttagagatttttgtaatgagcactaccttccagacagggagttggcccac

SEQ ID NO: 1578 - DNA, 201 bp, Bos taurus
caatgcatatttccaacttgaaatttttttcacatttatgaacacttttagactacactggtaaaaagtagctataagctccacttccccagtggccacatgaagagttctgaggacccattccccagagaaacaatcataactgatggaaaatattttctaaaaatatttacatctcaagaaattgccctaaggccatat

SEQ ID NO: 1579 - DNA, 201 bp, Bos taurus
acactaaaacttgtatgcaaatatttatagcagaattattcatagtcatcaaaaagtagaaatgatccaagtgcccaacagttgatgaatggttaaatactatatagtatattgatacagtagaatcttcagttcagttcaatcagttcaatcactcagtcgtgtccgactctttgcgaccccatgaatcgcagcatgcca

SEQ ID NO: 1580 - DNA, 201 bp, Bos taurus
aaacctgggatgaaggtgaggaaatagtgagactgaataaaacctttggcttttttatcacagaagcctggtgtcaagcccacatccggccatggatcatctctccaagcctagacttgttctaagcttcctgtgttagaaatgcctactcacatatttgctggtgaagccgaccttggcagctggatcacagtcatgatt

SEQ ID NO: 1581 - DNA, 201 bp, Bos taurus
caagcttccacacgtttccttaatccccacatcgggcactgtatcttcggctcgaaaatttccctttagtttacaaatagtccatccaatgcttgtccatgactttttagaaagaactctcctctccccactcgcgctcgcggttaatttcacccacagctacacttcctttcctttgcaacgcaacgctctcctaagccc

SEQ ID NO: 1582 - DNA, 201 bp, Bos taurus
aaaactgtagctttgattagaaggactttttctggaacctgaagagctttaaaaactcctgctgcccaccctgggtcccaggccctgcccatggaatcaacgcaggcacgaggcatcactagtgattaaagatccctcgatgatttcatgtgtggccaagtttgagcaccatctcctggtgtctttctccccctctttagc

SEQ ID NO: 1583 - DNA, 201 bp, Bos taurus
cagctgtatggcagcaagtaggcatctcactcgccgctgcctgtgagctgctggatgaaggaaccatttttatgaaggacggcctgggtgctctaaaacccacctctggtttcaaccagatgtggctgcacctgtggtctggttctccccttctgcccccaccactgtggccactgtgatggcatccaccaggttgtgctt

SEQ ID NO: 1584 - DNA, 201 bp, Bos taurus
caaatggtctacctaaattttactatcatttcctcccaaacaggaacttaagtatttttctaagagtgattaacatagagcagaggccgctgtttcatcgaatcagttcagttgctcagttatgtccgactctttgggaccccacaaaccacaatatgccaggcctccctgtccatcacccctgaagtccatccaagccca

SEQ ID NO: 1585 - DNA, 201 bp, Bos taurus
tttctccttctggccactcctccttaacttctcagtttcagtgtggttagcatactctccctgctgccctgactcactccaggagtcctccctgctcctccgcccctgtgccccggccgtctctgccatggtgaacctcccatcctctccctggtgaatgactctcctcctgcaggccccttgtctggggatacaggaggc

SEQ ID NO: 1586 - DNA, 201 bp, Bos taurus
atgagttcctggagaagggtcatgtgtccatttctgttctgctgcccctagtacctagcaccaagctgggcacactgtatacctattatagatatcacctaagtcatctatttcctattcattataagcttctctgtcacttctctgtcttttcttgcatttgtcattcacatcttatattttagcaaagtttcatacatt

SEQ ID NO: 1587 - DNA, 201 bp, Bos taurus
atccctccccaacaacacatgctttttgatcctaaaggggagcaagacaggcatttgaaaaagttgattattgtccaagaagaaatcaagtcagtagagacgtatttaaatctcatgcaagtggctcttttagccttttgatcaaggctcttgggaagatctttcgtgaaataatgcggctcttttctggtggatgaaatc

SEQ ID NO: 1588 - DNA, 201 bp, Bos taurus
cccctgccattacccctgggcgtatcaagtgctaccacacatgctcatttagatagctgggggccaggttaaaagctgcaggtggcagagactgagggtgtggatacagagggagatggagagagggtccttgagcctcacctgctcagatttctgtctcatctcaggcgcggagatgacccggggatgggcagtgttctc

SEQ ID NO: 1589 - DNA, 201 bp, Bos taurus
ccattggcagtcccaggccaccttgcactcaaaggactgcacctctcaggtatcatggctaacaatttgtgagactttcatcctgcctcctcagtctcctctttgcttcacagtggccctgggaagcagacatctcaaatgattatgcaaatcagcctgcaagaccggctttggatcatttagtgaaaaagaggaaatatc

SEQ ID NO: 1590 - DNA, 201 bp, Bos taurus
ctcacccagagtccttctgctgcaggttccctctgctgctctcccctgggtgcaatgaacaacccatagcaggacgcttgagtcctcaaagcggtgctcttggccaggtgtgtgagagcagagagcaggcagagtgacctcggtgcttgatgttaatggcttcacgcaggcagggagtgcttcctttggaagcaacagctg

SEQ ID NO: 1591 - DNA, 201 bp, Bos taurus
gggaccaaaggggaggagccactgcttcaggaaacccagcagaactccctgaaccatgaaagcagatgcctcagcagaaggagggggccattccatgaccgcctcagtgagacggtaaataccagactttgcccgtcacctgccgtggggctgcccttccctgtgggggccttgccctctctctcctgctcattccatgtc

SEQ ID NO: 1592 - DNA, 201 bp, Bos taurus
tatgctcactctttcatttgatactcaccacaaccctgtcagttgaacccatactttgagagtatgtcttaaatggcagagaagcaatcattcaggtggtcaactgattgtttagtctacccaatgcctgtgtcaaaacaaagggtcaggaagatttttcaacaccctccatatttcttaactgaatcaaccagtggtttg

SEQ ID NO: 1593 - DNA, 201 bp, Bos taurus
gaatcaagaaggggaggtgggacgagaaccatgggccaaaggacgaagacacctcaatttagttggattattggcttgaaatgagaatttttgaataaaacgtggctgtgtgggcctcatgcactgacagagtctgaagcgctgaaattatgcagccagaatcaaagctgttgaatcttgtagaaataaactgaaaagaaa

SEQ ID NO: 1594 - DNA, 201 bp, Bos taurus
tcacccttccctgggaccagtttcttctcaggagtctcactctcttctcctgtgatgcatcctcagcagaggaatttccagtccattacacatgaggtggagcaacaatcatgccccctccccattcctttgtgcacccatggctgcatggacaccaggggaaggcagatcatccaaatccacttgcaaggagcacttgga

SEQ ID NO: 1595 - DNA, 201 bp, Bos taurus
gatccccttagatcacacaaggcattagtgcagaggaagaaagatctctacatctgtgtcatcattcccaaggcaagaccatctcctctccaggaatcaacatggcaccttacacggagacactgaggaacccaatttgtaacagttgtctgtgtaattgccttcccagctggctcagtgataaagaatctgcttgcaatg

SEQ ID NO: 1596 - DNA, 201 bp, Bos taurus
atcataaaggaaattagaaaatattttgaactgaatgaaaaagaaaatacagtatgaaaatttgtaagataggactaaagtggggcttagagggaaacatggctttaaatgcaaaagaataaaggtataaaagcaatagcctaatttactttaataagttctaaaaagaagagtgaagtaagcccatagttagtagaaaga

SEQ ID NO: 1597 - DNA, 201 bp, Bos taurus
gttgaagatcagggtgccagctttccaggttctggtggaagtcctttaccaggttgcagactgctgacttctccttatggcctcagatggtaggaggaatgagggagttctctctggaacctcttttataaaagcattagtctcattcataagggctctgccctcatgatttaattaccccaaaggcccacctaataccat

SEQ ID NO: 1598 - DNA, 201 bp, Bos taurus
tcagcctataatacatccaacaattaaagttgcagatggaattaatcagctgaccttgaacaagctgaggagattatcctggattatctaggtaggcccattgtaatcacagtgtccttctaagtgaaagagggggtcatgagaatcaacttcagagtgatgtaatgtgagaaagaccttattggccattactgactctaa

SEQ ID NO: 1599 - DNA, 201 bp, Bos taurus
tgcttttcctgaaccagctacctccctcttccccagctctccactgcaactctgtttccaatcaccaagttagaaatccagctctcccatcagattgctgggagaacgggcctgggtggaacagcatgcttccagtgcaaataggaaagaaaaaaaggcaagagggtagcaagagtttcaatggatttcagggaatgacat

SEQ ID NO: 1600 - DNA, 201 bp, Bos taurus
atggcattgtaactaaacaagaggaagaaggctcattacccagtgatgattgaaataactaatgcaactttcggcgtctcgtcagtttcagaggagatcgcgaatgtgatttggtttatacaagatgattgtattgcattcagagagggaatgttgttcctgtagagattgtttatagatttaagtatgggtgaaagatgg

SEQ ID NO: 1601 - DNA, 201 bp, Bos taurus
tggggatccgatgtctgcccttgaaaaacaggtctgctttaactcagggccctgactctcctggagggacacagaacattctcctgaatgcactcagaacatgagctccatgttcaagggctgcagagggttgcagtggcccagagaggaggctagcccattgtggggaggggaagcttccaggctgtggagggtgtgagg

SEQ ID NO: 1602 - DNA, 201 bp, Bos taurus
aaaacaaagaggagagaggcctggactttccaggggttgcagtgtgaaagtctgggggagagggaggaccctggcgataggccattgcctgggccgggtgcgaggtatagcacaggaacaagtctcagcacccccacaggacttcctctctgcctttcagtacagcagagggaagacaggcagacctaaagctcagggcac

SEQ ID NO: 1603 - DNA, 201 bp, Bos taurus
gactgctgttccacagccatgtttggaggaggccactatagctgcttctaacaactggaagccacaactatagccaaggctggaggtgtagccaggaccgcggggccaggcccccaggagcctcagggatactgagctgggtttggtggggagactggggagtcaagagcctccaccggcgcaggggcgaaagggaagcgc

SEQ ID NO: 1604 - DNA, 201 bp, Bos taurus
gaaacactctccgagggtgagctattattttgtcatcatcctcatcttctctgatgagggagggggtggccccgtggcctcaagtcagagggagatgggcagagagagggggctggattctccctacgctgagataacactccctccccaggggcccggcagccaaaccactaccctgacaattagcagaggcctttatca

SEQ ID NO: 1605 - DNA, 201 bp, Bos taurus
gactctgaactggggctttgggggaagtgaagtgtgaagtctgggatgagggatcaggaagaagggccaggagggttcaaggccagaggtctggaaacaggggttggttcccaggttgcctcctccgccacccaagacttctcagctccagatcaaagtcctggcttcagttctactggcctggctgagaccctcctaggc

SEQ ID NO: 1606 - DNA, 201 bp, Bos taurus
tcctccagcagcttcatagccataagcatctgcccggaaaagacagatacatcactgatttctcaacagagtcttgcaaagtgtgatgtcagacacgtccccttggccataacattggggttggtgtcctagcaaagctggctctgtgccaagctacccagacattgggtcaaactcttgattttcacaaggtgtcctgtc

SEQ ID NO: 1607 - DNA, 201 bp, Bos taurus
tttcattgtgtattcttgcttgttcctgcatcaggtgttcataggtgtgatttcctcactggactcccacaggccaagcccagggaacagggctgaatcaggagggcctggggttggggtgaggaggggacggatggaggcgggagggagggccaagaaacagacccacaccaaacaaaaccctagggccttggctgggca

SEQ ID NO: 1608 - DNA, 201 bp, Bos taurus
actgaggttatttaagccctaagtatttctttgaccattttctcctgttctttagtggttcctgatttcaccaagtttgaaaatacatttatttaaaattctccttgtaaaagaaactaggctaagtacaaaagccataacttaaaaaaaaaaaaaaaacagccttataaatagttaatttaccttaatgagttttcagat

SEQ ID NO: 1609 - DNA, 201 bp, Bos taurus
ttcttctctttcccaagcaggtgaggcaggagggaggcagcgggcagagccttaggttgggtggggaagttcagatcttggccactggcttcttccctcttggattgctaatggctcaactctgtcatcctctctctccttttccagaaacccaaggccatcttgtgtccagccctctctgccctggttgtctacttgaag

SEQ ID NO: 1610 - DNA, 201 bp, Bos taurus
gcttggccatggccacctttacccaggagccccagttatgcctgagtcacctgtctcagcgtggaagtatcctcatgtccaccctgaagcatctgctttcgcccagcttcctgcatcacctgggccaggcgtgagttgaaaatttcaattctattatggatgggatggacggggggcaggcaggagagaaagagctgacag

SEQ ID NO: 1611 - DNA, 201 bp, Bos taurus
agaggacaccatattttgaacagaaagtgcttagatacaggcagtgaggtcacaaacatggtcggaagagccctaggataggcctacaggaatgattctaggggcacccctggggaggctcatcagtcaaggaagccacactcaggaggatggggtttgggaaactcactacgactgttggccccaaagctactccatgtc

SEQ ID NO: 1612 - DNA, 201 bp, Bos taurus
ttctccaagggacctttgtttcttttaatggagaatgatatgtagaaaacaagacctgggtgccaggcgtgctcattgttattgaggtatcactgcttccgggtctcttatggagagtggtaggaaatttgtgtctgattaaacacacacatatgatctatctatatatctatcaatcatttatcaatgtgtggagaaaac

SEQ ID NO: 1613 - DNA, 201 bp, Bos taurus
atggtccacagggaggcgaatgcaaccaccatcacatttaaggcaacccaagaactcccacatgacagacacgtgctgcacaaaacgcagtcagacccctgtgttacctccctagatgagcactggccaccctgacccggtgctgtcacacagaaagaaccctgagagctgcaaaaatgcaaacaacatccacccactgga

SEQ ID NO: 1614 - DNA, 201 bp, Bos taurus
aaatcctctatcccatggccagagagccctgacagcagagagacaaacaggtgttctctgtcctcacatctcatgtctctgggatgtcccttcatgctgcgcaggaagcatggcctctcttagagtcacccacacatggctgggtgggcactgtgctgtctgtacaaaaaagccagccggaatctaggtagtccatggggg

SEQ ID NO: 1615 - DNA, 201 bp, Bos taurus
cccaagttttggtttaatggtctctctttccccatgaatacctaaaacctgttctgcttcaaaactgagcaatgcagctctcctcctccagaattacaaccgctttagtagagggactgagggctccgttcacgtttggttctcactgttaagacctcaagcatcatgcagctactgctcagtcaatagacagaggcagga

SEQ ID NO: 1616 - DNA, 201 bp, Bos taurus
tgaataactgattagatgctgaggacagagaaagactcaagaggatgcagagaggcttgagagacaaattgagatcaggggatggggaggctagagaggcagacagacccaggccaatgctgaaggggaggtggtccgagagggataggcagagggctggcaggaagtgagttgggggaggggtccaggggtctgcctgca

SEQ ID NO: 1617 - DNA, 201 bp, Bos taurus
tttccacctaagaatgttataattcttctaaagtcttgttttcgctctatgatttatttcactgcatgaaagttcctctacgcactgctgtctcttttacgatgctttctcccaatgtttggtaattattagttggaggctcctcctttacctcagattcctgtatgactatacactctttagcaaaaggggtatgagata

SEQ ID NO: 1618 - DNA, 201 bp, Bos taurus
ggaagtctaaaggaccaaaaatgatttccctacaatctgaatccttttctacaaagaaagttccaaaaaagtttcctaccaagaaagagttggcagttcttgggtcttttgtaagcaaatatcttgttcatcacaaagcagcactttagggtttttgtatgtgcatgaatcaaataacaatgaaaacaagtatttgtatgt

SEQ ID NO: 1619 - DNA, 201 bp, Bos taurus
ggctgggactctgcccattctctttaccagtgtggccagccgcagacacttggataaatgaatgctcaactggggtcaggtccctcagtggagctggcaggaacagctcgcaaggggccacttgctgccaggggccaggccaggacagagagacccaggccaggccaggttggggtgctgggctggggaaacaaggagaaa

SEQ ID NO: 1620 - DNA, 201 bp, Bos taurus
aacaaggtctgagcctgtaataagtacagccctaaattacacttgagcctgctaacggcgggcctggcccagtgatgggagggcttgattgctggggccccggggtattcactcccaggaatgcttctagctggcacagtggctcaatctcgagaaactcatttgtgtcttgtatttgaaaagggagacacacacaaatgg

SEQ ID NO: 1621 - DNA, 201 bp, Bos taurus
cactcagaactgaggatgcagatcagttcagaatgaatacttaaaacaatctggagtttaaggcaagagagggtttttctgccactctgtgaatctcatgctcataaggggactctcagcctgcctgagtgctggaggacctggctatgtgcatgtttcaagctcctggaagaaagttccaggaagaatctgcctgtagca

SEQ ID NO: 1622 - DNA, 201 bp, Bos taurus
taggggactccttgctgatttcagtgaggagggcccatcctaactgttgaatgacctacattcaagcttagaggtggccctaggaggagctggagaaagattgcaggtggggaggagagcttctcagtgggaattccaagaggagcagtccaggtggcctacgggtcatggatctcagggtcctaagggaaaaattgcctg

SEQ ID NO: 1623 - DNA, 201 bp, Bos taurus
aacactgttttgattttgtcacttgtccattcagaaatcggcaggagctcccatttgcctcccacctttaatctaaactcctcagcatgtgttttaagacctttgcaaagtcacttttaactgccctcatctttggccaccctggcttctcatctttgctctggcctgacacagaccacttaagtcgctggcttcagggca

SEQ ID NO: 1624 - DNA, 201 bp, Bos taurus
catgcaaggtgtgcctagaaaaattcttacattaatttgaaacagggctaaaccaggggcagacccttgagtagcaaggcccagtctgtgtgattactgcgggtatgtgggctataaatcctcaccagatactggctcccagggtggcaggaagcagagagatgctgggatttgttgggattcagggccctggcatctttt

SEQ ID NO: 1625 - DNA, 201 bp, Bos taurus
cccttggtcatgcctgtcaggctgcgaggagggagagagctgagaaagatctaagcctgagcctgtgaagttgcaggggagggaacttggttgtttgaaaggaatgagcttggccatggggattcggtgctggcagggcagccacagcccattgtaaagagtctggatatcacttgctggggccaatccatatcataggag

SEQ ID NO: 1626 - DNA, 201 bp, Bos taurus
ttgagagccaatgtatttatcttattcagagactccagctctttaatttgcccttgacaatcttttaggcctgaagcatgaagctttgtagacttacaaggatgacacctcttcggtaaacaggctcatggtgtctctggggtctgtaggatttctggccagatggtcagcgcctctctctgactgtctacagctcagctt

SEQ ID NO: 1627 - DNA, 201 bp, Bos taurus
gacaaggaggtcagggaacggtgactatgaaattatgtttgcgtaattctccattctgctacatgcttactgggtgcttggtcatgatggtagacagctcatccctttgtatgtgagacatcaatggtgagagaggagccccatctgccactttcaaagtgtaccatatgtcagggttgatgaggactggtctgtttcctt

SEQ ID NO: 1628 - DNA, 201 bp, Bos taurus
aaaatctaggattaatatgtttagaaagtaccatttaggaaaaatatatagagttttcaaacagtgcaattgaaagtttgatgtaatgggctatgggcaaggcatatggaacttgccattctgtatttaagaatctgcattcttcaaacctcggggaatcacatcattctgactcttccatatcaccttatggtgcctcag

SEQ ID NO: 1629 - DNA, 201 bp, Bos taurus
gcaactataatcacttactcaaatcctcatataatgagaacagaaggatataaatccattttcgggacttttagatgtaggatctgagttgacaggatagagtgtggacatataaggactaagtccaaagagaatctggactccggtcttctggcttaccggtcttctgagtccatgaccaggatgccatttacctttggt

SEQ ID NO: 1630 - DNA, 201 bp, Bos taurus
aggatggtgctttgactagtaataaattttatgacattcagagggagactaatgacttgctaagaattgtgggtgagtagtgatatagacagaaaagaatcgccagggtcctatggatttcagtatgatgaatacatccaaaacaactggcatatcaagggagatgattgcattaaggcaactcattttgaacacctctta

SEQ ID NO: 1631 - DNA, 201 bp, Bos taurus
aaagactggatgagaatcttgggatatggaggaaatgaaaattggtggccctgcttaagcttgaaagggggagatcaggtaaaagaaaaatacctgacttgaagcaaagggtctcaaatgttccaatagccatcagataatctccaaaatatacaaacagctggtatagctcaatatcaaaaaaccaatctgattaaaaaa

SEQ ID NO: 1632 - DNA, 201 bp, Bos taurus
ctatggccaactaatatggagggttagacaaaaccgttttcccatttctatcctgagaagatgggcaaaaaataaagaagtcaactcctcctctcctctccggccatgatgatagtattcacttctaacataggttattctcatccaaattcagtttcctcattgaattcaatataatgtgtgatcccacatggcagaata

SEQ ID NO: 1633 - DNA, 201 bp, Bos taurus
atggttgagaaagctgttgaagattggaatgtggaaaaggagtgaaagaaggaattctgaatgggagatgctagaataacacatgtaaaaggaattcttagagtggaaccaaagataaattacaggaagctgttctgaatctaccaaatacatgaaatgagagatgatttaactttaggatgtttcatatttcagcagtgg

SEQ ID NO: 1634 - DNA, 201 bp, Bos taurus
gcttacattttcataattattttctttttcagtggaaattttgtttccccttgtgttcaagagttctttctctcttccctttcaaaatatgacaggtcatgggagtcttccatgatcttgcttatgattataataaatgaatgatgtggattaaagcaacgatttttccctaagtatatttacagtttagatgaaacaagg

SEQ ID NO: 1635 - DNA, 201 bp, Bos taurus
cacaaaagtgcattcacacaaaaatggttgctgtttaccagagcaaggattacctcttggtcaataaattaagcatcatagttatatttccttttgtgtaatatctgctaagcatttatgcaaaacacatgcctttacctaaaacattatgtttactgttacgaagaagacaattaaaatataagtatgaagccctctact

SEQ ID NO: 1636 - DNA, 201 bp, Bos taurus
aacatccctctcttcaagtctccatctgctgagtccggaagataaactgtcattcagtctccatgttggagttgttttggatattgtcagcaaccaccagctctctctatccttcatggtgttttcagatttcagtcaggtagagtgttctataaactgtgagaaatagagttgaattcaagcaggtcaattcaatgaccc

SEQ ID NO: 1637 - DNA, 201 bp, Bos taurus
tttaacttgggcttagagaagatgttgcccccccttcactgatcttttctggtatatctttcagaccatgttttccacttggccttacagaattggagagaacaaatcatctaggtcattggctttcaagtttgacaacatgttgaaatcagatgcctggaccttacctccaaaaattccaatttaattggtctgggttag

SEQ ID NO: 1638 - DNA, 201 bp, Bos taurus
atacttcccagttctaatatctatacttatggaatcctggccctataccctcatcctgaaagagagtgttaggtagctagttggatattagcagatcccaccccaagctggatggggtcatctttctctgttccctcacaatcccccaacaccagtgataagaacatacccagaaattctcctttttagtcaaggaccacc

SEQ ID NO: 1639 - DNA, 201 bp, Bos taurus
atcttacttgggaaatggagtttgcagttaagagaccttgacacaataagattatattgatttattcagttggacctccaatgtaatcacagttcagttcagttgctcagtcatgtctgacttttggtgaccccatggactaaagcatgccaggcttccctgtccatcaccaactcccggagtttactcaaactcttgtcc

SEQ ID NO: 1640 - DNA, 201 bp, Bos taurus
ttttatagactagacatttcactcaggcagaaaggaattcccactgcacttgaggggtagcagaatctccagaacaggctactggttctgcttggctctgtgctgtccacggtctccaggcaccccgaagacaaagaggctggagaaattgggtgaggaatgaaattatgaaaccaacattctggattttaactgaaccta

SEQ ID NO: 1641 - DNA, 201 bp, Bos taurus
agggaggcctgatgtgctgcaattcatggggtcgcaaagagttggacacgactgagtgactgaactgaactgaactgatgttctcccatactacagaaatgggcctcttgagcttggtagatctcagtaatttagaaataaattatatttcgtgcacttgaattcataactgcacaatttctcttgaggtctcatgtattc

SEQ ID NO: 1642 - DNA, 201 bp, Bos taurus
cttctctatcaaactgatttactcatttatttgctctatttaataaatattcttgagtggttaaggcattaaattacaaatcccttgtgcctttaaaaaaaaaaactgttatcaaaaagatgtttcttaagttattcttttaaaaaggaatctctcaagttcccagcattttatagacacactccatagcttttttattac

SEQ ID NO: 1643 - DNA, 201 bp, Bos taurus
tgatttaacacaattatccttaagtgactggaattttaatttttgtgtagttgtgttttctttagtgaacagtgcattacttgtgtacattttaaagaggaggaaaggggcaaggactacaaatatattctgctcagttgtaccctgggtgcatgccatggggtagtcctgctgtcttcctgacccagctgatggacagag

SEQ ID NO: 1644 - DNA, 201 bp, Bos taurus
aggttctgtaagaactgctcttcttccttacacgtagtaacagtgtgatataccttcaaatgtacacttatttatgttcataccctaccatacagcatatcccaactggcagaaaaacccagagaccacaagcaagcacatataagtcttgctctggagagagagaaaataaatttttatgctactctgtcagtctcattc

SEQ ID NO: 1645 - DNA, 201 bp, Bos taurus
gatgagacaggaataaattaggcagagacagaaaaacaacccctaatcaacaggataatacaaatgaaaattccaaagcaaatgatggaattaacactgagaaggacaataatgaggcactgggttagtatacccattttcctctgcaagaaatatattgatacccacccttgtggctcagctggtaaagaatctgcctgc

SEQ ID NO: 1646 - DNA, 201 bp, Bos taurus
ttcccaaggaggtttacagtggattgatgaataggcagtctctgtctcagcttaatcaaacctacggatttgatactcattctcagttgaaaagacaaacagatgtccagacccagggacagaagtgagcatttcaaagcagatcatctattatattttccccagttattgtggacaaaattaccatcaaacagaattatg

SEQ ID NO: 1647 - DNA, 201 bp, Bos taurus
catctgggaaagccaatgcattagagcacagagagcaagtcactgaaaataaatgagaagcaaagtggagagtggaggctagaagaccagctactagtcaaccaggacagttggggaacagagtcaccaagtgatgcagagtccactcagggatagtcactatgaatgatgatacaaccagagagaacggagacggctcta

SEQ ID NO: 1648 - DNA, 201 bp, Bos taurus
caaagatcccctgttttttctctcttctgcagaggtgctacaaaaatcactgtctgccccaggaaaaacaccccaagctgaacagagcctccttgtgagaaaatggacctgcagaagtatttaaagggaatgttatcttttaattaaagaagtgaagggctccgggcaagcccagaggccactggctacaaaaaaaaaaaa

SEQ ID NO: 1649 - DNA, 201 bp, Bos taurus
ggccccaccctcaggggctctgggagcttctttggctgaaagtgttttggcagactcagctttctctgtcatcagtttgaattcatgggaaagggcaagacgccaaaagtgcttgcaggtgaattctttgtccctttcaagtgcatctgacttacacagatgacttatgtgggtgtttatcttatgttgggaggattatca

SEQ ID NO: 1650 - DNA, 201 bp, Bos taurus
ccagtggtaagatgatataaatgtgaacttcttaaaaacacactcagaccatgttctcatgtctacccagagacacaaagcttcctgaccaaccaccaattccagcgatgcccagttcatccatctttgactagtagaccctgctgatagaactaacactctttgggaataggaaagagattgatgcgaagaaagaagtgt

SEQ ID NO: 1651 - DNA, 201 bp, Bos taurus
aaatgaagacaaaaatagaaagaatggatgggggaatccaggaaaagaagcttctaaggaataagaccctttcacgatggtatttattaatattgcttgccgtctgtggtcttatttggatgaacatggtcagtttggtgagagtactcacacaggcgctaatgagggaggaccagatcttccttaatatttgaccagacc

SEQ ID NO: 1652 - DNA, 201 bp, Bos taurus
actcagaggtccttattctgtactgtaggtaatgatgattctcttactgaaagaaaaactggaagacttccaccagaccacctaagcgtagcagctgcagcgaatgctagaagacagtcagcttcaacggtttgaacccttttacaatattggactgaatctcaaatttctatgcaatctgttctcatccataacccaaag

SEQ ID NO: 1653 - DNA, 201 bp, Bos taurus
cagtcccagcatccctcgggcgctatgctcaaaaagcacagatttgttggtgcctgctaagtcacttcagttgtgcctgactctttgtgaccctcaaactgagaatgaggctgtgatgggaagccccgccctgccctttgcgtgcatgttaacagtgaggcccctctggcagacccaggctaggtcctgagtgcacctcag

SEQ ID NO: 1654 - DNA, 201 bp, Bos taurus
aaacaaaatgaaaacagagaaaagaatttataaggtaaaactttttgacttgaataacaatctcccaaattgtcctccttcgttcacacagcaaaggtcctccatcttagctgtaccaccaatagcaggtgctggggtgtgtgtgtgtgtgggggggactcctgcctgctgactctcagaagcggccttgactccaggaac

SEQ ID NO: 1655 - DNA, 201 bp, Bos taurus
aagttctaatcaagaatctccaacatttaccagctcaatttcagaactaccatagaccagtaagtcctttgtgtctccaatcttatcttttgaagaacaacgtcctaggcctgtcttaccactgtatgttaggtgcaggtggagcagataacctgtctctttagtctctcgggtcaagagtaattatactcgaggagctgt

SEQ ID NO: 1656 - DNA, 201 bp, Bos taurus
ctctgtgataaggaagcaatgacatccagacgaccagaagactagtaggaccttctccttatgcaaataagaaaagccctaaaaggccaaaggaatttccgcaaatctcaaaacgactcagtgacaggcaggaattactccctgcttggtagcctgccacctcctgaatacgtaactttggccaaaaaactcaacttctcc

SEQ ID NO: 1657 - DNA, 201 bp, Bos taurus
tgacatagctaaatttctcaggagtatgtgtcttctctaatgcagaaaacaaaccccttagcaaaccagcgccctcagatattgcagtaatcatgtacacgagtggatccacaggaattccaaagggggtcatgatctctcatagtaacattattgctggtataactgggatggcggaaaggattccagaactcgggtatg

SEQ ID NO: 1658 - DNA, 201 bp, Bos taurus
ggctttctctgtgtggacccattctcttgatggacaggatgtgctgatgtgaagcttgctgttggcttgttagctggctctcatgctgtcaaagggcaaccgcagcaacatgtcttctgggtgttggaagaaataactggaaaagaattgactcctttaggagggccgcagaggccgtgttcctgaggaccatgtgaggac

SEQ ID NO: 1659 - DNA, 201 bp, Bos taurus
ttgtttacatcagaggtggctgcacgaattgacctcagggccagaagacaggccatctgtgggaagctcccaatttaagcagaaaattcacagacccagaaattgtgtgaacacatctagagaagcagcagcattcgtaacagtgcattgtctggaaagagcatcgggttggaagtctggagatcaactaacttgttgagt

SEQ ID NO: 1660 - DNA, 201 bp, Bos taurus
taatccaacccctctggttaatgatgggaaagttaaggctcacagcagttaagtgttgtgttcagagtcttgggaggagacaggagcagaactggggctacaggccaggtctcctgatgatagttggttctaatcctcatggtaggtatgccatggaggtctctgccctagcttagtgaaatcgaaatagccagagagggt

SEQ ID NO: 1661 - DNA, 201 bp, Bos taurus
ttttaaaaatggataagtggtgaaatcaatacctcacaagtgtgcagcgctttctctgagtcaggcactgtccccagaattttatgggcattgtctcctgtgatcgtcacatgagccctttgaggtggagtctaagattacctccatttacagaggcgacatgagactgagactgaaaatctacctgtcttagtctgctca

SEQ ID NO: 1662 - DNA, 201 bp, Bos taurus
aggaaaccttgaaaattcaaattatggagaatgtcacgcacagaaaatcaacagactatcaaggcctgaaaatccttttttattcttttacgtcatctccaaatgcctggctttgatgttctaagatgtcactgcatatttatattgctacataatggtatttggatcctttgctattcaaacttaaccaaacatggttaa

SEQ ID NO: 1663 - DNA, 201 bp, Bos taurus
agcttatttggagaaaggatcattgcaaatttaattaaattaaggattttgagataagatcatcccaggttatctgtgtgggccctaaatccaaagacacgtgcttttataagagacactcagagaaaatgctcagaagaggaggcagtgtgaccacacagtcagtgatgtgaagtgatgtggccacaagccaagaacacc

SEQ ID NO: 1664 - DNA, 201 bp, Bos taurus
gaaaaagatgtcagaatccaagtttttctcctcttggcagtggttcactttaacttctgcctagtggtactgtttccttgatactttttgatttcccaaatcaaaatgatagtgatagagagaccataaaagtagttgaggcaagattggttatcttgaggtagtctttttctttaccttttgatagaaacatgggtagta

SEQ ID NO: 1665 - DNA, 201 bp, Bos taurus
tctttctgagctccagatcaggtgcccttggattttcaccaaatctaatgaatccatagggtcaacaccctgacttcagtagtttcttgagggaagaacattggccatagccttcctggaagttaatgcagaactaaaatcattgccttgattttgagatttaagaaacttaattttctttctttttttttggtgagtcaa

SEQ ID NO: 1666 - DNA, 201 bp, Bos taurus
atctcattagatttttatgggagatactgctaggtggtggtggatatactgtcattttctctaggcagttcattacatctattcattcagcgaatgaaaaggctcatttcatccacaagagagctgatgaagttcatggaaccaaattcctctacttttttcccaagttgagaatatttatctatctaaacttttttactt

SEQ ID NO: 1667 - DNA, 201 bp, Bos taurus
ccacatttaagcctatttcattggttttttatagattcaattgtactttagctacattcaaagagtgacattaaatctatttcacctcagattttcacttaatctaatgaatttgggcctcctttggaaatgatcacatcattcacgaggtactgtaagaatctatgatatgaagctggatgatccaaaatgatgctgacc

SEQ ID NO: 1668 - DNA, 201 bp, Bos taurus
ccaaccaaatctcctttgcttttcacaatattcaagacacatttcagtgtttcagcctgttttctccttcctagtaattgtctttctctatcatatcacatgaactccttcatgagtttcaagtctgtccaaatatcatgtttactcctgaggcccacgctgaatattccacgtaaaatcacagccctccttaacacacat

SEQ ID NO: 1669 - DNA, 201 bp, Bos taurus
ttcatctatgtattctttatgactgcttttgattctgcaatggtagagttgagaagctgccacagagactgtctggcccacaaagtctaatatttatgtctggtcctttgtaggagaagtctgtggacccaccccacactgtggtgagcagcccagttctggagttggatgcacatggactggaattccaacctctggcct

SEQ ID NO: 1670 - DNA, 201 bp, Bos taurus
tctaccttttcaatccaaaggtcagtattaatttttagagtgtgagtcccaggaaataaaacaagtatctaagaaacaactgggcctaggggcccaaaggtgtgaaaacataacttcaaaagtaacacaaaagtattagcctctttccgtctctgttttgtttgtcttattgaaggacatcatagagcaaggaaagaagat

SEQ ID NO: 1671 - DNA, 201 bp, Bos taurus
ctcctccctatccattaaaccactgaagtctctgtaactgattctggactcttttttcagtcttgaggctgagcaaataagggcttgcaggcctgtggagaacatcctaagacgtagatgtgaaataacccactcagtgcctctttaaacctatatcctggacgtttactctgatttactcatgagaaaaggtcttcatgt

SEQ ID NO: 1672 - DNA, 201 bp, Bos taurus
aatggaaggcctggggaaggtgaggtggtaacttactgtggttttgatttgcatttcccagatgattaatgacattaagcacttttctcatgtacctggtggctatttgtatgtcttcagtggcctgttcaggttctgtgcccatcttttagctaggttattcgtgggttttttttttttttttttagttatatgaattac

SEQ ID NO: 1673 - DNA, 201 bp, Bos taurus
agagcaaagtatcagaggaaaatgacaataggtagcagtgtcagttgtaaaaaaaatgttgagaagatatgcaggaggccccacgatgtacagaagggtgataaaaagtggatagagcccagcaatgggaatacacaagcagattatatttaaagattgaggcagaaatccagaaagtctataatggattatcaggttcca

SEQ ID NO: 1674 - DNA, 201 bp, Bos taurus
gcctcctcagactcctatctctggtttctcaattccagtagatcgttgacatctgccttagtttcccttcctgtcctgcttcctgaaacctctatccatacagtaacctgaggttatcacaggccttacctcttttatttcccatttcctagggtcaccctatttcattcagatcagatcagtcgctcagccacgtccaac

SEQ ID NO: 1675 - DNA, 201 bp, Bos taurus
ttgtgaaaaataaaaatttggatgatggttatgaaggttgatataagcaagtgacattgagctgttcctacaaactgtacatactttttgatgactcactgtcaacaatatagtttgctcaaatcagacccaatgcaattagcatatcagatttgagactatatgatgttgaaaggtgtttataccattgtttccactatg

SEQ ID NO: 1676 - DNA, 201 bp, Bos taurus
tcactggactggcccgctcggacacaagaaagagacggatatctgggcaaatgcagtctaggagctgatccaaggtttgctgcaaaagcaagccctgccccgcgttggccagcaggtggacagtcatggccgggggctccggcatctcatccatcgtgggtgctgaggatgacaaaggatgctggcgaatcgggcccgcag

SEQ ID NO: 1677 - DNA, 201 bp, Bos taurus
gcctaaaaggattgagttataaaacatttaagggacttctttatcatgtaaattccacctttgtaatgcaaatcccattgtacggcccctgccaggagaaggagagcaatattaatttacttactgtttaattattctcctctctccaacagcccctgggatgatgtaaggattccagggccaagaagagaatcttccact

SEQ ID NO: 1678 - DNA, 201 bp, Bos taurus
aaacaaaaacattaactttccctcttgtccttaaattcttgtgctcttaagtatttaagaacataacaaatgagtatcagtcattctgtgggttccatttgacaataacttctcttattgtccatgccacacaggtggtgctcatctagaattactgcatgcacatcacagacagagattccttatcatgattgacgatgc

SEQ ID NO: 1679 - DNA, 201 bp, Bos taurus
tccgtctgtgtggcctgcggacctggaggctgatgtcagccagctagaagctggggctgtgtctccagtgctaatggtgtttgccggtactgctgtggctgtgctagaacaagctcccaagatggccgcctccagggtccccagggaatcccaggtgccttctgtctttccaggtggttctgatttaggctcttttcagat

SEQ ID NO: 1680 - DNA, 201 bp, Bos taurus
gcataggccattggtccggcattaacctattggggagaagagaattggctaagaacggtaatatctcctccatggagtcctctccatggctagaaagaggcgcctccaccatgcggcccccctaattctctcacatccccttgtatctgtcttatctgctgtctctagaccagtcagtgagcgactagaggacgcatctga

SEQ ID NO: 1681 - DNA, 201 bp, Bos taurus
ggcccagagattctaccctataaagagcgaaatgatgtcatctgtgttcaaattattgcataaggtttttctttccttaagtattttttaaacatcctctctttattccttttttacttcttggccatcccacgtggcatatgggatattagttccctgatcagggatcgaaccagtgccccctgttttggaagtgtagag

SEQ ID NO: 1682 - DNA, 201 bp, Bos taurus
tgcaataagaaaagtcaaattatgtgcagcggtgacagctccagaaggaagagaaaactgtgaaacatttgagataaacttccaccaacgactgcttttaattcttaaaagtttgtgactaaatggggtcaattatatgatcttcaaaagttagctatgtaaaaactgttctgagccgtggctggatcaatgagctattaa

SEQ ID NO: 1683 - DNA, 201 bp, Bos taurus
agtgctccatcatcaaattgagaagtgaagaacactaggttaagaggtaggttcttctcagtgattctttttgtctcttttccttgtctatatcatgagacaggaccagctgtctccaaaacagatggctctggggaggaaatggaagtaggcttgatggagactgtgcaagggatgactgactaccccttcagtggtaga

SEQ ID NO: 1684 - DNA, 201 bp, Bos taurus
ccagctcaaatggccttgggtgttgcagagttgatgtctctgtgaagtccctaaattttatagtggggagtcagcactctccttcctcaagctggtccaagctgcaggcccccagtctccattatccttacctcctcttcctactggccatatgagcaagtgtgttctcggctctgacatccactagcagctattgactca

SEQ ID NO: 1685 - DNA, 201 bp, Bos taurus
gagaagatttttgatcagataacaagagcagtggaatgtctttcagcttcaacataaatacttctcagcatataccaaattctaatgtgtgaatcttttatttatttagattattagtgccaaattgacacccgtagtatttggtcagctggttcattatgttccatagtgtatctaggatcttcttaggattattgtggc

SEQ ID NO: 1686 - DNA, 201 bp, Bos taurus
cctccaggggatcttcacaacccagggaaagaactcacgtctcacatctacctgcattgacaggtggtttctttatcattagcgccacctggggagctccatgttgcatacagagagcgtttccaactttctctgagactgtccatgtctgagttgcttcctgttctttcttgcttcttgctgtctttacattaaacccat

SEQ ID NO: 1687 - DNA, 201 bp, Bos taurus
tcatgtgtttagatttatattattctaaaactttatgtatttaaatgcttcttgtttccctatcctatctcaatataatgttttgcttgttctgtctttggactcaaggacaaattttattataggaataagtaagagctatcctagatgtagccctcttcatttgcaagaagtacagggaccagggaaatttacttacaa

SEQ ID NO: 1688 - DNA, 201 bp, Bos taurus
taatcttgaatttattttttgttactatgtttgaagggagtattggtacctcacgccttaccttggtaatacatttcctggagcctcaaagttcatctgccgtagtgaaagttgctcagttgtgtctgactctttgtgaccccatgaactatacagtccatggaattctccaggccagaagactgagtgggtaacctttac

SEQ ID NO: 1689 - DNA, 201 bp, Bos taurus
tcacaggttagactgggctaaacaggtgaaagagaagaacgatgtgtgtctgtatgaacaccaccagcagcagccaaaacgacagataactggacagcgaaataagagaataggacactgaaccaatctaccaaaaataaactgacagggaggaatccaaccaaacacatcgccaaaagtgtcagctaaaaatacagccag

SEQ ID NO: 1690 - DNA, 201 bp, Bos taurus
tgtgtgtgtgtgtgtgtgtgtgtgagtgtgtgtgtgtgtgtgtgtgtttgtatgcgtatctgtctgtccatgtgagatttatagtgtctttttctgtaaacgcaacaattatagattttttttcactttatcagtacttcctagaaaaacaatggcttgagtatttatttagttgtagaccttgagctcagtcttctttag

SEQ ID NO: 1691 - DNA, 201 bp, Bos taurus
tttcaagctgctgtatttgtgataatctgttattgtagcgatagaaaaagaatccattttactaaattattgggcagaaaaagtggggtaaaattcattggcaaagcacatagcttacagcctggagaagagcagatcctcagcaaccttgctgtccttttcagtgtgtgcgtgctcagtctcttcagtcatgtctgactc

SEQ ID NO: 1692 - DNA, 201 bp, Bos taurus
aaactagttttcacggttctagagactgtaagtgcatgatcaggttccaggctgcatactgctgacctattaagcacactcacatagcaaaagaggccagtgagctctgtggggtcactttactatgatctttaatccccttcacgagggtgccacactcataaactaattactcccaaggcccatcttctaacaccataa

SEQ ID NO: 1693 - DNA, 201 bp, Bos taurus
aggatggactctagcacatttggtgtgatgatttacagaaggtttacagaaaaaactgcaaagtaggttgggaccagatagcaagaatcgtgaagggccttgtgcattaagcagaaattctttcagtcacagagtaccaattaacagtggttaaaaaggaagttctttggaaggaatgatgctaaagctgaaactccagta

SEQ ID NO: 1694 - DNA, 201 bp, Bos taurus
gggagagtttcattatcattttgtatatattgaggtaatctgaaaggtgggattatcttttgaagcaagttctttgttactcctaaggcctgttctagccgtgtgggaaaactctctacccatcagtgaatgtgcttacctttaagacttgagcatccgagtaaaatcaattggccagttcttcattttgtttccttggtg

SEQ ID NO: 1695 - DNA, 201 bp, Bos taurus
tttctaagatcccgaactgaacttgtttcttccccatgcaagagtaaattattttcctgttctcttcaagtttcagcttgatgcatgcttagtcacacagctgtgtctaagtctttgcaactccacggactgtagccaaccaggctcctctgtccataagattctccaggcaagaatactcgagtgggttgccattttctc

SEQ ID NO: 1696 - DNA, 201 bp, Bos taurus
tacatggtaagggaaaggaataggcaaagaagttacaattggaaagactattacaaaacaaacagaatatggggagctaagtataaaagatgatttgtgtcgatcaaataacacattattgattgtggattatcattgacagtgggatctccaaatggccatactttgtaagcaaaggtattataatatgagtctgcaagg

SEQ ID NO: 1697 - DNA, 201 bp, Bos taurus
gttcctggccctggtaagagttctttacctcttataactttcccatcgtttagaaaacatttccatcgcctgtttttaatatactatcctgactgttcattgtttggccatcttttccatttgtagcagtttgtatctcttaatctcatacctctatcttgcccttctgccattctgtctcacgctggtgaccactagtta

SEQ ID NO: 1698 - DNA, 201 bp, Bos taurus
catgaatgagatttttcagacgattgtccaggtgttaaaccctatagtacaaaagacaatttgaaagggaaagaacatgtgagaaggaatagtgaatcacactgataaaataagcctctttattaaaatcaagtttgatcaggaaagtaatagactactcttctagaaatcatggaggtatctacgttaccatgttaccat

SEQ ID NO: 1699 - DNA, 201 bp, Bos taurus
tgagtcaggttccttgtttatcaccacatgaacagttctctggtatatttttagcacaatgtgttatcctagactgatcatatgttcacagattgtggggcgcctgtgaaagactttccactgtacttgctattgggcaaaatcacgtctgctacctggtattcatgcagagtaaactgtaatgtggagacagatggtatg

SEQ ID NO: 1700 - DNA, 201 bp, Bos taurus
gattaagaggtagggcaggcctgttctatgcgatttctgaggtccaggaaagtaccatcacattcttacctgaagacactgatgcctggaaatcccataatggaaggcagggccattcatgcttcactcagagcttgggtaaaaatgcaaagacattggaaaagtacctgtaaaataaaattcacaatgagccctaaatga

SEQ ID NO: 1701 - DNA, 201 bp, Bos taurus
ttctgtgtatccttctctaccctagtttctgggaactacaaatctgttttctgtccccacagtattgatttttccaaaaagtcatataagtggaatgacgaggtatgtagctttttcagtctggattccctccctcaccataatgtgtttaaggtttgtcataagctgaattgtaaccctacaaattcacatgttggagcc

SEQ ID NO: 1702 - DNA, 201 bp, Bos taurus
agtaactagcttagaggcagtttgttatttgttgtcagagatgagaagagagctgtcacattcttttctcaccaaactcacagagaagttctgtatgaatcggagataaggcttagtatggtgcaatggagccaacatatgtttgctggaacactggttgcctgtgacaaatgactttggaaaattctgaaaactctgtgc

SEQ ID NO: 1703 - DNA, 201 bp, Bos taurus
cagctctcctgtattgcaggcagattctttaccatctgagccaccagggaagcccctcaaccatctactgagtttgaaaatctagaaaaggccaaacctacaaggataaaagtcaaagtatatattaagtcactaagcaaggacaccagctttagtgctgattcatgcttcctttggcagaccctggttgcacggccttta

SEQ ID NO: 1704 - DNA, 201 bp, Bos taurus
tgagcacgcacacactgctgatttctactttttgtccttcctccagccactactgagaaattttccaaagctgtttttggccctttatctaaagcatcaggtgttattattatagtttctcattattttaagcatttcttctatgctaatggctcagatctctgcctccattttgttttcttgggtaattctggcctgaat

SEQ ID NO: 1705 - DNA, 201 bp, Bos taurus
tcaatccccacatttatagatggtcaagtggccatggtatttataataaaaaagtgtccactgcaagctacatgtgactttgattccacatagaaacccccactgtaagaagaatataattatatatcatcattgttgccaatatcttctcttagcttccacttgcccgcttaaaaatctacaatggtattttaaccaatt

SEQ ID NO: 1706 - DNA, 201 bp, Bos taurus
accaggctcctccgtccatgggattttccaggcaagagtactggagtggggtgccatcgccttctccgttacataggttagtatgaactaaatactataacataacctataaaggaagagtttttaaaaagtgagtataactcatatacatctttcacttttaagagcagagatccatactgacatattcaatgagaaaag

SEQ ID NO: 1707 - DNA, 201 bp, Bos taurus
ctgtccccagactacaggtccagacaggaatgaattttgtggccgtcttgtgaaatccatgtctggtgtgaaccacgtcttgtgtgaaccacacactgcacccagaccaggcagcggtgcctggccagttccagattcctattgcagaatcgatgatgatcacgctcacatgatctggattattaacttgattctttgaga

SEQ ID NO: 1708 - DNA, 201 bp, Bos taurus
cggcacggatcactttggcactctggttgcggttgggactgaggttcacccgcgtgaaggcgctcgggccccccaggagggccgagcgggccgccagctcccctgttcccggaggaggcgcagtggaggaaacagaggctgtcgaagatgaggagggagcggccgcggtggccctgggcaagctggcatcctccacaacga

SEQ ID NO: 1709 - DNA, 201 bp, Bos taurus
ttgatggtggtaccttctttagtcgcttgattatatgactcttcactggcccaatgcaggcataatgcagttggtgatttttaacgtatgcaaatgttcatggctggtctgcttggctttgcaggcgtgctggaggccaggacagagatgcacagctcattctgtgtgaccacttaactttttttttttaagtaatttggt

SEQ ID NO: 1710 - DNA, 201 bp, Bos taurus
aaagagtcagacgtgactaagtgactaaacaacgatttattaaatactctgggaattttaaaaagagggaagacatgattctgacaaacatcagtggtcagttgtcttgttggacatggacattacttgtgtatgtgactcatggctgcctacctttaagcctggactcccaggggggcctggaggtccctaaatcaacag

SEQ ID NO: 1711 - DNA, 201 bp, Bos taurus
ccatttaatgaggtgactgactggggcagacctaccaaaatctaccttcagacccaacctgtcactggagtttcttgatgaggtttcatgcagttatcccatttggtaaataatagaggcaaattatttaataaaagtagagggaaaatataggcttgctttcctttttcaagcacaaacgttgggtttaaagagcgagat

SEQ ID NO: 1712 - DNA, 201 bp, Bos taurus
gtcccaggtgatgtaggcccaggccagggaaggctctaaaccggggaaggatgaaatccacttaaggactggagacctcctcactccaaacccagtagcaccaagctctcttgggtgcaggcctgggagacagaatgtcatgtcaggctccactcaggcctccccagctggattctgcagttaatgtatttagaggattcc

SEQ ID NO: 1713 - DNA, 201 bp, Bos taurus
tattttaacaagcttctccaggtgatttctgattgagaagaactgttctaggcaaacatccaagaaactattctacagacagttaccagttaaggccaaccaatattactccatccatagctctctttaaagtcgaaaatcacaagtgacctcaaggtcatctaattttactagtaagttaaagccttatattggtgctaa

SEQ ID NO: 1714 - DNA, 201 bp, Bos taurus
aggttgatgcagagcccctgtttgagtttcctgagaaactcaattcccattggctgtcatctaattcccattggctatctattcttataataaattttctctttgttaatactttaactggggttccttttttttttttttttcctttgtttcaaacaaaagctggaagttactaacaccaagaaaagtatacaggtaact

SEQ ID NO: 1715 - DNA, 201 bp, Bos taurus
gctccaggggttcccccacttctgaagtggactctgctctgtgactctctgcacattctgtaaggacaaatctatacttcatcaaccacctgaatgaatactggggacattttcaccgggggaagtttggtgtctgtaactttccaggtaatttccctcatctgaataacttgagtgaaaacaggtccaagcacacagcct

SEQ ID NO: 1716 - DNA, 201 bp, Bos taurus
ctggcaaatgcatgccttcagtcaccaggacaaccagacaatagagtgtccatctaaatcagttgctatcattgagccttagatgaagctgaacaatgggtgagtcgtgttcatgctggaggtagccctctggtgctggtgctgtctgtccctaaaccattgataatccgagaacagttcttacttcgtaggacaagtgaa

SEQ ID NO: 1717 - DNA, 201 bp, Bos taurus
gtttcattttcagcagtagagcactggtgggcagaagaatacagaagaaatggcatgtcatgtacaggcacaaagagaacaagggcgggccctgaagttatgtcaaagaatttcaggaaagcaaaagcatttgtgaccatgattcggttttcaagttttttcaatatgtggattgtctgcagtggctggggtgtcttgttg

SEQ ID NO: 1718 - DNA, 201 bp, Bos taurus
aaggagaattctcaaccattggactactagggaagtgcccctgcctacaatgttttaaaggtgtaaaaactgttagctatggtagcccattggccatcatttgccacctcatattaatggtttgcaaatcacagattaaagactagagctactaaaaggctaaagagaggaaagagttttgatagtttgaccttaaaccat

SEQ ID NO: 1719 - DNA, 201 bp, Bos taurus
caggctacagtccattggactgcaaagagtcggccatgactgagcgactaacactttttcactggtccataatggttgcagaagtagaggcttggggttcactggccgattctggacctctgtctgtggtctgctttgtcttaacagtcacgttcctgtctcggaaactctgaaacagacctgcccctaagtgatttacag

SEQ ID NO: 1720 - DNA, 201 bp, Bos taurus
tgtgagtgtctccttgaagcctggccctggaagtccaggaggagtgaagagataccttggtaatcctctaatccataggtgacatcttttcttaaaaaatattttttattttatttttggccatggtgagtcttcattgttgtacatgggtattttctagttgtggtgagcaggggctactctctagttgcagtgtgaggg

SEQ ID NO: 1721 - DNA, 201 bp, Bos taurus
tagtctccatctcttggcaggcaggaagattttgttttaaaacagagatttccttcagcatccctaaggcatctttatggagaatggggccatctaaccattaaatctgttaaagtgcctccgtcagcatcctcactagtgttttcttattctctctccctcctgaaacttcttacgtgaagattgtgatgcgtcagccaa

SEQ ID NO: 1722 - DNA, 201 bp, Bos taurus
tcttatggttgataataacaagacacaggtagagaacttataagctttctagatctttagggccatgattaagagtaaaagtggaaaatattactttatgtgtgtcataagtgactatatattttaaggtagtggaccataatatttacatgtatgtctgggagaagaaaaggagagagagaacaagtttgattgaccaat

SEQ ID NO: 1723 - DNA, 201 bp, Bos taurus
agttcttaattgtggcaggtgggatgtttagttacagcctgagaactctcagctgtggcatatgggatctagttgtcagaccagggactgaacccaggccccctgccttaggtgtgaagagtcttagccactggatcaccatggaactccccagtgctttgcattttgaaagatttttataccagtgtaagcattactatt

SEQ ID NO: 1724 - DNA, 201 bp, Bos taurus
ttcagtgaaatataaacaactacaaattttgttgagttcttgatcatctggcaaatcaagacaaagcacaaagatatgttagttctgaacaagagacaatttatctcatgaacaaaaagcatctgtggtcagaggacaaatctttgacagttacaatcatgcctaaaaggccaccataattacaatgttaatgtttctcaa

SEQ ID NO: 1725 - DNA, 201 bp, Bos taurus
atctggagctttctgtcctttccaaagatctttcagttcctcgtgttgtagaatgggggcttctttttttaaactgcctgtcaaccagggtacctttcaacaaccacaggccacccccaggtcctagttaactgattccctccacagatggctcaaaacatggctgtttgctttcttctaggccagcaaaagcagacttga

SEQ ID NO: 1726 - DNA, 201 bp, Bos taurus
tgtttccattaaaaaattatatccagactcaccagagtctataacctctcttgagctcccaccagtgatcagcggtgagaagcatgaacaaggctgtccagagaagccccaaagccctgcttggcctgtccccctcaagactgaagtacacatcccctgccatgtgtcactgccacatgaagagaactgtaattaaacaat

SEQ ID NO: 1727 - DNA, 201 bp, Bos taurus
ggggacactctaccctggccgccattttgctgggactccatgagaggtacatgaagctgcagctcaactcagcttgacttctgacacacaggaaggtcctgaagatggtactaatggccctattcttatgtgggttggacaaccacattgcacagaagttctgagactgtctttctttccccactggcattactatcagaa

SEQ ID NO: 1728 - DNA, 201 bp, Bos taurus
cttaaccacagaagggcttgatcttttaaatgtcaacactgctcctcaaaattattcaaataagtctaatgaacaaactgtgttacctaacacagcagccgctagtcaagcaacatactactattcaaatttatcagagttcaacacaattgaaaaaccagcctcttcatcacaatagccacatgtcaagtgctcgacagc

SEQ ID NO: 1729 - DNA, 201 bp, Bos taurus
aaagatcctgagagctgatagtttaggggcttctccctttagaaaccatttgaactttgctattgttcttgggggtagtagtggtggagaggcttcgttctcttaatcaaatttttcacccaaccaaaaagcagatatcttatagggaagggagacttgtattgcccttctaaggaaataagattttctccacactttagg

SEQ ID NO: 1730 - DNA, 201 bp, Bos taurus
gcaggccagcccaggagggagactgacatacagggctatgtctacataactgcctctttccaaactcacatagcagagtctttgcctgatgaagaggaggcgagaaggccctggagaaatatgcaaactcaactaccctgcctaatttaaatgagaagaaaaacaccattcaaagttgagtttttagtgattgacaaaata

SEQ ID NO: 1731 - DNA, 201 bp, Bos taurus
atgctaactcctaccaccagaaggtaaatcccacctaatagttcagccaggaataaattctgaatgacctgaacttgaaggggagttgtgggagcagaaagccctcctaattaaaggccagttcattagcactttcatacatatggattagccatttaaagcgaagttaaatagattggggaaagatttttaatgtcaaga

SEQ ID NO: 1732 - DNA, 201 bp, Bos taurus
aagacccggctctagcggacggtggctcggcccgggtcgagaggggcgcaccagttggcggctcacggtcgtaccagaagtatgagagccaaggtagccaccaggccctggaacggcgcgccccgagagccccgagctggcacggccggagaaccagggtaggcagagaagagacgcttgcaaggtcggccaggggtccgc

SEQ ID NO: 1733 - DNA, 201 bp, Bos taurus
aaaaaaaaacagtcgtccgcggcttgcgtgcagcctctctgtcagcgtgggaaggagggaaagaaaagactcagccaagtgtcccgaggaggagccggccagggaggggagaaagggaggatttcttttccagggtagggtttaattacgggagattttgtacatcttatcgcgggcttttacgtatataccaaggccaag

SEQ ID NO: 1734 - DNA, 201 bp, Bos taurus
ggtggggcatcaaccctccctgcagttgtaaattcttttataatttccctgtccaccctcctcattgaacattttatacttgtggattcaatcaaccaccggtcatggggtactgcagtaaatatttagtgaaaaaaatttgcctgtgtatgaacttgtatagttcaaaccatgttgatcaagggtccactgtaatataac

SEQ ID NO: 1735 - DNA, 201 bp, Bos taurus
accatggctcacatggggacacacacacacacacatggctctttcaggttccttccccacagacctctccacggtgctgtagtgtcaggtcatggccctcgacttctccgagagtgagtgatccaggacagcaagacagaagccccaatgtctttggtgaaccagccttggtatatttttgcaattcctcttggttaccca

SEQ ID NO: 1736 - DNA, 201 bp, Bos taurus
atgtcttgaagggtttacctgcaaaaggcggtcccagcaacgcagagatgccgttagcacagatgatgattccgtaggcattggccaggtgctcaatccctaccaagtcttccgtcaccacgggcatcagggagaaataaccgctggaaaagcctatcagggcacagatgactgccaggccggcataagtgtgcatcaagg

SEQ ID NO: 1737 - DNA, 201 bp, Bos taurus
tcttgcacagagggtgctgagtgttccttcaggaagtggccaccctagagagtccccagcattctcggcaccctgaatcacagtgcgatactggctgtagacaccacagaaggggccccaggtctgaagactcagggtgtagggagaaatcaaagtggagtaaatgtctggcttcacttctgttagatgctgggtatcggg

SEQ ID NO: 1738 - DNA, 201 bp, Bos taurus
agctcgtgggcaactctgagaacagtccctgaggttatactgacacacggagggacatacacaaagacacagagctgctgtgtcaatgggttgtttggttaggggccggggtgtgtgctgaggatccataggggtctttcttgtggctgtaaaatgtaacctattaagttttacaagtaactatgtgagaggcatgatcct

SEQ ID NO: 1739 - DNA, 201 bp, Bos taurus
actaggtctcttcagtggctccctactgcacttagaataaaatcccatctcccacaccttggtcaacagggatgagctgtctctggcctccagccccttcttgttttctcatcttacttccttggtggctatttttctgctgtctcttctttgaggtggcccagatacatctttttcttttctttcctgaaaagatacaga

SEQ ID NO: 1740 - DNA, 201 bp, Bos taurus
agagaagtccaaagaggaagccactgatgtgtccaaagaaggaactattgtaatgttcgctcataataaaagagaggaagagaaaaaggagtaattgtatgcagaagaaaatgtggaggaaatagtgttttgtagcaaagaagaaaaggaaaagggaaggagtaaaaaggaaagaagagaagcaagggcagtaataaattt

SEQ ID NO: 1741 - DNA, 201 bp, Bos taurus
taagtgtggtaaacgctcccacatgactctgtgtatttgactcctcactagtctattgttttactttaaatattttgatggtattcatgactatatgactcaatgaatcttttccatttattgttatacagtgtttctctttatccctactaatgcttttaatattaaaatctctttttctgggtgctgatagtgtaatgt

SEQ ID NO: 1742 - DNA, 201 bp, Bos taurus
aagggagtgccttccatagcaaagtcctggccactctcagccttgggggtggttcctggagcaaccttgaccaccagatcagatggagccacggagagggaggggcggggggcctggtgggagaattatccttaaccctcttacacaagcttcccttttccaaatttgctgttaaagaattccatgctgtattggtcctag

SEQ ID NO: 1743 - DNA, 201 bp, Bos taurus
gggaggagaggcctgccatccaactgagccttgagcaaggtgattgagaccaagaacaaaccaattctcccttgctaagaggaaaaagagaaggggaggcagaggcccgagtcctgagcaaagattgagaatcagggaagaaacgatgaaggaccacggagaagttaggcagggatatttgtatgaacatctaagcagagg

SEQ ID NO: 1744 - DNA, 201 bp, Bos taurus
tttggtcagttttcattgttggttctttgtcatgtacagtgatgtaatcagtgttgttggctaaggaagattctctgtagatctcattgcgatagtaaggatgcctctacaccacatgctcccaagaagactatacagattgaccacagataagcagctctgctgacctcatgggtgaggcgggagtaggcagcaggcgtg

SEQ ID NO: 1745 - DNA, 201 bp, Bos taurus
ggtcttcgtggcccagccagttctaggccaggacataggtcttactagactttctctgttctctcccagggatcaacaaacgagaggccaagaactgcaacgccatccgccactttgagaacaccttcgtggtggagacgctcatctgcggggtggtgtgaagccccacccctgccctccaggccccgccccatcttccag

SEQ ID NO: 1746 - DNA, 201 bp, Bos taurus
gctgcgtgctgagaaagcccaccactcagccccagccccatcggcccactcaggatcggggagctgccctgaacatactccgcgccctcacagagtcccaaagacacttcaaggcagggccccttggtctggtctctctgaagaccccgcacctgggcactgaggtctctcgccacctctgctccggagggctctctctgc

SEQ ID NO: 1747 - DNA, 201 bp, Bos taurus
ttcgggggctctgcagaggaaaaaggcccaggggtgtgctttggaaacagagttccagttttgtatccagctcttcctgcacccctggcacagaaggatctccaagccccctggcccaaaggaggtaatgttgctctttcttccctaatgctgcgatccctggccatctggacccttagccccacagcgccatctgggggt

SEQ ID NO: 1748 - DNA, 201 bp, Bos taurus
ctaaagttacatttgtaataaaaaaggggcaccacataagtaaaaagaggaaaaatacaatcccgagaacctttgaggctctctgttcattggaaatggtctgcactgactttttccctactgtggacattcttcgcataagtatgtcagcacttgcattgggcagagttttgtccttgtgaaagccatccagcattgcca

SEQ ID NO: 1749 - DNA, 201 bp, Bos taurus
gtccagctgtgcccagggtggcttggccgtcttgtgctgctgtgaggggtgggggcagggtggtggtgggcttccaggaagagaaccctagaacctttcacggctactgctctaaggcccagtggggtggcttatgctttctcaaactggcagagtgaacacctggcgtcttacctaattgtggatttgaattttctcagc

SEQ ID NO: 1750 - DNA, 201 bp, Bos taurus
ggcgcccactgcagacagcgatgattcaagatggcctcatcttctggctgattgacatcctgaaggagcccgactgcctgtctgactacacgctcgagtattcggtggccctgctcatgaacctctgcctcaggagcgcaggtctcacagccctactcccctcccccagctctgggttggctttcatttttccctcttaga

SEQ ID NO: 1751 - DNA, 201 bp, Bos taurus
gctccgggtgctggccgacccgcccacatgggggcagcagttagaccccacccacacaacgggcgtctttggagactattggccttgccttggtgggttcgctgcattcaacaggagataccactctctacagcactggggttgatgggaggttgaaagatgacaggtcttgagccgggttgtttgctctgaaggggtgag

SEQ ID NO: 1752 - DNA, 201 bp, Bos taurus
ggacgttgatgtggccccgtgaacgactcaggatggaggggtactgacagccgtgctgttccctccctggaacctgggctatgttcttccctccacttagcgattgggaaaaccgaggccttgccagcagccaggtggatggggaggtgtctagcccacgctttcaaagtaacactcttgaagcacctaagtggcaagaga

SEQ ID NO: 1753 - DNA, 201 bp, Bos taurus
aatctgataggcagaacagtgcattacagcctacactacaaaactagtataaggctttctgtgacaaatctatgtcactggctgcaattcaaagtattaacacctatcttcaaaaattatgaacacgataaatttattcagtttaaaaagtttaaaaataatacttatgattccatttaataagaggaaatacaataaaca

SEQ ID NO: 1754 - DNA, 201 bp, Bos taurus
tgtcccctgaggcctggtgctcagacccccgaggtagaggccttggtagggtgggacttacttcggggcagtgggcatgtggctggtatgaggcccataggtgcctttgcaggacagggcaggattgtttcttagggaactggagcctgggtgtgagtttgacaccctctcccatatgctctgccccaccccctgtgtgaa

SEQ ID NO: 1755 - DNA, 201 bp, Bos taurus
acaaatctgtcaaagaaaaaaaaatataagtaaaatactttatagccttgaagttggagacatttctttaagcattgatctaaagcctataaatatatatttaagactgataaagattcattgtaagatttatctggcaaattaaatcatctggggaatgtaattgctacatatatgacagataaggagtaaatatgctaa

SEQ ID NO: 1756 - DNA, 201 bp, Bos taurus
tgagttagttttcagctcaatgattaaattagttgcttctgtaccacagcatgaaattcggactaaacctgttagtataaccttgctccataaaatgtgtactttatgtaaggccttaagtgataatagtagtttttattgaattgtttgttgagtagaatattttgccatttatgacttgtaatttagagtttttaaaag

SEQ ID NO: 1757 - DNA, 201 bp, Bos taurus
ctttccagaaactgcattttaccttctagtttaactctggcatgtcagttgtttcctctcacccctgcccccagcactcctctctctgagatgaggtgtgtaaggcatgactcttagaaaagaacagtagaccagtgatcgtgtgtagccaccatgcttagatacggggtacacatgtgtacctcctgcctgtgttttggg

SEQ ID NO: 1758 - DNA, 201 bp, Bos taurus
cgtgagttgtttcagtggcatcaccagagccaaaagagtggaagggacatgaaaaagtggggacgctaaatacatacatgcctttcaaagagctttgccacgccagaggctgtgacagggagcttgacagaagcagggtcctgaagatgtttgtgagaatgaggagggtttgagcctgctggcaggcagcgggtaaggagc

SEQ ID NO: 1759 - DNA, 201 bp, Bos taurus
gtcacaaaccatggagctgaatggaaggagggctttactaaattactggactggtttttacactccacccaccaactgtgcaaaggcattttgttacaatacagcttgtgtggttcaaccttctctgttgtcagttagctggtccaaaaaaccaaagggaaagagctgcttgtttatgtttcataaatgggttcaactccc

SEQ ID NO: 1760 - DNA, 201 bp, Bos taurus
aacagatgacatgtttgatagtcatggaaagttctcacatggctgtggtcagcacatggagcagcctatgtgaagcatctcccagggccagcttcacatgggggcagcgccctcacctacaaacctgcccagactttcagccctcacacacatctctccttgactctggggcccatcagatgacagagggggcattcctcc

SEQ ID NO: 1761 - DNA, 201 bp, Bos taurus
ttgaggagaaggcctacaacaaggaactgcggcccgcagcgcacaaagagagcgtggagatctccctggctctcaccctctccaacctcatctccctggtgagcggcccctcctggctggtgggggaagggcagcagccacagcttcctggaggtccagctgggatggccatggggaggaaggtcaaggccccagccccag

SEQ ID NO: 1762 - DNA, 201 bp, Bos taurus
ttatggaatcttgcttcatgtttatttagagcgtcttcagcagtttcttggcaaataccagctgttttcttcagactgttacacattttttctttacttgtaaagtgtgcacttgactgcccagtactttgtaggtgctctctgtgagttgcagaggaataggaaagtaatcaagggcttcccaattgggaagcgccacta

SEQ ID NO: 1763 - DNA, 201 bp, Bos taurus
ttagtaagatgaagtgtatgctgaatgataggctggtactagttaggctggattagcagagaggaaaggcggggaaggagaaagtcagagctggaagagaccgggactctaactcactggaatttgaagaaaccttgaggacatcattggatttctaccaagtgtgaggtaggaaatgccagtcaatttttatttagatct

SEQ ID NO: 1764 - DNA, 201 bp, Bos taurus
agttcgtcaacagcttcgtttcctgtctgacatctgctgggagatttcccagttggttctctgtcaagccgtgtggccatgggccactcagtccctttttattggacctcagtccctgttctagaaatccagatggctggactagatggtccctggggccccttcctattccggccgtctgaggaggaaaggaggggcctg

SEQ ID NO: 1765 - DNA, 201 bp, Bos taurus
gcacctaacaaggccattagctctgggtctttctctctggggtggcagcaggaatagaaaacaacagagataaggtctcctagcagcacagtctcagctcagggctctggggatgggcctcccctcctgccggagaggccatcccaggaggctgactgctcacacctgggcagcattcctggcttcatcccctcctgtctg

SEQ ID NO: 1766 - DNA, 201 bp, Bos taurus
ggtgtggtctgggcagggtgaccagtgtgggaggacgaggttggagggaggcaggcagagccaacggggagaacaagaaggccgatgtggatttatattcaacgctgcaggttgtgggagatggtttgatggaatcgcaagagggaaaaggacatggtcagatgtgcatcttgaaggcaaggcctaagtgcttgtcactcc

SEQ ID NO: 1767 - DNA, 201 bp, Bos taurus
ctccttgaggccaattccaaggagcttttctcagtcttcattttgattccttcaggaagcagattatattattgttcatgaatgttcactgctcctcctaccggggccctcccagtgagagaaatatatcccagtctccttggctgctgtatggccgggagacttgcttttgcaaataaaatgtgagtgcatgtgacctgt

SEQ ID NO: 1768 - DNA, 201 bp, Bos taurus
ctcagccaaggcagcagtggctgtagcattccagcctggtccccccacatcttcacctccaggccaggctcagtgggtctaagagctgttttggtacttttgtccttgagaccagtcccattttaagaacttggagattgatttcttttcccttctaaaaaatgagtcttgcattcttcttaaaatgatatttgagggtgg

SEQ ID NO: 1769 - DNA, 201 bp, Bos taurus
ccgttgttggaggctgactcttacgtgtccttgaagctgaatgtttaagttcctagtacatggaagacatggagggtaaagtgtaaatgagatgtggcctctcctcttggagctcacaactgagtgtgagagagatgtgtaaattgatttaatacataggtagttgctgtgaagcactttgcagaaagtggtttgacggaa

SEQ ID NO: 1770 - DNA, 201 bp, Bos taurus
gtttaatacccctgctctgaagaaactgtccagcgctgcctacccagatccctcaaagcagagtaaggccagctggggaggggcccgggaaggggggtctatgggggctgcctacatgagagagcatgagagacatgtagagagcctgtcagtgcctcagaaaagggtttgtcttcagttcaggcccaagaagccaggagg

SEQ ID NO: 1771 - DNA, 201 bp, Bos taurus
cccagttgctctgggaacggccgggcctgtccaggtggggccggcgggtcgctcgctttcccaagccagggactgcctctgaggattgcagtggaaccaagagaactaggggcccaggctccagataggcggggtccggaaccttgctgctgctagggacaatcaaccactaccccgtgagtgtcacgtgtctgcgtatct

SEQ ID NO: 1772 - DNA, 201 bp, Bos taurus
cctcagatagaaagatggtggcatagaggtcaagagtcaatccatgtatctgtcacttcatcccacaggcagtcatgctggaggccccatatgggcagaacacaaaacatggaaaacagcaggtgccaaagggtgtgagatgaatccagtgaaaatataatagcctgacaccacgttaaaatcctagagcatatggcctga

SEQ ID NO: 1773 - DNA, 201 bp, Bos taurus
ggaagaaggtaagaggtattgagaggcgatgagcaagtaccaagtcctgcctgtggggggctgtctgggccattctcgctgaagccttgagggacgtggcacctcaggaaaggagggattaaacacggtgtttgcaggtgccaaggatagtctgagctacaagggggtgtttaccaagtctggtggcccgggtttaggcac

SEQ ID NO: 1774 - DNA, 201 bp, Bos taurus
tgtcaatcccactgtgcagaggaacaaacagatgtgaagttaactgacttgcccaaggctatataaccaggcagtggtagaaccagagtccaggtgtcttgactcccacagttcagtgctctttctactacaacaaatgacaactggaggaaagttatttcaggcctaaaagggtaaaagtacaaactaacacataatgtg

SEQ ID NO: 1775 - DNA, 201 bp, Bos taurus
cttggccagctccctccagccgtctcatttccttttgccccacggccctatggtcactgcctccctccagagcttgctatgttggcttctctacgtgctccatccatcccggccccgagctgccccttcacccattcctccagccctgcagtctgcttttgcctgctgggcttaatcttcacacccgcctctttgagcccc

SEQ ID NO: 1776 - DNA, 201 bp, Bos taurus
ctagggcgtaggggtggccccgggagttcccatcaccccaactcctgcagttgcccattcagctcctgctcaccccacggaactcagccaccatggagtctcaggccctagtccatcttcagcagggaataaggacctcatccctggaggcgtccaagcgcttgataaagccagggaagagagcgttctgccttgcacgct

SEQ ID NO: 1777 - DNA, 201 bp, Bos taurus
acatgtgcaccacttctacccggcagggcccccccgccgccctgggtctcataccatacattctagcagtattaaattgattttggtttgctacacacaccgcactggtttaggcctctgcgtctttagacattatggtcttcttagtcctctagagtaaactctttccccatactttgcctgggaagcttcttagctggt

SEQ ID NO: 1778 - DNA, 201 bp, Bos taurus
gcagagccagcccagaggaagatcgtcatgcacaaggtaggccagtctgtgcaagtctcaatcagagaggaggagccggccctcgcgtcttctcagttctgcaatacaggagggtgggcatcttgcttcttcttgcacagtttctcactagattgtgacttctttttccttttatctggagtggccgctgtccttgtgttt

SEQ ID NO: 1779 - DNA, 201 bp, Bos taurus
ggccctgacgtatcaggggtcagggaagtcttctctgaagaagcgccacttgggctgagaccaagaatgagtcaagaggaatgtatagtggccttctaccccctctctactcctcatgcgttgctctcgttctggtaagaccaccccagtttccctttgaaaacagctccctggctgttctcagcccgtccaggtgggctg

SEQ ID NO: 1780 - DNA, 201 bp, Bos taurus
gcccattttcaggctgccctgtccatggttggtgaagcccccaggacactggagaacccctagctggagaggcagagggaagcagggcctgagtggggagcgatcattgcacttggaaccacccagcacaagtgcatgtgagcccagagctggtccaggggacacggggcggggtatccaaagcttctgccacggacatca

SEQ ID NO: 1781 - DNA, 201 bp, Bos taurus
agggggtcagcagccctctggtcctggagatggagcccctgggtctggatagactgagatgcctgagctgagagcctagctctgcagcctatggaagcctgggcctgcctcccccagatgaggtcaggcttcctctgcaggctcctgggggaggcttgggccaggccagctttgaggaaatttccagaaagtctcctgaga

SEQ ID NO: 1782 - DNA, 201 bp, Bos taurus
taggctcctctgtccatggaattctccaggcaagaatactggagtgggttgccatgcccttctccagctggggcccatcaattaccttgcagcttcagaacaaggaagggaggaggaaactgcctttgctgtgggtttggaagtggggagccctgggtttgaattctggatgattcatccctttctggctgtgggaccttg

SEQ ID NO: 1783 - DNA, 201 bp, Bos taurus
ccccgagccccacgccctcgttagaccccaggctttggcctgttttccagtccgggttctgccgtgtcctccctatgggaccttggggaagtcacttaacgtctctgagctcagggccctcatgtgtgagttgaagatacaaacatctgccttagggggtgggggccagacttagatgtggtaacacctgtgacactcagt

SEQ ID NO: 1784 - DNA, 201 bp, Bos taurus
atgaaaatatgatgccttgtttggcccactggtcacagaggaatgagagacccatggagtaaacttgagctgaacccatgatttgcagccaagcctagctcggcccaaccaagacaggcagagccatagctgccaaggctcagatatgggtgaaaataagtaaatgattattgtttgaagccaccaagtttggttggttta

SEQ ID NO: 1785 - DNA, 201 bp, Bos taurus
aagggcccctggttggggtactctctggatagacacatctcccagcaatggtgagggattcaggctcctcccgtcctgggggctgccacctgaccacccacggtctctctggccttgtgttccagtttcctcactttgccacaaaggctgacctgtccatagctggctctgccgagggttctacacttaaagcgtctctac

SEQ ID NO: 1786 - DNA, 201 bp, Bos taurus
cctgggcccacctgggctgagtctgaggatctcggggaatatctgggcagggatccaggaggcaggtggatttatgagtaagggcttagctcacggggccgcgtgtggacactgatttggagtacagccgacgcgctcattaacatctctgggaacatgccagcgttcacctggatgtgtgggcctgtttgttcctttgcc

SEQ ID NO: 1787 - DNA, 201 bp, Bos taurus
gttgcgtacatgtaccacacactcttcacccactcattggtcgatggacatttagtgtccttccacgccccggctattgtgaacagtgcggctctgaacactgggatgcatgtatccttttgaattgcggttttctcagggtacatgcccagtagtgcacttgatagctaataagaagctgctgtatagcacagggagctc

SEQ ID NO: 1788 - DNA, 201 bp, Bos taurus
ccatctgtgggtgggtctggcagataggccgctcttatgctgtggtcgtccttcaatgacaggtgtgaagggtcttgcagagaatctgatgcacagcagatggtaacagtcacaaggcccccttctttaattcagctgcaaactgggccgttatagggcaagctccatgaacagatggggcatttctgggatgggcaagag

SEQ ID NO: 1789 - DNA, 201 bp, Bos taurus
caggaacacagggccaatacccatgtttccacccagtggaaaactcagggtctgtgtactataaaaccagatgtgtttggaaagatctgtacaggctaggggcagagatgcaggtatgggccttgcaggtgggagagactgaagtcagagtgaccacccacatctgaccctgctcggtcatcctacccctggtcccaggtg

SEQ ID NO: 1790 - DNA, 201 bp, Bos taurus
gaagctccaccctgactcctagggcctgggaacctcaagtcccgggctccaaccaggttcccaactgttccctctaggcctcagtaaattcgagtaagacacaatgcattcattcatgcagaaagtttttactgagctcagacatgagtcctacgctgggcacctggggctctgggcttcctggaactggcctccagtggg

SEQ ID NO: 1791 - DNA, 201 bp, Bos taurus
ggtccaggtatttctatctgagcagggccccagcgcgctggcaggcgaacaatgaattcagattctgctgaaaagcttttggacaattaaagcacatcccctggcccccagcccagggctgggcagtgtggggcaggaggagagagagacagagagggacacctattggactcggccctggtaccgagtgggtgggaagtg

SEQ ID NO: 1792 - DNA, 201 bp, Bos taurus
gaccaccatgtgtgaccttcttcctgccctcctctgccttcgctcctgtgctccggacaccctgtgtgtgcctggaacccccgcacaggcccttgtcaccagctcttctctctccctgggaagctcttctctcaggttttcagggttcactcatctttcattcctcacaggccttccctggctcccaaccttaaagccgga

SEQ ID NO: 1793 - DNA, 201 bp, Bos taurus
ttgtttctcaacaaaatcagtgggaaccgtaaatttcagtcttgtcttagaaactttgatttttcttacgttacacagattccacttatttcattaaggctgtttattttattagtagccatcagagctattccttaagattaattcctatatgattattcatatttggtactgtgtagatagatatattttttttaatct

SEQ ID NO: 1794 - DNA, 201 bp, Bos taurus
tgagctctgagaccccaaaatccaggaggcatgactgtgccaggatatggtttgtaataactgtctgaatagattctgccatttggcctccagagagataggaacactccccatcccaccagcactgctttaaccctttccctcctagagtcaacacctgcatgggcccgggtgctgcatcctgctgggcagcctggagat

SEQ ID NO: 1795 - DNA, 201 bp, Bos taurus
ttcctgggtttctccataaaagcagtcagattaatacccacccctggggttgccaagtactttgaatctgaattcaggcacaagtgtcgctacttgtttaagtagtgactcgtatagctagccataaagcacccaacaggctgaggaggagttggttagacagcatcaccaacttaacggacaagaacttgagccaatgga

SEQ ID NO: 1796 - DNA, 201 bp, Bos taurus
cagtacgaggagccccatctagaaactctgggcagacacaggatagcctgtcaggtgtcatcttgcaaagggcagactttataaggaccaagctaagctgaagaccagagtgaatttctcatattcattttcaaagtgaaaaaaatgagaaaaataaagatttggacaaggacatataacaaacgagatacagaactagat

SEQ ID NO: 1797 - DNA, 201 bp, Bos taurus
tttgggtatcaggtgaatgaatggacacggtcttggtcctctgggagctatggcccagtgctggaaggacacacacaggcaatttcagtgagttttgggagcccaggggatgggcattaaccaggcctggggagagaggaaagggtatgaaagggtcagggaggtttaggaaaaactccctggaggaacggaggccttaaa

SEQ ID NO: 1798 - DNA, 201 bp, Bos taurus
ttttgcctgccagggccctggagcccctaggtgaaggacagtaaggatccttcagcctaagctcaccccatataagcctgtgcatccaactaggactgcagaagggtctgcccacaggcagggccctgctgagggtatggctggtgccctcagaggcaaagcagcagcagaatggtgtgggggaggggagaagcaaggatt

SEQ ID NO: 1799 - DNA, 201 bp, Bos taurus
atggggaaaaacactgaaggcactgttatctatgaatgatgataataattcctacctcaaagtgatatggggataaatgagttaatacatataaagcacttagaatagggataggcagatagaggcgtgttagtcgctccgtcgtgtctgactctttacgaccccatggactcttctgtccatgggattctctaggcaaga

SEQ ID NO: 1800 - DNA, 201 bp, Bos taurus
gagtgctcagctacttgctggcccttggtttttagttttgatatcagttttcagaatttatttaaaggaacatgcaagcatgggaactacaaccactaataacagtgagagagggtgttcaacaggcccctcctatggcctctgtgtcctgcgcccatcgtggggagcaagtgccacacggagagcaaggactggacctga

SEQ ID NO: 1801 - DNA, 201 bp, Bos taurus
gatgatgtgggctggggcaggtgcgacctagtaggcagggcaccaggcaggggtggcatggaggggcttgtgtccccacgagtctgggggccctgtgcctcgcctctcctgcccctgaaactgttaaactaattaaggctgtggagccgcaggattaatcggggcagctcggcgcgggccaggagctcaggtagtcgatta

SEQ ID NO: 1802 - DNA, 201 bp, Bos taurus
aggccctgagctctaggaacagggagtctaagagcaggacccccccacccagttcacccagaagtgaactgccttgttcctcctcccagaaaattccaaacggctccgctcatgaaactctggcctgcttcgagctcaatttccccactggtaaaataggtgtgtccccaaggcccacgccactgagggataaaggatggg

SEQ ID NO: 1803 - DNA, 201 bp, Bos taurus
caatttaactttaattgtatgtaaattagactcctgaaatgcttaaaaacagctcattaaacatttctccctgcaatcttatttacaccattttcttagccaggcttttctttattagagtgcagaggttaactttagctcagatctgagtttatctcaagtttcaaatgggtatggagtctatgttaataaagtgttgcc

SEQ ID NO: 1804 - DNA, 201 bp, Bos taurus
tcagtgtccctccaacttgtgacacattctggcatgcttccactaaattctcctttggctgagtcagctcttatccctggcctccaaaagcactttaactactgcatgctggcacagtgacacaggaccagagttagtgggtctgaggttttccctgtgatctcaaactgggctgtccctaagaaatgggcccatctagtc

SEQ ID NO: 1805 - DNA, 201 bp, Bos taurus
gggcatgacagtatgtctcctatacatacatgtgacatggcacatttggcatgtgacagataaaaaagcttgcattactgtgacttggccattttacaacgatggcagagtgtagcagttgtgcccacctgtacattttcttgatggaactgtgacacctgatacggcttgtggtggcagtgtcagaggcctatatgacag

SEQ ID NO: 1806 - DNA, 201 bp, Bos taurus
aaaaaaaattttaaaaatcttcaccaaatctgtgtccataatcaagtgcttaaatacaacactgttttatctttcctgaaataaaagctacatttatgaacactcatgcaaaattaaacagcatataattcctaaggccttcctagctttcttcacaatttaaaatctggagacctggatattcttacacttgcatttttc

SEQ ID NO: 1807 - DNA, 201 bp, Bos taurus
tcctgccccaaggctaccgagcaaggccttgcagcaaggctacagaagcagcatctaggaacaaggtcatcttgggaactgactgagctcctttgtaaccgcggccagaagcccccctgattatcaccagcaggctttctgaccccagttcagttcagttgctcagtcgtgtctggctctttgcgaccccatggacagcag

SEQ ID NO: 1808 - DNA, 201 bp, Bos taurus
ctcttgccgcagggttccttttctctctcctgcccatggactcaagcttcaacaccattcctgattgcccttcccgacatctccttgctacctcccgagtttccctctcccctaagcctttgatctaggcccttctccttcctcggggtccctgcacccgtcctctccccagcgtcccccatttttctggaccctctttcc

SEQ ID NO: 1809 - DNA, 201 bp, Bos taurus
gaattcaggcaggaggaaaggatcagctggatcccaggccttcaaaggtggaagcccaaagagtagcttcagggaggctgtggatttaccacacctccccaaaatccaaaccctgtccatggcctctgcatggctctacttaaaataccactagctgcctttggttgactatctgtgtgcgaaggacgtcatgtacttttc

SEQ ID NO: 1810 - DNA, 201 bp, Bos taurus
ctttgccctcccagataaccgcttggcccccttactgttagttgggtttctgaatcactgttgaaagtgatttgcttgtgaacaagaagataaggccagggtccttagagaggagcttcccgctttgaatgggagattggaataggtaccctggaaattaccgtccacgttcaagcctaattccaggtcttctctacccga

SEQ ID NO: 1811 - DNA, 201 bp, Bos taurus
ctgtagtgaaaaggacctgagggcatctgagtcatgcatggtatagtaagtacaaacctcggcaccaagcaaaggagctgtcaagggcctggaagattcattcttcatttctctttcctgctcggcttaaagtccatggaagagaaagagctttcaatcagtggaaccaatgaggcatcagggccttggagggtagatttg

SEQ ID NO: 1812 - DNA, 201 bp, Bos taurus
gggagtcgatgactgtggccccgctgaggcctcctgcaggcacagaggatgcggggcgtgagccagggtcgttctcatcctttccaccccaaccataagccaccatttgccaggcctcctctaaatacctgggcaggctcccaggcacaactcagggagactccagggtcaccagcctttaaaggcacatctgggatccag

SEQ ID NO: 1813 - DNA, 201 bp, Bos taurus
ccaggcacaggaaaagcaagccaacctgagctgcactgcgctcaattcagctcagactgggctcaagcagccatgagcaaaaatagcttcggatttcacccgcaaggacactttagcaggcctggctgagcagtaagctccccgcccctggacgtattcaagttgagattttccctctggagaaggtcagaattcatgttc

SEQ ID NO: 1814 - DNA, 201 bp, Bos taurus
aggcactttttttttcattttcaccaagaactttattgaacaccttattcattaaccagatgaaacttttggccaacccaatagacgtgaggcggccagaagcttcattccctgcctgtgtgacgctgcctctctgagcctgagtttcctaacctgtgagtacaacaaccaacctctcggggttgttggaacacataaggg

SEQ ID NO: 1815 - DNA, 201 bp, Bos taurus
tgcctcgagtggccatctgtgaggctcagagccacccagaatggtcaattccctggcaatcgatacagagttagggctaagaagaggtatatcagttccacagcacactaatttggcctgtaacctgaaaaagtgaaatgaatctctggtgaaccagattctggtataaaacatgtcagggatcaatatttctggcttgtc

SEQ ID NO: 1816 - DNA, 201 bp, Bos taurus
ttccacttgccttggactgtgactcatcgttcattcattcatttattcattcattcactcaataaattcttactttgcccactgtatgtgaggcctgatggtggatacagaaatggatcagacccacccctgtcctcaaggacctctcaggacacatacaaaaataagggcaacagagcaagtgctgtgggtgtaatgcta

SEQ ID NO: 1817 - DNA, 201 bp, Bos taurus
tgctcaggaaatgctagtggcctgtaccgtggtcccagtctgaaaacaggttccctgggaagggctggtttccctggattctcccatgcccagtgcccagtacctgggtgcgatgtgggccagctggtgctgttcagtggacatttgctgagtaccatctgcacgccaaacactgtgctgggcactgaggattcaagagcg

SEQ ID NO: 1818 - DNA, 201 bp, Bos taurus
aagtgggcagtgcccagggctgccaatactgggtttggccatgcagagaccctcatcttcctggaggggtgtcatggccaggttataacccagcatcttgtggttctgggttggaggattcaggcctctggctccctggcccagccttattccagtgagtgcccaagaaaggaaggatgaatttaatgtgctgctcgccct

SEQ ID NO: 1819 - DNA, 201 bp, Bos taurus
ataatttatgtccttctccttcctgctgtgtcaacttggggttacataactgaacttctctgtgagggagcccttgggggcctccaggaggcagggttggtggtgacataaataaatatttctctgctctctgccccgggcttgggctctgagcaaacaccacagcctgaaagggaggccatgacaaggaggaagctgggg

SEQ ID NO: 1820 - DNA, 201 bp, Bos taurus
cgattcagcatgcacaaagctgttaaagaagaaacagtggaaccctatcaaacaatgactcggatctgcgtggtctacggcctgctactggagtggactcgctctcgacaggacactggggatcagtgctcaccttgtttgacccccttcccagccctgagatctgggtgttctctgaggcccatgtttaggggaccatgt

SEQ ID NO: 1821 - DNA, 201 bp, Bos taurus
tctgcttggggagacagggctggtgtctccaacctgcacgggcagcctgagggagacgggctggggagaaggtctgaggaggagcacacaggccgctgggctggttaatggacacggcgtcgtctggctggacgcgcagagggtagattcaagcacgacgtggggcttcagatcaggacacctcccggggcatctccgggc

SEQ ID NO: 1822 - DNA, 201 bp, Bos taurus
gtgatgccaggcagtgtgaggtggggtcaaccaaggaaggcttcctggaggaagagaatgttgagccagctctttaggagggctgaggcccagatgggcaaggaggagggtggtggtgaaaatggcactccccttgaacacttggcacttccacaccatgcggaagcctgtcaaagcccagctgttggccctctgccctgg

SEQ ID NO: 1823 - DNA, 201 bp, Bos taurus
gctgtcactccagcgtgaaggatgtaaagaataacaggacagaccccgcccccgtttgtcgctagaattaaagtaaataaccggccaaagtgcttgacctggaacctggcacttggaacgcgcccggatacaaccagtggtgtctggggctacgttcttaaattggccctgaactagttcgtcctgtttcaagtcccgtgt

SEQ ID NO: 1824 - DNA, 201 bp, Bos taurus
gctaaggtgcaggtctccccttctgtctcctccttcgtgcccagggtctacatcagggccaaacccagtaaggacctttccaggtaagaggcctatcccacattcccacctggaggagcatggaagccaattccaggggttccaccaagaagaccctagggtttcagcatcagaaggtcctcagaggcccggggataccat

SEQ ID NO: 1825 - DNA, 201 bp, Bos taurus
ggaggctgggcctaaagccgttgtccaggagactcaacctctgctgtctccatagcaactgggacagccatcgtcctccctgctgaatgcacagggggcccttcgattttgttaagacacagtagccaggcgggtccagatttctattccagttccacaatttcctggctgcttgaccttgggcaagtcatgatccctctc

SEQ ID NO: 1826 - DNA, 201 bp, Bos taurus
cactcaattcaacttaaaacaggaaaagatgtaaacattggatctgttgccataactcaggctctgttccctgaatagaaacatggagacagcatttggggtaacatagaaaagagtagcttttcgtggtttgtcaggcaaaggcggccacagtgggctaatgccctcaagactgtgtgacccaccctgtaggggacagtg

SEQ ID NO: 1827 - DNA, 201 bp, Bos taurus
tgaattgttttccacagtggctgcaccattttacactctcaccagcaatgcacaaaggttccatagattcacattttattatatgcttttgcgatgtgagactgtcccggcatgaataaaatagacaagtccatgcttttaagaaacagacattcagcagagggagttgggtaatacacaaataaatattaatcttttgat

SEQ ID NO: 1828 - DNA, 201 bp, Bos taurus
atcaacttgactttgtcagaacatgaaggctcaagtcctggcttggcctgccacttgctataaactgggggcaaaggccttgccctttctgaacccatttactcgaggaatgccacctgcctcatataatggctatgagccctcccctgctgtgcaaactgtcaaataaaatatactctgaatgtgggcctgatgggtcca

SEQ ID NO: 1829 - DNA, 201 bp, Bos taurus
tctgtgaagagagacaaggcagttgtttcagatccacagcagtttggacaccagacaccagtggtttaggcaaacccaaggcctgctactcttggctctacgcagccagatgaaccgatgcaagtagcagcccaaagcgaatgctttccaagcacccgccagggccccgacaatcactccctctaagtctctcgggctggc

SEQ ID NO: 1830 - DNA, 201 bp, Bos taurus
ctctaaagcctgcagaaaggagtacagccctgcagacacctggattgtagctcaatgagacccatttccggattctggcctccagaaatgtgagaggatatgtttgtgacaactttttacagcagcaacaggaaactactcaacggtctaggcgctgccatgatccaggaggcctcacgttcacctgcgggccacaccagt

SEQ ID NO: 1831 - DNA, 201 bp, Bos taurus
cctgaaaagttagcacatacccaagctgtaaagtagccagagttgtgtcttaggctaaaatttgaactccaggacaccagagggcagagaacagggaagagtcctgggcaccagccaggcctgtggcccccagcactgccaccccagctttacttcaaagcttcagttacccctgcaggcggggggccgggccttgggcac

SEQ ID NO: 1832 - DNA, 201 bp, Bos taurus
gaagcttttcacaaaaatggcaccgaaggtgaagaagggagcccctgccccttccaaagccaaagcaaaggctgttaaggccaagaaagcagtgttaaaaggcatctacaaccacaaaaatagaagatccagacgttgcccgccttccagtggcccaaaacactgcagctaaggaggcagcccagatattcttggaagagc

SEQ ID NO: 1833 - DNA, 201 bp, Bos taurus
agccactattataggtctgggagggcccatcgaggatctgtctgacttatgaagtcactcgtgctcagggaatatgcattacttgccaggaacgttgacccgaggctccagggggcacagtggcctccggatctgaccaaatggcaaaggggttgtcttgggttctgaccaccgtgaacgtggtttaggtgtatggagtgg

SEQ ID NO: 1834 - DNA, 201 bp, Bos taurus
agctccgtgaccttggacttgttagttgaccactctcagcctctagttcagacattcccgtcatctaagagccggaacctctaacacaggggttggcaaagtggcccactgcctgttttgtaataaagtgtcataaataaagttttattggcacacagccacacacattcctttgtctgtgaccgctttcccgctccagtg

SEQ ID NO: 1835 - DNA, 201 bp, Bos taurus
gggggtcgatccagactggcctgacctggaaggccttctgtgggctgccctggcctctgatgctgacggcacctccctccaccccaggccaatctgctacttatgagtccacaccctcttcactccactgtcaagcttttgctcttggttatacccccgccgggaacactttctctgaaaagatggggccatggcaggcag

SEQ ID NO: 1836 - DNA, 201 bp, Bos taurus
caaaatacatcccaactctaatcactaatcaccacttcccctggctctacttcggtcagcccacgccaccatcaccttttatccgggttactgcaacgacatcctaactggtctccatgcctccgccccttctgagccctacctctctctaccctactctctctgtcttcaacccaggagtcagcatcatcttttagcaca

SEQ ID NO: 1837 - DNA, 201 bp, Bos taurus
gtttggaagggttaaggcagcaacctaacaacgggagctaacgttttatgaggattatagcccaggcactgtgacaagcattttgcatgggtggccttatataatttttgcaaaacctgcgaggtagttactattattaactccccttttaactgagaaagtggaggcctagagagataaaatgactggccccaaatcaca

SEQ ID NO: 1838 - DNA, 201 bp, Bos taurus
ggccaggccgcggccctcagcctgctgctgaatcacggtgagctctcgacacggcttcgcctctttgagcctccgcttcagcagctgtaaaatgggaacaatggtgtctgctttgtgggccggtggtaagcgacgctgtaatgagagcgcttgtgtgagtgcttctctgaactcggacgttctgtatgcctgaataaggta

SEQ ID NO: 1839 - DNA, 201 bp, Bos taurus
gctcagcgtctggtgcaggacggtgcttccaggatagccacaggcgaaataaatgagtgcctgctctcaggcaacggcagctcaggacgtggctacaaccatgatacaaaagaaaggaaaggccccacctgcggctgactggcttggaaccattgctcaaggctcacagactcagaggaacactgtcacgtggtcaactcc

SEQ ID NO: 1840 - DNA, 201 bp, Bos taurus
agctattgatgaggaaactggacacctcggagaggtaaggtaacttacccagggtcaccaagcagggaagcagcaaagccaagaccagaacccaggcctgccctcttccaaacctgtgctccgtctaccaggcgacagtctgcagtgtctcaagtgtacatgtgcccctggttcctctgtcacgtgttcgtggcgtgggcc

SEQ ID NO: 1841 - DNA, 201 bp, Bos taurus
gctggggcagtggccgtcacacccatagcaccggcaaggaaccaaactgttgaagtgttttaagtgatacaaactcatctggccccttgagataggcttccgtcttgcaaatgaagcaactgcagcacccagagactaagtcacttgcttacggtcacagaactaaaagcggctgagccaggccttgagcccacaaggtcc

SEQ ID NO: 1842 - DNA, 201 bp, Bos taurus
tgctgaggatgagccccacccactgcgtacatcagtggaacgccggccctagctttcctgaccgcaggagccgccgagtggaaagggggtatcgtctatgcggacgtggggccttgaggagagggcgcaccggactcagagccagaagactctgactcggtctgtcaatctcacagaagcccaaccctacgccagttttct

SEQ ID NO: 1843 - DNA, 201 bp, Bos taurus
atttaaaataaaaagtacaatttgacttttatttccaagaatggctataaatactactcccagacaggcacagtaagtgaaccatttttaaagtaactaggaatgcttctctaataaatcataaaattaaaagtggaaaaagtacccgaataaaaaaaatctttaagttacaaaaaagtcaagatgtgggtttggtgggct

SEQ ID NO: 1844 - DNA, 201 bp, Bos taurus
gcggctggtgagcagagggctggtatctttgagggcgttaggggatgaggcagggtgtgactcattatgcttgggtggatggaagactgctgctgggagagggccagagcccggcccaggagggattttcagccctgtgggtgtgttggccccaagccagataaaggctcaggtgagtcactgtgctcagggttgccagaa

SEQ ID NO: 1845 - DNA, 201 bp, Bos taurus
gtccagaggtccgtgacaggttgtgatttttgccaaagaatgagtttgaatcaaataccaggggttccttgtgaacaagtgagccaagctactggcctcagtaaagcctccctctcagcgcagctttttgtgtacacgttcccactacaaagaaactcccaaagtggttaaaacaaaacaaacaaaacagaactttttttt

SEQ ID NO: 1846 - DNA, 201 bp, Bos taurus
tccccgaccacacgcagggtcgtaacccatcatcctggcacgtgaaaggcggcttctagtttagggagtactttcacaggcacttgcaagagccccagtgcgtgcccactggcctggtgatgctgaggccttggggagtggttccaggggtggggtggggcgcctgccagcctgctagcttggggcagctcagggcaggga

SEQ ID NO: 1847 - DNA, 201 bp, Bos taurus
tgggctgccagtctcctccctcacctctcaccttcgtgcagatgcccatggaagctccagtcccactctaggcctttggggacgtagggcctcacaggacccagccctcccttctaggttctcctaattaaggtgctgtgtgcatcagtagaaggaaatgtgggatgtggggacgggtcagggaaggcagaggacacagca

SEQ ID NO: 1848 - DNA, 201 bp, Bos taurus
tgcagagagaggcagatctaacggccactgcctctggccttcctggtaaccctgcaggtcctgaacgtctctaaacatcattcctctcagctgtcatatgcgtattatttttccctggcctgttttggaggaggaaataaggcttagagatgctgagtgacctgctcaaggtcacacagctggccgtcagtggtgaggctg

SEQ ID NO: 1849 - DNA, 201 bp, Bos taurus
cacaatgctttctgaacaattaaagccgtttctgcctagttgcccaagccagtgatgattctggaaaacaaaaaagaagacctccaagtttactgggccctgatcagccaatggttaatctgtggtttctcctcagttcaattcagtcgctcagtcgtgtccgactctttgcaaccccatgaatcacaatacgccaggcct

SEQ ID NO: 1850 - DNA, 201 bp, Bos taurus
gcagctaagcctgagttttggctcagtatcctcagatgaatactataagcatcttgggtactctggcctaaggcagtgaggagacaagggaattagcatacttaaaaaaatagttgctggtgagttggagggaaggttattttgtccagcactgggataaaccacttgatggcctaccttaatccgcatttaacagccagc

SEQ ID NO: 1851 - DNA, 201 bp, Bos taurus
ctacaaggctgaggtcctgtccagggctgaatttgccagcagttcggagtacttgcctcctttcgagtttaagatggccgagagacccgagatctactctatgcctgagcccgtgcccagtgaggactccttcaaggctcaggtctcctccgggtttgaggagctgcccaagatggcggcctccaagtccgaggcgtctct

SEQ ID NO: 1852 - DNA, 201 bp, Bos taurus
gcctgggagtggggaggaagcgggctcgtgggccttctccagacaaccatgagccagctgggttggcaggaggcggggagactatgggaaatgttggatgtggccagctacctgagggtcttgagtgttaaggtgggatgcttgtgccagatgtgtgatgtgtgggggtccgccctgaggtcctgagaggggtggtggaat

SEQ ID NO: 1853 - DNA, 201 bp, Bos taurus
ataacagcaacaatggtccgacttgagggcctgtgacattgtcctggtttcttcctgcctccacctcccggcgtccacaggccacccccatgaagaccctcatctgtgttccctttttgaacgtatgaaaggatttctctgggatccctgggtcaaagggcacacatcaaattccgccagactgcactgcaaggtgtctgg

SEQ ID NO: 1854 - DNA, 201 bp, Bos taurus
aggtcccacccagtcggtggcgctccacgcctgtgggttttgtatatttctgttgatgacacttgttagttgctccccttcttgatggcccttggctctccgtggtaaattcagcgccatctggatttattaattacatctgtattccaacccaaggtgcatcctctaacagggagtcaagctgagcatgccctttgaaag

SEQ ID NO: 1855 - DNA, 201 bp, Bos taurus
gaagtccttgaatggccactgaatgaaacatagctctccactttcacgttctgctttttttctttttccagttgacagttgtcactgtggcttgggggaccagggcctgtgtgtggatgacaccagtgggtaactctccgctcctatgacagcaggttgacactgaaaccgctaacttaagcaagacactgttccctctgt

SEQ ID NO: 1856 - DNA, 201 bp, Bos taurus
aagaaacagatccctcaaataggctgatatttattaaagaaattgagttgataactaataaccttccaaaacaaaaaccacctggcccagatgatttcagtggtgaattctatcaaatatttaaggaagaaattacaccacttttctacaatctcttccagaaaattcttacaaaaactccctaactcattctacaaggcc

SEQ ID NO: 1857 - DNA, 201 bp, Bos taurus
ctgtgcttgggagctgaactgacccctcctctttctctctctctcgaggccactacgatgctcgggcccgcgtcctcatctgccacatggcctccctcctccgagcgcccttggaggagcttgacctcctggaagagaccttcctcgagagcctgaaggaaagcaaagaggaggactctgagtaagggacccctggccctg

SEQ ID NO: 1858 - DNA, 201 bp, Bos taurus
ttgcatgtttgttaaactgaggcctgaagagagcacgggggtttctagcacaaaaatgtaaaactggaacattatcaggcactgccagccccggagctcaggggccgtgaccttgccctgaggacccctgggtctctcacccggcctgccaccatctcgcgggggccaacttgtcctggctcatatctttactcccccaga

SEQ ID NO: 1859 - DNA, 201 bp, Bos taurus
gtttatagatatttgtatctgccactaaaactggaagctccttaaaggcctgagttgccccttgctcatctgcacactcccaattcagagcacaaggcctcggacagtaggatcttctaagaaatattttttgagctgaattgaattcattcactcatttccttattcattcgttcttggcatccttaacagcagaactgt

SEQ ID NO: 1860 - DNA, 201 bp, Bos taurus
gagttctgttatgtgcagactaccagaccctcacttgatccagtgcaggatggcctggattgcctcctgatcatgcggtccagagccttagaacttgaaaccaattaaaggagagaagcacgaggccccgtgctgtgtcgtgggcgtgctcgtagggagcagagggtctgtcaggagcagactccagggatgcgtcctgag

SEQ ID NO: 1861 - DNA, 201 bp, Bos taurus
aggggccccaaggctgaggcttgctaagtcaacatcatcattacatttcttgtttcctcctgaaaattcgggcttgttgtatgagacggctgttccccagcggccggtggaaggctggggacgtttcccactccaggccagtttgccgggcctcctggggacgtgggacccgcggcccctccaggtcaccctgccggctcc

SEQ ID NO: 1862 - DNA, 201 bp, Bos taurus
ggctgtcctcagtgcgccggcctgggccgcgggcctgtgtgggctgccttgcgctctcggctctaatgaggagactcaggcttctgtcatccttgcggccagtcacataactcatccgaggcacggtaaagccggggctggtttccaatgtaagtaactgcaggaggcgggcccgggaagccacgagggtgacaggtctaa

SEQ ID NO: 1863 - DNA, 201 bp, Bos taurus
ggctgtcacagtcacgcccggctcccggcccagcctgcttcctgccgccgctcctgtgcgcccacacgtccctccaccctctgtcccatcaacttggtcacaccagtagagggattgggaaatggccgcgcggggcaggggtgggacggcgcggggacacccttccttcctcttagtcactcgtctaactttcagcacatg

SEQ ID NO: 1864 - DNA, 201 bp, Bos taurus
caattatactccaaaataaaataaaaattaatttaaaaaatagaataaaataagggaaatgatggtgattcccctagccagggctgctgggaggcctgagcgtaatcaggtgtagccccaagtgaccagctttagagacggcagctctagggtttagctgaaggtcacgggactcacatgacctgtttgaatctcgcctta

SEQ ID NO: 1865 - DNA, 201 bp, Bos taurus
cattttcagagagggaagaaaaatagcagaaggctggcgtggctttttttttttttttttttttttaggaggcattctcaatgagaaggggaatggaaaagagagagaaaaggagaaagccggcagacaccccactttaaagggaaaaagaacacatcacaaccacagccacaaatcctagatgggcgcccagacaaaacc

SEQ ID NO: 1866 - DNA, 201 bp, Bos taurus
tcaatcctggccaaagtaaagtaaaagtgagtggaagtctgttgggcagagaagaggctgccaggaaaagtcttcattcttcaagaaggacgtccaggcgacggtggcccttttccttcctccgagtgttgtgtccaggtgtgatgccttggacaaagcgagtaatctctaagatccctccctgtggtgagaatagagatg

SEQ ID NO: 1867 - DNA, 201 bp, Bos taurus
atttccagggtgaaggttaaggcaaaatgggtgagaagaatgactaccctttccacgaatgctcaccactatgagcttgggacacaagcctttacataccgtagcccagcagggaaggccctactgccatccccatttagcagataggaaaactgaggctcaaggagattaaatagcctgtgagcgtagatagcggctagt

SEQ ID NO: 1868 - DNA, 201 bp, Bos taurus
acgggtctggatagatgctagggactcgcacatctgtgcacagcagcatgccctgaccaggtgggagcaaggtctgaacgtttccgttttcctgaaagcctgtcacagaggccttcgctgcctcccagagcttcctcaaactcatgtcccttgggtcagtgacggtgtcgaaccgtctcatcctctgccgccccttctcct

SEQ ID NO: 1869 - DNA, 201 bp, Bos taurus
ggtgattaggccagtggacagagaaactctttattaaattatttgctgctggaatggccccttctcattctcagaaatgtggccaaatgccaagaagtaggtttggtatcagcagacttgaagcgttcccactgagctttcaacatgaaggcaaattcaaatcccccaggtagtgcatactgtgaacttacaaggccacac

SEQ ID NO: 1870 - DNA, 201 bp, Bos taurus
tgcagcgggtgagaaagggtggcatcgtgtctgcaggatgagggcagggatggcaggtccatcatggggactgatgtgactcatcaggggaacgagagacgaggcccaggggcccggagcgcaggccaagcgcgaggacgcagaggtggagcccgcaggcagttttgccagctgcagaggcctccaccccattggtcacat

SEQ ID NO: 1871 - DNA, 201 bp, Bos taurus
ggcataatcgaactaccctcattagcatgggaagattgattctggatgctaagtacttagcctagcgtctggtccagaagaagtgcttactcaataatatcgtcatctgtggtgggggcgacaaggacacgcccggaatctatcatcataatggcctggattttaactctgactagacccagctgccaatgcaggagatgt

SEQ ID NO: 1872 - DNA, 201 bp, Bos taurus
ctcacgagtgcacacggtgctcccaaggcgtgcctttgcgtgtgcccacgtgtgtatgttcctgcgcgcgttcttgcctccgctctacccaaatgcaagactgtacttgtgcgtccaggcctccaggtgcctagtccttccctcctggggtgcgggcaccctgcctctctctttggtagcttgaaggacccccgtcccctg

SEQ ID NO: 1873 - DNA, 201 bp, Bos taurus
agtcctatctgtgctgcagggccatgcggggcaggggctactgttattcagtttacagaggtccagagcatcacctctcagaaactgcctccagcctgctggagaccggagggtgcgtggcgtggccgtgttggtgatgctgggtggggaaagaggatgacgacttcacatcgtcagccactgaggctgctgaaatgaaag

SEQ ID NO: 1874 - DNA, 201 bp, Bos taurus
gggccccaagcacgtttgcccgtcttccctccagatcacgatgctcaccctcagagcccggggagggtggcagacagcttccgtgccttgtgaatttcagttggtctgcttttggccacgtgacaccccagaagagctttcactggggcagagtcaccggctgcagatggaattcagcagctagacagagttacagggagt

SEQ ID NO: 1875 - DNA, 201 bp, Bos taurus
tccggctgagctgcaactatcaacagacacccacccccaggggccgtatgaaagaatgattgattgttgctctaagctactgaacttggggttcacttgtcattcggccagagctaactagtacaaacggtcacatgacgatccacgtgaaaacgtgtattaggtattagctagtttagctctcggtggttagtcacctgc

SEQ ID NO: 1876 - DNA, 201 bp, Bos taurus
ctgtctccacacagcactggttaagcatgtgagctcccgagccacagtcctgggttcagatcccagctcggccacttactagctgtgtgccccggggccttgtttctggtctgcgggatggaagtagcgacagcatctacccgtggggattaacaacgttgggaaagtcaaatgaggcagggcctggcaccgagcaagccc

SEQ ID NO: 1877 - DNA, 201 bp, Bos taurus
gcacgccagccggccgctctcagcccatttcccagcagcttcgggagcccaggatggcgcgagcacggtgaatcattaacctgcagagagaccagcagctacaggatggccacccaccaccctagaggccctgccggcccaggcctccctgtgcccagcccacgcagccgagctgggctcgcaggtggcccctctggctgg

SEQ ID NO: 1878 - DNA, 201 bp, Bos taurus
gaaggtaaaggcgttgctcaagacggctgcgggcctgacgagtggagtgggtgcagcggctgcctcctggctcccagcctgggcacccccccaaccctggtggtctcaaacaagccagggcctttgaacccctcttatcagatagaacggagggctgcttatcagatgtaatgacgataccgctcaggaggagaagcagag

SEQ ID NO: 1879 - DNA, 201 bp, Bos taurus
gtccctcaccccgacgtgccaggtggctgtgaggggtcatcttagcttctcagctctctgatgacctcgtgagctttgccatgaagtgaaacggcaaagtgttagaggccgggaaccttttccatcataaaaagtgcaatgacaatctgggtataggaaagaggctctgctcagcaatcaggaaccaaggtcttgtcccta

SEQ ID NO: 1880 - DNA, 201 bp, Bos taurus
tgcggcccgaggcatctcgcctcactgagagttccttcttcactgacagggcattgtcaggaagatgaaatgatgctgggcatggcctgcagggagtgctcgataaaccacacaagtcattatccatttgccaaatctggtccagctcaaatgccccctccaggcagtccgcactgatctccttcacagacaagggtgatt

SEQ ID NO: 1881 - DNA, 201 bp, Bos taurus
actggccacatttgaagcgctcagaagccacgtgtggcggcttccacgtcatactggcatagaagtcttccgtcgtccgagaaggttctgacagcaccgcctcagagcagcagttctcagccaggccgacgttacctttcggggtgcttttcaaccatcctacaattcacaggacgtcccccacccccagcagacaaaatc

SEQ ID NO: 1882 - DNA, 201 bp, Bos taurus
tgatccagtgactgttggcaatttgatctctggttcctctgcctctttgaaaaccagaatcggaaatgctaagaaggggccagataacccatgctttgacgagccctccaggtaatggttctgctgctgcagctgctgctcctgaactctgaggaccgctgtcccgaagctcgcattcatccctggccactgccccaggcg

SEQ ID NO: 1883 - DNA, 201 bp, Bos taurus
cgtctcacggccggttgaaagttgactttatcacaacccctctctgtttcactttttggcatcaggtagatctgaggtcagaccacgacccctcgctttccgcactgggactctgggccgctcactaaggactctgtcttagcttccctcgtctctaatactcgagatgtgtgtgctcagtcgctcagtcgtgttcggctc

SEQ ID NO: 1884 - DNA, 201 bp, Bos taurus
gttcctcctcatgtgctggcagtccttcctttctctctccctttgctgatttcttctcgttgccccgaactccagggactctgtccttaggcctcgtcttcatagacactccttcgggctttagatgcctcctaaattcatgtctctagccgagacatcaccccaagtcttcagactcagatggccactcaaccatattct

SEQ ID NO: 1885 - DNA, 201 bp, Bos taurus
agcataaaatgtatttacatgaacaaaagaagaagaacgctcacaagaaaaatgaagacccaaagaagtgcccaggcctaagtgcctgtataccagctgagcaaagagtagtcgctgtagaagagtgcctaagtgacgtggtggcgatggttgttgctaagccatgtccaactcttgcgacctgatggacgtggcccacta

SEQ ID NO: 1886 - DNA, 201 bp, Bos taurus
cgtgttctccctacagttttccagtaaaagccagatttctgctgctttgaaattctgtcagagtagctcagaggtgcagcctgggggccttaggagccacacttggctgcagtgtccttggaacgctttcacatcgagcctcgaaaacccgcttctggtggtgctagtgaggcccacagctaggggcccagaggccatttg

SEQ ID NO: 1887 - DNA, 201 bp, Bos taurus
gccccgcgggctccctagaggctgcaccagggcctcccgcagaccggggtgcgggggacgagggaccgggaggaggctggctttgacggggaagccgaggatttcacagacaggctccttgacccgcctccagattcgaccagtacgtgcacacggacgtgcccgagcgggacctcgcggccttccggcaggcctggccac

SEQ ID NO: 1888 - DNA, 201 bp, Bos taurus
tcttgaggcaggttgtccaggttggactcagaggatcagggactgctctgcacaccccctgtttttctcaggagttccatcaagctttctaattgaagtgatccgtccggattctcagaggctgtcctctgaaagggctgctgaggggtcctttgggaaggaaaggattccctctgcctggttaactccttcaagtgcaaa

SEQ ID NO: 1889 - DNA, 201 bp, Bos taurus
attgctctctggccagagaatggagattccacaggtggtttttttatggtattaaaacaaatacacaaatatgagaaacaaatgacgcaccccagacaaacggcaattacagaatcaggccaataataactaaaataatggactatacacatatacatatacacccataaaccaaaccaaaacagacaaaaaaataataat

SEQ ID NO: 1890 - DNA, 201 bp, Bos taurus
gtaatgtcccagatgcatttgccctctgtcttccccaaatatctgtcagcacaatacctgtaggtctttgaataagaacaaatctagttttactcttgtgatctatgaaggggctcactcactttggttttcatgtaatttgtgctaagttatcatatatacctttaggctaccaaagcactagtgaatgcttctccagga

SEQ ID NO: 1891 - DNA, 201 bp, Bos taurus
ggcgatataccctgggctaaaggccatcctgaacatgcttccatcacagcatctccactctccaactacgatacacacaaaggcggggtaagcccttatattaaaaggccatgtctattagaatactaaaagatctgccactttcctcattaaggcaaaccacatctaaacgatggtgataggaatgtgtctgaattttct

SEQ ID NO: 1892 - DNA, 201 bp, Bos taurus
atatgtacatatacatatatatgtatataaagaaaaaaaaaaaatcccaccaaaaaaaacccagaaagagaacctggtctgtgaggaaagctaatgaactaggccttgaacacagctgaaacttctgagaaaacccagatggtcaattagaaggcagttagatatgtaggtctggatcccaaggaagcaacgagagaggtt

SEQ ID NO: 1893 - DNA, 201 bp, Bos taurus
cggctgcctgctccctgaaccgcccagccaactgggccaccgaggggggtgcagagtcgtccacaatggcgttggtctgtgccggcctttcctggcaaaccaaggggaagccaaagttaaccagaaaatacgcacctggcactctgagcatcagcacaaggggccacgcgagatgcctgctatgtgacagtgaggtcttct

SEQ ID NO: 1894 - DNA, 201 bp, Bos taurus
agtcactcaaggtgacttgctgctgcagcccacgccctgcttgggccttgactcagtcacgtgagaacccatgaccacaatgcagataaacttggccaccaccttgctcccgggtctcagaatgtgcagcgtagaatcctaccctccatagttctttgggctaggaagaggcatttatgagatggagcagtggaaatgggg

SEQ ID NO: 1895 - DNA, 201 bp, Bos taurus
ttcttgagtctccaacaatctaaggccggggctgagctgttaatcagtctactagctgtggggcttctactctgaaacgtctggtgaggagtggcaggcgggaaggggcagggccacgaataccctcctgggctcctgacctccgctgtcctgtgccccaggccatctgcagatctgctcaggcagggatgtcctctcctc

SEQ ID NO: 1896 - DNA, 201 bp, Bos taurus
gaggccatgaaggccccggggcggctaagctgactgtaggagcgcggggaggacgcgggcagaggaggcgcccacagctgtgtggaaggggcagagggagtgtgtctcagctctcctggcctggattcctgtttctcccttgctaacttcttccccttctctctcccagcagaggaagaagaaccccaacgaagtcgtgta

SEQ ID NO: 1897 - DNA, 201 bp, Bos taurus
ttgccagaaatctcacagttcagaccaaaatatcaatacttgggcccaatctcctatgtacatagggatctcttaaaatcattctgggggcctggagtcctgaggagtagacagagttgccagtgctgtccttatcttctgggtaatggcacaatccttcccgttctgctctagtaggaagacttagaagtgaaggcctga

SEQ ID NO: 1898 - DNA, 201 bp, Bos taurus
gaatgcacataggttaggtgaccaccagagccccgctggtggccagttgcagcatcctaagttgcgactccaggatgggatgcctgaggcccactgtgctcgctctcagctgcagcatccccggggaaggatgagagcacaccaccctctggtggcggcagagcagacatcagccaggccaggcagcgcagtgtacccagg

SEQ ID NO: 1899 - DNA, 201 bp, Bos taurus
aaggaagaggagtgagaggtagagcagtcataatcataacaactctggaagcccactaggtgaatgttgtcccttggttaggccctggatctgctcctgggagtaactcccaagtttatgttctttaccattatggctccacactctaggaggcccttcacttttcatcattctccttagcctcttccaaggccaaagggg

SEQ ID NO: 1900 - DNA, 201 bp, Bos taurus
tgttttgtcagaactcttcatgttttggctggccctgcacgacaaggtcatagcttcactgagttttgtaaatctcttcaccatgacaaagttgtgatctgtgaaggggacattatatacaaacctgtattatgtgcttagtcactcagttgtgtctgattgacacaaccccatggattgtagcccaccaagctcctctgt

SEQ ID NO: 1901 - DNA, 201 bp, Bos taurus
ttgacttgctgcactgttactcagtgcatctctggggcattaaaataaatgttacatcatgatagcatgcagtattctgaaacataagggattcatggccctggaagtttcagagactatcatttagcaattacataacataagcctcattctgagtcttcccaatcatggagaccaggaggcctgtgttaatgaatgttt

SEQ ID NO: 1902 - DNA, 201 bp, Bos taurus
gggagcaggtagctcactccatgagtcaaggctggtgcaccccggtctgtaatgcagtcatcaggggtcagcgccacctatttctcgtttgttgagggtccgagtctgtgggccgcccaagggaggccaaagcacagcccttctgcacagagaggaagtcagatgggccctggggaacagctacccaggtgccaggagcac

SEQ ID NO: 1903 - DNA, 201 bp, Bos taurus
gcctggacaggacagggcgagtgttgtttaactgcccttggtatgaacctttgtattacagaagagctgcttctgcaagaggctattaccagcttcctatttggccttccctccatcctctgctgttcagctttatcattgccaccaagaggatgaagagccccagtgtggcccaggggcagtgaaagctgagactcacag

SEQ ID NO: 1904 - DNA, 201 bp, Bos taurus
gggcctttcctagacccaagaagtgtttgattccccaagtgctgttttcctgttttttccataagccttcccatgaatgccgcttctcagttctttcctcgttgggaagggctcgctggccttctcagccccctgcctgcctttttgcagcaagtcagcttagcctcagctggggctccttattaggcaagggttccagct

SEQ ID NO: 1905 - DNA, 201 bp, Bos taurus
gctggcaaccctctgtggatgagccacctctgtctgcctggctcccgtccacactggggcccccccccaccgggtggaagtatggcagagggcccagctgcggtcagccacacctgcccacctcaagcacagagaagaccactaagaaaagatgagaaaactatggtgtcagaaaccatgggccagagctatgaagcagcc

SEQ ID NO: 1906 - DNA, 201 bp, Bos taurus
ttccaggcaggagtactggagtggggtgccattgccttctccggctcccatccctaactaccctttataaaataagtccacttcttcagagaaaagggccgccacaggaattccctggcagtccatggttaagactcctcacttccactgccgagtggcaggctccatcctggttggggaactaaaatcctacaaatttgg

SEQ ID NO: 1907 - DNA, 201 bp, Bos taurus
aagagttagtgtccttcattacctatctctatgaaatgaactctttctttaatatcctgcagcagtatttcccaaaatatgtgccttggaacagtggttttgggaggaaaagaggtgttggaaacaagtaagtttggaaaaacctgtgtactatcctctgttcccactttaacttctaggcgggagtgacagggcacatta

SEQ ID NO: 1908 - DNA, 201 bp, Bos taurus
ctaataatcagcttaattccatgctttgccattgtgagcatagagccctgggtcttggtactctgtccagatcctctgcagtacaggccttcagcaaatacccatgccagctcttatctccgtgaggctactcagctcacttgtcttgagccatggtttccaggcatttcctctgacaatgttccctaaggccatacctta

SEQ ID NO: 1909 - DNA, 201 bp, Bos taurus
gagacagagggacgttgggtcaataacttgatttgttcaggatctgagtgggcagcagtagaaaagaggaaggaaactcatattggtaagacttctctttaggccttcattactttggaccatcattactttaggccccatgacttacttgtatctctctaaggtatgttattcttattttagaaaggggaaaactgaggt

SEQ ID NO: 1910 - DNA, 201 bp, Bos taurus
catacatggctggtttaaccctcacaacaaacctatgtggtaatggaggctcagggagatttagtaacttgccaatatcttgaggttataagcaatggacttgggatttatacccagcaagactggctcctgaattggtactttctttttaggcatggcttctccaggccataaaactagcaagtgacagaacaaagggtc

SEQ ID NO: 1911 - DNA, 201 bp, Bos taurus
ctgttcagttccactctctttactttgtgcatgaactagcctttgcaggcccatgtcatgcttatgctggccttcactgaatggccttcgtgttgctgaattgttttagggaaggagaaacctagtcttgcttggaaatcaagccaggtctttgcacatctgcaaaggtgtgggtgggaggcctctccagccctcaacttg

SEQ ID NO: 1912 - DNA, 201 bp, Bos taurus
aggctggctatttattcccctggccccgttcctgtgcagtcctgacatgctagctttgtcctttgaccaaagctttagctgctgtcagatgtcttttccacacagctttcttgggggcctgtaactgctcctcctcactcaatccctgagctttgaggtggaccagctccctgaagctccctgccgtgggctgctgtgcca

SEQ ID NO: 1913 - DNA, 201 bp, Bos taurus
gagaggctgctggctctgctctgaatgggctttagaaccaccttgcctgtctaacctgtcgtcttcttccttttctgctatttggtgtataaaactaaatcctatccccgggatgggcttccagcttttaacacagacctctcattgtggttctcagagcttttaaaatgaaaacagtgtttccagaattaggcaagtatg

SEQ ID NO: 1914 - DNA, 201 bp, Bos taurus
tcataagtagtatgtagcttcctgggaaggagctgaagttgtcagttctcaagacaaaagtacttccaaatacacagaattactctccctcaaaaagtcagccagacagtgtacctgaagtgggggctctgagacctcctctggagccatggatgggttttgtcatcagacacacttctggggattcatttttgagagatt

SEQ ID NO: 1915 - DNA, 201 bp, Bos taurus
acaaatgaataagacagaagggatggtaatgataatattaccattttatccaagtgactaacattgactgatctgatctgaacattgaagactacatgctgtagcttcaaccttgtggatttattcatgctaaagccccagatttaaatctacccactcagcctcagggagtgttgggctgggactggcatcctctatccc

SEQ ID NO: 1916 - DNA, 201 bp, Bos taurus
cacgacgcattgcatcgtctctcccatctggccccggagatgggaaggaaagaccaaattcagggtcagaccagcctgtctacttcctaagccctcaagattcagtgagagctaaaaacctccccttcctcacagatatcttatggcatccctgggacttttcttgttcctcagaatgcacaagcctcagaatgcaggagt

SEQ ID NO: 1917 - DNA, 201 bp, Bos taurus
tttcttattgtagactcagtgagagtaaagataaagcaactgtcaaaatagcatgttattttgacagtagccatatcataaccataaatgatacagtttacctgtacatttttaccctcactaatggggtctaaatactgtattctccgatatttcatacatacgcaaagatacatgcacatgggttttagtaagaaaggc

SEQ ID NO: 1918 - DNA, 201 bp, Bos taurus
ggttaagtgtgtgaacacaggggtagacagcagcctctctgtgagagacaaataagcattcggaagactcaagaagctaaagtcagtggaggctcacttcggcacaaaccttgggggaatttatgcattattagtcaatatcagagcctccaagcatgtgtccctttagaacaagaactctcaaaggcctgacaaggagga

SEQ ID NO: 1919 - DNA, 201 bp, Bos taurus
attagaaaacctatatatgtagacacataggtagagatggacaccatctcagaacctagttcaaacttggatgcaacacagtagaggcctctatccctggtgaagcctcatttctggcagttacaggcttaggtggtatctgtgaccacaccctccagctatttagggccagttataatcgttaaacagtttttcattata

SEQ ID NO: 1920 - DNA, 201 bp, Bos taurus
attctggcctggggaattccatggactgtatagcccatggggtcgcaaagatctggacacgactgagcgactttcactttcaccagttgaagaagggatataaattaggccaagaatctgaactgaagtgtccaaatgggtgtgacagtcatcagatgagcctgacatgacgatcttatgcaaggaaagggaaaaaaaaaa

SEQ ID NO: 1921 - DNA, 201 bp, Bos taurus
ccaggaggggtatgggatggtatgctcaccctctttctcttgctgccagataatactttccttcagaattcagctccaaacactcccaatgctccatacatgcaactctgacccaggaggcccaggcaggaagccccttcagaatcgaccctgagcagatgacctcactgagaagcgtcgcgtgcaaggtgccggtcagag

SEQ ID NO: 1922 - DNA, 201 bp, Bos taurus
ctgcgattagacaccgcacagaaatattctaggaagggcatccctgggagttgatgatgaagtttacctctagcaaggccatgaggccatgccaggtctttccaggttctgggtaccccatgggagcaccaccctaggctccaggagaagagaaagaactccaaggggccctctagctgcagccccccagtaaacagccca

SEQ ID NO: 1923 - DNA, 201 bp, Bos taurus
aaactatttattttttaaaatagaaacacagagagccctcaaaaagaaagccaccctgcatgccctcagagcccctccttcctttttttatgtgtaactatcaatgtatatcaactgggcatgcaatcatatttattgtcactttcattcatgtcatgcccttgcttatatggtttagatatgaattattgactgttacac

SEQ ID NO: 1924 - DNA, 201 bp, Bos taurus
cagaaatgttaagtccaagctaatgttttgtgtaaatcctggaagggcattgtcaagtcttattttgtagtcactagctccaaacaaagggccttttccagtttcactatttccactcacctttttcaataatgtcaagatgatacagtatagactttagcgtggcctccaaacacataactatatagttgatttcttttg

SEQ ID NO: 1925 - DNA, 201 bp, Bos taurus
attgatttccacattcattcctaatttgtaaatcacagattttcctgggtgaggcctctaagcagtctgatcattttgctcttttaggagctttgttttaggagcacagggtgagagatggaggggccctgagagagagttcagcagccaccttttaaaataaaggaagtggggaaaaaagtctctctatttctcccaatt

SEQ ID NO: 1926 - DNA, 201 bp, Bos taurus
gattccatgcttccaaagcaaggggcacaggttcaatccctgatcagggaactaggatcccacatactgtgggtatggccaataagttaataaaacaatttgaaaaagaactgtgagacttaagaatccaaatgaaggagccacggttaggcatttgttaaatatctctacttttctgcttggcctatctaggtgatagtt

SEQ ID NO: 1927 - DNA, 201 bp, Bos taurus
gccatcaccttaccagagatccaagtactcaaggccctgtatattttggccattgaaatgataaattattgaaaaaacagaaactaatttcttttccatgcttcagttctatgtcccaaacaaaagtacaataaattaaaattgaatgaaaattgtgataaagcctcatgtctaatgaatttgagatgagaaggaattatg

SEQ ID NO: 1928 - DNA, 201 bp, Bos taurus
tgagagcttggaggtaacaaggggggtgatttggataataattaataacccgagttccaggcgccactgaagcagcatgcaaattcaatgaccccgcagtggtacctcttgaagaagaaggtgctttattgcctctgtcaggcgttcccttctcagctgtgattccttccagcctcggtggtttgcatactgcggctaaac

SEQ ID NO: 1929 - DNA, 201 bp, Bos taurus
tgacaccccatgacagccctcattttctaagctgaccttcagtctttgcccttggacccttttgttcacattctgttgttgcaaagggacagaaacacaacccactactgccttattatgttttaatttcctgagtagttctagcatctcataggcatcttcactgtctctctcttttcagttgctcccctttgttctggg

SEQ ID NO: 1930 - DNA, 201 bp, Bos taurus
aatataaggcttatggccatgtcactcaatacaatgaaatatctccctgatctttatctgcttttgtccttgtttaagcaatgacactatcaccaacagacatggcctacattgtctacacgagatcacacaactctctcatgcatatactccaccctacgtccccatcaagaaaaaaaccctgagagattcctgagcagc

SEQ ID NO: 1931 - DNA, 201 bp, Bos taurus
aaaatactattagcttatttgagtttttccagttgtcctaactaatgctgtttttcttatctaggatctaagccaggaccccacatggcctgtctcttttagtatgtgatggtagtcagttttctttcttttcatgactttaatacttttgaaaaataaaggccaatatgtcttttcctcttttttctattttgttttggt

SEQ ID NO: 1932 - DNA, 201 bp, Bos taurus
atactacagcaaagaggcaagaggtaacgacaatggctacagtgatccacattgttatcgggcaacatacgtttggaaatgtattaagacctaaagtttaattcagctcccctaaacactgtgttattggtctggtctcacactgtgaactgggatttaattctgtccctgaatgaacaaatgaacttcctcttcatgaag

SEQ ID NO: 1933 - DNA, 201 bp, Bos taurus
attttgctttccagtgaccatgacgtgccatgcatctcctgttcaactataacttgaaggcaacttcaaaggctctgcatatgggaaggccagtaaacgcgtactaagcagcagtgcaagcaatccattctcttcctcggtcctgacaggagacatccttcttaggaccaccaattctttgtcttactctcattccctact

SEQ ID NO: 1934 - DNA, 201 bp, Bos taurus
gtctgagccaataatatatatatatggcttatcacctgtggatccaaatgtaccacttatacctacctttaaactttgggaataggtattgagaatagaactgtacctctttgagcatctctgctattcccgtttattttttatctcctccacctccaaccctactgtcattacatatatacttgaactcctggcctttaa

SEQ ID NO: 1935 - DNA, 201 bp, Bos taurus
acaattgtatacttcaatttaaagtatacacataattttaaaaattgggagaaggggactaacatatctatttttgagcatggccacaccctgtaggaaagagaaactgcctgagatcctacaagaccagggtccccaaagcataacatgacacccaagttaaatacaggccttagccaaccaaacataactgggaaacca

SEQ ID NO: 1936 - DNA, 201 bp, Bos taurus
caggtcactgttctcccagagcagggagacttctttcatgctaatggtatggagagagatgaatccccaacctctcacgcagtcaggcctcctcctctccgtcccttctggcagaggtctgattcactccctcactacccacctgctctcttgctgggcctccccacccccacctcctctcccttccggtattcctcatcc

SEQ ID NO: 1937 - DNA, 201 bp, Bos taurus
acagggtaaaataattcatcctctaagacgtcaattcttaactgggctctcaataacctgcatggcacccacagggaaaaccatatgaggagccttccagcagggcaagatagaaaagtgttttccttaggaaaataaataaataaataaaattttcatttagttacgaaaacaaaaaattcataacctgtatataacttt

SEQ ID NO: 1938 - DNA, 201 bp, Bos taurus
ctgctcgactctggggaattcagcttctctggggggccattattccagacttggaggaatatcctactgccttagagacctgtggttagacctgggtgtgactctgtgggccctagaactgaagatcaaatcaccatgttcccagggcagaaaccacttcttcagcctagtttcctaggcaggagtcgcactcagtctcag

SEQ ID NO: 1939 - DNA, 201 bp, Bos taurus
tcctcggcctttgctggggttccaagttacctcagctttaattttcacctgcgactctcattattaacaagctgcatacttccttttctggatccaaacacaggcactagcaagaaggcctagggaaatttttctatactaccagaaggcttatgaaatcttaatgagaggacgatctatcagcctaaacacgttcagatt

SEQ ID NO: 1940 - DNA, 201 bp, Bos taurus
ttccgtggaccaacagcaaggtgtttacaaggctgtactccttccagaagctagaggagagagtctgtaccttgcctctttcaaattgtagtgggcgcagcgttccttgccctgcggccgccttgttccaggtttcaaggtcagcgtcatcacatctccacctgctgcttcctctcatcattttctcctctgtgtgtaaca

SEQ ID NO: 1941 - DNA, 201 bp, Bos taurus
tggcatgaaaataagctatgcgttttaccccatttagtctaacatttgtaacattcagaagtggtcatataaacattttcttttgcatgagtgactaattgtcttatacattcttcactaataagagtaaatgcttgatgaaggagagagaaaagaatagaaagtctcagtcacatagattcaaacattccacatgtaatg

SEQ ID NO: 1942 - DNA, 201 bp, Bos taurus
tccttctttagaactgcagtatcctcttctacccaagaggagttcaggccagaagacaccagatcctggcctctccgattcactgccccaagtcccaggcgagacaatgaaaactaaaggcgtttctggtaatcggactctgagtcttcctctgcaacatccgggtgcgagaggagtgaataggtgactgtgttctcagcc

SEQ ID NO: 1943 - DNA, 201 bp, Bos taurus
ggccccagggcgggccggctccccgccatcgttcctccgggaccaccaggatcgggaaaattgcccgacaagcatttaaggaagcctggaactttggcccgcagactccggctttcaacatcaacaacactggctggagctgcacttgcgcctgaagttccagataaggcaagatggggctcctctggtgctgcggccatg

SEQ ID NO: 1944 - DNA, 201 bp, Bos taurus
agaactcaccatagatatataagatgaatctctcattgaagtcttcagatcccttttggtttatccgggctttgtatgaaccagcatctttcagagtcagcttgttaatagacaaagagttgttttttgggatgtttattcgccctttgtagcttttgtctaaaaacaaaatctctccacttgggaatgctaaaaccaaag

SEQ ID NO: 1945 - DNA, 201 bp, Bos taurus
aaaaaacaacagtttaacattctgatcaggactgatatattttgctttgcctgtaagtgcctgagccatttgctggcattgggccctacgtaagaatgccgtggaacaaggttctcagttaatggcaaagcaagtacagtaatgggcacatgacagtggggcccactgctcctaaaaatacctttttaccagaagcttctg

SEQ ID NO: 1946 - DNA, 201 bp, Bos taurus
tagcaaccatggtcactgcctgggggcttttggacagataggcccgaacttgttacaacttagccacttaaaagctgtgcggcctagggcaaaatgcttaacccctctggacctcaggtgtctcatctgttaaatgacaccatctgccacaacattctgtaaaggctgtaagtaatatccaaaagggccttagtgtgcagg

SEQ ID NO: 1947 - DNA, 201 bp, Bos taurus
gctgtcccctactctgggggaaagatctgtctccccaacatcgccccatatgcagtctgtggatgcatctgtttgtgtgggagggttagttgtcaggcccttggcatctcccacctcgtccctgtgccccactggatggtgggtgccccatctctgtacctgcacctctgtgcacactggcttgggctagaagggaagggc

SEQ ID NO: 1948 - DNA, 201 bp, Bos taurus
aggaagaaaaggaagggcacaggggagaaggtggaagagggcattgagggaggagctggcagagcagctgaggctgggaggtgagagcaagggcccctgcccaagtcccatcggacatggttgggcatttgagccaagttttgctgagaagggaaaggttgcctcctacttatcaggggcggaactgctgggttttgtgag

SEQ ID NO: 1949 - DNA, 201 bp, Bos taurus
cagctgttgtgatcatcccgactgaagtagaaaggaaccctctagggagaaaggggcagagctggagtcatgatggaactaaccctaatctgcctataggcggagaggccaaaggaggggatcagctacatgactccactgtcaatttcctcatccatgtgtcagatatttattgagcatctacttacttgccgggtgctg

SEQ ID NO: 1950 - DNA, 201 bp, Bos taurus
tcggctcttcgcatcagatggccaaagtattggagcttcagcttcagcatccatccttccaatggatattcagggttgatttcctttaggattgacccaatggccctgattttgcctatctattaagttttggcccagagacacccttggagatgaaagagacatggacaagactcaccaattttcccaacacagggaact

SEQ ID NO: 1951 - DNA, 201 bp, Bos taurus
tactgtaaagataggtgttgttgaaataaccagcagagggctgataactgcctctggaggtgagggaggccccagtgaaggagatggggaagtatgggacatgggagtaaatcacattgcattcttacctggagtcaattcagtgaacaatccccagtgtttgctttgggaggggagaagttgcagagggcgccatggtgc

SEQ ID NO: 1952 - DNA, 201 bp, Bos taurus
tacagatagatctgtgatatggccctgccaatttagttgcagtgcaccctacaaatgtgtactctgcatttcatagactttacggttttcctgagggcggtatgatgtctatctttactgaatccaaaatagatctgcaggattgaacaaaatttgcttaattatacattgttctttcttttggccaaaacattcttttgt

SEQ ID NO: 1953 - DNA, 201 bp, Bos taurus
accagctacactgcagcactgagcaactgagctacactacagacagctggggtcgataggtcgtatttagtgctggccaagaggagtcttggagaaggcaatggcaaccccctccagtactcttgcctggaaaatcccatggatggaggggcccggtgggctgcagtccatggggtcgctagaagtcggacacgactgagc

SEQ ID NO: 1954 - DNA, 201 bp, Bos taurus
gtgatcccctcttgccttctgtgacggtggtggaaatgtacttagaggccacagagtctgatgttagagagctgcttggggcgcccgcgttatcatacgtctgcagaagaccatgtgctaccaggccagatggacaccacctatttctctgccaacatcctgaacttgtgggcactgagcagcagccagagggttatgctc

SEQ ID NO: 1955 - DNA, 201 bp, Bos taurus
gggccctaccatgcagggattgtgtgggccccaccatagacatacagatggtgcatctcgacttagacagacttaggaagttgtgaaatggatatgtacacacagggaggatggaggccccaacacacacacacacattcgaacacaagtgtacacagagtatctatcattcccttctcttcttctacaccgtggcttatg

SEQ ID NO: 1956 - DNA, 201 bp, Bos taurus
agttttaccttcctgagttactttgatggaacaccagttctgatattaactctttcctgacagcccaatggatatggcctttggacctgaaatccctggacagcccttctggagccttttatttttagctcagtttatcctacatctttttgctttaaggtcaggcctgaaaggaaaaattggtctgtgtgtgtggatagg

SEQ ID NO: 1957 - DNA, 201 bp, Bos taurus
catctcccaccttactgtatttctgctcttctttggcagtgtggctctcatgtacctacgcttctctgccacctactccttattctgggatacagccattactctggcctttgcagttgtgtccccatttttcaaccccattatctatagcttgaggaataaagagataaaggaagccataaaaaagcacatgagtcaagc

SEQ ID NO: 1958 - DNA, 201 bp, Bos taurus
ctcactaaagggctctactagctgtggcccagaccttgaggaacagtgaacctcaccacccccccaccccattcctatctctgtgacccactagcagtgggttgtctttctgggccacagtctgtgagacttggtttccccatttgggtgacctgaggagactgaacaccatttgggttggattcctggctctctcaggga

SEQ ID NO: 1959 - DNA, 201 bp, Bos taurus
caatgccacgtggccaagttcaaggcattgtcagggatatactttccacaagacactagcaaaagtctattctttacctcctttgtctctggcactgctggcattctttgtttcatggccacatcactgcagttgtcaaggttgaaggttggaatcttcaaatctctctattttccatcttcatattgccttcttctttgt

SEQ ID NO: 1960 - DNA, 201 bp, Bos taurus
aagacttaatggcacctgcagtcaggtaatggtcaggtatggtgtagcacagatgagaggagctgaagaagaggactaagagaggactttgacctttcctgtgtgaggtctgttagatgtaggaagaaagctcttgggacattaggatagatctcctttctccatcctcatccttaaaatatttttcagtaactttagaag

SEQ ID NO: 1961 - DNA, 201 bp, Bos taurus
agcacacaaatttagttgcactatgtgggatctagttctctgaccaaggattgaacctgggactcctgcattgggagccccagtcttagtcactggaacaccggggagttccttgggatcaatcttgatttttcaccccctggaaatgataggcaaggtactgagggtgtcttcctgtgggcatagggacagagaatagaa

SEQ ID NO: 1962 - DNA, 201 bp, Bos taurus
aatctgcctctgaaaccaggcagatgcctccaccggtgacctgtgtccttggacaagacactccacttccttattcttcagtttcctcatattaaaatgaaattaatttattttctcataagattttgtgatgattaaatgagttaacatattcaaagggcttggaactatgtctgaaatttactaaacattcaaatagca

SEQ ID NO: 1963 - DNA, 201 bp, Bos taurus
attctgtgctcaaacctttataaaggcctttattttagaaaggaggcctcagcagccatgccaaacatgcaggtggtatttgcatgacataaggaataatgaactgctaggtgtgaaggataggcctggaacctgtgagagtctgtttttccaggaagccttgggatgcaagcagcaattgccatatattgctctaatggc

SEQ ID NO: 1964 - DNA, 201 bp, Bos taurus
tatgcgtgactctcttcctctatttatacaggaatacttgttttcaaatataccctgttcccactgctgaccccatgaaagcagaattgaaagccccattcggtttctgtcaggcctggctcacagatgcttatacaacatttattcagtagatgtttactgagccctgcctagatatctgtcatgtgccagatgctcata

SEQ ID NO: 1965 - DNA, 201 bp, Bos taurus
aaccccaaggccaagcctatacccaccttccccttccccagagataattgttttgagcagcaaaataaaggaggaaggcagccaaaggttcagtgggggaaggatgggatgtggggccagaaggaaaagtgaaacctgcctcttccagtctctatcttcctcttcttccctcgtgtcttccaaaggaacagtccaactcca

SEQ ID NO: 1966 - DNA, 201 bp, Bos taurus
gggtgtatgtatagctacagtacagaggagttaagaggcattttctttcaaagagaagtaaagggcagcatgtgtcaagctgaaataaaggaggaaggcctccaggaggaggacttcaggatgaccttcaggaggcaggtagacctgactaccagcagggggaagggctgcttcagtagaaagagctgtagctgggaagcc

SEQ ID NO: 1967 - DNA, 201 bp, Bos taurus
gcaggacatgtgggcagtgctgacttaagaaccattatgagactatttcattattttaatgactggttgttaaacaatgtgtactgtggaatacataccaaggagggaccgttccacccccgtgcctgcctctcctcactccccagctcctacacagcatgctgttcacccatcgggccatggcggagcagctggctggac

SEQ ID NO: 1968 - DNA, 201 bp, Bos taurus
atctgagaggtgaatcccaggagctttctagagggtaggagttggaagccgccctcgaaaagaggcactttccaggcccggatgacaggaagcttgtgggcacaggcagagggcaaatgtagggacgggaaaggcaccgtccagtttctggtggggagctggggcatccttgcctttttcagcttggcaagctgggcctgg

SEQ ID NO: 1969 - DNA, 201 bp, Bos taurus
gggcccttgggagagcagggaagcagaatgagaaccactcgccctctgagttaactttagccaaccaaagaggctggaaacatggaactcactggttcattatgggaaagaggctgagaggccactcaaaggacttacgggcatgtgtgggcttggatgaaaacaggaaaccaaagaaagctcagcaaggagttatccaaa

SEQ ID NO: 1970 - DNA, 201 bp, Bos taurus
cgccctgccgccggctgctgccagagtcccagaggaaatcaaaggcctgggctttgggctctggccaagggagctcagagtgcggcctcttaaagagccccttcagcctcatgtctatgcaggaacccagtctagggtgggacaggggggtctgtccagggtcctctcagaaagtgatgccggaggcctcggttttcccat

SEQ ID NO: 1971 - DNA, 201 bp, Bos taurus
accactgttttaaatgaaatccactatttttaaatagcagagcactctacacaagaaattgtattatttttattgttataaattccaaatggttaatggaataggaaaattagaaactgcctaggcctgaagattaggaaatactatcagcctaaagaaaaactctaagagacagacagaaaaataatattatgttaggga

SEQ ID NO: 1972 - DNA, 201 bp, Bos taurus
gaggagaggaggggggaccttgtcagttggagggtgcccctgcccttctcagatctgcctctgactggggtcagcattcacatcactctctggccttctttatttgttctacaccttcccgtggagtcccaaagcccagctcacagcccgccctgagcactgttcttaggtcctcctcccacagggactggccaactttat

SEQ ID NO: 1973 - DNA, 201 bp, Bos taurus
gaaccaatgctagctcagtggagagaaggcaggatggagggctctcatgcccctcttaatgcaaacagggcagagaggaggaacggagagagaagtacccatggcaaaggttttggcctgtgtgaggggcctgaaaggtcaagcagttgtatgctatgaatgctaagttgtttcagtcgtgtccgactctttgcgagtcca

SEQ ID NO: 1974 - DNA, 201 bp, Bos taurus
agcagggccgttgggcccgggccaacaaggacacctccaggctgctgttgctgtatgatgaggacatcctcaagtgagatccactccaggaacaggaggatttggcctttgctcaggcttatctgaccagggtaggcaaatgctgcttcctgttcctgccagcccctctcaacaagactgattttccttcaggggagatgt

SEQ ID NO: 1975 - DNA, 201 bp, Bos taurus
gggcagtagttaggtaacatggaacggtatttgagggggagccatttcttatgttcaaattcttcactggcttctaatcttactcatggaaagcagaaggatagttttagagaaagatagactccaggatggaaggactagattttggtttgggcaagagtccacgggagatatcaaggcagtgttcatgggggggttagt

SEQ ID NO: 1976 - DNA, 201 bp, Bos taurus
tcatctacctctgccacccgccccagtattcatgagaacctgtaaaaatttccctcatcaaatgtgatcagcccccaggaccccaggatggcccagtgcccacttcaggcaaagggagctgacaggtctgaatcggagggggtgttcctgtccctggagtactaaggaggccagcacacagttcaggcggcactgcccttc

SEQ ID NO: 1977 - DNA, 201 bp, Bos taurus
catatgagccaaggtctgggtgctttggctgtggcactggcaggcctggaccagcccctgagagcctgcccgagactttgtcactcttcacgtggccagagcccgcccccggaagtccaaggatgtgtgccatctggacgcccaagcttgtggaaagaggttagaggttagaggtggctccctccacagccagggcccaaa

SEQ ID NO: 1978 - DNA, 201 bp, Bos taurus
gcaaaaggtagacaacctaggaaggccactctttcaagaagacctggtctcttgttaaatttcttcttttatctttttgtattgctattgctcttccctcaatggcctcacttttatctcaataactcctttgagcattttccttggtggttctgtataccatagatgccacacttactgctggcttttctttttacttgt

SEQ ID NO: 1979 - DNA, 201 bp, Bos taurus
gagctggcctctccaaggccatggacagctgcccaggttgaggttgaccgtttctaaattgatgcaacttgaacaggtcacacttccactgcagaccattcttcattcttgggctgggaagacagttatattgtcttcctatatatgcttttattaaatatgccattagacaagatgggttcttccacatgataaccatat

SEQ ID NO: 1980 - DNA, 201 bp, Bos taurus
ttgagttaagtttcctggagaacgctggatgatcatttggtatcagggttagagaattcacaatattaagtttgtcacaaaattaagtatttgagaaaggtctgtgatggatgtgcattcatgtgggaatagtaaatgggttttaaacagatgacattcttggtgtttttgatcagctgttctgtgttgtttctcagtttg

SEQ ID NO: 1981 - DNA, 201 bp, Bos taurus
acttcgtttccttccccagactcatatactattaccagtttcttgagtccatgcacatattagcctgtttttctttctctgttttttaaaataagtatatgtcatcttctgttctacttcaccgtgtgcctcagaggtcattacaaataagtgtgtatagacccaccacataaatgctccattgaatagatttacagtttt

SEQ ID NO: 1982 - DNA, 201 bp, Bos taurus
tgcacagctacagttggaaactgagaagggaaaaattttcggcccatattatgtttctcggcaaccagttgcagatttgaactggtgcaggtcaggcctcggtccagcccttggtgaaatgggtgtttatctgtagcccgttggctgcattctgttgtctgccgtggtaaatggcctctatcggcagagccagggtgtagc

SEQ ID NO: 1983 - DNA, 201 bp, Bos taurus
aaatgctgatgaggaactaattataattccatttcaaaccatcaggccctgagatactgtctgcccccacctcagctgcgggggaaagaaaagcacaagaaaccttctcccacactcaggcctagaaaaaacggaattttgaaggcacttgggtttctagagtttgagctagaagaggagggtcaagacataagcgacttg

SEQ ID NO: 1984 - DNA, 201 bp, Bos taurus
tcccctcacccctccccgccaccactcaaagtcccgttcagtggccaccccttcagaggtgtcctccctgattaactgcacggggagtgatgtgcttcccgtcttcatggcactctgggcctctggggtatctcactgggatgcagtggtgtcttacactgtctgcacctctcctcctgcaccagtctgctgcttttgaag

SEQ ID NO: 1985 - DNA, 201 bp, Bos taurus
ttatttttctctcataataaaaagtcttgatttgagcagctttggcttgatgtagttggggtttctgtgattcttatggcccttttttcttagttgaaatttgcaactcgagtcatcatatccatgttccagtcaagaaagacggctagttttttccagaagcccccagacacactacctcctacatcattggccagaact

SEQ ID NO: 1986 - DNA, 201 bp, Bos taurus
ttaagaatttgactttcagtgtaggggacacaagttccatgcctgatcaggaaactaagatcatatgtgccccagggcgactgagcccacacaccgctcgctacttctgagcccgcacaccacaacagagcttgctgcgtgatgcagtgaaatcctgcgtgcgcaactaagacctgatgccaccaaagatgtatttttaaa

SEQ ID NO: 1987 - DNA, 201 bp, Bos taurus
cccaggagttggccacttctgagcagagaatcctcaaggtcattctgcttctagcaggctttgccctgctcactggcctgctctttatccaaatctagaaagctccaagacaggcaaggaaggttgggtaccatgtgcccttgacctccctccccctctcccagtgtgtggggaaaagcaaggagtggggaagggaggtat

SEQ ID NO: 1988 - DNA, 201 bp, Bos taurus
ccacaccccacccctcggcccgtcagcttccctaaccactcgccaggtggaggggtggtgctttgtgccaggtactgtaggctctgggggaatcttgcccggattgtcatcacggtagggcctgtggtgccagattgcatagccaggaattgtgtttactcaggtcccaaggagggcctggactccatcttccctgattct

SEQ ID NO: 1989 - DNA, 201 bp, Bos taurus
ctgtccattaatagacatcattaaaaggataaaagacaagccgtggactgggagaaaatatttgtaatgcacatatctgataaaaactgtcatcacaagatgatattaataagtaggtaggtagatagagatatataaaacacaggaaactctcatttgaaaagtggacaaaagacgtaagctggcatttcacaaagaagg

SEQ ID NO: 1990 - DNA, 201 bp, Bos taurus
tttagggaattaggcatactcatgtttggttgttggatgtacgtgttggtaacctttatatggggacaatttgaaatagatataacaactacaaacatatgtactctttgactcaggaatctcacttttaggagtttatcttgtagatatactgcatgcaacatgacaaagatatgagagtacacatttggtagatgaatc

SEQ ID NO: 1991 - DNA, 201 bp, Bos taurus
gctggagtttattgggacacgccggcaagctgcctctccagttgtcggatccccagaggaaaggggcggttggtgtggcttggcctccattgttcgggatataggacgccatgcggtaagggttgtggggtgctttggagatgtttcgggtattcgaccgaaaactttaggaagttggtccaaaggagtcggcggactgga

SEQ ID NO: 1992 - DNA, 201 bp, Bos taurus
ggcagttcagcctctctgcattttcctattccctgccatcatggccctttcctctcctgggaacccggaactctgctccaatcctgggctgtcacaaagcattaaaccccaggcagcacttaaccccattgtctctccctactcttgaccatccacagcgcccagcagaggacaaatcattagggagggagagagccttgg

SEQ ID NO: 1993 - DNA, 201 bp, Bos taurus
gcaatggacatggccaacatgaacaccaccccagctgccgtcgaataccatgccaggccgcaggccattgatccgtacagtgttggtctggctcctggccgtggaggagttgaacttactgtgttccttctcacagtaccggatctcatattccaggatgatgccattgggctgctcgagctgtggccatgacatgatgct

SEQ ID NO: 1994 - DNA, 201 bp, Bos taurus
gttaatttcaccggaaaaagtaaaaagaaagggagcagtgaccttggacaggctctgccacacccaatttcctaacataatcacagccttgtatcaacatcggttgtctaattcagaaggggtaaagtagcccatgacactgagtaatctggatgtgatttcaaaatagagttgtgacatgatttgctcagttcaggatga

SEQ ID NO: 1995 - DNA, 201 bp, Bos taurus
gaagcagtacttttcacattaaggttgtgataatcttatagtttgcagcgtagttagcctatgtctttcctgtattagatttttgctttggcatcttaagttgtctcctctttgcactcctcaccctccccttctgttcctctgtcttctttgtctcttcttcctgttcctctttccctcattcttttgggaatttacagt

SEQ ID NO: 1996 - DNA, 201 bp, Bos taurus
gctacgcggccatgagcaaagaactctagcccatccaaagtagctttctgggtctctgtaatagaactattcttagaatgcccaaacctctctcatcagagtctccctgcactggcctgctgggggtcagggacacttgaacctggcagtaccaccatctcacagccagccatttaattcatatctttgtgcctcatgttc

SEQ ID NO: 1997 - DNA, 201 bp, Bos taurus
gttcgttcagaaaccccaaactcctaagagtcccagcacagaggaaatgtttggttcttaatgatagggacaggatcatttaggccctaaggcacgtcctttacagaatttcctttgaacttaacaggaagctaacggagactaatttaacttgaagagggccccccttgaatatggtgagataggaaacaaaatttagct

SEQ ID NO: 1998 - DNA, 201 bp, Bos taurus
cttctccgggggatcttcccaacccaaggatcaaacctagttctcctgtattatgaaagattcttcaccatttgagccactcaagaagccccaataggccctgtacctaaactcttttaggcagttaaagagagaggcaaaaacaaacaaactccagaaaagaagctcttcctgagtcagctaggccttgattaccttcag

SEQ ID NO: 1999 - DNA, 201 bp, Bos taurus
agactcattctctcacctacagtctgtctgtctcacccccttttcttctctttgagaaagacacaggcagagacaggccaaagttagttgcacaaaaaagtgttgggaaaggctctgaaagagttttgaggcagggctctgttggctcagccagttctggggaatgctacatctgggtggccatttttcacagatatcaag

SEQ ID NO: 2000 - DNA, 201 bp, Bos taurus
ttggaatcatataatttatcatttcccaatagttgctaccactccttcccaattcctgatgatcatattgtataagttgtaagcctatgtgacttcacccagcttcagtgagacttgtgctatacatttacaacagatggtgtgtagagcaaggtcctcaaggacgacccctaacatatgattcagtttatatccatgtga

SEQ ID NO: 2001 - DNA, 201 bp, Bos taurus
gaggttaggggaggagaacctctcactcacatccctccaactctcttgtgctcatgagtcatcctgtggcctcaggccagtccttccaagttctgcctccttctgtcctcaggaaaaaatgggcattgtaaaaatataagcacagcaaaaagctgaaaaggttcagactcctcacagcaaaaggccactgagatgccagat

SEQ ID NO: 2002 - DNA, 201 bp, Bos taurus
tgtcagacatagcatagcaggcaaggttagaatgggacctagggtctcaggaggcatttagagacctcagtggcagggggcatgaccatatcgccataagtttgtcacaggaagagctatgcttacattggaccatggactctgggtcaaaaaatgttgtctccatagaggcagggtggggtagaatggaggagcacggac

SEQ ID NO: 2003 - DNA, 201 bp, Bos taurus
actatgaggcacggccaaaaaaaaaaaaaaatttttttttttaagtaaatggttaatttagaaggaaagaaaaagctgatttgagtcctaggtcttctgcttaggccggtcacttcatctgtttgagtctgtctctgtgtctgacaagtgggaaaattagtgacccctaccctgtgcctcacatgtgagaataaaatgtga

SEQ ID NO: 2004 - DNA, 201 bp, Bos taurus
tccttcaagtcaggatccggggccagaagcaaggagcctagggaatgatcagctcacgagacagcgagtgctgtagccaagtgaagcttgtcattcactcgacaatcatttcacaaaaccaaggccaggccagggttgaagagctcgctgcctcgtccctgagggtctcacgtgtgggggacaggtgtggcacccacaacc

SEQ ID NO: 2005 - DNA, 201 bp, Bos taurus
tatgactttcaaccataatacctccagccacagttaacaagggttgattacttgggaaggagtaatagtcctcaaactttctagttccaaggcaatcagggtacaaacataatcaacacagacagacttatttctaaataaataaatcttatttgtcattcaataaaaaaaggtataataaggcttaaggttttcagacat

SEQ ID NO: 2006 - DNA, 201 bp, Bos taurus
gaattctatttttgtaaacagtgacgtattaaagatctatgttgtttatttttaatactagttaattaattccattttcatttattgaatattctcatctatctctgttggtttaaaaggacacctccatcatatactatattcctaaataatcacgactcatgacccctttttacgaaagttgaaactgatggttaggga

SEQ ID NO: 2007 - DNA, 201 bp, Bos taurus
agcactacaaagggctgcccagcaatgccctgcacgcgcacagcaaccccgtaagtactggctcttgcatccttagctggccgtcgcccaccacgacgtaaggtgcctatctctgcctcacccactggctctgtgatgaagcgaatctggactccatggtcaacagggccccggggctcggccatggtggacgcctgctcc

SEQ ID NO: 2008 - DNA, 201 bp, Bos taurus
ccaatcagtactcataaggttttcatggtcaatcccagacaaatccagagcaacaaccaatctgagtcatgggacagttacgttcccagctgaggcccagcagcaacactccgcctcttgtttcagctctcatcctgccaagtgtcccattcacggtctacttagtgctgtttttcaggtttgtttttgcgggtgatttca

SEQ ID NO: 2009 - DNA, 201 bp, Bos taurus
gaatcaggtaaagcactttacctgttaaaatgggcccttgactagctatggaatattttaaattttcaagtagacaacgccatctgttgggcatcttgcaaactatcaaattgtatggccctataacacaatggttaaattggttgttttgtttgttttgccttagggtgtggtggaaaaaattctgagattcggaggcac

SEQ ID NO: 2010 - DNA, 201 bp, Bos taurus
tcttcattgaatttgtacaacggcaaattcacaaccaggacttgtccttgtctatgattgtggctattgatgaggtctccttgttccttgatacggaggtactgagcagtgaagaccgaaaggagaatgctctgcagacagtgggcacaggggagccttggtgtgacgtggtgctggccattctggcagatggcactgtcc

SEQ ID NO: 2011 - DNA, 201 bp, Bos taurus
tgctgttggccttctggtaggaagggctaactcctgatgtgggtggctgaagggtctggggtaacctggagctggttatggcttattagtgggtgaggccaggtcctagggctggtgccagcctactggcggtcagggctgggtctaatggctggctctggggggattgaggtcccaaggctagtgctggtgcactagtgg

SEQ ID NO: 2012 - DNA, 201 bp, Bos taurus
cttccacaatgtcaagaatctaggcaagtggcatttgtgggctgactttctttcattaaagcagaagggtagagctgcataagagaaatagttatgatccgggttggagctaaattctatgcctttgtctctctcccttccctccctgcccctttcttctcccccttgccctccggccctttcccaggagctctcctccag

SEQ ID NO: 2013 - DNA, 201 bp, Bos taurus
gtatcgagcgccgagcctagagaacggcgctgggtgaggggcttggtggtggcagcgcagtctccataggcgttatgagtttggctgggggccgcgccccccggaagaccgcggggaaccggctctctgggcttctggaaaaagaggaggaagatgagttctaccagacgacttatgggggtttcactgaggcaagagccg

SEQ ID NO: 2014 - DNA, 201 bp, Bos taurus
ggttccagccttggtcggggaactaagagcccacatgtctcgcaacatggccaaaataaatacataagaaaagcattcctgggaggagtaaaaaggcccaaaattctagctctatcagtagcttgctaggcaagtcacttaacctctctgagcctcagttctttcacctttatggtagttttcaaagtatcatatatgggg

SEQ ID NO: 2015 - DNA, 201 bp, Bos taurus
aaggcctgctcccagccagtgtcctgctccacccaaacttcagtcaggggacacaaatgacagtgaagtttgccaaaagaaatcaagcatcagcgagatgttctggccagaattcaggaagaatgaataggacagaaactatccaagcgatcttgttttgcacacccaggacagagctaggggatccaggtgcaggcatca

SEQ ID NO: 2016 - DNA, 201 bp, Bos taurus
gctgacttccgcaatccgggtggaataaatccagcacccctagtcatccggccacattatccacacttctctgctgagacgagcccagagaacagatgcctatcaacaggtaacattttcagcttcctggatcctttaacctctcattcctgtcagttttccatttttaggaatattaggaacatagtgacttgtatatca

SEQ ID NO: 2017 - DNA, 201 bp, Bos taurus
gaatcatcctagttcctctcaaaaatccctttcctgttggcatctgtctcccctattatggggtgaaaatagctggtatttggtacattttcagtaaataatgtttcttaacatgtttgaatatggcatttatgccgtgaggtcagccattcataaatattcattaaagttagacttgttccagagaacaatcattgccat

SEQ ID NO: 2018 - DNA, 201 bp, Bos taurus
aagacatgacagaggtggccgcaggaggaagctattgaaaggtctgaatttttccccagcaggagagcagcttggtggtttaactggcctgcgcaaagccaccctgatatcttccctgagtggggatgaggaggctgtggctgctctgcacccttccagggacctgtcatcagtagctgattctgctccccgacttgtggg

SEQ ID NO: 2019 - DNA, 201 bp, Bos taurus
gtcctggattaggggtcgagaggatggacagcaggagcaactgcaggatggcctctcatctgttccaggtgtcctgtggtcctctctctggtcgaggcaggtagaccaagaggggaaagggcacagctacagtttgatggcagagttactggaaaattgtaataatgagacccctctgcagatagtttctgatgattacca

SEQ ID NO: 2020 - DNA, 201 bp, Bos taurus
aatgtagcgcataaagcatcaccaggcgggcagcatcaaactctgtcactctggggttctgcaggagcctctttacgttctgaaaaaacagagaactgttctttatcctcccttcacttgggtgatgtataatatcttagttctaagaattattgaatggtagtgatacatctgactaagatatcatgactaagatcactg

SEQ ID NO: 2021 - DNA, 201 bp, Bos taurus
cagttattcaactctgcttttggataaggggtcctggagttgattgcaggtgtttcatgaatccaaatggactccagacattatcagagactgaataaattttaatgtttcttacatgtgtgttttcaaatgtgtgtatatgctattgttattaataaatttaccagttaattaaaaagcttggctgcattcttttatctg

SEQ ID NO: 2022 - DNA, 201 bp, Bos taurus
cgtgaggtctgcgtggaccgagcctgatccctccgcagctttatacccggcctggtcggcaaacgaattcaatacaggtcaggaagcgaaactcggccagcgttgatgttcagtattttctttacgtttgtgtctatacattccagtgggatgaaactcctagatctagaattactgtttcaaaaggaacacacgtttata

SEQ ID NO: 2023 - DNA, 201 bp, Bos taurus
atccccgggggcctcgcttcaggagaagcgaggagccctaaagcagagcctttcagaagccacagtctccttatctaagggatagcctcttccaggatcctcttcctttgaaaatttctgatggcccttgtggtcaaacatagaattcttgggtatgtcattagaactatatagccgtgtggtttccgtagtgtagtggtt

SEQ ID NO: 2024 - DNA, 201 bp, Bos taurus
ttcttctctttggataagttgctcggcagaaagaggccatcctggccatcttctctggacccggttgaccaggtcaccggacaaaacaatggacagttaccggaggactttaaaagtggtcagtgactaactctccaccataagcagtagagcacctctgtgtaatgccacagcgtccctctattgtctttccccttagtt

SEQ ID NO: 2025 - DNA, 201 bp, Bos taurus
gtttcgtcttctgaggtggaacgctttaagcctgcccgccgagagccggagctttcctccagctgttagaaagaaagagcttatttttctcttgcaatcttttgatataactcgcgacttacatttttgggtggacgtgttttcgaaaatttagtagagaattgagaagtgaaaaagttttaacttacagcaaagggtcct

SEQ ID NO: 2026 - DNA, 201 bp, Bos taurus
cacttggcttgataaagtgcacagactgggatacagggccaagtgagattatgttgtatattagatttgtgtgtattttagtggctgtaaatgcacatttcctaaggatgcatcctgtggcaggcctgtccatcaggatgttaagcagtgaaaatttgctgaaagccttcagtctattgctgaggagaaagctagatgcca

SEQ ID NO: 2027 - DNA, 201 bp, Bos taurus
ctacctcccctagttcgtatgcagtcactagtccatttggaccagttctgccctcatactgatgttatgttttcttgtggacagccagggcctggggagcatttcactgtcccattctgggcttcctttccactcctggagaggcatcaagatgttaaaggtataggaccctcatttcttgtggcccttaaggctcttctg

SEQ ID NO: 2028 - DNA, 201 bp, Bos taurus
gcgcctggcaggaatcttacacttaatgactgggtgacggggctccaagcttttacacttttcctttcctcatcctgtggcccaggacctcgatcctacacgggtgaaagaagtagcaggatgggtggaaaagtaaggggcttcaggagggataaacctgacctggcagcgggagccctctctctgtgggggaatccctat

SEQ ID NO: 2029 - DNA, 201 bp, Bos taurus
ccttataaattaaaccagtacatttaataaagtgtgaattctcatacttatcattaatgttttttccactttattttcaaaaggctggcttttctccattcttctactatcaaagccaagagctgcctaatggttctgtcaaggaggttccagctcctactcctgctcctctggaggtctcaagcccagaaactacagagg

SEQ ID NO: 2030 - DNA, 201 bp, Bos taurus
gtctgactggcctgagacaagaaaggacaccaggcagggagtcaggcgacctgggagagatccagtgacattggacagagaagagaccaaggccacctccatctgcctggggtggtaggctcatggctagggacataagctggtatttagaagcatcccagcctgacttttacatcatcaggccaagtggcctctatctct

SEQ ID NO: 2031 - DNA, 201 bp, Bos taurus
tattgatccctgtatagtattgtcttcatggaaatgtgctttggtgagatgctatcattctgtgtcaagggaacaataagaaacaatcccacaaaactcattgctgtgactactgaaaagatgttcattatattactctatcctctttatgaggacccttgggaggaatttgtctgttcacttgagaaatggtgtgcttct

SEQ ID NO: 2032 - DNA, 201 bp, Bos taurus
agacaagggaagagcaacgctaaggggaaagggcaaagatcaaagatcgtcctagcggagggatgcctcaggagaaaagagactccctcgtgctcgcattccagaaggagtgatgagtatccactcagtgccagggccgcggaataccaccttagtcaaggtcactgcctaggattaagctaaatgggtaaaacacgaagt

SEQ ID NO: 2033 - DNA, 201 bp, Bos taurus
gactgtccacagggctggtaatagaccaaactccctatgtgaccttgagcaagtcacaacacctccctgcgcctcactgtccttatcttaacatgagagcgttggattaaatcaggtctgaggccccctccagttctaaaattatattatctctctaatactgttagactggctgccttccaaagtgtcactgcttatcat

SEQ ID NO: 2034 - DNA, 201 bp, Bos taurus
tctggcctggagaattccagtacagtctatggggtcacaaagagccagacacgattgagcaactatcactttcatgaagccacactcccagggttcactctgatatatgcatgctctcctgggcaggagtctcattgctcttcatgtaatcactttacacatcactgttaactccctgatacatccctcttagtatcgatt

SEQ ID NO: 2035 - DNA, 201 bp, Bos taurus
tgtttttctattgcaggatcccactttctaagtgggatcacatgccctttattattagtctgctttagactgtgacagtctcttacactttccttgtttttgatgacttgacagttttgaggagtactagttaagtattttgtagactatcccttaatttgtgattgtctgatattttcccctcatgattaggctagggtt

SEQ ID NO: 2036 - DNA, 201 bp, Bos taurus
ctgaggtgcctggaacaaaagcagggtactgtacctgtcccctgcacacaacaccaccaaaggggtggaaagaccacctctaagctagatccccagaccaactcatggccacccacattgttaatccttttaacaacccaagcagtttctctctgggagcaagccagggcacctgtttctcgctttcactcccttgtacta

SEQ ID NO: 2037 - DNA, 201 bp, Bos taurus
ccactgtcctctatctaatgccagttccagtgagttcctggaagccccctgcacattagcaaagttctgcccaccaaggcctgaggggaaacaagactcaggtcagtccagcacttctacctatgacccaggttcttatttagtttttgtaatcaggcctctttttcctcagtttcagcacttcttattcaggtggagaag

SEQ ID NO: 2038 - DNA, 201 bp, Bos taurus
tccctctcacgtgttggggctcctggagctaagacagcacagtggctggtacctaggtctctccctggggaaagactctgagaagccttgtggcctgctctcctctcctgctcaatttgagcagagaaatccaaggctgccaccctcctcaccccttccacacatctggcccatatggatgaatattctcaattcccaggc

SEQ ID NO: 2039 - DNA, 201 bp, Bos taurus
atctgaaaaggaaaattaggatgcagcttctttgggccaaattgtatagccagaacaatagctttaattcaatgtaaggtaaagtcagttctcccaagaacagatatatcttcagtctttcagtggaatccaagcttattttttccattaaggtaggaaaggaaagagtcttggccaaatctgttaacagagtgttacaag

SEQ ID NO: 2040 - DNA, 201 bp, Bos taurus
gttaattgctgtgctgcaagataccctgtctattggcccctgtagaaagttaaccttgtttttcatttatgacaatttgcttattgcacaattgctttagggttaaatgaattatattaagatgccttgaaattatattatagcactccttgattaagaagcaaaaacgttttctgtcatttactcttaaaagacttaaaa

SEQ ID NO: 2041 - DNA, 201 bp, Bos taurus
cattctagctccagattctatcctcttaacctgtgtgtcagcccccagcttggacccatcttagttcaacctaacactgttggactggtgctgttaacatcggtgcttctgatctagcagggccctgttctgtcctccattatccccaaggagaatggcttgctgtgaagatgtcttcaaggctttgggggtctaatgcat

SEQ ID NO: 2042 - DNA, 201 bp, Bos taurus
agggcttccattgaagtcttgaacctcccaaagtcatctaagagggtttgaatcagtttattccaaactcctaaatgttgatattttgacctcttcccacgaatcataaatgttctcaataatatttaaaaatggtgaatccttcctaggtggttttcaatttccttgcctagatccatcagagaaatctccatctaaggc

SEQ ID NO: 2043 - DNA, 201 bp, Bos taurus
aggagattaccttgtggcccacactcttattgtgacaggcttcctctgggtttctcttgaacgtcaagcctagtcatccccatggcctccttttctgttgtagaggggctgctgagcgaggaagacggggttgcaagccgtgaggaagaggatgaccaatctggcgtagttgagatggccatgttcccagggctgtctgag

SEQ ID NO: 2044 - DNA, 201 bp, Bos taurus
ctctttccaaccctgtctttagtgacatcctattggtagtttgaaattctatatttacctcctggaaatttgcagattctacagactaatgcttctgtcccctttggagactttattttaccctgctcctctgaagaagatgactatagcattaagccatgggagtggtgaagtgaaactgtttccagaaattttagcccc

SEQ ID NO: 2045 - DNA, 201 bp, Bos taurus
tctaggatggtatcctaagagaaaccaggatatctgacaaattatcataagctttcacatgtaatcaggaagaacaaggtgaatgtcactggatatttcgggtgcattttagtgcccagctttgaatgagagtaatttcacagactgttgaggggagaagcaaaaaaatcaaaccaacttaaaagctaaatgacagaagga

SEQ ID NO: 2046 - DNA, 201 bp, Bos taurus
tggcatctcagataaacaacaaatatgtttttagtataagttctaaaaatgcatggggcacatttatcctgtaaaaaatgattgattgggaatttcctggcagtccagcagttaggactttgtgcttgcactgccggggtctaggtttaatccctggtcagaaaactaagatcctgcaagctatgaggggtggccaaaagt

SEQ ID NO: 2047 - DNA, 201 bp, Bos taurus
ctacttctttatatattcaggtgaatctggcaaggaatcatctagaagaaccttagaatataatcctagggaacaaatgataaacaggaaaaaaaaaaagtgcctctgtattataccaagcaacaagataaaacctgaaaatgttggatgtttataaacttcctgcaagtatacagtaaatatctgctactctatagatac

SEQ ID NO: 2048 - DNA, 201 bp, Bos taurus
cttgcctggaaatttccatggacagagaagcctggcaggctacagtccatggtgctgcagagagtatacaagctttttaagaagaaaagaaaatgtcccaagtgggttctgtgttcttctgcgccctggtatgaccttggatgtctttggaaatttcacatggtgtaatttcagtgttctctctaacagaaccagaatcgt

SEQ ID NO: 2049 - DNA, 201 bp, Bos taurus
cggcggtggggcactcatagaaattcaggtgctcctccaccctaaagaccggccccaaatccccctgcttcgtctgctgctaggaccacgaaggcctctgccgggaccagacaaatccaaggagccgagcagaggcgttcgaccgcagcgcacctaaggtacctacctgggcctccacgcggctcggagcagattaaaccc

SEQ ID NO: 2050 - DNA, 201 bp, Bos taurus
tgtccttgaaccattcattgtatttagcttttttttttttggccttaggagattgttattctgcttatgagctggctcctttactagaatctaattcctcgttagaggaatggccatgtcactgttagcctgtattactgacagctgtgcacaatgcttagaacttagtagattcccaggaaatatgtaactccttgtgca

SEQ ID NO: 2051 - DNA, 201 bp, Bos taurus
ccagaggggcaagaagagggaagggtgttatctgagcccatgagaactggaatcaggaatgtggcgttgcttaataaggagctgtgactgtacaggcaccgccggaatcatagcaaggccgggagggattgagggcattaaatgctctgatctctgcttctcctccactactgatgcctcccgctggctgagccccaagaa

SEQ ID NO: 2052 - DNA, 201 bp, Bos taurus
gtcaccacctccgggcaggggctattttggatctgagggtgtcagcagcataaaaggaccgtcgtggaagttgtggccgggacacgggcagagcatgcccggttctctccccacgtctaaactggagcctgaaatagctgtggggctaaagaagctcagaatagcttttggcttcaccacaattccaggccgagcacaaca

SEQ ID NO: 2053 - DNA, 201 bp, Bos taurus
cctcgtgatggaggccaactcctcattaggtggtcacaagtgttgctgaatctccctgtgaatggtattctcaaagaggctgaccacagctggccccagtaaggctttgcaccccccttccaattccaaattgactgaccaagagcacctgttgcccattgccagacagtacagcagctgtagagtgtggtaggtgagggt

SEQ ID NO: 2054 - DNA, 201 bp, Bos taurus
ggccttggacacaggcagctctcactaatgagggcccaaggtaaagtgaaagctacttgaacttgtaagctgcacacagtttgatatgttccacagcctatacacagatccactggcaaaggatggaagaccttactggctaaagatatattggagtaaaacttctaacagatcactggctgaccactaagctatgctgat

SEQ ID NO: 2055 - DNA, 201 bp, Bos taurus
ctgactcactactctgaatttcacaaagaaacacgacatgagcataatcacataagtagcttcgccccacccagcagtgcccaccccgcaacagagcccccgttgaccagagacttgacaaagcactcaccaactagccttcctgctgagacttcccactgtcccttcagtcctttggctctaattattggtaggacattt

SEQ ID NO: 2056 - DNA, 201 bp, Bos taurus
aaatggtgacgctggctatactatgccgctcactcacagccttaccctttttctcttccgaggcccaagccctgaggccgccccgcccccggccctttgcttaataccgcccctccccggagaggacaggggaagatgtggaatttccaaagcttattggatgctggtggtgtcactctggagggcggcggggctcgcagc

SEQ ID NO: 2057 - DNA, 201 bp, Bos taurus
gaaagccaaggagagctcaaaggaccagggtcaagtcgctccccgcagatcctagtgcaaaccaaccgtggcgctattctgcgcccaagaaacaggaagttagatgccaaaaaggactttgaggtcagccaaggagagcttggtgacaaattcttcagatcctgatagaatctgtttggctaaatctttctttttttcttg

SEQ ID NO: 2058 - DNA, 201 bp, Bos taurus
cgaaagggcccttgaatatcttgtgaagttcatgcaaaccccgagttcaggggcagaaccccttttaccttgctctggggagagggccagggcactgagcacttcctccagctcctgaatttgcttgaacaacttctgacccttgtctggaagagcctggatgttcaccgatgccagtgtgctctggaaaacagatcctat

SEQ ID NO: 2059 - DNA, 201 bp, Bos taurus
tctatttcatttttaaagatctcctgagggggaggagatgccctcagtaagccattccaacagttaactactcttatttgccttatgttgaggcggccgaatgttgaaaagcaatctctctacacatccctatagagttgtacagtttctgttcacagtgggagaaatatgctttgtattactctttctctgccaaattac

SEQ ID NO: 2060 - DNA, 201 bp, Bos taurus
aatttactgtatcagttagctattgctgcataacaaatagcaagctttggtggcatacaataatagtacagatttttgttcacaagcctatggatcagctaatgagagctggatgatctaggatggccttagcttggacccctctcacagtcgttgaataggctagcctgggcacgtttccctctcacagtcgttgaacag

SEQ ID NO: 2061 - DNA, 201 bp, Bos taurus
ataaaaagccctcctgctacgaggtcatgttggcatctaatccatttttgcaactcaacatttcacagcctcccagaaactcctaccgaggccccttcacacttccttccctccaccaccaccctctctgggtgtcacacctagtcatctgaagtcctctgttcatcacagtctcacacctctggtgacctgtctgccgag

SEQ ID NO: 2062 - DNA, 201 bp, Bos taurus
attcagcccaacccagtcagatgttagagagaaactggccaaaatgatgtgagaggtgaaggctctggctactacccaccaggccaactgcccctcagatttgcatttctgagactctggactcagaagttacctcttccaacccccacctcctaccttcctggcccacttgtgcccttggacctcggaatctcctttttt

SEQ ID NO: 2063 - DNA, 201 bp, Bos taurus
ccaattacttggaacgtgaactttaagtaggctgtgacttctgttggtggtagaaaatagtcctaatgtggccaaggctacatgtttgagcctcaggagacgtactttgcaggcagaaagctgtggtgtgatggctgattgtattagattgtcttattcctctcttctttctctctctttgctttagttttataatattaa

SEQ ID NO: 2064 - DNA, 201 bp, Bos taurus
ggttttggctgccaaagcagttggccctatgcttgtactgttggctgagctgcccagcgccagccagggcaagggtgtgggtggtgccagaggtatgtgcggaggcagaggcctcagatgctgaggcgtctgacttcaggatgagagctccagattcccgagtggctctttattactcacaatacactcagattaggagca

SEQ ID NO: 2065 - DNA, 201 bp, Bos taurus
ccggggctcacctgcattggcgttcttgtggatggataactgaagaatggaaaggatgcaaacattagacagctgggcctgacagcccagggagggagatttttttttttttttttggctgcgacatgtggcttgtgggatcttagttccctgactaggggattgaacccaggcccgtggcagtgaaaaagacatcctaac

SEQ ID NO: 2066 - DNA, 201 bp, Bos taurus
aaatagctgcacactcaaatggctcatgggcctggtgattacaggaaaaagggccaggaataccgggcgagaggaaggagaagggccagagatccctggcgccatcttgccctttgagacagttcaggcagacagcaacgtcagacagttgcccaacaagaacagcagtgggaggccggagaaggcagctggatggtagac

SEQ ID NO: 2067 - DNA, 201 bp, Bos taurus
ctccatcctccaaccttcctttttaaatgtccccacgtttattacatgttcatcttttcttaaggagtgggtagcaaatgtgactgaccaagacatgacttaagtaaccatcacaaagcaaaggaaaaccacctggatggcaggattaaatgatgtgtgtgggacaagaacagagaaccattccatctacttttgtgagtg

SEQ ID NO: 2068 - DNA, 201 bp, Bos taurus
aaaaagtacaatattaagagcataggcttctgggttaagagaaatttgggttgaaatcctagctctgcccttattagctgacctcaagatgtctcaatttcttcatctataaaatgggggaaataatgcttacttcataacttatcttgagagttaaacgaaacaaggactgtaaaatattacaatgcctggctcactgtt

SEQ ID NO: 2069 - DNA, 201 bp, Bos taurus
aacccaatcattcattgttagaagtacggaaaagtaaaacatataccaaagttacatttgacaggaaccaacactggctaagttattgcaggttaccaggtagtctgtcaagtgctttcacatagttgttctcacaacagtgctgtcagatatttatttcacaaagaacagcttaagtcagattaagcaggaggtcatgca

SEQ ID NO: 2070 - DNA, 201 bp, Bos taurus
aggcacacagactgtgtaatcaggctcagctggtaatcagggagctgccaaacagacgcgagacgaaattacctccctgtcccagacaaagtggccttctcgatgagggttaaaaccagcgatggtgggaaaaacaaaggaaggtatgcggcagctgctaccaaacacttggccagtggacggctcccaatccgtccctat

SEQ ID NO: 2071 - DNA, 201 bp, Bos taurus
gagccagtactgttgttaagaagaggcagtcatctaagtccaggcgaagggagactgggggtggggggcagtattagtagagaaggggaggcccagagaagcataaaggaaattcatcactctcgtttggttataatgggctgggagggaatacggcagctcctgggtaagaactcatctgaaggaagacagagtcagaca

SEQ ID NO: 2072 - DNA, 201 bp, Bos taurus
ttctttatttggatccagctctgagattccaggcacactcagggaaatcactgacagccaactgaacaggctgtggctcagctgcagactagaaagaggggaaggggcccgtgactactggggaagggggaggcaaaggccagcccaccagcccccaggtccacccacatgtctcccactgcccatgccctcgcttccctc

SEQ ID NO: 2073 - DNA, 201 bp, Bos taurus
ggagagcgagcttccttctcttctatactgttctgctttgcaatgagtctccagagcccacagcctgcaactttgccatctccgtcctgtcatcggcccttgctggcttcttttcaacaccattccaagcaagccaaccaatcacacttcagaataatcctcaagctggccaatagcaggacaggctgttcttagaccaac

SEQ ID NO: 2074 - DNA, 201 bp, Bos taurus
tgtggtctatgcagtcatggacagcctgggagatgtcctctgtctaactggccttcaaacactgtcctctcaaaactcacaatcacagtgaggcaaagcaggaggagaacactcaactagggccctgtggcttggcctggaaacttagggatacagagttctatctatttattattcaaataaattacacaagggcaggag

SEQ ID NO: 2075 - DNA, 201 bp, Bos taurus
tctttctatcctcttgaagaaaactcaatctctcggccttagaaattcataggctcttctgggaatggtctggttgtcaaataagttgcttctcacaaatatccacatgcggagagaagggcccagggccggtgggaaggcgtgcgtaagctctccaaattgcctcagtctctgggtcgtgtttttctgcagtctgagagg

SEQ ID NO: 2076 - DNA, 201 bp, Bos taurus
cctaaggcccacttgactttgcagcccaggatgtctgtctctaggtgagtgatcacaccatcgtggttacccggattaatatgacacccaaaagagaacagagatagaggccccatactagaaaaatacttcttaatcactcctggctcaggatttcactagtactctgcagagcatgggggcggggcagggtggggggtt

SEQ ID NO: 2077 - DNA, 201 bp, Bos taurus
gagtataagtgacccccaaaatgttctactatatagacaaataagctcccagccagggcaataggacttatgaaagaatcgatggtctatctcttcttctttctcaggttttggttcccagatgtgcaatcctagaaggaaagggaagtggggatggaaagagaagagaaggagggaagaatggacattctctgagatgtg

SEQ ID NO: 2078 - DNA, 201 bp, Bos taurus
tgataagaagaaatctgaggggatacgtaggcagttcaggaaaaagaagcctaggaaatggaggaaaaatcactaaattttatcactttagtctctctcacctggacaaaaaagcacaaccaccataccaataaagaactaattatctgtgccaataagtaaaacataagagacaaagaaaaaaatctaaaaaggaagaaa

SEQ ID NO: 2079 - DNA, 201 bp, Bos taurus
cccagtgcctaggacctaaacccagttaaatttgaatctcatgttgggatccaggctttgattccccgtgcaccccctgccccaagttgtccgagtgggttggatttgcagtcaggattaagaaattcccatttagagtgctgggaaaatcactgaggattttggataaggagatgagtgagatgaaattggaattttagc

SEQ ID NO: 2080 - DNA, 201 bp, Bos taurus
atatattcaagttttacttatgacttcagttaaaagaaaaaaccctctacctatgaaaaaagtttgcagaccattatcttagatctttctgaagccatcagcttatttctgcctgttgttctagcattcaagctttccatttactcagaactcagttaaccatttctttatatgtagttagtgcctactctgtgccagggg

SEQ ID NO: 2081 - DNA, 201 bp, Bos taurus
gtgggtggggagggatggtgacagcggagctcccaagtggttgggaagggaaggaaagggaatttgtatctattgcttctgatgtatcttctgtagtggttgcctctaccttctaggcctcaggactaccacctataatgtatgtctttaatcatgggcgaggatggggccaggcttatagactgactcagacagcaacat

SEQ ID NO: 2082 - DNA, 201 bp, Bos taurus
aaggtagctcaggctcaggtcacgtaatggtggtcgtcagtacctccagaccagcctttttcggttagttgtaaagatctgcaggttggcctgtccagggttacaaagggaccatgaagaactgagcctggggactgaaagagaggatttccttcaatctggaaacatgaaggtgatcagtaggcctgggtctcaactccg

SEQ ID NO: 2083 - DNA, 201 bp, Bos taurus
agaaccagggcaaataacatgaagccagacccctgcttcttcctggccctataccctgccggagccaaggcgcctttggggtctgcttcattgctggtctctaaagaccacttctcaaccccaggcctcctagaacacatgcctcccctctcctctcacctggcagaagtcagtttctggctctgaccctggccacagacc

SEQ ID NO: 2084 - DNA, 201 bp, Bos taurus
ccttccagcctaggtgtctcttttaagtaggatgcaaggcttggtattttctgagattaaagaagtcctttctttggggttcaggtgaaattctttgcatcaactacttaggatagtctggacatggcaatttttagccttgtatgttgttactgcctttgttacttttgtgtaatagcagagaagttcagttttgtctgc

SEQ ID NO: 2085 - DNA, 201 bp, Bos taurus
ctttcctgcatgttcttccagatgttgactggctgacttcttgggactagcagacctgcctcttggtgtgatcccgttttctgctttcaagagatttttcttatcaccatgcccatgactgttaggtgggtcccttttattcacatttttatgaagaagagacttatgttttatatcagactgattttcatttaaagtgct

SEQ ID NO: 2086 - DNA, 201 bp, Bos taurus
aactaaagtgttttgtgctaagctcttcacaagaacactgagtttctaatataaagaaaagcagtgtctctgcccaagtgctctggacaccatctgagtgcagaggtagctgcagcccatccagtggacttcttgaatgctcattaagtacatagttggaaaacgacaagatgttatctcacttctaagggaagtttttca

SEQ ID NO: 2087 - DNA, 201 bp, Bos taurus
gtttgctcagatttttccccactatctgtccatcttggatatgaggatgtttctttctttcctgcaggcaaagggagaattcctctcacctgagggccacaagtggcttcggggatgaaggactggaggacagagagaacttccacttctgccagtttcttcagattccttcagcttaaaatattcagtgtgccaaatggc

SEQ ID NO: 2088 - DNA, 201 bp, Bos taurus
ttatttttggagtttcccatcagagaactggccaaagatctggaagcatttatttatatccctagtatacgggagagggccttctgctcactggccatcagttctcattacctccaaaacatgcttgcccgggtccacctgggtcttcaggaccacaggttctgctgcatctcaggtctctgaaaggtcctgggacttttg

SEQ ID NO: 2089 - DNA, 201 bp, Bos taurus
gaaagacttaattcactttcctttttctatatagaaaagatgacaaaactgttgttatataaagaggtgagaaaagagtattcaaacaaaaactgcagagaaagaaaagtattgcagcagtgtgctaggcaattaataaaaacattgtattacttttccgtatcttgtgatatttgtgaaatatttcaacttcaagagtcc

SEQ ID NO: 2090 - DNA, 201 bp, Bos taurus
atctccttgacattataacttttggctgtacgatcccctacagttctctcatggatgtcaatgatgatcagacaatcagttttaaagaaaaccattattagagaaatctaaagcaatcaaatgaaactcaacttatatatagtataaaccactatgtattcagtatcagcgaaaactgtccagtgtcttgactggagtaaa

SEQ ID NO: 2091 - DNA, 201 bp, Bos taurus
tctcctaacaactcaacatttcttatattattttaccatcatgattactctcttccaaatacagtttgatcctgtgcttagttgttccgtcttatctgactctttccaactctttggactgtagcccaccaggctcctctgtccatgggatcattcaagtaagaatactggagtgggttggtgggttccattttcctcttc

SEQ ID NO: 2092 - DNA, 201 bp, Bos taurus
gataccaagcgagggtcctggcttccggagtgagccacagtgccgtgacagcaggtctgcagagagagacacattccacaggcagaagcgttccatctcaatgggcgagagccgccctgacgcatggggtggctagtttttaagggctgggtaacttctgaggctaacaagcaggaagattgctacaactcttttggggaa

SEQ ID NO: 2093 - DNA, 201 bp, Bos taurus
gggccttgcagactctgggaacacgtagggtgttaagcctgaaaagagaagcgggagatggtaggaggtgtctacgaaccaacgctatcacctctttggtcttgggaaggggatgaaggccagagaagtgtttctgagcagaatctgacagactgctgctggggagaggctcctgaaaataacaacccccgaggtcctgaa

SEQ ID NO: 2094 - DNA, 201 bp, Bos taurus
tggtgacgtaggccagattggcaatcttcattccatacagcatggaggagaagccaggggcaggggtcccaaagctgccgggagcagaggagactggggagtgagggccagggggcggcaagctggggagggcgtctgagagccactctgtgcgggacaggatggggctggggacagagactcaggccgggacggcaggac

SEQ ID NO: 2095 - DNA, 201 bp, Bos taurus
gtattataagacggtttcagctaagatcaaaataaataacatgatctgactcaacggtttgactcttgagctcctggacgaaatctgatggaatgtcaaacgcagagactccctcctaggcactagctgctggtaggcaaaagtatctcaacatccttgccattggcaacaacagcattagaagagcagctgctgccaagg

SEQ ID NO: 2096 - DNA, 201 bp, Bos taurus
tggatcagtcttctagacagcaaagtggcagagcactagaatcaggagatgaaacggccacagccggagaaaggccacattcagatgtgcaggagcaaacagtggaggccaggcctccacaggggacaccactgaggaactgcgcagcccctccagacttggagtacatcctgtctcaccctggctgtgctctacagtgaa

SEQ ID NO: 2097 - DNA, 201 bp, Bos taurus
aacgaagataatgcacacgacaaaattatgaaacacactgtaagacacacacactgtcctaaaaattcttctgtcagatgtctgagatcatgacctacacaagctctgtttccctctactttggaaacgtagctatgtagtcaaacatttgaaaccaaaccaacccatagctaaaataagatactaattcttcacctatgt

SEQ ID NO: 2098 - DNA, 201 bp, Bos taurus
atctggggccccagctcctaacgttcttaccatatccttctcctcgggattacagacttcccaggaggcctggctaggaggattcggcctagacagtttccagaacctactgatatctttctgattctgtcactgcctttgcccaaagacctctgctgcctctacctgggcctctctcaggaatcctgtgctgccttctta

SEQ ID NO: 2099 - DNA, 201 bp, Bos taurus
tagacttaaaggcaaagggctccaattgacccggcctcctgtgactgggctgaggatttatagagaagttctgggccttgacaaattaattcctcttaacgtaacaaagggtaacagctccagaagtcctattccactgtccaaagcccaaatgccgtaggaagtggacccgctttcccctcctgggttggcctgccattc

SEQ ID NO: 2100 - DNA, 201 bp, Bos taurus
ccttgccctgcccctagtcacaggatgaaatgaggcaggggatagaggggagctatcctgaggctggccacctagctgtggggtaaaggccactctcccctgggctcctggcagctgttatgctgagccctggtgcagctgtttttgcagcagctttcacactgacgcagaaaatagaagcagtgtcaggccaacgctatg

SEQ ID NO: 2101 - DNA, 201 bp, Bos taurus
acgtagtgaggtgtggaatgggtacagtggttggcttaagaagtcaagtctggagcatgtggcctgtggacaaggtagggaaaattccctgaaggcctgggtttggctggacatgtggtgcctgaagacagagtctgcatctcagttctgatttcacagatcctgccacttttctgaggcttctcctggccacatctcaga

SEQ ID NO: 2102 - DNA, 201 bp, Bos taurus
cctagattcaaggaaaaggacaaaatgacctctagatcaacccacacatacttattgagcactagctgtttgccaaatactctcatttaaagtctttttttcccagagctatgctattcctctagagcagggtctgccaaaatacaacccttgggcaaaatacagtcacctgtttttgtcaataaagttttattggaacac

SEQ ID NO: 2103 - DNA, 201 bp, Bos taurus
ccactccaccccacccccaagttacaggttttatcactatctcctctgttctcccttgtgagtagaaaagggacagctcttttctagctctgcaggggtcgagaactgtttcccaacttggctggagattcctctgcctggagagcagtgccttgtagatactatagctgggcccttccagggacacctagtagagccggg

SEQ ID NO: 2104 - DNA, 201 bp, Bos taurus
ctccacccactagtgtcggtcacccttcccttcccaagtagtaacgtccaaaactgcgtccagacttttgtcccaaggggcaaaatcacctgagtctccagtcgctgggttaacccccccaggggcccacagaggctggcgctgtgaggcaggcctgtcgagtgatggtgcttcagccgcgattagtgggcaaatgtttct

SEQ ID NO: 2105 - DNA, 201 bp, Bos taurus
ctgaatggccagtttgagaactacccaggtcttttgttcctctggcctagcccccaactcctgggattcttccacgtccatcattccccaggagaggttttatcgatcttagagtcatggcccgtgagagctggtgggcggaaagcagtgccgtgcacacagtgggaactcagtacacgtagcctttattattattgcaac

SEQ ID NO: 2106 - DNA, 201 bp, Bos taurus
gcgtggtgaggactacaggcacctcactaggcacagagggaatttatgaatatataaaacattttcttctggccagtttaagttctgcctgggaaattaatggctgctttcactgcaaaatctatttactgtcactggggagaccagtgatttcctttagccttcgctgtgtagatcaaggtcaagtctagcgtcaggggg

SEQ ID NO: 2107 - DNA, 201 bp, Bos taurus
catgtggacgggccttacattgtgcagtcttgacactggggcaccctgggaacctgctcgatgtcagtggaaggagtgaggggtggcggaacaaggttccggtgagttcaggcctagcattcctcacttctccctgtccgcttacctgcccctcccatgcatacatacacagcccccactggagaaatgtcatactagaca

SEQ ID NO: 2108 - DNA, 201 bp, Bos taurus
ctcaccatctcccagagtttgcccaagctcatgtactagtcatcattgttcatgttttgcttgaatatgatatcaattacaaataaccctgttgcttaacaatcaacttaaaagacatatcagaaatcaatggcttttcccctggagccttcactctgtcactctgagccttgaagagaagggccttcagaggcatgaatc

SEQ ID NO: 2109 - DNA, 201 bp, Bos taurus
gcattagtgagtgagttcagactcccatctttttaactctttaaaataatacgtcaaaaagggaaccttccccttgaaaggataattctcccgtgtcccaaagcagcttgtccttggaacagttttaaaaatgctgcttgaaccttgagcctctttggcccaggttatcccaaaagggaagtttccctttaaacaacaatg

SEQ ID NO: 2110 - DNA, 201 bp, Bos taurus
atcttttctcaggtcaggaaaagattaacccttggtctttaaactggggactagcattgtccgagcacacccagacagctccagctgtggtttcgtctggtcgtagtccaaaatttgttaaaatggaaagtgatggatgaagatggaggtgagacaaaaggaactggactcaagcctcactggagaggcaaggtgagtttg

SEQ ID NO: 2111 - DNA, 201 bp, Bos taurus
aacttcatggcaaactttattccctgatcctttattcctaaacacatggtcctcagggtatctgatccaaatggcttactctgatgactggcaggccaaggtagtaaacacaggagacctagaacctcttcagattatctagttatctaattgaccctgataggagcatctccatcatggccagcttggggtctctgtcag

SEQ ID NO: 2112 - DNA, 201 bp, Bos taurus
agatgctttgagcattctgaaacatagcttgggagacacaggagaaactaatgattgtccgagagggctgggctacaagatgagagaaaccatacatcctttcatggtgtgcacatgcctcagtgttcattcatacagctacaagtttcacagcaatcccctcaggctgcaataagactaaactgaatccaccctgcaatt

SEQ ID NO: 2113 - DNA, 201 bp, Bos taurus
caatccttttttctgtgagcacaccaggggtcactgtgtggcattagagccttttgcgggaaaggcttttttttttttttcctgtctctctgacgatcccatggtttgggttgctgtctcacattatctccgtcagactgttctcagggcattcaggcccagtgcttaccctaaggactgaagatgcagcccatgcctccc

SEQ ID NO: 2114 - DNA, 201 bp, Bos taurus
ctccctgacctgccaaggccactgagcagcaggttacagagccaggattggaaccaggtcttggtcttggggttagagggatttgatcaggcagccttgctgctgagcgtaatgcaggccccaacctgatcagaaagtaaaatggggtgtcttttacatgctaagcattgcgctgggtgctttatatacactgcgtacagt

SEQ ID NO: 2115 - DNA, 201 bp, Bos taurus
cagctgggggcaaccggcccctggccctgctccagcaggtggtggtaatagagccagaggtcagagtagagagcaaggagatcaggttcttggcaagaacaaaactggactgcatcactgggcctgcacacagggagaaaagggtcacagacacatccaggtgggggaggggcagggtgactggggcatcaaacctcaaga

SEQ ID NO: 2116 - DNA, 201 bp, Bos taurus
ccttcacccagagatgcacaaaaggtggtggtgccaccacatgggccacagcactccctggggtctgggacgtcggagaagctgagtttggagcctccactcccaccacaccagcccctctaggcccacacctgtgcagaggccactcagaggagctcagccactcgtctgagacggcaggctctgcaaaactcccaggac

SEQ ID NO: 2117 - DNA, 201 bp, Bos taurus
gaagaagatgggaggagtccaggggtctttaatgcaggacagaggaactgcaacggctcaccggagagagatctcagaaggccggaaacctggaaaacacgttggaaaatactgctggcacatgtggaagtccccacccttgtcccctcctgaccacaaagggatccctgtgagtgacatactggccagtcctccagtctt

SEQ ID NO: 2118 - DNA, 201 bp, Bos taurus
taacccatttggccaagtcagttccttttcacttgttctcacctaaaccatccctgcatagcccttattacaggtgtaatacctaaagccccgctaaactgtgagtgcaggggccatgtctagtttggctcattatggtatcaacacctagcacatcgctgggaacatagtaagaactcaaatgtttgttcagtgaaggaa

SEQ ID NO: 2119 - DNA, 201 bp, Bos taurus
acagagttaagctaccaacagattccctgagcatcatagcagcaggatgatctctccttttagtgccttgtcaaaaaccaaaaaatagtgttgaggaaaagctgccattgcccattgtggcttcagtgttgaccccttgcagctgtacaactcaaagcccctagctgtctaaataaagtgctttctccatctcctttagaa

SEQ ID NO: 2120 - DNA, 201 bp, Bos taurus
ggtcgagggacttgtccaaggtcaggcagcgagtcagttggaaactgggacaagaatcagcgtgcgtgtgctctgtaggctcctctgcatccctcactgggactctgctttggcctggggatgacaaggggctgcagagatataagtgtgactctggtcagtggggacttcggtaccttggctcccaggtcatcccacctg

SEQ ID NO: 2121 - DNA, 201 bp, Bos taurus
agtagggatgtgctgccacctggaggaggaagggagcactgcagcaaggaaccaggacagcccctggagtacctggagatcaccccttctttcattttcagcctcccacccaggagcctcactgaagcagctcttcccaggaaatgggcttggagaagacctccctttctaaccagaggtcatagttcatctggaagtcct

SEQ ID NO: 2122 - DNA, 201 bp, Bos taurus
gcagaaatgctggtaagcagggttcatggcaggggaatacatcatctttctgatttctaagagcctttctggggattcttacagagtgtgagccaggacataccgattactctatgcacaaactgccctttgaggtctcagttcatacattttctgtgtcacgtgtaaatcaaaagtggtactgcttctgtaaaactaaag

SEQ ID NO: 2123 - DNA, 201 bp, Bos taurus
tggtaaagggtgccttcactgggggctggggggacttgccaggaaatgtgggctctttccccagggctgccccaaagctgacctgggcctcaggctgcccaggcacagctcaccccctaagaactttagctcctcattcagggggtcatcagacacccacctaggccctgcccagaccccagtcctaccgcaccaacccct

SEQ ID NO: 2124 - DNA, 201 bp, Bos taurus
gccacacctgccctgggcaaccaaggtgtgtggtcacttggcctatgagggaaactttttctccccagaccaaatctctgtctccccagaccaaagtctttgtcccacatctcagcctgacactggccctctgtgcttctatcacatatgggcacttgcaaaactccatgatagattctgctccggcctgttctcctcggt

SEQ ID NO: 2125 - DNA, 201 bp, Bos taurus
gaaagacagaccatgcattgctcttcttttagaaccattggttcacctacaatgagaccatgactgtggagagtgtgactcaggctgtgtcgaatctggcgctccagtttggagaagaagatgcagacccaggtgccatggtgagtgtggtgactgcgccaagctgtcttgctgtcctgtgggacttagggtgtctgtcct

SEQ ID NO: 2126 - DNA, 201 bp, Bos taurus
tgatgctcttggcatttggggccagatgccctatctgatgccagatgcttgtggccctctctttttttgggacactgtcccatgtattgtaggatgtttggcagcacccctgacttctacctactacaatgccaatacaatgtcagtagcacccaaccctgacttgtgataatgaacaatgtctccagatattaccaaatg

SEQ ID NO: 2127 - DNA, 201 bp, Bos taurus
gcaaggccaacaagatgaggttttgagcctccttttcaattgccaccctcttttttcagaaaaccctaaagtcatatccgcctgttctcaactccttggtcgcttgccaagatggccacaggagaggaacacatcacacaacacttcttctgttcttcatgcccctcctccacccaaaccgccaaagttgaacagagggca

SEQ ID NO: 2128 - DNA, 201 bp, Bos taurus
acctgaggcagcaggaatttaagatcagagtctcagctttataaggaaacaagtgtcttaccccacaaagcaccagccctccacagggtccctcttatgggagaaagacagctcagaactcatgatccttgaagtagggcaggagctagttaacacacacaggatgtcagtacattgacactaaagaaatgttgcagaact

SEQ ID NO: 2129 - DNA, 201 bp, Bos taurus
agactggcttctaggtcatccctttcttttcttccacgggcctggtctgctttcttcttagttctgcctgcttttgcttctcctaagtaggaattactctcttcttttttaggacttattcttaatgtactccttcctacttttagaagtgttctaggagtcccttccctttttttttctttcttttgttgtttacatatt

SEQ ID NO: 2130 - DNA, 201 bp, Bos taurus
ctgtttttatattaaaaaaaaaaaaaagaaaatgtgtgttaccctccctttgtgactagcaaactgctgccagtcttaaaggaaattacaacctaggatgacaatggcattatgaggaatgttccaattagataagatcatttaaaaagtgtacttaaaagcaagggcttccaaatcaaacaaatagaattggatacctat

SEQ ID NO: 2131 - DNA, 201 bp, Bos taurus
gtgaaggggttgctgagaaataacattttgagagtattcatattaatggttcactggtgatcttggtgcatgaattggagctgtgtcactactctctgaaccctgtggttagttagctaagatatttaatatctttactcctttggactgtgcatcaatacatttgttttctgctttggaaccagatatccttccctaact

SEQ ID NO: 2132 - DNA, 201 bp, Bos taurus
tgtctagtttggatatcaaggttatactgtttttagaaagactaacagtgttctacttttccagttacctatataattttacagaaggttggaatcagttttttttaaatgtttgggagatcacactgtaaaatccccttggccaggtattttctcagtggaaggattttaaataatggaccaaatttctctatggtttta

SEQ ID NO: 2133 - DNA, 201 bp, Bos taurus
aacactgtttaaaggagatactaactatggctagtatattttcatatttaaatttcaaatgatcagagttaaacacatgtttaaataaatattaaaattatccactaagaaagcagcagtcttacctgtaacgaacatgaaaagaatggtcttctctcatgtttatcaaattttcctccatcgagtcatattataagctgg

SEQ ID NO: 2134 - DNA, 201 bp, Bos taurus
gccattttcattagggtgaaatatttgaaaactagaactgtttttcacttacaggcaaaataaaacccaaatgagtaacataacaattataacagctctataaatgatattgaacacagatgggccaacaaatgctgccaagtaagtaagctactggagtggcctggaccttctgcaaagggtttttcatttctagacaga

SEQ ID NO: 2135 - DNA, 201 bp, Bos taurus
cctttgttacctgtcccctgcctccttcactccctccccatttttgaacgtgggttgctcctagggaatgactttaggcaaggtgaatcttttcagcccagggtgacataaagagagggactcaactgagagctgtctgttaatactgacagctactgtcagtcctgagggggattggtgggcagtgcactatagaatata

SEQ ID NO: 2136 - DNA, 201 bp, Bos taurus
tggaattatattaaacttatggatgacactggggataaattcaattcttatgatatcacaggtcactaaccagaatcatggcctgaatctccatctattttggtcttcatttatattttttcagttcagttcagttcagtttccagtcatgtctgactctttgcggactgcagcaagacaggcctccgtgtccgtcaccaa

SEQ ID NO: 2137 - DNA, 201 bp, Bos taurus
gttcttcatcagtgatggtggtggtggtgatttcctctaacttgcagataatgtatgtaaagtgcccaatagagggcctggcattcagtagcgtgtggacaagcttcaggtactcaggtagcctgcagggcaatgggaccactgagtcctgggtctcatttcacctgtgcaagaatggccttcattggaacactggggccc

SEQ ID NO: 2138 - DNA, 201 bp, Bos taurus
attaattagagacaagcctctttgagaaataattagacagtgccacaggtgatatgatcctctctaatgccttgatgaacatggcagcaaaatgcacttggcatagcaattgttatagataagaagttgactacaataatcttgattgttcacagtttgatgataatcgtatgagaggttttgtagatgattatggtggta

SEQ ID NO: 2139 - DNA, 201 bp, Bos taurus
aactctcctggacctacctcttctttgtttctgttcatttcttcaacaaattcatattgaggcctcactgtgtgaaatcgctgtgattctgcagaattctaaaaggactcagttctgaaaaaattctcaaattagtaaatctatctgtaccaaagcctcaaatagatctatacttggaccctaaactaggaaatgccacac

SEQ ID NO: 2140 - DNA, 201 bp, Bos taurus
aactcccagagttcactcaaactcatgtccattgagtcggtgatgccatccagccatctcatcctctgtcgtccggttctcctcctgcccccattaatttcggggccaagtgaggaaagcttattcaaagtcagagctggtgaaaattaattttagtcactcaaaaagagaggatatggggaaaagactttagataaacgg

SEQ ID NO: 2141 - DNA, 201 bp, Bos taurus
atacatagtagaaatttgagagacacattatttggagtataggaggaagagaggaacagattgtcccaaattccctcttatgtaaaatgggacttggatgttttgttcagattggtgttctagagctagtgagtgttttaggcatgaggctttttcaagagcattattaagatatcaaaaagcccttgtttagtgtcagaa

SEQ ID NO: 2142 - DNA, 201 bp, Bos taurus
ctcaaaataactcccatcaagacactcagttaaaatggtcttgttgggaaaactttgatatgaataaatagctgtaacatagtagtctctcaaaaataccgtgttcccaggggaagggctgggaaagggtaataaagaatcaggattagacctaaaagatatatttgtgttagactctggagggttgaatgaaaaatttgt

SEQ ID NO: 2143 - DNA, 201 bp, Bos taurus
tatcacaatagtattttcccagtgtgtataataatcacctttttatttcgccttttatagctactcctaattatgtggccaagtttttaaactatcaatccatgtgtcatctgtaacattaccttttcatagcgcttgtctaggttttcatcatgtattgtgctttattcttcttcctgggccatattctctttttttatt

SEQ ID NO: 2144 - DNA, 201 bp, Bos taurus
tttgtcttaatattggcctttgacccatcttcagattcttgctggtgtctgtgcatgctaagttgtttcagtctcatccgaggctttgaaaccatatagactgcagccggccaggttcttcggtgcacgggattctccaggcaagaatactggagtgggttgccatgtcctcctccaggggatcttcctgacccagggacc

SEQ ID NO: 2145 - DNA, 201 bp, Bos taurus
taatgaaaaagtatttacatctcaacttggtctttggcagagtacactcctttagtggaaaaaggagttatgtcaggcctctttctttccaaaatttgttcttctatactctgtcattcacattgcaaactctggtttctacttcttcataattcagagagaaaaaaatgaggatgcttactgggggccagaaaagttctt

SEQ ID NO: 2146 - DNA, 201 bp, Bos taurus
ccataccttgaaaaataaggggtctatctcatatcttattccctatctacagtcttcctagtgagtacccaatgaaggcctataacaggttgtgaatggataagtaagtggatttcaatagaaactatgaaacagggacttccttagtggtccggtggttaagactctgcacttccaatgccggggccccaggtgatccct

SEQ ID NO: 2147 - DNA, 201 bp, Bos taurus
ccctggtttaacatttggaggaagtgccaaactgtcttccaaagtagccacgttgccttctctctcccagcccacatgcatggcctcatgagtatgggcagagaagagaagactcagtcctggtctgtacatggatggctctgtacgatgtgcaggcacctgaaagtaggcagctgcagcactgtggcccctcaatgggcc

SEQ ID NO: 2148 - DNA, 201 bp, Bos taurus
aaacgaggaggcctacactaccaatgagctaaaagaatgcagaggaggaggagcagagggcagagatgtgctggtggatgtgcaaactagctcaaaacaacgcctgatttgtagcaatggcctaattctgtagtgtgtaaatgcccctaccattgccaattacaaactgctttaccaacttcaagtgtgatcactgaaagc

SEQ ID NO: 2149 - DNA, 201 bp, Bos taurus
cactgctgctgtaaccaaatccttgggggccatcttcctgcccttccccaagtgtcactagttcctgaaacaggctgctgtggctagaacctagggtcacggctgcactctagcttcaaggccatctgagaaagtcaatagctggtctttgggtatcttttacatcaagagaacatgtttgcaaagacacattgtttctcc

SEQ ID NO: 2150 - DNA, 201 bp, Bos taurus
acataaattatgtacatttaacatatactagttgtacatttcttaggctatcagcgaatgagattttaaaaacaaaaaaaaactgctgaatacttgtctgaatatttttgtctcagagttcagtaactcaaaccctgcaaaattagtttcataaggccgtattgtgaatataatatgtagttcatatgtttctgtagtgca

SEQ ID NO: 2151 - DNA, 201 bp, Bos taurus
atttggtcctttaaaaaacaagtgttttctctcaagtgatatacatagtaaggcttaatgtcattttttgtaatagcttttgatttgtttgacgaaggctctaaaatagtattttaatataatggcatctcattctaatacaaaagggagaagtatgttgcccatatatcagtcactttgagtgattaatcaaagtctgaa

SEQ ID NO: 2152 - DNA, 201 bp, Bos taurus
agtaatctttctgtgttattgattttacttctttgggaacttgtaatagagataatttatatacttgtaaatcaaaataaattgatctaacaagtaatattaaatataggattaaccaaaataataaggcctagaaattacctaccatatctgacttcttttcccacctttctactgaacctttgcaaaactctctcatgt

SEQ ID NO: 2153 - DNA, 201 bp, Bos taurus
aattctgtcaaggagtagaatagaaaacagaaacaactctaggcattctattcaaaaagagaaattaaatatagggagccaggcacttaaaaagtcgtgggaagtttggactccaggctgggtctcctgaaatgatccctgataaagtgcagaactgatctgagagggagctgttcattatcctaagatcagaaatgtggt

SEQ ID NO: 2154 - DNA, 201 bp, Bos taurus
tgctgaatcttttttcaaattcataaagaaagtctctcaggatatttcacagtgtgagtatacacagcctcctttccctgacaggtcattattgaatatcgtgctgggtttgagtacagggctggtgagtggcttctctccctgcttcttctgtaaatgtatgaggggttcaagctttggaatcttaaatgtccatgagag

SEQ ID NO: 2155 - DNA, 201 bp, Bos taurus
tatttaaaacctttcaatgttatgttgtccttaacatattaccagccatgtaccttggcctctatgtgttatttattaatttatcaaggaaatctattgtctatagcaaactagttcaaatgtaaatcaaataatttgccatgacaagtaaacagaaatgtttactcagtaagctttaccttatggttggtcttcaactag

SEQ ID NO: 2156 - DNA, 201 bp, Bos taurus
gatctgtaggtggggacattgaaattaagtcagagaagggttcaagacaaaaataacactgtgatctagggaggcagtgatgcattctgtataaaagaagctgtattttattcatatacattactgaaatattttaaagtgtgtttttcagggcagtataacttctttaattcacttgagctaaaaaatagctatgatgat

SEQ ID NO: 2157 - DNA, 201 bp, Bos taurus
tcctgaagaaaatcatgtttaggttgatatcaaaagattgattaggtctaagttcactgcccagctacacattagactcatttgggaaactttaaaacacgtaaatgcctggggaccctccccactccctgctctgtcattctagatgttagttctggagttggacccatacatctatatgttttaaaaactctccaggaa

SEQ ID NO: 2158 - DNA, 201 bp, Bos taurus
ttctcacagggtggcccccatgggccaccaagaagatcaggagcactttattagaaatacagtgtcctgtttccaccttacccctttaatcggaactcaaagagaggggcccagtctgtgtcttaatgagctctctgggtagttctgatacatgctaatgtttgtgaaccactgttctagtccagagtagacaatgctatt

SEQ ID NO: 2159 - DNA, 201 bp, Bos taurus
ttccattaatatggtgcaaatgacatttctgaaactgctgactgcctctgctcggcaaaatttcacctattactgtcatcagtcagtggcctggtatgatatgtcatcaggaagctatgacaaagcacttcggttcttgggatcaaatgatgaggagatgtcctatgacaacaacccttacatcaaagccctatttgatgg

SEQ ID NO: 2160 - DNA, 201 bp, Bos taurus
ttttagttgggtatttaatttgtaatacaaactatcactctgctgaatgccatttttcagtttgtccctgacttacaaagatgtttatttcttgtttcctttcttgttttccagtttgaacaaattctgcatccagaatgaaatcaggcatttttccatgatcatacttatcattttttaccacatttttcattattattt

SEQ ID NO: 2161 - DNA, 201 bp, Bos taurus
aagaaagactcaccttattcttctccatccaactctctcctatttctatattatttgagtctatccaaactattcatttgtggatatttagcagactattttgcttcatgtacagatgaatagagcttggatttataaaatacacttactatttgggaaaagatcatcaccaaaaaaatactaaagtgttacattagtaat

SEQ ID NO: 2162 - DNA, 201 bp, Bos taurus
ctttatgcacttcatatgtttctagagatcttcccccaaatagtcttctagttagttccaaaattttgtgattctgtgcacttcactgaacaaacacataattaatcttaaattatgcagttacagactggtattgataattatagtagtattgtaaagtgatttctatattgacaaaatagatatattttaattgggggt

SEQ ID NO: 2163 - DNA, 201 bp, Bos taurus
ctgaacccaccttcttcctccctcctcataccatccctctgggtcgtcccagtgcaccagccccaagcatccagtatcgtgcatcgaacctggactggcacctcgtttcatactttgtgtatgtatttgattgaaagtcaaagtgaaagtcgcttagttgtgtctgactctttgtgacccatttgattatattcctataat

SEQ ID NO: 2164 - DNA, 201 bp, Bos taurus
gtttctagaatagctgtggagtgtcagacaaaccacttttacacaaaagcaatgagatgggctaaagggacaatttgttggaaaacctgagttagaaattgatggccaagttttttttttagaaatggctggtggctcagacagtaaagcataggcctgcaatgtgagagacctgggttcagtccctgggttgggaagatc

SEQ ID NO: 2165 - DNA, 201 bp, Bos taurus
tcttggctaaataattaatggcattctgtttctctcttaaaagtatctcagtttagatgataagtttatatgatcccctatttataatgtgtgaaacctccaacatttctttttggccatccactggcatttaccttacctttacctttaactcagggcactgtgcatccttttgcttacaaagttagcactgaaatcctt

SEQ ID NO: 2166 - DNA, 201 bp, Bos taurus
tttagccataaaaaatgacaatatattagcatacactataacttggctggcccttgaaacatattatgtaagaaatcaaacataaaaggccacacattgtacaattccatttttatagtatgtccagattaggtaaattacatagagacagagaaagatgagtgttggccagggactgggggagggagaaaatggctgctg

SEQ ID NO: 2167 - DNA, 201 bp, Bos taurus
ggccacactgggtttccccctggcatgtattctttcccagtctacattgctcaggctccaggttgctctgcaggggaactatctaaggtgggccctgagtcgtgtgcaattccaggtctaaaccactcaggttcaggttcttgggtactccacaaaggcacagactcagttgggcctgcgttttgtgcccttcccaggtct

SEQ ID NO: 2168 - DNA, 201 bp, Bos taurus
aagaaaaagaggaagagtattgaattttagagttcaaagccataaaacagaaaaagcactggtagcctctaagctgttttctccactgagttgcagcccatttctcaatcagcaagatgcctggagatccagaatgtaagactctcaaattctcggcagatcagctatttgggaaatatgagcatagcgactgcttaagga

SEQ ID NO: 2169 - DNA, 201 bp, Bos taurus
tttcaataggcagtatataaatgtgacttttgcttttttaatgtccacttttaagtttttgcaactatattaactttttaaattataattcaatattgtacgtgtatggctagaatgaaaagcaacagtcacctcccctgcacccactggcactaacaagttagaggaagaatttcaaaatggcaaccaccagcattggcc

SEQ ID NO: 2170 - DNA, 201 bp, Bos taurus
cagtgatttcccttggctaattggaaagattagcagtgccacaatgaaagaattggtgataatgaaaccaaactaccggcctaatgatacaattcggatcccattagtagactgtagagctcaatgtataagggctgtcagaaggagatgaagggccagaatctcatcagacactcctcttttaggcttaagcttgctata

SEQ ID NO: 2171 - DNA, 201 bp, Bos taurus
ttaactcttgatgatttccagtatgcccattcaagttcaaggtctttgcaggccagttgttactagccaaaaagtgcctagtattctggccaaaatgccctgtggttttgctgattgaccaaacgtgtcacagtgtacattttcagatagatagaatgttttccttagatctaattctaaaacatcatggccaccattgtc

SEQ ID NO: 2172 - DNA, 201 bp, Bos taurus
gcagaaacaggggctcatctgttcagtgactgcatgtagcagcagcaggattcaccttgagtgatcacttagagtagttggacagatttgggggttctgttattagggccagtctcacagctaagacatctgctttgttcaatgcttgacaaaagttttctaatgagaagttgttagctaatatatgagaaagtcgattct

SEQ ID NO: 2173 - DNA, 201 bp, Bos taurus
ggggaagtcttaaccactggatggccagggaagcccctggtttatataattctgttaaactttacccataaataatgtcacagatcagggggaaaaaatccgttgtcagattctaggccctcatgttgggtatggggattactgtcactgaaaaccacgttagctactactgggaacatggctcatagctgcttgcccctt

SEQ ID NO: 2174 - DNA, 201 bp, Bos taurus
tgaatatcaacttttaattacctatctcttatcaatcttctccttcaatcctgctctccatgtcccctggctattggggtgcatcaggaattgccagagagatatgatactactgccctccctgacttttagcaccatttccacctcatcctcttttatttagctttaggagctatgacagaggtctgcagtagacctatt

SEQ ID NO: 2175 - DNA, 201 bp, Bos taurus
ttttcacttgaggaaagtggcccccaaaaaaattgctctgaaagctaattaagctgatgtccatgagacccaaatggccatagtaaagaaatagttcttatcttattttattttcagttcagttcagttcagttgctcagtcgtgtccaactctttgtgaccccatgaacctcagcacgccaggcctccttgtccatcacc

SEQ ID NO: 2176 - DNA, 201 bp, Bos taurus
tattgtagaatggactacaattttctttttaattgttgctgagcacctaaaattctaaaaaattaattgtttacaacccaagtgaacattttctctgctcgtcggattttgtttagtagaatacaaacaaagttcacctgcatgctagctttcttctactttgaatattaacatattggtaggcaacacatatttggtgcc

SEQ ID NO: 2177 - DNA, 201 bp, Bos taurus
ccccataagccatgatggcctgtgaaacagtccagctcagagccttagcagctgttcccttggagggaaacccttttcttgagaacatccaccatttactctctcacttcttcgaggcctttgctcaaaagccttcaatgcatcccaccgctaccacattatttaaaactgccttctctgctttctgctattctttgcttc

SEQ ID NO: 2178 - DNA, 201 bp, Bos taurus
aatggaacaccctaaaactgcagacataacatgacaacaaataccccttgagtgtcacaccaagaagaaatttaaatgccaccaaagtctactatacttatagtaatcaaggataagcagtagatggaggtaggagtgggagaattgaacgaagatggtcaaaaggtacaaacctccagttataagataaacaagtactgg

SEQ ID NO: 2179 - DNA, 201 bp, Bos taurus
cctgtctttcccctcaggcctccagcagaagcccgtagccagctagctcagctgtcatgccagcaacttctcaggagctataaggcccagctgaagggagcgcttgactctaagttagagatgctaaccatttctggtagtgaagaatgaagagccaggtgtcctggattcaactccctgctctgtcacttgttagacatt

SEQ ID NO: 2180 - DNA, 201 bp, Bos taurus
tcctttaataaattacatcttattccattgttctataatatttatgaaatgattagtgcaataacatcattgaagtatcatttaaaaggcaaataccctatagatttggatttgtcatcccgattccttggcattcaataatataagtgtctttagaggcatcttcttcatcttctgatttcttcacagtaaatttagcct

SEQ ID NO: 2181 - DNA, 201 bp, Bos taurus
aaccctggtgaccctagacctttgttccatcattaagcttttgaccgatacttggtgccttagtctgtgctggtgatggggggagaaaaaaggatttcagtggaatctaacccctgatataaattagtcctcctattccttgtgtatgtcatcgtccacagcacccgaaaatatgtaaaccatatcttcaccattaagaag

SEQ ID NO: 2182 - DNA, 201 bp, Bos taurus
aggccacggtaagtattttggcttcttctctgactcaaatgagtcagtgaacagcttagagcagagtgacaggacctaacttgtgtattaaaaataccattctgaagatatctgcttctggccataatggagtaattggtactagacttgccctctgctgataaactaaatatgaaacagctgttctcaaaaataggtaga

SEQ ID NO: 2183 - DNA, 201 bp, Bos taurus
attagttcttagaataatacaaagcagacttcttcagggagccttccttgattttcctggccatctccaactccccattatggaggcccttattagcctctgtatatctctttattaatgcataatatagcagcaattttacatttacttgtgtgattagtgaggccattgagtagagtatttaaaagcaaggatttaaaa

SEQ ID NO: 2184 - DNA, 201 bp, Bos taurus
agttgcaagcagaagggctgaaactctcagggccactaatattctctaaggcattaatatgcaaattaggaaattaatatgcaaaccaggagagctccccactcctacccggccaggtcagtgcacagcttgggaaggtggactgcacttttgtgcagagagaaacttcgtccagacagaagcagccctatgctagggtgc

SEQ ID NO: 2185 - DNA, 201 bp, Bos taurus
ttaagttcattttttggtgtcactagtccaagattttcccacctaagacattaacatttggggccagataattatttattagtgtgagaagagatgtcttgtgcatcataaaatgtttagcagcgcccttgtcctctatcagctaaatgtcaggggcagcatctccccttcctctcagttgtgatgaccaaaaatatcttc

SEQ ID NO: 2186 - DNA, 201 bp, Bos taurus
cacaatatcactgaaagctgtagggttctttcctgtcctttatgtcagcaaaaatattttcaccttctcagtagctctttctcacattttagcttctctcgtgcttttctaattcagaaaataccattgcaagtatgttaaagggtttaaagtttagtaggaaatttttaattctcactaagcagcactatcacatgcatt

SEQ ID NO: 2187 - DNA, 201 bp, Bos taurus
tgatgatatgcccagtgcattatgggtaggtcaatcagaatggagaatagcaagcaacagagtgaatgctggtaacttccaggccccagctatttcttaagctcacactttcaattctgaaaattgggggcagtctaggaaaggttccaggagaggtgccagcaaagtgactggaggcctatggctggggttatttaccaa

SEQ ID NO: 2188 - DNA, 201 bp, Bos taurus
ataattcctcttgttattgttttagggattatacattataatatgtataaagctctttgtaccacagaaactctcatctctgtcttttgaagtcttgcttggcatttagctgatgcatttacacttcagtttaactaagccaggtctaacaaattgataaatccatcatcattgttttttttctttaaataaaaggcttgg

SEQ ID NO: 2189 - DNA, 201 bp, Bos taurus
atgttttccttttatttcttccctgatgccctgaatgtattaccaggcattttaatgagatgtggctaggtccagccctggccaataattaactccttccgctctgtcagactgttagcattttatggcatttctagcctctgggagcttaagtgtagggcctaagtaagaaagtatctctggcaccgtttccaggataag

SEQ ID NO: 2190 - DNA, 201 bp, Bos taurus
cctgactctcatattaacagggcccactgtaactgggaaaactgacccagacaaactctaacaaaactagtattttttagactttatactctaaaggtgaagaaaactcctctgggcctaagaaacacacacatataacacccactcacccacccagcccctccccacacacacctatctctccatcaatctaaatagaaa

SEQ ID NO: 2191 - DNA, 201 bp, Bos taurus
agaaactcataaaaaacatctgagagctgaaacagcggttacaaatgtgtctcactctgaccatgttttagcctctaaggaaaaatagatacattctcatctgtaggagagtaatgtagtaatttgaaaaatcaaatccatgacacttcattatgggatcatgtaggattttattttcaagatgcctcattgcaaaattaa

SEQ ID NO: 2192 - DNA, 201 bp, Bos taurus
tggggaaaaagacaggagacatgtatatttgcttggtgtaccagttgttcctcatgagaataggcttatcaaacaagtaaataaataaatatatgtgtcacgaacagaaatgtccatatactcaattcactgaattgttgattattaatgatcattggggtttccctgatggctcagtgatcaagaatccacctgcaatgc

SEQ ID NO: 2193 - DNA, 201 bp, Bos taurus
cagtcagtggagaaggttttcgacaaagcaatggcatatatgactgcatttgcaaaacaaaatctaaaataaagtttatgttactgatttatcattgggtttccatattggaattttggcactttagatgaatttgaaatattcatatactgaatttttaaattgctgtgatggtaacaattgattcatggatagttgagt

SEQ ID NO: 2194 - DNA, 201 bp, Bos taurus
ctattgatcagtgtttttgttcaattctaattattactaaaaaggtattttcactgactataaatcttcagtgtccacactttatgtatgcacaaaaatccagaagtttattaaaatagagtctcctctgataatctctatagatgctttaatcacacattctgtgtatttaagccaacatctaagttcttgtcacatctt

SEQ ID NO: 2195 - DNA, 201 bp, Bos taurus
ccctagagaccgttttgttcatcttagctcaatacaagatcagatccattgtcagcagtaacaatttgtactatgttcttttccactgggctcaaacttagagcatccctgagtggaaaataaatggcaatagctgtatctcagattttacatgggcatggagggagaggggcggaatgaacttagagaagagtaagacct

SEQ ID NO: 2196 - DNA, 201 bp, Bos taurus
tgcagcacacacgacatacatcccctctccttcctccctctattccctcttctgctgctttttgccgctcctccatatttatgagaggggaagggtgagcggtggctatcacggccttattatctgtttctacagagtatgctcctttgtcttttacaatttctctctattcctttctttatctgcagcccaaatcctatt

SEQ ID NO: 2197 - DNA, 201 bp, Bos taurus
gtagggctgaggtgcttcgagggacacaaacagaagaaagagtattcaaactgatgttgccataatgtaaagcttcagtggggactatcttgggaattttgtaggaaaaaaagaaatccttcttcttaatacaacattaactctgcttccatcgtggtttgctattcctgaagaccttagctccttagccatataggagaa

SEQ ID NO: 2198 - DNA, 201 bp, Bos taurus
gtaaaacaaaagagaaccctgtctgtgcgtgtgtgttctctgctcatgctatgtagagaagcgttttgtttgtttgcagtggttaacaaaaatctttttcttgggacattttgacctagtgctttgaatctttaacaactgagttgctgataccctctgcagctgccagagttcagaggtttttttccccttcatttgacc

SEQ ID NO: 2199 - DNA, 201 bp, Bos taurus
taggagaaagctttcccttacttggggtgtgcagtgaacgtccttgtgctattcaagcatgtacctcatatggctcctggccaaccacacagcgcatctgccccatgaggaaggaaactggtctttgactgcattcagctgtcaggaaggacccagtggccatgggagaccactgcacactaccgttgctgatcatattgc

SEQ ID NO: 2200 - DNA, 201 bp, Bos taurus
ctcaattttttgcattgttcatttaagaaggctttcttatctctccttgctattgatagagtcttaataatgtctgagcggagaaggttggtatcagaaaggcacatttgtaagacttttaggatgatttaaaggggagttttgcaaggaggcgtattaattgggaatttgaaaattttatgatataatagagttggattg

SEQ ID NO: 2201 - DNA, 201 bp, Bos taurus
gtgggctggattatgccatccagttaaatttagattatttgtcttctaaattctattcctaaaattcttgaacacagacatgtttgcttgttaggcttgagggatagcttgcctatgtgaaaattattggggtacagatttcccaagaaggcaatagatgctgttttctagcattgagtgtattatggcagatttaatacc

SEQ ID NO: 2202 - DNA, 201 bp, Bos taurus
tgatactcaaaatatatctattgaattgcatcatagataaaatttacaataaagtgagtatagctacatggtgatgaaacgttattgtgaatagtatagactttgaaggaaagaaactgctctcaaaaaagttactgttaccttctagctcctctcactctccttccatctctctgccactcacattcctcccactttcaa

SEQ ID NO: 2203 - DNA, 201 bp, Bos taurus
ccaaatttccatttgtcaacttgttggctctaaatttggcccccatacacggagggcaaagagagacccaagaaagaggcagaccacttcagattggtaggcagttattttaataagccagtgaacttacagatgaggcttgtgttggatggccacaagatgagtagatctctgcaccccaccagaattttagaagattat

SEQ ID NO: 2204 - DNA, 201 bp, Bos taurus
ctttactagttgctacaagcagagagactatcagattaatgcagaggaagcagagagaggtttggaatatgaagggcagttggcaagccaggtccttcctatgttgaacaagcagttctggcccaaagaagtgaaggctctacaaggtgaggtttacaaagttcttcacacagcaataggagtctatcttataaaacgtcc

SEQ ID NO: 2205 - DNA, 201 bp, Bos taurus
cttgctgctgctggcagtacggctgtgggtagtcctgagtcctcgcgctcctgtgcctcggcggtctctcagcctcttggtggtggctggatctggtgagtatacgggccttgactggcgggctagggtcgggaactacaaaacccagagtccatcgcggcgctcttcggcagcgccagtaggactttttgcagctttgaa

SEQ ID NO: 2206 - DNA, 201 bp, Bos taurus
ggctttcaagctcaccttcatatccttggatcaccctcattgaccttcaaaccaacctaggaccccaaaggtcttggcccatattctgtgtatggggttcgtactaggctaggagtaaaattcagactaccctagttaaatatatgttggcacacctgtgccggtgtcatatctcaaccaacaggccttgacctgtggtga

SEQ ID NO: 2207 - DNA, 201 bp, Bos taurus
ccatcctagtatgtatttgccatgtgactttgctgcttctcctgctgagaagtgtagcccatttttttgcctccttgaatctgggtaggccttgggatttcggttgacacacaaaatgcagcagatgtgacatgagagttctgaagtttaggtctaacatgcatggcagctgctgcttgtttggagcattgccctgagatt

SEQ ID NO: 2208 - DNA, 201 bp, Bos taurus
gtgcagctgattgggataatctcccaaatgatgcaggcccaacttaaaacagtccgatgttctaccacattctgtgcacttggcctcttccagccaactgacttggtgtcctgctgacacccagcctgcctgtgcctcccactggctcagcttctgctctgacagcacggggatcagggaaaaagagaagaaaatcgcatg

SEQ ID NO: 2209 - DNA, 201 bp, Bos taurus
ggttggccagcgtcctgtagatgctgatgttgagacctctgtggaaaattccagtgggctgcacacttgccgcagaggggatcacgggcttgcggaggaacgcggccttagctagtctggtccagcttacctttaggttggcccactgggcaacagagcctgggagaggcacaccctcaggtcagcctgtttctcaatgca

SEQ ID NO: 2210 - DNA, 201 bp, Bos taurus
tggccactgcatctttgacactgggcaaattgtttttcctcttaaatctgcgtttattatgaatacctagtcaatctcttaaggattaataatccataatagatatctctttgtctaaactgctaaagtgtattcttccctaccatatgtaagttattcatgaataacaccatcaagtgaccgaataagaatgcagacttt

SEQ ID NO: 2211 - DNA, 201 bp, Bos taurus
aggagatcttcccaacccagggattgaaccctggtcttttacattgcaggcagattctttaccactgagccaccagggaagccccttatttttctgtaactccatatcacctcaataaaaaaattggaaccatacctcatactgcaaacaaaagaaacagaataatttctaaactgctcaaagaatgaataaaaagaaaaa

SEQ ID NO: 2212 - DNA, 201 bp, Bos taurus
ttacctcaacaaaccctcagacgttggcagctttcccatttgactccagtgaccctgatgagcagctctccaagcagccactcctaaacagtatgcctaccgcatattgggtactcttttaagtactatgtatgagggctgtaaacaaaatggtcaaactttctgtactcttaaaattctgggggggagaaatgacttaaa

SEQ ID NO: 2213 - DNA, 201 bp, Bos taurus
gacaatgaccagtgtccatttagcctggcctttgagcctggctgactcgctcctctggatgtgtcagttaatttgcccgtgaaacccactggtctgctagttcaccttagaagggccaacccctcctcttattccatttgcctaaactcagagtaggttttggtttcttttcatcaaaagcagcttgatcagagagaatgc

SEQ ID NO: 2214 - DNA, 201 bp, Bos taurus
ttcttctcaggtactgggattctggccccagagctgatcctgtggaagacttccgatacatctggggagggtttgcctatctgcaggacatggttgaacatgggatcacgaggagtcaggcccaggaggaggttccggttggaatctatctccagcagatgccttacccctgcttcgtggatgactcgtgagtcggaggtc

SEQ ID NO: 2215 - DNA, 201 bp, Bos taurus
gtagctattaaagtagaaaatatgcacaccttcaggacaacaatacgacacttagttatcttacaggaaaaacattccctgatatataaagaggcaagtatcaagaatgcttatggccacattgtttattctagcaaaaacctgaaaacaacctacctggtcatcaatactgaaaataaataaattatagtatatttatat

SEQ ID NO: 2216 - DNA, 201 bp, Bos taurus
tccttcctctaccccatcccatctcttcaaatttagcatgtcttctgttctttcttacctactccaacttacatagattgatgttctctcagatcccctccttttctctccactttaattcccctgcatttacagtctcctctctgcttcaattatctacttttccctcttgcctcaaaggaaggaacattcctctgtagc

SEQ ID NO: 2217 - DNA, 201 bp, Bos taurus
ccagggcctgcacttgcatgaggggggctaatatcagtttaagaccctgcagagtcacaaacaaatgtgagtccttgatatgagtttccccaacctctcccccacctctcatggccgtctcgaatgccctttagataagacctctgaaaaaattacgagaactcagcttcttttggtttgaattgaccactctgttctaag

SEQ ID NO: 2218 - DNA, 201 bp, Bos taurus
aattgttacatttatgccagcttctgctcttttcttagtttttcttctttctctctccaaactagaccttagagccagctaaaattgacttcgagagctattgtcagaaaacaaagaaaaaaaaaaaagaagaaaacaaagaaactctactttttgcctgctatcctggctaatcatggtacatgttctaagatctatgta

SEQ ID NO: 2219 - DNA, 201 bp, Bos taurus
ggcatgggtttagtttcaaagagcagaactagaactagtgatcagaaattaaaggtaaatttctaagcattcttagaactgtttgctggctcgcttattcagcaaacatttaatggtagataaataaaactatggtctctaatcctccccaattttctttactgatactttcatgcatttacaattcactatcactccaat

SEQ ID NO: 2220 - DNA, 201 bp, Bos taurus
ttcaagacctgttccctcaccctaccttcccatctagaaagctgcctgtcccagacccctgctataaaggtatcctgaaaccatcactagttccttatctgccgtgaaccaacaacatttggtttcctgacttggcttgatgattacagtcttatcttcagtttttgagtgggtgcaattgagagtctttgaactttgccc

SEQ ID NO: 2221 - DNA, 201 bp, Bos taurus
gaaattttaggttacaatttagtcacgtgcattaatttggaagttattagttcccagataattggatagattggaattgctactctaattgcactaagttttgtcttgctctaaaacagacactttagactgtcaagaaaagaatggacttctcctttggtgggtgaggtgaaaactggtactcaactgatgtcccaattt

SEQ ID NO: 2222 - DNA, 201 bp, Bos taurus
ttggttggttgagcacgacagcctatggtggaaagcgcagccacgggccagaggaagatgaagaggaaggcaatgcaggacacccgcacgggcaccaacacggtccccatgaggacgatgtaggcccagcgccatgcgctgatatgcgtgtgctgcacgaaggggttttccactgccggcgggaacagggacttgttcatc

SEQ ID NO: 2223 - DNA, 201 bp, Bos taurus
cccctggtaagaaccactggtgtagaggaagctgtgaggtgcccatgatgggcttttcaaactgtggatcactcagtacccattaaggccaggcttctcaactgtggttgaacattgaaattgtcgaggaagctttaaaaaatgctgatgcctggcttgcactcccaaattctagttgattggggggtggtggcctgggtc

SEQ ID NO: 2224 - DNA, 201 bp, Bos taurus
cttttgacttaagcctttgaagctagcaagacactcctttaaaaagccctttcccatttgtgacaccagatgcctagctgccctgcctttcagagaacttcagtttttctaagacaacaccaaacatgtttggcaaatggtgtggtgatagggataagacataaggctgtttcttagcaggtcacagaagtccctcagtaa

SEQ ID NO: 2225 - DNA, 201 bp, Bos taurus
gaattaaggctaagattgctgaggtctgtgaggggccatatttagatacctgtgctgtatccagtaggtcagagttcacaaactcaaactgcttccagatctgatgggccaagggtaactgcagagtgccccctctaaaggaaataaccactgctcagagttaaccagatgttgcggtgcaggaactgtaagtctagtgtt

SEQ ID NO: 2226 - DNA, 201 bp, Bos taurus
ccttcaccttgccaactagtctgcacctctttcaggaagaacattttcctgtaaatgatgatccctcaagtgataactttagattttcttatagaaaaataatatcttgtgatcctttaataacagactttactcatatcaattcagcatttgatcaccgcattatttattcattaaatgagtcagttaactaatcctcaa

SEQ ID NO: 2227 - DNA, 201 bp, Bos taurus
gcttacttctgtcatttcattaacctcataataacatgaccttgtaatttatgaaattgaatttttgggccctatttgttcagttttagtgggtcttactatacacacaagactagtataacaaaaggagagcatgtgtgctagctgtggtgtgaggtaaggaagcgagggaaagcctctcagagggatatttaactgaaa

SEQ ID NO: 2228 - DNA, 201 bp, Bos taurus
ttttaccctaaatagaccatccaaagaagctcctggctgaaactctggctaggggcttcagatcaggggcaggtggccttgggcagggagtcttcagggtgttcctggcattaattttgctgaaaagagcctcacaagagacccagtctcccctcctgcatgagtggcaggcattgggcctcggagagggcctccatgcaa

SEQ ID NO: 2229 - DNA, 201 bp, Bos taurus
agtctgtgtattcatgaaaataagccatggttccttgtccttgtgagtctgaattgttatacagaatttttatattgtgtgtgctatgtttattgtgcacacaggtacatacatgcagaacatactaattgaattattctaaaaacacaaatattttgcaggctacagacacacatactaaatatctaaatctacaaactg

SEQ ID NO: 2230 - DNA, 201 bp, Bos taurus
taacctctgagccaccagggactccattctcttgccttgggccacacaaaagttaagagtgggtcaatgcctaaagagagatgggtattgacattgggcccaccctcccctggggagtagtcctagagaatgcaactacagaggcccttaggtgtagctgggcaacccaggtaagatttcacacacctttctaatctcata

SEQ ID NO: 2231 - DNA, 201 bp, Bos taurus
gcaaacaggcccaaactaatgttacccatttcttttacccctgtcttgttgtccctttgggttaaaatctttgacgatacctagggaatgacatgcagcttcccgagactctcgtggcctatttatccttatggagtgttagtccctcagttgtgtccgactctttgcgaccccatggactacatacagcctgccaggttg

SEQ ID NO: 2232 - DNA, 201 bp, Bos taurus
gggaattttttatttctaatatggctaatgcttcagatgaagatatgtagcttctaaaaatagcctttcagtattttattttttaagtggaaaaatgcatgcatgtggtaaacaagttaatcacatatatacaataaaaatatcttcctcccattctagactcacaattcctctctccagatgttgctgttgttaaatatt

SEQ ID NO: 2233 - DNA, 201 bp, Bos taurus
acatgactgagctactgaactgaactgaacttatattgaatatgtttttgaagtaattgaatttttttactctttttttttctgtgcagaaattttatatttttatgtaagcaattcctttatgtaatcaaaatttatttatgtaaataatttctttaaaaaattgcttctaggttttatcttttgttttacaaagatatt

SEQ ID NO: 2234 - DNA, 201 bp, Bos taurus
tgcagaaccaattttgataaaatgtcctacccataggtgctcaataaatatttattcaataaatgaataaaagaatgaatctctgctccccatcctgtcctcccctgctttccagtctcttctctttgaccctgaggaatcagcagctcaaaggccttagacgaaaactgattcagataagtcattttaaagtgggacctc

SEQ ID NO: 2235 - DNA, 201 bp, Bos taurus
aaacctatctgaggctaatggccccctgagctctggctcctattggaggcagctttgaagactacatttgaagaccaggaagggtgaggaagagggtatggcttccctgaggtctggcctcaaaaggcaccccacaccccaaagatccagggccaaggcaagcctgtaaacacagttgctatgacgtatgatatagctacc

SEQ ID NO: 2236 - DNA, 201 bp, Bos taurus
ttctagggagtagcatagcatttgcaggtattaattgtatttgtttattgagcttcaaaaactcttttgcaaatgcaaacatcaagacattcaacaattctgtaagtatgccatggaatagagaaactcaaaataacaggtttgaaaaatgtctggagaatagttcaaatgaggaatagttaaagaactgaagatgtcctt

SEQ ID NO: 2237 - DNA, 201 bp, Bos taurus
gagacaatgctctctatcagaagattacattctaattctgaaaaatgtgtaaatattaatatcaaatgtgttctgactcatgagtaaaacagggttggccatggagcaattggaagtacagtttagttcagttcagtcgctcagtcatgtccaactctttgcgaccccatgaatcacagcacgccaggcctccctgtccat

SEQ ID NO: 2238 - DNA, 201 bp, Bos taurus
aagagattgcattttgcatgaagttggcagatttgggaaccagactatgcaagcaagccaacttcttattccatgctccatatctcactgcctctgaagcagagagccattaacaaaattttaaaaacttattactcctagaataatattgtattgacagcaactgtaatcagtgattcatgtaactacaaagagaaaaga

SEQ ID NO: 2239 - DNA, 201 bp, Bos taurus
tccacatttgctggcatattgagtgcagcactttcacagcatcatcttttaggatttgaaatcactcaactggaattgtatcaactccactaagtgggagagtgcaaaaaatctatgaattcttgattttaaaattattcaactattaaagtgtactcataacaaagttgagggcacaaacttcagaatcagatagaagtg

SEQ ID NO: 2240 - DNA, 201 bp, Bos taurus
ttaaattatgtttaaaaatattttaatcatactttaaaaaaagtgaaataaatttttttctttaattcaagtcaatttaattattttaaaacactcatatgccaagatgaactcatatattaaggcaaattccaattttatatagtcatttgattaattgtgtttcattttaaattgctagtccagggagagaaattttgt

SEQ ID NO: 2241 - DNA, 201 bp, Bos taurus
tatactaaatcatatcatttaggttttgctaaatgctcccaggtaaccttgaagttatctctcatagtatctttctctctcatttgcaaggcttgtttgagaccttttcccactcgacatggaagttttaagagggtaaagtccatgtctctcttgtttgccaatatttcctaagcattgagcacaatgtctggcatgcaa

SEQ ID NO: 2242 - DNA, 201 bp, Bos taurus
ttatacttctgctattttgggactttgggtccctgtctctgtgattctcatggtcaaaagtcagttgtcacagctctatgaatcatttatccaaaggccagaaacaggaggcagtgggagagtatgtgcctatcttattttagcaaggagaaaaagtctttctaaacagttttccatcagaattcctctgaaggcctcgtt

SEQ ID NO: 2243 - DNA, 201 bp, Bos taurus
tactgctgcaatgaacacaggggtacagatatcttttccagccagtgtttccattttcttcagataaagacccagaggtggatcatatggccatttttaattttttgaggaacttccatactgttttgtatagtagtcttgccagggaaatcccatggacagaggagcctggcaggccacaatccatagggtcacaaagaa

SEQ ID NO: 2244 - DNA, 201 bp, Bos taurus
caagctgtaggagcagggatgaaatgattagatttttatctttcctcagtttgaagccattaatgaggtctgtaatatattgttctgcccaggaatcaccgggccagcaaatttccctcaggcctcagaatgcagattgaatcaatgttttttcacttggctccttcttcttctggatttcctttttcacagagcagttac

SEQ ID NO: 2245 - DNA, 201 bp, Bos taurus
cagggcaggcctctctctttagagggactaccactaaaatgtagatgagaatggagccaaccatgtgatgatattgggggagatcatctaagtagaaggcgcaagaagcttaggatgtgtgcagatcagaagggaggacacttggcctcagtgtcagaagcctggggaaagttaagagtaacagagacctgcaggcaagat

SEQ ID NO: 2246 - DNA, 201 bp, Bos taurus
atgaaacaaacacaacacagaattaaaggaaccctgaaactgaagaagcaggagatgaagttcaaagatacagagtctggaaagaaccaaggagaatcacgtgacccatatcaaggcttaagggccaaaaggcaaaaggaaaggtcaaggttgaagctctgacaactcatttttattcatttcctttacacgcgttcacaa

SEQ ID NO: 2247 - DNA, 201 bp, Bos taurus
cccacagtgtgggctgtgccctcattcaatgactactggctcccacttagcttctagacttgagacagtccacccaagcccagattctgttgggatctcttgccatcaggccaaagttctatttgaatagcaatttcaaaatgattctaggacaaaagtcaatcagtgatcagtctctgttgatgagccagcagcagccaa

SEQ ID NO: 2248 - DNA, 201 bp, Bos taurus
gaaggtgacaacccctagcatgtagtagcagcagcacacttaactaaaccaggggtggacaaactatggccataggccaaatctgtctcattgcctacttttgtaaataaagtcttatgggaacatagccacacccatttgtttatctttgtctatgtatgcttctgctgaatagttgtgacagagacctatgtcctgcaa

SEQ ID NO: 2249 - DNA, 201 bp, Bos taurus
agcattccagaggctcactgttcagtagaatgacctttggggaatcctggcttagacctcctgatgtagagcacagaggccttttcccaaggaagtcctcaatcaaaagagcccaagtgaaagaaagtggaagtgaaagtcactcagttgtgtctgactctttgggaccccatggactatacagtccatggaattctccag

SEQ ID NO: 2250 - DNA, 201 bp, Bos taurus
acatctagccttactcagtgtcattgctctgtactgctagtgtagtgaattataggtcaggaaatgatataaatacagggggcaaactgtaagacagccagtttagggagagtcagtttgcgttacagatctatctgcacattttcatgaggttaagtttaagacaataggaaacagttgttagcatgaatgtaatgaatt

SEQ ID NO: 2251 - DNA, 201 bp, Bos taurus
gtcaaaactagtggtggtcttacatagaatttgatacctttcttcttaagtactcctctgttggcccaataatgtgcccaaagaaccaaagttagaatttccttacttccctttaggagtatctctgtattcaaccactgaaaatgtaaatatcctgaaattggtatctcagaattattaaacattgtggtatgcacctgt

SEQ ID NO: 2252 - DNA, 201 bp, Bos taurus
tttgttaaggtagagaaggtggcagtgaactagagtgggtctcatagtcagataactgagttagaagctgccacatacttgctgaaccaagtgtttcaatcacctccctgaaactcaacgttcaagaacgataatatccaccttgcagggcaggtggccatatatacctgtcagagtaccaccaacaaactgcacatctga

SEQ ID NO: 2253 - DNA, 201 bp, Bos taurus
gtcctttcttttgtttgtttaaacaaaattcactcacagctgcaagcagcacaatgaaagcacattttaaaataatcagatgcttttggggcctcctgctgccagaacaacttcagtccgagttgctgccggctgcctttcaaggctgcagcctctggcaccaactgtctgagggggtgcagtggagttgaaagccattgg

SEQ ID NO: 2254 - DNA, 201 bp, Bos taurus
ttttttgcttaaagaccctttggcatctccaccaaatttctggattaaaaaaacctgtgacattgggtaaaggattttaaaagttattgtgtgaacaagagtccctaggtgatccttcttatgcaatattttagacaatttaattctgttccacaaaatatagaatctgtgactcagggtgattttttttttcttcttcca

SEQ ID NO: 2255 - DNA, 201 bp, Bos taurus
caggagttgggtcatctattagacgatgcgtgtatgtttgtatatatatgttttctaaaagctgaccccaaatctgaagaatgtgaagggcaaaaacatagctgtgtaactggcctcttgaaaataaaagccaaattgaatgagcagaaaggatgggcacttctaagatggggctgctggatggtgaatacatgtgagcaa

SEQ ID NO: 2256 - DNA, 201 bp, Bos taurus
atctgactctggacctacatgatgactggctcctgtgtttgaaaaactctcacatgaaaacaagggacaagacgtctctactaagagatccgaacaaggaccagagtgcggaagttaaagtgtgaaagtctcagcccaacataaagaattgtgtgacaatgagaggaatctagttcttaggggctgcaggccctaacagtg

SEQ ID NO: 2257 - DNA, 201 bp, Bos taurus
gtgtgttccctcaagtctctttgatccctcaaggcagcagtgagccccaggctctggaaagacaggatggctgagctgcttgagagaagcctttgcacccgggggatcggctggccgctcacacctggcgctgtgccctgggctgtcctctttcactcccaggccggcaggaaggcaagagctgtcacctgacagactgcc

SEQ ID NO: 2258 - DNA, 201 bp, Bos taurus
gagtgtcatggaaataattattagcttagatcatggtaacgaaatgcatataagagtctgaagacatgtaataacaggatttggcctatactcgagaagtttgtgaatgattccccaagaaaatgacttgagttattcccaaaggacgaagagtggtaagaagagtctgccagacagaatgaacagcatatacaaaggccc

SEQ ID NO: 2259 - DNA, 201 bp, Bos taurus
atttattggaccacatttattcatacaaacatgcagaataaatggaaagaatagattacattttaacttgcatttttcaaaagcaagatacagtgagtaactataacagttacccaactcaaaccaacttagcaatcttcaatggttactgcacaccacagggagatatttttcattttgaagcaaaggagaactatctcc

SEQ ID NO: 2260 - DNA, 201 bp, Bos taurus
gttagattcctagtgaggtgactaagatcccacatcccaaggagcaactgggcccattagggcacctcaactgctgggccctcatccagcaagtaagatccgaggcagacaaataaatagataaatatgttcttaaaaaaaagtttgttaaattttctataaggaaagagaggttggtggcctaaatgaaggattacttat

SEQ ID NO: 2261 - DNA, 201 bp, Bos taurus
gccttctaatagacttgtggttaattatgcaaatgatagtttgtgataattggtcagttttatgaacaacagatttttaaattaaggaggttaataagggagatgattattgtgcctcgtgtgctgtgtgctctttgaaagtaacaacaacaaacttgaaagcaagtaagacataccgagcctcaagagattgcctgttcc

SEQ ID NO: 2262 - DNA, 201 bp, Bos taurus
ccagaacatctgacttttgcccagtgtgacctcttctcatggcttcctgctcccagcactgagccagtccctccttattccccctggctgctgctgctattgctatttgttataccagctgtaccctgaactcaaggtacctgtttctttttaggagttgtaaagttaacagatgctacagaaattttgtaacatatgatt

SEQ ID NO: 2263 - DNA, 201 bp, Bos taurus
ctcaccattctcaatccagccaggtatgtacatggctccatttcgctggggtgatgcattctgagaggctgtgttgactcctcccagagcccacacttttgcactgtatctaccatttgtgtcataagctgtaaagtaccttgaatagataccatcatccttagtagcatcagcaccttgacagagaaatgaaggaattaa

SEQ ID NO: 2264 - DNA, 201 bp, Bos taurus
taatcctgtactgtattaattatgtagaagcagtggttacatggttaagtgattgggctttgaagttaggcttcctgaattgaaatcccagctttgctttctactggctgaatggccttgtgtgttagtcgctcagatgtgtctgattttttgtgaccccatggattgtagtattctctaggcaaggatactggagtgggt

SEQ ID NO: 2265 - DNA, 201 bp, Bos taurus
tgcttttctctgatcccctcactcctaagactgctgttatcatctgcaggggcttacttcccagtgacccaattgcttcatagtatttttcaaaaatacactaatttcagaaactggccacattttttgcctaacaattgctaacaatattagtgttgccttttaattttaaatcatagtacttgtgttacatgcttgacc

SEQ ID NO: 2266 - DNA, 201 bp, Bos taurus
actgaacctacagaggttcaataatttgcttaagattttccatgctatttctgtttttatctcttctttttcctaatgcagtagtactcagcattagtttaagtgtctaaaactgtccagggtttaaatagaggtatttggaaaatagagctcagctgaaggtcaaatcataataggagcttagcatattgagaaaccatc

SEQ ID NO: 2267 - DNA, 201 bp, Bos taurus
ttcaagagcttgactcccctctttcctgtggtaggaatctgtcagctcacattagaattgtacagcgtgaccggatgttatagaggcagacaagcaagatatgtctcactgatgcatctggacaggaaaccttaaatatggttttcttttcttaaaaaaagaaatatccagcacatgtgtttttatttttcttctcagcat

SEQ ID NO: 2268 - DNA, 201 bp, Bos taurus
ttcacttacagctgttccccttgagtgagggttacactcacacttaaaggacacagattcttattatttaggaaacaatttttaaaggactatgacacaacacaaaatctcattacatagttcaaaagatggtgagtgtggtgagggtggaagataaagctgtaacatttgtggagcccttacatgcatcagaaattctgc

SEQ ID NO: 2269 - DNA, 201 bp, Bos taurus
ccagaaactgaagtcagtcagtcggtcaatatacaaacaagtaaataaaacacagactttaaagcagcctactatctagtggtcaccaacctagctaaaagaattatgaattatttcgccttctgctacaaccttcaaggcacatgatagcacttttaaaaaatatgttctgtaacaaaaaagaaaaactaaagtagaaca

SEQ ID NO: 2270 - DNA, 201 bp, Bos taurus
ttcccgaggccggtggtagcggctcttgcagccccggagctggactctgacgcccgcccgggctccagctcccgttgccctcgcatcctccttccgttctcctcgctcagggccctggctgaggttttgtttcccctcggtgctccttgggcatccagcctgggaactgctggggtgctcgaggtccccctgggctctgtg

SEQ ID NO: 2271 - DNA, 201 bp, Bos taurus
aaatttggggcatttttggccattactttttcaaataatctttctgtcccattatttctctcctttccttctgggactccatttacatgtatgttagactactcagtattttcccataggtcactagatctctgttcatttttgccatgtatttttttcctcttcttcagataacttctatggatctacctttaagttcac

SEQ ID NO: 2272 - DNA, 201 bp, Bos taurus
gaggtgtaaaaaacaatacatatgtattatttcttatagtttctgtgggtcaggaacttgagagtggcttatttgggtgggtttagcttagggttttatacgaggttataatcaacatttgctagctaggtaatgctcaaaatccttcaagctgggctttagcaggacataaactgagaaattccagatgtataagctgga

SEQ ID NO: 2273 - DNA, 201 bp, Bos taurus
tggccaggattctgatgagaatatgactacaggaaaatccagttttaaaaacaaagtttgggtaaacaatgcttctcccaataaaaagaggttaaaaaaccggaagaaaccaatggcctgaagagaaagctgattttacaaagtcataaacaaaagacaaatgaagaaaacaactacagcagaccaacaaagtagcttcag

SEQ ID NO: 2274 - DNA, 201 bp, Bos taurus
tgaaaactaatgacgtctccatgagggtcagaaataagtgggttggtgaaattgggatttagtgagttgaactggttatttgagaacagtttaggcacctgcattaaatcaatgaataaaattgatggtgggtaagtcctactgctaatttggacatataaatactgatatagacaggcaggaagacaaatggatggagac

SEQ ID NO: 2275 - DNA, 201 bp, Bos taurus
ctcccacttgcctcccctatcctacataggaccaagtgtgaaggtacttcaatgctaagggtagtacacagtgttaaaagtgcctgggccctggagtcaggcttggattcagatccgactgtggcactcaccagcagtgtggactcaggcaaactttcttaggcctcagtttgcttctgtatgaatagtgcctaccttagg

SEQ ID NO: 2276 - DNA, 201 bp, Bos taurus
agctcagcatctcaggttgatgagaagcacagtgacccaatctcttgattactagccagacaccctgcggttcctgaggcctccctgtaaaaacagcccagcactgtctctgaggttcagggtccctggagtcattgggaaagtatgttccccaagtgcctactatggtcttggccatggattgttctagccaatataagg

SEQ ID NO: 2277 - DNA, 201 bp, Bos taurus
atttggggaaggcttcttagggatctggaatggtgggtgggatttgtattggcaggagggaaggaattctaagccggagaaacagtataatcagaagtgtgatggtagaaacatctcaagcttgtgcagtagcacaaggaatgccctgtgaaacacagatggatgttgaggtacaaggggaagtgactatgaagaagaagg

SEQ ID NO: 2278 - DNA, 201 bp, Bos taurus
agcatgtgatgatgtaggatttgccagtggattggatgtggcagcaagagaggtgtgttaagacaacttcaagtgttttgatccaaaccactacaaaagttgaatttcttttaatgatggagaggtggcagtaacaacagatttggggatgggtaggaatcaagaattcagttttagcgtggtacttatgttgtagagata

SEQ ID NO: 2279 - DNA, 201 bp, Bos taurus
aatattgaatcactatgttgtacacctgaaaccaatactgtaaatcaactatacatcaattaaaaaacacagatggccaacctctaggacgctgtttccacagatctgacattgactgtcattaaacatgtgtctgtggggcttctgtaaacgtgagcagctgggttggccctgctgctagactaagtccagggctcttgg

SEQ ID NO: 2280 - DNA, 201 bp, Bos taurus
ttttgtctgtaggagactcaaaatcaaggaaaactagtcttctgtggaacatatagttttccttttgctttatcttatagggcattctaaatctcataacaaattagatttctttcttttgactactagaaatattagagccaagtctgtgacccatctctagtaaatatataaaaacatgtgcatacaattttgtgtgct

SEQ ID NO: 2281 - DNA, 201 bp, Bos taurus
tccgctttccgtcgtcccatcctcaccgactgcagcctcctgagattcttcagtagcggctttgcgtttcaggcctttctttccgctgccgccgctcttatctccggctttcgccatggtatttttgcttcttgtggtctgtacggaaacggaagtagcttcctcttcccacccccgtccttaagctagtatttccggggt

SEQ ID NO: 2282 - DNA, 201 bp, Bos taurus
aactctcttcactcatatataatagaaaaaaaaaatcatatctggcctcaatggattttatagtattttgaatgttcaacttttaaaaaaaatcctactttttatcctgagattggaagtgtttcctgtaatttactttccattaagttaaaacacatatcaaatgtcaaacaataatcagtatcaaggctgcaaagaaca

SEQ ID NO: 2283 - DNA, 201 bp, Bos taurus
actttgtacatacttgctgagtgagggcccaagagcagctccagccatacaacgtacagacacagacgtggggaacagcttgttcagccactcaggtgccattatgcagagccctggcccaaagggatacaggccttcctgtctccaggtctcttccctgggttcaggtgagagctgagggtgcagaagtctgacttcttg

SEQ ID NO: 2284 - DNA, 201 bp, Bos taurus
tattatgcttagtgttaggatgtcaagaacatttttgtgtgtgcttataaacaaagtatattttccattgtattaagtcagtatacttagcagcctgtggatatgctttttgctattgttgtttgttttggttttaagaagattatttatttattataattacttttcaatattatttttttataatataactgcttcaaa

SEQ ID NO: 2285 - DNA, 201 bp, Bos taurus
actctctaagagctgtgggatgcctccaagcaatttatttacttgaaatattttcaaacatttagtaaatgcctgattgagaagtagattcatatgaaagacattattaaaaagagattgagatatagcttgctcagaaattttcatatgacaccttcttttgtgtgatcagagaatgatttgcctaaattctaatatttc

SEQ ID NO: 2286 - DNA, 201 bp, Bos taurus
tactgggcagtaatgtaatgtgagcacatttgagttgcaatctgagaaatgtcaaggtgctcccctctatggcagtctgctcaaaaccaataccaggccgtaagatgaagacaagaaattttgggaaaaaaaagtagacatgtgatttttttgggggggggaggtcaacttcgatgcattttgtacatctgtttgaactgt

SEQ ID NO: 2287 - DNA, 201 bp, Bos taurus
tgaactgaaagctaaaaaaattaaaattacaaaaacgtatgctatgtccaaaccatcagcttaaaagaaatggagtgactataaacctagatattttatcctattgcaataggcaacctcaatgtccctcagtgagccccaccccctctattcacatgtatgcatgtgtgctaagtcgcttctgttgtgtccaactctttg

SEQ ID NO: 2288 - DNA, 201 bp, Bos taurus
catattcaggtaaatgtaaaaatggtgatatctgaataaggttgatgaagtttatctgtgtcagcttcctagctgtgatactgtgctacagctatgaaaaatattaccagtgagcgaaactgaatgatatatatatatatacaaaatgttacattttatagaaatgtatatgatcccacaataaactcaaagtagaaaatt

SEQ ID NO: 2289 - DNA, 201 bp, Bos taurus
agttataaaaagttaatctgctccacaattcttatatttatcctcatatatttaaagttctaaagcattggctcttaaactttacaccatgttaaaatcatttgtagagctttttaaaacacagggtttgaaaaccccaatccccgagtttctgattcagtaagtctgggaaatggcataaaaaccatcatgtttaccatt

SEQ ID NO: 2290 - DNA, 201 bp, Bos taurus
tttgtattatcacttccccgaagagttatttggtaatgaaaaatgttggttatcttagcacagttacacaggtacaagcaaaactataatagattcataagaaacaaacaaacaaacaaaaatgagtagggtagcctgtgtattctgattgaaggtgcagagtctgaactggcagaactcttcacatagccagttgagtgt

SEQ ID NO: 2291 - DNA, 201 bp, Bos taurus
taagtgctacttaataaagtaattaagtgttaaagaacctctggccagactgttgtttgtcttctgtttaaaaaaaaaaaaaatgaatacgagacaaaaagaagccttttaagtacagccaggaggccagagggaggagctctcctgagacaacagcagagcctaataggaagaagaaagactcctcttttttcctgacaa

SEQ ID NO: 2292 - DNA, 201 bp, Bos taurus
acagtgtacatccctttttacatgcaaaggagatatgctaactaggttactaagaatctgggggccaagagggagtcatccagaagacaacaaaagtccatgaagaatggggcacttcccagcatctctcaggaagcaatcggtaagagagtgttggctgaaatcagttatctggcacacaggagggtctgatgttgattt

SEQ ID NO: 2293 - DNA, 201 bp, Bos taurus
agacacatacaactacatgatctgtttgggaaaaatgaaccattgaccatagctgatcagtctgagattcaaacgctctaagcaccagaatgtcatggtcactgttcacccatagacccagtaatgcatcatggcagtggacgagccacccactgtgcaaagtatttccaaaaaggctcttggttccttgtttcttatttg

SEQ ID NO: 2294 - DNA, 201 bp, Bos taurus
agggaggattcccaatgacaccacacagagaagtaacattagttctagtaataaaatagtatttaactaaattacctttgtataaatatctacctggtaccatgtattaaaatattaaggactcagacccatatgtgtccttctttgaagaataatatccctgcagtggctactaacagttaaacctgattctgtgtttat

SEQ ID NO: 2295 - DNA, 201 bp, Bos taurus
tctgaacataaataatgtacttttttttttttcccaactaaatgcacagactgtaagaacaaaccactatcttacagggaagaaatgatgggtcatccaatcattaaagcaattactgaaaaatataagcattttcccatttaaatttctatcatctattattcatgaattaattagctaactacttctgtgccaacttta

SEQ ID NO: 2296 - DNA, 201 bp, Bos taurus
ggtaagacatgctattacagtaaacagggattcatgataataatgggaatgagaggatccaaacagtaataatagaggactggagagaatatttgcttccccagtggctcagtggtagtgaatccacttgagatgcagaaaccacaggaggcaagggtttgatccctgggttaggaagatcccctggaggagggcatttca

SEQ ID NO: 2297 - DNA, 201 bp, Bos taurus
tatttttgtgtaattctctcacttctgccctctgtaatgtgccagctgcatctgcaggatcacttctttcatgatagcaaaatggctggagcagttcaggtttctgtaaccatatccttcagaaagagtgccccagtgctaacatgcaaggagaaagtcttgggttttgaaccatccctttagcctccatttctccctgga

SEQ ID NO: 2298 - DNA, 201 bp, Bos taurus
gtgaaaataaataccaaaaaattacagagagaattattgcagggggacaggggagggttggcaagcagtgaataaactgaataattagtccccagccactggtttcactatatttacaaatttcctgatgccaattttaaaagactaatcctcaagaaatacctaggtagtaacagaggagatagtggaaatagaaatgca

SEQ ID NO: 2299 - DNA, 201 bp, Bos taurus
ccataataatacattcaatcattctttctgaatataaaggaactagccaggatttttttgccattctttctgggactcaatgtgatatcacaagcttcttcagatccttacagcaaccactttaagaactttaagatcagatatgctgtgtgtcagacttggactcccctttggcatgttgagtttctttatcattctcaa

SEQ ID NO: 2300 - DNA, 201 bp, Bos taurus
gtgaaattataagatagcgatccttaattctctagtgcagtttgataattaggtgtattcttaatggtgggtgaggcccctaattatacaattaaggttcgaaaacctcttgaaatcctaacgtggagaatacttccacacaaatggccttgctattatttttaaaaatccctgtaatatcaaccaaatccagaagaagaa

SEQ ID NO: 2301 - DNA, 201 bp, Bos taurus
caaaggaatgctatttccaaaggaatattcagagctccttgaatcatttgctactttatagacacttagatgacaacaattctatagataaaacaaataacaccagtaggtgttattaatctctctgggtctgaccacaatgtacatagataatatagatatttatcctatttagctctctcatgttgtccacatctgaaa

SEQ ID NO: 2302 - DNA, 201 bp, Bos taurus
gggctttgttcaggatggttgatggtgttctgagacctggggagagaggaatagcaactgtagtacttgttatacactagagagatctggacgctgagcccgaagaccagactgaaaaacacagtgtgagtgactgcctgctggctgacaaggagcaagagggacacagccttgccctcccctccccaccgcatgctctgt

SEQ ID NO: 2303 - DNA, 201 bp, Bos taurus
ccaagtgcattccttcactcacatctgaattggcaaaggctttccctttcaaatttaaaatctccattctctttctcaagttagggttttttgtgggttctacagtcgggttagtgggtcacactctaaatccgattcctaattctgttgttgaaggacacagcttcaccacgtgcaaaacaactgttttgccgtgacaaa

SEQ ID NO: 2304 - DNA, 201 bp, Bos taurus
gggtttaacccgtcatttataccagttagagggaatccatgaaattacctatggctaggcactttggaaagtttccaggctatttttcaaaggttaaccgatactgctggtcacccttgccaaacagaaatacaagagggagagaaatgagggaactgagaaatgaggatatagatatcctttttaaaaaaatacagtttt

SEQ ID NO: 2305 - DNA, 201 bp, Bos taurus
caggtatttacattttcctgttgattactgaattagctttcattaagaatacacttaaattctaataatcactgaaccagcctcatttaattttatgttcacagacttaaataaacttgtgtctctgacctgtccaagattagaaactcaaataggaagtcttttctttcctctctgccacttctccattccccttctctc

SEQ ID NO: 2306 - DNA, 201 bp, Bos taurus
atgtattctttgccttctgctattgtcattttagtttcctatactgtcttgcacttgaaggtgaaattaccattagtgtcaatggataatccaggcgtaggctaaaggaaacacaagactttggcaacaatgacacaattctccaagtgaagcaagaatgtgaaaaaagtatgcatttcacatttaaagtattctggtgat

SEQ ID NO: 2307 - DNA, 201 bp, Bos taurus
attcctcatgctgcaacctccggaggaacaaggcaaatggctgccacataatgtgcaatggaggacttgagagtaacacactttcataatatgtggtcaacaaggagaatgtcactaattagaagccaaggaacaaaccatttgcaaatgaattagtatatgaaccataccctagggacccaaaagacttcatttgctttt

SEQ ID NO: 2308 - DNA, 201 bp, Bos taurus
catctgtccccctggtaaatgcagttgtgagggcaaatcagaaagcaagtctttccccaggggaagggagagtgcatggtttcctcttcaatgaatatactattatatgaggagtttataaagttaatactattgtgaactcaagtaacatttttaatgtaaaaaatacaatggctcagaggatgttctttctttaggtaa

SEQ ID NO: 2309 - DNA, 201 bp, Bos taurus
gattgcacctctccctttttgatgaaagaatgaagctctcctttgcttctgaaccaaactttatcttgttctattggcacaaatgacagtgggaggaaggcgcgttattggggatcaactcaggaaggtaagtaacagaccagtgaagaaatacagggcctaggtgaaagaatttcctggccaggtaggagttggtctgct

SEQ ID NO: 2310 - DNA, 201 bp, Bos taurus
catgccatagggccatgaactaattcacgtgactagcaagcatgtgttcaagtatataataacaagcctgctcatgtctatttacaaggcagatacccagccctctggatttcttaggtttaaaaaaacacagtttattttccaaatcttggcaggtgcttacgtttggacctgaatacatttcattacatttcactgtca

SEQ ID NO: 2311 - DNA, 201 bp, Bos taurus
tctgaagagacaggatgcctggactcttttacctatgatggatggaacgtggggcaaatggcaaccaccaaaaaagtggataataagaaaacttctaaaatgttaacatacccttaaagctcgagtgaggtctagaggagaaatttagaatctccaggaacctcagacataagaaaaatctgttttcattcaaaagctttt

SEQ ID NO: 2312 - DNA, 201 bp, Bos taurus
atttagatgtagagtggggacttgggctggggccctgaggcagccctcatgtgggggtcccaacacacggtttactttcatctgtatagtactgtgctgacgggcacaggcctcagagaacctccaacagtgcatgttgttgttgctattgtttagttgccaagtcatgtcccactcttttctgaccccatggattgtaac

SEQ ID NO: 2313 - DNA, 201 bp, Bos taurus
caaatgacaaatgccagttgccaaattatatcttcaaacaacttctgtcattcaaaattcaactgaactatattcctaaaacaatctattcctggggaaacacaacagaaaaattaccttaagtgcctctgtattctgggtcatcagtatttctatttaggagtgatcaaaaggaagctttctagtctagactgggcagac

SEQ ID NO: 2314 - DNA, 201 bp, Bos taurus
tggtgatggacagggaggcctggcatgctgcaattcattgggttgcaaagagtcggacatgactgaagcaacttagcagcaacatattatttttcctgggaatgttagagtgcactgtgatcaaagcatagtaaatatgtaggttgctgctgctgctgctgctaagttgcttcagtcgtgtccgactctgcgagactccat

SEQ ID NO: 2315 - DNA, 201 bp, Bos taurus
tgtataattggtattaggactcctgggctcttgaaagttaatcacatctacctcagtcctttgctgggtataatctttgaagtaaacaatctcccactccataatttagggacctttctattgagtcacatacatgcagttattctttgatatttgaccttttatgacaggtagaatgtataggtcagctaagacatagtt

SEQ ID NO: 2316 - DNA, 201 bp, Bos taurus
accagttctttcccagggaattctatcagcagagcagtcagttatccctttgttttaggctttccctcccagagatgctactctagaaacaactcccctacgtctaagcagacctgcggctagcttaggtacactgctacttgtttgccggtcctcagaatatttttttcaaaggacccactctttctctcaccagcctca

SEQ ID NO: 2317 - DNA, 201 bp, Bos taurus
ttaaaataaatagcttccacctcctcccccaatttgcctattactgtctctgatgatatacaatcccaagtgaaagtgttagtgaaagctttgttaatacatattccctacattccaatcccagaaaagttatagttcaccagatcctgttttatgtcttctgtcatccccctgttggtcactcttccattctccctagtg

SEQ ID NO: 2318 - DNA, 201 bp, Bos taurus
atttcagatattggccttcttttttagattttagctatttatttgatttgtttgtactcataaatgaacataaatatgatatatttttaaaaataaaattattggtatggaggccactttcaaatggggaataacatatttggctctgtactgaaaaaggaaataagtcaaataccttctacctgtttatattgaaagaaa

SEQ ID NO: 2319 - DNA, 201 bp, Bos taurus
atggataaatattcaggcaggccagaggtctggtggcaattgttctgattaatggaagaccatagatatccagtgcccctctttgcttggctcactcatcggtagagcttattgcctgagggccacaattaagcaattatctgatccacaggaggtgttcagtcatgttcactgaggagatgcacagtgcccatgaaatgc

SEQ ID NO: 2320 - DNA, 201 bp, Bos taurus
atacataattttcattattttattacaaaaaaagagaaaataatttcaatccaggcaaaatcatgtgggacatgagtaaatatatatatatcaaataaaatggacaaagatttctttttttttttttttttttcggacaaagatttctacaaagtttttaaacatttattattttttgcaaataccaaaaagcattcttct

SEQ ID NO: 2321 - DNA, 201 bp, Bos taurus
aaaaaatgtttaaagaacatatttctatcacctagttaaacccatcagtaaaaagtctgatattttaggatatacttaaagctaattatggaacagcactctctctctgtacccctaaacacatctgctggggttttgtagtctcattttttaaaagttcactaacattaggaaaagcctgctattttcaagtaatctgcc

SEQ ID NO: 2322 - DNA, 201 bp, Bos taurus
atgacagtatatgtatactaatccttccctatactgtaaaagctttgagtaggaattatactttctcaaatcctctctctaggatacacaggagaacagggaaaggactctcatagcttaggtaagaaagataagaagaaacaggcaatttcaagaacagaagtgcagagattcaagcagaaagcaggcctggcaacccca

SEQ ID NO: 2323 - DNA, 201 bp, Bos taurus
ggcctccctgggatgggttcttggctacccagtcccctatcccagacttcagccagcctccatcgacactctcacatggtaactgctgccattcttcaccaaggaaggggcctggccatgagattgggtacggtgggcataagggccactcttcaccaaggaagaggcctggccatgagcttgggtagggtaaggataagg

SEQ ID NO: 2324 - DNA, 201 bp, Bos taurus
tgtttccttgcttccttgcaaggtccctttaagaaccagaaacatcatttgaaactatttctcactgtctgacctgcaacttaccttcccatcatcattactgttaaactactgatttaattcttggctcaggtgtgagtttcttaaattctgtgcttcctatacctctccaggaagtataactggtcctatctccttcaa

SEQ ID NO: 2325 - DNA, 201 bp, Bos taurus
atatttagcacctgaatttaacctggccaaaaaaaaaaaaaaaataccactaaaatgcagaatttgttataccacataaagcagctaagtgctgacctctagtggccatactgagaatatctttatattaataccactactgaataatctttgcatgctaagtcacttcagtcgtattcaactctttcagaccctatggac

SEQ ID NO: 2326 - DNA, 201 bp, Bos taurus
ataatagtctttccccatttcgagtgccttgaaatgaacttagatttccctttgtgaaagaaaacagcgtccccagtcttagcaatacaatgattctaagaaaaataaaccaagctgggtattttaaaagttaaagcaaatcagcaattcagcttcgctgtcttaaggcagcaagcagacagcgcctcagtatttaattcc

SEQ ID NO: 2327 - DNA, 201 bp, Bos taurus
tattggttaacttgaatctgtaggattgcacctatttgggtgctctgttcaggtaagtagtaagattgaaaaaaatgatggaaataggaagtggccccaaccaacacaacattgtaaagcacttgttctccaaaaaaaaaaaaaaaaaatgtagctcctcatatactctttatgcctagaaaggttgatgtccttgtatga

SEQ ID NO: 2328 - DNA, 201 bp, Bos taurus
tggccttgaagtacacaatgaagcagggaaaatgctaagagagttttgtcacgctggttggggaactaagatctcacaagctgtgtggcatgaccaaaaaaaacaaaaccctgtaagatggcaaactcaaaaaaatgaatattaaagagatcataattccagggaaaaaactaaaggctttgaccaagattttgtctgagg

SEQ ID NO: 2329 - DNA, 201 bp, Bos taurus
tccgactctgtgcgaccccatagacggcaacctacctggctcccccgttcctgggattctccaggcaagaacactggagtggggtgccatttccttgtccgtatagttaaatattttaatactgtcatttatttcacattacaatatgatccaaatttaatttttcacatacagctaacaaatgtagcaaacaacagattt

SEQ ID NO: 2330 - DNA, 201 bp, Bos taurus
tgtcccagggcaccagttataattaccttgacccaaactactttccagcaaacagatgacatggaagagaacatcatacactagtcctcttcaacacatagcaatggtatcattgtgaattatgtgcacagtttggaaagattctctgctttccctgaaatgacactcacagcatgacagcttcctgagtgttctcgtcaa

SEQ ID NO: 2331 - DNA, 201 bp, Bos taurus
attgcttgttagttatgtggtcttgggaagtcagttaagctttctgagttttagtttaacagagctaccttcttaagttattggaaagattagcaatgatgtatgtaaaccataaagcatagcatctgacttattggaggtactcagaaaaggcaagcacctgatttattgtatctgttgcccttcccctccaaactgcta

SEQ ID NO: 2332 - DNA, 201 bp, Bos taurus
cagctcaaagtgtgtgtatgtatatattttcttgtcaggaactggagggctgaaacaacagcgtccaggaagctcttagtatgatatgacattcagctaccaactatctaccaatctgctttatttcaattaaaaaattataaagatgaaccattgtagaaggcagccctcaggccttaagctaaaatagtcttaggtaga

SEQ ID NO: 2333 - DNA, 201 bp, Bos taurus
ttttaccaatatggtaatctatttaaatatcatttagtgaaaaaatgttattatggtagtagcagcctgttataaatgaaaaggtatgctttttgaggctctgtactctaattgtctagagcagtgaaaattttttatctatgtaaaatttatttttgcacccattggttgctgcttcctgactgggccaaggatgaatgt

SEQ ID NO: 2334 - DNA, 201 bp, Bos taurus
tttccatttttatatatcctaagctagttgaaaatgatgattcccacaacaagcataactcagcttgtttctgcttactgagtattttccaccatggtatgtgttgatatcacttcttccattatgtatgttgtacagcagagttactgttactgtgggaatcataatttgaaattttgacttgtgtgtttctggaatctt

SEQ ID NO: 2335 - DNA, 201 bp, Bos taurus
tactttgacacagactttttaatcttcctttttttcttccacaaaatcacctcaggtaccacaaatccactttattggaaaccataatcttgtacttaaagaacaactcagtgttaaccccaggccctctggacacctttaatcaggtttgggtgagtcctgaaatcctagaatgcctgagtcagggcttgagtcagtaag

SEQ ID NO: 2336 - DNA, 201 bp, Bos taurus
cccaagctcccctcactgtgtgtgcacagcagtgtacaggcagaggttcttccttcctctccaaagctactctgcgcttgtgcttctgatcccatcccttatctacatggcctttctttcttcatgatttccccctctttctctcttgcaccttccttttcgtcaagttttccccacattgcaccaactcctgcctcaaac

SEQ ID NO: 2337 - DNA, 201 bp, Bos taurus
aatccacatctggcctgtgaagtttgcagtcatttgttgcagtttctgaataattattttgaattaaattctctgcaagaatggatccaggtgatatgaaccctaaagctgatatgattggggccatgaaggtcttacaaaaaaataaaattacaaacacaaattaggtatgaaaggaaatacttagaaggaacaaataaa

SEQ ID NO: 2338 - DNA, 201 bp, Bos taurus
cagaaggggtaaacagtactcctagtgtgtagtttaaaacttctaatgaatgggagtaacatatattggaagatgccaagtaagaagcagcagcaaccttgttttatagaactgccatggcatacctgataaaagggacacctcagaaaatcttcactggcttgattatgattccaaccatgtgaccttcctaccatgtgc

SEQ ID NO: 2339 - DNA, 201 bp, Bos taurus
aatctgcgctggcaccacagcaggtccagagatcagcacagtgttgggcagcatcctagggaggtgagagggactgtgactccagcaagcaaaaagactgggacagcagtgactcaagaaaaacatttattattcttattttttgacttattctgtagattcttttgaattttctttttcttttttcttcccccttttccc

SEQ ID NO: 2340 - DNA, 201 bp, Bos taurus
aaaagcttgaaggagttgattatgcaatatatgaagagaaaggtgatccagcaaagagctgagatgtaggcctgcgggagggagcttgcccagtgtgtttagttcatagaagtcagagaagaaacaagaggtcagatcaccctggaaggcattataagtcattgtaaaaacttgtacttttactctaagagaaacagggga

SEQ ID NO: 2341 - DNA, 201 bp, Bos taurus
tctgagggtcaatacccctgtgcctggaaagtagggatgagcccccaagatggaaggcagtgttcagctcctagttaaccccatatggcctatggaaaaaggacagatctgttactagataattctctgttaccactctttgagataaatgacacaagagattctccacagcaatagatgatagcattgtgaaggccatga

SEQ ID NO: 2342 - DNA, 201 bp, Bos taurus
ttccttctcactatggttttaaatttgcaaaactttgatttctaatgagactaggaactccttcatttatttacttccctgaatccagattccttaaaatgttaaatttcatattctaaacttttgtattttggtgttgttcatactagacatttcgtgacataactgataagtacaaagcaagcaaaagaaactcattca

SEQ ID NO: 2343 - DNA, 201 bp, Bos taurus
aatcaggctgatttaggggaaatctttctatctgcctaggccttctgcccccttcaaaatttactgagaagcttataagtactgaaatcaatctccaacatcagaaatcttttgtttcatgaaacttagaggaatcaattataaccttttctgttgaacagagaatcaatgtacaattatttaacatgggagaccatgata

SEQ ID NO: 2344 - DNA, 201 bp, Bos taurus
tttattactattaaccttcaaaagtcaaagatgcaacagtggttttcttcccaatcattaaaaacactgagcaatcagagggccccagttaggctgggatttcaaagcatgtatttcaggcagttcatttcagttcaatcggtctgtcatgtctgatctttgtgaccccatgaaccacagcacgccaggcctccctgtcca

SEQ ID NO: 2345 - DNA, 201 bp, Bos taurus
acatgacttagctactaaacaactatacatacacacacatatatatatatatatacacacatttacatattcacacacatatttatacttaatatcttttaattccaggaaatagtgcaatgaggaaatataaagcaggatgagggagtctctaatatccactgtctgtgacactcatttttaacacaataccttgtattc

SEQ ID NO: 2346 - DNA, 201 bp, Bos taurus
ctttactggggttgaggatgagttctctagtggtttatgagttgacttttcataagatttataacataagagcaggaattagggttcagaaagggaaaaggggtgacattattttgctagcagctgtgtcatacagctgacagtaagttgattcgagatggatgcctttgaaatggataccacaacaataaaaagtttaat

SEQ ID NO: 2347 - DNA, 201 bp, Bos taurus
cagctgtaagcccccaaataatttgaacttatcgagtaggcattccttaaaaacaatgtttttagtaaaatcatctactcggtattttattcatctccatgaaaaacataaacattcaatagctaactatggtgactcgatcagtatggccacattggtagagcttagaagctgaaaagtacggaaacacagatgagaaac

SEQ ID NO: 2348 - DNA, 201 bp, Bos taurus
tctttgcataaggcctaagtcatctcttaacttatttttcacagtattgcagatatgctactaccaacatgcatgtttgatcatttcacagtcttaaagtcatggccctccatcacctctgctgttgctgctactgctaagtcgcttcagtcgtgtccgactctgtgcgaccccatagacggcagcccaccaggctccccc

SEQ ID NO: 2349 - DNA, 201 bp, Bos taurus
taaaacatgtttacctaaaaattaatgaagatagcatatagggccattaacttttaatgatgagtaataatgaggatgcaaacatagctgagacagtattgcttggtgtagcagggtcctccaacaacgttgcatgcctggtgcatcagtccagggtaaggggtgaccagcagcaggacctgaccctggttgacttagaac

SEQ ID NO: 2350 - DNA, 201 bp, Bos taurus
tgtgtgaaatgagctattggaaggctgagatctgagtagctgctaaaaagctagatggcacagtagttagaattgtttttgtcacagtgtctatggataaaccattccacctttcaaagtgaggggcacaccttgaatgtcttcaatgagtggcaggtggacttttcaagataactaacctgctgctgacaatgaccctga

SEQ ID NO: 2351 - DNA, 201 bp, Bos taurus
tggaaaatgatgcttttaagtaatgtgaaatttcagtacctattcctgaaaagcaagaacctggtaccatctgaggtatcaggcagttgatgacagtagcctctgtgaactaggatactttatagactgtggttccaactgaagagcaaggtgtaaatgtcacatgttttcttaaagtctatagctgagagtgtttccaaa

SEQ ID NO: 2352 - DNA, 201 bp, Bos taurus
tgaatctgcaaaatcttctctccaggaaggacaagtcaagtcttggctggtttgggtatggaatttccctggacgtgaggctgagattttgagaggtcaagctttccctggggatccaacgctcatggagaaagcagatggtttccaaagtaaaaactagaaagagagttccccaaaggggaccagatcttagatttttgg

SEQ ID NO: 2353 - DNA, 201 bp, Bos taurus
gggacttgcaaggaagtttaaagatcctctagtccaggggatggcagactttttctgtaaaaggatagatagtaaatatgttcaactttgcaggccatatgatgtctgccattgtagcacaaaagcaaccttagacagcaattcatcaaacaggggtactggaactagtctcccgtgggctggatgtggccctagggcagc

SEQ ID NO: 2354 - DNA, 201 bp, Bos taurus
tcctgtacacatctccttgtcattctagttctgtccttgtctgagttttcagcaaactgttttcacagcactattgctgcttgtagtcccagggctactaccccagtcaccagtgctgtccctgatacaaagtagagaataacttgtagaatgaacaagcattatttcatgttttaaccatctgaatttctgtccatttgc

SEQ ID NO: 2355 - DNA, 201 bp, Bos taurus
ggggtgccattgagactgcttggcaattgggattgttcaagaagagatgatattcacgaagcactctcccagcactgggacaggcacacgatgtgagctcaatcaacaaaattgcatttccatgcagttcagctttgtacttttatcagcattacactcattttccatttttaaagccaaatcttttggaaccttatttta

SEQ ID NO: 2356 - DNA, 201 bp, Bos taurus
cttgcttgtttggttctactctacttgagatgactttgtttattccagaagcaccaacactgcagaactccggtaaaagttaaaactatccctcaggagattgatatcacttataatattctgtaacttttgtcacacccataataatacctttctttagttattttgagagatgtgctttccttcttccagtttgttaaa

SEQ ID NO: 2357 - DNA, 201 bp, Bos taurus
tcaaaattaccttactaattcctgtaacctccttagcactcaagctccttttaagaaatgagccataagcagtagtcttggcaacaagaagataatagggaataaatattttatcatcaaaaaggctatctggtttcctatgaataaaagcccatctccaagttgtcttatttatttagttgctgaatgcaatccgtgcca

SEQ ID NO: 2358 - DNA, 201 bp, Bos taurus
ctacagatctaaggctcttactgcttctttttagtctgagcctagagaaccagatatcaaaaaatattatatattttctattctctttagaccccaacacgttgcattgagttactgcaaatcacaaggctaaaaacctcctcatctgtcatcagccccagttcataacatgacacagccattgtggagagaatgactatg

SEQ ID NO: 2359 - DNA, 201 bp, Bos taurus
atctgaatatacccccataaagcaacagtctctagcagcgtacaatgcttctccaaatggagcttctcagaaagtaaaaaacggcagctgatgggttgagctcagaatactttgtcaggtgattacactgtgccccggtcttcaaccctgtccactgacagactgttctaaagagattaactctatggcttggacactgga

SEQ ID NO: 2360 - DNA, 201 bp, Bos taurus
gatagtgaaaaatgggagtgaaattctaagaatggaaaggaattcaagatgatgtatcaattttatgtgcactttttcacaacgatccaaagaaacaagagtcattgtttagaaaataaaattgcttggccctgaaggaagaattctcaaggcctagtgacacccaaatcatagcttggaatagtctgtccaagaaataaa

SEQ ID NO: 2361 - DNA, 201 bp, Bos taurus
acttcagcagcaagaaaggctcatctttccttccagctctttcttggactaggatacaagggaatgcagatcatttacatgtcacttcactgctccaaatgcctcagagatgccaagtcttcctaggatatttttctctcactaaactgacttctaattcccctctgcaataggggaagggagacctggagaaaacaaatc

SEQ ID NO: 2362 - DNA, 201 bp, Bos taurus
acaacaatatagtctgtgataaaggaagaattcttcagatgggaccaaggttgccaattgcaaataaaccatcttatattaatttccacatgttgatttgcataagtatgaagcttgcatgaggtcaatctttctattgaaatatttagggtaagtgacctaaacttgaattccacttttttagtttgcttttcattgatt

SEQ ID NO: 2363 - DNA, 201 bp, Bos taurus
atatccgactctttgtgaccccatggactgcagcatgccaggcctccctgaccctcaccatctcccgaagtacttctttaggggatcctaaagagagctcccctgttgtccaggccctcttctctttatatgttcctagattctaatttcctattattgtcaaaatttctacttagctccccagtctttagccatcattta

SEQ ID NO: 2364 - DNA, 201 bp, Bos taurus
ccccctcccacctccctccccataccattgaactttgatcctaaattcatctgttctattgattaacccctgctgttcctatttccaaagggaaaaaagtatattacaagcctgtgtattttatcctttatgtctgtcgtactttgaattagataatattaaattgagattatttgaaaaattcattaattcatctgaata

SEQ ID NO: 2365 - DNA, 201 bp, Bos taurus
atccattttcaggtccttttatctgaagctgagaagttgagagagaaagccagacagaataagaaatataattataacagaacagggataaataggagaacaggtcaaatagagaagtaatatttaaatccttatcaaagagaatcatggggacactgtacaatatgtaggtggcccacttgtccaggacatcatattacc

SEQ ID NO: 2366 - DNA, 201 bp, Bos taurus
agattgagtagtgaaggacatgaacagaaatcctcacctattttggcttgcattctaataaggctgttatacatatggataaataaatgaatatatatgcgtatattttggtatgacctgggggctcagtggtaaataatctgcctgccaattttggaaacacatgttccacccatgggtcagaaagatcccctggagaaa

SEQ ID NO: 2367 - DNA, 201 bp, Bos taurus
tggacagaggagcctggtaggctacagtccatgggttgcaaagagtcggacacaaatgaactactttactttactttaatatgaccatcagttaagatcaattgctcagtcatgtctgactccttgcgaccccatgaatcacagcacaccaggcctctctgtccatcaccaactcccagagttcactgaaactcatgtcca

SEQ ID NO: 2368 - DNA, 201 bp, Bos taurus
aattgttaccaaacaaggttcatgtaccagatacctggtgaggccaaataaactgaaatatcagagtctggagcagagaaatgtttattgaatggccaagcaagaaaaagcagtggctcaatttcaaaaaccctgaactctctgatggcttttgtggaaaagttttgtgggcccaatttgagatgagggttgtaggttatg

SEQ ID NO: 2369 - DNA, 201 bp, Bos taurus
atatcccaaatcacacccaacctttattctctgctgatggcctagcctcatgcttcgttcaaaaaccaatagccattttattggtttctcaagaaagaaagaaagtaaaagcaatcataggccatcaccataggccatctgatggcctgtatgctagcacagtcaatggttacataattattactatcttactcaacttca

SEQ ID NO: 2370 - DNA, 201 bp, Bos taurus
ggtattacttttgatgaatgagtcaaagcagacaattatgaaaataataaaagtagcataagcatgcatcagactttttgttttaactgaaaacatactgagatacattcattattggagaaaggcttcttttttgagcatgagtttacttatttcaatttccccaagttctgtcttacaaagacaactaaaatgcaatgt

SEQ ID NO: 2371 - DNA, 201 bp, Bos taurus
gtcccagagaaaaaaagtaattcagatgcttgagtctccttagccttgtgtttctccccagtgtttttctcagtgctcaagaaaaccttttcccacctagtgtgaaaagtgcaatactgcaacatcatgaatctgcattccacgttttcagtccctcttccttcagagtcacagagcacaggatgacagtgtattttaggg

SEQ ID NO: 2372 - DNA, 201 bp, Bos taurus
taagatttcactggaatattgaattaatgaagtgattctgttcctaataggtaacacatctcatgtgctttgcttgtcttttcaattagaaaaacaaagatatgtaaaaatgggccaatttcaatttttttaatgctgaactaaaagttatattcaaaagtcttcacttcagagttgtttataggtctcactactttcttc

SEQ ID NO: 2373 - DNA, 201 bp, Bos taurus
tttccaaatctttaatttctcattcctttttgcttaacagttccttttcagttcatctcttgcttcagaagaacatatctgtgccctcaacactttgcttggaaaccttctgtgctaaatatctaatatcatagcttacatgttctcccttctgacagttcaaccttgttcttagccactgtctgtctccttcaatttcca

SEQ ID NO: 2374 - DNA, 201 bp, Bos taurus
ctccgtgttcaaagtccatggcaagtctggataaagcatgtccatttcatagttatgacttctgttgctttgctctttgaaccatgtagaaatactataacaggacagcttccaggtctgagaatacaggtctgagagtacagcttattgacacctcaaggtaaacggaaagggagaagcaattcagtttaatgttcacct

SEQ ID NO: 2375 - DNA, 201 bp, Bos taurus
cagatgtagctaaaaccctttagatactaatagtgttctatttgtctatttctctttggttcctaaatcagtgcctcaagcataggagatatttaataataatttgatgacaaaattaatctttatttccattaataccatatcagagtgtttaccatcacccgtgactttctctaaagctctttttttgaactgtctgta

SEQ ID NO: 2376 - DNA, 201 bp, Bos taurus
ccgtatgaaatattcactaagtttttcaatggcctttggagtcaacgttacaattactaaaatctggtggtttattcgaaaaattctggaacaaccatgtcgatccatagtcatccaaagcttgggccaaaatttttccaaaattctcctttcacaacttcatccactagagaaatatgttggagcaactgtatttctaga

SEQ ID NO: 2377 - DNA, 201 bp, Bos taurus
caatttgcatagttaggtcttcaagtgcagaacttttgaaataagacctattgaaattttattgtaactatcaccttcataagcagttcgattagctcctcactatttgtgatcttctgcctattatttgattggattgttttcatgctgttaagtatcatgagctgtttgtaagttttggagacaaatctcttgtcagtc

SEQ ID NO: 2378 - DNA, 201 bp, Bos taurus
agtgtgtgtgcaaaaagtagaatcctaaatacacatagcatttgcttttgtacatttaatgtgtctgacctttgtaccacatgagcttacaatttaattacatgatggtactagcaagactacaaaataaaatcactcaatagtaaaacatacatacaatataatgttgcacactgtgaaatatagcaaatagtacccagt

SEQ ID NO: 2379 - DNA, 201 bp, Bos taurus
ttatggctaaacctgcacacatttctgcccagttttcatagggaaccccaactccaggtgttgggaaaacagttgaagtcccaaccctgtaacttccaaaaaactatagctaatgtggctccaatgaattcaaagctacagagaatggcaaggcaaaacaattgcctaggaaattattgatgaactaagaaataagcagtt

SEQ ID NO: 2380 - DNA, 201 bp, Bos taurus
caccactgtgaaactgagggaagttgaaaacccgcagtttcgtggattttttcccacactgtttagaacacaaattactaatatcagaaatgaaatgagacatgtagtgggattaaaaagataataatagaataccatgaacaactctatgcccacaaatatgataacttagatgaattggactaattccttgatggacac

SEQ ID NO: 2381 - DNA, 201 bp, Bos taurus
gttctttagagcatttgttttgcaaacttactgtttctcattcagagtttaacttgctttttcctttattgtttttccagttttaagaaacttgaaatttgtttatactcctttatagtaactacctttttttgtgtgtattcagtaggcatctggggaagaattaatttaaaaggtgcaaaatatctattagattaatat

SEQ ID NO: 2382 - DNA, 201 bp, Bos taurus
taagcaataaaatgtttaaatcagtctgtttctcctttaagatccatgaaggtcaacccatggggactgcaccttgtgtttctaaaacaactctgcttcaattaatcaggcctagaagaatgttcctgacttactacaagctgtctgtgcttcttaacttttgccagtttctgctggaatctgcctctgaaccatgacaca

SEQ ID NO: 2383 - DNA, 201 bp, Bos taurus
tacaaaattgcccagtatttgtggaatgaataatatgcctccgaacatcacaagtagctatagcattctctggtgcacaatttcaaaaccattagcttagcggacagggtttccacaaaggagtaagatatctggtttacagccttgagtttcacataacctctctgtatttcagtaacaatttttatttcacttgactta

SEQ ID NO: 2384 - DNA, 201 bp, Bos taurus
acatctgattgttgtgtaagaacacagactagtacaacagtggtctggctttatctccctggctgttgtccttggggagttagttctatataatgcttcagtgtaaaatatgagactgaatggagaccatattgatacggtgctcaggaaacatgcataatatccgtttgactagaatcccctttcctttgcctctagtga

SEQ ID NO: 2385 - DNA, 201 bp, Bos taurus
tttttactaaagtttcagttacaaatctaatagcatggctgtccaatttgctagattcctgaagatgctaatcagaaaagtagaagaggtaagtaagagcggcacagctactgccaggcaaagtgacagtaatgagacattagagatgaagtcagacacagagaaagagataaaaggggaaaaaggcaaactgtgcagtaa

SEQ ID NO: 2386 - DNA, 201 bp, Bos taurus
gattatgaaggctgataaatccaaaatctgcagcattggtctatggtatggaagacccatggagagcagatgttctagtttcaaggccatcaggcaggaagtggtgatgttgcagaaaaagtcagagggcagttggctggagaattctttatttcctggggaagggtcagtctttttgttctagtcagactttcaactgat

SEQ ID NO: 2387 - DNA, 201 bp, Bos taurus
agaagaacttcccttttctctgggaagttccctgggagttgtgtagttaagattctacacttccaatgcagggggtacagatttgactcctggttgaagaattaagattccacatgccacacgatgcagccaaaatttttttaaatatcattttctttgaaatgttccacaattacattgaatgattttttaaatatatgg

SEQ ID NO: 2388 - DNA, 201 bp, Bos taurus
ggaggcctggggtgctgcagtccctggggtcgcaaagagtcggacacaactgagcgactgaactgactgactgacttcattttaaccataacaaaaatgtctcctctgtactttttgtggccttttttgggaagaaattataaagaattcagagaaataaacataccctaacccattcttagtgacttatgataataatta

SEQ ID NO: 2389 - DNA, 201 bp, Bos taurus
ttgttcatgggattattcagtgctatgcttttacagcatatagagaaaggggctgtcatctcctttaatatctttaaaatccagaagcttcttagtccatcctcaaatgaagcaaggagggatatcagtcctttgatgaggagctatgtgaatgcaacattaaaaatttattttcggagtcttggactgccttatgaagtc

SEQ ID NO: 2390 - DNA, 201 bp, Bos taurus
tagctcgagtcccatgagcataattcacgtaagataatcaataatgattgcttagccacaatttcattgattagaatattctgataatggtctactcaagggtaaaaaactgtatgctatagttttaaaacatattatattatagccttctgattggaaagtttgagctttaattatgctttgatttgaagcctttgaggg

SEQ ID NO: 2391 - DNA, 201 bp, Bos taurus
aatcctctatttaaacactataatcttgggcagaagtagagtctaaagaaaggaaagtagtcctacagtgatggaagtgctaatgatttttagataaatagcacatcaagtgttgaaagtgaggtatttaagagaaaaaaataataagctttactctaaacaaatgacctaatgatttgtcaaacatcaaagagcatattt

SEQ ID NO: 2392 - DNA, 201 bp, Bos taurus
ttgcaagaagtaaactaagattaggagagaagaaatactatatgatataaccataattgggttgtttgtgatatttacagaggagtttcactgcaatggcaaagactataatcattccgtaaaaggttgaagtatgaatgaaacactctattagattgttttttccaaaagtgagcacagcaatatttctgatattaagtt

SEQ ID NO: 2393 - DNA, 201 bp, Bos taurus
ggtggggtcctaatgactacatctgattaatttggccactttacttttccagaaacctgtattgtagatagctgagtctggggaccaagttgtagcaaggatttgtgcagcaaagctgcatatattttagatgaaatttattagaaattgatgccaaatgtgggtgatggaccttgtaaactccagtttgaaacgctggat

SEQ ID NO: 2394 - DNA, 201 bp, Bos taurus
tggcaagcggcttgtttcttcctaataaagaccagatttttgaagcttgagttctgatgtctaatgatatatgggtgagtacagggagagagatttgaagaatgtcagagaaattagaagatgaagtttgaaaggtttgtcttctaaatcataaacatctttgttcctttttcctctcacatctaaagcaagggtcataga

SEQ ID NO: 2395 - DNA, 201 bp, Bos taurus
gagaaacaccagatccttcttttcctctaaagacctatattagtttccacaagtaatgagggagatgaaaaaaataaataaaacatatatttttttccattaaacagctcagtgactagtggagaaaaaaaaaaatgaggtgggtagtccagacaaatagaaatataatgtaaatttcctcaagatgatataaaacccaga

SEQ ID NO: 2396 - DNA, 201 bp, Bos taurus
ctccaaatagttttgttattggtagcacctctgcttgaactgggaggaagtgttgcattctctaattcagttcaattctctaaatattgattgagcatctcacatgggctcaggcaaggttgacctgacttgaaactggagaaaaggactgcttacgcgcttctttcaagtagagcaaggaaggttactggatcctaaata

SEQ ID NO: 2397 - DNA, 201 bp, Bos taurus
attgaatgtgggaggcaaagaaagggaattgagaaagaatgttcacctttcagacacagataactagagtacctggaggataagcatattttgaagtaaagataatgagttgatttttgatcatgttagttggccctgactcaactattcaagtgatgtctacagattagttggatggttaagactgactcacagggaatg

SEQ ID NO: 2398 - DNA, 201 bp, Bos taurus
tagaagagaaacagatcaggtcaagcaaaaatttagctatgaaagcttattttggaggtcagagaaagcctttatatgccttctaaagaccttggtactttttcctcttcacaaaagtacaaaatcaaattttaattggctctccacatgagaaaccctaggcaacgtatgctgtctagtctgggatatggttgaggaggt

SEQ ID NO: 2399 - DNA, 201 bp, Bos taurus
caagaagcagttattttccaaaagccccagtttagcaaggaccacattctggagttaaactgtgctgtagtttcagctctgtttaatgtttagctccagactctcccgagacctgtaaccacggccactgtgtgctgaagtctagagacagaggaagaataagggagaaggcatgagacagactggagagggaaaaaggac

SEQ ID NO: 2400 - DNA, 201 bp, Bos taurus
ccacaaaaagcataaggagacacagggtagtgaaacaaaatataactatctcttttaggtgaacctgatttctgagattaacaacaggcaggctgtagtggacatttgagaaaatcaaatcttcactgataaagaaggggtacttaaaatcagctctgagcgttggcagaggtcaagacaatggactttcagtaacaactg

SEQ ID NO: 2401 - DNA, 201 bp, Bos taurus
cacaggagaatcgcccaagagaaacctgtgcatccattcattcatctgttcattttaatcaaattcaatgagctattgaaagtgctccaggtactgggggaaaaaaataagataccctcggactcttaggagtctgactacgatttatttagtctgttggagacagacaagtaagtgctttacaaagtactgttctaggat

SEQ ID NO: 2402 - DNA, 201 bp, Bos taurus
tggggaaggctgagcctgagataattacatcccagctcccccggccaaaagaaattattgcacatagccaacagtgactgagagttgggatcaaaagctcgttgaagttcctgacctgaaggccagctagacttagcatgcgccgtaggtcctgaatatcgctgttgaatacaagagaggtgaatgtggatgtggagaaaa

SEQ ID NO: 2403 - DNA, 201 bp, Bos taurus
tcagagtgtggacttccatcatgccttctgaatgggcacctgaccacataatcagtccctcagtcatagctgattggattaggatgggcccttgccccaagggggaacaatcagattctgtcttatacgaaattggggttcactatttctaggctcaccttcattggcatttaaactgaaaagtcctgagggctgcctggg

SEQ ID NO: 2404 - DNA, 201 bp, Bos taurus
tagattctttaaagcaaaagagctcatttgtttttgtaatgaagcctggcccctgaagtataaacttcaggatgatgaggcctggccagaaaatgggagctttagtcatagtaccaccctacagttagacatctttttgcaaaagtcagggaaaataaatagaaattccttatacaggcttttatggccctaagagaaaac

SEQ ID NO: 2405 - DNA, 201 bp, Bos taurus
gccactaatgtgttgtgtatgataacaaaacctctggtatgacacattttctgtgatcattgttaattagtgacatagtaacatctgtagcaggtggttagtaaacctcatgtgttgggggtgcactccttggggaatggtttgggccagatggggtctatatggagtggaatatttgactcctttttttcttgtttttag

SEQ ID NO: 2406 - DNA, 201 bp, Bos taurus
gtcatttactctgtgcctgtggttatagtaaaaaccaagattgaaacggggctcaaagaaaagtacttccaagtgtgcctagtaggtagtaaaatgttcaataaatgttacccattgttattgttgtttttgatggaagtgcacccaaattcagaaattcttgaacaaaccagagttagccggaggaagggtatagaaatc

SEQ ID NO: 2407 - DNA, 201 bp, Bos taurus
aagaaaaatcaacacatttgtgtttggtggtggcaggaaaccaagttggaatcttttacacagaaagcagaaagacttcccacctgcccagggtaactgtagaaaaccgagttcaggaggagctggttaccacatgtataaccattttatcctagcctcacaaccccaattcacctttctcagcctttcccaaagaaggat

SEQ ID NO: 2408 - DNA, 201 bp, Bos taurus
acagccctaattcgtttttacttaagaaacagccatgtttggaaaaaatcaggttaagttggatggagttatagatattttaattaaagagagaacacactgttctggttacttttctatttgaaaggcataatgtttttattcatagttttaaaacactttccagtttccttaaaataatggactttctcagaagtgtta

SEQ ID NO: 2409 - DNA, 201 bp, Bos taurus
aggagcttcaattcattttgcactgggccccttaatttatgtatctggcctcgcctgtaactaacaacacttgacatccttaaacggtagtttaacatagtccttgagatttttatatggccaggattatcgtgaatgcacactgtctgggtctacgccagatctcctgagtcagaatctgcattttagaagttccctggc

SEQ ID NO: 2410 - DNA, 201 bp, Bos taurus
ggccttccttctgctggaaatgcacctgaggatctgaagttagtcttctttgaattttctttcttaacgattgccttttcttcatgaggctaccattactgctttggccaaagaggacatctttggcactaaagaaatgtgtgtggcttcaaagtgtattggtttctacatgggctttcctgagagctcatgggatgaagt

SEQ ID NO: 2411 - DNA, 201 bp, Bos taurus
ctgccacgccctcctccaggggatcttcccaacccagggatggagaccctgtctttctgtggctcctgcattgcaggcggattcttaacccctgaatcactggggaagccccaaataggagacataaccacttagatgacactagaaaggagccagctagagaaaagactttgaatttaagagtcaaggcatagctgacag

SEQ ID NO: 2412 - DNA, 201 bp, Bos taurus
cttatcccaaccttagggatcagggaagtatctattagaggtcacctggtatgaatcttgaaggatgtaagagaaaactagggtggagaatccttggtaaggggtataggctgcacaaacaatgggttaataaataggatttgccagacatctttgtccatcctggctcataggttttaaagctcatacaatcagtgattt

SEQ ID NO: 2413 - DNA, 201 bp, Bos taurus
atgcttgaaggccttcatatttaacttgaaagcaataccccagaacaagaaaatcatccccataaggactggtcatgactctctttaagaactgatttccggttttatcttattacatcctctgtgttgtttaaaatcctgtattaaatattaccttattaaaatattcagtatttttgcagccataaaaagctaccatag

SEQ ID NO: 2414 - DNA, 201 bp, Bos taurus
atgaatggcacggtgtgtttcatttaccctttaatatcatgttacttcaggcagagggataccaggaggagagtgcagacccttgtaggaccccagagaccgtgcagcctctgacttagggcccatgcacaacttaccagttgctggagggcacctacctgccaacttccaaactgtgtttcatgccccaggcctgggcag

SEQ ID NO: 2415 - DNA, 201 bp, Bos taurus
agattacagactgcttctttgccagtggtctccagtcttagacttttcttcagtctatcttcacctcagagaaccttgtgttcatttattcaatcatgcagtcaaagaggaagttgcatttctgatatagaggaacgtttaggagcaggctaatatctatgtctgcaatcaactgtcagggtaatattagatcttctacaa

SEQ ID NO: 2416 - DNA, 201 bp, Bos taurus
attcaatgcataatttatatttcttttttgtctgctattattagagtttaaggaaacagatatttattggaatttctcaatctcactgacaataactctactgatattgtttgtagtgagtacatttttgcatttttaaaaagacataagaagtaagaaatacctaaaatgaaattaggctcacagttgatctagttacaa

SEQ ID NO: 2417 - DNA, 201 bp, Bos taurus
tctcagcaagagactgacttggtactttatatgtactttttatggtacttttgaaaaaaaatctcttcatcttcatagacaagatgaaaaatttggggagactgcaggtgaactgtctgcacaacactaatgataaaccattaatcaacggcatacccatgagatgatctatgctggcatggccagactggtcctgtcctc

SEQ ID NO: 2418 - DNA, 201 bp, Bos taurus
aaagtatcaattcttcagcgctctgctttctttatagtccaactcgcaaagactatatctgtatatatatcctttataaggtatttttgtaaatataccccttacagataaagaaactgaattaaagaattaaggatgaactatccaagatgatccagtctgtaaggatttgaacccaaagtcactgaaattcaaaactca

SEQ ID NO: 2419 - DNA, 201 bp, Bos taurus
cttacaactgtatgtgatacataagaaaaagattatgtctattttgcaaatagagctattgattgaaaaaaggtcaattcattgtccatgtcactctccaaattaatagtaagacctgattagaaatggagctattgtctccgcatgcaaaagataccatactgaacacataagaaatttaatagcaaactctgttctata

SEQ ID NO: 2420 - DNA, 201 bp, Bos taurus
gtcatatgggatgcaggggtagaagggtagggggagagtgggtgaattcatatgaaaaaaaaaaacaatgttaccgctgaaaccaggaaaggccagggatcgtggtagcatacctagcagatgaatggatttatccaaatgtaggaaaatgaagaaaataatgtgagatgaccctggaaagaagactagggccacacactc

SEQ ID NO: 2421 - DNA, 201 bp, Bos taurus
gagatgtaaaacatatcattacaggccttttagaaaattcaaatgtaaccatcccttctatgaaaaatatattattttccacttgctatcaagaaccccatttgaaaaaagaaagaatcccatccagagttatcctccagccttagcttttgggccactttgtgttcttttaactttcttctcagaagagagggaaaaacc

SEQ ID NO: 2422 - DNA, 201 bp, Bos taurus
gtccttcagaccccctacatagaaagcacttcccccagaaaaccatcaaagttcttaaaaccaagttagatataatcccatgtagtcccacagaacatcatatgtcttctaacataacacttgcaacacattacatgaaatttcctgttacatgtacgatttctcatatcagattgtaagctccatgatggcaggatcatg

SEQ ID NO: 2423 - DNA, 201 bp, Bos taurus
ggggcctggattcaatccctggtcaaggaactagatcccacatggcacaacttacagatcccatatgccacaactaagatcgaagctcccacatgtcccaataagacctggtgtggccaaaaataaataaatattctttaaaaagatgtcactgaaacatgattacaatctctacttggacgcctccagtaatgggacgct

SEQ ID NO: 2424 - DNA, 201 bp, Bos taurus
ggccatcccacccactcacaaggctctgaacagagtatcaatgcctttgcctgtatagagcagtcctgaaggttttacagcagcatggtagctccctggaatctgacaggccacagtaactttctcaaagaaggagttagtcgtatctggaggatgatgcagataaaaatggtggcaagtgaattattttgttatggaagg

SEQ ID NO: 2425 - DNA, 201 bp, Bos taurus
ccctatttcctaaatggtggtgggctgttcaagtctagtgtttttcagcctgagtagtaggacacagttacactgtgatatgagcctaggcattctggcctttctgatctactcttttgtcttgggatctgaggatggaatgactggttgtattgtgtgtctgattcactaagtagatctggggggacagtcagttgctct

SEQ ID NO: 2426 - DNA, 201 bp, Bos taurus
acaacactaaaaagtttctaagtgttgaacatatctgaatcatcttaaacacatttgtatctagtgataaatgtgataaaatttggctttgtatgtctccgaaatacagaaatagttcaatagaaatatctacaaaacttctgtttggacttgggatctcataaattggtatacaattcaatcatttcttagtcatttttt

SEQ ID NO: 2427 - DNA, 201 bp, Bos taurus
aagatttgttgttgttttaataggagagtgacatggtcagatttgtgctttgggtcgctctctcagggaagtggaacaggatgggctaaaatatagaagacagcacagtaatgagagtaggcaacaaacagaaaagttgcaaatttgtgcaagaaatgaaacggatatgaaccagagttgaagctatgagaacacagaggg

SEQ ID NO: 2428 - DNA, 201 bp, Bos taurus
ctccatttcacaaccagcctcgcatcttcacaaatgtggtgttgcggctgtttcacttgtttggacacatgttaacaggcaggaagatgagttcaatgactccggacaaagcacggacacaagtggatttgatgctggctcttcttccctccagcacactcggcagctgccagatcccgccttctgatggaggcgaggggg

SEQ ID NO: 2429 - DNA, 201 bp, Bos taurus
gaaatattaaggaaatgaagaaccacataaactgtcaaccactgaatcccctcccatactatctctcgaaaataacagatgaccatgccatcttattaacacattcaatgatttcataggtagtccaggaagaggatttttaatataaaagataacttctcttttggagagtcagcccaagaacagtaagaactgaaggag

SEQ ID NO: 2430 - DNA, 201 bp, Bos taurus
tagattaacatctataacatagagagcaaagagggcactgtaagcaacagatgaattctattaggctctaacagacctcagaaggatccagaaagcctctacagtttgcttctgagaagtgtgcattccagtaattgcttctaagtgctcctccatactggtgtaggccagggcatgcaaagtcagaagtcctacttctac

SEQ ID NO: 2431 - DNA, 201 bp, Bos taurus
tcttctatgcacttgcacccatgtatataatctaagacattattctctctcaaattcttttactgtcatataccaaaagaaaaactcattaatacaattaatacttcattaacaattataaacaaaacaaatttaataatagttcattaatagttcatttaataatagttcgttaataatttattaatatagtagaggcaa

SEQ ID NO: 2432 - DNA, 201 bp, Bos taurus
aaagagtttaaagttcaaattctgccaagttagaaagatttattaaacatcttagacttttcacgaatacctcagaaaagccatgtcttataagtaagcccaggactaaggactctacctagaactgaattcaaaatgaaaataaatccactgtaacaaaacttgaaacaagttttcacttatgattaatacatttcatgt

SEQ ID NO: 2433 - DNA, 201 bp, Bos taurus
attaactaagtcattgacttcctctgagcatcaatctgcaaagtgaacaataatccctgccttgcctactctatagggaagattccatgagattcccttattcataaccagcacgattggcaactagtttgtagtggggacaagcctggactagggccagactccctggcttcaaatctagtcaaatgcttaccgactagc

SEQ ID NO: 2434 - DNA, 201 bp, Bos taurus
agtcattaagctctgccaaatgaacgaaagctatgaaagcatacctttggtgatggggagattaccacctgtcaacactgtcttgcccgttcgtaagtgatttgaatggttagaaaatctttccttgtgtttggtcggctgggacctgctggatggactttcccctgaggcatgccgcaaatgcaacatctaggaagatca

SEQ ID NO: 2435 - DNA, 201 bp, Bos taurus
gagctgcaagatccttatgaacaaagaagtgactagacaggtattccatgccagctgcaatctgaattgcaatgtgtagaaaatctccgtgatccaggctggattttacagtcccatcttcatcactactgcagccaacatccgaatgtggggaccgcatgatgaggaactcatggagatctccctgattcatgtactcaa

SEQ ID NO: 2436 - DNA, 201 bp, Bos taurus
gttgattttggctgagacagctcacagactgacttgtatactataagaaatattattcatatagtgatttggagttgggtggaatcagaaagtactataaatctcttcacatgacattcctgcaaactccgccaggctgagactgaaacaggcttggaagccaagaggcagcacctgcacagcccactacgtggcaaaagc

SEQ ID NO: 2437 - DNA, 201 bp, Bos taurus
atgactaacacacagactgagaacctcatagcacaacacgtgctcctcgaaaacaaggacttatcttccttcttctccttttaaatgtgctctgcacacatgacacactttgccaatattcacaagtatagttctaattggaagctttccacaccctattcatacagtgggaattgctgagtgatggaggtggattgggat

SEQ ID NO: 2438 - DNA, 201 bp, Bos taurus
aaaggccactttaactttcttagccattgcttccagaagggtcttccttcttgttgcccatttctcagcagtgtgagaagagaggttaggacactgcacagtctttttctccaatctcagtatcaaccaatatcatcaataccaagcagaggacttgctaccagctgccaggtgttgatagtctggggaagtggtaaagaa

SEQ ID NO: 2439 - DNA, 201 bp, Bos taurus
ggaggctcctgacctgcactctgctcttctctgcactacagtgaactcccctccattattcccttgcctttgaagaaggtgactgagtgggtgatgtaagacagagcccagtgagcactcagcaataggaaagcttaggagctacaaccaccaggagctaagacaccatagactggcatgagaccccaccagctgccccaa

SEQ ID NO: 2440 - DNA, 201 bp, Bos taurus
caaaaactaacaatcattgtaaggcaatatgttaaatattctgaataataaaccgggtgcccccggacccaagacagaagttggtatcacagcacagaaacatttctgttttcttgccttactcagagaatacccttttctccagacttccttatctctctaataaatgccagattttattgacacatttcatctgcttct

SEQ ID NO: 2441 - DNA, 201 bp, Bos taurus
caccttacaaacttactgactggggcatgccagcaagccaggaaatggcaaggtctggctccaagtccaagtctagatgataccaaaacactgtatgctatagacgccccttgggttagacccctcctgactccagatccattgtgcttcccaacacatcactgctgtctagaggaaagggagagatatccttaccttaaa

SEQ ID NO: 2442 - DNA, 201 bp, Bos taurus
aaaaggaaccgacagcagcataagcgcctgggttctttcctttctcttccccacatggctcctgcaggcatatcaattggcagagccttggaatagtaccatttgtcaacaactggttagtggaaaaaccaaatcctaaaaagcctgggtgaatacgctttgtttctgtctgtgctcttcaatcagatgactcagagggcc

SEQ ID NO: 2443 - DNA, 201 bp, Bos taurus
cctgcactcagcaatgaagacccaccgcagccaaaaataaacaagcagatcttttaaaaagaaagggatgtcccaatgccagtgacaaacagaagttcccgtgggatagaggctgcggttagtattgctgtcactgtgtagtcaataatacagatacaagatcccaaaggtacaaaaagtatacgataaataccagaggca

SEQ ID NO: 2444 - DNA, 201 bp, Bos taurus
caagatatccacttcatccaaaggcctgtggttacaagatagctatcaaaccttctaaggtgattcctccttcgcactaagggatagagaatcctccattgttccaggattccaagcaaaagttctgacactcattctggttggaatggtttaggtcatgtgcctgcactaaacctcccttggggccacctggaccataac

SEQ ID NO: 2445 - DNA, 201 bp, Bos taurus
caagttataactatgatatttagagatatcctccataaaaagtatggcaaaaagattggtcagattgaatttagccagaaagttaatcacagtatcacctatggaaatatatttgtcagagaatcctgataaattaaacagatttcaatgagctaccagtagatggctctcttaatttgctattttatttcagttcagctt

SEQ ID NO: 2446 - DNA, 201 bp, Bos taurus
aacagtgggaacaaaattttgcaaaatatatttcagataagaggggtaatatccaaaatatataaagagctcatgcaacttaacagcaaaaaggcaatccaattaaaaatgggcagaagaactaaatggacatttttttccaaagaagtcatccagatgaccaacagatacatgaaaaggtgctcaacatcactaatcgtc

SEQ ID NO: 2447 - DNA, 201 bp, Bos taurus
attaacacatgaaacaacagtttccagacactggacaacaggctgcactggattttaatgcccaatagaagggaaacaagggaagggctacaagggccccagctgactgcctggaggcagtacccaggctacaaccaaggaaaggggaaccaaagagactccatgagtagcagagagagatcaaagctcagggaggccagg

SEQ ID NO: 2448 - DNA, 201 bp, Bos taurus
atatgtatatcacatgtacaggttttagcactttaaatatatcaatttatttaatatatttattaatatattaatatatattctaagaagtaggtggccttaataaccctattttacagataagtaacagatgcacggtaatttgctcaaagttacataactagtcagttacagacccagaatttgagtcctggccatctg

SEQ ID NO: 2449 - DNA, 201 bp, Bos taurus
ctaactacagacaaatgctgcagagctctgcagccactcccttgctctacagttagaccactgcttaccagtgctgattgctgcccttaacatcccatggactggagaagaaaagccaaactttgagagcaggattgctgctagaaaaaggaagctgggtgtgggtattggggaatggtagcagatctgtcgttaatattt

SEQ ID NO: 2450 - DNA, 201 bp, Bos taurus
cttgtgctaatgtggtgccaatgtgccctgaagacacacccctgagtgacctttttcaatcaggagttgccctaagtccttcagaagtagatagtctgtcgctgtttatagtcaatcacatatgcatgttctaatgctttatcctgaaaacaaagttgaaacactttcctataacatgttaaaaatgttatctgtggctct

SEQ ID NO: 2451 - DNA, 201 bp, Bos taurus
taggcttggactaatttgccagaggctgacacttcatgtagaacaaggatgagccatcgcaaatttaaagccaacataggccccctagtccctggctgacgctgcctctaactgcgcattcgtgagtgagcccagtcaagaccacaggagccccaaccccaaattctgacccacagaacaatgagctaaatatgtggccag

SEQ ID NO: 2452 - DNA, 201 bp, Bos taurus
gtttatttaaacaaagaacaagcacgggaggatgaaacaaaagtgaaaataagggaaatgaaagctctccatcttttccatccttcctctgttgtgtatggatttctcatacatagaaaagacagaaagagatgtctggaatttgtggagtatccaaaagtaaaatagctttcatcaatctatagttcatataaaccaaat

SEQ ID NO: 2453 - DNA, 201 bp, Bos taurus
atcagcaccaaatgttggcttcaaaagcaaatgcagcagaaactactggtgcccttcccaccctggaggtcacctatagctggggtggacagccttcccatctcaaacacctgagtccctctgcctcagggctttctctgttcacagggcagagtgggacaggctggaagaacagaagcaatgtgcccaggagcaatctca

SEQ ID NO: 2454 - DNA, 201 bp, Bos taurus
atgcatttttggccaccaggcacagcatgcaggatcttatttccccaaccaggggtcagatcctcagagtcttaaccattggactagccggggaagtcccaggactagtgaccttctaaaaagaggccaagggagtcttctctctcttcatacatagtaaccaaggaaaggccatgtgagcacagagagaaccaggctgcc

SEQ ID NO: 2455 - DNA, 201 bp, Bos taurus
tggtagttgaaggcctgatggagcttgggctcacatctcccaaagcgccatgggatggatggagccccactcctctacacgactccactaagtcaactctcgccaactcttcttcttggcctttggtttctactgctaaagggaccctgaatcatttctggacagtgtggccttctccacagtactctcttaccccctgga

SEQ ID NO: 2456 - DNA, 201 bp, Bos taurus
atgcattcatattgtggatgacccataactttaatgagggcaggacatgatttatttgtgaactgatcaaactgttaagtgttcatctatttatctgttactttcttcttttatttttgattcactcatttgcttgcttacctaacaagtaccagaatggtaactgtgggcctggtagagtcagggctataaacatgaaca

SEQ ID NO: 2457 - DNA, 201 bp, Bos taurus
ctgataccttggcccagatgccaggtccccgccaccaaagcatgtatctttagtccctgcctgcctgtcattgcctgagtccaggtggtgccttcatggtatgattgccccaggatggccagcctctggggcagagttagtactctaagccctgtgatcacagtcttaggtttgctttccactgcatctagaagcaatgag

SEQ ID NO: 2458 - DNA, 201 bp, Bos taurus
aggttgatgtttttcttaaaacacaacaaaacaatttgtgatgattttaattgattcttaaatgaatgggtgaaatcaattatttagcccacaatgtttcgtttttcaacatgtgaagggagcttatcaaaccagctgctaaggcatttcatcagcaggactagagtcgtgcatctctgggcagggggagagggtggctga

SEQ ID NO: 2459 - DNA, 201 bp, Bos taurus
tgggaacctctatgtttgtcactgatcacaataagaccttcagagggtgatggccattcttctacttctgctcctcaaatctcacacaacttcctcttttcagttcagttcagtagctcagtcgtgtccaactctttgcgaccccatgaatcacagcatgccaggcctccgtgtccatcaccaactcctggagttcaccca

SEQ ID NO: 2460 - DNA, 201 bp, Bos taurus
gaactttctcatggctaagtagttatgccttgattgttggaagagtaagcacaccttgattgcttacataattttgaattaattatattacttccagattcgtttgttattaaggagggtgcttatcaactgattctaattaatgtataacaactttgtgatataatagaggctttaaacatttaagatattacagtcccc

SEQ ID NO: 2461 - DNA, 201 bp, Bos taurus
ccatgtgaaataaccccattatccttccaataaattctccctttgctgacctagtatgagttgggcatatatctaagcagtccctagaggcctgatcaccagacaggtgattttccagcacggctattttccagagcggctttttcactctagtgggcagcagtgagctcattccccttcctgcaggcctttcagcctcag

SEQ ID NO: 2462 - DNA, 201 bp, Bos taurus
gcttaccatagcccttctgttagtcccgctggccttctaaccagccaaggagcttctctttccattgttgaaccccagggctggggcatccaatatgaggctttaattgttgactccccagggacaatctccagtcatgtaatctccctcttcctctcaagtcctttcctagggacataagtcccaacttgattacttctt

SEQ ID NO: 2463 - DNA, 201 bp, Bos taurus
tttcataataatcataattaacatgcatgtccttggttgattaggtattacttccctagtgcatactttactttttttaatcctcagaaaaaccagtgaagtagaactcagcaaggctcataattttgacaaccatgccttctatttcttcttgttcttgctttaggctttttggtctttctgctcatccacatagtcact

SEQ ID NO: 2464 - DNA, 201 bp, Bos taurus
tcagatttttaatatttcttgaatgaataaattgaatgaatgcttatgctgatgttattatagtacattatccctttgtttggagggggatctctgtaaatacatgctttcaagtctaaaaattcttcaatcaaaaagaacatttagccaagactaaagcagataagttcaaggtgtctatacaaatgtaaacgctcagtc

SEQ ID NO: 2465 - DNA, 201 bp, Bos taurus
ttggaaaattttaggtctatataattctaaaactaacaaaaatattttgtattatgactatttttattttgtttgaccctattccaattccttctacatactattgcaagacttagcatataaattaaagcatccttcgttcccttagccaaggcagtatcaaggtattccctagtcacggtattttcagtttatctattc

SEQ ID NO: 2466 - DNA, 201 bp, Bos taurus
ccactattaatacttgtaggcccttataaatcactacctccatgcagagtcttagatcaaaatacatgtggtcaggccattgccccacagaagcaactgattctttcaaaagggctgtatgtcaccttgttttgtggatagaagtaatagcctttctgttcatggctgaccttggccaagaaagaaaaatccctgttattc

SEQ ID NO: 2467 - DNA, 201 bp, Bos taurus
agccccaggaactgcagctgaaattccctagggagaaactcacagttgctatcaggaaggattttgaccagcatctggaggcatccttctggctgatccatccacttgtccccctcctccagctctcaagttagatctattcaggtatcctcctttcttatacacagaaactaacacttatcattagctgctataaataat

SEQ ID NO: 2468 - DNA, 201 bp, Bos taurus
aggctgaatgcctattggttctggagtggaaggaagtgatcattctgacactctgccacactaccaaaaatctgttttacatctgtattaaatatgatccagaaaaatggaagaaatcatctcatagcttccccacagtgcaattgcagggatgtgagcaaacatgtctattaggaataatatataacaagaactgagcca

SEQ ID NO: 2469 - DNA, 201 bp, Bos taurus
tcacttgcttaccaaacaagtgctgcttctgtctctgtgtctcagagtctccccatgtcgtctcctttaccatctacttctagctatgtatagacttgaggacgtggatggggcacctaattttcaaacagcataatgtccatcctctttcaggctaattcctagacatccacatggaagcactttattattttccttcag

SEQ ID NO: 2470 - DNA, 201 bp, Bos taurus
gggccccaggttctccagatatttctctttcccaacaactgctacaaatagcacctaagatgagcagcacctggagcccacgtagatcttttttggtacacggccaccttttgcctgcctcaaaaaaaagtaccacatcactttccaggaacacagctctcagagatcagggcaatcatatagctgctgatttttcaccca

SEQ ID NO: 2471 - DNA, 201 bp, Bos taurus
acaaatcattttgtctagatttgagagtttattgcctgtctaccaagtaaagactgagcttctcacgggtaaatggaaggtgagaagaatacaatttaggctacatgattaggaagatgaaagcagagaaagatgctgcagttggatgagcttttccagcagctgagttaaataagaaccaagataaccccctgactcaga

SEQ ID NO: 2472 - DNA, 201 bp, Bos taurus
acatggaataatattctctacctgacaaagtattctcagatgactgtggctcacacatttatatccatgtaaagcaattggcccagtgactggcatgacatgcttaagaattggtagacattaccatcatcaataccagggcttcaggactcatctgacctatccatgtttacacagtaccattacagtgtttgatccagt

SEQ ID NO: 2473 - DNA, 201 bp, Bos taurus
acaaaaaggggttagcaggttacaacgggatatgagtagggtacaggtaggtcactcactgtcacactgtctctgaaacatgacactagacccaagaaattaatggtaagaagtcaatcagccactgaaagaactagaagaaggatatttcaaagagaaattaaaaagctgtgatgcatttataaataaaaacaaacaaaa

SEQ ID NO: 2474 - DNA, 201 bp, Bos taurus
aaaagcatggaatgaaggcattgctcaaccctgaaccagctgatgcctctggttaatgcagggaaggaagaagtacaataagcagaatggggcctgtaggaaataaaagttgtaggagtttgtaggtttagaaatacggagtttacttttgggttggacttccaggccttttacataaaacaaagaaaataacaactatgt

SEQ ID NO: 2475 - DNA, 201 bp, Bos taurus
ggattggaaaccagtccggtggccccatcatctctatgaaatgtgtgagaaccctgacaccatgtctgctgcatactagatgctcagcttctcaagttcaatctgaatctacaccaaggggccttgtaccatagtacctgttatcattctatctcaccaatgggaagactcatatcatgcttatgtccccagggtttagca

SEQ ID NO: 2476 - DNA, 201 bp, Bos taurus
tgaccaatgaattaggaggctcagtttctaactccaactctgatggtaatgtgaggggcaaccctgatgactcactgtttttctgggctttggttttctcgttttcgtattgaagaatttgatatagaaagtctttgagcaaacttttagttctgaagcccatgatcactcattatccaaagagcagcatgtgtaccaaat

SEQ ID NO: 2477 - DNA, 201 bp, Bos taurus
cagctctgattttctcacagtgtgtctcctattgttacatataattcttaacaagccctcatatacagttctgcaggccctgaacaacttcagagggcaccatttatatcatggtctcctacctgagctcctggggatgctcagctgaatgtgatataattctttcattaacttagaccctaaaataggccagtatctcaa

SEQ ID NO: 2478 - DNA, 201 bp, Bos taurus
acgatatcacttatgtgtggggacccggaaaagccaagttcagagaaacagagcagaatggtggttgccagaggctagaggtaggaaaaatggggagatgctggtgaaaggatataaacttccagttataagatgaatgagttttgggggtttaatatacaacacagtgattatagttgattatactttattatatactag

SEQ ID NO: 2479 - DNA, 201 bp, Bos taurus
agcctgatacctgtggacaaggcactgcatctatttgaggcttattctgtttatctataaaatgcagcaaacgttcagtatttaactcacagggccatgtcatcaatcaaataaagaaaacacagtttcaagccatagaagctgtaaagtaaaatacaaaatatagtatcataacaatagctgacgtttattaaatgttat

SEQ ID NO: 2480 - DNA, 201 bp, Bos taurus
cctctgcagatacaaagtagaaagtgattaaatgtgaaagaaaagtacacatataatacaatggcagctcagagaatggggtgaattctttggcctgagatggtaagagaagacttgatggaagagatggaatttcagccagatattgattgatgagtaagagatgatgggaaaaggccatatgtaaggaataaagaatat

SEQ ID NO: 2481 - DNA, 201 bp, Bos taurus
tgtcctccacctgagatgccttcctcatcctgtctgtctgtttgactctttatctttgttgaagtcccctatttcaaccttaactcccctgggaagactccccttgttcatatagccagcaggggtctgcagttacccacacttccctgtggtcttcccttcctgacaacttacctgtggatgttgtttgcttagccagct

SEQ ID NO: 2482 - DNA, 201 bp, Bos taurus
aggccgagcctgcctgctaccagggtgtgattgttcttgtgatttggcaacactgggcaaacgtgtcccatcagggctgagctaaaaataggtcctgtgctgtggggcccaggaaaatcagcagtcgggcacatacaggattggccaaccaggcagaagtaaacagccacagtgccccaggggcacagtgggcaaagagag

SEQ ID NO: 2483 - DNA, 201 bp, Bos taurus
acacacccacgcgtgtggggtcttggttcaccgaccagggatcaaacccacgccccccccccaccaaccccgccttctttggaaggtgaattctgaaccattggctcaccatgaaagtccccaggctaagctctttaaatacattgtttcatataattctcctcacaattctaagagataaatattaagatcagtccatat

SEQ ID NO: 2484 - DNA, 201 bp, Bos taurus
gtggccatgggcaagtaacttcccctccctggacctcagcctccttccacaaaaagaggagatcatactgcctgcctcatagacctgaagtgagactagacaccaagcactggccatccctgtgcccctgttagagagttaatgaaaaatccccctggggaccatgagtatacccagcatgcttttgaaactagccagtag

SEQ ID NO: 2485 - DNA, 201 bp, Bos taurus
aggaagacatggacagtgaggtatgggaggccgtatctccagagatctctcccaacctcccttcccaacagttgaccagacattaccagcccatcttcaaatatgtgaaactgaggcccagagagccgaagctggtgaaatatcatcacaggccagaggggactgcgctctaacacagcagttgttcagaacgtacactgc

SEQ ID NO: 2486 - DNA, 201 bp, Bos taurus
caaggtctgccagtgcatggcttgttacatgagaaagaaagatacttctgcagtatttaagcctttttatttatgtctctgcaggagatgtcaaatgtctatcacacctaacaaaatggccatatgctctttatcccacaggttccaatgtgattttatcctgcaatcagtctaggtcaacccaaggagatatgttaatgg

SEQ ID NO: 2487 - DNA, 201 bp, Bos taurus
ccacacttctccagtgagatagcatccctgtcttcttacttctgaaggactaataacagtgattcacaggaccttttgcttttccaaagttttgggccatcattatttagatatacatcatcacacacccacagcctcaatagcccatttgcttctggggaggaagctgagatcaggcagcagcaaagctgggaagagaaa

SEQ ID NO: 2488 - DNA, 201 bp, Bos taurus
gactgctgatcatcatgtgatctctggtgttaccaaattccagccaaaagaaagatttgtgattttaattagtctgtgtggcctaattatatgagagaaaatataaaatttttagttaagttctttgaaagattccagtaacatctttacaggccacaaggggcctgggacctcttcccaggaggtttacagtcagattca

SEQ ID NO: 2489 - DNA, 201 bp, Bos taurus
tttgaaatgagaagtggtctttacattgtagtcacaatttaaaaaaaattgttgtaccaaaacatgtaacaaatgtacccttttgataattaacaagggtacatttacagtattgttaactacatgcacgttgttggacagcagatccatggaactctttcttcttgcatgactgatactctatacctgttgaacataact

SEQ ID NO: 2490 - DNA, 201 bp, Bos taurus
agagtcattgaagtgagctcttcgtctacaagaacctctcctccctcaagggactccagtacacaaacacatacccacactcatacactctgattagatgcaagtttttgccattcctgccttagccttcaacagcagacgctttatgatggcccagtgaacgatgcagaggaaaaatgggaacttttaaggatcagatgc

SEQ ID NO: 2491 - DNA, 201 bp, Bos taurus
tgagacctagaaagaggaagcaactttgcccaagatcacacagccagtaagtgaaagagctgggttagaactcaggccactagcatgaaatatgtttccaggtgatgaatgacccacagaatataggcatcatgagacttagagtgtcttcctgggagctccccagcaccggggcctggcacgtggcaagaacacttttat

SEQ ID NO: 2492 - DNA, 201 bp, Bos taurus
agaatcaacggattatacatttctaccatcttactgattcttcctaactcttcctatgacatggacttcactaccatgtctctttgcctttgccaagaacgtgccttccattaatcacacattgaaattctccttagtctttatgaatagctaaagtgattttctgtggtaaaacattctttttattcctctagttgccat

SEQ ID NO: 2493 - DNA, 201 bp, Bos taurus
gttggtagcatttgatacacacctgaatggcttcatggtagaatgcctatagataggacttggggacaaggatgtatttaagtaaaagaatgcagaagtgcaagcagactggaaaattccatcattgagaattttgagtaaagtgagtaaattttgagaaaagtgagtaaaccaatttgatgagagcagaagatctttaaa

SEQ ID NO: 2494 - DNA, 201 bp, Bos taurus
actccggtactctgtggccatcttccttctacttagtcacagccaggtgctgctgaaacaaaaggctgctcagtacctggtgtccccacactggcccatccgcactaaagcatgtctctgagccagtgggaataagtatttaggtcttggtccagggttgcctatccaggccgtctgccagtgcaggagacgtaagggaca

SEQ ID NO: 2495 - DNA, 201 bp, Bos taurus
ccctccaaagccatcctgtacacaaccaccagggcaatcacccacacccttaaagctgattgtgtcagaactctacagtggttcctcagcacctgcggattgagctgggcctgaggaacttgctttacgagggtctttagtatttttttaatcacacaggcacacatatattctttctcactatggtttatcacagggtat

SEQ ID NO: 2496 - DNA, 201 bp, Bos taurus
ggcagacagcattttccaggataaaggacttcaacattggatgagcacattcaaaactatgacccaccttcaagtcagtgttcaaaggaagtaaaaggccacacagaaaatgagatgtaattgggcaccccatggggaggggacagaacccaggaagccttgaaaagcctcagtgtggccagtcccccagcccagagccaa

SEQ ID NO: 2497 - DNA, 201 bp, Bos taurus
cccagcagtgatatcatacccttttattaagggccatatgatcccctgcaggaggcagtcagaaattcaaagcaatattatacatggctgtggttactgtatgatgatgcaatggaagatgatcctcagtccccaggaggcatggatacaggattctgggactgtttttggccaccgctcagtttttgtcttgaaactgca

SEQ ID NO: 2498 - DNA, 201 bp, Bos taurus
aaagaagataatatagcttctaaccgcttagagtttataaactacctgcaaataaacatctcattcacccttttcaataaactcatcaagtgagaattttcgagttttgtgtttgagacaacagaactagaatgtccttgtccaaggacccttaaacctgttggggtgaggctgtgactagtacatgggaccctggacctc

SEQ ID NO: 2499 - DNA, 201 bp, Bos taurus
gaggttgttaatttatcaactttgtggccttcagagttttaatcccaggatatgttctgtcagtgtaggtatctttctggatgggtttggtctaagcaaacgatggctgtgaggatggtgctattttatcagtagagagatgtactaccttcagatatcctactacagttttatagcctttgcatttctgatatccctggc

SEQ ID NO: 2500 - DNA, 201 bp, Bos taurus
agacgatggacatgggaatgatgctgtgatggatagccgtgagtgctggagtcaggctggacttaggaaaggtagcttgatgcttgatggcagacgggaaatgtgtaactgtctcaggtcgcttttagcccttgcttcctaagctctgcaagacttgtccctgctgtcttagttgagtatccaatggcttttggtcaggct

SEQ ID NO: 2501 - DNA, 201 bp, Bos taurus
tggggctggcttccattccagaaaggtaaaaaaggccaagggaagagtgtccataagtggtttttatgaacaagacctgaaaatggcccttttcatttctattgatacttttggtccatgggctagaaccagtcagaagcccactcctagctacaagggaggctggtaaatgtggcccagtggtacaggttgtggtctcta

SEQ ID NO: 2502 - DNA, 201 bp, Bos taurus
ccttagcactctagatctgctattaatatgctgggccttcagccacacagttcacccagcgcttggactcatctcccacctgctgactctgtaccctcccattctctgttgtggccagcccctacccatccctattcctgccacttttcactggccagactaggtcctcgggttcccagtgctgccttttctgtagctcag

SEQ ID NO: 2503 - DNA, 201 bp, Bos taurus
gttatacccaggatccgggtgagaaagctgagtcacagaaaaggtttgtgcctaacccaggggtcagagcccatgaatagagaggccaggccttgaactcgggctccagagcctgggctcttaaccttaaccactgagtcatcccctccctttgctctgtgcagactgccttgcattcctgggccatagtgaatgaggtca

SEQ ID NO: 2504 - DNA, 201 bp, Bos taurus
taaccttaggcagaacctggaaagtcgagtatttgaccagatcatgctttgcttagcatttgtctcttttctcccagaagtggaatgtactatctttactagtgagttaatacagattacagagggtagactcaattcagaaagtcttggtagtctatagccgtaccaccctgaactcacccaatcttatcaggaagtctc

SEQ ID NO: 2505 - DNA, 201 bp, Bos taurus
accaggtcagcagccccctgctgggccagctcagatgcttcgccttttctctctgagcttcagttcttcgtatgtaaaatgggtggttgcttcctccagacacagcggtgaggccaacctacgctgtatagtagaggcagtgcagatatgtagtagcataattataccaacgacaataacaaaaactgccataaagagaca

SEQ ID NO: 2506 - DNA, 201 bp, Bos taurus
aagtttgacaacaaagaataacaaagtagacttttcctcaaagactatacaagccaaagataatggagtgatatattcaaagtaatgtggaagggaaagatggaacttttcatgtagaatttcatatttgtcaaagatatccttcaaaaaaggcaagataaagagctcttctgactaataaaaacgggtcattctctcacc

SEQ ID NO: 2507 - DNA, 201 bp, Bos taurus
tacatagtggatgctcttaaatgatcttgttattttttgagagtaaactctagcatcaaatcattaggctctcctcttgcactgttcagcagaaggtcaccaaacatcttctctgagtcaggccctagcttagaacttctaaaaggggagtctgtcatacatgtcctctagttgctcagtttggcaggggacaatgtcaag

SEQ ID NO: 2508 - DNA, 201 bp, Bos taurus
gcagtcttattaggaccccatgggactctgtggactgcttttaaaggcaacagtgggcagtgtcatggctgaaggaggagaggttttacaggtagcctgcgggagctcaagatgcctcctttttaacatgcagcatatggggttgcaaccagaggaggggcagtcttaccaaagcaccggcttggggtagacacttaccag

SEQ ID NO: 2509 - DNA, 201 bp, Bos taurus
gattggaaggaaggaagctggaccagaggcctgcatgtgttctctctgggccacagatgttcaaggtgggtctgttggggatatcatttggggtacccaacgaaggaaccactaacccaggcctctccttagtctttcactgaggaatcctttgtgtccctcagtgctgctgaggaggtaagtgtttatgactgaaaagag

SEQ ID NO: 2510 - DNA, 201 bp, Bos taurus
ttcttttttgggagatgagattaaggctgacaccaaagactgggaatatatttctgcttgtacccccgctaacctccctggatgaaatttactactctgagaggcagggcagccaggcaactgtagccctctcccacactgtgggcactgtaggagactaggacaggtgtggcccaagctcaatgagagggagtgcaaggc

SEQ ID NO: 2511 - DNA, 201 bp, Bos taurus
taagaagatgggaagggagacacacattcattcctggggaaaacatgaccaggtgtcttgagctgatccttaaatgaaagtttaaaaacaggaggtctacaaggcagctccatgctgatcctgggctgtgttcccaactttgctgtattagttgggtgatagaatggagatgatgatttattccttgcctacttcatgaag

SEQ ID NO: 2512 - DNA, 201 bp, Bos taurus
tctcctccctccagctgtacctgcaggcccgattcacttggcgaggggcccgcctgctccggccccttctgcagttcaccctgatcatgatggccttttacacaggactgtcccgtgtgtctgaccacaagcaccatcccagcgatgtcctggcaggatttgctcaaggagccctggtggcctgctgcatagtaagtagcc

SEQ ID NO: 2513 - DNA, 201 bp, Bos taurus
ggagtaaacattacgttattcagagagacacttaagattcaaaccacttcatatttaatcagcaatcacgctcccttccaaaagccattccaggaaaaacgtaagtcgagtttttgacaagaaacaaagctttctgaaaacttatgcacacatcccaggcctcaggggacaaacttgtggccccattttgatcagtggtgg

SEQ ID NO: 2514 - DNA, 201 bp, Bos taurus
tccatacctcctctggccctccctcatctgttaggactttaaccctttttgttgttggcacctcagagattcagctgctagacagtaagctccctttgatggaaccaggccttccacctcttggctggctctgtagcctgtatctcagtaatcagacgactacaggtaaatcgtttattaaaatagatggaatataagact

SEQ ID NO: 2515 - DNA, 201 bp, Bos taurus
tggtcagttgtattaaaaagtttattcctccttgttttcttgcccactgggactccatctagagaaacatttcctccagctctactagacttatttcaaagagaaaatattccgttttttcattccactttgaaaagataaggcatccagcttcctgtcctgtggctgttgctcagacttctgtactagttctcagcaatg

SEQ ID NO: 2516 - DNA, 201 bp, Bos taurus
ccaggcccactcacttggcccccactatggacctaccctccctcctgtgagaagaaccgggttcttgggatcttctctagttggaggagggtacacatcattggccaaaggccctgccctccctgctgctggtttccgccttcaaaggggaggtgtggtaaataggatgctatcagctatctgctgaggtcagggttgatg

SEQ ID NO: 2517 - DNA, 201 bp, Bos taurus
ttaaatacctgaactgagatatgagcctctgcccatgacaggtatgacagtatgtgactttaggataactaagttaaacacccactgaaacaaaacagaatgaaacaaaacaaactcttttagaggaccataaaaaaatctagaatccacaaaatataaaaatttacaatgcgcaggatacagtccaaaattactcaaaat

SEQ ID NO: 2518 - DNA, 201 bp, Bos taurus
ttagcttccagcctttcactccctctgacagctacagggcctcaaggtttccaatggcaaccatttccctttctctagctgattgctaggtctctgaccatgaaaccagaccaccccctaccaccacagacttgtcagagtggggacttttctgcatagtgttacctcctcctcttggcagtgggaaggtaagctcctggg

SEQ ID NO: 2519 - DNA, 201 bp, Bos taurus
gccttccttgaataatgaatctacagaaaggaattagactgatctttcatttgatcccaacacttcccaatagatgctgttttatatgaaggtgttaacattcaaaacaaagccaaattcagtcttctttggaagactataattgaaagatgtagaattttatgggcaaaataagttccttctttaaaaacattctttatt

SEQ ID NO: 2520 - DNA, 201 bp, Bos taurus
ataagtagaagagacttacccgcaactaccttacagttgtaaggccacaaaaagagaaaaataattatgttaccttgtagtaaagcttgtaacagaggatctggtaagagatcaaggagaaaagaactaaagtgactttgagacctgtgtccatggttctgttctgagaacttcttatgaacatcgagttctgttgggccc

SEQ ID NO: 2521 - DNA, 201 bp, Bos taurus
gtgatgtaaaaattaaaatcaaagttttgctttttgaatgcatggtctgtaacccacagaaaatgagcaaattgtttggtcaggatcttgtttaagaagccaaaaatttaagaatcaaaatatgtacaccattaaaaatactaattctgagtattatatatctaaaaattaaatcaccctgtccagcaagtttcaaaaaat

SEQ ID NO: 2522 - DNA, 201 bp, Bos taurus
tatgtttgagtctctttggatttattatactttccattcattaagtttcttgtatttatatatccatgtcattgcaaagattttggacttttgggccatcatttcttcagatacactctcttccccttcctctctccccttcttctgggactcccattatgcatgttttggcctacttaatggtttcctataagtctctta

SEQ ID NO: 2523 - DNA, 201 bp, Bos taurus
atagttcatgtccaataaatattacttatacagccattttcttgggacagtggaagcatgctggacagtcatggaaggaggccagtgctccctcacagctagaacatggagtctgtgagacagggcagcgtgtggaaggtgaggctggctgcggccacgccgtggaggacttcataaacaggcagtttggctttgatctga

SEQ ID NO: 2524 - DNA, 201 bp, Bos taurus
ctctcacatgtccatcattttttatagctcagaaaccacagctgacaaaactagagcatcttgcctggtaaattttgatgtaatccttgaaacccatccttccaaatttaaactatgagtccttttcagcacacctcactaggtgatacttgaagtcctcttcttgtctaaaaggctgtgtgtttgtaggagaaccaatta

SEQ ID NO: 2525 - DNA, 201 bp, Bos taurus
cagggcaggtctgggtgcccttggagcctgcttgtgctatgctgctctatggaaaatctttgcaaagcctcagggagggcctccaccctcaaagggtggaggaagtgggacacttagatccaggacaccagcgactctcattttccactcttgactcagagtgccctgcccagaaaggccattggaccccaggctgcccac

SEQ ID NO: 2526 - DNA, 201 bp, Bos taurus
taatgtgcagcccaagggcaggaactgagttttattcaacctcaaacctgctgtgcccagaataggactggctcgtggtagagaattgatgagcatgaactgaccgattaaacgaatgaaagacccttttcttcaaagagcttctgtgactcgatatgatatttttcctagaacttgtggttttcaggccagaaggtgact

SEQ ID NO: 2527 - DNA, 201 bp, Bos taurus
ataacttttaaatatttagacatatggtgtacaggttccatgtgaactcctgctccaggccctgcaagtgtgagggatgggcctgtccttgccattacacattcttctgcctccaggctgcatcatctgccaaagtccccactctctattggcggtgaacactgatgccccctatccatccttgcaaaggcctgactctct

SEQ ID NO: 2528 - DNA, 201 bp, Bos taurus
ccattaggctgcagtgcttccagctacactatgatgtttctcgccaaatattagcgactattctaatatgtctgcagtctgacaggcccctgcaaccctgcctagtctttgcttttggaccaacaccttccctgaatccaagcccacaagcaggagctcagagctcttgctcggcctcccagagagccctgcctgctccct

SEQ ID NO: 2529 - DNA, 201 bp, Bos taurus
caattactctaaacaggaagagatttctgcctacatctctgacaggcaggtgttctctacaattcaccaggaagaagaaaactctgtgagaggacaaccccgtcaatcagaaactgtagcagttcaaccaatgaacaatctccatgctttggactcccagctttctccagtgaactttttggttattacagcccttccaaa

SEQ ID NO: 2530 - DNA, 201 bp, Bos taurus
ttgcagcgttggcttccccttgccttggatcagacctctggtcctaagccctcctcctctttccctgtagcaaacattgaacgaagcaggagagtagtactttggccatttgctcctcagcacttgctaaggagtatgttttgttgaggtacttgaaagattccattaatgaggaagtccaaggtgatatttttatcttct

SEQ ID NO: 2531 - DNA, 201 bp, Bos taurus
attgcctccatttgggcaggtgctctagtacccaggagcctgttactggactcccgtgagccacgctctatccttataataaggcctcctctactggagtaggtctcaggtctggcactgggagaagtcgtggctagagcagagggcacagctgccagataagggcagggccgcagcctacacctggctgctcagcgctct

SEQ ID NO: 2532 - DNA, 201 bp, Bos taurus
gcatgactatcttaatgctcaattcatgagataagtatagagaataaaatgtgataacgcacataggaattttcatagcatctggcccccagcagttcccccagtaaatgtccatcctcactgttccttcctccctatgggtgacggttgggtggtggccttgagaaaaagaccaagtctggctttcagttctctgcaccc

SEQ ID NO: 2533 - DNA, 201 bp, Bos taurus
cttacctaatggtgtgctcaaaatagatgtcatccatggaggctgtgacacaggggcaccctgcatgcctctccgctggcatcaggagaagaaagccatctgttagcagcctccccatggcccaggcctctgatcaatatcagaccctcctagctaaggcctgcctcctcgctcacacccccaccgttctttactttcctc

SEQ ID NO: 2534 - DNA, 201 bp, Bos taurus
ctacctttgcacggccctgtttgcattagaaagtttggcttaaggtcaggaagaatgtcagaacagggagacttctaagagacagccggttccatccattcctcttggaagtggagaatgtggcccagagaagacacccaagatcaaagagaaagtaacatgaatggggcaggaacccaggcctcctgactcccagtgcct

SEQ ID NO: 2535 - DNA, 201 bp, Bos taurus
tatcttgactgcccactgtcatcccacccctgcctgggtatagttaggtgccaccctagtaccgtatagacctcaaagcactgatcacaacaggccaagttctgtgattagcctcccctgccctcaccagattatgaacttcctgaaaggcaggggctccctcatcaagctcttgccataggcctgacatcaatggaaact

SEQ ID NO: 2536 - DNA, 201 bp, Bos taurus
gcagagcatttcagcgtcggggaagccaatacaatttgagttagtcgtgatggctgccactttaaataccgcggtgagtgtccgtcagcgactaatgtgccgcacagggcctcgcagagaacctgatcaccccagcgcttcagtcgattctgaccccgagctacagaaaatgaacttaaatctagtgggctgtcgccacgt

SEQ ID NO: 2537 - DNA, 201 bp, Bos taurus
tgtagctcacaggcacggagggttccctggagggggtagagagggaagctcagatgggcaggacaccccagaaggacagtaccatccagttcaagcacgcccaggaaaaggccccatagttggtaggtggggtaagaccccttcccaacccagccctgtcatgtactgtcttgttgcccagtacggggagctcctcatgct

SEQ ID NO: 2538 - DNA, 201 bp, Bos taurus
acaggggatttaatgtcacagcctgcagagagaactcaggcagccagcgtcaatatttgccatgtcccagcctccctggccccagctccaagatcagtacgttaagtacaacaggttcttctctgtgcaaatacacagggatagataaatggaatttaaaatggctcaggcttcgccacagggtctggactggaaatctgg

SEQ ID NO: 2539 - DNA, 201 bp, Bos taurus
gcacttagcactgtgtactgtctgttcacttgttaatatttccaaagttgtgagctctttgagggcaaggcacttgttggattcatctctcttttttcagaccaacacaatgcctagcttgagtaagccctcagtagatatttgctgaaccaaacgagaggaagactgagacctcagaagaacagacttagggctctgagc

SEQ ID NO: 2540 - DNA, 201 bp, Bos taurus
tataaagcatttggaatcatgtgggcaggctgtgaacgctgcaaaaatctctttgaaggggtaggcccaacgcctgtgggaggttttgcgggtctttaataagaaacccctcagggatggagttgcccctgtggaggctgtcctgcttctcgtcactgcacctaaacagctgcaagtaacaacagacattttgataaagcc

SEQ ID NO: 2541 - DNA, 201 bp, Bos taurus
cacagaggcgggcacagctgaagcgacaaagcacgcacacgcaagagtggtttttattctgtcgtttctactttcatttttgtctccatgtttcctgtaggggtcacatgggatttattggaaaaaaataacttccattaaattttttttgaatttgaatcaaagaagagagggttaggttggttacttgatatgggctag

SEQ ID NO: 2542 - DNA, 201 bp, Bos taurus
agaaacaggatttgcttctcagtttggggccccaggtctcttaaatgcttagattgtagtcttcccacaggattaagtagtgatttctgttttcataggcggtttcataggcctcttgacactgtgaggggcctcttgaatctctcgttgctctaccacgtctggctgtgtggtgtctttgtcctgatgacttggtacgtc

SEQ ID NO: 2543 - DNA, 201 bp, Bos taurus
tggcctttgtgtttgaagacagttctgcagcaaggttcctgatgacaaggcaggctccttgggggtgtggtgctacacgtggtgtgaatccccaggaaagagtgcagactgtctccagggcctgatctgctggggagcatagttgggaatgctggaggtacttataacccccagaagtttgggaggacaggcttgactgaa

SEQ ID NO: 2544 - DNA, 201 bp, Bos taurus
gggcacacgatggtggagggtggacgtggacactgggctccttgctctcaggctcggtgctgcctcagaagcccactagggttgggatgcggccatgctgtggaaaaaagggagggtgatcacgttcagaattggcatggctacttacagactccatgatctgcagtgacccctgttagcctgagggacagacctgggctc

SEQ ID NO: 2545 - DNA, 201 bp, Bos taurus
ataatttgggaatgtagccacttggcgaagtaatttgtggctaattggcttttgatgaattggtcatttgacacattgatttttggccaactggcacttgataattgatgttcgtcaaattggactgcctcccacagtgggcttggggcttgatgtctggggccaggctgtgaggcccacatgggcgcctggcaggctgag

SEQ ID NO: 2546 - DNA, 201 bp, Bos taurus
ggcccttccctcatcaactacttcttatttctgtccgacccttcagagctcagttttcaaaacagcagttcacactcatctactgtctttcccttcctgcctcaccatcactccagagccctcttgttcttaaatccacttgactttcatgtgcgttctaagtcacttcagtcgtgtccaactgtttgcgaccctatggac

SEQ ID NO: 2547 - DNA, 201 bp, Bos taurus
gctcccctgttctcttatccccatccctggccgacagctctattctcaaggctcccagatgctacctctgtgactactacagtgcctgctcagacccacatggccagcatcccactggacgagtgcccgaatgccacaggcagctaaaccacacttttccaaagctggaagccggtgtctgcacacaccctctctttctcc

SEQ ID NO: 2548 - DNA, 201 bp, Bos taurus
ggtacgggacttggcggccttgtggggagctataaggcacctggtgggaattatccttttggtgaacaaggctcttcagcgagatgctggctgcatacttatgtgctttttgttggtgattctggtttttacaataacccaatgtggggtgctaaagcactacctagtgatcacatgcaggaaggctgggatgtgcctttt

SEQ ID NO: 2549 - DNA, 201 bp, Bos taurus
gcctgtgggcccatcatgatccaccctaccacatacaggttgggcctctgaccttcaccccaactctctcctggctccagcctgctggcctccatacagtcctccaaatgtccttaggatcctatctcagcaccttgtcctccttgctgcctctgtcaagatagtccttcccttgctccatttacacctctgcagagggcc

SEQ ID NO: 2550 - DNA, 201 bp, Bos taurus
ccgttgagcagccacaggtcatggtgggccagcaacaggtctgggacaccacaggtctgaggtgtcccagcacctcagattgccattccaggatcttcagaacatggccctgcctctcctgcagctcccacattcacctgccctgcttattgtctgtttcgtgttcctccctccaggccttgggatgtgctgttccttctg

SEQ ID NO: 2551 - DNA, 201 bp, Bos taurus
gctgtctggcctgggggcccatctatctcctaccccaaaaccagtaagggggaggcaggttgctcagtgtgtttgaggattggaccccaaagttcctgcaccccagtagaggctcccctggcctaaatcctttggtaggtgaccaccttacctgccgcccccaccgtaattgtgaagggattctgcgtcaatatcggtccc

SEQ ID NO: 2552 - DNA, 201 bp, Bos taurus
gaaactggaaaaattagtagccacaggcctgaaggaatcaccatcatcaccattatttttagttgggagagcttaaaaaaatcaaagtatcttgatttacgtaatagcgggtttaaggagctaagaacagttaaatagtcaggactgccacctgctgacttatgcagtcattggtgtgggctgctttttttgtttttagag

SEQ ID NO: 2553 - DNA, 201 bp, Bos taurus
tgagtaggagttagctggatgatgaactggaaaaatgaacgcgaagagacagtgggagtggcattggcatgtggggaggcccataggccttaagagcccagtgttattcagagaactgagaggtatatcttgactggagcatgtcgtatgggacatgagacaaagctgagagactgctggaggccagctcatctaagactt

SEQ ID NO: 2554 - DNA, 201 bp, Bos taurus
cggcctgtgtagatttagggatgattcaggcacatcacattcattgtgcactttatttctattattattatgtaagctccacctccagtcgtgaggaggttgggggcctctccaatagatcacctttggagaccaggcaatcttatataagggaatagctctggtttgattccattttctgagtcccattcagaagaatgg

SEQ ID NO: 2555 - DNA, 201 bp, Bos taurus
tccatggacttcccatctatgggacttaggacactaaaacagaaacaaaggagagagatggaagcagctcttagaagaactacttctctcttatcatacactgggtgccttgctgaaaagacctatgcaaaacatcacaaagaagaagccactgccccaaaatgtacacgaacagagctctcagggaggggcctgtgcact

SEQ ID NO: 2556 - DNA, 201 bp, Bos taurus
gaccttagtctatgcacatgtgcagcagagaccttagtgggcccaagccaactaatccttggtcaacagggtcagagcctatgcatgtgccaaggagacaggagagagtccagtggaaaataaaggaataacatttgaatcccagtccacacatcaagaaagtatagatgccttattgccttgaggtatgtgaatacaatc

SEQ ID NO: 2557 - DNA, 201 bp, Bos taurus
tcaaatatctgactacggtatcaaatcatgatcactaacttttctttttacattaatactaggacaaatcatttacctactaaaatttagaatatgtcctatttctatcaggtatgttattaagatagttagcatgactttaaaatcctcttgtcattcatcctatggatctatttagggagacaattttgtaacgaggac

SEQ ID NO: 2558 - DNA, 201 bp, Bos taurus
ataggtaccatgtctaccctacctgtaggaacacatctgggattctaggcttctctgtcaccgtggggactcaggcaaccaaatacaagtgagtaaacaagtgagatgatgggcccagctatcgtttttcttggcatagagaataggggctgcatccttgccctgaccatttgcttcccatttagtcacagctgcagcagg

SEQ ID NO: 2559 - DNA, 201 bp, Bos taurus
ttccactgttgtaaaactaagcaaatgcctctgtaactgaatatttgtggtttccacaggctactggatactctgtattcctacaacactcagtttgtagtgtggacccatttgccaaattcttctcgaattgcctgcaacctgagttctttccctctcaccttattgtagcctcttgttatctactcttattgtttaaaa

SEQ ID NO: 2560 - DNA, 201 bp, Bos taurus
atgtaacatatcataataaaaaagcttagaaaatattttagaaatgttgaaattgagatgcctgtggaccattatagtgggaaaaatgacaaaaagtcatattttaaaatacacgaacattcatttagatgaattaaaattttgggagaaagagccctctccaggtaagctcagtcagtcagtcagttcagtctctcagtc

SEQ ID NO: 2561 - DNA, 201 bp, Bos taurus
attgactgaatggtgtttatcaactattttatgttgtgatccacacatatgtactgtatgtgtctttgtttattaatttattgaggaagcctagagaagagaggtttgttttcacatcttgagcattattataaataactttcagaataggtagatactgaagttttctaatttagaaaatgtccatttgggctaattagt

SEQ ID NO: 2562 - DNA, 201 bp, Bos taurus
ttctgcatgttttcctcattgtgtttaatcatttacagcatttgattctgaagtgagagatatatgaccctttctttcacttgaacagttggaggccattgtaagtttaataattgtcctaatttccatactattgtgactcagggattagggagacccaaggaaagagaaaggggaatggcctgatggtggatcagtcag

SEQ ID NO: 2563 - DNA, 201 bp, Bos taurus
ccttcctggcttcttttcttccttcactttttgcacgtctcctctttagctagtatttaatatcactcatgaggctaatgctgtgatgggcatctactgtatgatatccgcttaatccattggtgtgaaagcaacaaggacttattttctcccttttgtaggaaacagcattccaactgttttttgacatctttaatttca

SEQ ID NO: 2564 - DNA, 201 bp, Bos taurus
attataaaatcctttcctggtacacctcaggataatccaatgttttaatacttaggcaacactggcttataaagtccatggttgaatataagccttgaaaagtttgtttctctctcttttgtgtgtgtgtgtgtgtgtgtgcgcgcgtgtgttttgttcgtatatatttatatatataatttaataaataaggatgggaaa

SEQ ID NO: 2565 - DNA, 201 bp, Bos taurus
ccccccactcccctgccgccaacgcacagaaaacagcaaatgtggcaccacctttatgcgtcacatgggctcccagccactcccagacctgcagactgctgtagggccctgtaatttgtcctgacttcctctactcattggccgtgctagcagcaacatgcgggcacaaactacgtcttattctctttagcttcctcacag

SEQ ID NO: 2566 - DNA, 201 bp, Bos taurus
ggacatgactgagcaactaagtacagcccatgaagctgtatttttaaaaacatggagatttcacatagaagtataaatttctggcctctctttaagaatcaggagacttggccaaagtggacctgcactgatgcattttcacttttggctggagctgagtagctgttgcccaccttgttgttgttcagtcactgagttgtg

SEQ ID NO: 2567 - DNA, 201 bp, Bos taurus
aacctagggaaaaactgatgtttcagttcaagttggaaggctgttatagcaaaagttcttcttacttgtggtaggtcagtcttttaggctttcaactgattggacaaggcccacctacatttggagaacaatttattctgaatccactgatttattaatgaatgtcaacattaaagaaataaataaatgactcttttgtga

SEQ ID NO: 2568 - DNA, 201 bp, Bos taurus
aacaaaatgtgttttataagtgaaggaagtcaagaacccaggaatggggtgttgggtatagtttttttgattctgtccttcatctcacggcccacattcagttaatacagatttttcttcctaatctatttcctcttctctatattgcctttttggcatctgcatttggatactaatctgcacctgaaacttaacatggcc

SEQ ID NO: 2569 - DNA, 201 bp, Bos taurus
ggataaactctactgatatgtcattgataccaagttctgaaggtcataataaggtattttgtccttcataaagttttctgttgaagcctcgtcttttatccaaaaggaaatagcatcatttattcattcagaaattacttgttaaacacccaaagtatgttttacacatggcaaaatactttaagagattagacaatcagg

SEQ ID NO: 2570 - DNA, 201 bp, Bos taurus
aggtcatggtccctgtttggtggttggctgcccatctgatccactacagcttcctgattcccagccaaacctttacatctgagaagtatgctagcacatcaatgagatgtgctgaaaactgcaattcctgcagccagtgttagtcaacagaaggggcccaattcttctccataacaacaaaagttgaacaaattgggctac

SEQ ID NO: 2571 - DNA, 201 bp, Bos taurus
ctcatggaagcaattttaagcccattaaatattgtagattcagtgatttgtgaaacttctgaaactttgggcttgctgaaacaatctcagtaagaaccctgggaaaaggcaagtgaaaaaaggttaaaattgaggaatgagttctaaaataaatctgaagattatatggatatgcaaattgttaaaagggcattgcctgaa

SEQ ID NO: 2572 - DNA, 201 bp, Bos taurus
caaatgttttgaagctacttttaaattaggaggcaagattccttttcaccccttacctaaacaaaaaataaatagtttcaaggatttcaaaggaaagtatggaattattgttagattggccaatagaaaacaacccatctgtcttgctcagcactgtgacaaaggagtatttttggaatctttgacagccaagcttttgtg

SEQ ID NO: 2573 - DNA, 201 bp, Bos taurus
tgggatttgccaggcaagagtactggagtgggttgccattgccttctccaaataaggggcatagtaaggggcattttacaggtgttggccatgataaggagagaacaaataataatatagtcacagcacagagtgtggaagaaacaggatttaaatccaagtaaatctgattgtagaatccattatttcttgttgatacta

SEQ ID NO: 2574 - DNA, 201 bp, Bos taurus
tgctggcctgtggaccaggttcaaggcatttattgccatcggggattacaacggacatgtcgatctgggtaacgagtgttctaaagaagtacccactgccatctgtggagccatcatcctggccaagctgtccatcgtccctgtgtgaagaggctactggaggagcaagatcggcaagccccacgcagttctttgcaaggt

SEQ ID NO: 2575 - DNA, 201 bp, Bos taurus
ctccttccaggcaagggctggcccctgtgaacacctgctgtgggcctgatactagctgcttttcgtagagaaaaccacctcaggagtagacaggatcatcggatgaggacgcgggcccagagaggaaatgaatgtctcagacaacaggagagactgataaagatttggagttaggagagatgctggcttattcgggaacca

SEQ ID NO: 2576 - DNA, 201 bp, Bos taurus
ttctgtgccctggacccactctgtgcaggccctggtgaggactcagctcatggagaggtggcagacctccctccaggagacgggggagatgagatgtgtccggggacagggtgcagattgcaggcctgtacttgtctcgtgtcaggtcatccctaaacacctccttggtgccaaggaaacggtgtgggtttgaaatgaggc

SEQ ID NO: 2577 - DNA, 201 bp, Bos taurus
ttttctttctctctagattatagctttggctctggcagcaagcagaggggagagatggagctgtcacctcagagcaatattctcatcaagttggttgtttccttcaatttttctaacatcttttcatcctgaaagactctgaatacttctcagcaactgactagatacatactgtttcaactgcaggaggccccacaaagc

SEQ ID NO: 2578 - DNA, 201 bp, Bos taurus
ggtgttaaaaactgaatgtgtaaattttgagtttatataactaaaatttctctgagtctgtatgactgattgatgctataccactgattactatgtcttctgccttcctgagttttctgaacaagtgtaaggaaaaaagttccagataatggaatatgttttattgctaaccagggatatggactgaaatctctgatcttt

SEQ ID NO: 2579 - DNA, 201 bp, Bos taurus
agtgggagggatgacgaaggctttggggccacccttgattggctgcatgacatcccagcatgtcaactgttactcttatctgtcctgtgtcgtcaccacatggcaggcctcatgagggctgagaccttttctcttttactcacggctttatctccagcatttaaaacagtgcctggtacatagaagggatctgaacagtgg

SEQ ID NO: 2580 - DNA, 201 bp, Bos taurus
cctgacctcgcttaccggctgagttctaagccggcagtgtgtctccagtgaatcctgcaattacttaactttattgctggaaggactctcaccgctcatttctttcattcggttattgcacagaaggcaaacaagttcaaatgaaacattgtgagttttctcctactatcttgctttctgtgataaggactccttcctctg

SEQ ID NO: 2581 - DNA, 201 bp, Bos taurus
cagcagcggggagactggcttttacggcacgtaagagagccggctgcagcccagggcctcggtgggagagcggaattattaatagatcctaccgaggcctcgggaaaaatgcaggactacgtggagtttaaaaggtcagcgtgaataacaaaaacagactttctggggagtcagaatgggtttaaaatacactcagagggg

SEQ ID NO: 2582 - DNA, 201 bp, Bos taurus
gaggagcagtcaacttgtttcctctttgtgagcagcaagcagagagggaagaaggagaggaatgaggcaaagtagcagagaacagatgaggcagggcctcaggaggcaaccacatgagatgtgagtctggggacaatagaagcccccacagtattttcaacagaacctccacaccagtctacacttccagctttacaagat

SEQ ID NO: 2583 - DNA, 201 bp, Bos taurus
cagccatggcacaggccaaggtcccctcccagagggcgaagatggtcgggatggttgagacaccagcagagatataaggaaatgattttccagggactcatggccatgagtgctcacaacctggaggaagaacttggagacaagaccagacgaccccaggttctgagacagtccacagcctgtttacttggacctggagca

SEQ ID NO: 2584 - DNA, 201 bp, Bos taurus
ctcttggatctcacactgctctagttgccctggccttcctgtcccttgaacaaacctacttcatttctgcctcaggatacacttgctgtatcccattcctagaaaatgccccagataaccaaagggcttgctcttttgttcaggtccctgatcaaatatcatctgagagaggctttctatgaccagcgtatttcttcatag

SEQ ID NO: 2585 - DNA, 201 bp, Bos taurus
tcactttcacttagcagaaccttcaacatccctgagtctgcaaatttcaggcatcacgagtgtgtatgggaggctggcgtaacacatgaggagtgctccccgccagaagttgtacatgacatttttgtaaatcaaatccttatccttcatcttttaaagaaattctactgcaagtcccttggtaatgtggagaatcctttt

SEQ ID NO: 2586 - DNA, 201 bp, Bos taurus
agggggctgggctgaaatctagttctttctgcacctgtcaactctggggcaagtatgcatctgcccccagttctcatactggtggcccggtcctgggtgccagcagcagccctgcaggacacactgaatgaacaggagcagctcccagatggagagagggatggggaggcctgagataggctggcgaggtcagcagagccc

SEQ ID NO: 2587 - DNA, 201 bp, Bos taurus
acaatgtcgttcactataggtactgtgttgtgcagcagatctttagaacttattcatcttgcataactactttatacccattgaacagtcccccagggggtcctttttttttaaatgtatgtccatgtttactctgttcctccatttattcctatgttacctgaatatttttagcttgtcattactatgacaatcactatg

SEQ ID NO: 2588 - DNA, 201 bp, Bos taurus
aaaggagttggatgaagcagaagagagagaaggggagggaataacagcggggaggaggaggggagacagcacctgctctatggggccgagaccctagcaaagacagtgtgtccagcccccctgcagcttcacactctggagtcactcaagccccacaccctgcctggcgcctgaggctcccatgacagctgagtcagaaga

SEQ ID NO: 2589 - DNA, 201 bp, Bos taurus
attgttaggagacaatcacaggttgaacagatctgaggcctctctttctctgcagcacgattagagcagagtggagacaaagagaagaactagaagtagcccaagccccatgcaggctggcccagtacctctctcccctctccttcctaatctcctgcaccttgggtgtctcaaggtcctctccacctgcctgtgcattcc

SEQ ID NO: 2590 - DNA, 201 bp, Bos taurus
acctcggcccggaggtcttcatctgatagcttgatgccttcttcatcctgggtcaggaaagcacaatgggacagcccaaggcatgtgaggtaggttccaacaaggcctcacaagagtagctgtcaaatgaaggtctgggagagggagggaaattccttttcagactaggggttcggagcgtctctttgattcctatctgtt

SEQ ID NO: 2591 - DNA, 201 bp, Bos taurus
cttcaatacttcccctgcccatgtgtctgacattattggtctcctctcttttctaacacatttgctcctaacacaattttccctcctatttctcagatgagccccctaattcccacaagtgctaaatattgaaggatccacagggttcagtctttggaacttttcttctatttccactcatcccattagtcatctcatcca

SEQ ID NO: 2592 - DNA, 201 bp, Bos taurus
tggatagcacctcatctttcattgccttggccttcagctgttcctctagttttggtgaaatggtagctgccagttagccacactggccatttgtgaggccgtgaccattgtccagatacttgtgatcaggatagttcagtacctgggagagtagctctacccagatcacttcacccagaacacagcttgttgtctgtttaa

SEQ ID NO: 2593 - DNA, 201 bp, Bos taurus
attagtactcattgcctataccaacctctgttcctgttaacagaatcagcacaccttgaaggagagcaatggaagcaaccagatcattccatcaccttctactatatctgaacttgacaataaaacccacagtgagaatttgaaacaggtacttttgattctgtttaactcccttgtgaccacactataatctgaaggtga

SEQ ID NO: 2594 - DNA, 201 bp, Bos taurus
ccaagaagaactccaccacaggggtgaccaggttgtctttagatcctgcagacttcacccatgacactataggcctcatggcccaggagctggagcccccatatgacattttcaccagagtgtacacagcctgaagaattcttaacaaatggcagccccaacctgaacttcaggcctgaagaccagccccattttgacaca

SEQ ID NO: 2595 - DNA, 201 bp, Bos taurus
aaggatattaaaagatatgaatgaatagccagatgaacagacacacagagggaggaagtctggaagagcggtgaacactggagcttctggcccagaggagcttcgagtgtgcctcttcctgacttcctgctcactaaccaggaagttctccaaaccctcccaaaccttttgtgtttctaaggaggcttttgacacaggtag

SEQ ID NO: 2596 - DNA, 201 bp, Bos taurus
acccccactcatctctgagaggaacagggagtgacctcatttccctcaccctcagctccttagtcataaagttccctccctcccagtccaacctgtcgctttgcaggcctcattcccagcttctgtggccttagaacagcaggcccagggagaaccgctggagataaggactagctcaggggccagtagcatgagatgcca

SEQ ID NO: 2597 - DNA, 201 bp, Bos taurus
ttgcattgtgtcaaccacaaatgtcttcagacattgtctgatagcctctagggagcagatcgccccctgttgagaaccactggtttagacagatgcatatagtcgattcactaccacaaccatgaaaatacagaatagttgtattatcctaaaaacgtccctcatactgcacctgtgtaatcaacaccctcctccatccca

SEQ ID NO: 2598 - DNA, 201 bp, Bos taurus
aacccagaaatatgtgtgcctaggggaaaatgaagttctcaggtggggacttaggagagtggtgctccttaaacagtccatacacaaggtccccaagtctgcaaagcatgcccaaccctttcacagggtaggaattatgtccatctctttgttagttttcacatgtcccctacaacttgtaaacttatagctcagaagttt

SEQ ID NO: 2599 - DNA, 201 bp, Bos taurus
ggtgacgtactagaggtcacaatcaaactcttgcggttacttgtccgacagctgcaatgaaaacacaagtgtcagttataacagggttgcatcatgggcccatagagcttgagtggctatcgagagacaaagtcacatcatttcatgagccgagcagtgtaatacttggaactgggttaccaattactgtttgcacagtga

SEQ ID NO: 2600 - DNA, 201 bp, Bos taurus
atgttaagagcttcaattttaacattcgcaaaaagcatgattactaaactcagtaaactccagaacacaagcataagactgtgatgggtatttaattggcagcttcccctcaaatgttagacaaaaattgacataaaggagaggatttgaggtagggagtgatgagggagagtggaagagctgacctagtgagagaagttg

SEQ ID NO: 2601 - DNA, 201 bp, Bos taurus
atgctcacataatctcccagaggtctaaaaggacccaggggtgctgtagtgtgtgaatgtgcgggctgaaaccactatagatcttttttctattattaatgagtatgaagccagttgaaaaagaagccactagctgagcaagactcaagatcacccaactgtgaaacccatccaacctatggatttccatacttgtgagtc

SEQ ID NO: 2602 - DNA, 201 bp, Bos taurus
atatctactaatggtcatgctaaaaggaaaggtggggaatccagggtaaagcaagaagagttctttgtactttttcaacttctctataaatttgatgtcttgtatttacaataatattacaaaagcacacttaggagccaacctcaataaaatctcactgaccaaaagaagggacaatgtgaacatcaacaaagataataa

SEQ ID NO: 2603 - DNA, 201 bp, Bos taurus
tgggctctgctagtgctggactttgggagtctgatttcttttttctaagggacttgacagataagcctttgcgataaggctgtccttttagtcatagaccgactgtagctaagctgcttggttgtgttctattagaggagagatactgaagtccatttctgaggggtgataggatagtaagatttcaaggtctccagaaat

SEQ ID NO: 2604 - DNA, 201 bp, Bos taurus
ttggacatggagaggccgggcagcccggccctccacaccggaacctcctgcaagcctgtccagcaacacccacctgcagggcctcgcaaaccagctccacgtccagtgccttcaccacaaactccaggcacagctgggaacagaaacgaaggtgggctgtgcccagatgtccctgttccaaggccccagccccaggccaga

SEQ ID NO: 2605 - DNA, 201 bp, Bos taurus
ggggtccctgtcgtgttgtttggagggtttggctcactgttgccagagcctggcaaggaagatgtgcccgaagagctgaagggagacatttggcagtactccggccccgcccgaggtgctctgccatccaggccaggcttgcattgcccctcctcccagccagagactggtcagccaagtcctgccccagggcccctaggg

SEQ ID NO: 2606 - DNA, 201 bp, Bos taurus
atgtggtgcctcccctgccccctccccaggccccccctccacaggctgcagtttcctggtggtccctcatcaggatgggcctcccaaggctctcactgtggctcctcactagtgctccctgaatgggaacaagcatttgctgtgtccgggtccgggccctgttgaaacttcaagtgaaagccgaacggcccttctttattc

SEQ ID NO: 2607 - DNA, 201 bp, Bos taurus
gtgacgcccactggccacccactcattctgagaacccctcagagcgatgatcccgtttcgggcgctagagggggtggggcccgtgcatgcacgtgcgtgtgctcactagcagggccagctggagctctcctggtcagtccagcctcttaccgaattgggcgtgaggggtgcgcccaccacatcgatgatggcgtccttgct

SEQ ID NO: 2608 - DNA, 201 bp, Bos taurus
tttatcaccgctactattcaaatggtatcatttactttctctaattcaaaaagagaaggaaagcaataagaggtataaacattagaaaagaagaggcaaattgtgattatttgcaaatgacactatcgcttacatagaaaaactcaagaaaatcaattgacaaactattagaattaataagaaaattcagcaaggtgacca

SEQ ID NO: 2609 - DNA, 201 bp, Bos taurus
ctctggaatcagaagccaggaaaataccccaagggcagtccttgtattccttctctggggatattgcctcaagaaccagtgagactgggcagctgccctggaggaagccagtggctaaacatggcccttcccttggcccctcccttccccacatggattctcctgttgctgttctcattcactgaaagactgattgaccta

SEQ ID NO: 2610 - DNA, 201 bp, Bos taurus
aaagcccaccatgaccaagaacaatatactaagtctcatgatacaactctccatggtttcgttattatccccactttacagatgaggaaactgaggccctgagatgttaagtagttgacccaacgttatacagcttctaagagtcagagccctcgtgcgaagcaggtggtttgatctggagcctgtgtgctgggcccatgc

SEQ ID NO: 2611 - DNA, 201 bp, Bos taurus
caagtgtcatgcaaatcagccaaaccaggattgtgtaaaccatttttggatttagtaagtgtggatctcagaaacagggtgaaacaaacgtacctaaaacaaacctgctccagctctaaagagccgcgcccctccctgaagctcactgacacgaggctgtgtctgagagcccagacaggcactggaggccccgttccttgg

SEQ ID NO: 2612 - DNA, 201 bp, Bos taurus
ttaggtcaccgctttcaggtggcaggaaaggtcaaacaagaaaggtttccccggacctgagaagcaggtctgcaaggacagggcccaaaatcagtaaaacatttatcctcagggctcagagatatctgtcctagagctgggcttgtgctggtcacctgccaggcccttgcaggcgggagccaaccccaggccctccctgca

SEQ ID NO: 2613 - DNA, 201 bp, Bos taurus
aggcctcagagaaagtgtgccatgcggcagaggtttgtgtgtttgtccaagttgacgaggggacagagactgggaggtggtccctcaacaatcagcctgatccaatttgagctgtgatcaggccagtgggcagagcctgcagaaagccccgaggggtggagaagcctgagggtgggcagaggccccggaccgccagaggcc

SEQ ID NO: 2614 - DNA, 201 bp, Bos taurus
ggcatgctgcaatccatggggtagcaaagagttggacacaactgagcaactgaactgaactgaactgaaccgcatccagtgatcacacagatgtttaatcttttcgataaccaccagggtgagctgtttccttaatgaagagacacaggtttgttacattcagcaactcatgtgaagtcactcagccaggaaaccttaaga

SEQ ID NO: 2615 - DNA, 201 bp, Bos taurus
ttggggcacagagagctcattagtaaggcactgggttttcctcataggaattaaggcccccaggaggagcgcttcaaaggaaatatcctcagactcctgacccatcccttacacagagcccaacagcaggtaaagaatggcgggggtgcaacagcggggcccaaggtttggggcatcccgtcttctgcctgccctagtttt

SEQ ID NO: 2616 - DNA, 201 bp, Bos taurus
gggttagatggagggaggcttggcccatccatccttctctcaatggaccaagctgttgaggctttatgtcctgcctccttaccaggcttttctgggagacagaggggagggccatcttcctgcttcctgccactgtctctgtccctggtggggatgccaagatggaattctccaaatgttgtcaacaagaatcccacaaga

SEQ ID NO: 2617 - DNA, 201 bp, Bos taurus
ggggctcatgctctaaaaagccctgaactctccaaagggtttcaacaaaatattttttaaagccacatgcggggcagagcacagggccagttgggttgccaggtctgtgatcagcttgtgcacagttctctgattgggtgatggtgaggtaacacggtggtgttacaggggttaacattaacagtccttaggcttcaggag

SEQ ID NO: 2618 - DNA, 201 bp, Bos taurus
tgcactctgattttgtggagtacaaattaagagagtgaaatctatccctactgattgatagagctttaatatattcatccaacactgtggtgtgtgtgtgtggggggtgtgtgtgtgtggtcagtcgtgtctgattctttgcaatcccatggactgtaacctgccaggctcttctgttcgtggaattttccaggcaagaat

SEQ ID NO: 2619 - DNA, 201 bp, Bos taurus
tcttaggatttgggaggagagtcatctctcctctcaatcacctctcatggttggccacaagaaagaaagggtcgagtaacctgagctgcccttcctgaaacgaggtgttctattatctactgagcattgagttgggcatgggcagtagtactctgtcctcaaaccgaaatgctatggaaaatactgagcaagctgcatgag

SEQ ID NO: 2620 - DNA, 201 bp, Bos taurus
ggaagatagtgaagaacaggggagcctggcgtgctatagtccatggggtcacagagctggacacgacttagcgactgaacaacaattcacctttgaagccccaaaatcctgagggcctaccacacagtaggtatcaacaaaataagcattgccattcaggcatccatcatcctttttatagtgtgaagaaggctgatattc

SEQ ID NO: 2621 - DNA, 201 bp, Bos taurus
tttagctttacgtaagttagaagtaaataaataatgctctggaaaattgaaaaatacttattgggaagctctatattaaatctaaattcttgacatttccggtcccaaaaactttttttgagtacagcattttattgaatcagtttgtttcaatatcattggttacccctctaaatatgtgatttaaaaaaagattgacaa

SEQ ID NO: 2622 - DNA, 201 bp, Bos taurus
cttcagagtaaaacttcttaaaagagttgccttcatgctacctctatttttctgttttctatctacttttcaaaacatttcagcctggcctccaactccaacacaatgctgaaactgctcttgtcaagggtaccagtgacctcagtgttgtcagatccagtagacgctttcagcaaaatttgacacagttggcctcctact

SEQ ID NO: 2623 - DNA, 201 bp, Bos taurus
caaactcacatgagtggaaatactcaaggtattttttttttcctcaagctattttttaagtgggcagaatttgatgatttttttctcaaccaagtcttgctgttcataactctcccatgtgttgtggttcaggggcactgtgcctgcattatcacattaaggctggagaacagtcttaaacagcatgagactggaatatag

SEQ ID NO: 2624 - DNA, 201 bp, Bos taurus
tacctgctccccatcttaggaagctcaaggcaaggcctggctctgtctcaggagccataatattacagtggattttgctgcagtaggattggtgatgtgcatgtgaagtgagctggccctctgtgaccacagtccagggagggaggcggtacctaaaaaggcaaggagtggaaggatgatgagggacagggagcagggagg

SEQ ID NO: 2625 - DNA, 201 bp, Bos taurus
gccctctgtgtgcatgtgtgctttgggggccaggacctgtgtcccttccagcaaactgtgcttgaagtcaaattcaaaaatggacagtcaccagccttgcatgggccctgtcacggctgcatagcacaccatggtcactgtagactgcagtgcccagatgggaagggcaaaggcaacccacacacgcggagagcacgggca

SEQ ID NO: 2626 - DNA, 201 bp, Bos taurus
aggttaggacataagttgaaagggccctttgactgttaagcctccggacactgtggtcactcctcgccagggatacagccacctcctgtggggccaagccagtgccttcacagaacagggagccatagactatggtgcccaatgtgccacagagccataggctatggtgcccagttattcacggaggtggggatgaactct

SEQ ID NO: 2627 - DNA, 201 bp, Bos taurus
tggggtgtaactcccagtccttgaaaaatgtcttcagggaggttcagaagcgtctacttcccctttacattagatgattccaaaagagccatgtccctggtggccagcacctcatgttcgttctctgggtttgctttttcacgtccagtgcctgatcatggccaggttcaccgaactggaggcagatgagatctgacaagt

SEQ ID NO: 2628 - DNA, 201 bp, Bos taurus
atggcccctttaggtggcctggccgtcccatgcccagcaccctgggatctgggttcagccccagtctgccttgcaactttgtctccactggtcctctgggggctctacagggcctgagcacagcctacatgatgtggctgtaactgtggctgtaggcacaggccagctgactgtatccatgttctctgcacctgtctttca

SEQ ID NO: 2629 - DNA, 201 bp, Bos taurus
tgaaataattggtccctagattggcctctcatgtgaaactcttgccttgacaactgccttgcagctctgtctggtacccattatcctctggaactgatgggggcctgttggaactgagatcattgattgcctactcaacattaactcccttgttcctaacagaagtctgtgtgtgttcaaggaatcccctttcctaaatgg

SEQ ID NO: 2630 - DNA, 201 bp, Bos taurus
agggatccagcagagtgagccaggacagagaggccttggtgcagtgtggggtggagccagctcagactggctctggagcgcttgttgttcagtgatgccacgttagaagcttgaaactggccatggagggagaatatataccgcagttagcaaatgctgcaaatcagggctccacatccctgaaagcccattgtcgagcat

SEQ ID NO: 2631 - DNA, 201 bp, Bos taurus
gcatagagggtagcctcaaataccacactgaaagaaaattcagtagatttttagaatctcagagtttggaagaggccttaaaaaatctaccttggcctgcatttcaaaattccaacactttgtatttcttgtaaaatgtcttgtcttaaactttccccaaagttgttagggacttaaaacctcctcaagcaactcactcat

SEQ ID NO: 2632 - DNA, 201 bp, Bos taurus
aagttgaagccttgggcccatgcaaggcagaaaatggacctgggacagccacatgaaaaaacaaatggatccctcaaatgtttactcctcagtgaaaagacgaggaagagtctctgcctgggccatgggtaggggaactgagtcattcttctgataaaagctttcccccatggaaatccaaggttcagatatagtgtctgt

SEQ ID NO: 2633 - DNA, 201 bp, Bos taurus
tatattgtcccacattgaggccctctcactgtgtctcttcaccgccactggcagcagctccccaaggtcccgtggtgactgacgctgattaatcacaggacgcccaggagccagaggaggccgtcttgggaacacctggcccagagggccaggcatccaccatgctgagaactggcacatccgcagtcttgtgtctatttt

SEQ ID NO: 2634 - DNA, 201 bp, Bos taurus
accagggaagtcccctagaagcagagtttgaccaccttcttccaccaggtggtaatgtttatcatcatgatccagcagcagagcgatagctgtggcccgggtcctggactctcagcctgcttccagctctggaagcctgtcatcctggatgctaggaggctctggaagtcagggccagcttctaatcccagctgtgccacc

SEQ ID NO: 2635 - DNA, 201 bp, Bos taurus
aggagagagagctgaactatggatgccctttcgagaggcatctgctgaaatataattttcaaaaagtgtgtcaagagaaaggacatcacctgagccaatgggcagcatttatggcccaagacacactgaggtgcccaggaaggaggctgaaatggcagcctgcgaggcaggaaggaacccaggagcttgtgtcatggaacc

SEQ ID NO: 2636 - DNA, 201 bp, Bos taurus
atgatcttgataacataagtacttgagataaaaaaaatgcctgagagttctccctcccaccccttcgttttactcaaattgaccttaataggtttccaacatgtacactttccctctgatgtaagacactattcccagaaagaactttcttgacattgagggacaaaagggctgatgaaactagaaaacctgactcttgac

SEQ ID NO: 2637 - DNA, 201 bp, Bos taurus
gacagcccccacagcaaggccgtctctacaggggctcaaccggagaaccccctgaccactccttaaaattagaaggcacacatcactactcaactctgaacgcataaataacccatcagtctaacagcaacaccaaaattcacattgtctcgttataaaaaattttataaccctgaaaatttaagacccaaatgcccaaca

SEQ ID NO: 2638 - DNA, 201 bp, Bos taurus
tgacttcacccccagtgctttcgcaaactctgaatcacagcatcccaggcccctcagaaggccctgctgctgccgtaggccgctggggggacacttggaacgcagaaagaatcgagcgttcagcgcaggggaagtggatgagggctgcagagggcagtgaagaccggcccgagccggctcccaggtcatcacacctgatgg

SEQ ID NO: 2639 - DNA, 201 bp, Bos taurus
gttaataatatttatctctaagaagagggatttagttttcttctttaaacatctgctcaaattgaaacacttcatcctctctacactctccagacttaaagtcatttctgcattccccactgtgttgtattaatatgtgtagtaggtatacagtagcaggtgctgaataaaccactatatcctaaacttctgccacacttg

SEQ ID NO: 2640 - DNA, 201 bp, Bos taurus
attagtgcatttccaaatatgagggtgaaagtgactaccagaagatgtgaaataaatgtaaaggataacaaactcacacctatttggttcatactgccataatttcatcttcaaagaagaagatttatattgaagttaacagataaccctccatgaaataatcaagaggagctcagacttttcactctttctttatttttg

SEQ ID NO: 2641 - DNA, 201 bp, Bos taurus
atataccataaatagtacaataggtagccactgccttcagcaaataaggtgagtttaattctgggattgatttatatatgtgtgtttgttaaaattggccattttaaggggctccagaaaatatacctaaaagcagaatataggatgaaaatgtatctacaaatttatctacatatctgatagaatgtgctggtagagact

SEQ ID NO: 2642 - DNA, 201 bp, Bos taurus
gggatcttcccaacctagggatcaaacccaggtctcctgcattgcaggcagattctttaccatctgagccaaacctttgggaccactaaaaggcccccttgcaaagttagcccagagtgccctctgctgacactgcttcttattgcgcctcctgtctctgaccttatgtggcctacattaattgagagtggtttggctgca

SEQ ID NO: 2643 - DNA, 201 bp, Bos taurus
actcctgggaacccctcggtggaggaaggaagctccccagaacctgcccttggctggaacctccagcccagagtcaaaccccaagctcagcccagaatccaaccagggcccctccccaggcctccagcgagcctttctctcaccttgacccctggcccccctcagtaagcttctacctcttctctgagcccccactgctct

SEQ ID NO: 2644 - DNA, 201 bp, Bos taurus
agggccaggtcttgcctccagggaggcctggctccaaacatagtctcctgccaagctgtccctctgtgggggcctcaaccatgaaccaggggactgatatttgttgccatgatcatgaggccagtcctcaatggggctgttccatccttgcccagaaggtgactgagagagggcaggagtggagaggcagtgagaatgtga

SEQ ID NO: 2645 - DNA, 201 bp, Bos taurus
tcacacgcccccatggcagagcggagcggggctgccctgggcctcagcttggaggagagagccgcatgggcggactaagaatggggggcaggagggccggcaaacagcagcaagtggaagccaaagccctaggttcccaggaggaacgtccacaagtgagcagacgtgatcctcccctgactctcagctccgagccaacat

SEQ ID NO: 2646 - DNA, 201 bp, Bos taurus
gaagtttcagagctgtttctggcttcctgtgtgtgcagatgaggcaggagatatggaaacccttagcgtacaggtgctggctgaagccaaaagctagatatggccttgggtgtgaggagagggttaagaatggaactttagggaacagcaacattaacaagtgaataaaggaagaagagggcttccctggtggctcagtgg

SEQ ID NO: 2647 - DNA, 201 bp, Bos taurus
tttcaatttataagcaaaacaaaactggtgtacaaatggattctgttggccaattcttttacaaatgggtaacgatttttttaagaaggatctaaggcaacggcaccccactccagtactcttgcctggaaaatcccatggacggaggaacctggtaggctgctgtccatggggtcgctaggagtcgggtacaggcctgag

SEQ ID NO: 2648 - DNA, 201 bp, Bos taurus
agggagccccctggctggagagaagccgagctgggcctgtgccgcggctggagaaggacccagagacgctgaaggttagggagcgagccaaagacctagataggtcgcagggccagacacggtcaggaggaagccggggcaagatccagacgggctgccgggcgaggccaagggaacactcagaccacaaagaatcccagg

SEQ ID NO: 2649 - DNA, 201 bp, Bos taurus
ccacttgaccttggctgatgggggtagaggcaggcttggagtagagggaatattgtctaaaggttgtctttctaagctgctccttttctggctctttgaccggagaaagcaggcttttcttggggcttttttctgtacccattacattttgaggttgctggcttctccagtacccaatcaaacatatttgaggcaaagaga

SEQ ID NO: 2650 - DNA, 201 bp, Bos taurus
tgacctgggttcactctcaggcctcttcagagattcgagggtaagagttgattatgtcttaattcgtcttgtctggctgtctcctggatttagctgaacacggcccaggagacatctgccagttgactgctattttctgaaccagacctcttttctgaccaagacccgtttgtgaggactaaggctgtgctctgtgcggca

SEQ ID NO: 2651 - DNA, 201 bp, Bos taurus
ggagttgctgccacccacatgcaggccttcaacgcggagactccaaaattgtttttcctaccgtgcactcccatgggacaagagttatcaggaccatgcccgctggccttttgttggtctgggaggggtggggctcccttcacagctggattcctattatgagcggaatggcatctgtatccagaggtaacatgtgattaa

SEQ ID NO: 2652 - DNA, 201 bp, Bos taurus
atgaaaggcctgtcagtgaatcgctgggaaaacattcccaaacaaatgccctctaacgaggggtgctgagagcagaggggcctcgggaacgggtaaggtcgtggttttgttgtgagcggtttggtcgaagggaaacgccagaccccgtgcctttgtgtgcaaatttcccacccgggccaagcgactttccccaatttaatt

SEQ ID NO: 2653 - DNA, 201 bp, Bos taurus
cttccttctcatcatctttcaagtatgtgttcaagcccaggcatggaaaataggttcatcccaccagccaagtcagttgatttctagtggctccctggccgctagggacaaagatgctgaggcttaacctgggctcgacagactgatcagagatgcctgccagtgctggggatccagcagggtaggacacgtgattgccat

SEQ ID NO: 2654 - DNA, 201 bp, Bos taurus
aagctctcccactgactcacaacacagccttgtgtgaaagtcccttccctagaagcctcagtttccttacctgtaaaatggaacaatgaggccagccagtctgccctctggaggcagtggacaccgtcacatcatgcgtctgaaggctggtgtcaaccccagagaccaatgtctctctctggtgtgacttgcatccctctg

SEQ ID NO: 2655 - DNA, 201 bp, Bos taurus
atggcccatgccttcttcaggatctgctctaaggccaccttatctgagtcccttcctaatctgataaaagagcatctcctcccctggccttctccactcccctcactctcttatatactgtatatttatttggttttatgtctggcgccctttctctggtatcagggactttattattgtatccctgggcctggaacaggg

SEQ ID NO: 2656 - DNA, 201 bp, Bos taurus
tggaaataataacttagtttgtagcatcaccttgaagcatagaaataacatctgtcgaatgctgagtgcaaagcctagagcttagtgggtgctcaaaacacggccttatctatgttacatgttctgtgcatatgtatgggctgcgggacaatggcagagagaactaggtggtgcctgggaaagcgcccaaggtccatgggg

SEQ ID NO: 2657 - DNA, 201 bp, Bos taurus
gccccatgggccgcactttctcttacttgtcattgaagcctctgcagagaaatgcacacagagatttgctgttggttaagtgagaggcagacagcaggacgcttagaaggccctttgcaaatgtgcccttcactaaagtgataaggaaggaatatatgagttatgggaatggaaccatagacgcctacaaacgggacacct

SEQ ID NO: 2658 - DNA, 201 bp, Bos taurus
cacatgtgatcaagcccctctgatgtcacttccaaacacacagagttgttaaatgaataagtgggtgggcagcaggggtgactgtgctcctggccaagccggcatcaccacccttcctctccaggctcttagctgatctgcctcatgctccctgcccccaagggatggcttagccccttccctgtcctttgtgagatctgc

SEQ ID NO: 2659 - DNA, 201 bp, Bos taurus
aataactggagtatcagtggccagtccgctcttctgcctgttctccaaaaggtcatttgtttccatcagactttggatttgtgctgggcaagaagtaaccatctctggcaagacctggcatctgggctgctgtttggttggatggaggcagctcccgtttaatttcaagcagtgattgccaggcttccctgattgataatc

SEQ ID NO: 2660 - DNA, 201 bp, Bos taurus
cacctgaccttgagctggatttatcagtccccaggaggccagtcacagacaggaccggctggtgctggctttcctggacccatccagccatcagaccatgggagccattagaaagtttcgggcctggtagtgaatgcctctggctgtcccagtgctgcagggatattagccgtatggtgggacccgggacagttgaagcac

SEQ ID NO: 2661 - DNA, 201 bp, Bos taurus
aggggccccatcctgcactctccggggagagggagagaggggatggaaatactaggtcgggggaagaagaccactgacaggcccacggagaagcccttagtataactcgtcaggaaactggagtgggattagggcaggatgcatgatcaagaaaaggtggcattagagttgatacagcaccgcacgccactaacagggcca

SEQ ID NO: 2662 - DNA, 201 bp, Bos taurus
ccatcgagtctgcctcttcaatgtccacgccctcctgtccactccggtcgctcagctcaggccttcatactttttgttggcccttgcctcgcagttgacgcgaccacctcttctcacacctgctccagacagttctacactccaagtttgaaaacccacattcctgagcttctgactttggggccggtctctcttggccag

SEQ ID NO: 2663 - DNA, 201 bp, Bos taurus
gttgacggtgactgatagagccggcaggagagaatggccagggagatcctccagagccactcggtaagccctctcatgggagaggatcagttgcagagtctgtggctttcggtccagctttgggccaggcttctctctggttttgcctgagtcagcgcctgggaaaagggcagcttcccttcctcatcttccctcttctca

SEQ ID NO: 2664 - DNA, 201 bp, Bos taurus
agcagcccccgggcgccttacccagccagactgtatctgtgccccgggcaaggtgctggggctccagtggtggcccaaaccagtactgcccatccaggtccaaaacgtggggtctcatggaggaagatggcagtcagcacactaattactctgagattagtgcttggaaggacagaaacgtgatttctgtgagtgtgagga

SEQ ID NO: 2665 - DNA, 201 bp, Bos taurus
aagttgggggtaattagtggaccaaatggtaaaggttggtttccacgtctgcctccctcacctttctgctttcccttgggctcacaggacccatcccaatacccagtgctcaggaggtgcctgggaccagccggaaggaaagacatacgcatgggcacagtgggatgcccaggtgggatccccaacagggtaggcaattgg

SEQ ID NO: 2666 - DNA, 201 bp, Bos taurus
agcacccagcatggggttgggtgcagtcacaccagagtgtgagggaatgagcgcacggctgatggagtgaatgttggggcccgatgtggaaagcgtgtggtgtctggacctgccaagaaaagtgtgctgcaccacccttggtttctccaggggggccctcgcccttcctctcctcctagtaccacagcctactttccagca

SEQ ID NO: 2667 - DNA, 201 bp, Bos taurus
agagcgcggccgggccggtggggagacaggagcaagcggggcagccgatcccgcagaaatgtctccacaacaggaagcgtctcataacatacctgtggttaggccaggccccggggctgcctgagcttcccgcggctccctcagctgcagccgcccttctggggtagggggcttggagcagcaggagcctgcgcagagctg

SEQ ID NO: 2668 - DNA, 201 bp, Bos taurus
tcctttgactgataaaatgtggtctgagatgtgccacttctaggcagaagctttaagagccagaatatggcttgacatgtatcttttttctcctctgctacaatgactggccaagttccagacagatgcttctccaacatcctaggttccaaagggagcacagcgaggtcacagctgcaggagggccacaatgaatgtgta

SEQ ID NO: 2669 - DNA, 201 bp, Bos taurus
tgactctacgaggccgtttttctggtttaatatccacatcatagtgatacacatctattttgggaatctgaacctggaaatggttggctaacagtcgaatgggttttccgacagttccaaggccaggacgacgaggtggctgaaacaggctggctggaggtcctgaagagattgaaagattatttgatgtactattgtttg

SEQ ID NO: 2670 - DNA, 201 bp, Bos taurus
gaaagaaaagtgggcctggaggaatcaggctccctgacttcagactacactacaaagctacagtaatcagacagcatggtactgacataagacaaatacacatcaatggaacagggtagaaaggccagagataaacccccacacctatggtctaatctatgacaaaggaaacaagaatatacaacggagaaaaggcagtct

SEQ ID NO: 2671 - DNA, 201 bp, Bos taurus
aacaataaaagcaaaaataattcatactaatagctgcagaagcacaattctacagaggtatgaggagccagttccaactgtgtcccaatctacagttctacaacttccctgttattcgttctaattctaaatttctgtgataccattgttatatataaaatacaatgttttaattttcatcttctctcccttcttgccaca

SEQ ID NO: 2672 - DNA, 201 bp, Bos taurus
cactcccaactcctttttgtagaaattgaaccagagggcctttagggttggagacatcaggtacaatggagggtgggatggtgagtggagattaaaatagcgtatgaaaacaatgaaagtctgcaaacagaaggatgagacttgaagtcttttccccccatgttgtgcccaggtcacattgatcatcaggtgagaacttga

SEQ ID NO: 2673 - DNA, 201 bp, Bos taurus
aagaggaaggcctgggagggttccggcctgaaggtcctgaaggttggccacgactgctggggcttctgcactgctgggtgcaccactgggggcagagttacgaaacgaacactggctgtcagtcccggggggaggcagtttggcctcaagtgggagtggctgggattggggtggtggggtacctcatgcctagttccggtt

SEQ ID NO: 2674 - DNA, 201 bp, Bos taurus
cagtctattaattacaacgtcaacccccatatcaaaagctaaactcatcacatctactcattcccctcaatcttggccgtccttctgtatttcctatttcagtgactagtctcaccattaactcaccactcttacagaagccagagtcctcagctttcttcagctttcctcttgtggcccccaactcaatgatttatttaa

SEQ ID NO: 2675 - DNA, 201 bp, Bos taurus
gccttgcccctcccttccctgtggcacctgtgaatttcccccattctctgtctgtcttgacttatctagccttggttgagcaaactcacccatcagcactgagtggggcccagagggaggggtgacgtgcccaccatatcagtcttcctctcggccctctctaagttttctccaaatgcagctcctgccttctttacagtg

SEQ ID NO: 2676 - DNA, 201 bp, Bos taurus
ccatagtctagctttcatcgtgaacctgccctcatcattgttccctgcttgaaatgacctccattcaaaatcctggttgtcacctttcaatcactgtgcaccttggattcttagcaacctgatgctgtgggccacttcttcctcctggaaaccctctcctcccttcggcccactctcctggtctttgtatgaatacttagg

SEQ ID NO: 2677 - DNA, 201 bp, Bos taurus
gatgctgtgtttgcctcctcgaggccacaggagtgaagtgagccatggacatggctggattccaaataagcagaaaaggggaccttaaagcaaaggttctatagtgtggccacttgccctgcccctcttgctatttatatcagaatgggaaaaatccttcaaatggttcaacaagaagtcaagtttttagctccaccccaa

SEQ ID NO: 2678 - DNA, 201 bp, Bos taurus
ccatgtcctattcattgacggggccccacaggctaagttcatcatcactacgtgcgtcgaccgacacagcgcttccccaggtgtgatggtggaacacaccgtgaaatgagaaaaggggaggagaaaagggatggaaggatggaaggaagggagggagagaaggaagggaggccagaggggaggggagggcggaggggaaga

SEQ ID NO: 2679 - DNA, 201 bp, Bos taurus
ctcacgtatttttgcctggagaatgccatggacataggagactggcagacttcagtccatagagttgcaaagagttggacacgactgaagtgacttagcacgcacatacacaggcttcactattgtatcttcagtaccttgaacagtgggttcaatttgtgagtaaagggtacccgctactacccctattaccctgagcag

SEQ ID NO: 2680 - DNA, 201 bp, Bos taurus
ctgtgctggcaaacatcctattgcattgcattttaatgtgggatgaagttttctaatggaacatgagcaaacataatctatggagctgctgctaataaacaacatcactgtgtattggagggtttatagggcactggtgatgactgcaccggttaagcacagctaagcatcccttaatttagacatttgggctcaggttat

SEQ ID NO: 2681 - DNA, 201 bp, Bos taurus
tggcaggttctgagccgaggatggcctgatctgatctgcaaaggagggcgagggtgtgggcagggagactggtgggagttggctgcagcgatgcaggtgatagatgaggggccctagacaattgcagtagcagtgaagggcatgacgagggggccagttccaggtagattttgcaggtggagcccgcagagttggctggtg

SEQ ID NO: 2682 - DNA, 201 bp, Bos taurus
aggtggccaaagtattggagcttcagctacagcatcagtccttccaatgaatattcagggttgatgtcctttcggattgactggtttgatctcagttggtgttggtggagtgcaagaaggcctgaatgaatgtgtgaataatgagtctcttcttcagcttccttgctgacccctcaaagcatttcagaccccatctccttt

SEQ ID NO: 2683 - DNA, 201 bp, Bos taurus
cagggaggatatcaccatgggcatcccacaggatgcatagcacttccctgctggctggtaggatacagggggctaaggcccagacttggagggagctgtagagtctgggggaagttaaggagaaagcaaagccagttatggagccaggggcagccccagcctgagacagggtaacctttcgtatgggccgcctcaaccagg

SEQ ID NO: 2684 - DNA, 201 bp, Bos taurus
gctcagcttctcctgtccacaaggttggccggtatgggctgagcttggccaggcagattggctctgcttctcatgttctcatcctcctggggccagccacgtctcctcccagtgatggctgagattcaagtcagcacgcctaatctgtcaggcaccctacaagcctttggacatgttaaggcctccataatgaccaaaccc

SEQ ID NO: 2685 - DNA, 201 bp, Bos taurus
taagaaatattttaggttttatgggacacttgcagatatctgttgcatagtctttgctttaaaaaaaaaaaaaaacttctttataaatgcaaaaaccattcttggcccttaggccatacaaaaacagactctagaccagatttggcccaggggctgtagttggctgacccctggcctggaacattctgactcccatgaggc

SEQ ID NO: 2686 - DNA, 201 bp, Bos taurus
gagtcgattatagtgcttaagactgtggcctctggaatcaacctgccaggttttaagaactaattctaccactgatgaggtttatgaccttcagtaagttactttgccttactaggcctcatttgtgtcatcaggaaggtggagataaaaaataaataaaaacggtacctacttcataaggttgtcttaaggaacagatgg

SEQ ID NO: 2687 - DNA, 201 bp, Bos taurus
gccaagcactgggtctgggaatatgtcaaccagctcccccacattctgaaggcaacttgacttgaccctcagcctccatagactgggaggcaaccagaaccccatgttcccatccaggcaggggcccaggaaaaagaggtgctggaggaagcttagagtgccatcagggagtaggtaatctgtatagagccctatgaagaa

SEQ ID NO: 2688 - DNA, 201 bp, Bos taurus
cctttgaaggggaagtcttttttgcagctgctcctgggcctctccctgttgagttcctttggatctgtgcctcacttttccattttccaggttggagtgtctgattgctggccatagtcttaaatgaccatagtcagaaatctttattctgaacactggatttctacagtaagatccatggatttactcaccaattatgta

SEQ ID NO: 2689 - DNA, 201 bp, Bos taurus
ttccaataaccattttgccttttttcatttctttctcttaggaattatatgtaatatatacttacatgtaagtaaattaggtccttgttactatatctctgtataaattgaggccctgtggggaaagtaatattaggaagcaaagggagcctcaccacctcctggtgggacaggtggcccagtccatgcttcccaagggca

SEQ ID NO: 2690 - DNA, 201 bp, Bos taurus
tgttggtgggtccagctgaggcctgtcgggggacctgctcggcctcggagttggggttttgagagcaggagccctccagggctagcctggggtctgggccgcacaccccagcaaccatcaagcagcaggaccaggggcttccttgaggttccagggaccaaggcaggaggggggtgtccacggcctgtgagccgggcggaa

SEQ ID NO: 2691 - DNA, 201 bp, Bos taurus
tctgggcgggtgtagagaattagtacttgatcttaccgaagtggggtggaagtgagcacagggggatgagttccattttgagctggaggtgtaatatctacagccatcaggcgaggttgagcaggctcaggaaagaggcctgaagttaacgggattgattagttaacagaattctggttatgacggtattcagatcaggta

SEQ ID NO: 2692 - DNA, 201 bp, Bos taurus
ggattaaatgaaataatgtgctccatgtacttagcttggcgcctggtacaggacaagcaccacgtaccccttattgcaggcctttcatcctgtttcaaattcttccacatcctcctggaatctttagggtctggtcctgtaagaccctttctggccatttgcatccccatttggtggctacgcacctgcaggtgaaaccgt

SEQ ID NO: 2693 - DNA, 201 bp, Bos taurus
agtggggaagccttgataaatatttgtccatggacatggtcacggatgctgcagaatccagggtgtggactgctcaggatggagggctgaagctagcccctggaaccttccgagatgtcccccagtgggagtgggacagacccatttttagggatgcagagaaaaacaaaaataaatcgagaggctcaggtgaacgctggt

SEQ ID NO: 2694 - DNA, 201 bp, Bos taurus
gatgacagaggatgcgatggctggatggcatcaccgattcaatgattagtttgagtaaactctgggagccctggcgttgcagtcagagccggctaagcgactgacctgaactgaactgaacgtttgctgtgaccgccccctgctggaataattcccgtactgcctctcaatcgactcagtccccaagatgacttcaactgg

SEQ ID NO: 2695 - DNA, 201 bp, Bos taurus
agtgctaacctgagaaggggcaacttgctgccttaggggatctgcatggggggtgctgagacttgaggggtggcgttagcaaagagtgagcctcagaagcgggcctggaggaacatgcgggtcacaagaatgttcacctgtccctaagccccaactccgtccctttgttaacaaaagacagggctcaccattaagttccca

SEQ ID NO: 2696 - DNA, 201 bp, Bos taurus
ggagtttacagagggagcagcttggggagatggaagggagccagggcagggcccttgcacacctgctgacatctgggctctgtttcgtggcctctgtacatctcctataggaagcctccgtaccaggggtggggactggggaggagggcaggacagccctgctttgaagatgggtactttcggggacacgactggccgaga

SEQ ID NO: 2697 - DNA, 201 bp, Bos taurus
aggccgtgtgcacatcaacatcgtgagtaaaagcaactgctccgttgacgctaatgacagagagcttgaatgatgctcggagtccacttgggggagctgcacggtgcttccaggtcggccggcctggcagaggttttcgcgtggttcctgtccgtggtctctgtgcaggacaagtccttgtttcggtgcagctcatgacaa

SEQ ID NO: 2698 - DNA, 201 bp, Bos taurus
actcagagtcaagcaaagagctcaggaaagagatgaaggaacagatctctggcactgagggtacaaagcaactcacaaaagaaggaacacaaatgcacccaaagcactggagaaagcacatcacctctctaatagccaacaaaatcacaattaaaataccaaggtgaaagggaaggagaagagaaaaagggaaatctcaaa

SEQ ID NO: 2699 - DNA, 201 bp, Bos taurus
gtcagctcttctgctctcttcacctcctgggggcaataggacccagtccaaagtctggttccttctcttcacttcgggcctcagcttgactctctccctgagctctgggctgagaattagcatcctctctcccctcacccaagggtgggtgcccatagcaaggccacccttctctccaaagagacctctccccagtctcct

SEQ ID NO: 2700 - DNA, 201 bp, Bos taurus
tcacacggagggaggcgcggccagacacaacaacactgagccttacttgcctttctgaaccccacttgccctcgattccggggttccctcccagatgtgtgacgctgggaggccaagctgtggaagggcaagaggcgaattggacccaactcaagagatctggtcattgctaccttgaccttccaagcatcttcttgcctt

SEQ ID NO: 2701 - DNA, 201 bp, Bos taurus
agaacacagggcagataaggagtcagcagcttgcagctctggaggttgcagcagaagattgctgccacggaggtgagcacagggatggaggtccaccccagcctatgatggtggccttcctggaagaggaggctgcgtctttaagcagagaggaaacagtgcagcctgaagctgcagcatttccttcacctgagctgcctg

SEQ ID NO: 2702 - DNA, 201 bp, Bos taurus
cattctgtggccttcgaaaggggaagcaggctccaggaaaccctgtcctggatattcccaacagagctggggcttctgtctacccgtcagaacagctcccgctcagacaaggccccccggagaagagcccagtaactcagttctggggagacaaggaggcgtcccagccctggtggcctctatctgcctgggtctttgaaa

SEQ ID NO: 2703 - DNA, 201 bp, Bos taurus
agtactgatgaaacatagcagggaatagtgtgttaggaagccccatctgtctcaccatgcacagatgtgcacacagcctcatcctctggcctccttgctgatggacctgggtgcccagctcaaagtgtggatgccttctctgtgtctgcagagccacatctggtgcattagggccagctctctcctctctgcaaagactga

SEQ ID NO: 2704 - DNA, 201 bp, Bos taurus
gggttcaaggaccaggattgcatgcgcgtgttcacgagcatttgccatgtgctgtgtggggcatggtggacccaggccaccactggccttctggagctgctgcttctggtcaggaggacacagaccgaggatgtgcagctcaataagtgctgccaggggatgtgtcagggacatgcccaggatggccagtgatcccgttga

SEQ ID NO: 2705 - DNA, 201 bp, Bos taurus
aatgccccagactgatggtcagaagaaagcagaatggccaggagctaaatcagcaggaaatcaatgcctgagagatggagcagtctgtttttacaccgtacttgaagcccaagttggccgattttcattagtttttgaaactttctttaaacaaaggtttttgcagccatacaatacttgaaacagatgcaagtaaagccg

SEQ ID NO: 2706 - DNA, 201 bp, Bos taurus
aagacaaagtaggcaggggcctggggatctgagattgtagatggtgcaggcaagattctaggtggttctttgcttgtgacacccctgttacgctccattacaaaggccattaaaatcatattcacagatactcaggaaaagtcttccaaactcagaaaaaaaggcaaaaaaaaaaaaaaaaaaatgatctcattaccgtcc

SEQ ID NO: 2707 - DNA, 201 bp, Bos taurus
ctcagggtcgcagggtcacctcagatggaagtcctggtgtggccagtctggggtcctttcctttccctccagttgacctccacggacagaggctttgacactgaaggcttttctggccattcaaggcactaataaacttgaagcaaatactcaaaaaccctacacaggaagctatctatagtcaatatcttgtaatgaact

SEQ ID NO: 2708 - DNA, 201 bp, Bos taurus
cagaacaacaaaagactgtttgtcgtgctaacgggctctgcctggcctgtgacccgggagacaacgctgttttctctgcccgataaaggaagcgcctttacgtaatgactccgactctggcctctcctgagttgcatggattaggaatcaaatgctcagtgaatgatgcccctcttaatctcaaattctcaggaatttact

SEQ ID NO: 2709 - DNA, 201 bp, Bos taurus
ccagcctgcactgctgtgaaccaaaacttagattccctggtgtctcacatttcactgtcctctttgggaccaagaggagctccccttcagaaaattcgcatgcatctattcttggatagggcttccctggttgctcagatggtaaagaatctgcctgcaaatgcaggagacaccagttcaatccctgggtcaggaagatcc

SEQ ID NO: 2710 - DNA, 201 bp, Bos taurus
ttaacgaagaatattctttctctttgtgtgagttttgatgacattaagacaagagcgtggtggaacacagaaccaggggaaggagagtgtggtgagccaaggaggtcctgagagccattggggaagggaagggtggtctgggacaggggtcagcatgccttctctgcaggaggccacagggtaagtactcgaatccttgca

SEQ ID NO: 2711 - DNA, 201 bp, Bos taurus
aaggtggcagaaccagtctaacacagcagcatgcccagaccattgcaggctttgtgcaagtgtggaatacacgccatccctgtgtgggccccagctgtagatggctttgactgttcaccctagagcgatttccagaccacggatgttctcacttgcatagcctgaagggttcggttcgattggtttcctctgggattttga

SEQ ID NO: 2712 - DNA, 201 bp, Bos taurus
atttgcctgctctcagaatctcattattccttgtgatgtattcggtcttactgccaccttttaatacatccattctgcctgggcttttaagaccttcattgcttcaatacatttagtttcaaatgttccgcctggaagggctccagccttcttgttctcacaaatatgaattcaattctggtaattgctaaatggatacac

SEQ ID NO: 2713 - DNA, 201 bp, Bos taurus
ccccttcaaacctaaccaggtcctgtgactcagaaaccccagtcagggagctccaaagagactggtcactcacctttcagaggaccaataagaaaaaagcgatctctgtgacgtcccatatacgtggcatctgaaaagagatggatgtgagagttggactataaagaaagctgaccaccgaagaattgatgcttttgactg

SEQ ID NO: 2714 - DNA, 201 bp, Bos taurus
ccaccccaaacctgctgaatctgaaattctggagttggagcccaagcgcactggagtttggaaaccatcactgtccatatcacattaaaatttcccaaccttttgctccaggccaacgttccttgtgagcgctagacccgcactctaaactgccctgtgagacgtctcctttcctgatgtccaccaggggcctgaactcca

SEQ ID NO: 2715 - DNA, 201 bp, Bos taurus
ctcccccctcaaataaaatataactctcaacttataggttgtgactattttttttcaaagtcgacaccagcctcctcccaagtggtcctgcgtctcagaggagcaaggtcatggaggccacctctgagttggcggttcttacaccctagagaagaagtgttcccactcttgcctcccctccacatgtgcccttggtcccct

SEQ ID NO: 2716 - DNA, 201 bp, Bos taurus
aacatatcgatgaatgaatgagtgaatgaacaggtggatggacggacagatggatgcatgaacaaagaagcaagccacttggggcccgaaggacaaatggtgcactgcaagaaggggacaccgttaggaagagactgaacgggagctcagaatttcttcttgtagtaagaacccaaacctatgtctatactgcttgtgaag

SEQ ID NO: 2717 - DNA, 201 bp, Bos taurus
tatagagcttatgcaaatataaatgaagattccttaggtaaaggaataaaatgaatctgagatgccagtgtttgaacaaacaagcagagagtgagcacagggatgaaaatgagatagaaacgtccatttctatgaccgtgtcgtgggggtggtttagactgtgactagaagaagcctgtgtggtggtgtccgtggggcaac

SEQ ID NO: 2718 - DNA, 201 bp, Bos taurus
ctatacctgtgtgcctgtgcggcctgtctagtccggagctgtgccctctgcaggcactccgggaaaaataatcagacacgaagacagttgagcctctgctggaaggtcgtacagatgcaacaggccaatgaaggatggtttgccgacgagaggaaggaaggtaggacaggtgacctcttgcctcaagtctccagcctcagt

SEQ ID NO: 2719 - DNA, 201 bp, Bos taurus
agcctggtgggctgccgtctatggggtcgcacagagtcggacacgactgaagcgacttagcagcagcagcagcagcatagagacagaaggccatgaaaacggaaacccaagaacagggactagaacattttgactaaaagaaacgtcaagatggacacaaggcaagctggaaacccgggaagaaaaggcccatgcgatgac

SEQ ID NO: 2720 - DNA, 201 bp, Bos taurus
ctcccggctggtggcctcatctccacctctgggcggcagtgctgggctacctggaggtccagtgactcctcatgcggccgtctttctgtttctcttctgacgccctcttctaatttttatgagtacactggactcatgaggataattcagggtgatctgtcttcaggccagctgattagcagccttactccatctgaattc

SEQ ID NO: 2721 - DNA, 201 bp, Bos taurus
agtgaatcccctgacagacgaaagactttcctaatgcagaggcggacagaataaatgtgcaatttgtccacgacaaagactgtgccaccaaaggccttcatcttctacaggaacgagactagtcagggaccatacttgtggggaccacagcctgtgtgcggggtgagcaagaaaagggccgcttcaggggaggcttctggg

SEQ ID NO: 2722 - DNA, 201 bp, Bos taurus
gggacctgcgggctaggggtgtgacctggaataatctgtggaccttagagagacagtctggccactgcacttgcagaagagcctcagggcctgtctttccgtggggcttggtgcacggacaagcctatagctgctgggtgctctccgtctgatttactgtgacgatggacagcaaaatatgcgatttcacacgggtgtgca

SEQ ID NO: 2723 - DNA, 201 bp, Bos taurus
ccggcctcagggggcagcaacggccacatgtaggtgcgggcaggagagtgcagcccacgggcagatgctgtagctcatcccctgggccaccgctcctcaggatggtcacttctctgtgtaacgggggtggcggcggggaatgcagacaaagcggcaagagagggagggaagggccattttattgaggatagatgccagaat

SEQ ID NO: 2724 - DNA, 201 bp, Bos taurus
cctggctctcctgttcatggggcctccaccctctgacctctttccctcccaaagcccccacctccaagaccatcacttggattagaagacctcaacatggacatcttgggggccaagtcattaaatccataacaccagccaagttgggctgggggcccgccctgacccagtgtgacctcagcatagcctgatcacatctgc

SEQ ID NO: 2725 - DNA, 201 bp, Bos taurus
tgagttaacacgacacaccatcacctgggaggctgttagcatgtgtcagctcagcactggtgagtccagcataggtcaaagccaggtgcacaggccagccgccaccatctgactcacgcaaggagatggggtcatttctaagggagttctttggaaaacactgaggctctgcggggccagggacttcagggggctgggttg

SEQ ID NO: 2726 - DNA, 201 bp, Bos taurus
cctatgctaatgacagttacccagttcctctcagccctggggttctgtcctgtctccttcacagatccagccactggggcaggacagctggccaggagacctcccgaagagttgtattctcaagcagatgctaggctgtgcatcccagggagtgtgggcagggcccctcgggttgctggccgcctctcaacaaaccatcta

SEQ ID NO: 2727 - DNA, 201 bp, Bos taurus
actggggtgaggaggtcgatcatgaatgtgggaagccacagctcagctcaaaacaacccagaaggtcaggagggaccttctctgggcttggccccagcgctgcacaagaattccaagtgtttcctcacataatcccagcgtgctccgtatgccagcgagtcatcagtcctgagctgaaggcccagaggaatgtgccagagg

SEQ ID NO: 2728 - DNA, 201 bp, Bos taurus
aaaaggttcacaacattacacacgattttttctttttttgaggagggcatctctctgtattcccttttgttataaaatggtcatgttagctgtccatcgctgcatttgttagactgtccgtctacttgagaggacgacagggtgagtgccacccacctgtgaccctgactggagaagctatcgtccctgtgattccctctc

SEQ ID NO: 2729 - DNA, 201 bp, Bos taurus
gtggccaaagtattggagcttcatctcaggtgaccttcagacagctgtataatgtaagcatgtgcttctttacccctgatctatcatctacatcccttgcctcagcgcccagccaatggccaggtgggtccggtgtgtcctggggagaggaagggctgagtcttctgaatgaccacacattctatctgtgatcgtggtgcc

SEQ ID NO: 2730 - DNA, 201 bp, Bos taurus
ctgtgggaaatgcaatttcgtgggcccctgtgggctccgtccttcgctgcgtggatgcccccacagccaggaaacagtgggcaaatgggacagccaaggcgtgggaggccctgaggctgagtcagccatgtgacacctcttggacacagttcagctgttgtcacggcccctggagtgactcaaactctgaatcccatggat

SEQ ID NO: 2731 - DNA, 201 bp, Bos taurus
caatctggacatgaacgtgcctggatggatgtttcggtgcatttccagagctcaggagagagattggaagggtgagagctcatgcccccaggcgggcacacgggacaagagtgagcaagggctcccgagttgtctctcataatgtccacccacgtcacaagctcagctgcctcactgcgcatgccctatctgaccacatca

SEQ ID NO: 2732 - DNA, 201 bp, Bos taurus
gacgaagagggtcaggtccacagacacatgtagcaccatattgataggttacgcggcagaggcttcctcccaagtccgggtgtaaatcaaagcatgagacggtacagtgcgagggaatctacacccagagctcctacaaagacaacggcgatggctgactccttcttcttcaagaggtatgtgtcgctggtcggccacgcc

SEQ ID NO: 2733 - DNA, 201 bp, Bos taurus
tgggggccggcccgcccagcagggtcagcccacggatggctccgaccacactctgctggtccatgtaggaattcaggtagaactcaggtctggtccggtcgctgtactgcaccacggccacacgcacccggtctggtcccacgtccaggctctccaccactctctggacgaactccttcagcagtgggaagccgctcctga

SEQ ID NO: 2734 - DNA, 201 bp, Bos taurus
cggtgtcctcactgcgcccagcctggccgtctgccctgggccttctggggaggtgccgccttgtgtcttgtgccccttaaagccccaggttaatgggaggatgcagaagtggggcatggccacccccagggcacttgcacacgcactgggcctggcacaggtttcagaggggtctcagcacactcgtgtgtttttattgta

SEQ ID NO: 2735 - DNA, 201 bp, Bos taurus
aggtcacacggcgggcggcgtctacaacctgggcttcctgcagctggtttccctcatttgaaccgtcaccttcactcgcttctccccagcgagtttgcctgtttgaagctggccagtggatgcaggccgtttggactggaggatgaaatctatccagtgtggccgcggtttgggactggggtggtgtcagagcccctcctt

SEQ ID NO: 2736 - DNA, 201 bp, Bos taurus
ttttaggatataaaattttagaggacctccacagttaggacactgaataagagaggggagaaagtggaaagttggtggtgggtggtgtttgtcgttagccggggggtatgttcccgtaatgctcttgatctaaaggaatagcttaaagattttaaagataaaaaccacagaccttgagaacctggatcctgggaataagag

SEQ ID NO: 2737 - DNA, 201 bp, Bos taurus
agtgctggtctggccattttgggtttatttgggcttcaggatgaagccacagagtagcagctcagtcaagctccccagaccctaggccgacaatgaaagttgctcagtcgtgtccaactatttgtgatcctgtggactacacagtccatggaattctccaggccagaacactggagtgggtagcctttcccttctctgggg

SEQ ID NO: 2738 - DNA, 201 bp, Bos taurus
ggcgtagacggtactaagatttcaatcactctccaaggaatgatgccagtctgttgcttggctttcagtaggagggtgaactgatcagatctgcatttagaaaagattattctggccggctagaggttgttgcccagatccacgttaagagtcagcagtccctggactaaaaggtgtcaggctctggtaggtcactgacag

SEQ ID NO: 2739 - DNA, 201 bp, Bos taurus
gcccaccagtttcactatgttctctgtgtgtctttgtgtcttctcttcttataagaagagctccaggtcgcaggcgccgggatggaaatctgttcagagctgtggttcgggcatcccagggccagactccagcttgttggggtctgcttggacctctgtccaagctgtgtggctctgagcagcttcttcactctctgatca

SEQ ID NO: 2740 - DNA, 201 bp, Bos taurus
ttaagaatccacttgtcactgcaggggacacgggttcaatctccgatctgggaatcatctacatgcagccgagcaactcaacccttgccccaccaataccaagccagtgatccagggcccgcaaaccacagctactgagcccatgcaccacacctactgaggctcgcacacctagagccagcgctccacaagaggagccac

SEQ ID NO: 2741 - DNA, 201 bp, Bos taurus
gaggccgcagaaagcagggccatcacgttagagagcatctccgtgtccgtctcagcatgtgcaggagaaggtccccgaaggttcttgttggatgagtgactggcttttcctttcagttctacggccccaggatcggagcgctctacgtccgagggcttggtgagcacacccctctctacccgatgctgtttggaggcggac

SEQ ID NO: 2742 - DNA, 201 bp, Bos taurus
tcagaccccagcgtgaggcctggcgcagggaaaggacctctctgctgggcactcacgggtgactccccaaatgcccttctgcaggcactctgcttcctgggggcctccttataaatacaccgtatcctgagagtaccccagggaccctgagtcccttgggctgggccagagaaagctggtttgttatttaaaagatgttcc

SEQ ID NO: 2743 - DNA, 201 bp, Bos taurus
ctctttttgagagctgctggaggctggagacctccatcagccagggcagtggcccgacgcccacccacactgccgcagcccatctcccaggcccccagatcaatgtggttccacctgtttctgtttcaagccaaactggggtctgagtccctccacagactcctgggccagtgggagggctggctcagcacacagtccacc

SEQ ID NO: 2744 - DNA, 201 bp, Bos taurus
ttccgttcctggtcaaggaactaaggtcccacgtgcctggcacacaatacagccaaagcaaagtgggaggggggcagagaactgagaacaccacgtgcctatctgggaccaggcactgggctctcaacagctttgtaagcaaagtcatattggcggtggacagggcgcacaaggtgtccctcgagtcttcaggtgagagcc

SEQ ID NO: 2745 - DNA, 201 bp, Bos taurus
caggggaactaagatcccacttgctgcaccgtgcggccaaaataaaaaagttttatctgaaagaataaatacatggtcatagcctttcataaaaatgctcgaaaggaccagttttaggccagtaatgtattcttcacttcattcctttaaatagagaaagaacccctctagctgggcgtctgagtccgcgtttccctgttg

SEQ ID NO: 2746 - DNA, 201 bp, Bos taurus
gtggccgaagtattggagattcagcttcagcatcagtccttccaatgaacattcagaactgatctactttaggattgattggtttgttctccttgctgtctgagggactctgaagagtcccaggcctctgggcacaagttttcgagacgtgaatggcattggcctgcctctgtgacccctcaggacggcagacgtccagtc

SEQ ID NO: 2747 - DNA, 201 bp, Bos taurus
gctcagcatcaccccagacggcatcagaggtgtcccagaggtggcccccgactgcaggaccctgcccccatccctgggtgcctctggtgcccgagaaagcggaggtccctgagagctctgtggccagggtggtccctccgcctaggggtggggaccccaggtggcggtctccacaatgcggatctctgcagtgctcagctg

SEQ ID NO: 2748 - DNA, 201 bp, Bos taurus
gcaaccagcccaggccacgcccagcaggtgcccccggcctgagcaagggtcggtgcccagaggctctgcccctctgcaagccaggacagtttcccggcctgaggtaaggacagaaaactcgaagtccagctctgccccagagaaccttccagatcacccagcaccagcccctcagtcgtaacttcctgggggctttgaccc

SEQ ID NO: 2749 - DNA, 201 bp, Bos taurus
ggctcgggcgcccggaggcgcagctggaaggcccggagggcagggggacacgaggtccgcggcatcacggggtttcctgcaaaggggtataaagtgctcatttgctgacccccggccagcgcccccaaggcctctaaaaaggaacaaaaaggctagaggtccagggaccacagcgggaaggtgtgggtgccctccctgagg

SEQ ID NO: 2750 - DNA, 201 bp, Bos taurus
caggtgaggcccgttcccctccgtgtcgcctgaccccccagcacaggtgctccggttgcttttggtaacagccttgcttgtgcgaatggagccctttgcacacctgcagtgctctggcctctgcacccggagcccagaccacaccctggaccaatccagtcccacgtcagcgtggctgccttgggaagggggcatcctcac

SEQ ID NO: 2751 - DNA, 201 bp, Bos taurus
gtaaggaaataactgtcccacctgtctgtcgagggtcatctgaggctccactggagaaaagaccaggtgtcctttgggagccagggaaggtcctggacccatcagtctctgatcctctcggccatcactggcttgggggccctgagtcccccttgggactggggaatgcgctgcttccagtggccccagaaaccaagcaga

SEQ ID NO: 2752 - DNA, 201 bp, Bos taurus
gggtaagacccgctggaggaggggcagagggggtcttggagagtgtgagtccaggtcaggggcccctcttctctggtcaaagagaaggaccaaaaagcccgggcaggaaaagccttgaccagaaggagactccaaagacaaagaggaaagggtgtgaatggatttgttgttgttgttcagtcactcagtcatgtctgactc

SEQ ID NO: 2753 - DNA, 201 bp, Bos taurus
gctctgcctctgctgatacagaggaccaggaagagccaggaagagccccccgtcctgatcagagaagtggtgtgcacggctgggaagaacaaggctctgttcgggccagaggactcgagggccgcggagtgcgatggaggtgggacgcagtggatgggaggacttccggttccatgacttcacctggttggtgaagcagag

SEQ ID NO: 2754 - DNA, 201 bp, Bos taurus
gaggggcctctgaagacctccagaaccgtctgcccttgtagatgcccctccctgacaggagcctggaggcttattcctgcctggcccttagcatccgaattgagggcgtccacgagtctgtgactgtctccccgactctgtgcctcacgccaacctcaggcctctcgtcacccgtcccccatcccatgacactgtccattt

SEQ ID NO: 2755 - DNA, 201 bp, Bos taurus
gccctgcaccccactcttctttgcaggagccaagcgtcctcctgccggcccagcccatccacaccatatccgggccaggccccctcagagggaaacctctgtgtttccacctgacacgtgaagccggtccgcctagtcgcacagggttaagtggtggaggtttagtccctaagtcgtgccaactcttgcgaccccatggac

SEQ ID NO: 2756 - DNA, 201 bp, Bos taurus
ctcagaaggagtgtcgcttttggacttccagcctgcagatggtgagggaatgtgctcagaggaggtaggcctccgctggggcccttgctacctcagccctggggaactaaagcaaaaatatccctccacggggagtgctcccgtcagaaggagtgtgatgtccagatgggcgtgtgtgcgcggcaatggggagccggggag

SEQ ID NO: 2757 - DNA, 201 bp, Bos taurus
agccttcttaaggaaagacataaatgatccctgttacacgtgtggtcagggctgtccctggctccatcatgtcctcccatttcctgcagtttcctctcccgccgtctagctgctccgagagccggtctcgtccctgctcacagatggccgcactagccccgctgaaacagaaccgctggggcagcaggggccagggagatc

SEQ ID NO: 2758 - DNA, 201 bp, Bos taurus
gaacccagtctcaaaggaaaagaggcaatgactgctttgacttcctcaggctgtccagggacgtactggggctctgggttccctttgtttgctcctcatcggggtgcatttatggagggatctgagagtccatggagtgataaggtaacttgtttcagtgttgtctgggtgttggtgagggaatattcttgtcatactacc

SEQ ID NO: 2759 - DNA, 201 bp, Bos taurus
caggcactgctggtgctgcaggagctcagatcacacttgagtgatgagagtttgcaaggaaaggattcaggacacagtcactacaaatattcaatagatccttgaaagcagcgatgggtttctctgcttcaccctggaggtatttgtcaggctcaactcagaagcaggtttactgaagccactgcagtagccccacttggt

SEQ ID NO: 2760 - DNA, 201 bp, Bos taurus
ctgaatgggtgcagccctcacagctcacagaccaaaccgcggccactgctgatggccaaatgccccatccttccccacagagccctccgggcctgctccaaggagcccactgagtaaagcggactgcccagtatgtgacctcaaaaacagaccccgagatacctctccctggagtcaggccgtgcagctcctgctggaagc

SEQ ID NO: 2761 - DNA, 201 bp, Bos taurus
ggttcacggctggggagcagcagctccatgaggctgctaggaaggctgttttggtggcccctaatagctccaccccgttagccttgggccatttctgccctgagtgatgcgagcccgtgagttgcttctaaatgagaaaggacagtgcaaggaatgggatggcccttccaagatgaagcgagaaggactctggctcctgtc

SEQ ID NO: 2762 - DNA, 201 bp, Bos taurus
ccccctggccgcccacggggctaggctcctggggcggcacctctgctgggggtccacttagcgctgcagagtctcccccaggatcacacgcgcagactcaagtgacctgtcagctggcccactggcgagacccggtcacagagccaccccgttctgaaggggccgaggcgctggaggacgggggctggtggggccgccgca

SEQ ID NO: 2763 - DNA, 201 bp, Bos taurus
tgtcaggtcccaggccgggcgagtcctcacctaggttttcccggaggagccacgtcagcaccgagtctctgtagggaatgaagtctgtcttcttcttctttttgttctgtgggggacgggcgtccaaggtcagccccgagcccacctgaggtggggtcaggggggcacagacggggagcgcgggctggctgcccagggctc

SEQ ID NO: 2764 - DNA, 201 bp, Bos taurus
ctttggtgcagacgaccctgtggatggtcgacagggcgtgggtgtctccagcagaggggcttcagcccgagaaatcgtggctcgcagagggtttcctcccgcccggaggtcagaagatgacatcgcagaaacaaaattggcagcaaagtggctgaaatgagatcttttcttagatcttggcagaggagaggctgcccttgg

SEQ ID NO: 2765 - DNA, 201 bp, Bos taurus
ccttctgggaagccccctcatcttgccacagcagctgtagccggcacttatcaggctgtgagaactgtcgagagtcccttctcagcacagaccaggccaacactgccagcgggcatggtggtggcagccgccctgtggaggggaaccctcctcaccaggagccagacaagaggctgcaccttggcctgccagcctggccaa

SEQ ID NO: 2766 - DNA, 201 bp, Bos taurus
agccaccgagagttctctctgctgcaaaacagcacccctccccttgcccagggcctccctcaccaagtaagaacgctcatcagggcctccctccatccccgtgggtgtctgcccgtcctgtccaggtcagcacctttctagaaaacaggaggaaaaccccgtgtgcggaggccaagtccagggacagtgggccctcctgca

SEQ ID NO: 2767 - DNA, 201 bp, Bos taurus
ggccgtcagggccagccgcccccgcaagactcacgtattcctcctccaggttgaggatgtggtcgatggcttcctccacgttctctgggagccccgtcacggtcacgcagttggggtcgggcgccccactctgcgggaagcggatgtccacctggaaggagtgcacacagccagggtgggcgaggccccgccgtgcgtgag

SEQ ID NO: 2768 - DNA, 201 bp, Bos taurus
agagcgcttcaaaatagcatatttgtgcataaagagggcctccagacctcaggaagggggaaaaaatggaagaaaaagaacttctgtcgggaaaagggattgtcccgagaggaggaagagggcccagtggttgtctgaccctcgacgcctgcccctgtcgccggggccgcccgaggaccctgctgctttctgcgccacgtg

SEQ ID NO: 2769 - DNA, 201 bp, Bos taurus
cagccacgccaaagatagcagaagataatggcgacaacttcagtacaaagcacacacaaatatgcatctatcgatacaatgtccagccatgtgtaaggccggggacacagcacccagaacatacaaagaacctctagaaatcaataagctgatgaagccgggtgtgagcccacgcggctggggcccgcgctaggtcctgct

SEQ ID NO: 2770 - DNA, 201 bp, Bos taurus
tcgggtggggacatgcgccaccctgggctctcctcatatcagcaatcttgtaagcagcccccagagacctggctgcaccaggccatgctgacctatctctcgggctcagtgtccccccggcgacaccccgccccaccaggggctgcgcctagctggacagctgcagggctggaaggccctggctgccttttgctcccgggt

SEQ ID NO: 2771 - DNA, 201 bp, Bos taurus
tgagcacctctggggcgtcctttacctccttaggctggcttctgggcagcatgaatgtcttgcactctcttcccaacactgggggtgtccaggagacctcggagcagcagagggcccaagggtccccagggaactcaggacagccagtctcttgggagccaggaggcgcccccccccattgctgccttcactgtcagcccc

SEQ ID NO: 2772 - DNA, 201 bp, Bos taurus
gtaacagctccgaaaccagcagtgctgggggcccagatggtggagaaggaggaccctgagctcacctcctcccacagacactcagagcaacattagtgagagtggccagaaaactagcagaaagggggacccaggactgaagacataacagacccacagccagacaggcagccgtggtggggacacagcgtatggagagct

SEQ ID NO: 2773 - DNA, 201 bp, Bos taurus
aactcgagatgaggccctattcccctgcagccaagaaagaggaaacctgagggggcccttgcaactctaatggaggcctgaggttccctgagatcccgtcgcaactagagagtaaccctgagcttcctgctgcaactcgagaaaatccacgagattcccccctcaacctgagatgaggccccattcccctgcagcacatcc

SEQ ID NO: 2774 - DNA, 201 bp, Bos taurus
tgcctactgtctgtcagcctcagctttcctgcgtcctggggcttgctttgttgtggcccacctgacaaggaccctgtgggctttgggcctcacacctgagtgcatgtacctagactctctttgtcccttcactgggctcaatttgtctgtgccccagaaatagtttcccattccaggggctgtggaccaactctggcctgg

SEQ ID NO: 2775 - DNA, 201 bp, Bos taurus
acaggcctacactggcaccactactgtcttccttcctaattattctatattctttcaacacctggtccaggtgacttctttgtaggatgacccagatttttgctttgttgggccaggaggtcttagaggtcttatcttccttggatgtcctcagttctctagtgataaggagtctcctagttctcatacaagtcctccttg

SEQ ID NO: 2776 - DNA, 201 bp, Bos taurus
tggtgacagttagctctgtgtttcccaaaatccaggaggctgagacacacctgagatgataacactgaagtcatctccatagggaggggcctcagtgaagtacctcttaaagtcctgtgacccaaaggacatgacagtcatggttaagacccaccaaagagagagggaaagctgagctgagcagcagaactggccaccaaa

SEQ ID NO: 2777 - DNA, 201 bp, Bos taurus
ctgcagtccatggggtcgcaaatacttggacatgactaagtgactgaactgaactgagaatcatcacatgaggattgtcgtctttcagtgtctgtatctgtaggcccccttattacatgtactgtgtgacggtttgctccacttgaactattcaacagcctaggtacccatacctttagattttcctacatgaagactact

SEQ ID NO: 2778 - DNA, 201 bp, Bos taurus
aggggatgctgagctggccaggtgaggggggtagagggaaggtaaacaaatgggcagcaggtcaaagagagagcagcttatcagcaatgctccagtttccaggccattactaagggagtgtgattataaccttcccctgataggaggactaggacatcactggaattctggacctgataaagtcatttgaaatgctttgtt

SEQ ID NO: 2779 - DNA, 201 bp, Bos taurus
gagacggataagagatttatggatgtttcttgatgggagagcctgactgagatggaaatttcaggtgctggaacagcggctatgtggccctggagcagctgttaggagagaccccatgtctaagggcagagaaatgccagcaagactgtaggtgttggagccgtggctgtgtggcactggagcaactttgaggaaatactt

SEQ ID NO: 2780 - DNA, 201 bp, Bos taurus
catcatcattctcctggttccaggcagtctggggtatttgtgcttgtgggaggcatctagttaacttcttccacctggtggggatctgcaaaatatcacaaagacatggctcagaatattattcatagtctctgaggaagagctaaatgtccttgactttgtttaatgactaaatattattttgtcttggttgattgtttt

SEQ ID NO: 2781 - DNA, 201 bp, Bos taurus
tcttttggtaactaaggaggtcaaacccattttgatttctggcctaagatgttcaagattataatttaactgcacatggaacaaatcataatcatgcatggaaaactgctcaggccttatgactaatgcccagtgacattaaaacagcttgaaaaatcttagaaaatccatggagtatccaaaccctgaatttcatatgtt

SEQ ID NO: 2782 - DNA, 201 bp, Bos taurus
cagtataaattaaccttgtgctgaaattcatttaaatgaagtcattccctgaggtttataagtgtgtctcattaagattatttcacacaatagatggttttaaattcaatggctttcaagaagattacaaaactaattcacttatgtgaataaattatttattcatatatggcatccctcaattagagtacacacgcactt

SEQ ID NO: 2783 - DNA, 201 bp, Bos taurus
tattgttgcctggataatcccatggtcagaaaaccctggccgactacagtccatagggttgcaaagaattggagataactaaagtgaccgagcactcacgcacacacatgaacttgttctggggccaattgaatatgaatattgcattatttttattttgggcatttaaagttttcagttagcgactattgattgtgtcta

SEQ ID NO: 2784 - DNA, 201 bp, Bos taurus
acccatgaaacttggccacaggtaagaacgaagtccttcaaaaactgtagaagcaaggtaaccccagatttagagggagagagctgtccatggttcagaacccatgccagaggccataaagagagccagctcagggagcgggtgaatgaggcctgaggtggcgctgcccctctcttcagcctgggcagaggagggcacaca

SEQ ID NO: 2785 - DNA, 201 bp, Bos taurus
tgggccagactaagataaccgtgatggctgatggatattgttgtatttgccatttcctttacataactttaattttcatgccatcataaagtaaatgtttgctgaccagccctggccacagaactgtaaagctcctgcagccgtggtgggcagttctcagtgttgtaaggtgcagtcaccagccttgtgactggcaggaca

SEQ ID NO: 2786 - DNA, 201 bp, Bos taurus
ttattcataagaagggcctgggggaagggaactacttcatcttggcctgcaaagcatgatttttatcagcctttgcaactcaaagattttggttttcataggttaagggttaaaaatataattggcctatgaagtgaagtgaagtgaagtcactcagtcgtgtccaactctttgtgaccccatggactgtaacctacaagg

SEQ ID NO: 2787 - DNA, 201 bp, Bos taurus
taggatcattgcaaggactcacaaggcttcatagggtgagctcatgtaaagtttaagtaaagataaagaatacagacaaaaattacccagtcaggcattgagtacctaagagaattataaacatcctcctcactcctgggtcctttctcagatgcacagaatttaccttgcattaatcaacctactattcctggcagtttc

SEQ ID NO: 2788 - DNA, 201 bp, Bos taurus
agtttcagaaacagaggtcagagcatgtgcgttgctagaggaaaagcatatttttatgttccctttttcaacttggcaagcagatggctggagccttagatgagtgccaggaagaaacagctggcaaatcaaaacatactgaaagtggttagaagtgcttatgagcatttggaagaaacaacatttttgaaaaaaggggaa

SEQ ID NO: 2789 - DNA, 201 bp, Bos taurus
tctttacctgtttttctataataagtggaccaaagcccctaaaactgtctcttcaattagatcatgagtccaagaggtgaacaatttaaaacattgcaaagatcatggaggcattttcctaaccaactgccctaatcctgactcctcttttcttcggggcgtctcttcctcatatgttccttcatataaaaaatgaaatat

SEQ ID NO: 2790 - DNA, 201 bp, Bos taurus
tctgacatgcgccatattgggaagtctcaggtgctaagctaggctctcctggtgtgtgttatcctaacattgtttgaccaaacccccatcaatattgctggaggtctctgaccacccaccacacactgtgtggcccacgagagggcagttctaatgagaacagccttgatcccatcatcccagagcagctgcaggacctca

SEQ ID NO: 2791 - DNA, 201 bp, Bos taurus
agaagctgggagagaggcccagggcagcttctcagaggcctcagaaagaacaaaccctgatgacaccttgatctcgggcttccagcctctgaaactgtgagagcatagacctctggcctgaagtcacccacctggtcgtattttgttacagcagctctaggaaactaatccaacagtagagagcattgagtcagaacactg

SEQ ID NO: 2792 - DNA, 201 bp, Bos taurus
gctcttcatttcaggagaacgcatgccttcctcagtaaacgcgttggtcatagccaccttcaccagactgtgggctgatctggggattggactgaacattcacctctcaaggccattttttttgttttgttttgttttttgaggcatagcaagatctttggactaaatcctggtggtccctcttaaaccatgtaacttata

SEQ ID NO: 2793 - DNA, 201 bp, Bos taurus
caagacctggctcccttggcactaacctggccatggcagctctgccatctgtctgtcagcagctacaacagtgtatctgcaaacacgagcaggccctagatagcagtcatggtgatgcatcttcagatgtgacctccaccaaccttttcaaatttcatatgcaattggagggccccaaattttcatgttgatggcttccag

SEQ ID NO: 2794 - DNA, 201 bp, Bos taurus
catacgtagagtgatgaagaaaggcctcttgctgtggtgacatctgagtaaaaacccggaggaagagagagagcaaagcatgggtggacacctcgctggcgggagaaaaggcaggtgcagaggccctaaggcagggtttgctgcagtgttggaggaatgggtgcagaggggcacgatgtgggggtggggaagtgggggatg

SEQ ID NO: 2795 - DNA, 201 bp, Bos taurus
acctgacccggacctcagtccctgactgtcggggtctgtcccctctcagttcccacagcagcatcgccagacgaggccacgtttttcaaacctgtctttcttcaaccttccttcttctccagctgagagcacccctccgacttaacaagacaccagcggccacttctgcgaagctctggaccctctccctccaccctctct

SEQ ID NO: 2796 - DNA, 201 bp, Bos taurus
aggagcagccctgaggtcacaggttcagacactccactcagagactgaccagaccttccccattctcctctggtttcccagcatgaacatagtcagtttttcccaggactcaactttggccaaagatagatgtatgtgacaaaaagagcctatgcctgccggggaaggcagacacagacacagacaccctagatgatggtg

SEQ ID NO: 2797 - DNA, 201 bp, Bos taurus
tctgccgaggggaacacacagagctctcttggtggccagacgttcccctctggcagggggaacctttgtctctgtccccctcacccccgactctggagcaatgtcttggccctcacagtagaagtgagagtattgaatcaggagaagtagccaggattcccactccccccgtggcacacgcatgggccctgcacagggcct

SEQ ID NO: 2798 - DNA, 201 bp, Bos taurus
aacctctttcggaaaaagcaaaaaggagatgcagaaggacatgatactaaggcgtcatgttccatgggtaacaggcagtgatgtggccctacttctgaccggtctctcacgtgaggagagtgggcgtctctgtgctgtcgtaaccaggtgcagggagggagcggccgagctcacagaggccgtgatgcctggctgttattc

SEQ ID NO: 2799 - DNA, 201 bp, Bos taurus
gcaacagttggtggaacatttaaaccctcaggaacaacatttctcagcctccaagacttcagtaactggaaatgccctccaagagcagtcaggccccatgttggggctcccttctgggcggttcccttctcacaggcttggcttcttagccctggtcacaactggccactgtggctttctctcggcttattcactcaccat

SEQ ID NO: 2800 - DNA, 201 bp, Bos taurus
ggagaacgaatccgaaaggctctgccagccctcccctccctcggcccgatagtgacttttcccggcagtgtgcagaatttgacttagaataattttcttcctttggaacctgtggcctgtcggtgccggatgcacgcagtttctggccctgagaggagggcatttcaccccagggtcatggtcagggccacagtgcagggg

SEQ ID NO: 2801 - DNA, 201 bp, Bos taurus
aagtagaaaagagcgtaaatgctttgccaaacaaagggggccacagtagactaatgccctcaaaactgtgtccagacctggagggggcaaggaggagtttcacagtctcgattcaaagagggcctaatcagctagtggacattcttttgattggttggtggtgaggtaatcaggaatcagtatcattaaccctttggttaa

SEQ ID NO: 2802 - DNA, 201 bp, Bos taurus
gtactgtttaggggcaaagcaagatggagtcttgtaatgagataaatttccttgaaattaagggttggttgtcaccccttattcatccaatcaaccattcatagagcctcactcaggcccacatccaggtgcaggcaagccgaacagtggttggtgtgagccttgtcctttaggaagagtcttaacaaacctctcaaaggt

SEQ ID NO: 2803 - DNA, 201 bp, Bos taurus
gttttagcatccaaactagtcaaattggttgaaatctcttcatttcattctccaaaagaagcaaccaggcagagagtcgatgatgcatacaagcagctcagatttaatcctcagggggatctcagttattttagctgatacttcaccttctttttgcagtgcccagtaccctaattactttgctcctgagtccttttttag

SEQ ID NO: 2804 - DNA, 201 bp, Bos taurus
atatatatatatatatatatatatatatatataaacccacaggttccatgagatggaaataagctggatttctgagctggcccccagtgtatagctacccggtacatttgcccatatccactgggttttgacatagagataaatcaatgtttgtgtccagcactggccctggggttatttgttattgtgatatcatacatt

SEQ ID NO: 2805 - DNA, 201 bp, Bos taurus
actttgacatagtgcccagcgcaccgtgactgcatttaaaggaacacctggcaggcaaagcgagctgctacactaaatgacaacatatgtcatgcatatgcatgtatgcactatgacatcaattcgcttgaaaacagctttgtatttaatatttagcaaagaaccaaatatgtgtatattactcactccatattcccttat

SEQ ID NO: 2806 - DNA, 201 bp, Bos taurus
tcagccagcattgactgcatccctgctgtgcacagtgaggccccagggatccacaaggagacaggactcatcgtctggcctcgaagctggaaaagactacgtggagagcatcccaaagcatggtgagagctctccggggatgcaggaaaggcccaggggagatccacagggctgaactggagcagcagatcagcagcagat

SEQ ID NO: 2807 - DNA, 201 bp, Bos taurus
ctttctgtacacctaacactaccacaacactgaatatcaactatatttccattaaaaaaattttaaatccaaggactaggcccaaaatcagtacgagcgaagtgcaaaagcatgtgcctggagacagggagatgcgaggacaggagtctgtgggtgactgctcaggggaggggacaggccacgtgcagaggagagagggtg

SEQ ID NO: 2808 - DNA, 201 bp, Bos taurus
gcctcaaacagcaggactgtggtcactcagggggcaggatccaggaggcccaggggccagcagggggagggttcacatgtcggtgtcctgtttgtcccccggcctttgtgcagctttagccaagcccagctcatcagatgcacacctggacatatactgtttcctgggaataaactgcacttcagtaacgttgactgacag

SEQ ID NO: 2809 - DNA, 201 bp, Bos taurus
tgtcaacattggcctgttatgattactgtaatcacatagaggcttttctactgggtggagtaagtcaggatcctgagtcttcctcctgaccaggcaccactgtgggcttggcctgctcgttccaggtttagcaggaatcctgatgagtcaatttagtgagaattccccacccttggtgttagggactgtttacatcaccca

SEQ ID NO: 2810 - DNA, 201 bp, Bos taurus
gtgtgattctatttgtggttcttcttttggttaactccaagtctttgaacaatatggctttttctctttttcatgatttattgacttgagatattatctacctgctccccatcatgaaaactgaaaaatgtatcttgcacgatccatatttctttttgtttttcactgttacaggatattattattttgctattttagaat

SEQ ID NO: 2811 - DNA, 201 bp, Bos taurus
tctaaattccatatgcatcatctgcaagcagctcactcttgagcctgaagatgtgcaagctgtcagtttcactcaccttcagggggatggactaaagcagcgttccactcaggactgagagctagcttgcagatttggggcagggaatccttgggtccgtggtacccagagtgtgacctagagggatgtgaaaagcttcta

SEQ ID NO: 2812 - DNA, 201 bp, Bos taurus
ttctggccgctctgggtcttcactgctgcaggggctctccctagctgaggtgagcaggggctcgtcccttgttgtggtgtgcagtctcctcttgtcgtgaagcatgtgctccagggcctgtgggctcagcagttgtggtgcacagggctcgttgcctggcagcatgtgggatctccctggaccagggactgagctcatgtc

SEQ ID NO: 2813 - DNA, 201 bp, Bos taurus
gggaagagtatttcaggcagagggaacataagggaggccgttgtgggtgcacagagtgaacaagcgggagaatggcaggaacgaaaaataagctacaccagagagagcttattggcctctgtaaccctgacttttgttctctatgaaatgagaagccatggagagggcggccatatttgtttttggccgccccgggtcttg

SEQ ID NO: 2814 - DNA, 201 bp, Bos taurus
atcaagctttcctgccttctctccacgttcccccatccatgcaccctaccccccagtgacaacaagcctcagccactctttcttatatttttgtttaatgaattgtgttctctgcctctgggcttttgtacaggttgttccatctgcctggaatattatttacttactcttgctgtatttcttgtttcagctcaaatgtca

SEQ ID NO: 2815 - DNA, 201 bp, Bos taurus
aaccgcaggctagggcccactcggactctgtagccatgaaggccctgaagccacacagtggagcctgaagcacaagcggatcaggctgcacactcattcctgttcatttttcgtctgcctggccgctctcccaagggagacttaagacacctcttagcattgggaggtcagtataaacccccgacccggatcagcctcata

SEQ ID NO: 2816 - DNA, 201 bp, Bos taurus
catctcatagctcggaatgctgaataagggagactgtatgcaaagtcactagcacatgtgaatcttcaataaaagccttgtctcctttgtgtaccttcctatagtatttctttttaacatgtatttatttatctggctgcattgggtcttcgttgcatgatgtgggatctttcattttggcacatgggctgtgtagttgtg

SEQ ID NO: 2817 - DNA, 201 bp, Bos taurus
tttttcccccctaaatattaggctacttaattcatttcagttaagatatatcttttttttgtgtgtgtcattttatggccccttgacagatttgcttcttaaattctatgttctattggattgcacattgtatgtaagaaagctgtgaacatttttacaaatcttataatttgtcattttactgaattttcttgttttata

SEQ ID NO: 2818 - DNA, 201 bp, Bos taurus
cctgcaatttgctcctggctttgttacaaagccctactgctgatggagagcagagtccaaaatcccttggttggcatgaagagttccctgtgtggcctctgctgagctttctgtttctcatgagcttcttggttggtacagccccccaacctggtcaacaggaactaccctcctattgtaatttgcacaccaagaggtgaa

SEQ ID NO: 2819 - DNA, 201 bp, Bos taurus
tttaaactaagttttggagtaatttgttacatagcaagagataactaatacagcctggaaccctagttttcttatagaaaattcatgcaatctatcctatctacaatgaattgaattttggacatttcaagtgatcacaagatattcaaaccagaatgtgtacaagatatttggtaaaacagacctggagcctaaggaacg

SEQ ID NO: 2820 - DNA, 201 bp, Bos taurus
ccactgcagtactctggcctaggaaatcccatggacagaggattctggtgggctatagtccatgggattgcaaagaatcggtcacaactgagtgactaacacttcactgagtctagagggcccaaagtatcaggtaaaggaatgagtgaaataaaaagagacaggtgaacttgaggatgggtgagtataaaaacaaagtct

SEQ ID NO: 2821 - DNA, 201 bp, Bos taurus
cattgtgggttttgcccacccacttatagtcaccaagaatctctacttgatccactaattatggtgtatgcagttgtgacgacatgtgatatgtccactaggctaaaccccactacatccttcaaagtcaggaagtcttctcttgattttcatttcctcttagcacagggctttgtttagcacatggtaaaggtttactgt

SEQ ID NO: 2822 - DNA, 201 bp, Bos taurus
cctcagctcatccacgcttgtggtttcaaataaacatgcgtgtaaaatgaccgccaagtggaaccctcctgttaggtaactgtcaccagcccctggccaggttgattcctttatacagtcaacgttaagagctggctgctgtgcttggcactgggaatacagcagtgaatgagaaaactgcgaggccctgtggaaggagca

SEQ ID NO: 2823 - DNA, 201 bp, Bos taurus
tatgcactaataaaaactggtaattctgataataatgtacatcattctgtaggcaattaaccaacagatccctggttctgactcactaggagagaagctctccatgcacagcaaggaaatccgccccactaagggctggcagagcagccgaatagcagagcatcctgcaaggtgaagaggcatgcacatcttcagttggga

SEQ ID NO: 2824 - DNA, 201 bp, Bos taurus
cttttttacctactttcaatttttagaatgtaaatttggcaccttaatcaaaatttctgtaacaaatgaaaacaatgatgtctaaaccttaccaactatataatcttcaacagaatagcaaatactttgcccaggacattcgagatcaaattgaatatgaaaagttttcttataagcccttagagcagatctgaacaagca

SEQ ID NO: 2825 - DNA, 201 bp, Bos taurus
atatcttaagtacttattgattttttaccttgaagctaataatcattactatgacttcaaaaataatgacagttgccagatgattttatattataataaattaacatgagtgaattgtcttagtgagacagcagtgattcctcagaagaaaaactttgtacagtgttctgaatgctcaggagtgctttcttagttcagctg

SEQ ID NO: 2826 - DNA, 201 bp, Bos taurus
ggatgagaaaggtggctgagttctgaagggaaagtagacattactgagaatgggagagggagaggaacagatggaaagatgggccagaggaataaatgagcatcatgcattttcaggaactgtgagtaatatatgataaacacagcacagtagcttatgtgtgaatctgagattagaaaaggggacagtaagtgaatcctg

SEQ ID NO: 2827 - DNA, 201 bp, Bos taurus
acttcctaggctataaagagctccttcaaaggttatatataacctcctctgaaaactctaaccaagtaccttctcatgataagcaaacagaggcctcaaaatgggaactttagagaaacataaaatcctcacatttacccctccaacttatctgactgactggtgggaaaacatagtatgattattgcaaagctggccaag

SEQ ID NO: 2828 - DNA, 201 bp, Bos taurus
agaggacccagggttcttttctcacgacaatccaactgtatttcctctgggagaaggatgctccctacgaatatgtggggttggaaccggaggccgtttagagctaaggaggggatgtttttgatgtctggagagttccaaccatgattagatttttgggtgcaaagactgcactgcgcattctcttcacggagcaatgtg

SEQ ID NO: 2829 - DNA, 201 bp, Bos taurus
caactggccattcatttggaagaaaaataaatttgatccctactttataccatgtataagaagaaagaaacagagctagaaaaatgtattagaagaaaacagaagaggatcttgggatgtggaggcctttctcagcatgatgggtaatctagaagcctgaaatgaaaagattcacagatccagctatttaaaactgaaatc

SEQ ID NO: 2830 - DNA, 201 bp, Bos taurus
ccgttgatgagcactggcaatctacctgtctccctcacctcctcgtgggaaaaccttcctgctttccctgcagtgttcctcttcctcctatgctctgaattgcctgcattccagcttcctcaagtcctgccctcactctaccattgcccttcctactgtatctgggacttccccttctcttgtcccttgaccatgaacaac

SEQ ID NO: 2831 - DNA, 201 bp, Bos taurus
atgacccgcacagactcataaacctcgaggtctttcggccttctcgagcccggtagaatttgtctgttacagagatacatgcacaaaatataatttttattccaagactgagtcatccaaagaggccatgtggtcttgagctgaaagaaccgtgctctgttttggagagtcagctggtgttctgtgtgatctctcagtgcc

SEQ ID NO: 2832 - DNA, 201 bp, Bos taurus
cctgccccccacccccctaccagcccaaccctgtcgagacccctgcttccctccctctctccctcagctgggccttatctggcctgttcagtgatgcgataaaacaaaaagggaagtttctgattgcacgaacacaccctttggagagattccagctagagaagagtccgttaaggaaagtgagagcggtggcgggaggcc

SEQ ID NO: 2833 - DNA, 201 bp, Bos taurus
tctctgagatagttgtgtgtgaaagaagcaggctacagaacaatatgatcccagttctgtaaaaataactccctcccttctctctcggtttctctccttcgttttttttttttttgtaaatgcatagaaaacgccctgatggatacacatcaaactattatcagtggttaccacctggagagaggtgggtggagagacggc

SEQ ID NO: 2834 - DNA, 201 bp, Bos taurus
taaagtattatacttaacatttcagagtcttgagtttgtctcatcaaatgcatttaatcccagttcttatttttgacattgttttgattatgtaaatatcgagaatattttctgtattttacatatgcttacagtatattagagttcacttttttttctgcagaatgaaatgtgaagcaagtttaaaagtgtataccatct

SEQ ID NO: 2835 - DNA, 201 bp, Bos taurus
gagaatgaccaactaggctttacaagtcacatggcaacatgtcagaggaaattttctcctaacagagttaatggtggctgtagcctgttgagatttatgatgaataagttgttgaagattgcaaccgaacctcttgggggaaaaaatactggcttccttggttgtggatggggagaaggaactgacagctgtcctactctg

SEQ ID NO: 2836 - DNA, 201 bp, Bos taurus
aaagaatttaagtttgttgaatacagatgtatttaagaattgcctttctttagaagtgggtttgttccccagctgagagggttgcatctaaaaatcaggccgaaaagatggatctatgcctggaaatcactgtttggctaaccccaaagttgccttttagataataattgtagccactttagcaacagcccattgctgctt

SEQ ID NO: 2837 - DNA, 201 bp, Bos taurus
ttgggggttggtgcaaaagggagttgagggggagactgtggaaagacaagcagtggggctttttcttaggagaacaggtttctggaataaaggggaacaccgtgagcagtagggctttgggaaagtaagggaagggagggggctccagagacaggctgcgcctcttatggaatgtagcccagggccactcttattcatgtg

SEQ ID NO: 2838 - DNA, 201 bp, Bos taurus
ttaaaaaatttcagcctactgccccatttaaaaatatatctattgtaatcaaattttggtgccaatccaatttggatgtccccttacaagagtggtgtgtggagtagactgacgcttgttggagtgtggcatttttgtgaccgaagctccagaatcatatcagcagttccagagactctgtacatcatctataaaacgtgt

SEQ ID NO: 2839 - DNA, 201 bp, Bos taurus
aaatgtccttaaatgatttggcccctgcctgcctgtctaaccacatttctctctcctgtcattctaagtccctaccactggtcttaggtctttaagcatattgagctccttctggccctaaactttaactcttaatggcctttcagcctggaatattttccctctcagtaactcctacttaagtcctgtttatctttatac

SEQ ID NO: 2840 - DNA, 201 bp, Bos taurus
gtaagccattcattccattcccaaatttctgtcttcctaagtttttccattttaatcttctgtatttagaaagaatttctgtcatatgaactttatttagtatacacagtcactgaggtattaggtaatcatctgagcaaatcatctgtcctatttgagatgatttgttgaatccaagatctcaggttaataaatttggct

SEQ ID NO: 2841 - DNA, 201 bp, Bos taurus
atatcttccttaaaagccaagttttagaacagaggcaaatggttagtgattcattattgaaaactgtagtgcttttggcattttatttcaaaaactatttcacatctaggccacatgaaggacatattttaaaagccattagctactttctttaactttaaaaaaatcttaagtaggcctattggcttattgagtcactct

SEQ ID NO: 2842 - DNA, 201 bp, Bos taurus
aagagctctgtgattagttatctgtactctaagtgtagtcaaataaaatttatttacttgtttgagttatttctagagattttcttgcactttaccataaagtaaccacttagttattataattttgttctttcatttctgtggctgtcaccctttgctttcccagtgctgccaaaaatagcagttggactttaatttctt

SEQ ID NO: 2843 - DNA, 201 bp, Bos taurus
tggactaagaagtgaatgatgaagaagtgagtgcaaaatggtgatcattctgggttgcaagaataacatgtgcaaaggccctgaatcaaaaggaatttgacatattggaggagctcaaagtgagagagtgcgaccagaaaatggagagcaaagaaaaaataggagatgacattagagaggtttggagggtagggcactggc

SEQ ID NO: 2844 - DNA, 201 bp, Bos taurus
gcatatatcaaaacttcaaaaaaaacatttggatatctttaaaacttagttttctgaactctgtattagtgtaaaattctgagtgcagagcttattaatgtgttgactgagctttgtgtgaagaggggaaaacctggattattgaagcagcatagccactatggttgtaggatctgaaattgtgagactgaactgaatgaa

SEQ ID NO: 2845 - DNA, 201 bp, Bos taurus
aataaaatggcctggctctgaatgttagaccagcttgtaatgacattgtggtctacctgtaaaatcagtccctgatatcaagggcttccttctttgtttttcttctctgctggcctagccagggactctcctccccactggggacaggaccccatcactctgttccttggccctgctttgcttagggtggttccctttcca

SEQ ID NO: 2846 - DNA, 201 bp, Bos taurus
gactacaagcatgaaactgcctatctcaaagataatgattttttaaaagcactgctttaaaatattactcattttgattactgagtttaggcatccactttgattttgcactggaagagtctactccgttctggagattatcctgttagagactaagagctttagcagcccaagaacaacccactgcagcccatgattcta

SEQ ID NO: 2847 - DNA, 201 bp, Bos taurus
gtttacatttatttcctctgctcagtgatccaatggggaagtcaagtagccatttctttaccattctggcatacttttcaatgggattctaccatagaggactcatctgaagagagggaaagttgcatgccaaagactagaggggagagaaaatttcactttcactaaattttgctgattttcattgattcttccctgagc

SEQ ID NO: 2848 - DNA, 201 bp, Bos taurus
ctggaatttgtttgtcaacaacgcttcataaacaaggcagctggaaattagtgagtggcagcccagctacttgttagcgcccagctcctctctcaagccataatccacatgctgtgcctttaaggccaggggcttgctggcaactccgggctgaactctgccctccccaggcagtgagtcagactggaaggctcagacaaa

SEQ ID NO: 2849 - DNA, 201 bp, Bos taurus
tggggatgaagaatactctaggtgaattatctgtcctagtgtctctcattgtcttcaatattaatatattaatagttgctgtgcttctcatggatgagtcatatgtacctagaaggtacagtgaagtgtggaaaactctgtagtctctcatctccaaaggtaaaatgggatagacaaccaacgtataaaaatataactatt

SEQ ID NO: 2850 - DNA, 201 bp, Bos taurus
ccagcagcaaggctcccgactggctttgtcaatttgttaaccaaatccaagttcatacttcccaccaaagccaggcaagtaaatcaagagttgctggtcatgttatagtgactttatttggaaaaccagcagactaagaacatggtgggctagtatcccaaaaagccatcttcctggtgagaactcaggcttcttttatac

SEQ ID NO: 2851 - DNA, 201 bp, Bos taurus
ggcggcccttcatgaactgtagatctgaactgtcagatccaaagaaccacgtttaccctacaacactccaagaagcagtatatgaaagaataagctttacgggccacaatgctatttaagtaaatgtgttacttacttggaacacaaaagcatacattcatatattacaggaagtgcttaataaaaatctcattaaataaa

SEQ ID NO: 2852 - DNA, 201 bp, Bos taurus
aatctaattttatgtttgccatgcggctgagtttcagccaataggcttccttttccctaatctgtgatatgtggtaccatttctttagatatatactgttgttctttaagtacatggacctatctctgggctccctattttactcattggttaatttctctatttgtgtatcaatacaaacttatgattggttactacaga

SEQ ID NO: 2853 - DNA, 201 bp, Bos taurus
cccaggagggggaactagatcccacatgccacactaagagcttgcacgccacaactaataatctcataggctgcaactaagacctggcacagccaaataacattttttaaaggtcaatctagaattttgcttaaatgggaagaaaactctgatacactaccataaggatgaatcggagaatattaggctaagtgagatagc

SEQ ID NO: 2854 - DNA, 201 bp, Bos taurus
tccatgggatcttcctgacccaggcattgaacccttatctctggcctctgcaggcggattctttaccacagagccaccagggtagcccactggggtctgtactgtaggctaaagaaccatgaaaatacaaagctggacatttaaacaggagaaagatagctatatgactttcccttctgagagaatagaagacctagttcc

SEQ ID NO: 2855 - DNA, 201 bp, Bos taurus
agaaacatggtatatatcatttgacaatatgtactatggagatcagcatatagtttcacttgagacatatcaagacaaatgatagtagttctggctcttcggaaaatgacagtggtaggagagagaataggaacttggatcctgcaatgatggtgattgtggagatcaatgtctctcaaaatgtgttgtctaaaaacatag

SEQ ID NO: 2856 - DNA, 201 bp, Bos taurus
ctatcggactgggaacgatgtgaatggtggaagtggttggaaagaaatctccagagttaatccatgcttggcataaaacaggccctttcctagcccttgggaagagtgctctggagcagctcactgccttgcctccagtatctatttgatctcattaggccctttagccctgtgttatgtggtcaccttgagaagctcagg

SEQ ID NO: 2857 - DNA, 201 bp, Bos taurus
tctgtcttcaaagccaacaacatcacattcttttgacccttcttctgttgttatgtatctctaactgtacccagaaaagattcttacctttaagcactcatgtaagactgggcctacctggataacccaggataatccccctatctcaaggttcttaactttaattacatctgcagcgttccttctgccaagtaagatcat

SEQ ID NO: 2858 - DNA, 201 bp, Bos taurus
agagcataggccccttggagaactccagctctcatggacttaggtccatgtccattctggccccaaaaaggtggcaagaaggtggccatagaaagctgccgattcctcttggtctctgtatgaagtgtgagaggtggcggtgttcttggagagaggacacaaagtttcaagcatacattggacgaacatggcccgaggttg

SEQ ID NO: 2859 - DNA, 201 bp, Bos taurus
cacagaggagttaagcaatttgatctcacacagtggcactgtaggtattcaaccttagttcacttggtgctagtctttaattttataatatactacacaaactttattttaaatagtatttattgataatttctaatgggctgctgctgctgctaagtcacttcagtcgtgtcagactctgtgcgaccccacagatggcag

SEQ ID NO: 2860 - DNA, 201 bp, Bos taurus
cgcaaaagtagagtaagggaccaaaaagcagaacaaataactggccgagggcatggaagtggtggcagagagctccacggggtccccatacatttcagacaggtcgagggatttagatctgggccattctgttgaggggaaggcgatggcaccccactccagtactcttgcctggaaaatcccttggttggaggagcctgg

SEQ ID NO: 2861 - DNA, 201 bp, Bos taurus
ctgttggaacaagaattgatataatatcattttattcccaccaaaattacagtttcttgagtgcttcccttttccagaccttgataagtgttttgtatcccttatttggttttatctttgcaacaaccttgtgagctaaggccgatcactcgtctttgataactaagccttagtgaggttacccagcttgtccaaaggcac

SEQ ID NO: 2862 - DNA, 201 bp, Bos taurus
tctacattaagccaaaaaaaaaaaaaagaaccccgtcgcaaagtcctcaaaggcttgccaacgctgtacagtgatgaggacatgcccccagagtaaagaactgctttgtgaaggcttcagtggagaattaatattaattctgatgtcgttgtattgataaatgggaaatttccacaaacccagctttacagaccacagagc

SEQ ID NO: 2863 - DNA, 201 bp, Bos taurus
cagattccagtgagactcctgccctgggatccctacgagtgcttggttttccttctccctcacgtgaactcttatggaaagttcccctatgctcttgctagcttgagtatggccatgctctttttaatctaaatgaaccgaaacagcacagaaaatgtgaatatggaaccatctgggcaaagcaagcactcttaagtcaaa

SEQ ID NO: 2864 - DNA, 201 bp, Bos taurus
aaaggcaaatgctcccctggtggcctgctctgcagtgaggctctgcaagtcactcctaagaactcaacctgaagttcctttcttcacctttccaacaaattccatatgccatttaacaccctgtaataaatttccctctgcttaaaccagctagagtggattctgttctctgcaagtggaccttgactgatacaatcagta

SEQ ID NO: 2865 - DNA, 201 bp, Bos taurus
agaggatgaagtgtaagttgaccggtcaccagctgctttgtcttgtcctgacagccgccctccccataagtgattcaggccattcttgtccctatccccagaccaccctctccccgaccacttaaaagtagctggtgctgaattttgactgaaggggccctgttatgggttgtgtctccctccagtcctaatcaccctgac

SEQ ID NO: 2866 - DNA, 201 bp, Bos taurus
ttctggattttagtcattctaatttgtatgtagtggtatctcattgttgttttaatttgtatttctgtgatgacacgtgatggcttggggaatggaataatgaaaggaaaattgagctgtcttcctttttgtgaggctattctcaggttttctttattgcactgttttgctgaagtttcttaagtggtctcctgaactctc

SEQ ID NO: 2867 - DNA, 201 bp, Bos taurus
tacctttctctgttccaggtgggcactactgtgggctgttattacctatgcttttccaggcaaatgttactgcaaaaccattaatattattaaaggtattgtttggcctcactgtgtgtcaagcacatggacttgtgttttggtaacaatatctgtggagaaggcaatgacaacccactccagtactcttgcctggaaaat

SEQ ID NO: 2868 - DNA, 201 bp, Bos taurus
cacgctctgtggccaggagggcaggcagttttcaacaggaaatgcgtccctgagcagtatccctgcacgctgcgatggagtccaggtgaggccccgggcccggggaacagcagctgggtctaaaggtcaggaaggaggctcagtgaccatggcgtgcgtggtttggtgggcaggggattccaggaagctctgttgataaca

SEQ ID NO: 2869 - DNA, 201 bp, Bos taurus
atgttgtatttaaattccctgtggggtaatgtaatgctgatccaaagacataagagcaatttgattaggcaactgcaggcctctgtgaatactttgagcctgaagtacttaagacttaatctcccccgtaccctataccccataccaaggttacccacggaggctgggccagccccacccctgacggcagtacctctgagg

SEQ ID NO: 2870 - DNA, 201 bp, Bos taurus
aacagagacctttcttagagaaataaaaaagggaatgatgctgagtagtcaagtaaacaaggtcacttaccaccatttataaatattcccttggccactcttcaaccaggaactcttcacagtactcttgctcctgtctgttggcatttgaagccagaaggcaggagagcagtgaggccctcattttcaccctctggattc

SEQ ID NO: 2871 - DNA, 201 bp, Bos taurus
ctagctccactccagccatgctagcctccttcccgtccttcaaacacagcagactcccaccacccccagggctttgcattatcatttctttcttatatatgtatatatatatgtatatatatatatatatatatatataaatgtatttattttaattgaaggctaattactttacaatattgtcatggttttgccatacac

SEQ ID NO: 2872 - DNA, 201 bp, Bos taurus
aataaactgacatgaggcagagctcgctagtgtggatgatcatacaaatgatggtttgtgtacatctgattgctcaaaaggcagataaaagcagatagggtttgtccacgttctttcttacctttggatatgagagatcttaccttttaagaacacactttgtacaggtgtgtttaggatggtggatcaaagaggagggag

SEQ ID NO: 2873 - DNA, 201 bp, Bos taurus
caccaggctcccccgtccctgggattctccaagcaagaacactggagtgggctgccatttccttctccaggggatcttcctgacccagggattgaacccacgtcacctgcattagcggcagattctataccacctaggtatactctaaagtgattaagcccagaactgaacgtctgtgtagtacggacagagagatgaagc

SEQ ID NO: 2874 - DNA, 201 bp, Bos taurus
gaagaaatgtcaaaggaggcataaaacttctagggcccttctcatgtggttcctgcctggtgaagccacccctctgcccccaagagtgaccccaggaacacagggaagggcaggcctcctcatctggccaccacatggggtgtgaaacaatactctctcacaaaaggtgttctcaatgtgcatttcctgggcctcaactaa

SEQ ID NO: 2875 - DNA, 201 bp, Bos taurus
cccacaattccagagcatcctttggtttctgacttccagacactttcctcataattcattaccctgaaccttgcttatattatagacaagctctttgaacttgagctcctgtctcccctggacagatgccaatgatcaagtacattggctcatgtgctcagacttagcttttcccagaagcgcagagccacgttgctccca

SEQ ID NO: 2876 - DNA, 201 bp, Bos taurus
gggggcataagagaagtccttgtgattgaaacagcaaaacagaaatggggagaaaagatgtaagccactggttctggaaatagagaaaggggccataaaataaggaatacaaagaaggtggctccagattctggaaaagccaaagtaatagaatcccctccccaccacacctcacctcccggcctctggactccctgtcag

SEQ ID NO: 2877 - DNA, 201 bp, Bos taurus
ttgaaagcattttggcaataagtatcaagaaccataaagacattaacatactttgacagtaattccacttttaggattctaagaaaatactcttaaatccacaagaggttgtgtgtgcagaaagatggcagtccacttaatggaatattttttagtgttcaataaaatataaagactcttggtttcataatttcagttaga

SEQ ID NO: 2878 - DNA, 201 bp, Bos taurus
tatgtaaaaacataaatacataatttttaggatgcacttcaaattgttatctccatagccagaattcaaaaacaattatcagtagaagctcatgttcatagtgcatatttatctttctaatctcaggaaacaaacaattttttgagaaataggaaaatactggttaagaaaagccttagtttccttgcaaattgatgtgtg

SEQ ID NO: 2879 - DNA, 201 bp, Bos taurus
aaatccattaaaaaatgtatttagcaggatgaggacttcataaggcaggtgtctatttcattgataactccggagaaataacacattccagtcctagagatgtttttgaagctcatgattgagtgtagaactattctatcattaccagaaatgttcattaagcacctcgttttctcctttgtatttttaaataaatcaatt

SEQ ID NO: 2880 - DNA, 201 bp, Bos taurus
cttagagaagttaaaatgcaaatacagagcaattcaaaaagctgctcgtttactggatatatgtaaagagaacccactccaaaacttgttttccatctaagataggaggactatttggaggaatactgcaagatgcattttaatcatcatcctcattgtgatatgtctgctaattttccaagctctgtacatgtactatga

SEQ ID NO: 2881 - DNA, 201 bp, Bos taurus
aaaaaaaaatgctagcatgcttccactttctctctcccttctctgagactgccgtgagaacatgccccggccaacctgagaatgtgcctgggctggccaactgaagtgatgctgaggcttgtgaatgcaagagacatgaggaggtaaacccagcggtcgtaagagatcagctgttggccagctgatccccagatatctgag

SEQ ID NO: 2882 - DNA, 201 bp, Bos taurus
gattcatgggcctaacattccaggttcctatgcaatattgttctttacagcaatggattttactttcactaccagtgaaattttacatccacagctgagcgtcatttccactttgcctcggccactttcttctttctggagctattagcaaatgccctctgctcttccccattagcatactggacactttctgacctggag

SEQ ID NO: 2883 - DNA, 201 bp, Bos taurus
tggtgtggtatggtatagtgtagtatagtatctggagaccagaaagttaaacttataaaagtattatatactaaggttatcattttcactgatggcctaataagggagaaagcaagagttagaagagactttaggaagctctttctgttaacattgtgatgtagtatgagtgctggaaaagagaaaggatttcaggagaga

SEQ ID NO: 2884 - DNA, 201 bp, Bos taurus
aggaaaacacttgactggtatcatggctttgaaatttggcctttgatacatggtactgggatgctaaaggttattctcaatctttttattttcttgactgctttctctcaggccatactctgattttattaattcttaatcttatccctttcagtctgtttcatgatggtgtataggttggaagaaaagactgttgcttgg

SEQ ID NO: 2885 - DNA, 201 bp, Bos taurus
aaattcaacttccatagtcacattttccaaactctgctccttggaataaaatttccatgtggtactaattcatggggtggtggtggttggggcactgaggggctggggaggtaagtccttgcctgaatatgtttggaaagtggtgagttaattaatcaaatgggtttcttttcctaggccctctcagggcttttatcatgt

SEQ ID NO: 2886 - DNA, 201 bp, Bos taurus
ttgatgttgagttcttcagcatcttttcctgtagttttaagaggatcggcttctatgatgctctcaattggtcgttgtgaacttcggatggccagtcattatgctcctcatctttgcaaaatttcttgaagcaccactgcactgcatgttcattagcagtttctgggccaaatgcattgttgatgttgagagctgcctcca

SEQ ID NO: 2887 - DNA, 201 bp, Bos taurus
atcttcaaatcaatctcccaatgggaccatgatatgtcaattataccctcaaaaagcattgcaaaatatatcccctcctgtccatttccactgtatgcttcagcagtatcttttgacattcccagtagcaaatgatcttcaaacagaccttggcaatatcttctacctatagtctttccttatataacagtttgttttctt

SEQ ID NO: 2888 - DNA, 201 bp, Bos taurus
tatatgtgaaaagcagttttccagtaccgcaacagataactgtttcaaaggatgcatgagtgctaatgtgctatgggagctgatgttttaattggccctcgattctctgaaagatattctttcttgagaagggctggaacctctgaaaagctgctgggtagctacggcctgaaatcacctcaacctcactgccatcataga

SEQ ID NO: 2889 - DNA, 201 bp, Bos taurus
ctcattaaaatctacagaggccagaatgcagtgaggtgacatattttaagtgctgagcagatcttgtgggcccacgtggcccttgctgccctcacctccacttgctcctctcagtcctctgcccgctcatgctgaccatgttcacacttgctgttcccaccattctgactgctcttgttctcatgctcactgaagtgcctc

SEQ ID NO: 2890 - DNA, 201 bp, Bos taurus
gtagacttgctaatgatggccattctgactggtgagatgtggtacctcactgtagttttgaattgcatttccttcattagtgatgttgtgcatttttccatgtgcctgttggccatctgaatgtcttatttgaagaaatgtctataaaagtcttctgcctgtttttcaattggagtgtttgtttttggtgttgccaatttg

SEQ ID NO: 2891 - DNA, 201 bp, Bos taurus
gagtcattccaatttattgaattaattgatataagtagctatagtattttgatgtaatttatatctagagtattgtcatttgcattaaatattttttgatcaatcactatgtgtaggctgctgtcccatataagttggactcagttttaaagtcaaaatcagtcatgtaatagtatgtgttagatcacatatttatttctt

SEQ ID NO: 2892 - DNA, 201 bp, Bos taurus
taagaatcttgtatacatgtacaatgaatcctgtacatttaatcacatctttgatagccatactgcatgattgtgtacattcctggcaacttaatcaagtcgcaaatactcccaacagcagcatcagtaaggaacaaggaggcattgctaaagacaaaagaaaataaattactgcttagaaatgtaaggccttgtttcaaa

SEQ ID NO: 2893 - DNA, 201 bp, Bos taurus
cccctgccccttgccgaccaactgctcatctgggttttgagatcatagataagtttacacctttgaaaggaaggattcatacaaagttgacagtgttgaggacttcattaatattgacctccagcaaattagcccaaaggttaacaagttgaagaagccttcagaatcaaagagcaaagaggagttgatgaagaatccata

SEQ ID NO: 2894 - DNA, 201 bp, Bos taurus
caagctgatccctgtgatccctgaatccaacaggagttcaaaaggattctgcgcgtctcaaagggcataaactgctattcgtttaggattttcaggcacactggggcttcgccacagaagagctgatgctatccggcctcgtgattcggccgccgctgctgaaccagctcaaaccgcagacgaatccagatgaatctgaag

SEQ ID NO: 2895 - DNA, 201 bp, Bos taurus
ccctggtgtcctcagacaggcttccctgtgaggatgtggggaatgcactgacattcagactctatacagattccaggccaggaatccctcaaggctatgtacacttagaagggtgcctttttaaaactctcatcagttttaatgatgagaatgagccagctgcagtcccaggccttagaagctgtttgtcatcatcaaggt

SEQ ID NO: 2896 - DNA, 201 bp, Bos taurus
aataagaactgatgtgtttcagtccatcctcatggattccagctcatccttgcaggttttcgctcactcttgatatctccacttcatgcccatcttccctcatatctgcctgctttgtgaaatttaagctccagatcacacaaggaccttaaagacaaagaccttaaagaaactgcttgttgttcagtggcccagtcatgt

SEQ ID NO: 2897 - DNA, 201 bp, Bos taurus
tagcaaacagcttaataatagtaagaggttttcaattagtcactttttattgagttttttattctactaggaaatataaggagaaaatgaacaaatcttttcctatttgagtccactcagtgccgtgttagaatgagttcaacatcagctctcaagagctaattcttctcgcatttttccaaccttcgattgaaaatacaa

SEQ ID NO: 2898 - DNA, 201 bp, Bos taurus
tctagaaatttcaagtactagattcaagaaattaagaaatcttgcttagatttattgtttttatcctttggtcttcatcttctgggagtttcagacttgaatacaagactccttaaaaagtaaactaaaactgtgtgttaaatagttaatcatatagtgtttgcaaaggcatcacagttgagggctgaattatataactca

SEQ ID NO: 2899 - DNA, 201 bp, Bos taurus
atacaaagttatacgggacttgagcacagcgggttgtactgctgaaagatttccaagggcatgagcagatggagatcagtttattaaagaacgaagcagatgtgtttcaggtatgaaaatgtctcatcgttctcttgtgctgtgaagaggaacttgaccttattgtgcattttcatgtgaattcttttgtttcatgtttta

SEQ ID NO: 2900 - DNA, 201 bp, Bos taurus
cagtgggttgctatttccttctccaggagatcttcccgacccagggattgaatctgcatctcctgcattggcaggcaggctcttcaccactgagccacctgggaagcccaccttaacaaaatcacatcccaaattccttttgaatttaaaaattttaaaataggcaatgtattcacattgtttaacaatcaaaacaacata

SEQ ID NO: 2901 - DNA, 201 bp, Bos taurus
aaaacaaaaatttcctaactctatgtacctttttctggttttgtttgtttgggccagtctcaacttaatgatgaataaacaagagatactcgagttttcacgaattatggctttcaatctttctcctctgccactgaatgcaccttaggcacgtcatgaatcttgccagttcagttcttaaaagtctgtctagttcaaaac

SEQ ID NO: 2902 - DNA, 201 bp, Bos taurus
taagggatgtcacctgaatggcctatctatattctatattatatatattctatattctcttagttgaatatttgggttattttcttcaacaatctgcagaagtttccattttcctattggccttacttgactccctactattcactaaaaggctcaagttctaagactaaatacttacttaaattttaatatttgacaaac

SEQ ID NO: 2903 - DNA, 201 bp, Bos taurus
agtgcttggcagctttggggaagttgtgatgaaacgcagaaggagagttcctaagagcccttggacaaagtaaatactttatcccaagagaagaggcccccactcagaagacttccagtgaatttcctctgagaatattctgttaacatagaaaatctaaaaactctttaagttggagagaatgcacaaaagtcgacagag

SEQ ID NO: 2904 - DNA, 201 bp, Bos taurus
attaaggaggccaagaaccctgttcaataacactaatatcaaacttcttgatagtcacatgtatcattttcatttttttcatttagaagtacactttcttgaaaacagagcacttgaaggattcatatcttttctttttcccaattcgtttatactttcttcgggaactagcacacaagtactctatatcaagttgaatta

SEQ ID NO: 2905 - DNA, 201 bp, Bos taurus
tttccggtttctaataatgcagtttcacaccatttatcaaaaattcttaccaaaaaaactattcagagaagttatacaaattgttgcagctattttacagataagggcttcagacattttacaggtagaaaacagaaacttggaaaattgaagttacttgtcaagaatagaccacaagcaaacaacatacagagctctcaa

SEQ ID NO: 2906 - DNA, 201 bp, Bos taurus
atatcgattagacctatccttattcttccagtttataaacctcctggtcagcttcttcctagctgtacatcctggtgagacactttgttgtctcacttaccgacaccctcaacctccatgtcttttcatggcagctaattacaaaaccctggccatgaatcaatactctcatgtgttttctttgctcatgtaaccagattt

SEQ ID NO: 2907 - DNA, 201 bp, Bos taurus
tcagatgattcttaatattacatgtcaaatatgtaagaattgatacggaagttttgaagaaaatagtgaggacctaccatagcagaaattaaaggaaaatgtaattattgtgataaaagaagcatgccacaatgaatacataaatcagtagatggaatagaaagcttagaaataagaatttcatatatgatatatattatc

SEQ ID NO: 2908 - DNA, 201 bp, Bos taurus
gccagtgacaatggtgtcattggtatgtgtcatttggtatagcctgttgtgttttgaaatatacacagtaagtgtttaaataatatagtatggctataattagactccatttttagacaaagatatgaaaaagatcacagagtgagacagatttcaagaagatgacaaagcaacaattgtttttgtttttgtttttgtttt

SEQ ID NO: 2909 - DNA, 201 bp, Bos taurus
tcaacccactaaaccttgcatttgcagagcaaagaaatgcagttacagcacatttgttaacacaggataggattagcagtcctactgcgtgacaagtaatgcaaaataatcccaacagaaaatactagtttctagccggcccttcagaaatgtttgttttacaagacagcataatacttgttaaaacaagatgatgtcagc

SEQ ID NO: 2910 - DNA, 201 bp, Bos taurus
caactccagtacttttacctggagaatcccatggacagaggagcctggcaggctgccatctgtagggtctcaaagagttggacacgaagtgacttatcatacatgtgtggagcatcgtattgaaactgactattctataaggctgaccatcctatgaatttgttaaatctcttttgactgataaattaaatctcttgcctg

SEQ ID NO: 2911 - DNA, 201 bp, Bos taurus
ggcatgacttagccaagtcattatcctagcataggagggactgatagttagacaaggctacatacactgcattggatattttaattttacattgatgataatgcagttacatttgtatatgtgtggcaatatacttttcgatatgtgttgttaagtagaattgagtcttggctgaagaacctggccagaggagcaaaagga

SEQ ID NO: 2912 - DNA, 201 bp, Bos taurus
ttagtccttgattattagtattttatcatgatgtttaaggttatatgaactttcactacaactgaaaattgttacaatggccaatatagatggaagggtaggtcatattcttgttcaaccacaaaatctcacaccagtggataagcagtattaggccttggatatcaaatgatgcctaacaatattatcattagtatatag

SEQ ID NO: 2913 - DNA, 201 bp, Bos taurus
cttgagaaaagcccagtggtctggtactatattcattttaagagtttgaggtcagcttttatttttctgagctctgtggaatttgtctgcgacaagctaggtatgacaaccggatctgactttcccagactcctttttcctggttatccttgtgcttcaaatattctctaagttggcaaagattagaatatacaggttcat

SEQ ID NO: 2914 - DNA, 201 bp, Bos taurus
ctccttgcttgactcttgtcatctgactccagtgcccatttcccatattgagaggtaaaagatagtttcagctaacctgatgtccaatcagctgaccaacaaattgctatccattttatatatatatctcccaattacatgggtggttttcttggggttctatcacacctctttaacttgggcacttgtggaataagtttc

SEQ ID NO: 2915 - DNA, 201 bp, Bos taurus
aaaagttgtaaggagagggagaggacaactttctatggttttgaccgttgtacttacatctttctataatgaacactctgcttgaagtttccatggactcccagcatgaagctagtttgagagtgtctatatcttgtacactgggtatatagaaaaaaggactaggaataataggatgcattagatacataaaagtattat

SEQ ID NO: 2916 - DNA, 201 bp, Bos taurus
gtgaaatcttagaaaattaccttacttcttctttaatgaatgataatgaatattttacttgggagattcttggtggggaattgaaataatagcaaaaaatggaataactcagaggtacctaaatgattggagctataaaataatgaagaaagaaagaaaagaaacatggatcctctacttgattacatggatcttcaggaa

SEQ ID NO: 2917 - DNA, 201 bp, Bos taurus
atatcaaacagggaaccattcaggccatacgttagcaagcagccaagtaattaataataacacacgtggaagaaaatgaatgttttggttgagaaggagactgagaagtcagacaaaggcctgggcttcatgtccttgccctcagcagcagcaaaaataatgttatgaatagcatttaacttgaatttgcagcaaactgct

SEQ ID NO: 2918 - DNA, 201 bp, Bos taurus
tgtgtagcagtccatggggtcacaaagagtaggacacaactgaatgactaaactgaactgaaaaatgagatctaattactggggaagatacagctaatttagctatatcttgttactggcccagagtgagagcacccacaggctctgttcaacccaccttaaacttctgggaaagcactaaagctataaaaagtatgttac

SEQ ID NO: 2919 - DNA, 201 bp, Bos taurus
ttttttaaaaacccattaaaaaaataatcacttgagcctcttaatttgactgatattttatgaattaaattaacaaacagtaaaattaaagattttcctactggtttgtaattatatgaattttatgtagctcaatgcctacatgttgtggtaggcagaatagtggacccccatacttacagactttatgaacccttatct

SEQ ID NO: 2920 - DNA, 201 bp, Bos taurus
gatggattcaccctctttagtaaattccatctctcttcggctaacttcaataaatttttatattttgtgatcacaagttgccacacacatttgtttgctaagttgcttcagttgtggccaactctttgcgatcccaaggactgtagcctaccaggttcctctgtccatgggaattctccaggcaagaatactggagtgggt

SEQ ID NO: 2921 - DNA, 201 bp, Bos taurus
agtcacagattttgtaggaatatttctttttttggcactgaggtagtagatgtcctcctcagtttctttctgtatttagacatggcctaatcataaacctcggagaaggcaatggcaccccactccagtactgttgcctggaaaatcccatggacggaagagcctggtaggccgaagtccatggggtcgctcagagttgga

SEQ ID NO: 2922 - DNA, 201 bp, Bos taurus
atgctttggatgtgtttaatccttgtcacatgtaatgtatatctcaaagaatctaatctacacttcatcctggtatttttctactttctgatgggttctagaataaataagaaaacctattatggggaaatattggcaaacctactagttttaacacatattgttctggcttccctaagtaaaatctttggttttactgat

SEQ ID NO: 2923 - DNA, 201 bp, Bos taurus
agcacagcaaaatatccaagaacagatccactgaagggggttagaacacttttcctttactggcatggccactcccccagcgtggcccagctcagttgcagaaaaggctccattcagtcccagatttccctcagcatcgggatggagtgtttagcttcctgtgcctcgcaggatgctgccgcagaggccacttctttctca

SEQ ID NO: 2924 - DNA, 201 bp, Bos taurus
attctatggagatctcggttgggtaaggctggggacgggggccctctctcaccatattttcaggccaatactgctgatccctgtggtaaatgaagagaaaaagtggaaactctactttctggtcacactttattataagagaaagtcagaggccactctttataccaaggtgaaaggagtaaagtcaaaatcaagtgcctg

SEQ ID NO: 2925 - DNA, 201 bp, Bos taurus
ctttcccaactttctttcatgcctcaacacgtgctctgatatctatttggagtttctctgttttttgaaaaactctattcaatactttcaattaaaattcctctcccttttcaacacctatccatgtgaagaagagttaaaagctctcagagtcttgctagattttggttcaagatggtgacacaggaagctcctgaactc

SEQ ID NO: 2926 - DNA, 201 bp, Bos taurus
gcatggggtctagtggaggaacctcctctcagtggattggaaccactaaattctactgttaccttatttataaactaaatattttaaagggccctcattacttctcttttctttttttctttttaacatatagcgttcagttcagttcagttcagtcgctcagtcatgtccgactctttgtgaccccatgaatcgcagcac

SEQ ID NO: 2927 - DNA, 201 bp, Bos taurus
acagcatttttgttttggatgatggaaaagtttggaaatagtgggaatagatatgtaacattgtgagtatacccaatgccactgaaccatacaactgaaacgttgacttaaaacatgctgaattgtagaattagaaatggtcaaattaatcaactttctgttgtgaaaattttaccacagttgaaaataaaagaatgaaag

SEQ ID NO: 2928 - DNA, 201 bp, Bos taurus
aattcatattgatgtatggcaaaacccgttacaatagtgtaaagtaattatcctccaattaaaattaattaataaaaaataaaacaggaaaaaattctttatctttaagaaatctaggcccacctttcttttcttatttctgtgctcttagccatttccccctttcctcattccacctttttatatatcctatattctcac

SEQ ID NO: 2929 - DNA, 201 bp, Bos taurus
aaattttcaattacttatgcaatatttgaatcctctttttgaatgactgcaaatgaattttatccaatttgcactttcatgtcatgaatattctcaccatagggtgatatcaactagctctcaaacttgttgaaaacttaacactgcctttctagagctactactaactggctctctagcacactgttgtcacaccttact

SEQ ID NO: 2930 - DNA, 201 bp, Bos taurus
tcctattaattcatataattctttcataatgtactggtattaccatatgacttttaaatagattgaggtaagtcattatactgatggactttgggatattacaactatctcttattttacaaagatctctgtatctgtatttatataggagttcaggctacatttttgtttttatatgctaacttcataaggtttcatatt

SEQ ID NO: 2931 - DNA, 201 bp, Bos taurus
tagaatttaaagaactggtggaatatgaagactaatgaaaacatccatgcaaacacacacgatcttacatgaattactgggaaaatagtgggataaaccactttcctttggttttaaggaaaaaaaatgtagtatatatacagtattatcaacaactttttattctctgaaccagaatcatctttgggatctctcagagta

SEQ ID NO: 2932 - DNA, 201 bp, Bos taurus
gtgagtgcctttggggccccccactctatgaagactccatgttttattgcacttcctagaaactccagcaaagttgaaagttactcccacccaccatcccgtgacttagccttatttttaggccccactgcagagctgctggagggggcccttcccttctgcccctgaaagctttgctttatatgttttagattatgggca

SEQ ID NO: 2933 - DNA, 201 bp, Bos taurus
aacacataccacttccctctgtcataaaggctggtagtccggaaatagaagaccatagaagccccccgaacgtacaagtctcttggtggaagtttagacgctggtccaaagagttaaatgcttcgagatgaacatgaaaggggctaagagtgggcagaaaaagtctacgctgtacattcagaaaggtagaagttcaccagt

SEQ ID NO: 2934 - DNA, 201 bp, Bos taurus
acttttgtggcctgaaatgctccatggcagactgcacagaccttatcttctttcccttgctttagacacgtaggaggtgctaacatcacttcttcttcttcttttttttttttaagaaggagaggccccatctcttaggagatgacatattgagactcagtctaggaagtcagcataaaccacaccatagtaaccgaaact

SEQ ID NO: 2935 - DNA, 201 bp, Bos taurus
ccacattaacaaaatggagaataaaaaatcatataatcatctcagtcagcatagataaagcattccacaaaatttcacatcttttcatgataaaatcttccaagcatcttgctggagagcggatgtactgcaacatgaaaaaggccatatttgacaagcccacagctaatatcacactcaatggtgaaaagctgaaacttt

SEQ ID NO: 2936 - DNA, 201 bp, Bos taurus
ctgagaatttgggggcagcatgtctaacggatggggttttactatttttaatcacacagctcttaggatttatcctaaaacctctcactcaagactcatctcaaagcactttcttctgatgtagttttttaggatgttaatattctctgagtggtacattgccatgaataatgtctttttattaattatgttactatatat

SEQ ID NO: 2937 - DNA, 201 bp, Bos taurus
tgtgtagtctgaaaaggcaatccctgtcttaaagcttccctaagttcctgtcaaaagcaaatgataactttctctagacaaatcaaccatcaaatcaagcctcaatttttccatgtatcaagttcctgggtcaccacagaacttaagtacaaagtaaactaggaaagaaggagtaggagtaaacatcaacagaaaagctaa

SEQ ID NO: 2938 - DNA, 201 bp, Bos taurus
atgcctgtgttaggcttttctagaggaagttaatacatatataggccctttctaaaaagtctgtatggcatcagagaagacgaagcatgttgacacatagctacacaagtagccacaaggcaagcttgcagtgaaagttataaaggagatacagagtgagatgaaattttggaaggtgaagcagtgtttttaaactcaaga

SEQ ID NO: 2939 - DNA, 201 bp, Bos taurus
cccaggcactgtcatcaggttcagatagggggaaaaaaaaaaaatggatcctgtatggtctggattagcagactctgtgagcccatgtggtcccttgggacgtataaaaaggaaaatgtttaataagtggctggtatttctatgcttttttgagaaagtttaattttcacttctgtcaagttgcccagttacaagaatgga

SEQ ID NO: 2940 - DNA, 201 bp, Bos taurus
atagagtaactttcaggagtactttttttaaatttccatattttaagaagtatttggcagttccttcaacaaattctagcccctattatataatcagtaacctcttaaagaaagctgtaataacttcaaaacttaagagccaccatatgcttctttttgcacacagaatgccaaaataaaacttaattatgagtaccataa

SEQ ID NO: 2941 - DNA, 201 bp, Bos taurus
tatgtttgttgtgtccatgggaggaagtaagttcaggatttttctgtgtctccattttgaacagcctcctctaaagtctctttttgaagagtaggaggatattactggtgggactggggatttaccattctctggattcattcaaggaaagtcagtttctttaagatcaaacaaaagcatccagaagaggtattagtggtg

SEQ ID NO: 2942 - DNA, 201 bp, Bos taurus
atatttgatccagcattattctgggtgtttctctgagtatgtttttggacaagattaaaatttgaatctgtagactgagtaaagcagattgaacgtttgtcatgtgagtgggcctcatccaacttgttaaggcctgagtagaataaaagtctcaccttcccagaatgagagcacattctgcctaatagccttcacactggc

SEQ ID NO: 2943 - DNA, 201 bp, Bos taurus
ctgaatattcacagaaattctatgaaataggcttgataagcccactttttgtaaatgaggaaataaaggcagagtgtttaataacatttctgagacagtagctagtgactcatggtatgttatggatatttctcaggaaaatcctgaaatggtggctaaggctctctaatattgagaaatgaaaatatttcacgcttgcgg

SEQ ID NO: 2944 - DNA, 201 bp, Bos taurus
aggctgctgaatgctgatttcacagggtgaagctgcttttccagttaggggcacaagaagagaaaacagacagatatggataaggcataccttggagagattgttggtccagttccagaccaccactattaagcaaatatggcaagaaaatgagtcacagaaattgttttgttttccagtgcatatgaaagtcctgtttac

SEQ ID NO: 2945 - DNA, 201 bp, Bos taurus
aaccgtaacttgagacccaagtagctctcaccttgaatctgccctgtgcttggccccatctatgagaggagggaaattaaacacctgcagggataccccgagtagcactgcaatgtttgaggcagttaccaggtcccttttgtagagcttcatgaagacaaatggaaagtgtcccatcctaatgaagtcgtggatgaaagg

SEQ ID NO: 2946 - DNA, 201 bp, Bos taurus
ctgttaacccatttctagacaaaaccatgataaatgtactaaagtcagcatctgccttgctataaataggaatgtgtattcattctggaggtaaaattcacttggttaaacagatcaagagcgtatctaataggttgttattaataaaagcacataatgatctattaatacaagcacaaaataggtaagtatttttctcct

SEQ ID NO: 2947 - DNA, 201 bp, Bos taurus
caagcccctaaatactttattgtatacactacatttttttcatagttacatgtttgtgagactagtagattattgaggtctttgaaaatacaaagcttacgggaaatactgaaaaatactcactgaagatatatgttcatttttgttgaaatatagttgatttgcaatgttgttttaatttcaggtgtacagcaaagttaa

SEQ ID NO: 2948 - DNA, 201 bp, Bos taurus
aacttttgtttgttaactctcatatgaaaagataagtcaaaatagcaagttcttttgtttgttctaaaaatctaattaaagttgattcttggctagaactattattcttccttcctgttttctcctctcgtctctttatgtattaagtgttctttgttgtgagactacaatacagatattcatatttgtttgtgctgaagt

SEQ ID NO: 2949 - DNA, 201 bp, Bos taurus
atttttttggctgtagacagaggccttgacgctgcagccctgggccaggccgaccttcactgaagaaaagcggcgttagacattttcccactattaacccagccagccttgcttgtctcagagccagatcagacttgtgcacatggctttttgaaagttgattttcaatttcttattaaccattctcctgaaatgttgaga

SEQ ID NO: 2950 - DNA, 201 bp, Bos taurus
taacacggagctctaacactggtccttccatcacttcaaatttttgctgtgatgagacagaactgaggaaatcacatactaccctgacgaatatggtgccatgactcagatttaatctcactgaaacaatcttagctgggcccctgtgaggcaaaagccaagcacagcagaagcccaaatcagcaaaagcttccatggtgg

SEQ ID NO: 2951 - DNA, 201 bp, Bos taurus
tgtaaaggaagtggccacgaatactacagacacaaggacctgaatgctgcagacaatccataagctgggaagcacgttcttcctacttgagccttcagacgagaactcagtcctggccaacaccttgattacagcctcgtgagattctaagtacaaggtccagctaaactgtccatagacttcatactcacagaaactgag

SEQ ID NO: 2952 - DNA, 201 bp, Bos taurus
caaaacccaacaacaaccaccaccaccctcttgcacttcaaatttaatttcagtatcacctttctagaggatctaaactggcagttgctaagagtgtcctaaatacctggtaagtgggattggaatctgaggagtggatcgcttgccatcccaagtagtatgtgagacacagttcctgtaaaaagtggtgctaaaactcac

SEQ ID NO: 2953 - DNA, 201 bp, Bos taurus
aatcttggacaaaatgaagagtttctgtgtatattttcattttctttacaggatatatgttccagccttcaaaatccctagtgtacactgccagtgacttttgaggaccaaatttctattttaattaaattcttgcttggaaaaattagaatttttgttttatgttaatatgtccttaaatatgttaagtggcattatgtg

SEQ ID NO: 2954 - DNA, 201 bp, Bos taurus
aaaatgatatcacttaccttgtttgtatttcaggaagagggtgagagtaacaaagcttattcagttgaaatttgcactcgtcttagttgagaaaaatgagtaaattaaaaaagttaaagccactaaatcagaattcttacatattcttatgtggcagtgtctgacaaaaagtttgcaataaaaagaggaaggagaagtaca

SEQ ID NO: 2955 - DNA, 201 bp, Bos taurus
attttgcatcaagcctactttgggatatatagcattttcatcttataccacatctatgtgcctcagtcaatgaacatcataaatgtcagaatacatatgatattgtatattatgaaatccccatcttttctctgaagcccaacagaaatccatacctggatcattaataaggaaatttgctctcaacacagaccatctagc

SEQ ID NO: 2956 - DNA, 201 bp, Bos taurus
cttttaaaggtgtaaaatgtagtacaaactttttctctcatcattgttctccccatacttaggtctctctgttatcatacaatggggaagaaagggggaaaaggaggtagtttgaagcaaagttgttgtattttcaaattactgaagaaatgtaacccattcacatccagatgagggtagttacaagtctagatatttccc

SEQ ID NO: 2957 - DNA, 201 bp, Bos taurus
gtcaactcaaaaccccggcatcactctatatttgcagctaatactttcacaatgattcaagatatagcttcaggaggcatctaactactttattctttcctggtagccatgcttgaacgctgctgaaatacattttattgtattagagttctaaatgaatttttcccccctattgtgttggtagatcactactgggttgac

SEQ ID NO: 2958 - DNA, 201 bp, Bos taurus
ccagtgggatttgattacagaacttccaacaggactggggaaactgactcttggaggcacaaataaaacctggaacacaccaggactgaggagaaaggagcagtggccccacaagagaccgagtcagacttgcctgtgagtgtcaaggagtctctggcggtggcgtgagtcaacagtggcctgccacagggtcaggggcac

SEQ ID NO: 2959 - DNA, 201 bp, Bos taurus
gctacaagagaaagcaacacaaggatagctgtcagctgaatatagcacttgaatttcattgcagccttttcttgatactcaatctgtactgtaattgaaagtgagaactatcagggttgagaattttcctcctgacagaagcctttttttgacatccctgttcattccacctgaactctacacttaggcttctgttgctgc

SEQ ID NO: 2960 - DNA, 201 bp, Bos taurus
cacactcgtagagccctcatccctttcatctgggctgcacctgcagcttgcaaactgaaagagcatggtagaagcgataactgccagtttcaggcccaaggcttgacggtacctgcagcttctgcttttgtggtttgtggtgctaagccatcatataagaactccagccaccctgatgagattacatagaagttcacttag

SEQ ID NO: 2961 - DNA, 201 bp, Bos taurus
tgctttctattgattaaaaagtcattttaaaaatctgtgatctataaatacctattctctattcttttcaaacatttgattttaaaaagcaaggatttatgtgtgatggccttatcagtggcaaacaaaacctatttccaggtaaataatttagccttgatggtattctgaatttctgttgggtcatactgactggattaa

SEQ ID NO: 2962 - DNA, 201 bp, Bos taurus
cacccaccagcaggccagctgccataggaacccctaagcacccagccacctgatcaagctccacctgtcagagggcttaggactaagccccacctaccagcgagtaggcctagccccaggacttctggggatccatcagctagctagctatcagacatgtcctgcccactattggaatggtactagtcctggtacctggct

SEQ ID NO: 2963 - DNA, 201 bp, Bos taurus
ttgattagtctgtggtatggcctgtgccctgatactgttttcaaagttcccatgtggttctgatatatagccaggtttgagaaccactgacataaatgaagaagttcccatgttattaggcctttacaactactgtttatagtagtttttaccagtgaggcttgaaaactatataaatcagaacacctggcatgggctatt

SEQ ID NO: 2964 - DNA, 201 bp, Bos taurus
cactggcgtgtgctcgcagtgcctcagccacactgggcctgcccccactcacagcacgtgtgcccgccctgcccacactgctcaggctctaggttgctgcaccggtaacagtccaaggttggccctgggttatatgcacttcccaggtctaagccactcaggttcaggcactcaggtagtcctcagaggcgtagactcagt

SEQ ID NO: 2965 - DNA, 201 bp, Bos taurus
tctatctaaatatatttgaaatatttaggagagtttttttaaaaagctgctcaagccatcttcctgatttctgatcaaaagaatttaatcctgatttgatctgaatcttccaaagagtttatactacactgttacatgatctacatgtgtaacggcaactttgacaactccctgttgaaataaactcaaagcaataataca

SEQ ID NO: 2966 - DNA, 201 bp, Bos taurus
ccgtctgagccaccagggtagtaaaggggagtttagtttagaatccagatgctaccttgggaagaaagtgcttctttaaatggtgggttgtgctgatgtcgggatgcatttgtagaatgacttccatgagggattttttaaaattaaataatatataacgagacaggatttttaaaacaaatgcatttaaaaaaattttaa

SEQ ID NO: 2967 - DNA, 201 bp, Bos taurus
agaaattggttgtacttactttggatacattttatatgggttaacaaatatattatccttaaaagagttaccccaagtgatatccccagggatttggcctcgtaaggctcctctatttcagatcatccaaaaattaagccaggatgtgggacctccaagaagtcatgtgttcatttccctgctttgtgtcttctctacacc

SEQ ID NO: 2968 - DNA, 201 bp, Bos taurus
tttcagagccaagtagaaaaccagttttataggcagacatccttcttatgccacccccatagcaaattcccagattaactctgtctcttcacagagaaaagtcagccctgtacctcaagtagatggagttccctttctcaaactggggtgtgtgggtgcctcggggcatatgtgggtatgcaagggaggtttagaaacatg

SEQ ID NO: 2969 - DNA, 201 bp, Bos taurus
acaggctaaaaagattttgcagatgcccacattgtccgatccatttaaatgtctagactgtgtgtaatctgaccactttaaaggatagaaggtgctgatatggcctcatcgtcctctgctgcccagcatcagctgaagggatagtcctcaacttttcctcatttgcctcacagaactgagaatggctcagtactaccttta

SEQ ID NO: 2970 - DNA, 201 bp, Bos taurus
attcccaagccaacttttacagccagcgcccaagaaatcctgctcaaagcataacttgcccagttccttaaaaagaactagatgagctgctgttaataccccagctcttctctttaaaaggagggacaaaggtatgagaaaaccccacaccgctgacacctccttctatttacacagtttaaactccgtgtgtccttgatc

SEQ ID NO: 2971 - DNA, 201 bp, Bos taurus
aaggagagttattagatctggactagtttcctccagaaaagagaatttgagcgaggtggaagctctagagatacagatttcaatgcaaacttcctataaacatgctgcttcaatgtggcatgagctgtcccaaagggaagtttcctttcaaaacaccaaaactacaccaagatattacctcacaccaatcagaatgcccat

SEQ ID NO: 2972 - DNA, 201 bp, Bos taurus
tgacagctgtccaggcctctaacactcacagtcaggcaccccactgaattaactcatgactctccaacctaaaaagaatctgttcctgatctaattatggattcaccggtttcaggccatcattcctctgtacattctacagatgctcagagatgtcaccgttgctgaagaaaaatcacaaaatcttgtagagcaagctct

SEQ ID NO: 2973 - DNA, 201 bp, Bos taurus
gtattggagccacagcaagacagtctaaaatgcaggggaaggggtgcctggggaaatctcacttggaccaagcggatggccgtggataagcgtgctgttacaggaccaaattaagatgtcagcgcatcatggtacaggctgtccttccagagcgagctggccctctgctggaaaacagccaggcactcagtaatgagacag

SEQ ID NO: 2974 - DNA, 201 bp, Bos taurus
gcgggaactgattcagacagacaggcgccctgctggaccgggcagtacattaggactgtcttccccccaccacctcatccctcctcctgggcctggagccatctcagcactgcctccagattgctctgcaccatcctgtgctctgggggaatcccaccctccaggggcagggatttctgagttctgggcctagcgctctca

SEQ ID NO: 2975 - DNA, 201 bp, Bos taurus
atttttgaaactttgaattttcaaagttatgattttgataagccaacagtgctaagtcttggcttatgttagttttttaatttagtatcggtatataaccaaaaatgattactgattttaccagcgattgggaaataaaatcttggcactatgcttgaaacaactgcttcatttccactaaataactagaaccatctgcca

SEQ ID NO: 2976 - DNA, 201 bp, Bos taurus
gtctgctccaggccggccccactagctcccagctactagcatgaacttgttgggagctgacctctcacgtgggtcttccatctggcccagccaggggatagggtctagctaggggtatattacctgccactggctgatctcacttcaaatgcatatcactaattgtccttggggccttcgggtgtcctaccctcgtactgt

SEQ ID NO: 2977 - DNA, 201 bp, Bos taurus
ttgacatgctggttactgcatttcttgatattctagaggaagttggtgtgatctcaacttgaatacaccttgtaccctccttactagatctcatggcaccgtgaggcaacgaagcttgtattgcattggcaacctaagaaggaaaaatatagtttaagactgtcattgaatagatgtattattatactcagataaaacaag

SEQ ID NO: 2978 - DNA, 201 bp, Bos taurus
agtatggcacagtaatagctggtattacaaggctataatgaaaagaatttttatatactagaacattcttagtctttacaaatataaacataagctttctcaaaaaataaagccctctggttaagaactttccatttgcctgccagatgatttcttatatctataattaaatggctggtttcaatttgttaatcaaataaa

SEQ ID NO: 2979 - DNA, 201 bp, Bos taurus
caactccaaagattctgcttggccatgaaaatttttcactcagaagacctgagtgatggtctttgatggatttcaggcaagtacctgtgcgaattataagtatttgaaggtggtcaggccgagtcatattgggtgcacatccagttagtgtttatagcagagaaagtttattcatgaggcaaccaagcaaggagatgggag

SEQ ID NO: 2980 - DNA, 201 bp, Bos taurus
aaccaccttcttctgcttcctttgtaaagctattgcaggaaaattggtcccaaggggatggtcatgtcccaggtctctgacaagttcctgggatgggcccccaagtgagaatccttggctttacacaggaaataattcaagagcaagccatagaaaacaaagcagagatgcacattccatgggcagcatgtgggccatctt

SEQ ID NO: 2981 - DNA, 201 bp, Bos taurus
caggaggcggtgggactgatgggggagctgggggcggagggccggctcccggagcccgtagtagtggtgaggtcttggatagcgaatggagcgagagagagggagagcatcagggggccagggttctgccgccagcactgaggccggaagctggccgacctcccaacccccactccccctcccgccccctaaccaccaagc

SEQ ID NO: 2982 - DNA, 201 bp, Bos taurus
ggggagcagtttgatctttttcctacaatgaacacaaaatttattattataattttaactgcagcgggtcctcgtcgcaagcgtctgggcccctctggctatggtgggcagtctctagaacacgcagctcagtggttgcagtgtgtaggaccttagttcccacaccagggactgaacctgggccccctgcaccacgagcac

SEQ ID NO: 2983 - DNA, 201 bp, Bos taurus
aaaatgattaccacaataagtttagccaggatccatcacctcatatagttaatataattttttccttgtaatgagctcttttaagattcagatatgcattgtttcataatatattttggtcagaatttcccttacacaccacagacttttcttctgatcagatagagaagatgcacacccatactgtcttttcaaaaagag

SEQ ID NO: 2984 - DNA, 201 bp, Bos taurus
ggaccttatgtcaaaggtcatgtattaatattatgcttacaggtaattggcccaccttagcagatagggaagatggacgagttcagaagcaagcaaaataagtacctgttgatatgaagttatttttctcagaaagctaattctatcctgacagctaaataagctgatgtacagaaatcctatgtccccaaattcctgcat

SEQ ID NO: 2985 - DNA, 201 bp, Bos taurus
gtgtgttactctgaaagcatcccatttcatttggagaattggcatctgcccttctccccagtactgactcacacatttgaccttctcaaatccatggctcggtggggttgtgattcatcaaggggtttccagcaggtctgggtgtttgggaagaagcctcacccagagtcaagtacctagttcctttgagaagattctgaa

SEQ ID NO: 2986 - DNA, 201 bp, Bos taurus
agagaatgtagggaagcaagaaaaccacctgtgaggctgaatcagagttaacaatctgaacaagcaaggcttttattttaatggagaacagaaatccaagcttttatatgaataaaaacagaaatccatgtttatgtgaattctcctgatttttaaatagcaattcaaattctctgttatctaagcaaaacaggctacagg

SEQ ID NO: 2987 - DNA, 201 bp, Bos taurus
gtcccatgactgatctagtttgtcatctccacgatacatcttcagccctatctgtggtttgtttgttttatgtcatagcttttatcagattttctgtgaacgccttactgacaaatccttctcgatattgtagtatgtatcagtatttcatttccttttgttggtgaataatattacattataggtatacctgtattgttc

SEQ ID NO: 2988 - DNA, 201 bp, Bos taurus
tacttcaggtctggggcttctttcccatgctaccttctacagagcttacaacctatgtcttgtggcctttgcccttaaagccttgctaatgatgacacccatcagaaaggctaatgcatggtaatagaataatctttcagtggtgtgctttgaatttttacaagtcccatcagatacttattttaaagtcagaagaaacag

SEQ ID NO: 2989 - DNA, 201 bp, Bos taurus
gatttctgctccttaactttacctctttttccatcttatctttctcccccacagaagacaatctgtggatgtgattggcacagtctgacgttcatggatcgtttttccctaactgtcagaatcacagtgattaagaaagacaggcaggtactcttctacctcccacggccaactgatggaggcaccaacctctcagggctg

SEQ ID NO: 2990 - DNA, 201 bp, Bos taurus
gaataccatgagtagtcattccctattattaaaaatatactttttcatttgtcagttctgtactttgagataactctgtagatgtttgtttactgcctgaccatctacagaggtaaaaacagtggtctgagaaaccagggtcatttcagctgggagtttgaaagcttcaagttatacgtatcattaccaagtttggcttta

SEQ ID NO: 2991 - DNA, 201 bp, Bos taurus
gagggtggtgttctaaatctgagtctgtcttctccaaggtaggccagtgctaagacaagggagagctctctgtacccttggccagtgccccactctaccccagtggcatggctgtgagtaattagataaagcacacatcccactgcccttggggcctttgggtacacctgccaagtcaaatgcactttatctcagtcaagc

SEQ ID NO: 2992 - DNA, 201 bp, Bos taurus
tgtgtagtgtccacactcgacctaaactgtttggaagtttcagggccactttgagaatagctgagcaaacaataaggtgagccacggtaaacttttgaatggatgcaaagattgcaaacttatataaatgcatttgatttagtaggttaattacttagcagccttgcatagtggttaaaaggatatgccccgaacatagat

SEQ ID NO: 2993 - DNA, 201 bp, Bos taurus
tccattcctggaagagtttaacaccatttcctaattctttcaaaatgttgaggtatttgaccaaagcgtctgtttcacaaaagggcatagtatacatctacgggaaggaacaaggtcaagtcttctgaaatcctcagaatgacttctccttttatatatgcaaattccgctctttaagcttctcacccaagccttcttgtt

SEQ ID NO: 2994 - DNA, 201 bp, Bos taurus
tgtacttttcctgttctccaacttttctaccttgactatattatgatgttgaagtcctatagtatttgttcaaggaataatttttaaggacagtaggaaacattaagtatactgtaaaatagaaaacaactaaagaattcctactggcctttggagtctagataattctctagggagtagagttgtctttttttttttttt

SEQ ID NO: 2995 - DNA, 201 bp, Bos taurus
taggtttatttattacattcattaatcaaaaaagtatattctctatagaagagtatactttattccaagtagctatattgcattttaagaaccaggtggtgctcatggtaaaataacctgcttgccaatacaggagatgtcagagatgcgggttcagtcactgggctgggaagatcccctgaagaaggaaacagcagccta

SEQ ID NO: 2996 - DNA, 201 bp, Bos taurus
cctttggttatgactatacacttgttaaaacataaatgtccttgataaggtaattaattcagtccgttaatgtttaatgccacagaacaaattattgctcgcatctttttgttaggtagttagaataggaaaaaggagtccagaatggcagtggctaaaagacaaaaaagggaaaagcccacaaaaatagaacaaagtaag

SEQ ID NO: 2997 - DNA, 201 bp, Bos taurus
agatgctgttaggatgacatttgcattcccattgattacattcaataaaatctgacatttttaaaggaggagacaaaaaaaaagcagcttgcctattaatcatggctgttgccaaattatattatgaaaccttggttttccaacaattgttctgaacctgcagctttaacaatattaaagacttttagtgaatagttttaa

SEQ ID NO: 2998 - DNA, 201 bp, Bos taurus
gacagggaggcctggcgtgctgcggttcatagggtcgcaaagagttagacatgactgagtgattgaactgaactgaagggtgctggtagagggaaatcctcttgagagagaaaccttattctggcctcacagaatatggaaagatttgagaaaaaaattgacacagttaaaagaaaaatggagtgttacacaaacatagtg

SEQ ID NO: 2999 - DNA, 201 bp, Bos taurus
cccaaagtctgttctaggttattattgcaaactcaatggactcagctgcagtgatgatagaagccagtttccatattattgttaactgaccattggcttgagatagagcctagatctcacaaaaagtgactttatactatcaaaagactttcttttgctgatcttgtaactgcctgtacacgtacatagcaggcagcttgc

SEQ ID NO: 3000 - DNA, 201 bp, Bos taurus
aggtcatgaagccaaccattcactagttccacatgccctgagaaaggtcagtagctctagtagggattatttgatgatctgtgcttttattaaaaaaaaagggaggcctctcttgacatgtaagatagtatcacacatggcaaatgactaagcttaataccatagtagagatgcacacaaacagcatgaatgcaaaaaata

SEQ ID NO: 3001 - DNA, 201 bp, Bos taurus
aattgctttaaaataccacttatagataataatttttcttaaaatatatgaatttacaggtatgccctaagtagatggatgataaatgtgtctgctttaactgcaggtgcattcaaatattcagatgcaacatttgaaaaatgaattttgtgcctacttcacactgatgcttatcagagtccctggctgtcaacccttttt

SEQ ID NO: 3002 - DNA, 201 bp, Bos taurus
acttctaaaagtgtattggttttacaaaagttaggaagcattcaagaactcctattgtcaaacctgattatgctgcagatggtggtaccaaggcccaggggaaaaaagtggcgttttccagactacagagattactactgaagcatcaaaacatgaaataattagtttgtcattaattctaatgagtttgcctcttaattg

SEQ ID NO: 3003 - DNA, 201 bp, Bos taurus
aatatcatgtaattaggaataatctatatgtaaatcttattcactaccacactaaaaatgtcagcattacaaaaattaatatttaagatgaagatctactggagtttgatgttgattctattgcattttccttactttccttttcctggggttttggatactgaaaagcaaagcattgagttattgagaacaaaaacaatt

SEQ ID NO: 3004 - DNA, 201 bp, Bos taurus
agctgtgtgtgcagcattttatttattttttgcatatggttgagagttcatagctttttattgatagcctgttattgtcctaagtgaatcattctggaaactcaaatattgtgtttcactcatgtggttctcttaatttttacttcttgtattctgaatcatttagagtaagaggctttgtattgttgcttcaatggcttg

SEQ ID NO: 3005 - DNA, 201 bp, Bos taurus
tcttttccaatgagttggctgttcgcatcaggtggccaaagttttggaacttcagcctcagaatcagtccctccaataaatgttccggattgatttcctttaggtggtggttggccatctctacgcacttccccagcttcatacatcctgaatcccaagacagcaatcaactacaactcaactcatgatccttccttttct

SEQ ID NO: 3006 - DNA, 201 bp, Bos taurus
tatatggaacattttcaagtctgagttctcccagcccctgttttctgtaaagctttatgagctcagcttgtccatttaaagacattttccttaaagacttgcttataggggagtccatggcaaaatgtgtgatttctgacacctttcctgttcccaacagcaccattctgaatttatgttccctgtcctgaatcctgttct

SEQ ID NO: 3007 - DNA, 201 bp, Bos taurus
caaaggaaggcatggtatactgtcccttagaaggttggagaattcacaggagagaattaacctagatcctggaatctgagtagattcacatggtaagttcaggtggaagatggcaaccattgggaaacagaagacattctaagcagtggtgactatagagtgtaggccactggggtgactggtagccattctgttaataca

SEQ ID NO: 3008 - DNA, 201 bp, Bos taurus
ggtctacagatagaatatatggaaaaatataaatagctctatcatacttattaggtgacatttggataatgaaatggaaggaatgtctaaacttctatacgtaataagatatgactataatcccctcttataaagtagctgttctttacctggaggatccatgactcattggtaagggtatccatgtattggtttaagatg

SEQ ID NO: 3009 - DNA, 201 bp, Bos taurus
tcagattccaaggtaataaattcctggtctccattaacgttaactgacataaatcagtgggaaaacagagtgagtgctccactgaaaccttgtgtaataacatttattttcccttggtgagaaacagagaaaaaaattgcattaactatagaggaatggcatctgcgcagtaagtgctttgaagacttaaagttttataac

SEQ ID NO: 3010 - DNA, 201 bp, Bos taurus
aactgaaaattctaatgacttaaaaccacaaagtttatttcctgcccagtcagcatggcatcacaggttccctgcagcaatgctgcatgtctgccacagttcctattcacttgaggctgattgagttgcagccgagatcaagaatatggcaaagtatctagtagtcctaaaagcttcacatactatcatacagtcacacaa

SEQ ID NO: 3011 - DNA, 201 bp, Bos taurus
ataggagaagaatcacctcaaaagttaattattccaaaatttgagatgaaatttatgacctgcttataaaaaagaatttgcttttgatttgaagaatttgcacatttgaagaatggcacaagacactttgttagttttaacacatcgacaaaacaatcacagacacattttttcaggttcttgaaatgctttccttatagc

SEQ ID NO: 3012 - DNA, 201 bp, Bos taurus
tgtggtatcaattactacaaaattttattttcttcagcattttttacatatagatgcacctgctctaagtattgtgtaatttgtttatgtaaagagattctaaataagctacttgagtaatttgttatgggatgctatttcagtctcagtataagttgaaagtcaggtcaatatgtaaattcgaagtcagattaactggct

SEQ ID NO: 3013 - DNA, 201 bp, Bos taurus
tttggtctatatgttagtttatacaaggagttatttgggaaggaagactatggctttatctacactcacagcatctgggacctagattagcaatctgctgatttatcaagtatttatcagagcataagtgagtgagaaaacacatacatttaagagttggagattatgacaagggaagaatatatctcggcagataactga

SEQ ID NO: 3014 - DNA, 201 bp, Bos taurus
gagaattatgtaactccagcattctgaaatctacacatttattttagaggccattttcttttcctgcttttactttcaaaatttactacttatctagcttggcaaagacatttcttttttttcctcccttttgttctttttaaattgcttcttcatgaatcattcaaattcattctctacatgaaaacagcagaaaatttg

SEQ ID NO: 3015 - DNA, 201 bp, Bos taurus
acctcattttaagtttataatttattagttttcctgtgaaactttctactccttaagggcttggactgtattctgttcatctgtgtatccataggatatgttaagatgttgagctcttggtaaacactcaaaaaatgaatgtacaaaaaacttattgaatgaaccagttaatatatgacatgacatattccttaacttttt

SEQ ID NO: 3016 - DNA, 201 bp, Bos taurus
taagaaaacatgaatttgaaaataacagaaattatagtgatttaaatataatcaaataaaaatttaatgatgtcaatggttattccagggtttatgattgaagaggaaagtgtaatatggggttaagcattctcctctcttacactagagtcagatgatgaatttttgttgggctgttactaagcacacttgtatatatga

SEQ ID NO: 3017 - DNA, 201 bp, Bos taurus
cctgaaaggagggctgagcagaagtacttgaaggtctctgctcaagaccccagataaagatatctaagaatgaaagtacctggactaggaatggaaatattcaaacagcatggccagccaattgagtccttgacctcaactctgttcagaaacgaatatgcccaagtctggtgtggaaggacggttttcccaatgtggctt

SEQ ID NO: 3018 - DNA, 201 bp, Bos taurus
caatcacccctgattatttacactgccttttataaaaaattctaggtcagccgacttgaaagtcctgtaataaataataatgactcattttctccaagagtgtttacagagaatttattgccctatacatcactgcctgtaccatttttttccccggtgtaacaacataatatgacctcttaaaaagcaaaataattaaat

SEQ ID NO: 3019 - DNA, 201 bp, Bos taurus
tctagaaatgtgaaaagttaattaactcattgcttcattataaaaaaaaagatgtagcagaaaaaaataaaaaattgtaagccagttttactttatgaataataatgaaaaattgaatgaaaagatttccaagcaaagtagcaatgaaagaataatgcctggaaacaaaacaactgactcgataattgagtattttagatg

SEQ ID NO: 3020 - DNA, 201 bp, Bos taurus
ttgaagggacggggaaataaagctgcattagggattaaggactagagtctcctcataggaactaaacccactgcaggtatgtctgacaggaaggagccaggtccatgtggaggaagtagttactgactgcaagcctgcagagaaagagctaagaagtactgtggcttctaccatcctgtggactccatcctctcttccaaa

SEQ ID NO: 3021 - DNA, 201 bp, Bos taurus
tgtatattaaatgtcaggccatagaaacagcaccccagaaataggagctgatgattcaagcttggcagagtctcctgtactcaatgttaagaactagctaaaaggctcgtcataataatgttggagaaaaaagaattcttccttccaacatgtttctcaatggagatatcaaaatgactgctgaaaattacaggtctagaa

SEQ ID NO: 3022 - DNA, 201 bp, Bos taurus
gggattaaaaagagagaagttaaggatctctaaaattctaatttcctgtctgcagtctttgggaagatgacagcaaaatccaaaaaagcaggtttgatggacaaatagataccatgattcacttttcacatactgcacttatatgtatggattatgtatgtacaggagaatatatgcatatctgtgtacaaagagagagct

SEQ ID NO: 3023 - DNA, 201 bp, Bos taurus
caacactgaataccaaaaaggataacccaaaatatagtcacataacctaaccaatctgccaagccagaaaccaaagatatagtaaaatgggaaaggcctgctgttagaatcttaaataaatacttatggaaaatagtttggggcaagaagctttccaagtttcaaaaacaatgcaataaagagacattaaccttaacatta

SEQ ID NO: 3024 - DNA, 201 bp, Bos taurus
cacacttattttaaattattaaacttcttaatgagacactgtattaagaaaatacatgctagagcaatgatacctgggtatccagttttgccacttattagccctatgaacttggaaaattaatctaacctttctgaatgtgagtatcctcatctgtagagtgagaatacttgtagtttctacctcatagactggttgtga

SEQ ID NO: 3025 - DNA, 201 bp, Bos taurus
tttccccagctgactcagcctcccctccaagttagtctggattcctcctgatcttcatcctaccatcttgtagcagaggccactgtaactacactgcctggtgttcacccagcctttcacacaaggtctctggtacctccagcaggtgcctacataggccagggaaagtaagacggtaatccccatgtggcagaacctaat

SEQ ID NO: 3026 - DNA, 201 bp, Bos taurus
ctgcattgcaggcagatactttaccatctgagacatgagggaaggccctcaattagctcaagttatttcccacctatgaggacagggtcaaaaactgcatccaagaaaagtggcactggccagcagtgtttcttatataagtcctgtcaaggttttttaggcttctaagtagtttgggaaaagaggggcagagataaatct

SEQ ID NO: 3027 - DNA, 201 bp, Bos taurus
tggggtctgtgtgactctgtgtctctctcacccccatctctccccaaaggccatgttcttctcaagccttgctgccttaccacagagtcttatcacgtctccatttttgagaggttaattcaggaagaagcgtaatagaaaataaaagttcgcataaaaggaaaagaagccaagatgcaggctagctgtgttgcaagatga

SEQ ID NO: 3028 - DNA, 201 bp, Bos taurus
aatacaaacagtgagcaaaccaggcctccaccacagctttactagggagactacaagctctctggtgcaaagaaaatgtctacttcttgtctttgatcatcaatcaagtggcccaataactttcatacttagactccggattttatttaaacttctctttatcagtaaactctctgacaccatggctgcagaaggatacga

SEQ ID NO: 3029 - DNA, 201 bp, Bos taurus
taaactataattttagagtattgagttttaatttccatttgtactctaattcttacttggtatttttatttcctggaaaatatatggccatgatcaaaggaatacaatgtgctcgattagattagatttgttgctctttgatactagcattctggtcctctagaagctcagtggccttacaccaaaatactgttatccctt

SEQ ID NO: 3030 - DNA, 201 bp, Bos taurus
acttgattttccatacatggtatggcaagagtccaatttctttcttttttttttcttttttgcatgtggcttttctaggtgccatttgttgaacaggccaccctctctctcacggaatgatcttggcactcttgttgagtgtcagctgaccataaacatatggattgacttctggactgtcggttatattctgttgatttc

SEQ ID NO: 3031 - DNA, 201 bp, Bos taurus
caaaaggctatgttattttaaatctgcacttagaagctttaggggcaagagatcagaggtggagtctcagggagaagaaagggtgccctatactgcttccatgctttctttcctctctaccttcagccagaagaactctttaatcattagacattaggatgagtttctttctgaagaaacagatacatagttaaaactagt

SEQ ID NO: 3032 - DNA, 201 bp, Bos taurus
tggaaggatcatgataacagacaacctacctggtgctgaaatgacaacttcgggaaatctaggctggcagtgatgagtatggtctggaagtaaatgtttatagtgcatcgacccaagaacgtgactgaatttgacacagattgcctgaagcaccaaacaactggtgtaatatttacctttgccatttcccatcatttacag

SEQ ID NO: 3033 - DNA, 201 bp, Bos taurus
taagtcataactatattatattataaatgctaaaactgaagcttaacctggattacactaactgcccaaggttacactccttgcaagtagagatccaaaaatcaaaggttctatgtttatctaccttctctgatatgataaaccaagacagaatattaaaaagcagggacatcattctgccgacaaaggtctatatggtca

SEQ ID NO: 3034 - DNA, 201 bp, Bos taurus
tcagggcactggatctcgcatgccacaactaagtcacatttcaaaagatcccacatgccacaaccaggacctggcacaccagataaatacgtatttaaaacagaaaatgtgctcaacagagaagtttgcctaaaagataacttatttgcctgacccaacccatacgtgtagataaatccctcctctgagagtttatattcg

SEQ ID NO: 3035 - DNA, 201 bp, Bos taurus
ctgggcagccgcagagcaaaccctatagtgctggctggtctgagagtcaggccagtagctctgtccaactgttgagcatggtctctggccttacatagccagggagcctgaagagaggtctgggcagctccagaataaaactccacggagcactgagctgtggagcccaggctacggccccgcgtagcggagaactccagc

SEQ ID NO: 3036 - DNA, 201 bp, Bos taurus
caaaaataccaactttcaaccttacacctgaagtcctgattgccaactgccaatcctcttgcagaaagtttgaaatttaggccatgagatctctaatgtctcagttggctgaatctttgattctctatgagaatatattttccttacaatatagcaatttgggccaataaatattgtgaataaactaattttcttaaatat

SEQ ID NO: 3037 - DNA, 201 bp, Bos taurus
cacagtatatgggatgttttaaatagtctctaatgcatgagtgggaagtggggaggtgtagaaagtgagagaagagcatgaacaaaggtgggagagggtgaaaatgacactcctatgcagagaagtaaatacagatcagtgaggctagtgaaaggggtagctgagtaaacttgttattaaccgaggatttttccagaaatt

SEQ ID NO: 3038 - DNA, 201 bp, Bos taurus
ggaaccagtggaactgagtaaaggctgttaggtaactaaatagcaatagctattatgcaaataaataaacaaatcatagtcatcacttggtcactccaagtatgctttctgctttgttgttgtttgagaaagttataatttaaggatttatggttttaaaaatggctataatatttaatgcatttatgtgtatctctttga

SEQ ID NO: 3039 - DNA, 201 bp, Bos taurus
tccaggtactttattatatttaaaagctgaggaagatagataagaggctaacattcaataatacttatagtccttgctaaggtgatgacataaataagaacttgtaattaaatgtgaagataatagaagtaagttttgcattagttcattaacttcctaaataagtcatctctctttagagtacccaagaaatactatgat

SEQ ID NO: 3040 - DNA, 201 bp, Bos taurus
atattaaaatgttcttattacttgagacggttttcagtctctaaaggaagacaatgtgggatggtggttaacaaccttttaaaaacatttacatgttcatgttttaggcttcgaaaattggaaatttgtgaatgatcaagagaaagatgggacttaagttcttaagtgtggcatttctgcaaatgggtggtcttgtaaaat

SEQ ID NO: 3041 - DNA, 201 bp, Bos taurus
gactaagcacaaactagtactagtctacaccttatttagctttttctagttggttcactaatgtccactttctggtccaggcccaatccatatcctattctacatttagtctttgtgtctccatagtctctgtacattgtgatgggacctcaatcagtgtttctatttcatgaccttgacacttttgaagagtattggcca

SEQ ID NO: 3042 - DNA, 201 bp, Bos taurus
ttgattgtagatacacacacatatatatcatcatttacagatatatgtgcaatgaaagtgagaaaaagaagcaataaatatgtctttcattgtttcatcagcttagatctgagttcataattataaatctcttagcattctaagccagaagactttactgaagtcaataggagataaattaccatgcagacctttgtttat

SEQ ID NO: 3043 - DNA, 201 bp, Bos taurus
tcaaagccaggaagacattaagtggaataagaagttggggtaagagtctaggtggttcatgaatattgagaggaactagtgagtacaaggtaacccagctagaaggcaaaagtgcagagaccaaggtatctaagaaaatattaggaagtcaatagagttgctcagtcatgtcggactctttgcgaccccgtggactgtagg

SEQ ID NO: 3044 - DNA, 201 bp, Bos taurus
ccgggagctggtgatggacagggaggcctggcatgctgcgattcatggggtcgcaaagagtctgacacgactgagcgactgaactgaagtgaatatacgactgactacctagggcctatttatctattgggtttttttttttcccccacatttttcttctcatttagaaatgctctttgtatattatctttagtctgtcac

SEQ ID NO: 3045 - DNA, 201 bp, Bos taurus
taggcatttaaaattccaatacttttaatgatcatcaaaagaagccttgagggttcctgtgaagtcacatttttctgtgataaaaataaaaccaataaaagataaaaccaacttatgtttccaatacggttctatataaatattaaatgaaacaaaagtaggcagcaaacagtgggactcaaacccacatctgattttttt

SEQ ID NO: 3046 - DNA, 201 bp, Bos taurus
tgaagttttgtgacaattctgtgtggagcttgtatattggtgccattttttccagaacatttgcttcttttgtgtctctgtatctcactttgttaattctcgcagtattttaatttttaaaattgttattatatgtgttttggtgatctgtgatctttgatgctactgttaaaattgttctgggacaccatgatgatccct

SEQ ID NO: 3047 - DNA, 201 bp, Bos taurus
atattttgggtaagtgaggaggcatttagacgattaaattaaaagaacaaggaccccattaaaagtatgtaatattcaaatctttagtgttttccacacaaagtattattatctgagacaacatcaatgtaacagcaaagttcagtttctaaaaaaagtaagtttacaatatgccataccagctcatcttctctcttttta

SEQ ID NO: 3048 - DNA, 201 bp, Bos taurus
aagctgtggcttcattttgccagaatatttctgcaattctttaaaatatttgctttgagtttgtcaagaaccaacaggaactgtgcggtcttcagctgcagtgtaacaccactttaaactactgagtacttattatgcacctcttaattcacatatccattttgacactaaatccaacactgcattggaagattactgttt

SEQ ID NO: 3049 - DNA, 201 bp, Bos taurus
atgaaatgaattgttcctaaaacagtttatgttcagcatgagaattttcaattccttaagcatttgaaaaaaaattcacttaagaaatcacctaggcctaaaacattttcaggagataattctgggtaactctttaaattttttcaattccaaaaaaaaagccaattttatcaaaaatttcaaattccctgcatttaactg

SEQ ID NO: 3050 - DNA, 201 bp, Bos taurus
gaactatttgctgatgaactgactgtcccttaagcttgttggctatgagggaatctgggtgtttggaagacaagcaaagccaatgaagcactagccctctttggacagcctgctccaattacagaaaaagattagcagctgaaaacaaacaagtagcctgagtagtggctccccaaactctaaccgacaaagacccagccc

SEQ ID NO: 3051 - DNA, 201 bp, Bos taurus
taaatataagtcagaggccctcgtatcagaacccttattgcggttgagcgcccatcactgcaagtgtttagaagcgtttttaagcaagaggctaccactatccaattttagggcaggaaggccctcagcaagccctcggctcatggagaagccacggattcgaggtacaagcttcctccgggcgcggaggggagccgtccg

SEQ ID NO: 3052 - DNA, 201 bp, Bos taurus
acactttgaacatgtattgcttttacattaaaacattaataattaagtattttaagttactaaaattccccacatttcaactgtcttcagcatagatttcgttcctttggaaggttcttatcagtttcattactgcaaaatacatccagatccttctttctgcgtaagattctaacgcagagttgggtattgcacagtctc

SEQ ID NO: 3053 - DNA, 201 bp, Bos taurus
ttttttgaactttttatttattcaaatgttctgaatacaaatgaaccaccttggttggatatttattattgttcacctgtcttgacacagaaactgcaagtactatgataaatggactgaagggtctggtttcactgtggttccccatctgctgaaatcttattttgaaaatttctcactgccactctccctagtgaatgt

SEQ ID NO: 3054 - DNA, 201 bp, Bos taurus
tgggggctgtcaaactgtgtattccacctctctgccaatggagtgaggatacacctctggccatgcccatcatatgacaccattcatgtacatgtgattgatcaatcagaaaccttactcacattttcccatggagttgcttatagggctctgtggccatggccactctcacaatgactgctgacctgaaaaagagtcttc

SEQ ID NO: 3055 - DNA, 201 bp, Bos taurus
tgtatttgacaacatgatacaactggaagtttgctttgccactctaagctgtaggaagtgaggaatgtgagagaaataatggccagtgcagaagcctagacttgggaggcttgtttgtcctgatgaattgacatctttgctagtaaggtcaaaggtagacaatgtttatttcctgcttcacttccaggtgtggcctgtgct

SEQ ID NO: 3056 - DNA, 201 bp, Bos taurus
gagtagccttccccacttaagcagtaaaataacattcagaactgacatttacataggcgtgggctacccgttggcagtccacatggctcttctgttggctcttctttctgccaggttaactcttccacaaaatttaagcctctgatcaatggttacatccttagcggccatcccctggccacctccaacaaaatgcgaccc

SEQ ID NO: 3057 - DNA, 201 bp, Bos taurus
cagtgatcggagcatggatgccagtagtaataagagtacacgattcctcatttatatccagctgagagcaaatgagagtttctccttcaattatgctttcagtctgatttggctcagcatagtttccattaccaaaagaatgccacaaggtaattacttaagccaggttgcttaaccaacttaggtaagagacattatata

SEQ ID NO: 3058 - DNA, 201 bp, Bos taurus
gaccaccagggaagttcccccatggaggtacttgaatctataaaacaaaggcatctttgctataacaaatgttttcaaatggcccttttactctcttgaagtaaaaatctgtagataatacaacattcactcatgattttaaaaaattaatataataccccaattccaggaagcagtagaaggccttcaataaaataatta

SEQ ID NO: 3059 - DNA, 201 bp, Bos taurus
aatgagtcagtccttcacatcaggtggccaaagtattagagcttcagctgcttgtattaggtagccttaaattttttttgagttctccactctccactgggtgcacagaaaaccacaaaagggcctaaagacctaaagctattaaaataagaaaaaataattctctgtatatttaaaatatattaataatgatcagaaaaa

SEQ ID NO: 3060 - DNA, 201 bp, Bos taurus
tttcctagcgggcgagttaagcttctgctgattaacacactcaggatcccgattaactttgtggcatgaagctaacataattacataattggccttaaaatgaaactcttactttcagagatgctccaaaggtaagtgttttacttttttctggagcctgagaccttcacaaagacaacctggcccacctgttgtgtgaaa

SEQ ID NO: 3061 - DNA, 201 bp, Bos taurus
gagggggattctttccttataatttgtatcatgaatgcgcctcaaggatctagtgcatccttccacatgcgcctatggatcctggctttgtagaggccttgccttcagtacaaacagatgaaccctgctattgaactaattgttatgccagctgcattgtcctgtggaccctcccacccctttcacacctatgacactttt

SEQ ID NO: 3062 - DNA, 201 bp, Bos taurus
aaactagacaccaccaagagtttcccttgtcctgcaactgcagccccagggagcaccatggcattgatcctcaagctctggccccagccaggctagtagattccccatcctataccaggagccacaagaaaggactcaagcctctttgcccttggcctgatgactgcgtagggtaatgcacccagccttccttgccactct

SEQ ID NO: 3063 - DNA, 201 bp, Bos taurus
ttttgccatctgtattcggaaaaatgtcatttcaaattccctgtccatttttcaattgggttgtctttgttgttgagttgtgagagttctttatatgttctggataacagacccttatcagatgtatgatttacaaacattttatgggttgtcgtttcactatctttatagtgccctttaacacaaaaaagttttaaatct

SEQ ID NO: 3064 - DNA, 201 bp, Bos taurus
aggttttagttctatgaccctgggacctggccagattatgagctacctgaggacagggacttggaccaaatgtatccatcactccagagttatcccaaagatatatatactattagcacttggcccaatcagcgtctgaggaatgagccaatctttgcaatgaaggttaaatcatataacacaacacgaagtgggccagct

SEQ ID NO: 3065 - DNA, 201 bp, Bos taurus
ctgaccacagattccaacccactttatgcataactctcctgggaagatggggaggggaagcgagggtgggtgatgccagggggcctaattcctctaagaggaagtcagtaagcaacacgcaaaacctatacatcaggaaatccggcatcagcatctaatttatggaggtcaagagaattcccttatgatctagtggttagg

SEQ ID NO: 3066 - DNA, 201 bp, Bos taurus
cgccctgcatcatctgtccacatttttaatctttaaattagaaaagacgtcttcctggtggaacccagcaatcactgacgacagtacacgtaaagtgcccattgcaaggctggtccacaggaggtactcagtggattgtcattgttattaccaagtggagaatgatgctgcataaggaaaacaaagggcagggtcataaaa

SEQ ID NO: 3067 - DNA, 201 bp, Bos taurus
acaaagcctggattcgtttaccaggtggaggccttcgatccagaagacacaagtcaaaacctacccctcagtgtaagtttccttattaaatggaaaagcatcttttctgtgtggcctggagtctcagtggggcgggttgggaagtggcaatgggagggaagtgctgtccacctccaggcacagagcaccggggaggctgga

SEQ ID NO: 3068 - DNA, 201 bp, Bos taurus
tgatcatataataattggcatacttggagtctatataaaggcatgaattgtcttttacacttcacagtattgcttggatcacatggccagtttcctagtgggtgtcattaacgtaatttgaatgtaatagaattgaagatgtaaaacacacagagtttgaacagcaaagaggcctccaaaagtctgttggcccatggcact

SEQ ID NO: 3069 - DNA, 201 bp, Bos taurus
atgaagagataggaagaccaagatggcatccaagtccaatataattagcctacttatttttctcacacagcagacattaagatgttcgaaggcaggtcccgctagttggtcttcaggcctcacacagctgcagaattcaagcattccagtgaagcattgaatgagtaaatctgatatagcatgtagagatagaggccctga

SEQ ID NO: 3070 - DNA, 201 bp, Bos taurus
gattgaacctgggtctcctgcattgcaggcagattctttaccaactgagccaccagggactcccataaacagtggtggatacctgcttgctctgccttccaagtctagatcttcagcctagacctttagactgtgggctcaaggcagggaccatatatcatttaggtttgtatctcccatacccagcaggtacctagtacg

SEQ ID NO: 3071 - DNA, 201 bp, Bos taurus
cttaggatgttggagtgataagagctagtttagttttgatttgcccttttactaatactgtcatctaaggacttcggcacaagtccttgcctgctacatcagaggacacctgagtgacaggtgctttgctgtttccaaaatctcaccaggactaccccaagccccagcccactgctgattcactgcaactgaacccagtag

SEQ ID NO: 3072 - DNA, 201 bp, Bos taurus
acaggtgaatggggagcagtgaaaggccagcgggcaggattaagccaggggaacgaggaaataagagagttgggtgaggaaagagtgagaatggaccacctgctcaaaactgaatacaggccagtatctgcaagaggccttgaagcatgcccccagcagcccctcacactgccagccgccccaggaccacagtgtgtcagg

SEQ ID NO: 3073 - DNA, 201 bp, Bos taurus
tctagagtgggagtgagacatctactgtccaagtccacctggggccacgggctggtgatctctgccgcttgtgtcccacccttggggcacagaatgttctgaccagtctgtttatggcccttttgcctcaatacaccatgcgccactccctggaatcctgctgcccccaaagtactgcccacggcctccttcctactgtgc

SEQ ID NO: 3074 - DNA, 201 bp, Bos taurus
aagctggaggccacggtggtaagtaagcccaatggttttagttgccctgggatgtaggctgtttttcccaaccaaggagtttggattttaatagtcatttgggaaaggaaggccaaggcttgaactaactccagataaaaagctggaacttaaatgcctgtattaggggaaaagagcagaggggagcagaaaaaaactgat

SEQ ID NO: 3075 - DNA, 201 bp, Bos taurus
ataacaatggctggattttttttagtaggctttgaagatgcaaggcaatcaaaattctcattgctggtaggaatgcaagatggtacctttgaaaaagagactggcaatttcttaagcatacactcatcatatacctcagtaatccttctctgaaagtgtttacctaagagaagtaaaaacattatgtcctgtaaacaaatg

SEQ ID NO: 3076 - DNA, 201 bp, Bos taurus
cagccaataaaaatatctcttgatcagagaaacaagacttgtgcatttcttcttctgagacccaggcagctactgtttacttcttaaaaatgtcatgagtcactttttaagtggtgcaagcaaaattggaattgtttcaggtggaagggagcttgtcctctgaagtgtcttaaggataatcagagatttgaatacccaaag

SEQ ID NO: 3077 - DNA, 201 bp, Bos taurus
aagtccattagtatgcagtaggtaggataggtttttaaatgttttcctgtataaagcaattatctacttgaaataattaaaacattaagaattttaaaagctagctttccttaatgatatagttttaacttgaaaagatcagtttaaagccatatttatttattttaaaaaaatcactttttctaagttgactataatgtc

SEQ ID NO: 3078 - DNA, 201 bp, Bos taurus
taaagcattcacatttggcaatattaacttcaaaactaaaagttttaaaagtaaacacatttttttttgactaataaaacataaacgatttaacaattctcacaaaatctcacagaactgaatgaaggaaaatcatcattactttttctacaactacagaattaccaaatgttagatcataaactcgtgattctgtagtga

SEQ ID NO: 3079 - DNA, 201 bp, Bos taurus
gtagacatgagcacttgagtacctcgggaaaacaattctagacacaattaaaaataattcagctaaaattgttaataaattcctaaaggctgagtgtgtgccagcaagaaaacacagaacccatgaaggccacaacccgttcacgggttcttcagagcctctccaggtttgcatcaaagaaaataaaaggccaggtgcaga

SEQ ID NO: 3080 - DNA, 201 bp, Bos taurus
ccaccctcgaccggctccttcctctcccctttcccctccccaccccgggtcactgccgggcgcctcccatttaggggagtgtcggaccccggaaacctccaggccggaaacctcgcggcccaagggcctctccttaaaccgaattttctttgacaggcaactgagtgaaataagtgtttatctatttaggtgtgaagaaaa

SEQ ID NO: 3081 - DNA, 201 bp, Bos taurus
gttcctataaataaagtgcatgatcttttggtttgatattttgatagtctggtgaattaaaagagtaaggaactaagagtctttgtcctctgtcatcatccatttctgtggccctggggcagaggggggttctcctatagtgtaagtgttagctgttcagttgtgtctgactctttgtgaccccgtgattgtagtccacca

SEQ ID NO: 3082 - DNA, 201 bp, Bos taurus
atcacaattgtccttagttgtgaatgcacctaaaaacttgtttataaagctgcacaaacggtaagtcttttaaaagatcccaccaaaacattcaccaaatgacacagaacacttacagtattactcatcattattcttccaagctctcactggttaactatacagatagagcacatcgctacacataacttgactccgaat

SEQ ID NO: 3083 - DNA, 201 bp, Bos taurus
gccactgcaaagccaacaatggcaatgccaaagcagtctccaatggtatcttggaaagtctgcctgctaggtatgataggggcctgaaacctgaaattgaaattaagcaagtcagaatgttgcccacctggttagaagccttcaacagcatccatgtatcctcaggaaaaagtccaaattccttagcaatgccccagtggc

SEQ ID NO: 3084 - DNA, 201 bp, Bos taurus
cttcttcattgactccgtccaccggggcacactcgctggcgtggccatagcagaagcagtttcctcgaaccaccatatcgtaaaccgcgtaataatacttctctctgatttccattctggaatccaaaaggttatctcccaaagtatgtagtttcacaaacttgatcctcaagttggtaatttttaagagatctacgaagg

SEQ ID NO: 3085 - DNA, 201 bp, Bos taurus
atagccaggcgctggctcagtgcagctgcgacctgtgacgtgggggcgacagtcacactgcccgttcttgggtgagcacctgtggggaaacaaacccaccccgtgaaataaaagtggaggtggggggcaagtgtaagataagggcttaggggtgctggggtaagtgccctctggatttgagtccattctttgagtccatca

SEQ ID NO: 3086 - DNA, 201 bp, Bos taurus
gtgctgggtattctagtgcccacaagggggcagcactcctcacccaccaagcaggctttctcttcccttcccgttctacagggttggtctagggtctctttctagcaggtagcttggcctaatattaggtatctgccctttccatatctaccttgagcctctccttttactgggatccaagcactttgttttctcctttga

SEQ ID NO: 3087 - DNA, 201 bp, Bos taurus
tttagagatggaacaaactgacacttggattaaatgccgtatctaaagaaatcaaaggtaagggctaagttgacagcaaaactaagtctcttgattccagatgagttcacattcaacctagatttcaatcatgttttaatggagtaggcagaagagggaccctgagaaagccttactacaatcgatcatggtttcacataa

SEQ ID NO: 3088 - DNA, 201 bp, Bos taurus
tagtaaaaacagtgctctgccttgtacatgactatttcattaattcactgagccacccccaaccagtaagatgcagacatataactgaagctgcaggactaccagttaatgacattgtggagcataaaccacaagcaaatgctcagaacactaagaactgggttggccaaaaagttcattcagctttttctgtaacatctt

SEQ ID NO: 3089 - DNA, 201 bp, Bos taurus
ggcttctcttttccagagattctctctgtgaaagttcagggtgtggttgtcaatttgtttcaaacctcaaacaccgatttactggcagagccaccaagaacactggccttttccatctcttacatggactgtggcaacagacacgcctgggctctgagttccaggtcttcctcactgcagcaaccctctgaaacaatgctg

SEQ ID NO: 3090 - DNA, 201 bp, Bos taurus
cttgctttaccagggaacttcaggaacgcaaacatgaactattttgactgataaggttccaaaataaaatctaagggtaccttggccattgcatgagtcagtattccagataaacacatttagcattttaggctctgaactttatttttggtggtgattttgctaaaatgtgtcacacttcatggccttcagggtcatcac

SEQ ID NO: 3091 - DNA, 201 bp, Bos taurus
tgggccacagacagcagctgctacgagtcgtccatgtcaagtaactgataccctgccccctccttgatggaggttctcttggtcacagatgtgtgacacatgcatatttatcactggccccactcctaactggagaggggactggagaagaaatggggagggctgaaattatgctcagatgatgagcagagcccttcccat

SEQ ID NO: 3092 - DNA, 201 bp, Bos taurus
gagcatagttatcttagtctgatccttgaaaattgtctaaaaatataaatcaggtattaaaagtgatgtacgagaataaaatacatgaagggatagtaaggtgtttgttattttagataaataatttaagaaagacagctatccacccatgtccacattatgatcgataacttcccacttataatgaaaaggttctttgtt

SEQ ID NO: 3093 - DNA, 201 bp, Bos taurus
aaaacagcctttgaaacagagttcaaagtatttttaatacgggacatacgagggctcacttttgtaagtcccttgggagcagaagtgctaagtctcaagactgcaagatgtaaaccatggtggcttaggggggaacagtgcttactgcaagaatgagcttcacttttggtccatttacatcttattctgctcatatgaaca

SEQ ID NO: 3094 - DNA, 201 bp, Bos taurus
cagcctagggcgtgtcttctgcactatctcagctctttcaggagccatctgtgaaggagacacgccaaatacatattttatatgagttgtttttttttttccctttttaaaggaatatgacaactcaaccaaaagtgtgcgggatcagttaaaagaactgtcacaaccgttgaaattttcgtctactcccttaaaatttct

SEQ ID NO: 3095 - DNA, 201 bp, Bos taurus
atgacaccactgaagtcttgaggttttagtccatggctggactctggagctccctctccacctctttccatataagaagctcccctggtgaggccccaggctcccagggagtctccagcttacctctattctatggtccattcttagaccaagcacagatggagccgattagatttgggtggccagtttccacccaaacca

SEQ ID NO: 3096 - DNA, 201 bp, Bos taurus
taaaacacacagagtactaactattcagtgctccgcctgcctaatcagaatggatcacttgttcccctctagtctcatagcatttttgtttccaatcactttcaacatgttctaattctatatggaccttttttaactagtctgagattctttaaagtggagctatttcacctttatcttctcctttttgctcttcaatta

SEQ ID NO: 3097 - DNA, 201 bp, Bos taurus
aagctttcctttaaagaacaagaatcataaagcacagagatttgctacaagccatggggttgaaaggatgtagactgtaatcttcctagaggcctttcttgtcacacaggaggtgacagcctggagagggtgagaggagagaaaggtgaggtgagtgtggagcctctgttaatgttttggccctgctcctctcccaccata

SEQ ID NO: 3098 - DNA, 201 bp, Bos taurus
ttttaactctttctctttttatcttcctatacattgaaccacacagacatttctaaacttaataactgtctcaacctattatttttcagaagagaagttgagttctcccagtggtaaataatctccctgggaacatccagagtggggctagagtgaaatttttattaattattgattcatgaagaggtaatgagaacctcc

SEQ ID NO: 3099 - DNA, 201 bp, Bos taurus
gacttgctttaaattcatccattgaatgataaggcgtacaatgccagagggcctagggcacaaagggtgaaagagctgctttggccaccagttttgctcccgagtcttagagcttgtaactaggcacgttcctcatggcttcacatgatccagtccagatgtgcaaaggttccacactgtagtgtagggccaaatccaagg

SEQ ID NO: 3100 - DNA, 201 bp, Bos taurus
ctactctagagattataacatgtattctctacttcttagagtctattataaatgagtacttttgccagttcctggacaatggcaataatcttggagtattttaactccatttgcccatcccacccacccctttgtgctgttgtcatgtgttccaaatctatctatatttttaagcttcacaatatattattatcatcattt

SEQ ID NO: 3101 - DNA, 201 bp, Bos taurus
aatctacagaatttgtaaagtgttcataaacagtagctttcttttagtctgtgtcttccctttccattactatgtagtaaggacttatttagtttttttaattatatatcattatgtagaaattattaagttgagaatattttagagaatgcagagtatagataaaatgtgaaaatttttaatcatttattaaaaacagga

SEQ ID NO: 3102 - DNA, 201 bp, Bos taurus
ttaaacagccatcatgtgaaagttattcacaacgagccattccagactacttttaagaacacatctttgttacaggtagccgggaatctgcgtttgtttacgccatctcttcagctggagttgtatttgccatcaccagggcctgtagccaaggagaattaaaatcctgttcctgtgacccaaagaagaagggaaccgcca

SEQ ID NO: 3103 - DNA, 201 bp, Bos taurus
taacgtaaaatataatttgttagatataagacctataggccatggggttgctgaaaaatcgcacttggtgggaaccgcaagagagtgacagttactgactggtcaccatggccaaaaaaccaattcttaacaggctctctcactgggtttttctcagataactggagagaaaacagaacccttgaattacgacatctaacc

SEQ ID NO: 3104 - DNA, 201 bp, Bos taurus
ttgacctcaataattcttttttcatggaaaggcattttattttaaatatagcagtgtgaacatgtcaataattctttaaatgtactaaaaatgcttacttgataaagaatattttataaagtaaaaaaaaatcatgtaacataaacaatcacttcctaacatccattttataagcaaatatatttattttggggagagagt

SEQ ID NO: 3105 - DNA, 201 bp, Bos taurus
atattacagaacttcttaagtcctacagacagaagtgatgaagtcaccttcccatccactgctcctctaactgtaactggatccttgggaggaaaattaaagtaatacaatagatgaagtgtatacaaactcttggacttccctagtggctcagacagtaaagtgtctgtttacaatgtgatagacctgggttggaaagat

SEQ ID NO: 3106 - DNA, 201 bp, Bos taurus
ttcacataatttcaatcacaaagaatgcttttttctgtacaatgcggctgaccaaggaatggaaacatggaattgttctggcctagggcttctctaactacgtaaaaaggtctataggacacaccacagcaaataactttaaagaacttcactgtgcttctttaaataattttcttccctattaacctagtggccaaagga

SEQ ID NO: 3107 - DNA, 201 bp, Bos taurus
gctgataacagtggctgagtcttgataaactgtttacaaaaacaggcagcaggccatagttttccagtccctggactaggaggatttgaagaccaaatgtcgcctatgctatctaagtagactcttttgttataatagtttccaaatagagatcccaagggcctgatattagtcagcactaatgaagagttaacatccttt

SEQ ID NO: 3108 - DNA, 201 bp, Bos taurus
agtgggagagccatttgtacaagagagagtatgtgacacagtcaggagaaaaacaagtagttgaacctagagaagtagggaaaacaagaagggcaaatgagggagataaaagtacttgatcaacattccaagagagcaaaacgaggcatttccaagagccctgaaatgtaagagaagactctctttctgagacagcaggag

SEQ ID NO: 3109 - DNA, 201 bp, Bos taurus
catctgagctctggccatcaagaatggagagttctcagtgatcatctgggaaatttgatggagaccccaggagtctggccttagaagtaaaactgaaccaatattggaatccatgctattgtagactcaccctagcaaaatgtataaaataaatgtatagacctcagagataatggaactgatttgcaagttatttaactg

SEQ ID NO: 3110 - DNA, 201 bp, Bos taurus
ttatttgttgacctttttggatgaaaatttctaaaatccagaggaacaaagccagataatgatgacaaaggaataatttatcttttcctaggagacttcatgtaatggtggcaatattatcctcttattacacattgaaatttgtgcttacttctcagttttatattaatcacttctaacttttatttgtatgtagagcat

SEQ ID NO: 3111 - DNA, 201 bp, Bos taurus
tctacaatgctggaatttggttggtgtgggcaggtatgtgtatttctatttgaatgattgatgtttgagactgtggggaaaggtttatcctccctatattgttttaaatgaaatggaattattgacatatgatgcacaaagataccaagtgttttgtcaatctatgcatgtaactatagattatttcttatatttttgcat

SEQ ID NO: 3112 - DNA, 201 bp, Bos taurus
attcagatgctgactctgttagtaggattgccagataaaatacaggatgctcagctatacatatgagtttcaggtaaatgacacgttattttttggtatatgtatgtccatacaatatttgtacatacataaagaaaatttaaaaatataaagaaagctgagtgcagaagaattgatgcttttgaactgtggtgttggaga

SEQ ID NO: 3113 - DNA, 201 bp, Bos taurus
acatgtaaaatgactacagcatcagggagagaagcatggattttctgccaagactgatttggctacttaccactgtggagtgtccaacttaatctggttcataatttgcctccaatgcctgcagtgcttccacaagcagcatcgttcatgaatttgtagaatgacttaccaagtgtcatgtttctccatatatatcttgtc

SEQ ID NO: 3114 - DNA, 201 bp, Bos taurus
agtgattaaaaataacacaggtataacataggtatgatcagataagagaatgggctaaactcagtggtgattcaaacaagaagtaaatttagtattctccggtaaatccctatgatcatgctgttaaattccctttctgcactaatgacttacaccttgaacagacatcatagacttctcttacctataaaggaccagtct

SEQ ID NO: 3115 - DNA, 201 bp, Bos taurus
acagagaaccaggaaaggaggggagctggccccccttgtctgtctctagccagacgagggggaccagctcacacaagaacatattggtttaaatgagaaacaccaaaaatggcctgaacttaagaaatgataatgtcagtgtaaaataatggactcaaaagttaactagcacagcgtgcctttttcacaggggataaacac

SEQ ID NO: 3116 - DNA, 201 bp, Bos taurus
ccctagaaacaaagaaacaaactaattgccattaaagtttgtattgttgtcatgactagaatcctggttatatcttatgccttggaaaacagaaatacacttgcctgcattgtagcaaactagtgtgatgggcaaaaaggaagtgaatctggctttctcatcttaaagaaaacatgactgtggccttttcaaaatgctgcc

SEQ ID NO: 3117 - DNA, 201 bp, Bos taurus
caaacttcagtggttggaaatatctttttaatttaaatttcataagaaacagagctacaatgcacattccctgaccagattgtgtgtggcctatttattcaaaatgtttgattccatatggatttctgctctttatttataacttcaagaaaggattctaataagttagcaactcaaggacaactgacttgaaatccaggc

SEQ ID NO: 3118 - DNA, 201 bp, Bos taurus
gatccaggacatgacatttacctgagaaacttccatttcttccttttcctccgccgggtttctttctcaggtgagataaggtgaagtcacaaatgcatccggagaatgtgcctttaaaggcttcagcacagaccctctgttggtctcatactcacaggaagaagagacttgaaataccctcttttttgttgtctcaggaga

SEQ ID NO: 3119 - DNA, 201 bp, Bos taurus
aatgatgagatttaaaacttcaaaatctccttaattaggccctattctagtaccacttaataaagttgtgttggagaaacactgtcattgcacagtttccaatgacataatccgtcacagctcagtgagtcaaaacattagctaaaaaagtcttaggattaggtcacgatgttttactgaacaataaggtagaactgaatt

SEQ ID NO: 3120 - DNA, 201 bp, Bos taurus
aggaaatggattgattctatcagtgtgagttcaccttccaggtctactccaaatgttttcttctcttttcattcatttaagtctaacacaagggagaagaaagtaagttcaaattatttctgcctgaacacagcatcaatcttaactcttcatgtagtttttatgagaggcaaacactgatataaaataggaaaaagtgaa

SEQ ID NO: 3121 - DNA, 201 bp, Bos taurus
tattttcagtatattatctgattattatctatgtctctgaccttatccatcaccgtctctctccatttcattctattacatgggccttctgctatttctcgaatgcatcaaatatttgctgcctttcaagcttttgctccggctattcccacaacctaggccactctctgggtgcaaatcttctcacagcttcctccctcc

SEQ ID NO: 3122 - DNA, 201 bp, Bos taurus
cagtgcttttaggtggaaagttttgagatcaatattatttcaatggacccacaggtctgtgctcaggtacgtgtttagtactattctctttctgttcacacaatgaaaaggtttgtgggtccaagaaaatagaaaaattaatatagcgatgtagtggttaattacagtatagaaagttaatattgcaaagcctgaataagt

SEQ ID NO: 3123 - DNA, 201 bp, Bos taurus
tttgcttctgtcgtggggacgttcatccaagaactagtcagttttgactgtggctgctccttattgccgaccctcatctcttactatctcctaaacttaacgcttcacttacaataaggctatttaacactggttcttagttctagcctacttatcttcagtaacacaattcctgacaataaaaggaaaaagaaagctagc

SEQ ID NO: 3124 - DNA, 201 bp, Bos taurus
aggggatcactatagatgccaggcctcaaatggatcctctgggatctctacgagcctaatttcccacctgaagcccatctgcagcctgtaaaaatggagcgggggccaagaacacggggccaataaagctccaggcaaaagatgattgtgaagtgggacacaagtttttcaccttcttccaattctgctgaccatgactcc

SEQ ID NO: 3125 - DNA, 201 bp, Bos taurus
atataattgagtcattatttgtagtacttatatcaacattaaaattccccaacaacctatgaaaggtatgaacaatttttagagctacactttttttttcaccttaagagttatcttttttaaaaatgtgctttggaatttactattgtgtagttttgtcttttatattctccattacctcatgtaaaatgcagaagaatg

SEQ ID NO: 3126 - DNA, 201 bp, Bos taurus
gttgtaattatttatcagtaactgtgctcctgagtattgcctcttttgccatcatctgttctgtcagctcagctgaacaatgagacattcacttggccataatgaggggaaaatgaatgattcttattcaccgcaaaataacactggaagaattctggcagtgaggcaagattctgggctctccatttaaactttgtattt

SEQ ID NO: 3127 - DNA, 201 bp, Bos taurus
tcagtcccagtaggccatttctaggaatttcaaaacatcacataatgagcctgtcctagctttaatagtaaataggccagcttgtatgctgtgtagttcttcaagtgcttatatatattgtcatctttcttccctcatcttcatgctgtccacaccaggccatctgttccaactcccgcccgccacccccccacccccttc

SEQ ID NO: 3128 - DNA, 201 bp, Bos taurus
cagagaaaattactccatatgtagttgtagattcactgtgtatgtgggaagaggagagttcaacatcttcctatgctaccatcttgaacccctttctcttatggtgtgattttaaccagacagtatagaacttagcaggaaatcatacagagggttttctgttataagaatattcttctaatattttatgatcctttatgt

SEQ ID NO: 3129 - DNA, 201 bp, Bos taurus
tgtctatgctattagaagtttcagtaagtacttattatttgtgcattgaatttatttcctaagtaatcctgaagaagaaattaaatggtagcactgaataaacaagcctatatgctaataaatgtatgatattgaaactaatgttactgctttttaataatattgcaggttgggagtttttacacacaaatgtgtgaactc

SEQ ID NO: 3130 - DNA, 201 bp, Bos taurus
tttcatatatctcagcagacaacatcctaaaacattctatacatctgtacctaaagttcctctacctttaatgtctttattcctttgccccttggcaaacacccacctatagggatggtccttaaaaaaagatatctctttttttaactttttgttttgtattgggatatgtataattatgcccaacgtcaggggcgatga

SEQ ID NO: 3131 - DNA, 201 bp, Bos taurus
cttttgaatgatagtagtttgcccttactcaattaccagtatagacatcatctcttgaattctttcccgtttttcatttgcttaatctcgttatgttaagttgcctaagcttaagtttatcctggtcccacaaaatacatagacacatacaacttagtataagaaatatacatattgcaggggaaaatacaaaaatgatgc

SEQ ID NO: 3132 - DNA, 201 bp, Bos taurus
tgtcatttgcagagtccatgggttttgaggcaactttttgggggagccctttgacccaaaccagaaaaaccataatcacagttaatttctctgcaggggaagctctagcaatcactgggtttgacagatgtaacaagatcagtttcacactctagaaagggagggattccacggatgcagcacagtttcaattctagcaag

SEQ ID NO: 3133 - DNA, 201 bp, Bos taurus
tcatagagcctgaccaaaactactgaggtgagaactgaatcctgttttcaagagagtcttttatgcttctcaaaagatccaaggagaagggccagggtgtcacacagggcaatgatgataggatcaggaagattcacttactggatatggaaaattaaagattaattattaattacggaaatataaacactttaactcctt

SEQ ID NO: 3134 - DNA, 201 bp, Bos taurus
gccctgtcttcctctgactttttttctcctctgcttttctgcaatggtttccacttcttgtcttgaagtggatattcctgtctcctgtactggggccttggtggactgacattaactccttgtctgttgtctatggatgtttctatattggaatggttggaaacaggcagctaataagagtgactagctctggccccaacc

SEQ ID NO: 3135 - DNA, 201 bp, Bos taurus
tgctcttatttgctatcctaccattaactggttcaaaaataacctccatccagttcatcctggaaaagcttatggcggtgaaataaataaatatgtaagcgcattgtgaattattggctacagatgagatcacaaggaggaagtcactatagggtggaatattttgattgatagttatagaatctttgattgtcaggaccc

SEQ ID NO: 3136 - DNA, 201 bp, Bos taurus
cgtattgagtatggctcctttctgtaagtgctttagaaatggtaacagtagctgtgtgtgtgtgtgaacaattacagtaactcagtaaaatggtctctctcctccttacccaaggatttcctgctgcagatatttactgtgttccgaatattgatacgcccagagatgtttccaaaggactggactgtcatgcgcttggtg

SEQ ID NO: 3137 - DNA, 201 bp, Bos taurus
tgcctcttgtctcttctgacggcccctggtgttctttgattttggggagcataactccaatctctgccttcgtcttcacatggccttttccactttctatttatgacaaccattctctccttttaccaaactctgctcaggctcctctaagccctctacttgacgaggccttagccttggcctattaaaactgccaactca

SEQ ID NO: 3138 - DNA, 201 bp, Bos taurus
tattactgtgagatttagtgttcttaacacaataactggtacagaataggttcctcagtaaagagcagttccttttcattcctttaggtcctggccatgagaacaaagactccccctcttatatctaggcttatggctccagctgaagggaattacctttggaagctgggccttagtgggatggagaaaggggtatagaga

SEQ ID NO: 3139 - DNA, 201 bp, Bos taurus
ttgcatttgtgtttatttcttatatttaatctttgaattatctggaatttatctttttatgatgagtaaaatgaatatccgccttttttttctccctccaaaccctgattatttaacatcattggttaatttaagctcctctctatcagtgtgaaagtctttatcatatacccaatttctttgtgtctttgtatttatttc

SEQ ID NO: 3140 - DNA, 201 bp, Bos taurus
ctcatgacctgtaatatgaaaaatgctgttttactgcaagagggaggattgaaaaggtgaagctgctcaaactgagctattagctaagggcatggaacactttagcccttgattctgaaattttaaaggtgggcttgtcataagaacttcaagcagtaaatgtaacacacaaaggataaggaggcccatgatctgagaaag

SEQ ID NO: 3141 - DNA, 201 bp, Bos taurus
tacatataaaaatgcttagtgattggtatcatattatttaacaacaaataatcatcaagcagtaactgttgctttcttttggtgaacaaccaggcttatacttgtttagtatgatgcaatactaataaaagacactgtttaaagtatctttttagtttcatgagcaaaaatgctttctggacacatgtccttacattagaa

SEQ ID NO: 3142 - DNA, 201 bp, Bos taurus
gatttaattgtggaagtagacatgggctacaatgggatatttaaaaattcttgattctgatgtgcagcacattctgtgaagcattgctctgagcttctcaatttagcttccccacaaaatttgatagattgtgttttcattttaattcatttcaagatatttaaaaatttcccttgtgatttctctcttttctccattggt

SEQ ID NO: 3143 - DNA, 201 bp, Bos taurus
tttctgagagttgctgtcagcctgggtgaagaggaccatattactggatcactcttattttgacaaaagatcattatctggctggaacatgtcctaggagccaataaatatataataggctatttcagattctttgaagataataagcataatctcattttgactatagactgtgtttcttaataaatgtttaaaaactct

SEQ ID NO: 3144 - DNA, 201 bp, Bos taurus
aggatctcacatgcctcagtcaaaaaaccaaaacatagaaaaacagaagcaatattataacaaagtcaataaagactttaaaattggcccacatcaaaaataaagaaagaaatagaaaatccttaaaaaaaccaaagccaaataatgttgatattccatagaatagtgtacttgatcatcagccacctggccctaacctcc

SEQ ID NO: 3145 - DNA, 201 bp, Bos taurus
taaaacaaagcccaggaaattatgcaaaccttgcttctcttgacttgtctgtttcctgtttgaaacatgccaagacacccccatggcagagcaagataaaacaaaagtctgtcagatctagtcctaaggactcagtcggaagtatggcccaagatggcactgtcaagatgaatggtttgttacatgatcttaaaggtaata

SEQ ID NO: 3146 - DNA, 201 bp, Bos taurus
ttataggaaggaatgtctaaataccagtatctgctggtgacgctggtgcttacaggcttgcaagtcatccattccctcccctgaacttcctcattcctttgcccactgtatcctttggagcctaatggatcatttttcagttggacattattatacattcctgaccatgaaaaataagtgtgtgcagaggggtacagaatt

SEQ ID NO: 3147 - DNA, 201 bp, Bos taurus
gtcagctgtgtctaggcaggtaatttacctggttctcatgctgcagttatgaggaacctcttggaatgagcttgtatagcagatgccctgaagcctcccatattctggcagtgagattaggagtcactttccttggcattgcccttcacaatctcatttttgattagactatacctgctctccatggtatttgctctgacc

SEQ ID NO: 3148 - DNA, 201 bp, Bos taurus
acaggaagattatgaagagagggtcttaaaaggcaaacatgaaagtttctgcatatcatgagttttaagtctgcgtatccagatacttaaaaatgtacaggacctttccattgctgaaggagcttataggttttgccataaagtgtttattcactaactgtaacagtgaatgagtttaagaattgtatcactgaagaggac

SEQ ID NO: 3149 - DNA, 201 bp, Bos taurus
gccaaaaggaaagataaaaacaaggatgctagtgaaatctaaagcctctgaaacctgtaactcctattttagcccaactcctagctattaaaatatatcaataattgattaataatatttttattatttagtatgttaatccatgggttcttgtactaaaggtctatttatctcatttcctgttaccctctacaacaggcc

SEQ ID NO: 3150 - DNA, 201 bp, Bos taurus
aactgaagtaggaagaatattttcacaccacataggaggtctctattcattaactttaagaagagttactaagagtcttttttgcaatcagtgcacactcatgactttctctattcttttttaatcactgacagttttttgactccttcatgaaagaacctatcctaagaggtttcctaggtcttttagctaaccaagata

SEQ ID NO: 3151 - DNA, 201 bp, Bos taurus
ctggtgtgctgcgattcatgggatcgcaaagagtcggacacgactgagcgactgatctgatctgatctgatagagcataaatgatctagtaaaatattataggcctcaagtttggatccaagttacaaaagtaatctgatgaaagtcaggtatcttaattttgtataaaataaacaagaaaagatttacttgaacttgata

SEQ ID NO: 3152 - DNA, 201 bp, Bos taurus
ttgaatctctggtcagggaactggttcccacatgatgcaactaaggattctcaactaagacccaagacagccaagtaaatataaaaataataataataattaggccagagaagccagaacaaaagtctggcattttttagccaaactattggcagcaattggatttcttattacatgataaaactagccccattgctttaa

SEQ ID NO: 3153 - DNA, 201 bp, Bos taurus
cacaacgtgcatctttataagtggccttttaaagactgcacttaacctgatagagaatgttgggaaaaaacaccctttgtaaatgcatatttgtggtaatgtaatgtcttctgaagggcaagaggccatctctttggggtttcccagatggcacagtggtaaagaatccacctgccaatgcaggagacacaggaaatctgg

SEQ ID NO: 3154 - DNA, 201 bp, Bos taurus
atgtatatggtgctgtggtgctttttatatcaactctttgtgaaagtgaatagtcttccattgatactagatgcttcatttttctatatgaatttcttcataattcattggctattaatgcctgtttctgcctttaacatagaacattgaaaaagtctacttcaaaaaatagcatctcaaacttactacttatcaatgacc

SEQ ID NO: 3155 - DNA, 201 bp, Bos taurus
cttttcaaaattttgaaaaaatgatatgaccaggccccatttttcacaagctgaatatatggggaagacagagtaaactgttgcaagaaatggccatgtcatcatgcattgtgttttgtggtaataacctattaaaacaggaatggtatttttgcacatattaaactaaagtattttaattttggcctttaagccagtggt

SEQ ID NO: 3156 - DNA, 201 bp, Bos taurus
gccatattttcctgaagagtaggcatgtatgcatttattcaataaattatgcattgaagataccatatatgctggaaatacagtggttcaaagcccatacctggactttatgttgggagtggtagacaatgtttaattcaatgaataaatcaataggtaagtgtaattaacatttactgagaaattaatatgtctcagtaa

SEQ ID NO: 3157 - DNA, 201 bp, Bos taurus
tagggaggcctggtatgctgcagttcatgggatggcaaagagttggacacaactgagtgactgaactgaactaaagcaaatagatgaatgaatcaaaatatcaagtccaaggataggcccaaggatatgaggaaaccacatataaccaaaggagtgatggataatgaatgtttcacaaccagctctctggagcagagatgg

SEQ ID NO: 3158 - DNA, 201 bp, Bos taurus
ttgaaatatttcctgaaactcttccttaagcagccatgaaagttttctttacattatcaggccacatcacttgatttatccatacttctcacagagtatagtctcaattctttttcattatactggaaaactgtatctttaccactaaagtaaatacaatgtcattcatttgttaataatttaacgcaaacgtttttcaga

SEQ ID NO: 3159 - DNA, 201 bp, Bos taurus
tcatattgtcagtgaacttaactttgttccagatgtaaaaatagaagagaattcaggcaatcagagcccaaggccagctaccagtgcagatacccaaggcgatgcccagaacagcatgggttggaaaaaaaaaataaatgaattatcaggtaaaacgttaaagaaggcaacttgattcgtttaccaggtctgctgattctt

SEQ ID NO: 3160 - DNA, 201 bp, Bos taurus
cacattccacatatttcttgagactacagcataatgttctgaatcagttttgttttagcttgagtgaccacataatttgtcatccaaaccagcgtatttttggggttaggaggtattcataatcatgacaaggcaactgatatagctggctgttttagattaggctcctcagaaacagttcctaatttatattaaagtgat

SEQ ID NO: 3161 - DNA, 201 bp, Bos taurus
cacaatctgactaaagctttccatcacttcaattcttggcatttcttactgtttctcaattgtttcttaaatctcttaattatttccatactttggtttctgacttttcccttccaaaccaatgtcttcttcatgatttacttatcccataatactcttaataccaaggtttgatatatgtaccaaactctacataccaaa

SEQ ID NO: 3162 - DNA, 201 bp, Bos taurus
aggctgtttctctgaaggtaattttgcataccatatttctaacaccatgactttgaccctagaatgactgcagtcatattttgacaatatctcttattaaagtattcactcttcaaccccagacaatggctttttttttttttaatgtacaccttcttgtctgtaataatggttaaaaagagaaaagaaaagaaagaagtt

SEQ ID NO: 3163 - DNA, 201 bp, Bos taurus
aattacatgaaaacaagagtgaaaaaagaaattaatttaacaccattctatatgccagtaccattccagaatttaacaagaaacacaaaccatataaccattaaattctagtttcattgatccaaatcacctcaaaggtatccaacccacccacccacttgtctcattttaaatatttaagaatacagctttttatctgga

SEQ ID NO: 3164 - DNA, 201 bp, Bos taurus
cttcaaagtgccattgcattaaatcacatcagggattcaaacatagtacaggactcagtcttctataagcaagagtttctgttcacactagttcatgttttgttattgtcattagtaatatcatcattattattgaattcatcttcatttagggcattagtcctactcatcccattatagttttcattttctcaacatgtt

SEQ ID NO: 3165 - DNA, 201 bp, Bos taurus
gagcataagtcccagagccacagggaagatagattggatggtacagcaggcgggaagtgccaaggaaagatggaagctgtacgccacttccttctaggcccgcccgaggaaacacacagtcttgatcaaatgagtaaataaaacttcctgtataagtgcaattccattttcaagtctgaggagtgggccagtcctcttcct

SEQ ID NO: 3166 - DNA, 201 bp, Bos taurus
atttccagtctaggatttcacaagctagttcatggagaaattgaggaagtgaatgagccccacaccgagtaacactatgggaaatcagaagttaactcttccgatgctgtggcccacaggactcatctgcagacaaattctgattccagggctgttgtcacctctacttccgctcgagtatttgtttgatggaaatctcct

SEQ ID NO: 3167 - DNA, 201 bp, Bos taurus
tacactgtggacattgaaccacgtgttcagttggggtgtctacatggtcaccaggttggctgttgagtcctagcttggccatctgtgctctgtggcagatattggcaaccagatcgtcctctcctctaaaagtgctgcctcatgaggagttcatggcccttagcacctggtggacagaaacaatagcttggagggtggagt

SEQ ID NO: 3168 - DNA, 201 bp, Bos taurus
tcctggaaatttctggccattacctgccaggaatagcatccttttataaattaaggtcttatcttttgcagcagcagcatctagcccagagagggctggcgcggcccagctcagagaggatccaagagcctgggagctatgtatagaaggcagggttgctcttccagcctttggaaatgttcaagcactgagagagtcacg

SEQ ID NO: 3169 - DNA, 201 bp, Bos taurus
ccatggtggctgacaggttctcctttaaagataataaatagctcacaattgctttactttggaaagtgctcttctgccctgggactctgtaataaccaaccgtggaaaaggaaaggcctggggatttatgagatgtcccaatttacaaccatctgggagaaatacagcagggcgttggtacatcagtgttttaaccagagt

SEQ ID NO: 3170 - DNA, 201 bp, Bos taurus
gtttttttggccacgaggcatgtgggatcttagctcctcaaccagggattgaacgtgcattggaagtcttaaccactggaccacgagggaagtccctagaatataggtttttaaacataggccatggactggtagtgactgtcatatatctgcttcactctgtcccgcactcactgtggagtgtgaaaggcttttgtccac

SEQ ID NO: 3171 - DNA, 201 bp, Bos taurus
aattcctcaagaagcatcagggtccttcctagacagactggggaaggaggtgggatttacccagcatcctcattcctcctctggcaggctcctaactcacgtaagacgacacggttgagtagggggctgctgccttcgcattgtctccattctgtttctgctccacctccaatctttggagcactatgacccgggaaccag

SEQ ID NO: 3172 - DNA, 201 bp, Bos taurus
ccttgatcattgacagcaaaagaagcatttcacatttatctcctgcaatactgaaggacattttcacaactggaaccagtagttacaatgtcttactacagagcaaagaggagaaaaagcatcattcacaaaaacagccttcctccaccggctccaaaagatgtagaaaacccagcaaatctcctagctcttcgcgtagta

SEQ ID NO: 3173 - DNA, 201 bp, Bos taurus
ctggatgtggacacccaaaagagcacctagagatgtgaagcaaacctttaaaagggtagaaaggtacaagacgctggatttaacttcaagggcctgttttagcgcctgcccctgcgtgttggtcctgcaacacaggagcctctttgtttctgttgtacaatggcacagatggggccccaggctggggtttcaagagttcta

SEQ ID NO: 3174 - DNA, 201 bp, Bos taurus
ttgcaaagagcacaggtctaaagtcagaaggttctgggtcctagtcccagctgacatactaatgagctgtgggatacaggcaagtcacttaacttcttcgattttagtttccttactcaaaggtggagactcaataataaaagcatgcattacctacttcccagagttactgagaaagctgtgaaaatacaaaggcacatt

SEQ ID NO: 3175 - DNA, 201 bp, Bos taurus
ggctggaggaaaacagtaactccagacccctggagcgcacatgggctagaagaagagactcaggggagggtttccagtgggtgagacccacagaaggccgttgtgtgtctgagtgacagcattttatgccaccgcccaactgctgtatttacccagctctgcagagggtgacaagtctctggaatgtgcatcttatttttg

SEQ ID NO: 3176 - DNA, 201 bp, Bos taurus
agacaaggcccagatccaaactattcatgagtcttaattttagaatgctcctctgctgaccttttgctcacttccaaagctcatcaacagaaatggattgaattgaccacattcctcccatagtgcctgtctcttttgcaatggcctctggaaacactcttactaatgctgcaacactgccatttaagacataagtcatgc

SEQ ID NO: 3177 - DNA, 201 bp, Bos taurus
ggataacctaaaactaaagatacaaagcaatttcctctgtgcagttttctaaggtctatactagttttaaagtctcagctcagaaactgaaggttacatggtgatgaaaaaagctgagagtgagcacagtatctctagttgggaaagtcactcgtaagaacattaacttggaaaatatcctaaaaattatgtatgttttta

SEQ ID NO: 3178 - DNA, 201 bp, Bos taurus
ggatactctggagaatataaatctgtgaggaataatgagttgattaatgttgactttcccagtccagattcacctaaaagaaacaaagggggaaatctcttaaaactcagtcaacttatcaagcttaaatattcaaccagtgttataatcaaacttgctttcatccaattacttcttggaggacaagcaagtgacattaca

SEQ ID NO: 3179 - DNA, 201 bp, Bos taurus
tgcatccagagggagcatgtggattttaacctgggaactaaataaataaactgtcagagctgaaagaaatgttccataggtcagatcctaaaaatagagttgatgggtagagtatgaaagcagatgtaattatgagattgagcagtctcaatctcgtcttttcatttaggagttggacaggggagaactggagccacagaa

SEQ ID NO: 3180 - DNA, 201 bp, Bos taurus
ggcctaaatgcaggctgggaagcagcattattgatagggccgtgtccaaatggtcctctgtgctcagcctctaatggcctaataatgcattatacttgaatcagaaatactttgagttgcagtgcttattgccattattgaaaacacctggatgctccattcatcaaggttacatccaaaggggcccatttgtttattagg

SEQ ID NO: 3181 - DNA, 201 bp, Bos taurus
cataactgtttaacactgaactctgggttcacaggggcaaaaatgttgtgaaacattctgagcctttaatattctctttgaacatataagaggcacttttagaagagaatgacgagtaataatttacattcaccatttcccaaagggataacacagatccagcttcctcaacttcattgtctactcctcaggaatttcaaa

SEQ ID NO: 3182 - DNA, 201 bp, Bos taurus
agccctgattaaatggcggggcagccaagggaaggcccccgccgccgccagagccaccgtcaccgcgccgactaggcagggactggcagtggcgggggctgtaactttaatgtctgcgtcccggccgcagggactgcggcggttggagctgagggtactgtcttgggcctcgggtcctgggttggagccgcgtgtgcggga

SEQ ID NO: 3183 - DNA, 201 bp, Bos taurus
tgtggttttgattttggggggagagatatagaagctcagtgaggaagcaaagaatccagcaggagagactgaaaattgggcaggcatttgagtagaaaaggttagttagttgaagagtctgacaagtgattgggggtactgagatcagggaaaggaacttgagcttgtggttgaaaatgccttgcaaaatggatggcaagg

SEQ ID NO: 3184 - DNA, 201 bp, Bos taurus
actgccagataatttcttcagcaaaattaggtttactggggatcagcagaggattgcactttgaagtttaccaccatggtgagccacatgcaagtccctgtacagcaaggagaagagaacacttttatggaagggaaaacaaagttgtgagagctatagtaaacaaaaaagttcatggcttttcattggctgactacttgc

SEQ ID NO: 3185 - DNA, 201 bp, Bos taurus
tgaggatggaatctggggctgtgtgctcagtcattgccacttcttgctcctttgtccgctatacccagcaaataggccatttgggacaggtcagtaaggattgggataagctctttctcactctgcccctattctctcggtaccttggggccaatgacaactggatcttgattcctcctgaggctgcacagaatccatact

SEQ ID NO: 3186 - DNA, 201 bp, Bos taurus
taattataaaccacaagtaagctgtaaaataatttatatgttgccaaatatataaaattcaccatttcagttttcccactcctaaaccttggggcctctctcctggaaccctatgtcttttggttccacactatactggtcactagtttgactggttttagaaaagttcatttgggtttttccttaaaaacctgaataaac

SEQ ID NO: 3187 - DNA, 201 bp, Bos taurus
aagaggcccaagaaaactcccttgctacctcctccatgtgagattatagctacaaggggcaatctatgaactaggaagtgggctccaaccaaatactgaatcagctggcaccttgatcttagacttctagcctccagaactgtaagaaataaatttctgttctttttaagatacctagtttgtggtatcttgttatagtag

SEQ ID NO: 3188 - DNA, 201 bp, Bos taurus
tattctgccttgactgtcctagggcccaggactgttttgtggttagatgacagtttttctgtaaatttaagccaagcagaaatgtctgtcctcatgttttgctgaatgtgtggcctcctccctacacggtcctctcttttcataccagagtcctcttgggtgcctctctgcaaacccaccaggatagggttaccctcagac

SEQ ID NO: 3189 - DNA, 201 bp, Bos taurus
tctccctctcaaggctctggggagaattctttcctggtcttttccagctttaggtggctgccagagttctttgaattgtggtcacaccaataccatctttgagcccatggttacagggcctcttctgtctgtgtgtcaaatcttcctctgcctccctcttacaaggatctgtatttttgcctttggactcaatagtaataa

SEQ ID NO: 3190 - DNA, 201 bp, Bos taurus
gatttgaagaacttgagggagtgagccatgcagacatctcgggaaagagctttgtaagctgaagatatagcatatgcaagggccctgaggtaggattgtgtggggcatttttcaagaataacaaggggtcatttgtgctggggcagagtgaatgcgggagatagcagtagaagaagccagagaggtaatgttaccttaaag

SEQ ID NO: 3191 - DNA, 201 bp, Bos taurus
ttgcttaactctctgagcttggtttcttcattttaaaaaggaagaagtttcactaggtgacctttaaaaaaatttctccactctaactttgtgtgatttgccagggctaattacaaaacatttaggccagcagcacaacctttattaaaataaagatgtaaacagcaatgtgagagagaaggttagtgtgtgcagaagtca

SEQ ID NO: 3192 - DNA, 201 bp, Bos taurus
taaatgaaaaacattaggttcaaataatttcacaagggaattcgaacaaaacatcaaggaagtgattatttaaagccatagaaaatgttttaatacagaacgtgaaaattcttaagcacacatgaatactgcttcaggaatcctacaaaggtatcagttacaagtttattgtaattatacatatcattgtaacatcaatga

SEQ ID NO: 3193 - DNA, 201 bp, Bos taurus
aagaatagatgtggtagaaaagcaagaaaagactaattccagcaagctacagcctgtataactctttaaaacatgtcatctactggaaagcccttccttattctctcaagcatacatatttatatattttccataaattccatttctttctcacattatgggttcttgatggtgaattttacagtttggtttatagttgta

SEQ ID NO: 3194 - DNA, 201 bp, Bos taurus
tccactattcttgcctggagaaacccatggacagaggagcctggtggattgtagtccacagggtggcaaagagtcagacaggaatgaagcaacttagcacacacgtctatagtgcctgtttcagcctgagtacacagtagacactcatttgtatgaaagagtagtgaattcacgaggtctcctatagcaagagcggtgaag

SEQ ID NO: 3195 - DNA, 201 bp, Bos taurus
ggaacttgccctgccttgtctccatcctagaaatgccatgtgaaatataaagtaagattaaccaatgcagcatttattatgtgtgaggcactaatctaaatgttttacttttaatcctatgacaactctacaagaaagggttcctacagttatttccatttatgagaaaaagaatgggaagagggaaaaagaggaggaaga

SEQ ID NO: 3196 - DNA, 201 bp, Bos taurus
cctaattaaatgcaagatgaacacattagagagtaagaatgaagtacagtggatcagtaagagagacatcaactcaacattgaggtctggttagggattaagataggcttgataaaggacagaaatggtatggacctaacagcagcagaagatattaagaaggggtggcaagaatacacagaagaactgcaccaaaaagat

SEQ ID NO: 3197 - DNA, 201 bp, Bos taurus
cagacctcttcccttcctaactgcaactggttatcatatcaaacaaaatgactgagaagtaaagacagaatttccagtccaagccctggggccagacttccttgatttgggctccacaacctatgttgggcatcattcataacctcaaagcctcagtttccttggctgttaaatggagctaatgacatttacttggccata

SEQ ID NO: 3198 - DNA, 201 bp, Bos taurus
atgaacattgactcagtttcgcaaagagcagttacacaaaaccatagttttgataccagatgtccccacccaaggcattacctcagagcatctgttaaatcagctttatgcattcagcacacctggcttctgccttaaggaaaaggcaccctcaagtacatctcctctctaaaaggaaaactccttagacacaaggaatta

SEQ ID NO: 3199 - DNA, 201 bp, Bos taurus
agcaggtccacagcagtgatctgccactgtcatagacacaccatggcttcaattctaccttctaaatcttctgaatatttttcttgtggccaagcctcctctaggaccttccagggaagggcattctcagaagcacaaccccaacttaacgaagccaccacatgcccactgtctctgacttcagctatacaacttgtcttg

SEQ ID NO: 3200 - DNA, 201 bp, Bos taurus
ccagatgaatcctggtggcccagcttacctgcctcactaccctgtaactcaagtagcctgaacaggaggtttgctgaatagcacatatttttaggctctgtgggccatctggtctctggtcttagttttgccattgtagggcaaaagcatccaaggacaaaatgaaaacatgaatgagcattagctatgttgggagggatt

SEQ ID NO: 3201 - DNA, 201 bp, Bos taurus
taatatcccagccaccgttgaaactcttttatgtttgaggctcaaattgatggaaaacaaatctcaacgcctcaggacaaggctggggccaaaccttccagagagtgtaataaatacattcaagctcttaacaatttagaaaataaatttctcttgcatgacacaaataaataagaccagtttgagacggtgaatagcttg

SEQ ID NO: 3202 - DNA, 201 bp, Bos taurus
ctactataacattttaataagccatttttcccccaaggaactcatttattttataaagctcagaaaataaaaatggccctttacttccattactgatactatcttttgtgttctactttagattttcctgtgcttatttaaagattttccccccaaaattggactctggctatcgatactctcacaactcctttcactcaa

SEQ ID NO: 3203 - DNA, 201 bp, Bos taurus
aagatataattgtattaggcctgtcatgtgtctatgttatgctagtcaggatcctcatcactttgttctgttgaattgcaacactttttgttgaataaaactggttttcagccatatagtcacgctccattctaatttctcctacaaaatactttatatgctggttgaaattcctacagccccttcatttcatttctctac

SEQ ID NO: 3204 - DNA, 201 bp, Bos taurus
atggctgtttttatacaggtgttttcatttctgtggtggccgggcagtatatgctgggctctgtagtgaaggtggggccttagcagaaaaggctgaagctatgctggcattggtgacttaggtcagtttgcctcagacttcggtttcaaaactggtatgacaagtcagaatgacttggagagctactataggacacaggcc

SEQ ID NO: 3205 - DNA, 201 bp, Bos taurus
gggacagagaggcctgggcatgctgcagtccatggggatgcaaagagtaggacatgactgggcgactgaaaacagtgggcaggtagtggacaaaagtatcattcatatcctgggtggaatggagcaggatggctcaagatttcatcatgctactcaggatggcacacaatttaaaactcatgggttatttctggagttttc

SEQ ID NO: 3206 - DNA, 201 bp, Bos taurus
tggactgtatagttcatggggtcacaaagagttggacacaactgagcaactttcactttaaaggtgaaccttgggtcttggattaatcttaaatggctccgtggtctgtggcctaggcactcttgcgggtatttagggcctaaggcttgggtcacagcacatattcactgagtttacaatgtcatctgtcagtaatgctat

SEQ ID NO: 3207 - DNA, 201 bp, Bos taurus
gtttactgacttctgttcctcttggggcctctgagtcatcatgatctggagcaggatcagttccgggtgatctcacagactcacaggggtggttgtgcacgtatacttccccagcttgctcaggccacagaagcccatcctttgcatctgtgatgtgtgtcattgtaacacccatagagctaccgtatttgaaggtaactg

SEQ ID NO: 3208 - DNA, 201 bp, Bos taurus
agtcgctcagtcgtgtccgactctttgcgaccccatgaatcacagcacaccaggcctccctgtccatcaccgaaagttacatacatttaaaactgcaacatgaacagattatactctaagtaatgacaatttaactttcaaccaacattgagtgtttgttttaaatttttactatcattaggcattggtaaatatttgttg

SEQ ID NO: 3209 - DNA, 201 bp, Bos taurus
cttagagtgacaaagggaattttatgccacggcagaactgaataatctagttgcttttctgtttgctttttccttatggcattgcagtacgtattcatttccacagatcagtcaggcctttgcctaccatagtgagtttatgcattcctaatattacctagttctgacacattgctctcgagaagggtgcattattgtctg

SEQ ID NO: 3210 - DNA, 201 bp, Bos taurus
tctgaacaatagaaggggaggcattactatgaagttttaaaactcatactactttgaaattatcacacaagaattgtcacaggggaacacagtaagactgcgatttcttcttgttttacaccacaggactgaaaagggagttgaaggagattaattacattccctgctaatcaatgcaaagacatatttttctgcttctcc

SEQ ID NO: 3211 - DNA, 201 bp, Bos taurus
tgcctataaatgtacagttatctctctgtgccaacagttccacaactaaggattcaaccaaccacaggttgtgtagcactgcagtatgtatttattggggaaaaaaattgtgcataagtgatttgaacacacaaaattcaaacccatactgttcaactagagtttgcttctaagagagattccagagcgcttacttgagcc

SEQ ID NO: 3212 - DNA, 201 bp, Bos taurus
ccctggcacagccagctgcttctgccagctgacgttcccggggcccagaacttgttagatgagtgagggaacatagtcacaagggccgaggggctcaggcgtaggtggcacaatggggcagggttcccaggttgaaggtcagagacacggaggcagtgaggaatccatcctcccaacaactgtttactgagcagctagcat

SEQ ID NO: 3213 - DNA, 201 bp, Bos taurus
ctctctcctgcccgactgtggcgcaccagagctgccctcgccctggggtcagcggtcagcctggtgtttactgggagaggaggccctctggggtggagctctggggagctgtgtgcccctaagcacacctaagtgtctgtaaatacaggatggagtggacgtgaggcagggaggcagcatggtggcgacgggcccagcctg

SEQ ID NO: 3214 - DNA, 201 bp, Bos taurus
gctgcctgacctcagctggcccgggctgcagggaaaaggaggcccagggctttctgctgacttggtgctgaacttaaaggatgagtccctggcctccttggtgcctgctttcccataaggacactgccagttactaagcagcaagaatttacatacatcatcacatgtttaatcctgcagcctccagtccaggtggttact

SEQ ID NO: 3215 - DNA, 201 bp, Bos taurus
ttcttgtttctggcctagctctagccttcggtacagctgatttttctgtgtatcttgggaagattaaagggggtgaattaggaggtgtaagtcttcagctgtcataaccttcatggcctgtaatttgtcattgtcaggttatgttccagcaagggctgaggactgtggaaaagagctcaaaacggaaggaagcacacttta

SEQ ID NO: 3216 - DNA, 201 bp, Bos taurus
tttctccgccctccccccccaccccacatggcatccccttccccatcccagacattctaacctccactccggcgaccctcgggccaaaggacaaaagaggtttgaggaggcaccagagcactgaccgctagcaggcatgcagaatgcaaaaggggtgctggccctggaagactgccttgccttcatcccaggctaagtctc

SEQ ID NO: 3217 - DNA, 201 bp, Bos taurus
tgcccattccatttcaggttataagaattcacctttataaagcacttcatgtaatataatacctgtattttagcttatgaggtatttcattgcattatgaccaattcagatgtgtctggtctcacaagcagcttggtgctgggaaaagagagccctcatgtggttgtccttggagctgtatggctggtacatggtaccctg

SEQ ID NO: 3218 - DNA, 201 bp, Bos taurus
actcttggggttcaattccaagcttctggttctacctgactggatgtgagaataccctgtcctctctaaattctgatgtccatgcagtgccctaggaaaaggaggcctggattaaaccaccaagctctccagcccatgaaacctccctcccttccgcaaaatcaaatttcaaaatgttccatatgaaggatggctgccttc

SEQ ID NO: 3219 - DNA, 201 bp, Bos taurus
tcatatgaccaaagctgtagaaacaaactatcaacctggatacagcccacaaggcttatacttgtttatcacctgtttcatttcaggttctgtaagacacatatattgtccctatcatatttatatttgctgtcttattagctattccaaaaacaatttgctaaaggttcagttcaattttactaaagctcaagtcttttc

SEQ ID NO: 3220 - DNA, 201 bp, Bos taurus
caaagctcttgagacagataagcagctgcatttagcttgctctgcaccattggtgattaagccaagactggtcagagagcacattcggaactgcggcccccggggacaacaccaaggtctgcatgttcggttaagaaagctgctgagtaaactcgctccacgtctcactctccttttaactacttcacttcaatgatagcc

SEQ ID NO: 3221 - DNA, 201 bp, Bos taurus
cacttgttaaagtttattaatacaaagaaatgaatctgcagagggaagatcaataaatataaaatacacgggaaacactgggagagtcacagaccacagcgctggggagattcctcgaggatgggaggggcactctgtttgagtttgtggtccagaggtgaagtatttgtcctgccgcaagagttcaaagggcaggaattc

SEQ ID NO: 3222 - DNA, 201 bp, Bos taurus
agttgggtggttctggctcagggtttcttttgaggctgtagtcaagaggatcaccagggttgcagtcatctacacttgatcttagccaaaaggccgagaagggataaggtcgcagtcatctgaaggctgtattggagctggaggacttgcttcccaagtggctccctctcatggttgaaaaggcactactggctgttggca

SEQ ID NO: 3223 - DNA, 201 bp, Bos taurus
gcaggccggccgaggggggctgggcgcggggcgcggggaagggcctcggcggcagcagctgctctcgggtccacccgaccctgccccagcctctcgcgagcgggctgcgggctgggggcagaggccagcggcttgtgctggggaagaaaacaaaacttggttactgagtttgtcgaagtcacgtgtgccccaatcccactt

SEQ ID NO: 3224 - DNA, 201 bp, Bos taurus
atggtagtattcatgtctaaaagtttgatttggatcttttatatacatatcatgaactctttgaatatatggaatacagtctgaatacagttatagtgcccatttcaatgacactgtctgctcatttaacatctctgttagttctgaattgatatgtctcctcattataggttgtacttgtctgtctccccatatctgtga

SEQ ID NO: 3225 - DNA, 201 bp, Bos taurus
gaaaataaagtggaaaattatttcacatgcgtgaaatctgtttaccaactgcaaaagtctaaactgatgttgaatcctgttgctactcttacattgtttacagcacaggttccggagatcagtaaacaagcaatctatggaataatttctgaaattaatttcataaaagaaatgatgccgggcatgaccgttttaattaaa

SEQ ID NO: 3226 - DNA, 201 bp, Bos taurus
ctgtgtcgtctgctggccctgccacggaccacaagtgtgcgctctgtacaaatcctttagcctctctactttctcagaggcaaaagagggtggccatccccacttcacaggtgtgctgggaggatgatccgacaatcatatatgagatagtattgagtgtgcgcttggcccttggaggatggtcagtgtatattctattca

SEQ ID NO: 3227 - DNA, 201 bp, Bos taurus
gaccctggcacaatacaggtttggactgcacaggtccacttatatggagatatttttcaataagtttattagaaaatgttttagagatttgtcacaagttgaaaaaacttgcaaactgcaaagcctaaaaataagggaaaaaattaagagaaagttaatgtcatgaatgcataaaatataggtagatatatgcataacata

SEQ ID NO: 3228 - DNA, 201 bp, Bos taurus
tgaaaacaggcgctgtatctgaactatgtactgccagcgttgtggccaagaatgcaaggaagcagaagacaggatttctcagattcaaatctgggtagtattaaatcttttcttttctagatgtgtaaaaggacaggaaaaaaaagggggggtgggataaaaggttgtacttgtgtgtgctacccttgcctgtggttccag

SEQ ID NO: 3229 - DNA, 201 bp, Bos taurus
cacatggtagggatgagttagtattgcagcatgagtctataccatgacatctgctggtggaagcatggtttgaatatggtttggagccagaatcgagtctagaaaattcttctcctttattagatatataaaactgtaagtaaaagattcagttcttatttaagtatatttgatatggaagttctttctgttaagaatata

SEQ ID NO: 3230 - DNA, 201 bp, Bos taurus
tgtagggaatgagctttttgctcatcttttgctgagctctgtttaccagagcaaaccacaggtgcactcaggtaaggtaatacacttgtgctattcatttcattgtgtcagtttgtatgttatttcatctgttgaaggaaacaagcttggaggtgagggtttttcttaactcatttttgctgggcttaggaaaatgctctg

SEQ ID NO: 3231 - DNA, 201 bp, Bos taurus
tcttataaaaaggaaccccaagttatgattcagttgggcacagttctttaggaaaagtagctggactgtggaatctctgccaagggctgcagagtgcttctggtgccctgatatggtggtggccttgtagatgataaatctcttaaggacaaagtttctgttttatctaccatataatccctcaagttgcagattcaggac

SEQ ID NO: 3232 - DNA, 201 bp, Bos taurus
tttataggcaacgtccattgtcaaattctgatttgctgctgaaagttgtatctgacttatttcttgggggaaccgattttaaaggagaagcaaatctccctggcctacccaatactctacttccactttaatttaaaaaagaaaagcgttcatccctttgcaaacacccagcccttctctttgaaatggggactttccctg

SEQ ID NO: 3233 - DNA, 201 bp, Bos taurus
agttttggtgtgcaggcttctcattgcagtggtttctcttgttgcagagcctggctttagggagagagggcttcagtggcctcagctccccagctctagagcacagactcaatagttgtggtgcacaggcttagttgttcagctgcatgtggaatcttccctggccagggatcaaacccatgtctcctgccttgaaaggag

SEQ ID NO: 3234 - DNA, 201 bp, Bos taurus
ttgcaatccaaaatatacatcatcatggcctctatctttcccctaagaaactcctgaagatgagctttcaaaacaggcaatggagccattttaggggtacctactgggcctggaggagctgcttttagggaacctcctgaagtctaaaaaaagaaaagaaaaagactgggaagatgcaaagccaggcagctgtaaagcgct

SEQ ID NO: 3235 - DNA, 201 bp, Bos taurus
atccaagtattctggggtttaaggattttaaactcctttctcctaaaaccacagaagccaatctctaactcagtaccaggcctacagaatattcctaatattgaaagattgcagcattccatacagtaagaaaggaattttaaaaatagttacgttctaggcctacatgggcaggactttggctagctttctgttgaagca

SEQ ID NO: 3236 - DNA, 201 bp, Bos taurus
gattatcctgtattatcagtgtgggcccattgtgatcaaaagggtctataaaatggatacaggagagaagcagaagttggagtgatgtgcttcaaagatgaaggggccacaaaggaatataggtggccactaaaagctgataaatcagggaaatagattcgctctcagaacctacggaaggaaccagtcctgctcatacct

SEQ ID NO: 3237 - DNA, 201 bp, Bos taurus
gtcctcctctttcagaatgttgtaacctaggcagaattgttggccattgatgaaacccagccctattgccgacctgtcttccactgagtagctctattgtcttgaatgtatcacttctcagggccacatttcttctgcaaaatcttcatgatgtacggtattattgtaaaatccttcccagctatggtgatttttttccta

SEQ ID NO: 3238 - DNA, 201 bp, Bos taurus
agttgttcttattcaggattttaacattgtacgttaccctagaaagtaattctatagcagtgcctcttttctctcaaaatcatgtaactggataaagtggaaaaggtgactaattttattttcagtttcagcattaaatcctttgttgtattactactttatttgtctttatagtaatatctggctaaaactgaagtcatc

SEQ ID NO: 3239 - DNA, 201 bp, Bos taurus
ccagctccaggcccctatagtaagaaagtacacataaaagaactttccatggttactgtcaatgtataagggttagcacacaaactgtacaacacacttactaagtaaagagtgaattaattcaaatgttcttgggaaaaaaatattttctatgttaccattaagctcttgcccaaatcagatatctctgggacctggagc

SEQ ID NO: 3240 - DNA, 201 bp, Bos taurus
catcatctggttcttttattttttgctaactcaaatccattttcaaaatgtaactcagtctctagaaatccttctggaattcctctggaaatcctcagatctctccagtctgattaatttgaactcttcaagcccctactgcctccgggcagaccttgggaatcctttttctcggtgctttgttgcactgtacttacctgc

SEQ ID NO: 3241 - DNA, 201 bp, Bos taurus
tgagctcctcatctctacatttttagaggcctcctctgtgtgttccctgccactgtttcctgatgcctccaaggaggacctcattcaaagtatgacctaatgggccctggtctcaccttattagcctgttcctcttcattcctgtaacctaatcctttgtttatcaataatttgtcaatcatgtggccacatcccaaccag

SEQ ID NO: 3242 - DNA, 201 bp, Bos taurus
gacctttcctcacctttcccattgaattagcagcctgcatctccactctttatgagaatcaagggcatcacagccctgacactcacagcagctctatcagtatggctgtggggtacaaatgatttttgtatgcaacttacatggttcagaaaggtcatgtgatttcatagtgatcaaaggaaaatggtgaatgtttgtcaa

SEQ ID NO: 3243 - DNA, 201 bp, Bos taurus
gggctattcttctatgaaagatgctctgcctcctctacttttgacctggcagggactccctatgtcactcaaaggcctacagagtccttcataatgcaccttctctaactttccatgctctgatttgtctccagtcatgccctgggccccaagctccttccactccggccacacttgcctccttactggagtgccccaggc

SEQ ID NO: 3244 - DNA, 201 bp, Bos taurus
ttagttgccatttttttaggccaaaaggagtccaataatgacaatttgatatggtaaaacctggtataatatccatgcatcccacaaatacccaagtgcctatgttgtgccttcggccagttgccatgggaggtggaaaatgagaatgagtggctcctcctcggagcctctagtctatacagcacaacttgagtactaggt

SEQ ID NO: 3245 - DNA, 201 bp, Bos taurus
tgctgcacatggggaggtataatgactgtaattacttggatgacatttaaaaattaacaaattctccttcaaattcgattcttccctgtgtgctgccagcgctctttcctctaatcacgtcaattaaatgttcttacagtgtcaccctccataacaccctttaatgtagtgatttgggaagtatatttaaagcaattaaat

SEQ ID NO: 3246 - DNA, 201 bp, Bos taurus
tccatctccactggggccatgttgtcttggttttgatcatttccctcaaattaagatttctgcataaaacccccgtgtctgtgtttggctggcagttttatggctgaccaaactgcactggccgggggttctggttggctgaatgtttacacagcctgttaatcagatgaggagaggggaatggatgtggggactgtctgt

SEQ ID NO: 3247 - DNA, 201 bp, Bos taurus
tctaggccagagtttctcagtctcggcactgttgactttcggggctgggtgataattctttgttggggggctgtcctcttcattgccggttatttagcagcatctctggcctcgcttcatacattagatgccagtaccattctaccttccaactgttattatacaaccaaaaatttctccagaatttactatatgaattta

SEQ ID NO: 3248 - DNA, 201 bp, Bos taurus
gtctctgtgacaaaaacaagatataatgaaaagaaatgtaatgacttttgttcataccaatatcaaattaataagacatggggtcgccttgccctggcctctgacctggagctaaatacttatcagcagattattctctcagaaagaatgtagataaagcagttagcagagggcccggcatgtgttttgttatcattgtag

SEQ ID NO: 3249 - DNA, 201 bp, Bos taurus
aagatgaaagaacaaaaaagtactcagtagagtccctggccaccagtacacactacactctcagtcagcgtccaggttcttttgtctgtacagcgtggccgccggctctccgctctgagtgcagacctcgtgtttcccacgggtttccgcaggattggaaagctaggtgacctgaggcagagttggccgctttgtcatcag

SEQ ID NO: 3250 - DNA, 201 bp, Bos taurus
tggccctatcctgagtgcagcattgtggccatgagagcagggaggctgcaaagagcatcccaaagcactaggatgctgagcccagcgccttcacaacctccgcacccatcctggccatccagttatcagtgagctgtggagcccgccctacacttccgtaccaactcccacccagaatgcagcatgccagagggtctgtgg

SEQ ID NO: 3251 - DNA, 201 bp, Bos taurus
tttctactctcttgttctttcatgtggtagaataagacattcaagctcagggcctggcttgggaccacgtgctgcactaataattttgtttggagcaatggtgcttagtgatgaataaagtaaggccagtcaatcctaaaggaaatcagtcctgaatattcattggaaggactgatgctgaagctgaaactccagtgcttt

SEQ ID NO: 3252 - DNA, 201 bp, Bos taurus
gctattttcttcccatgtctcttaaaggaactggaagctctaatggctcttgtttgtttcaatcacttcacataacctctgctgttggtggcctctccaacatagattccccctttcttgtctctaacacaatctacacagtttagctgcccaactctttcccacccattccagaggccctggggaaggctgacacctttg

SEQ ID NO: 3253 - DNA, 201 bp, Bos taurus
agtggaataaagctgatagagagtatatgctagctgcctatcaagcacaattaaatctaaatttggaggaaaacgttcctattattgctcctttgcagggactcaaggaatacaaaagcaaagccaactctctcgcccccatcatttgcgagatttcctcaaagattttctggtgttgtgatatcagactgtaggcagcaa

SEQ ID NO: 3254 - DNA, 201 bp, Bos taurus
gctcagaaaagttgaaaatcaaaatactgaaaagcatatttcaggctaaagatcaaacagctactttggaaaaaactttcaattcaccaaaaagacagaacagttgtgaaactttatgcaaacaaacagaaaatacagaagtctcaaaaaattgatcacaaaaaaaccctacaaaacacacaaaaaacccttctggagtta

SEQ ID NO: 3255 - DNA, 201 bp, Bos taurus
ttcattctgtcacatctgttccattcactcccctattactgtatagaaccaaaaataagattgtgctgtttgaacttttagggaagcaaggaggcccagaaccttcatctcctctcattactgtcaaaacaaagcagtgactttggcagcatttcaaccccatgatgtgtgttgaggccccaggaacctggcaaggcacag

SEQ ID NO: 3256 - DNA, 201 bp, Bos taurus
actacttttcctaaggaaatcctggttttattaaatgaacaacctggcagtataaaactctcctaatttttctcttaacgctcctgtaaaaggcattcaaatggcttgaatgaacaggtttcattttatgtcagtttttttgcttcattcaaatagaatctactttcagtgcactttgttatgaagctgtaatactattat

SEQ ID NO: 3257 - DNA, 201 bp, Bos taurus
agtttctatctaagcatcaagctgatattttcagatctataatatttggcacaattctctttagtaaacattctttaagtatttaaatggaaacaaatacacttgctcaaagtaacaattcaatagtagtaaaactgatggtgagtgcagtaatacaagaattttgaaagtagagaggaagaaatgacaccatttcctagg

SEQ ID NO: 3258 - DNA, 201 bp, Bos taurus
ttacagcctttcctacatactgctactgtaataacaatcacatatcatatcatatgccatatttcattttacacatatttgcctccaactttaggttgcaaccaactgaagggttgtatttttccctgaaatagtatactcttagaacacattactgtgtggtgacagcttctcattgatggttgagagaatgaatgagaa

SEQ ID NO: 3259 - DNA, 201 bp, Bos taurus
ttgtgggttttgttcttgacatcgatgttcccagtaaatctctccatcatgcctttaaacaacacagaaaaaatgtcctccttttgtgtttatttcaataccagacttatctttatctttactattttgatggcaaactttctaaaatttattacaggcttccagattttcttaaagactcatataagtttgatggtttag

SEQ ID NO: 3260 - DNA, 201 bp, Bos taurus
gaccctctttccaatccaattgctaaaattatactgagaaagaccgtaatttttagtgagagagactggatgaaaaaaataattatttcccctgattctacgtctactactaaatagtagcctactactactgctcccacagttattaagtaactgtatgatctcaattccttcaacaactggttttttggtcttgaaatt

SEQ ID NO: 3261 - DNA, 201 bp, Bos taurus
cattcggggctttcactgacctcggaaatggtcatttctattcctcttctgaaccacttgtctatttgtcttaaacaaaccaccagaatagctgccctcactgccctgctgttgctatttctgatgttaccagtctagcaccaaggttgacatctttcctcttcacataatcatttaggacaaaagaagtgttcttcacaa

SEQ ID NO: 3262 - DNA, 201 bp, Bos taurus
gtagagaatttaaagactagtatttttcaagtttttccctttttccccctgaaataacagctgatagacaagaaactgtaatagatgcctgaagcttacatgctcacttattttaacaactttccaccttgctagactttagctgatctcttggctatccaggtgcattcatgtatgactacaagatgctcgttatttata

SEQ ID NO: 3263 - DNA, 201 bp, Bos taurus
accagaaatacattgaagaacacttcagaaaaccgcattagtcactcatgccaagccaatgtttcctctagcccaacaaacatttacaagcatagtgatgccagggtgtttggatgtctgggtgagattccatcaatagagccaagcgaacaaagcagttcagttcatctgaatcccaactccagaaaacagaagagagaa

SEQ ID NO: 3264 - DNA, 201 bp, Bos taurus
ctacttctgtcccaatactcagataatatagaatattaaacacaaattcagactcttctctgcttatggttaggtttatctcagaggtctcattggccttttacttcatattgctgtcattcgtcttctgtttcatcctgtaggtttcagtacacacaaaatttcagagaaagataagaatcttttgacaaagctgatctg

SEQ ID NO: 3265 - DNA, 201 bp, Bos taurus
tgtaataattgaagaggttataatgcaaagtgttctgtgatatttaacaaaagtcaagcacaaactaaataaaaatgctaagggataaaattgctaatctattataacaaatgaaggctgcaaaagtctttatggaaacctttccactaatatacaattaagagatgaatataagtaggaagactactgtattttatcttt

SEQ ID NO: 3266 - DNA, 201 bp, Bos taurus
gctggcaaacagagtggaaattataataatctcagagtacatgaaattttaaaacgcactatgcattttgataatcattagtagaatcctccttggatgattcttaggggaaaagtgtgtcatttcatacagaaagatgatttttatggtcattaatgaataataaaaatttctcaaattttttttaatggtcaagtttaa

SEQ ID NO: 3267 - DNA, 201 bp, Bos taurus
caccagtcctgtaatgaaattaagttctgatgacaaagcaaggtattactggaacttttctaggcaaacataatctatctaaaattcaccagctcataatgaaaaagcagttggcctggccataggaatgtgaattgaaacacattagaataagaatagaaaattatgggaaaatagcagcttcctggatactacttacag

SEQ ID NO: 3268 - DNA, 201 bp, Bos taurus
tcagtgcctaatttataatgaataatatagaaaaaaattagttaatagatcaaggaattggatgacaaaggtatgaactaacacttgacaatagaagagctgaatccattgctagacaaatattgatagggaagctgtccaagcatcttttataaaatgaggccttttcttaaaataactttccaagacttatttattttt

SEQ ID NO: 3269 - DNA, 201 bp, Bos taurus
aatcttttgtatgacttcttttgcttagcttttggcagggaaagttaggcaacactgaggtagaatattcaggaaagagacaacaggaataaacataggagcttctaacgcagttcatttattttgaatcataagtggtgtcatagcatgtaggtttacttttaacttagatgtagaggggaaaaaatcaagataaatggt

SEQ ID NO: 3270 - DNA, 201 bp, Bos taurus
ctgtgaagacaatgggtagagctctgctgtagccactgccccagaatgcaagagtctttggcagccttacagccctggcctagaaataaactttctgtggtttacctggcccagacaactgttgccgtaaaggtgtctcacccacatcagcaccccgatgtcctctacagttctctgagcagcattcctgcaacctgagga

SEQ ID NO: 3271 - DNA, 201 bp, Bos taurus
aatcatggccaccaataattctctctgttcttatgtgtagaatctatttctccttcctgagaatttgtcctgaccaatggaacaaagcagaaaaggcaccgtgccagcgccaggcctagactttcagaggcctggcagtttccactttcatctctgaaagcctagagctaccatgactgctttccaggagatatttacatg

SEQ ID NO: 3272 - DNA, 201 bp, Bos taurus
tgttcatctaaatgatactggttatttgcccttttttaggttgttttgtgtatcgcaacatgtagccttggatacagaacacaattttctatacactctgggaacgactagttccaagcccattttatctggtcatgcattttgattgtgccatcactgtgaataacaggactcacaggaggctaacaacacagggatttg

SEQ ID NO: 3273 - DNA, 201 bp, Bos taurus
ctctgggaagatttgttatgtagcaataaacagaatagactgcaaaacaaggtgataaattattctgtaaatcctagtataaaagcaagtatatttaaaacgcagacagcagcaagatcctagaagagtagcagctatgcaggaataagcaaagggaattccagtgggttcggaaagccaagaaacttgggaattcatttc

SEQ ID NO: 3274 - DNA, 201 bp, Bos taurus
gatattttgttacggcagcttagcagactaatacaatcggcaagccaaccaagatccttcttcgttcctgctctcatctatacacagataccatacagtgaccaaaaagctgaaggcccaggaaacagcacagaaaaagcaggtgcaaagtactaaaattcttaggcactgctgttaaggaaaatgccaaacatgtacttt

SEQ ID NO: 3275 - DNA, 201 bp, Bos taurus
atagagtgggcttagaaacaccatgtatttctgggaagtgagaggataagcttgatgaattcttcccattcagaggtacgcatactagatgatgcaacaaggatgtttggagactgtttcctatataaagtcaaagccttagtaagttgaagacatcttttttgttttgttgctcaaatgagaaatagagttcactacttt

SEQ ID NO: 3276 - DNA, 201 bp, Bos taurus
atggcaactcaccccaatattcttgcctggaaaatcccatggactgagaagcctggcaggctacagtccatgaggtctcaaagagttggacacagctaagtgactgagcacacacacatggaaaagcaaagataataatatacacaataaaaatgagaaagggaaaaacctttaaggaaagtgaatgaatcataaaacatt

SEQ ID NO: 3277 - DNA, 201 bp, Bos taurus
atgaggccataagggtgggccttgaaccagtaagactggtgtcattattaaaagaagaagacatattggagctctctctgcattcacagagcaaagaccatgcgaagatacagtgaaaagacggccgtctataagccaaggagagaggccttggaagaaccaacgctgccagcatcttaattttagacttctatcttgcag

SEQ ID NO: 3278 - DNA, 201 bp, Bos taurus
gagattttaatgattaaactctctttgagaacacgttgatggggttgggtgcaatcccagctccatcatggcctcactgagtttgagggtgacccaggtacgggggaagtcaccccaaagtcctaccttctccacagaaagatgagacccagtcgccttcctcacacccgtcctgggactacagatacagattcatagtgg

SEQ ID NO: 3279 - DNA, 201 bp, Bos taurus
ctctacacagcaattttgggttcttacctaagactttgaccaaggtaatcccagaatcacctgagacctagcaaattctttaaatcctactatacacacatacacgcccacacaaagccccccccacacgtatacctgtgtgtgcccgttcatgtgtgggtagacaatgctttcattcctaaatttaaagcatttttctct

SEQ ID NO: 3280 - DNA, 201 bp, Bos taurus
ctaaatccttctccagattaactcatttgtggctgtttcccatcactggcttctttgagccccaaacagaaaaaccctgctagtttctggcccaccctctttccagcagatggcggtctctgaccaggaatctcatggaccagcccccatgggaaactgcttcctctaaagagcagttttcctgggaatgtccaagaaaac

SEQ ID NO: 3281 - DNA, 201 bp, Bos taurus
catactcctcccaaggttccgtgtggccgacatgacagagtctctcacctccaccaggtatgctggtctctcagccacccatcttcaccatcagctatcagatctacccccgggccccttgtttgccaggcactgctctccacgaactcttctgcaggtgactgcttttcttgtcacattcttcagtcccactggaatctc

SEQ ID NO: 3282 - DNA, 201 bp, Bos taurus
tttctcccaggctgtggctgttcctatcattctctctcttttttaaaaactttaatttaaaaacattttaattttacttttggccacactgcatagcctgcgggaccttagttccctgaccagggatgaaacacaggttccctgcagtgaaagcacagtcttgacccctagaccaccagagaaggccctctcattctcttt

SEQ ID NO: 3283 - DNA, 201 bp, Bos taurus
tgagatcctacatagtatgacaaaaatagtcacattcatttaccaagcctcactcaagttataaccatcctcaacttttcaaattatactatcctccacagttagtcaggatctcttctattaatatggtctactgcatttggtgactatttctaaaaaaaaaaatttattggggtatagttgatttacaatgttgtatta

SEQ ID NO: 3284 - DNA, 201 bp, Bos taurus
ggataagagttctataaaatgccattttcattaggtatggactattgatatttaaggaataggctttacttagcaattaggattttgtgatgataataatcgaagtaaaatataatgtttggatgcaatgcagaataaaagaatataagaaatagtaaaaaacaaacaaacaaacaaaaaaacaccacttgtggttaccaa

SEQ ID NO: 3285 - DNA, 201 bp, Bos taurus
tacagggccatgcccacctctggagtccaagatgcaatggcagctcacacctgcccttggagctcatgttgctcactctgtgccacctgagatcatgtggataaataagctcctacagtggccaccccttgctccacatgtccaagcctcccaacaatggtctcttgcctctctggcgggtccagacttctttccagactc

SEQ ID NO: 3286 - DNA, 201 bp, Bos taurus
aacaaattccaatgggctcatagaaaagcagaatgtatgattccatgtttcctcatgcacaagatgtgaacaatatctcctactttgtctagtttaagtccatagaaatccaagtaacgcagtttgtagagcactttgtaataaaacagatgcccagggaaaggtggctaaggaccccaaagaccattcagtacatgcatc

SEQ ID NO: 3287 - DNA, 201 bp, Bos taurus
ctgtcagctgagagttgtttctactttcatcctttggcttgtggcctcttcctccattttcaaagccagcaacagccttatgaagctgtcagattcactcgtggtgaaataaaggggccaagagaatgccaagggtcctctggtctttgtcatcagaaccctgctgatccagggatctgttctgtgcttctagaactaggt

SEQ ID NO: 3288 - DNA, 201 bp, Bos taurus
ctgccatggtgagcactcctctgtgcaaaccagagctcagagtgtgagtggaggtgggacaatgcagtggcagcttaggtgttgcctgctggccagcacatacagaagacgcagctgtgtgagtatctggtgcatcagctgggaggttttgtcctgcaagaaactgaatattcttccttaagcatattgtcaggcctatta

SEQ ID NO: 3289 - DNA, 201 bp, Bos taurus
accaaagggatgtctgtgaacgtcacgtcatgggagctcaaatgaggatgaccacactgaatgcacagcccctcccaacagcctgctggccagatggtccttgaaattcctgagttctctgtcctgggaaacacctcattaccggggtccattctgccatagagcagctctattagcaagcattagtgttcctgcagttgg

SEQ ID NO: 3290 - DNA, 201 bp, Bos taurus
gcagcacttaatctcccgaagttcctggccccccgctgtggcccaactctaggagtcaccacctctccctgtcctctctctcctacaaagtccagggagccgcagggtgggggtgacgtcccaggacaaaagagggagaccactgagtgcaggaccacgtgtgggtggagcccctggagaagaggagcagttcctgaccat

SEQ ID NO: 3291 - DNA, 201 bp, Bos taurus
caaccacgagtgccctgccacgagggtgggaggccagtggtgacacgtgtgcaacattcgctgctgctccaccctgtgcttgctctctgctgcatcctgcgcatccttggcctgcttttgtcagtcgtcactcccttccttcaggacacactcctgacctctcccctggtctctgtttctgtggttggctctccttgtggc

SEQ ID NO: 3292 - DNA, 201 bp, Bos taurus
aagctatagtgccaccttctggaagacaaaaagaggtttcctgcagccggcgcggtgagctatgagaacaagaggagacactcagaaggaagaattccaccccaggagagaacgagagtggagcaagtctaccccttataaacctaggatccctggagaagcaacaccgaagaacagtacctcatcaaagataaccagtaa

SEQ ID NO: 3293 - DNA, 201 bp, Bos taurus
agcagaggaaatgggaggaaagagtagaaaggggaacgtgcatgtagattatcaggaggctgaagtatgcagagaaaggagatggtgagatatgcccagcggaggggtgggcaacaggtttctagaatgtctaaaattccatttcagttgtcttgctgtgccctgctgtcttgaatttttgataaaatgcactatatattc

SEQ ID NO: 3294 - DNA, 201 bp, Bos taurus
tctgacttcagattcagtgtagaaaaaaattatattctgattgagaaaaggaagtttaggaccaggcagtcattaccctggtatattcgacgtgtagacaatgctttctatttgagaactttgagtgtgcctaaaatgactctctttgtaaaatcattcttctcgcttttaattatccattaactttgtttttcatgagtt

SEQ ID NO: 3295 - DNA, 201 bp, Bos taurus
tctgctgatctaattgggtgaagacagagctgaaaagcgcccaaggcttcgggctgttattaaccagcggggcacattctctgtttcctgggcctcctacgctcacatgaattatctccaggatgctataaagagtaggaaagctagataaaaattatagttcaataaatcctgccacaaaagggattagcaaagcatctc

SEQ ID NO: 3296 - DNA, 201 bp, Bos taurus
atgatgtggggctgtggccatgcgtgggagatggcaacaccgcccaatgtgggaagagagcaaatgcctgccaagagcctgcctcctttagaggtggctctggaaggcctaataaagagaaatggtaatctcggcaggcagaaagtgtctacagatatggagcagataaaaatattacatgaaaatactttcaactcaatg

SEQ ID NO: 3297 - DNA, 201 bp, Bos taurus
accctcctccccacccaggggacatagcaatgtcacaacttggtggaggtgctactagcatcggtgggcagaagtcagggacatttggaaacattctaaacatcaagagacagaaatcccaatgcagatagttaccctcccttctgcctggtggccaatagcacgtctcaggtacaggctctgaatctcatcaacctccct

SEQ ID NO: 3298 - DNA, 201 bp, Bos taurus
attgctcttgatctgtgaggagctagaaaagttgaggccatgagccagccctcagactggtaacccccattgtaccccaacctggatttctcacaatagcccctattggccaaaggacaaaggtcaggcttctccttcttttgtccttccacggctgatgcaaatctcaagtgttccattattccgcggtccgaaagagag

SEQ ID NO: 3299 - DNA, 201 bp, Bos taurus
ttgagaatctgggccacatgctcatttaattacttgtgctttctcctcatccctgtttgttctggtcttggacataccacatctaaatagttgttgagcctgcttgaccttatggcctgatgagtctaacacagctaatgatgcgcagttctggctctgtggtaggtcacttactgtcctatagtcctgcccgctcagaaa

SEQ ID NO: 3300 - DNA, 201 bp, Bos taurus
aacttaaatttcatataattttcacatgtcacagcatcttatttttcttcagccatttagagatgtccaaactgtccttaagatacataggccttcattcacagagcctggttagagatgatttgtaacagaggctgccatgcttgccagaaattaggaggtggccttgaacttgacactaacatatccctgctctctttt

SEQ ID NO: 3301 - DNA, 201 bp, Bos taurus
aaaatccctttcaggataatggaagttaaaaaaaaaaaaaaaaaacatgtaaaatgcagtgtaaatatttgtgtcaaagccttgataagggcagtgacacgctccactccccgctttttttagtaatagtttcctgctcctcttagcccagtagtttcagtggctaaacaggagagaaagtgacaattactttaacttaat

SEQ ID NO: 3302 - DNA, 201 bp, Bos taurus
aagccagtgtcagtggtgttgacatgcattgacaggacatggacaatcatttgctccaggatggaacaggtgaggtacaggtgaaatctggcatccgaatggagatctgctgtggtggaggactgctccccgaggggatccaccagattctaactgtggggtgcaggggttataggtgttcttttcagggtgtgcgggagt

SEQ ID NO: 3303 - DNA, 201 bp, Bos taurus
taggagtcaattactttggtatctgcacggaaacagtaatatgggcagctctctccctccactggacttcagtctagactgccaagaaaatcccatggccctagagatgaaaggaacacagaaatggcaattaacaatgtcgctaaatatataacattccattccaagcacaataggcaactggaacatttcttgtactct

SEQ ID NO: 3304 - DNA, 201 bp, Bos taurus
aagttgatatgattagataagaggtgttttttctatcagtttgccaagctggaaagtgggggaaaaatggttcagatgtacaggaaatttctgtaaagcagtatcttagtgcaaaaaaccaggttcaactcttggccttcgtgtataacccttgttcttaatggaaattggtgttgtggtttccaagactgagtgcatagc

SEQ ID NO: 3305 - DNA, 201 bp, Bos taurus
tattataatttgtgtgttttaggaggataaggccagaaggcataagtgtagttaggtcatcacctgattgactttggcaatgcaggaaaactgtaaaaaaatagattcagcatctcacaaaaaagtgtgaggttattgaatttaagggtaagtagctatgtatacttcaataatactgaagaatatgctacagaatactga

SEQ ID NO: 3306 - DNA, 201 bp, Bos taurus
gacactccaaatttcttcaagttgatgcaccatatatttggattatttctcttaaaaaatttttttagtgccattaaagttcagtcctctgaatttccaacatctcttagattcatggacacttgaaaagtatttgcagtatctggaatgcttgtgtattgtgcaagactttctctggtttcaaacattgtctggacctgg

SEQ ID NO: 3307 - DNA, 201 bp, Bos taurus
gtcccttagtgaaggctcttggtgacccactgcaatgtttcacatgggatttctgtttctaggagacacaagacactctcaccagtgactagagtgatcactggacaacctgactttgatctaaactgggtaaagcatatccgtggctcactcacttcctagaaggtcaagaccaatcagattcaaaacagacccaaaggc

SEQ ID NO: 3308 - DNA, 201 bp, Bos taurus
ccagataaatacagaggactgagatagcaaatgagatgtagagatcacttccaattgtggagatcagaaaatgcattgtccatgggttaacagacaaacaccaagtatttccttctcccttccactccaatactttgaaattgctcccacaaattgaaaaaagtgttcttatggtttactactgtattttctatttgaggg

SEQ ID NO: 3309 - DNA, 201 bp, Bos taurus
tcccaagaatttttgttttctcaaatttttcacaagattttgttggatttggttgcagaggttagagtcttaaatatccataagacagaaataggaacttgacttgctattaatctaagtagcaataaaacagggagaaactagtttttatgctagagtactcactactttgcacacaatacaattttatacaaatgacca

SEQ ID NO: 3310 - DNA, 201 bp, Bos taurus
tgtagggtctctgactggatattaaatgctttgtcctaagaatgacataccctctgttcacattttgcccagatcaagtcacatggtcccattcccactataagaaagccaggaagtacagttctatcatgttaccaggaggcaggaagctgagaatatttggtaaacagcactgctgactaccacatgaccttatttgca

SEQ ID NO: 3311 - DNA, 201 bp, Bos taurus
ctagtaggttagtccatggggtcacatagagtcagacacgactgagcgacttcactttcactttcactttaggattctgcagctcctttcagtgtaaacttcctgccctctatatgtcatctcccttacttggcatttcaggtaatggagttacatgtccctggtagtataaatgttccacgatgattttcaggatccaaa

SEQ ID NO: 3312 - DNA, 201 bp, Bos taurus
aataaagcagtgttagggatgaatcactaagatctcattaggtgggatgtcagatgacatcaacaagatggcagaataggaagccccagaccctcttccctcaacaacaatgtatagaccaattccccttgtaagaaatccagaaaatggttaagaggctcctgaatcccaggtccccaggtgagtgtgaaaccagccaca

SEQ ID NO: 3313 - DNA, 201 bp, Bos taurus
agagaaagggaaggtaacacgacacttttctaagtagcttcatcaacagcaacatgaattaaacatcaaagagttgagaaggcaccaaataagagtgagagttatgcacccagtataggtttaattggtggacaaagggaagagaagaaaggaaagttgtcagatgaaaaacataaaagtaaagaattcatcttaccttca

SEQ ID NO: 3314 - DNA, 201 bp, Bos taurus
ccagggaaaaagaaatggggttcttgtgaaggaagctggacttgattaaaattgaaaacttcagctctgcaaaagacaattaggagaataaaaagacaagacagactggggatgatctttttaaaatgtatctgataaggtctggtatacaacacatgtgctttcctggtggctcaaacggtaaagaatctgcctgcaatg

SEQ ID NO: 3315 - DNA, 201 bp, Bos taurus
actctaagatttgtttagctcacagctcctagtttttgttctttacccagcctcgtatagtttcattttacatacgtttagatgattattctgccaaatactcaaggaaatccctaggcagagtttctgatctccttctttacatatctcccttctcttttgtgtttcaccccagatggcagccacctcagtcttccaagt

SEQ ID NO: 3316 - DNA, 201 bp, Bos taurus
tcatccccgggggagcacaacataatgattgatcccagtgaagttgcactcttaggaaagacaactccttgcataatttaaatgaataggccaaggatgacttaaagaaatagaaataaaggatggcactgtggttggttaatattaatgagaaaggggagggggcccataactaaggcagagttggaaactgagctcact

SEQ ID NO: 3317 - DNA, 201 bp, Bos taurus
cctgagaaccacactgggtacattctcatgaaaggtgtgaaaatctgattttctaaaatggatcagtaattctctatgaagggggaaggatcgataaatctttgctaagtagattgtaaaggaaaaattattctttcagtgacagtacattaggatcctccaaacaatctcaataaagtaaagacataacatctctctacc

SEQ ID NO: 3318 - DNA, 201 bp, Bos taurus
ttttatgcagtctctctagatgtatgacaaacacatcattgggtaattcttgctttgcatgccatttgtttcttcacagatttcagacaagagggtgttcgctaaattatatttatgatcctgtaaaacacaagtgcagcctctgttgaaacctaggtgatatgcacaatgtggatgatggattcattgttgctatttaga

SEQ ID NO: 3319 - DNA, 201 bp, Bos taurus
ggccatttagtgtccctgagtttcaatttcctcatctgagaagtggaaatcattaaatttaatcatcaactcaagatgtatgagatgctaatcaccagaggtgttgccagctctgtggccatgtgggtggacttataatcaatgaattgtactgagctttcacttcggccctttcactggaagcatcagtgaccagaccca

SEQ ID NO: 3320 - DNA, 201 bp, Bos taurus
cagcagtgagccacctgggaagccccctggtgcctgcacatttctgtaaaacatgagcagtgccctctgagcaatgagcagcatggtggtagtggggccttcatgtatttgctatgtcaagaacacattttatcagactacctcagagtagataatatccccttgacattacattctacgatgtgctattcttggaaccca

SEQ ID NO: 3321 - DNA, 201 bp, Bos taurus
ctagctgaacttgataaagaacaagtgattgacatgatatcaactctgctcccatgaagcatagttttacctactgcacccaaatgaaataaaagattctggttttgtttgtacacaatgggcatttattttgaaagtgtatagtctagcccttatcagttctctttatggaaacccataaccattactggacatggacta

SEQ ID NO: 3322 - DNA, 201 bp, Bos taurus
tggcaagatggcggccagcagctctaggcaagagcatgtcactatttatggataactcaggatagccctaaccagcccaaattggggcttgtttctcaccctggaagaaagaaatctctggccaagggccagggccatgagttggattgggccttagtcacaggcttctatggaagctgggatgaagaaatgtcccttaga

SEQ ID NO: 3323 - DNA, 201 bp, Bos taurus
ggagtcttaatccctggactggcagggaaatcccaggatggcactggggttaaacatttcattcaaagaattaaaatcagaggactttgcgtttgtgagcccccagtgaactatctcagagtgctttctcttttgtaagctttcattagttacctgtcagaatctttccaaatcccttttcagctgatttcagtacactga

SEQ ID NO: 3324 - DNA, 201 bp, Bos taurus
aatggtgtcatgatggaaaaataagaaccagccaacatagaggaaataagtaaattagaggtattagtaagctgattgacttctgtggggaggcaaactttttgaaagaattgatattatttcctgaaggaaatataaatatgttaggaattttgcagataatacgagcagagtaagttatatcatttgacttttagcaca

SEQ ID NO: 3325 - DNA, 201 bp, Bos taurus
atctcaaaataataaaagccatatatgacaaactcacagcaaacattatcctcaacggcaaaaaattgaaagcattgggcttcccttgtagctcggaccacgcggcagaagcgcgccagctgcaacggacctcgcagaagcatggtatagaggagctaccccatgtccaaggtaggggcagtggccgagaatgccaggctg

SEQ ID NO: 3326 - DNA, 201 bp, Bos taurus
ggcctttgtctctctgttacatagaaaagaatagccattaaaattttagtttagccttgtttctaagtctcaggtaaattttaggttatgcttcagttctcctcttgtgtatagaatgtggccaggaaccgaagcaaacattctgaccctaaaagatgaaatgtgtatcttaaaaatgacagggaaacaagttaggagtaa

SEQ ID NO: 3327 - DNA, 201 bp, Bos taurus
tgaaatcttacttaaagaaaggattttgctaagcagtccattgaatttctataaataagaatttggccaatgaagatttgtggttcagagtcatagacacgtagattcctccacctatctctcaaagggagagaaaaaaagtacagttgaaaaaattaaagcagagattataacaaagtaaaacaaaagtattttcaaggt

SEQ ID NO: 3328 - DNA, 201 bp, Bos taurus
tttttttaaagaaaaatcaatatgcttggataattttcagctttacagatcattttgctttatataagttctaatgtgtctaataacagtgaaggagaagtaatataaccactattaattttaaaaattgagtacgtcatttttctaagaccttttgatataactatcattttgctaaatattccatagtatttaataatt

SEQ ID NO: 3329 - DNA, 201 bp, Bos taurus
aaggtcttctttaggaaacaaatacctgaatacatatagaatggcttgagtgaaaagtcaggatgctacaaaagaaaggaatgaatgtgtagtattttcttccagtcggcacctctcctgagattagatttatgtcattccatttgccacttaagaggtattttagtcataagaatggacgaatattgtgtctttttcagt

SEQ ID NO: 3330 - DNA, 201 bp, Bos taurus
aaggcatcctggcaggagcaaagccacgtcacactccctggtctcaccctcctccttctctctaacttccttctttgcttgcccatgatcaacatccaatatgatacagaaggtaagaaagcttatagatacaatctataaagttcaacttgccaagacagagagatgaggaagagcctgatatgtgtacctggaggtcag

SEQ ID NO: 3331 - DNA, 201 bp, Bos taurus
taaaggtgatgggagggcactggctcttctggtctaacatagctttatcctgtttactgaaatagttccaagcagtaccatgccgggatgatacattaccatccttattgctgtcagcacgagagctcttttggtttgtcttttgagggcttagtaggaatgtacaattattttttaacagtaagtgagcaaaaactcaaa

SEQ ID NO: 3332 - DNA, 201 bp, Bos taurus
tcagatctcatggagcacatcctaagatctgtcactaataatcacccactaacacatatatcttcatgtttctcaattacgtcctctaatttttctttccactacagttcgtatactttatttggatttcatgatttaatctcatggcatttccaactggacctcatggtaacatcttgcaatagctcagtctttattgat

SEQ ID NO: 3333 - DNA, 201 bp, Bos taurus
tgtccaaacatatgaactttaaaaaccaaagatagttgtctagtatacaggatgcatcctttatatgtgcttcctactgattctcaaaaatctgccagttccttttattttatctctctttctaagccaaggttgcatagtccatttaagtgtctaatttgaaaagaagcctgggaattttttctcacccagcctgccttc

SEQ ID NO: 3334 - DNA, 201 bp, Bos taurus
agactctttctgcctaggtgtgaagtcatggatcattttctagacaagaatgagagttcctgagattccataatttttaagatgaaatgcatgcttgtctattaaatcagggggaaaaagaggcctgggattctcttcttatagtgttccttctttgaataataaaaatatgactctgtattcttacagaatacctgagaa

SEQ ID NO: 3335 - DNA, 201 bp, Bos taurus
tttttcatctcttatacacaaaggccattttgaaaaattgaatagggtactgtcaaaacagtaaaaaataatttgagcatatgttattagagatagattggttttgcccataacagatgtgaaaacaagcattgatatacaacatatcaaattttctctttcacattatggtactggccctcatttgggcccatagctggt

SEQ ID NO: 3336 - DNA, 201 bp, Bos taurus
aagattttctaacaaggccatatcagcacagcaaacacactgagttaattttccaggaacagagagaattatgtgttggagcgtgcatcatctctcactcatccccctttttgaacaaggcctgccaacattctcaaggttgctgatcagggctgtagtcacatgtacagcaactaattggcccatagtccacatcctaga

SEQ ID NO: 3337 - DNA, 201 bp, Bos taurus
acattggattgtaagaaagagatgagggcgaagaaagacatctctctcttccatcttctcttactagataagacatttctcctcctgtgggaagaaggaaccaaggaaaagaaaaaacaacaggatgtctcttcaggaatccttctcagttctacctacacaagagggaataagtgccctgtgagccctggcaacaaccgt

SEQ ID NO: 3338 - DNA, 201 bp, Bos taurus
gagtgatactcatcatagcagcaggtgttgcggtatgtgccctggcccatgagaatagacatctaattattcaaacaagcattgggctctgcaccttaccgatgcattccaaataaatatcggccttatcctagacatgcagagagctagcctttataaccctcatccattaaatttcagtagcatttgcaatcattgtga

SEQ ID NO: 3339 - DNA, 201 bp, Bos taurus
atgcctatcatttcagaagatatagggacctcctgaagcccatccataaacatcagactgcagtcacctgaacaactctctcaattaccaacagattgctgagtaaatcactccattggccagatttcctaccgtatatcctatttcctttccaagtaccaatgagcatccttaaggtaaaatgaatttggtggactggga

SEQ ID NO: 3340 - DNA, 201 bp, Bos taurus
gcccagggagtcttcatcacttgacagggagcttgtgctttcctttagttctatggtattccttagaatcctagctgctttggcttttaattcatttaatatgatattagcaattattgacacctaatcttgccttccacccaatcgagcattagaatagagaaacagaaaactggaaaattcttcctctcatggaattag

SEQ ID NO: 3341 - DNA, 201 bp, Bos taurus
taaatagagaacactggagggacacggtcacaagaaaggggcttcctgtcccagatatgatgtgcttctgccttcagcatcattcagtgtgcagctgcaagtggtatcaacctctcagtgaatcttgccaccaccccagccagtggctgtccagtaagtcatgaaggcatcccagtgcttggtttcccactggaaagcttc

SEQ ID NO: 3342 - DNA, 201 bp, Bos taurus
caaagtgataggtaagaaggggatttatttaaagagaaacacactccacagacaatgtgtgggctgtcttagaagacacaaggcctcaaaatagggggtaattagcttttatggactgggtaatttcataggttgatgaatgggaggattattctaattacttggggggaggggcagagatttccaagaattgggccacca

SEQ ID NO: 3343 - DNA, 201 bp, Bos taurus
agcgacaaaataggaaactaaattcccattcttgggcaagcataactgactagtttggtgacaaacctaaggtagacatacagtatggcctttttcttcctcttgttttatgctagagcagctattttctgcttttacgaattgcatggagccatcaattatggccagtaatcttcaacaaaatacgaagagcaaaagtat

SEQ ID NO: 3344 - DNA, 201 bp, Bos taurus
agattggaatacatgttgagggagataatccataggatctaatactacttttaggaaattaatagtttattttatctacataattttaacaattgaatagatggggagaagccaaggagacatggtatacaatcagtgaatatttttaggaagcataatttctagaaataggcctgttcaggagaaaacatttattgtttt

SEQ ID NO: 3345 - DNA, 201 bp, Bos taurus
gggatggtggagtctatagtggtggcagttgaaattgtgaagatgacatagaaaagaataattgaggaccgttattgtatgaatggtgctttgggcttctcatgttttttaaaatttgtacatatacatttttctacacattgatcaattggttttttttcttggttgtagattggatttatggatactacagacaacaga

SEQ ID NO: 3346 - DNA, 201 bp, Bos taurus
acctaattcgggcgttgggaatcagttctggaataccaccaggagctctcctgccttcccaggttcaggaggccctagtttaactctcgtcaatggggccagcacttagacaagcggcaaagctcagagcccaacgcagagggcaagcccatttctgctcagggctgagggggcaatcaagtggtacaagctgccacagga

SEQ ID NO: 3347 - DNA, 201 bp, Bos taurus
tatagcatataatacacgaaaccatgtagcaggtgcatgcaagaggagaaaagaccaggggattcagaggcttctggttggcgctaacgcgtggggcccaacatgccctgggttctacagacgagtttgggtagagaggtccagctctattccgccagctgcttcgggagtgaggaacccggctggggcggggaagagact

SEQ ID NO: 3348 - DNA, 201 bp, Bos taurus
ttttttggagtccagagataaacaagaggtagaagtgcaaaattagttttattttgaaaagcatattcacttgcaagagtttcattttttccccttcttaccatatcttaaaatggccatgaaactcactgacatttttgaagtcagttttacttaaaatgcttagagtttctttaccaaaaagaatccttttcaaggaaa

SEQ ID NO: 3349 - DNA, 201 bp, Bos taurus
cctgaaagggactcctagggcttccggctgaaaatggcttctaggccacagtatcacaggaaccttttagtcaaactcaataaaatatattctgtccaaagatctcaaaatatcaccagatttctaactaccactaatatacacagattttaaccttctgatacataaacatgggtggggtcttgagaaggctcagtaatt

SEQ ID NO: 3350 - DNA, 201 bp, Bos taurus
agtatttgcaacgaaataacatgaggaggtaacctgaaacactgatgtttgtaaagaaagtaattggacgaaaatgttttgattttttagatggaacccacaggaaaacttgtttgacattgacagaaatgttagctactgatattatgttaataaaaacttaagttgttactttagaatctggttttcaaatgtggaaga

SEQ ID NO: 3351 - DNA, 201 bp, Bos taurus
taacatcatatataatactattcattcattcattcattcattacactaacatctttgcctaccgtgagtaacaagtgcattgggctatctgcaatccaccattgattcaacagcatctgtggaacattatcattcactcatatttatttgaatattttatttttctcaaatcatgaggagggtcatgatagattcaccaga

SEQ ID NO: 3352 - DNA, 201 bp, Bos taurus
gttttcatgctcttgtgtgtttgctcagaggcttctctctcttccaggaaatctctttatggttcctgtgacttctccaactgcagccacgtgggctgccttgcttcttcatctgtatttattccacagctctactcttgttggcacctcggcggagctgtcactgcactttgttactgtcagctgtctgcctctctctga

SEQ ID NO: 3353 - DNA, 201 bp, Bos taurus
tgaggcttacatattcctagaaaaatctagaagggcctggctcttggccaacagggatggctaatatccccctctggttctcagcaatagttggggactgcttctatgccacatactggagagggcctccttgggtggcctgcccaatatataattgcagtgtttctctataccaactccttggccaaaaacgatttactc

SEQ ID NO: 3354 - DNA, 201 bp, Bos taurus
agtccctcttccagtgacctgtttgtttgcaggctgagcatagcctgggggcctctttctggtgatcttgggctcaatggccagttgacttgcatctgtaatatttccccttgttggtcttatccccagatgaatagttggattttcttggccccgttgggttgtcctgaagtcacaaagcatggcggatagcaatggcta

SEQ ID NO: 3355 - DNA, 201 bp, Bos taurus
tgtaccttgcctactcttacacattttaatttaacaatcagagctaaaaacattaactaagctccagacaagctcttcttccatttcttcattctttcctgctgctaaggaattctaggggatcatctagagggtgatctaggagatcatcgcttccttgcattagtatcaagctttacaaatccttctataatgtaacta

SEQ ID NO: 3356 - DNA, 201 bp, Bos taurus
ccatgggttaatatcagtgaacataacacacaaattttaaaggcctctggcagtacatttaaaagttacttcaaattaatatatgcacatggttaaaaaaattaaaaagtactgatgggtttatctctccaccctcacccctaacttccattgcctagaagataccaccattataacttcaacttttaggtattctggtgg

SEQ ID NO: 3357 - DNA, 201 bp, Bos taurus
gatgaggaagcatatattttgacacttttgattctaaaattccaataaacataaagtcataaccttagtattatagggtgggaaacatacaagctggaaagtattagtagaagagaagagagatttggggagagagaactaataaccacacatgcatctagggttatgtggaatcacgaggaggaaaaactttatttcaaa

SEQ ID NO: 3358 - DNA, 201 bp, Bos taurus
cttgctttttttaatgtatgatctttagccaaaaagattttttctctttcaagtagtcttgggctattagttctctccaaaaggaagtttagtaataaacgtatcagcatttttaactaccaagttgaagattttatttctgtttgggagtttagctaaaggtcagtgataaaactgatgaaaatgcaaaggacagctcag

SEQ ID NO: 3359 - DNA, 201 bp, Bos taurus
aattttaaaaattaacattgttatcaatcaggatgataattatatgttaccattatcatacaaccttcaaatagagaatttggataccttttaatcatctgtattatatcactattaaatagattaaaatggtatcattatttattatttcaaggaagaacatataaaattttatgcattgtatccaagtggcacagtggt

SEQ ID NO: 3360 - DNA, 201 bp, Bos taurus
gtggttctctgttcagtctccccccctccaatcttgtttcaattttgttttctctttgtgcctcagtgacctttattctccttggcttatgttctctctccaagcagaatcaaagttttccttaacaagaaacagtcttctccccaggagaaagtctggtgccagttgtttctgaaagacaacttcttttgccctttcgca

SEQ ID NO: 3361 - DNA, 201 bp, Bos taurus
gaaggcagattctcagccactggaccaccagggaagtccctggtggggacttttcttttttcttttttttttttctgctgagtgcttactgatctcccttattttgtttttcttggttgactgtgaagaaaaccagctcccctttacatctgtctagctgaaagccctgtcaggtaccaggtactctgtccaggcaatacg

SEQ ID NO: 3362 - DNA, 201 bp, Bos taurus
gaacaaatatagagaaactaataaatgtgagaagttatgagattatttactgctaagggtggggagagtgtgaatggcaaccctaggtgagggtataatgaaagtttctacagtgctagatacatgagcatgctaatactgtggaaagagagatgtatattccacttcaattaaacaacagacaagaattgtaaatagttt

SEQ ID NO: 3363 - DNA, 201 bp, Bos taurus
tcatagcctgctggttattacatgtaatcaatactgctaaaagcagatgacttctgatttagggaccaaaatgtttaacttttcctttgaaagtgaaccacatttctttgattatcttggccttcactgtaccataaaccaatatagaattctctgttaggaaatctgctctaaatctgggaccattgtctgaaggcattt

SEQ ID NO: 3364 - DNA, 201 bp, Bos taurus
gtccccaagaaatgaaatatgtagtgtaccataatcacttaagaaaatttatacttacaattttaattaaaaggcagaaaaatattaaaagtggtctgttcatgtcctcacaaaaatatgagtagtgatcttttcagagggtgatggaaagtgttaagagaggatttttgtgagaggataaagctttatagagaagctata

SEQ ID NO: 3365 - DNA, 201 bp, Bos taurus
atgtggcaaggaacaatataattaactttcaagataaagaaaaatcacttttgattttagcttagctttcagtgcttatgcaccaatttcattctattctatagagtgggttctttataccagagatcatggataaataagtgcaatcgttggaaatgttacttcagttatttcttcatcaggttccagcaagcaagctaa

SEQ ID NO: 3366 - DNA, 201 bp, Bos taurus
acagcttctaagctctgcagatgtcagagctgaaactgcacgtcacaactgttattttatttttattatgtattcttcttcatgttctctaagcattttggatctgtgtttggtgtctgttattactttaactgattctaagccagtatttcccaaagtatttttctaagacaaaagcgtgttgttctttactgttttcta

SEQ ID NO: 3367 - DNA, 201 bp, Bos taurus
gaaatgagtcttacgcacatgagaatcactacttttaggtattctttgtgctataaatctttgggcagaagaacaaaataattcatgaaaaagttttgtatataaaatcacagactactataactttctccagtttttgtcctctgtagctcaaggttgggaattcctggtggcttagcactaaagagtcctcctgcaata

SEQ ID NO: 3368 - DNA, 201 bp, Bos taurus
agactcaatgtctatgcaaactgtgcaagaaacagttcaggtggcaatggaatagtatttactaatgaaagatctctgacaaaggagactcctcgatgtgtcattcaaagatgactgctgaaaattgctgtgttatgtgagatgaatacttaaagcccaaattaggctatcgttttctgcttacacatgacattatttcat

SEQ ID NO: 3369 - DNA, 201 bp, Bos taurus
ggtcggggtccttggctaaggggagactctgccttgggcccaccggtgtaataaactgcactccactatctgcattgtccttctgagtgagtttgtttcccggaactcgtggctacaacaaaaattggaaaggagcagagaattactgctgtaaaatgagtctggaactttttaactttttctgtgttcaaatctgatctc

SEQ ID NO: 3370 - DNA, 201 bp, Bos taurus
acgggtacaaaattcctgacacaagctgttttaaaagtagcttaccttttgaagaggggttatagaaaatttgtgaatttttcaaggtatcagtcaaaatgtgagtaattcagtcatttgaattttctaggacttagtctccactctcattaatgaactttgtgaattctttaataagccaatttggcaactttgcttgag

SEQ ID NO: 3371 - DNA, 201 bp, Bos taurus
attatttatgtgctttccttattgtgtttcttccccttcaatatgtccccagggcatccatctttctgggggtttcattaggtttccctgagaatagttagagtaagacatgaactaacattttgcttttggcattcaaaataggattttgcagtgaaacaatgaccctcctagcaaggacattttcttgagagaagattt

SEQ ID NO: 3372 - DNA, 201 bp, Bos taurus
caacaccacagttaaaagcatcatgtgccactgaaagacaacatgattaattatatctatttacctgtttactcctgttctaggtataagacaagaacattggtggggaaatggcccattatccatgtgcatgtttaagtataatttggttaatcgaatggggagtggggaatagagtaagatccgaggaaagtcttctct

SEQ ID NO: 3373 - DNA, 201 bp, Bos taurus
gtaaactccgcgagttggtgatagatagggaggcctggtgtgctgcgtccatggggtcacaaacagtcggacaggactgagcgactaaactgaactgaacggaagagaccaggaaggcctccacggaaatattatgggttaaatcggaaacaggctctgtgggcaaagaatccacatgtaatgcaggaaacacaggtgatg

SEQ ID NO: 3374 - DNA, 201 bp, Bos taurus
aaaaacctaaggtttatagacatgaaacaactggcctagagtcgcaaaattaataagtgacaaattaccagattcctcaattcaagtccaaagttctcaccacaaatggccttagaatacggcaaaatggctatgctttcagaagtgtatttaaatactgttacaagacctggtaaaatgagagaatcataccaagaacag

SEQ ID NO: 3375 - DNA, 201 bp, Bos taurus
gactgaaaagtttatatggtggccttaatggtgttcagacatgtattcagtccagatggtctcagtaacacattactctctcaaggctgcctccttagaatagttgctagtgtgggaacagtgggcagatgtccattccaaagacgggagggagtgaggagccttcagttgtctgagtcaagctacaggtcacctggcatt

SEQ ID NO: 3376 - DNA, 201 bp, Bos taurus
gttcattctacttatctcaaagaaaaaacttgtattgtttttggtcatctttctccttttttgggctttgtagatttcactgaagtttggcttctttcctatgacttctaccttgttatttctcaaggatttgaaagtttacagttgcccttcactctgttgggagtcaccatgcctgacttctgggtctgagtcagctgc

SEQ ID NO: 3377 - DNA, 201 bp, Bos taurus
tagttagtgaaggctcttttactgttttaggatacttagcagtgtgatacccaccatagcgaaggagactctagctccttttgtttcacgtataaaagacaaggggacttttgcaagtcttccctcagggtggcagctgaccctgtagtttgttcagctgccggtttactcctgatggggtctgattgaaggtggggagag

SEQ ID NO: 3378 - DNA, 201 bp, Bos taurus
aaagcccttgatgtgctgtgcttagttgctcagtcgcgtccgactctttgagacccatgaactgtagtccgcctggcttctctgtccacgggccttctccaggcaagaatccaggagtgggtcgccttgcccacctccaggggatcttcccagcccagggactaacccaggcctcccacattgcaggcagattccttatcg

SEQ ID NO: 3379 - DNA, 201 bp, Bos taurus
tcaccgagttgagctaaatctaggattggaacctcactgaggacaagccaccagagccaaggcaggcaggatggactggacacaggcctgtgtgttgggagcatttaagtagaatcaggggtcagccagtctcttttctataaagaaaagtctgggtctttttgctactgcttccacatcctcctgcacattagaacaact

SEQ ID NO: 3380 - DNA, 201 bp, Bos taurus
actgaaaatctcaggccatggccaggcccctccctggtagtgacactgaagtgaaccaaaaaagacttgatgtctgtgtccaggtgaataaattaattagtgttaagtttggccacgtttagcagagatccaaaataacagtggcttcaccaagacagagccgacgtctctcacacactcagcacaagtccagggataggt

SEQ ID NO: 3381 - DNA, 201 bp, Bos taurus
tctttgcctgattgtcctccacaagcactgtgggcttgacttcagaggaggatattcataaaaaatgaaaagtaacctcttcaatattaagaataaattagtgacacagtggaaaagtaaaacctaatttctaatctagttcctagatttcctactgagaaataatcaaaacattgttgaaaacatcctctatcactgagt

SEQ ID NO: 3382 - DNA, 201 bp, Bos taurus
ttggcactagacacacgagacacatggacactccttttgggggcgtccattctagtggagaaacataagagcaagagagggccaagttccagaatgaaacggcatgatgggcgaggaggcaggggcgtgtggcgctttgggatggattgtcaggaaaggcctcaggacctaaaggccgagtgagctaactgacaaggggga

SEQ ID NO: 3383 - DNA, 201 bp, Bos taurus
tttagtaacaggttcaccatgccctcaatgtttaccacggagggaaaaacacaacaaacaaaaatcaccaatcagaatttttaacaagagaagggccagcagcaatagactctatcacaaagagaaaacaatgatgaagctatttcccaaacagcctgaaagatttttctctcccagaaatagcagcctaaacaatttttg

SEQ ID NO: 3384 - DNA, 201 bp, Bos taurus
aggccaaacttcttgatatgagctcccaaagtagagattctgatttaatatgttagctcaagttgctagaaatggctcttagagtttgtttggttacttaactgaaatacagaacttaagatggcccaggactgaagttcctgaatggactgactgaattttcccttgtgaactatagagcagggcttctccaccttggcg

SEQ ID NO: 3385 - DNA, 201 bp, Bos taurus
gagattatcaataatgccatcgtgcactaccgagatgacttggaccttcagaacctcatagattttggccagaaggaggtacgggttgaggaggagggtcgtcatctagtggtctgggaagctatgggtaaatgttaatgctatcccaagagacaactcaccctcaaggtctgtgggctttttcattacctgataggtaat

SEQ ID NO: 3386 - DNA, 201 bp, Bos taurus
aaaacatgaaaatgtaaagcgctgtgacaatttggagacttacagagttaggtattatttcatcaagtcccgaatctaatattatttccccagtgaggccgtactagatctcactggtgttgaactgtgttcctgcagctctttgattgttattgtcttctctcttgctactgcactttagaccttccaaggtggaggcca

SEQ ID NO: 3387 - DNA, 201 bp, Bos taurus
gaccttgagaaaccagatggattagaaatactgaatgtcagaactggaaggaaccagttctcaccttccacagtgccctcttacctacctccctcttattgtgtaataaggaaactgaagaagagagtactttaggtgacttgccaaaacctaataaaactgttagtgacaagccaagaatagagggcagggtcacattgc

SEQ ID NO: 3388 - DNA, 201 bp, Bos taurus
catccctccccttagactgaagcgggatttgggacgtattcaggaaccaggatttggggggcagaggtctgtgatactggggaaactgacactgcagtggagcaggaagcggagactagagctccccgaaaaaatctctatttgggagggggtgggggctgagggacaccaagtgagaagtagagctaacctgctaaagct

SEQ ID NO: 3389 - DNA, 201 bp, Bos taurus
attgccagtgactggctgcatgtgtatgtgggtggacattgctaagggacaagcttgccaaaggtgagagagagacaaacctccagacagactcacaagtgggaactctggaggtttccctagcacagcccaggtttctcaggttctggctcactggtgtgtactgtatgtgtcccaaacacctgggtccttgtaggcctc

SEQ ID NO: 3390 - DNA, 201 bp, Bos taurus
acttatacttttagaagttgtacggtcattgtgttatcctagccttgccagtaagagctcttagattaaatcatactgcattcaacatccagttagttgcgtcactatgatatctgataatagtggtacacatgattccgttgaagaagcagcagaagagctgaactatggacacattagagatgtgaactttaaactgaa

SEQ ID NO: 3391 - DNA, 201 bp, Bos taurus
ggaccatgccttcctctctgggcccagtgcctcctaccatctccatggcacagacctgccctccatccacatagctattcatacctgtcctggaccccagctgagctgtatgtgctgaaacaggccccgcctacactggccgccaggcctccatcagtgagcccagccctttgcattagggtccaacagggttatcagttg

SEQ ID NO: 3392 - DNA, 201 bp, Bos taurus
tctgtacgctggctgttccccctccggagtggtggcggtgaggagagaaggtaaatgggccaagtctgaatgattcggtgcagggccagggaaaagtattgtttatattttcaaaggattgttttaaaaaaaagaaaagaaaagaaaagaagagtatgtgacagagaccgtatgtgaccaaatctgggccttaacagaaaa

SEQ ID NO: 3393 - DNA, 201 bp, Bos taurus
ttccccacaacagcagagtggtcactgaacctgtttaaaacactgcaatgatcttttccattacattaaaaatataactcaaccctttaatctggcctacgaagtcctaatagggcctcgccctgcctacaatttggaccctttctcgtatctcgctctctacccagccttccagcctcatctctcttccctgagcatgcc

SEQ ID NO: 3394 - DNA, 201 bp, Bos taurus
aggcacttggtaaatgtttatccatttgtacatttgttagaagtatacataactagggtatgcattgtcctggccaggaagcacagagtctgactgtgtggtagactgaagctatcttggtttcctcattagagaaagcagattccagagaagtggctcagagaacacatgctctggtccaattacacacaggcttggagg

SEQ ID NO: 3395 - DNA, 201 bp, Bos taurus
gaaatcaggtaaggtgaagagataaattgcaggcacccccccctgccccgcccacccacaaccccagcaattccttctgttgcaaaagaggctgaattcagcacatacaggaagtgttactatgcaattggtgtaagtcaaggagagcatgatccttgaccacagtccttcaaggttcatgaagtaaacatggacccagaa

SEQ ID NO: 3396 - DNA, 201 bp, Bos taurus
caattctgacctggagccacctcctcctccccagcccagttcctcaggagctttgtttatctactgcagagctgtctgccaaagacagccgagggcttctgctatgactctggccctttgcactttccccctgcagagcaggaccctgggggacaatcctggttacccaagtgggcaactctggaatatgtgggggcttga

SEQ ID NO: 3397 - DNA, 201 bp, Bos taurus
tgctacactaatagcaggcagctctctcagtgcaatttatggcttcacagctctgaaaattacagtcatttgcagtcttctccattagtgccctgaccccatccagttatgtctgcatgtttttggttcctgatgtttaaagcttcttgttgctttactacctgagctccccaaactgaaaatgtactttttccatttccg

SEQ ID NO: 3398 - DNA, 201 bp, Bos taurus
tgtctacttagtaaataaatactatggctttctgggttcccacatataaaaattgtggcatgccctcagagaccagccagatatatgcaaattttaccctgtatagtttctgtctttcaggcattcatttcccttcagtttttacctgcttttcaccactcaccagtactttcaaatagtgtggggttttttgtttcaggg

SEQ ID NO: 3399 - DNA, 201 bp, Bos taurus
gaggtcttgttggaatgcttattctctccacctctcctataacatctccacagctgctcacaggaaattgggtgttatgatgctgggaagggaataaacaaagagaaaattgagaagatattgcaatggaaggaatgactcaattgatataagcctaagtgagtgtgcacttctttgggctaagctcgaggtggtacattg

SEQ ID NO: 3400 - DNA, 201 bp, Bos taurus
ctagtgactatcatgtcgacttccaagaatttaataaaatactgttgtctcctatgccagagaaacccaagaagggacaccctcgggagactgagtcttactgcggtgaattcagaggcatgtggtaagtgatgagaacattattagtgcacttgtggccttgcaagatgcttgcttgctgtagggatcttggcttgttac

SEQ ID NO: 3401 - DNA, 201 bp, Bos taurus
accagtgacagccatctgatggcctggcacccctaccttgagttagttacaagcagcactagcagctttatgtagctaaattgacatcaatctggaaaattctaggccagaagggatcataacaattctaggagataacatttctaactattatgagccttgtgtgcgttagtcgctcagtcgtgtctgactctttgtgac

SEQ ID NO: 3402 - DNA, 201 bp, Bos taurus
catcatttattgagaactccatgttctaggccaggtgctaagaacactgaaaaactgtcctgacatagacaggaggaaactgaggctcaggtaatttaaggaattggcctagagtcatgcagcttttaactacgaagctctacttctcattttgtatataaagtctactccccaaactggaatgtgcttaccctgaataca

SEQ ID NO: 3403 - DNA, 201 bp, Bos taurus
aggtacttttcagccttttacagagaactcagactgtggccagatccgggcctctcctagaccacacctggccatagccaggtgacaagccgggccttggtagtgtgggggcgtgtgtttttgtcaggatgggaccttgtaatcacagatgttctgggacctctcacaggggtcccaaaacacttgtttaaatgatctttc

SEQ ID NO: 3404 - DNA, 201 bp, Bos taurus
tctctgatgactgacaggtcctaactcaattaggcaaacgcagcttatgactcactcctaatgttccccaggtagggccactcagagtcctgtcactgtcatttggcattccaaaaggccttaagctctcaggaacaaaagcaatagctcccacagagaggaagagaacttttattagtcaagggtaagagtgggatgcaa

SEQ ID NO: 3405 - DNA, 201 bp, Bos taurus
tgggaagagctgggagagcgagaagtatcctaagtgggcgtaaggccgagatgacaaccacagggaccgctcactgtgccagaggccagcatctccaatgggtcctgtgggtctgcgatgcctggtgtgagactcgccactgtgagaacagaaacacactgtgtggccactgtaggtacctcgtgagctcagagaaaacga

SEQ ID NO: 3406 - DNA, 201 bp, Bos taurus
ctaagtgcccatgacctggaagatacaggaagacccagaggtggggaccacgatgatgagggcacgtactgtcaccagagcagggccagcaggcttaggacgggagtcgaaggagagggcgggagggcaaagtggggttagcaagagccaggagaaagccaagggctctgtgggcggaaggctggaggccagcccacggga

SEQ ID NO: 3407 - DNA, 201 bp, Bos taurus
tctggagggaactgtcaacagtccctgttttggaacctgccgagcaccaggaaagcgtgcctgccacagccctgccttactgtacccactcacgggcccataagccaatcaacagctctctggtttgcaagaggcgagatgaggaagcctgtaattataaatttactgagcagaaaggtgccaggcctcattccccatctt

SEQ ID NO: 3408 - DNA, 201 bp, Bos taurus
aagctggtcttgttgcttctctcatttggaaatccccaaggcctcaccaatgcctgctggatgagaccctgatctggatgcttcttgtcctggcccggcctccaacagtgtttatatctggtccacttcccaacctgtgctgtgggcgctcagctctccatgccttgtctatgttgcttgttccctcagggcacctcttcc

SEQ ID NO: 3409 - DNA, 201 bp, Bos taurus
cctgatcctgaccctccctgcactgccaggcagcggggaggcccaaggtctcaagagaagacacaggaggaagagaccggaaacagaagacggccatttcccctccactcggtgccgtaaggacgtccgcccatcaccagcttcgaggaatctcctcagccctctgcagcttctggagaacaagacagcgcctgagggtcg

SEQ ID NO: 3410 - DNA, 201 bp, Bos taurus
cctgagcaccctcacctgctgggtacataattgaagtgtggtctcccagtctgcagctgtcacggaggaattgacaaagagacatgaacagggcccaggcgcaaagcatgctctcctcggcagccttgagcacaggagaatgcaattttccacaccgtgcacaaggggaaggccacagaaagttctgaggccctggaagtg

SEQ ID NO: 3411 - DNA, 201 bp, Bos taurus
gctacacgggcttttctccagttgctgcgagtgggggccactttccagctgcagcgtgcaggcttctccttgaagtggcttctcttgatgcagagcttgggctctagactgtgaaggcctcgggagttgtgatgcacatgggccctgttgctccctggcatgtgggatcttcccagaccagggatcaaacctgtgtctcct

SEQ ID NO: 3412 - DNA, 201 bp, Bos taurus
ttccatgcactttagaaacttcactaattagagtctgagggttttttttttttctttagtttttttttttaattagaatagaaatccttacattcattgatagccttgcaataatactcaagctatattagttatgctattttatctcacgcctcagttttttcatctgagcaacttcaacatatgcaccaaacactcatt

SEQ ID NO: 3413 - DNA, 201 bp, Bos taurus
aagattctttaccatctgggccacctgggaagccctacaatccacatataaggataacctattcagaatatagataaattcagtgtatctattcacattcagaaaacaatgtattggccagtgcattgttttcagtttcagaaaagttagtaaaatagcacataaaagtaaaatacaagtaggctacaaaagtcactatct

SEQ ID NO: 3414 - DNA, 201 bp, Bos taurus
taggactcatggaactcaacatagagttgtaccgtggctacgatttagaacagtgatatagtcagggtacacaactggctgataaggggaagaggcccatatagttcagttcagttcagttcagtttagtcactcggtcatgtctgactctttgcaatcccatggactgcagcacacaaggcctccctgtccatcaccaac

SEQ ID NO: 3415 - DNA, 201 bp, Bos taurus
gatattaataatgatgaatcattaatttgtaatgaatcattatggagttacattaagacctgcggagtcttctccaacaagtggaaatgtatgaatagatttttcaaaaagcatcacagatgggcatataggaaattatattaagtatatggttgtatgggacctttgtcttattaaatattattttgaaataactaaatc

SEQ ID NO: 3416 - DNA, 201 bp, Bos taurus
atgaaatgactatggcttcctttttgcttgtttcaaacctgactgctctccaatcattacacgtctctcatgattcccaagagatttcagctgctaatgtattgtgttggccaaaaagttcattagaatttttccataaggtgctatagaaaatcccaaaggaactttttggccagcccagtgattgcacacttcaattca

SEQ ID NO: 3417 - DNA, 201 bp, Bos taurus
ggttcccagcgggagagcaaggcctagccataatcaccttaaggtgaaccatgtgactccctgagaagggtccagagccccagcagggtcactgccacaggctcggctggctcgcaattctcggcctcccttctgggccgggtcactctgagttaaagtactgtggtttacgtatgtctatataaagactttcattacttt

SEQ ID NO: 3418 - DNA, 201 bp, Bos taurus
gaataagatgggtcatcaatggtgtgaggccatatccaggaaccaggaaatctgaagatcctgttgaatagaagactagtgacaaggtgctgacaacagagaggcctcggtaaatgaggcagtgtctctgccctcagccaaaagtgtggagcgaatcccagcatgtcaggcctgggtctgtgaggaggctgaggtaatcga

SEQ ID NO: 3419 - DNA, 201 bp, Bos taurus
tagatttgcccccttcggattcaaatagcctaaaaacataataaggacaatttttatttttgtctctgagcttttccttttgagatacatcaggaaatgaaagggctcagagagagatagaggaaaaaacactacctgagtagcttaagtatctatgcagcctcaatgccatttaaatcctggctaaatttaatgttttcc

SEQ ID NO: 3420 - DNA, 201 bp, Bos taurus
gagggtgtatagccaagaggttgaggtttgttctttggggttcaccacctggctttgaatcccaacctgaccctcccttcactaactctattttttcagttaaatggaaataaaaattatacttttgtttaaggcatgtcattaaatttaaatgagatgataacacatgtaaaatgcacataataatcttggccattatta

SEQ ID NO: 3421 - DNA, 201 bp, Bos taurus
agccactttcggcttttgtgtttctaacctgtctcttcatgaaaggcatgtgagtttgacagcctggggattctggtcaggccgacgctgagctcaggatgttagaagattacctaaggacaacagtagagaggaggctcccaaagccacccttctaattgggggccataagtgatttattcttagcccttggtttctatt

SEQ ID NO: 3422 - DNA, 201 bp, Bos taurus
tgtaacttcccaccagggtgccctggaggtcagttaaagatatagcacctagcggtgcctttgcagaggcgctggttccggtctcctggggcaggcctgcgtgaggagctttaaagaacatgctgatgactccaaagcccaccctccttctgctctcacagggacaatgaagtggccataccaagagggcaggacagcatc

SEQ ID NO: 3423 - DNA, 201 bp, Bos taurus
atgcaatatgattgcttatataatatttttgatatatacgtatgcagaaaatagctacagttattggctttatatagtagagatgatgaattttatgggtgatctctgactctttatacttttaatgtttttcaaattccttaccatgaacacatattaattttattttataaatatgatgatatctttaaatatagcaca

SEQ ID NO: 3424 - DNA, 201 bp, Bos taurus
gagaattccgtggacagaggagcctggtgggctacagtccatcgggacaccactgagcaacacacacacacagacactacatcttgtttttcttttccaatgcttttggtacaatacaatccaaattacctttctaagacatgaaaagactctttcacactgaccacaaaagaaaatccacactctttagcatggtggtca

SEQ ID NO: 3425 - DNA, 201 bp, Bos taurus
gcatcggtgcgatagcccttcctgccagagacaagcagagctgaggaggagagtcaggaggcccaggggtcacaccgggcccgggacagcctgtctgaacgtggtgcctttccagggcacctagtctagtggggacttcagccttccttctggccagctgctcccatgccatccactggtggatttaatgtctggaggcag

SEQ ID NO: 3426 - DNA, 201 bp, Bos taurus
agtacacctctgctgcagctgtctggcctcgaagtcatttaaaagcttcgaaaaaataaaagatgccaagagtctgtggcgccctccatcattcttctcactgatggcctgctttgggcagtaccatcttcactttctacctgagccggctgtgcccccttcccttaaaaagtctagtcgtccccgccccccttcccttaa

SEQ ID NO: 3427 - DNA, 201 bp, Bos taurus
ttggctgacctgccccctgaaatagctatgattatccccataatggagtcaagccactgaggcccaaagggctactgaggggcagggttggacttggccccagttttccttatgcctcacttgctgctctgtggacagcgttgcggtagtgtggtcatacctgatgacaatggcagtgctgctatgatgaagccagttacc

SEQ ID NO: 3428 - DNA, 201 bp, Bos taurus
tattgtaaataatgctgtaacaaaattaagaatttgaaaatacttaactgaaattctaaaatgatggtcataagaggttataagtggaagttagttttatacctgctatcattactattgtttttcacaactattatagtaataaggaaaaggtgaacagagtagtttgaaactgagctttaagtgaggaaatgaagaaat

SEQ ID NO: 3429 - DNA, 201 bp, Bos taurus
ccaatattctggcctagagaattccatggactgtatagtccacggggtcacaaagagttggacacgactgagtgactttcacttcatttatataaggcagagtctctgatggattgcaaaaatggccagaaattgctgcaccacttatatttaaagctttcaacatcacttcataccagctcccattaagaagaatctttg

SEQ ID NO: 3430 - DNA, 201 bp, Bos taurus
ctccaatattcttgcctggagaatcccatggactgagaagcctggcgggctaccgtccgtagggtggaaaaagttggacacgactgaagtgactgagcatgcaaacacgcacgcaggcatcgtgttggcaacttaccttaaatgtttctggaaaaatcatactgtattttcaacttctctttaagtttaagatagtttcaa

SEQ ID NO: 3431 - DNA, 201 bp, Bos taurus
gcttatattcggttgaagaagatacacaaactggccaaaatttaaataaaaatcagtcagatatatttttgaggatgcacagaaccctttgggagcacagcagagtggcctttcaactgtcctcctggaatactccaggggtgggctgtgttgttggtgatgagaggttatgctggggagaaaaagctatagattgaattg

SEQ ID NO: 3432 - DNA, 201 bp, Bos taurus
gaaggaggcttacagtaaggctgatggagcctaagtttcaggacctttcacttgatggggtctctcccacgtctctggggagagccccagcaatgtgttatggccatttgtgtttgcaaggttggtaaaagtaagatatttaagtgcagttgggatgactgtctcttcatcctgctttgtcctcttttggtgtcaggcagt

SEQ ID NO: 3433 - DNA, 201 bp, Bos taurus
acccccttttctctgccagaggaactgattatcttttcctttctgctaaaacaatgtgactatatgacataatcgactcttcacccgtctacagcaaattgtggatcatttaatggcaaatttagaaccaggtcctggacctcagatatgagtgtcaaaatcttcaagttccaactaagtatttgaaataaatgaaaccat

SEQ ID NO: 3434 - DNA, 201 bp, Bos taurus
aaatctaaatttatccctctgttttggactcaaatatcattaatttatatttcacatttataagtactcatgattgtcagtaaatggccagaaaatataacagactacatgtgttgcagtagctggaaattcaaaggtgaaacagattatgactcaaaaaaatgaaaggctatgaacatcctcattaaaagagttccttca

SEQ ID NO: 3435 - DNA, 201 bp, Bos taurus
cctggcctgttgtaggttcttttgcatagttgttgaattaattgagtaatgatttaccctttaaaaaaatagggtagtggatgatgtaatcaatgaggtataggccttatttaaggaaacattgctatattattttcactatttcatctgcaataggtgcctctaattaggaggaatgttgttctgattttcctcttagac

SEQ ID NO: 3436 - DNA, 201 bp, Bos taurus
tagcatggtcctagcagtacgacctcaaggcctctcaagtatgtacatttgcccctgctctgcacagagaccacaactgtgccaatgggctgaggtagggcaagtgtataaactgtacccaggtaagggtgaatcagttacgggtgccaatgactatttccaggagaccaacctcaaaatttgcatccctccagtcataac

SEQ ID NO: 3437 - DNA, 201 bp, Bos taurus
ctatgaagagtggctcagagcagtccagctgggttggtgaggaaagagctatgaaccagtgtggcaagtggggagggagaaagagagagagagaaggcccagaagtaacagagagagagatctggagaaggaggagactaagtaagaaaggaggaagggaagaaaaaaggatctagaaatagaagcaaagagcacactgtt

SEQ ID NO: 3438 - DNA, 201 bp, Bos taurus
ttttaggaaacccaattcatttttctggatgtaatgtttagggaaaacaaaatccttacataagaaataaacctgcctcccctccatgtctgttcctgatctcgtctgtcctacagaatttggacctcatagtcctacttaagccatcttctcccaacattcctattcatctggctcccttccagattaaacacccctctt

SEQ ID NO: 3439 - DNA, 201 bp, Bos taurus
acagcatacatagagagtgcccaaactgtcttatacagtttgatgaacatttttatacacatatgtgaatctccatccagattaagttttaggcaatttacagcaaccagaaggtttcccagtgcttctgtccaatctccgatctatttatactcctctcacctcccactaactgatttctattaccatagattcaatgtg

SEQ ID NO: 3440 - DNA, 201 bp, Bos taurus
gcagcctacagaagctcccactgggcagcaaggaatgtacttgctttacataagcctcccaaagcagtcatcacacatatgtaggcctttaacgaagacagtccgatgacacaatattttttccctcactttcatcaaggcaaataaggaataatatcaattttggcccctgactccaaagtatattccattttcttgagc

SEQ ID NO: 3441 - DNA, 201 bp, Bos taurus
tcagactcctgagatgcgaacacctcctccccagaaaaaaagacatttgactttggggagagggtgaaaaagtgtgcccactatgggcctggcagatacatgggaagaacctgagccccaaagaggagagggaacttgcccatggtcaccagacacagtggccctggattccaaatctgcctggctcaaaggcctatcttt

SEQ ID NO: 3442 - DNA, 201 bp, Bos taurus
ttgtccattttaaaatcaggtatttgacttcagtgtgttttttgttgttgttttggttttctgtggggtttttctttgtttctttgttttgctattgaattgtaagagttccttacatattttgtacattaatttttatcagatatatgatatgcagatatttttgccctttctataggttgccttttcatttggttaatt

SEQ ID NO: 3443 - DNA, 201 bp, Bos taurus
tccatcctccccgtcaaaagacgatttaggcaatccaaacaaactttaacacttgaagcaggcactctccacttgcaggggcccaaaatactgcaaagggaagctgaagacaggaggataatgaataaggaggtgagtagagagccacatttggcttggtgtctggccaactggctgtactgtgtttctggtcaagcagac

SEQ ID NO: 3444 - DNA, 201 bp, Bos taurus
gtgtggctggaacatgggaggagtggggagaggtcatatgaggtgtgtcaggtggaggcaagggccaagccacgtgagagctgatgggccaataagaaagttggattttattctaaacacaccaggaagccctttgggaaatttgaagcaggggagtgacattacttgattcattttttttctttttttttggccttgcca

SEQ ID NO: 3445 - DNA, 201 bp, Bos taurus
cccacaggtgatcgccaggcggggtcgcccccttcctgccgcccggagtcttccacagggttccccgccaccggcagcacgcccacctcttcctgggctcgatgaacacggagggcacgctggccgtggggtccaggatcttgtcgatctgcatctgcgccctgcggtacacgcggtgccgctcccgcgtgtcgcccgatg

SEQ ID NO: 3446 - DNA, 201 bp, Bos taurus
taagaatatggatctccaggcctctctccagactctccaagggggcaggaatgcacagtttaacacctgccccagtgcctcagcatcacctctaagactcccatccctgtccttctagccagcaggccagttactgaagcttctcagaagaaaagtgttaatcaacttctttccacctgctggccatggatgcctgagtac

SEQ ID NO: 3447 - DNA, 201 bp, Bos taurus
tcgctgagtggtggggggctgggcatggcctggcgtctcccttcattagcctcagtgaagcctgtcattccaggccttatttcacccacctggggcctggcagtttctgggtttggtgggcggtgtgtgggcacctcaagctgatttagaaagcccatggcacccagcatggtggcctaaagggcacagtcagagcccagt

SEQ ID NO: 3448 - DNA, 201 bp, Bos taurus
ccgtagcccgccaggctcctctggccatgggattctccaggcaagaatactggaatgggttgccatgtccttctccaggggatcttcccaaaccaaggatcgaacccaggtaggccacatgctactctttttaatttaaaaagccctctacaaagcaggggagtctggtactggccagcctggccgccctctgggtcagcg

SEQ ID NO: 3449 - DNA, 201 bp, Bos taurus
gaaaagttttcattggttaacacttagcttccactggcccgtagtgagttctcagaaatgcttctcagggctggactgaaccagcacgaggctggagagcaagtatgctgtactgcgtggggccccctgatgcccagctcttggcaagtgaatggtaccaaagtcaaggctcgtccttgggttatttcccttcttatggca

SEQ ID NO: 3450 - DNA, 201 bp, Bos taurus
caaggcagggttgtcacaaactttcaatttgtaaaaaccacactatctgtgaagtacaatcaatcatggtatgttggtatttacagtcttagttgaaaatgacacatttgtgatttaacattatgatatactgttctgcatttttgtaaaaagatttttattaattcttataatttgtctatagctcacttattcattcat

SEQ ID NO: 3451 - DNA, 201 bp, Bos taurus
ccctagcctgcccaatactcagtgcgtgttatctccaaggcctgaaatgaaccagtgctcaggctgggcctatgcgtccctgtcctgtgatgctggcctcggctgaagctgggacgctcttagtccttaaactcgaagacttacaatcccgagggatgacacacagaaacccttacagaaacacacggatcaatcagaaca

SEQ ID NO: 3452 - DNA, 201 bp, Bos taurus
actgctagtgaagggctgaggaaaacttactacccaccgggctgtttatagcttccggaaaaatgttcaagataaaagaatttcagggttccttaggttcgtttgtttagctattttgcatcttcttcttttgaataataacacccatggctaatgaactatgtcctcagaccctggattgggtacccaaatcccatcata

SEQ ID NO: 3453 - DNA, 201 bp, Bos taurus
gctactgtgtcattctgacaaaaacaaatccaggtgccacaaagaccctgaaatgtcaaaccactgaagagacagaaattgttgcaaattaaaactaatccataaaatagtgtctgggaactctgtgcctgatgccaatctgcagcaaagtcaacaacgagtaaaaaataaaactttaacacccaagtaaaaagcaataat

SEQ ID NO: 3454 - DNA, 201 bp, Bos taurus
gacagtgcgggcagagatttggtctggcctctgtcctcgggacaggacagggactgtgggaaggttgcttccatcacagaggacagcgggacaggactctaggccatactcaacaacaggacctaatttggacaacagaagtaataccttagcatgtcagtgcactaattttttcctccaagtgtactgcacatgtgcatt

SEQ ID NO: 3455 - DNA, 201 bp, Bos taurus
ctgggatgtccagttcactcacacagcactcctagctaacaatccggtttttcatgtgtgtgtggatagagagggagcgagggccccagtaccctcagggcgctcttcgggggtaagccaatggcttctatggtccagacaggccaagatccctaatgtgagctgcagaggttggaaaccagctgatcacttttcttgaat

SEQ ID NO: 3456 - DNA, 201 bp, Bos taurus
ggtaacagttactatactggatggagtagaaaacaatttccgtcactgcaaaaaggtctcactcaacacaaacgtatgaggatataggcctccaaatgtgattttagaagatcagttagtgccatgaagacgttaaaaattatttagaaagaaaaacagaagctccaatactttggccacctgatgtgaagagccgactca

SEQ ID NO: 3457 - DNA, 201 bp, Bos taurus
ccttcagggttgtggctttcaaaccgccagtcacatttcaagtgggcagtcagagaggaggccagggagccccttatggtgtcccctgatggcaggccacaactccttggtctgctcctttgtcgttgaattctgcacactgacttgttttagaaaattttccctgccttagctcatcaggtcagactctgatgggcaatg

SEQ ID NO: 3458 - DNA, 201 bp, Bos taurus
agggtgaggctcatagccagctcagtgcccaccagctctgacctgggcagcctctccaagtccctggaggctgccaggagggccagatgaggccgtgacacggtgatcagtgcgctctgacctccctttagccacctaattcagttgtataacatttattagtatctgatttaatcccaacattccttgaggctggcacca

SEQ ID NO: 3459 - DNA, 201 bp, Bos taurus
tctatgaatacttggtggcgggagtacttatcctaaaaagaaaataacaagtacaaaggccctgagcaaagagcatacttggcctgctgaagaagcagcaaagagactggtggggtaaaagcagaacgagatttgtttctctttcaatgtttaccattgtggccacagtttactctttgcaagattttaatataacctttc

SEQ ID NO: 3460 - DNA, 201 bp, Bos taurus
cagtgcagaaagcgcttccagtaactgaggctgacctgtgaggttgctgtgctactcatccactgatttctccaagctcctgtgtggaggcctgcgcaggtggggtggagggttagatatccggcacttcaggtctctcacagggtcccagagggaccagagaggtggccagagtggttcttcagacatggactgtcaggt

SEQ ID NO: 3461 - DNA, 201 bp, Bos taurus
tttttcctgtctctgtgcctttgatggggcgctttgccctgcttggtgtaccctttcttcccctgtctataaaaatagcgtttttcttttaaggccagcacgagccccactttctttttgctaacagacatcagcttacaacagattctctttttaccattggtatttaacctcgtgtggcctcatgctgccaattgatgt

SEQ ID NO: 3462 - DNA, 201 bp, Bos taurus
gtgagacagaaaaagggctccactgtgagcctgttggtctgtcggcccctctccctgctgggctgagcgggtcaagactggaaagatgtggaggaacggggacttatgcaggaggagcagctggcctgcacttccgcgtgaagtccggacttctgtctccttccccttttgggtgtctgggccctctctcctgcatagcag

SEQ ID NO: 3463 - DNA, 201 bp, Bos taurus
tgtgtgagagagagacagagaggacggagcgagagtgcgtgtcagagagagggaggctgtacctctcttgaccctgaagccctggtcctcacatcatctacggagccaacaaccataatcttcaaaccgtagctccaatgaaaataacattctttatgcccctacagtcttctctgattcttcctacagatgctcaacccc

SEQ ID NO: 3464 - DNA, 201 bp, Bos taurus
ccagaattagagaagctgcctgtgcaatagaggttctgagagaaaatatctacatacctctgatttcctcatgtgccagaggccttacttcatattcaataaacagtcatgataggaactgacaattggagctcagaggctaataggcagtaactgggtcagtggtggcctgggcagctggcagcacagttctcatggaga

SEQ ID NO: 3465 - DNA, 201 bp, Bos taurus
ggaccaccagggaagtccctgtggtgtccttgggatcactcctaatcacgatgcagatggtgacatctttcagaaatcattaactggcccattttgttctgtcttgtttcagacaggagcagatatttgtggattctttcaagatgctgaatatgaaatgtgtgctcgctggatgcaactaggggccttctaccccttcgc

SEQ ID NO: 3466 - DNA, 201 bp, Bos taurus
tctttttaacagatgtgacattccagcctactcctgccctgacataccgcaccacaggaggcattttggacttttatatggttttggggccaacccctgagcttgtaactcaacaatacactgaggttggaagttattctacccatcaatatatcatccaatgtttgctgggtattgccatgttcttagcactgagaaagg

SEQ ID NO: 3467 - DNA, 201 bp, Bos taurus
gcaagagacccaacatgcttgggagagagccaccctcagactcaccgagaaatagacattgccgtcaggcgagacgcctccgacaaccaggtcgcttcccgctctgctgtagcgatctgtgacacccaaacccacccagccagctgtccggacctggagctcgaaagtgatgatctcagcctcaaagtcaaagtcccagcg

SEQ ID NO: 3468 - DNA, 201 bp, Bos taurus
ggacatggcatggggtaccaagaaggaggtggccaggtcctggggcagggagagaggaaggaggcagctgctggcacagaatgaccatcagagaagcatccttgaggccacttgctcaccgtactcatagtatccctaggaatcccaaactcctttgaaaggaatagaaatgaacctcgctttgcacacagcgagtgtaac

SEQ ID NO: 3469 - DNA, 201 bp, Bos taurus
tggtcctggtgggcctggccaagtcattctagctgagtccatgtttcaggaacttgggaatcagtagcgggtggaggagagggaatttctgcccagtttcatccctgctcccaggcctgctgaaccggctctctttagtttagaggagccggagagactgggagggggctgagagagaggccagctattgttctgactccc

SEQ ID NO: 3470 - DNA, 201 bp, Bos taurus
ccatatattgtctgtccctggagtactgagaagtcataaaataattctctcatcctttctttgatctaagtttctcccctaaaatgtggattaaagctggcacactttgttgacaccttgagatgcacttagagaaatatacccattctaggtccacctcagtcagttcagtcgctcagtcgtgtctgactctttgcgagc

SEQ ID NO: 3471 - DNA, 201 bp, Bos taurus
gtctcttttcatctttgaagccttccagcacctagcaacacatcttacaaaatataaggacttggtaaattttgattaaacaattgaatgaggccatctactgagttttcatacctagtcctgagcaaaagattttgaaaatggaaattcatgttttattatatgagtatttgcatatgtacattttaggctttaacagaa

SEQ ID NO: 3472 - DNA, 201 bp, Bos taurus
cagggagagagtcaccccccgtggtagtttgaatcacttttatgaggcatttcttccaggtttcctttggtcaatcatcttgctggcctggtcctgagttcgtatttgatgtctctgtggatcctcatccacatcttttagccaagacggattgtagtgaagaggcctatgggtagttgacatcacttactatgaggtgac

SEQ ID NO: 3473 - DNA, 201 bp, Bos taurus
tgtgtgtgtgtgtgtgtgtaagcttcctacaccaaccggcaattttcagatgccagcaaggtgtccaagaattcaactcaattctaacactacccagaaatagcatcacattccatatgtaagaccaccctccacttcagacactagctgcaagtccaggttgtcactggttcttctgacagactggttatataacccatg

SEQ ID NO: 3474 - DNA, 201 bp, Bos taurus
cttgagtatgcacacattcaaattacagcatggtctatttccaagggcaagtttcttcctgcatatttattgtaggagaccggcctactaaaaggcatgacaaaagaattaaacaatcttgctgagaggacatggctcagtatgcaactcctgaaggaatccaagaaggaacaaacaacatcttgaaagcaggacgtgggc

SEQ ID NO: 3475 - DNA, 201 bp, Bos taurus
acttgtggatccttgttacaaataagtttattaatatctgttcagatattttatctgcctgcaatgcaggagacctgagttcaattattttcagaactacctggggactcatattcatgttgattatcttcagtaatttggcaggttacttatttcacgtagatagtcaagtttcaaaattctgaaatcttcttaatctgg

SEQ ID NO: 3476 - DNA, 201 bp, Bos taurus
acaaagcaattaattcaccccaggacatggcactttaaaagcatgaagatgatgcagaaacatgacatgctaacaatgagtgtttctatttgtatcaataacttgctgagcctttaaggggaattactgacccaagaacagggattactatattttctttgtcaagcccttaactattatttgtttttaagagatgaaagc

SEQ ID NO: 3477 - DNA, 201 bp, Bos taurus
gcattggctgcgtctgagttcctattgctgggggccatggcctatgaccgctatgtggcggtgtgctacccgctgcactacacggtcatcatgcatggagtgctgtgtctgggactggccgtgggctgcttgggggctggtctcacgaattcactgctggagacagtcatcacctttcggcttcccctgtgtcacagtgtt

SEQ ID NO: 3478 - DNA, 201 bp, Bos taurus
tttcattgtctgaagagtgagtaattagccactttatactgagttgtgtcccctcaaagttaatatatagaaaccagggccccagagtacatataaatgtgacttttcagagataagatttatggaggtaattatattaatgtgaggtatttatagtggccctaattcgaagtgaccaatgtccttataaggagatagaat

SEQ ID NO: 3479 - DNA, 201 bp, Bos taurus
caaatgaaacaatcctgaaggcagaggtaagtggtttgctggccagtagctttgtcttcctttcccatgtattgactgcctgcccttgtggactttcaaaaatattttctggccaaacaggttccatttctcatgtattcaggcaagagatgacatttcttactggaaaagcccagtatctgttgctgtacacactctctg

SEQ ID NO: 3480 - DNA, 201 bp, Bos taurus
ttccagtaatagagatgtcagccccaaatggctggcaggccacttgaaacagccgcatagagacatgccagctggcatttgccgcacgctgtgtggggctcgcactagagcacaggccggtgaacattgtcattaacaatcctcgagcgatgatgtgttcctgcagtaaaaaaacaggtgatggatttgaaatgcagtttg

SEQ ID NO: 3481 - DNA, 201 bp, Bos taurus
ttctacaaacatccactcaggccccagggtctaggtatcaggtaatgcatcctgaaagccaagacacagaccagcccatactcctttggtgctgatcatcctgagggccttttactgacttctcttcctagaactcagcatttccttacatggttatgacgactgaagcatgccaaccccaggtgttccagaacttattta

SEQ ID NO: 3482 - DNA, 201 bp, Bos taurus
aacgttggtttccagaggaatgagagaaacagacacccagtaaaggaaagtaattccttattagaggaaaaagctctaaggccaaagattaaacataatggcattgacataacctgatcatcgattcataatctgattaatatggtcaccactgttttgcggatcaaatgcaagaggcaggttgaggccaggaactcacgt

SEQ ID NO: 3483 - DNA, 201 bp, Bos taurus
tagatagcaatagtttattatgattgttctagtgttaggggtgctgaagggatgagaaggaagggatagtacaagttttatgctcaactgtagaatctttttaaaatgtccttccaagaagtgagcttattatcagttggcttccacatgataaacaaaatcttcccaattattctgagctaaagtaatctttgccttcat

SEQ ID NO: 3484 - DNA, 201 bp, Bos taurus
gtgtgtgtgtgtgtgtgtgcgtgcgtgcgcgcacacacgaacagtgagtcaggcaaaacaagtcacacggaaaaacttcagcggcctctggactttctgaacttttctccaataccacatgccccctcccttccctcctatccgtgttcctcttactttcctttcaaataacttggccttacctttccagctggggctctt

SEQ ID NO: 3485 - DNA, 201 bp, Bos taurus
gctgacctatatcgggatggacatagggaggttttggttgatatactgttctctggatttgggttgagggtagaacggcattcctggtagttgtaggcccagcactgttcctcactgcatattggctgagggtctttctttccattttgagagactgtccacattcaattcttttatgactccctccatcttcaaactcat

SEQ ID NO: 3486 - DNA, 201 bp, Bos taurus
tatatggccctagagaattctcagatatgatatattctagtttacagttttatcactgtattagcaaggaacaaatatgtactaattcttacatagtcttcaaattaacatactggctcagggcctgtgattaataagactggatctgaaaacccatgccatggataattaatattgaaaagtacgatccactgaattaat

SEQ ID NO: 3487 - DNA, 201 bp, Bos taurus
aaattaatcagttgattttatgaatggatttgatataaatctccttttatttagaaaggtctgtttatttgagacattgacacaaattctggagactatattttttcagtagactttggtatatgatttcaaatttaatccatctgtacccacaaaacaaaatcatctctaagcattcttcttgagagtagacccagagtt

SEQ ID NO: 3488 - DNA, 201 bp, Bos taurus
tgttccgaggaagatggatcgttttagaaagaagccctgtagtccactgtactctcgaatagcaacagtcgtgagagtaggtcttcagaactggattcctcgttgtaacccagagtgcacattgtttaaaaaatttattttgaaatgtagattacagattcacagaggagttgcacagataatatgaagatctcttatgta

SEQ ID NO: 3489 - DNA, 201 bp, Bos taurus
aaataggaatgaaatgacttcagatcattaagcaacttatttgaaattgatttctgatgcttattcagcatgtttaacaaataaatgatactaaatagaagacacatttcaggcagcaacccaagagccaaatattaacacgcacaatcttcatttgctgtgggcgcttccaacttcaggtgttcttttaatattccatat

SEQ ID NO: 3490 - DNA, 201 bp, Bos taurus
gccatcattcatttaacaaatatctgctgtccatatacaggaaagtaacacttaagctgagatctgaaaaatgagtaagaatgggacatttttttaaaaaggggggccataggtggttaggactgagatagaataaataagcttgtcagttgatgaatgactgaagaatcttggaacaagcaatagtaaacagaggattaa

SEQ ID NO: 3491 - DNA, 201 bp, Bos taurus
tcctgattgtttatctcttaaaatgttctattacgcaatgtttttctccatctttactatatttaccctgagttttggttgtcatgtctgttagttatataatcatagtttattcccatctatagttaacttccaggttttctttagattcctatatatatatatatatatattttttttttttttttccttccagactac

SEQ ID NO: 3492 - DNA, 201 bp, Bos taurus
gagaaagaatctgtaattacaaggtttctaaagtaagcactctaggaaaagcagggtcaggagtccagagtcagaaagaaatccatctaaagtttagtcacgttgagtagaacatgaaggctattttggtcaacatctacttagtggctacccactccaatattctggcctggagaattccatggactatccatcaggcca

SEQ ID NO: 3493 - DNA, 201 bp, Bos taurus
actaaaacatcttgaggcccccaaatttctgagatgtgaggacattgaggagggcatctgtggggggatcccaggacagtgggtacagtgcatattgggactagattcaggggccttattcagtagctctttaccagttgaacaaagctattctatattttatccattcatctcaccccctcttcccctctccccatgttc

SEQ ID NO: 3494 - DNA, 201 bp, Bos taurus
aagcttgcaactcatcataaattttccagaaatctatccttctcacctggtttccttacctgggaattttacaaagtgaacagaaaaacatcacactttacatttgagaagtttgacggatccttgaaaacataatttgtcctcttttaacaatacatatctcactataatgcagtgtgagactacctagagtggttccgg

SEQ ID NO: 3495 - DNA, 201 bp, Bos taurus
ggaaagatcctgtttaggatatgcagaatcactctggcaaaatcaatcatgccacgggagttagtttcagtttggttaaagaaaatgaagaagtaaacaactgagtttctgggaaattaatatgggctcacactttagaaatagtcttgattaagtgtcaataagacaaatgagctaatgatgttgaattagaagttttaa

SEQ ID NO: 3496 - DNA, 201 bp, Bos taurus
caaaaaagaaaagaacacctttttagttaaaccatttattaaagcattctttattaaataacctaacaccttggaattggatatgtgaagagaacatgtctgaagaattaaagcagacaagatactctgatcattttatttcttgacttatgtgtttttattttttacttctgtatttcaagaaaacataatctctgcctt

SEQ ID NO: 3497 - DNA, 201 bp, Bos taurus
ctgagcttcttccagggacccccagagcagcccagtctggctcccagtgtgcagatctctctggcgaaggaagcaacatgcttgtgcatcaaagctgatggacctgcgctctcagggtctgggaggtttccaggctgttcctgctggctgaagcctgagtcaggagtgaaggcgatttcttggcagactttcctcatgtcc

SEQ ID NO: 3498 - DNA, 201 bp, Bos taurus
aagcctattgagatttgctggatgtcaaaatcacttagaatcacttttctaagtgaaaaagaagtaagtggccctactctcaggcctgtgtgtgtgccacctggaaagttccccatcagttcttcaggaagcatggacataacctccggtactttcgtttgagtgtccttctttcctgtgctactgtggagcctggcctga

SEQ ID NO: 3499 - DNA, 201 bp, Bos taurus
aatttaacctccacgtggaggaggcccccagcagctccaggcctgcccatcctggttttaagaggatgactttttctcagtagtcctggtgagttcgagggctggctctgattggcccagcttggatcatatgctcatccatgagccaatcactgtggccaggggtgcccagcgcgcccattggtcagctctgtgtcacat

SEQ ID NO: 3500 - DNA, 201 bp, Bos taurus
caagtgtgagccacacaagaagatggaccgcgttcctataattgcaccttgtttttgccaagatcatccgtcccagcttgttctcatcacattcaccatcattgactctgacagacttggggctgttttcaaaagcaaatctgccttccaaagagagagtcactgccccaaggaacactgaaaacgaagatgctgtggttt

SEQ ID NO: 3501 - DNA, 201 bp, Bos taurus
accagggaagcccatttagaaaaattggtattattctggatgaacactagacttcattttaaatgaattctggacattttaaataatcaatccacacttatgtgttgaagggctgcccgctgggaagattcaagaaaacatagtgcagtcatcgccagcctgcagcacatcttctgcataaagggtttctatgccctggtg

SEQ ID NO: 3502 - DNA, 201 bp, Bos taurus
catcaatgttcataaagaatatggtctgtgattttcttgtagtgtctggctatggaaccagcatagtcttatttgtttatgggccattttaatttttcattctgggaaatgttcatgtgtcttccactcagaaatattcatgtctcttccactcattttttaaaaatgcatacttcctaggcccacccagaacttactgag

SEQ ID NO: 3503 - DNA, 201 bp, Bos taurus
tttcactaaacagagtcagcggcataactgcacacctgcaacaactatttaaaacgtgtaattaatttaaaaatctcatccacaatagaaacaacgagcatgagaaaagcgttaaagccttattcaggcacacgcagaaggcgacaataaacgagtcttcctgtggataagggggctccatattgcaatgacaggagttct

SEQ ID NO: 3504 - DNA, 201 bp, Bos taurus
tcctccgaccgcagtttccttctctatacagcgaggggttggatcactgatcgttcagatccagtgtcctggggtgtgtccttacgctgtgtgtcttcatggaaaagggcctggctgtggccttgggggctagtaggtcacagtcagatggagaggaacagggtgcgcctcctgtcttcctgcctaacgtgactcccaaat

SEQ ID NO: 3505 - DNA, 201 bp, Bos taurus
agagtgaatgtcaggcctccctcgccaaggagggaggggtctggagagctctgtcctttgattgatctccggtggtcatgactccttaggtcctccagcgttcccttctccccacctctggcctcacgtcccccctcaatggtgcccacggtcaagagcccactaggcgagagccatcctcttccgcttgccttacagccc

SEQ ID NO: 3506 - DNA, 201 bp, Bos taurus
ggtgtctgtcatttgtgatgaagccctggggccaggggaccccccctggtcagtcctcccattccatgcactcattcagtataaactgagcaccttctccatctcgggcccaggcaggcaggacccccccacccccactccctggagctttatatctcgagcagaacttcatgaacttggaaatcttctcttccattggat

SEQ ID NO: 3507 - DNA, 201 bp, Bos taurus
cagcgtgggagacacagcctcagggcctgtccccagagagacagacaggagagagggcgagggagagtcccaggacctgctcagcaggaagaaaggcagcaaacgcaggcctccctttctacttctcgccccttctgactcagacagttcagttaattggctcctgcctccttggccctaggaaacagggccggtggtgct

SEQ ID NO: 3508 - DNA, 201 bp, Bos taurus
cggcagggaatcaggccccagcctcgtgcaaggtccacgtggcgattagcccagaggagacctccatgggcacaatggaaactcaggaggagcccagagctgacctgggggctcttgacccccaggccccagctgagtcatgaggcacatgcttttgcttgatgaggacacggaaagagcttaaatcttgtcactccactc

SEQ ID NO: 3509 - DNA, 201 bp, Bos taurus
agagacaagccgaccggaaaggccaccctggggcttaaccaaagcctccgggacaaccctgcaaagtgccaagcatgaaagtcatggatcgagtggagagccagacccgggggtgtcagcagggccgtgggactctgtcccaagggcgcactggcacccagcacccaccaccagcccccccagggctcaacagtctcctcc

SEQ ID NO: 3510 - DNA, 201 bp, Bos taurus
acatgagtccaaaaggggccacgcgtgaggatgtccactttaacatcctttatcgggacaaccgcagagccctccccaagaggggacaggtaaaaggagctgggagcacaccagagaatatggggccctagacttagtgtcaagcaacaagctggctggactcagaggcggactcccgggcagcaaaagtgaacaccagaa

SEQ ID NO: 3511 - DNA, 201 bp, Bos taurus
ccgtctcctgcctccggtggcaagtggggtggggcctcgggtttcagggccagcggaggggtggcggtgggggggaacaggcccagttgaacacaggtctcatacttctgaatctcacctgccccctggctgagggaggggcagcaaagtttctgggagcccaggaggtcaggcttgtccaggcatacaagggccccctca

SEQ ID NO: 3512 - DNA, 201 bp, Bos taurus
catctgggcgcgcctccacacttaccagtggatcatccggcagatatttgagagggactaggtacaaggttccatgggattcccgggccccaggccgcccttcttcctcccaccatggcactgcccctctgcacagcatgcctttgcagggggtttctaattctcccgagacatcctgggtttcgttgtccccaccgcccc

SEQ ID NO: 3513 - DNA, 201 bp, Bos taurus
cactggaagctccccgccgctcccccatcaccctcacagaggtttcctgttggtctccttgttttcatccgtatgctgtcaagtagccttattaacaccatgcctgtgctggcccgaggtcacccacagagagggcaggagtcgtcagggaaccagccccacagccagacgtgcagggggtcagcgcccgggagagtctga

SEQ ID NO: 3514 - DNA, 201 bp, Bos taurus
taaatagggcccacccaccaaactgcataagctgtgggtctcagcacacctgaatctgcctctggagagtgaaagcttttccagcttctaggggttaaaggtcaacagggaggcctgtttggactaattagaaacaggattgtttgaatacacctcacctctcctgagaggtgagtctcctatggaggattggagatccct

SEQ ID NO: 3515 - DNA, 201 bp, Bos taurus
gaggagcctgcacctcgatcctggacttccggcctccagagctatgagagagcagtttccattatcctagccccgaacctactgattttgctcccagttcacaccaggccccgcttcttcctgaaccctttcctcacgggtcactgggagtttgaatgaggtgacgcagggactatggttctgcgtgtgtgattgctgctg

SEQ ID NO: 3516 - DNA, 201 bp, Bos taurus
ataaattgaaaaatggacaaaggatgtggatatgcaacgcagttcagcaagaaacacaaatggaaaacccgaaaggctgcagccgaggcgacagcatcagtctgtgcttaacaggcggcaagagtataaaaggtcctaacacttcaagtgggaaacaagaaaaaggctcacactctgctggagaagagcacacagttatag

SEQ ID NO: 3517 - DNA, 201 bp, Bos taurus
ggcaccaacctggcctccgctgccctgagtcctgtgcaacggggtggccctttgtccagaggatgacccatatgccgttcctgtcctgcagcccaccaggcgcagagcttgtgtcaggagcagtccgagcatttccacgcaccatcttggctggagcactcacacccctttgaggctgaggtcacccactttacagaggag

SEQ ID NO: 3518 - DNA, 201 bp, Bos taurus
agaattttgactttcttctcaagatgcattctgtgctaggactctctttagtacctgtgtaagaattcctctggcgggctgcttcatctgcctcttatcaccctttagggccaccggagtcacccccagctggggtgccaagcacacagggattcacacgtgtcttgtttttctgccatggagggagacagtaggataggc

SEQ ID NO: 3519 - DNA, 201 bp, Bos taurus
ttggaggttcttcatcacggcccagtacctgaaagatgacacttcggtgttctcactctctcgcccttggcaacaaacccactcacacagcatcagtggtcgctgtcaggactctcgaatggcctcgtggcatttccccttggagatcctaaaggcagctcagagctgccgcacccacacttacactcctcactttattgc

SEQ ID NO: 3520 - DNA, 201 bp, Bos taurus
aggaaattttaaacccctggttgttttacaaataggtcattggggttgacctttcccatctgtctggaccaggtgctgagggtatacggtctcgaggagcatggaaacagctaggaagtggctgacagatctctcccgcccagacacttgggcttccccaggtgtatcaaggctctgggaagataggaattaagtgtctcc

SEQ ID NO: 3521 - DNA, 201 bp, Bos taurus
cagaggcttcttccctgagtgggaatctgatggcgctgagagtcccccatcagcgggcctctggcgactgtggcctgcgactgtgagccctagaggacacggatgataccagccctactgctaactagaatctccataatgtttatttttcccctggaaggactatttttttattataataggcacaccctaaaagttcaa

SEQ ID NO: 3522 - DNA, 201 bp, Bos taurus
cctgaagctaaaatgcatatctgattgatattgagggataaagaatggagggcaggaaaaagaccttctctttcctgaacttgcaaaatcaatgcaaagcaggctttctctcacctattaatgctggctggagcaggaggtctgtggagccgtgctgcctgaaatcctggcgtggcccctgggagtctccaggcagttaca

SEQ ID NO: 3523 - DNA, 201 bp, Bos taurus
tttggaaggtctggggtatttggaagggccagcttctggggacggagatcacacctgggtccagggaggagctgcagaagcccttgacttcagggaagggggaggggaacctgtgtcaaaggcccggggagtctgaccgttctgtcttcatccggaggaagggctatcatgactccttttttgaaaggagggtccttttca

SEQ ID NO: 3524 - DNA, 201 bp, Bos taurus
ctctgtccgctggtttaatagttgaactcatttagtcctggccatgtgctgtgagccgtctactgtgtgttcattcaacagccggaacctggaatcggcagcttacatatggccagcaagtgaaacagacctgggatttgcgcacaagaaattattctgaccttgaagctcattcctctaactgatatgtagctcttcatt

SEQ ID NO: 3525 - DNA, 201 bp, Bos taurus
aaccacacgctctcctgtgctttttacacccctgccagcatgcacagctctgactcctggaccaaaaagctaggggtctcctcactgatggcccctgtgcgctgataaaacttgctggaaagataaatcgcttggttgggttttgttgagtaggtcgaggtggccccagctgaagcccattgcagcaaaagcagaaaccac

SEQ ID NO: 3526 - DNA, 201 bp, Bos taurus
aggctgcagtccacggggccgtgaagagtcggacatgactgagggactgagctcacactaatcttgccgaacgagcagcagcgtgggcaggtgtaaggtgtgtggggccacagacgtgctcactggtgactctcccccaagcctgggctgcggccagggatgctctgggtctgggtctggtttgtgcagcagggcatccgt

SEQ ID NO: 3527 - DNA, 201 bp, Bos taurus
tcccacagcctcacctgcagactgacccgctgacctgagaacagggtctgcgttattccactactttctggatgaggggagccccagtcagcagccttcccggggcagacggcccagcccatgctccttaccacacagcagggatgcagcaaaagtggggtagagaccccagaaacctgtgcaccattctgctgaaaacac

SEQ ID NO: 3528 - DNA, 201 bp, Bos taurus
taaatctgtatcttttctcaaaacttgttaccttgttactgaattgttgtggcatttctcttcctgtagacgtctaagagtctatgagaacatctttgggcgttttgttaatttccctggaattggaaagccctttcatctgcagctcacgcccctgctgtgtcggcatcttgcggtgccttcagcgattgcctctcttcc

SEQ ID NO: 3529 - DNA, 201 bp, Bos taurus
atttgtcatccaaataagtatcatccttctcaggaagctgcacaacttgttctgacaagaggctattcctcagaagaatttaggatatcccttgcagtatgaccttcttggaccaggctcccaaggaatctgtagttcttcccttaataatagacttggtttttgacagttattgtaatcatcaaccttaaaatatccttt

SEQ ID NO: 3530 - DNA, 201 bp, Bos taurus
tccaggcctggctgcctaacttccaaaagtggggggctgacccggcaggagggcttgtaaaagcaagcccaccgagacaaaatgtccttgactgacagtacatcgaaggctggttccgggccgcagaacacatggactcgccccaagtttgaggagcacgtggttctcaccctccagctcttggtcctcactctggagaga

SEQ ID NO: 3531 - DNA, 201 bp, Bos taurus
aaaagaaatctgtttttttacatatatgtgtgtttatatataaacacaattttcttcctggtgtttcctgtgattccacttgctcacagcgggccgcatgcagagacctcgccccccaccccacccttcagatcagagtctctgctaagaaaaggctgcgtcgggcacctcactcagggccgtgtgcacgattcaagatgg

SEQ ID NO: 3532 - DNA, 201 bp, Bos taurus
catcttttcagaacataggctgaccctcatgctgtcataggaaacttactgtacttgtatttcagaatacattaaaagcatctggagtttctctatgatacgagagcctcaccttttacacagatttctaaaaccatcccgatatgttaaaacatactatttctttgttggctgcatcatgaattaggattattctcatta

SEQ ID NO: 3533 - DNA, 201 bp, Bos taurus
cgcacaggttcttgacgaggaccctcttctggcggtcagacggccgccttcttgccgcgtgctcacgtggcagagggtacgtggcctgagctccagtatcctgagagtgctgacctgtcgtgagggatccatgctcacgaccttacctaaacccaatcggccctcaaagtctcgtctcctaacatcaccatgatgctgggt

SEQ ID NO: 3534 - DNA, 201 bp, Bos taurus
ttttaagattccatctccttggtgttgattttgagaagagctgtgtgttggggtccttggaggttgaggcagagtccgtgtcactgcctgtattgaccaggtgggcacgctgcgctttgctctcgttaacgctcggggaggtcccgttctagttctgtgcttcgtgcttttctgctcggtctggtaatcgtcatagtaaag

SEQ ID NO: 3535 - DNA, 201 bp, Bos taurus
tgtcatgtctgtgcaggtttggggagcagagcactgactgccctttgttcctgtcttttcaaggaaagacgtgtctgtctctggagcaaggggcgggcctgctttctgttcatgatgacagtgccctgaacgcaggtccccccacaacacagctccctctgtgcagggtcagctgccctctttgtctggtagcccgccggg

SEQ ID NO: 3536 - DNA, 201 bp, Bos taurus
ccatggcttctcctcctccgctgtcccctccaggcaggtgaggcggctagggaagggctgtttgcgtttgagcatgggcagtgcctccgttcaagatgctcgttggccagtgggccagattgggaggtggtgcgtggtgtgggtctccaagctcagcgctgcgagttgctgcccctgagggtccagcctcagccacacaga

SEQ ID NO: 3537 - DNA, 201 bp, Bos taurus
ctggctgtgatgtctgcttgctctttcaacagtcaggcaccagaaactgcgcgttcgctcgaacttcagacacattgctttcaatatcactcgcgcccctgtagtggtgggccgtgtggagacacccctgagcagtccatctcgggtccaggcatttcctcccaactcagtgttaaaaagacaggagtaaccacagacgca

SEQ ID NO: 3538 - DNA, 201 bp, Bos taurus
gtaagcctgctcctcccaggaaggcacgcgtcagggcacttctggtgtgggtgctgagtacagagcagctggcagtgaagtgccaggagctcccaggcactgcagggtgaaaacctgtgtctgattccttcagccaccagaaacagcctcagacctgacagttcagggcgcgtccaggtctgtgctcgtgcagaccgcagt

SEQ ID NO: 3539 - DNA, 201 bp, Bos taurus
aatttttgtcacactaaatatttacctatgagtagataaaaggtatttttcatcatgataatattgtaactatcctaggatataatggtgtaacactaggatacgtacccaaaggacaattttaataaacatttctgatgttcaattattttaaaagaacatttttttcaaaatttaatattgaaaactttaatagtaacc

SEQ ID NO: 3540 - DNA, 201 bp, Bos taurus
tggttggacagcatcactgactcgatggacgtgagtctgagcaggctccaggacatggtgaagcacgagagaagcctggtgtgctgcagcccgtggggccacaaagagggagacacggtcgagcgactggacagcagcagcaaacgccattgtgagacggctgagcaaggctggctcccatacacccctccctgcctcccg

SEQ ID NO: 3541 - DNA, 201 bp, Bos taurus
agtggtggtcataaggaatttaagcctgagatctaatttttaatatcctttataagtagaatttgctcatgtacatacttattaaaaactaattttaaaatagaacttcctacaaaggaggagatagcctgttcctcggtctcagagttggccatgcacacgtgtgctcttaagtattctcagtcagggtgggagggtctt

SEQ ID NO: 3542 - DNA, 201 bp, Bos taurus
catgagggccctttttggtctgccaagaagagaacatctgtttcacacgattttcttaagggccatgtttaagctgagaatatgacagcccattaattctgtccatctcagtaaaacaaaatgcttagctgagcttctgaccagtttggaaaacactaaaacagaacaccttagtacatccgagcctaaagataccaatat

SEQ ID NO: 3543 - DNA, 201 bp, Bos taurus
aagaatactataaatagagtaaaaaggcaacccacggaatggaagaaaacattttcaaatcacaaagggattaatatccagaatatataaagaacacctacatcttaacaaaataacccaattcaaaaatgggcaaaggactttagatagacatttcttcaaagaaaatatacaaatgtccaaaagcacataaaacatgct

SEQ ID NO: 3544 - DNA, 201 bp, Bos taurus
gtcccccacatcccccatgggagtttcttctcctttgctccctcctgggagtttccagatgaagtcaaagcagccccggtgctgttggcaaaggctacatcactcccagtccttggtgttctttggaaggaatgatgctgaagttgaaactccagtactttggccacctcatgccaagagttgactcattggaaaagactc

SEQ ID NO: 3545 - DNA, 201 bp, Bos taurus
gggctgcccagagaggcaggttcccacgtggccatcagctcacacgctttctccttctctgtttgtccacctctccgttcggctggagtccccaagagaaggatcccgtggtgtggacacagtggccctgggtccacgtgacacctggccgaccagcccagcagggcagtgagtagaaagcggggagagggtgcaggcttg

SEQ ID NO: 3546 - DNA, 201 bp, Bos taurus
accatgttgctgataagcggcgatccccagtgaggctgggggggtgccttaggggggcgtcacacctgtgtgggcacccgggccgctgacatctttcccaggtacatcaattacagttagagagtcataagaacgccaaaacggacttctttagcgctttggtacggaggcccttgcgtttaaaatcaaagccgttaattg

SEQ ID NO: 3547 - DNA, 201 bp, Bos taurus
gcacgagcctgccatctcacgtggggaggtggggcagggcggaagtgacatcacacacgtctgtctcaggaaccctgtgcttagcatttggtggatgtggatgtggccagacggcgacctctctgcaggaagagcggctgtggtcgctgagctgagaatgctgctttctccccatttgacgattgaaaaagaaatctaaag

SEQ ID NO: 3548 - DNA, 201 bp, Bos taurus
ccccgggaggccccgccctgctgtgctctggtgtccttcctgctctgccggcaggtggttttcgggtttaagtcttttctcagcccctccctctgctgggcgtgttttccgggtggcccagggcccagcactcagggcgggctcctcagggaccccgccttcccacccaacgccacgtccctccctcgtccctccctcgtc

SEQ ID NO: 3549 - DNA, 201 bp, Bos taurus
ccaggcaccaccccttctccggtattgggctgaggacctcaccacagcagacgcttggaaacgttcgttttgaaagcagtgcgctttcccaggagaggcaccatcggcccctgtgtcccgtcctgtctgtcggggcagcatggaaccaggacccgttcctggggaaacttccagactaccgccggagccttaaagatgtgg

SEQ ID NO: 3550 - DNA, 201 bp, Bos taurus
gagagtcggacacgcctgagtgacggggcacgcacacacagatgtccttcagctaggctccagacaaagctgctggacggagctcaggttacaccccacacggcccaccccagggggcccctcttgtatgtccagctctcctggctggttgttcacccaacagcctgtgagaagaggctggtttactcagcgagacattta

SEQ ID NO: 3551 - DNA, 201 bp, Bos taurus
gggttactgggccggatctccctgcagacacgactcacccgtgagcgccctccccctcctgtgtcactctggctgcggcggtctgatcgtgaaggtgcgagggggacggccttccaaacacccactaatggcccgggggttacacacaggggccatctggggaattgatttctttctcggttacaaattgcaaatggagac

SEQ ID NO: 3552 - DNA, 201 bp, Bos taurus
gagaagaggcatcgagctggggaaccggccgactccagccctgagggacggctctgtgtccggcgctgtccgcctgcaatggggccgtgggagcgtgtggttccctgaacaggttgctatgacgagctgcgatgggagctccaacaagacctgggaaaccctcccagtaccctccacgagaaggatggccacgtgcctcca

SEQ ID NO: 3553 - DNA, 201 bp, Bos taurus
gtcctctttcctgataggttttctttgacttataattctgtatataaatgtgtaatgtaatattgtatttgcgtttcaatgaaacccgggggaaggctccgcacggaagcttcttcaagccctaaagaaaccccgaattagccttagagagagactcgagatacaggggaagcccctggggagggggcatgcgccgtgaac

SEQ ID NO: 3554 - DNA, 201 bp, Bos taurus
cagcgccccacctgcccaggcccagctgcggtccctgcaggctgctcccgccctctgcgtccacacacccccagggtgcttccccttgggtttccaaacacgggcctcggtctaaacccgggacacgtgtgaccacttaccgcgtcctgcctacgtgtctgtattaacacagcaccacagatgtgagtgtgtgaggactcg

SEQ ID NO: 3555 - DNA, 201 bp, Bos taurus
tccgcgtctctgaccgcccagccccatgtggccgagctctgccctggcgtcagcaaaggaaggaaagatgaccagccgtgccaggcagatccgacctcccggctggcctcggcatgagttcagggctctctccccgcacctgctcttctgggtgggcacatggagtctctgcacagaaatatctgcatgtctgtgtcccag

SEQ ID NO: 3556 - DNA, 201 bp, Bos taurus
tctcccaggaataaagacagaacactcctcagttcactttatgaggcttgactcttctagaaactaaatcaagggcgaaaaagaaaagaaaggccattcatcaatataaaccatggcttagttaagcagcaaaggtgttcagggtctcatgttcagagttagctgcgacaagctgcccgcctcagcctgcagacgccccgc

SEQ ID NO: 3557 - DNA, 201 bp, Bos taurus
cactctaggagccattcgcaaaagttaagtctttttactttgttttctcacctcccaccatgtctgacacataaaagaacctggcatccaggcctggtccagatgattattttcagacaggagcctgccatccctctaggtccgccagctctccgagtacagtcgatgatgccgcacccctcgcctcagcgcgcttaccgg

SEQ ID NO: 3558 - DNA, 201 bp, Bos taurus
gtcacctgggccgcgcttcgcgccgggatactgcggaaggagaagcccacgctcctgagtttgcgggtcctgaccgcccacagccgacggacgatttcctgacggaattctctccgcggccctggagacgagggagcttggataggccgctttgtgcgcgaaggcgggacttcttctcgcccgcgggatcgcggggacccg

SEQ ID NO: 3559 - DNA, 201 bp, Bos taurus
agatgagagcacactacagctagacttcaggttctccagacacgaaccctccaagttgtgtcttcggggtcctccaggggctgggagcttgttatgggttgtaagtcctgcttggccttgtacacacttgctgctgtggcctcaggacgccagccctccccgggcaccggtctccgggagtctccactctgcgggggaggg

SEQ ID NO: 3560 - DNA, 201 bp, Bos taurus
taatctgaaaatcagcaccacaaaatcctgggaaaaccctcaaacgggatttgaatggaatagaaactggtcacttctgagggcctgctctcctcagacttggagagaggaggatggaaggaagtggcagcggctgggggcgttgggcagacccgccaacccctagaccagagccgactctgtgcccggccctggacttca

SEQ ID NO: 3561 - DNA, 201 bp, Bos taurus
tcttataatgggctaatcagaggaatgaagacaggggtgggggtcagcttctcaggctcttggaagacagtcgttaccactcccccaacacagagggtcctcatccttactgcctggggaagtggccccagttttaaaaccagccatgaacaccccagaggctgggacacagatgacacggcgggtggtgcaggatgtcct

SEQ ID NO: 3562 - DNA, 201 bp, Bos taurus
ccaacctgactgggaccaaatttcagtgtcctcagcatctctgaacactggagtctgctctgtgctggcctcccatggctgttctctcagggccccgtgcgtctgctgctctgagtaagccaagggcacatgaaaaccacacagacttttggactcccttccctgcagctctgtgctctcccttccctaaatcacagccac

SEQ ID NO: 3563 - DNA, 201 bp, Bos taurus
caactatttagagacagtgtagttcatgaactaagctcatgggctccatagtcgaaagatctgggtttgaataatggttctgctgcctccagttgggcctcagtttgctcaacagtaaaatgtagagaatagtacatatctcaggaaattatcttgaagattaaatgaggaaatacacttccaatacttcgaaaaggatgt

SEQ ID NO: 3564 - DNA, 201 bp, Bos taurus
tatgaaatatatgtatgaagtttgctttaaaatagggtgttttttttttttttttggcaaagtaatagtagcttataaaaatgaaaattaaaggagtaatgtcaggggacatttggctttaaagaattcaatatgttattcttttcttttgtgtgccatttctcaagaattctctattcctcatcagttgctgcaggaacg

SEQ ID NO: 3565 - DNA, 201 bp, Bos taurus
ctggggctgagggagctggggacatgtggcaggcagtgtgactccacgatgaacctggagggcctgttgccctccagacacaggctggataattgaagggattggaattaacatatacacattaatatatatcaaatagatgatcaaaaagtacttactgaataacatagggaagtttattgaacaccatagaaaagaaat

SEQ ID NO: 3566 - DNA, 201 bp, Bos taurus
acaggatagatcaaataattttttttgagaaatgtttcattgtgggctacagttaggcaataagaatccagccagtcacccacattcattggcatgcgctatgccctttccaaagccatttgtttgcttttatgaaagcagactgaaaattaaacacaaggaatattaaattattattaatgaggacatttgcgggacact

SEQ ID NO: 3567 - DNA, 201 bp, Bos taurus
gcaagcacacgtccaggcaggtggcaggcacgatcccaccctgtggagccaggacacctcaggcgagccctgcttacccaacccctggcctccccttcaacagacactgccagctggagcaaaacgagccaaatggtgtggtggttttctaatgaggctaagcagggagagaacgaaccaagtaaattttttctcatggcc

SEQ ID NO: 3568 - DNA, 201 bp, Bos taurus
tcacagaatcaaacaccctgatggcccaaatggagggacacctacacaggtattggcaagcaagggacgcgcgtgtagaaaccagcagcatgatggagacgggggctgaagagacagggaggaatgaaatgtgtttccaaaacccaggaagccctgaggcacagacagggggtgccatggttgagaaagtgcacagctgtg

SEQ ID NO: 3569 - DNA, 201 bp, Bos taurus
tttgcttggaagatcaaactatattgtaaacccacctttgattttggctgaaatgataatcaatcttgaagctttcaaattacccggtaaagggcaaatgtagtatattctcttttagaacagctgtgcaaatagccttcatgtttggagttaggcttttactttattgaagatggcctttaagagtcatatttgtttcta

SEQ ID NO: 3570 - DNA, 201 bp, Bos taurus
ctgcttacactgtcagcaattagcgggaaaagttcagaatataatgtaattatcaattactgataactcagcaaacaaaaattaacttgaaataaaatgtgaagtcacaagattcagatttttaatgatgacaagctgttctgctttctaagtgaactgactgaattcagacctcaaattggagaggtatgggaacagatt

SEQ ID NO: 3571 - DNA, 201 bp, Bos taurus
ttctgtagttttaaaatagcagactgtaaaatctggcccagatcagagtttaggcagctcttatgatcactccctcttatgtccctgtcagagcacagatatattcatatggggccctcttttcataaagctgagcatctggatattgcccttgcggaaatctttcctttttaccccctaggaatcattactcttcttcac

SEQ ID NO: 3572 - DNA, 201 bp, Bos taurus
gatatctttacatgaacaaatcagaatacatggctttttgcccctctatagagggctctgcactgaaaaatctaggagaaccatttgtttctgtgaaaaccttttgtatgattccttagcggacttgtttagctcactgttttcctgtcaaggcacacacagccgtgtgggcaatctgagtccagtgttggattttggtta

SEQ ID NO: 3573 - DNA, 201 bp, Bos taurus
ttaaggtcagtaagcaggtctgactgacccaggcccctttcagattgctgcctctcccctgagactcaggacgtgtgagattgtacatgtgctttcagagtggggtctctgtttcctactgcctcaggtcttctgaacataagccctgctggttttcaaagccaggcattttggcagctcaccttcttgatgcaagaacag

SEQ ID NO: 3574 - DNA, 201 bp, Bos taurus
tgagttcgatcactgatcagggaactagatcctatatgccacaactaagagtttgcatgctgcaactagagatactgcgtgctgtaactaagacacggcacggccaaataaacatcttttaaagttaattaggaaatggttagggatgtggtggagggtagaggttgagggctatatcaagatgaaatgaacagtttatgc

SEQ ID NO: 3575 - DNA, 201 bp, Bos taurus
acccaattttgttgttaaacaacaaccaagagtgagcttttaaaaatataaatgacatttccatcagtcttgccctgatgaccacgccacccaaaatggctgttcttttgctttctgtccacccgctactccagcagtccctgcggcacccatacccgactcaccttactgaccttccctcttaatgatggatcctaatca

SEQ ID NO: 3576 - DNA, 201 bp, Bos taurus
acttagcaactgaacaacaagatatttaacctgagtttccgtatccttacacagtacttaggaagaacacagtagctcctggaatttaggagattaaaggcgataactaatatgaattaaaagatctggtaaattgtagccaggtcatctatttcacattccttacatttccttcccagaccttgatgaagcgtgttccag

SEQ ID NO: 3577 - DNA, 201 bp, Bos taurus
cacgaggacctgggttctgccagtacccaaatgagctcggtgctactcttccctggagcctccagaaaagaacacaagcttgcaggcaccttgattccctccttgtgagatgctaaggtgagaatcagctgagtcccacagcaaattcaggtaacaaacgggtgttgattgaaacttctatatttttgtacttcatgatag

SEQ ID NO: 3578 - DNA, 201 bp, Bos taurus
tcaatttactttcccctgaggcttgcatggtaaaagtgtttgcaaaggtggggcttctaaattagaacagattctcatgaataaggttgtcttttatttactacaaatggaagaagcagcaagtctgatagctgtctacttcaagttccggacaagaataatagtatggaagaaaaggcatgtttaattttgaacaatagg

SEQ ID NO: 3579 - DNA, 201 bp, Bos taurus
aaccacatgtctgttagttttttacaaaagttaaacaaaatgtagaagtcttgtcaaagtaatcacagcctaaatttatgacagatatctttgaggacttgattttttaatctactgtttaagacttaacatttgtatatgatactcttttttaaggaacaataattatttcagttaattttgaatactttttgcatgatc

SEQ ID NO: 3580 - DNA, 201 bp, Bos taurus
tgagcagaacttctaatttttatggatattcagataataaaatctcttctagtcactccaaaaaacaaaagcagtttcattcaagaaattaaagtatctacttatatatgataatcagagtctaaaattcacttaaaacttctctcctttaactacggcatgagttagtggggatcctggggtggaaaggggatgtgtgat

SEQ ID NO: 3581 - DNA, 201 bp, Bos taurus
ccagtgcagccaaataaataaatagttttaaaaaatccacattgttattttggctcctgcttgggacatatccaacattttaacacagcgagtaacccacattggcctcccgcacactttggaactgctgatcttcattttgtcgcccccttgtgcttgctctgcattctcagctctattatgtgatccacatggatactg

SEQ ID NO: 3582 - DNA, 201 bp, Bos taurus
taaaatggagagaggcctttccttagaggaatccatttagcaaaataaaaagaaaaagggaaatttggataagatcaaatatattcttcacattctgaatatttggacagatggaagaaaattcaacaggaaaagagtggatacccctaggataaaaatggcttcagtcaggcatatatgcataagcctctaaaacgtgaa

SEQ ID NO: 3583 - DNA, 201 bp, Bos taurus
tttccaaatgctaattttatctagctgtcatatctcttcccagagagatctgtctcatttaaaactacgctatcacaaccagaagtatgtctctctctctttttttaacatctgttgctgtcatcttctgattttaatcctaatgctatacttttgtccaaacctttattaacagttatgtagacacttaatacagtcaaa

SEQ ID NO: 3584 - DNA, 201 bp, Bos taurus
tggtatctaattttcttgaagagatctctagtctttcccattctgttgttttcctctatagttctagctgaactacttctcacctccgcagtgacttacctgtgtaccattatttaacatacgtggtcatattcttttctttggggaaatcttccccccaaaattgaattctctatatttctttttgtcttatcctatggg

SEQ ID NO: 3585 - DNA, 201 bp, Bos taurus
ctggtgatggcaaagaccacgctggtatcatagtacattcttgggataagcctaatagcaaagcctctaatctagagttagtagatttcaaggactgtccatgacttctgctggtgtacactgggatttttagcaaatattataatgttcacacatttaaaattacgttcttgtatctcccaggactcttacagttaagag

SEQ ID NO: 3586 - DNA, 201 bp, Bos taurus
actggtatgtaaaactttgtagaaatagagattaactaattcaccaactaccaccaagaaaggaattaacatagctgagatttgaatctgtggttataagctactaaagtcatacatatgtttaaatacggctacattaatctcttactgtgaatccgttgcataatctctcctattccacaaggatgttataaacagaaa

SEQ ID NO: 3587 - DNA, 201 bp, Bos taurus
tatgtttgaccagaagagaatctcactgcacagaattatttcaagggtacatgccacttgcacgttttaaaagaaagctttattataaaagccaataaatgtatttatagttgaatgcttgagacttgcttgggatgcagacaggctatcttccagagaaagacaaatgcttaaagtgcagaattatcacactaattttaa

SEQ ID NO: 3588 - DNA, 201 bp, Bos taurus
tccactcactgtttcatatggcctccacttcctactcctctgatcaaaaagaaagtgcttctttagagactgctcctttctcgaactgatatgcacttccgggcttcaggccatctttgatttgaggcttggagaaaaagaaaacaagactgaaacagaaaattcacccttgttgctggctaaaatcttggctttctctgc

SEQ ID NO: 3589 - DNA, 201 bp, Bos taurus
tctgtctgctacaagcctctgcaactacaaaggtatccagagctgtctctgcagccaagtatgtacataccactagttctggccacaacctctgcctgctgtgtccctagctcctagatcgtgaggtgctgctgaggagcccaacagccatagcagcccgtgtggggccactcacagtgctcacagaagaccatgcacgtc

SEQ ID NO: 3590 - DNA, 201 bp, Bos taurus
aagtgtaacttgtgcctattaaattactctatattggaaaatagagaatcagaagagcaaagagaaaagatgttatattgaaaactgaactagaattagctactacagagttcaatcattttagaatatcataaatcacagaaaaatgttgcattaaaacagaactgtaaggcaatataaatgtggaataagtagttaagt

SEQ ID NO: 3591 - DNA, 201 bp, Bos taurus
aaaaaactttgactattctaaagtgaaaggataccagtgtgcaactttactgtgcaagaaagctcatattcacagcctcagaagattacactacacggaacaatgaacatgcattgcaaaacaattgtgatcatttttggctatattttgtgagggtcagtgtctttttttcacaatatctcaagaaatatcttggtaaaa

SEQ ID NO: 3592 - DNA, 201 bp, Bos taurus
tgctatttcctgtaactgatgctgtgtattcactgaaaaagctgacattactgcatagtcggcttgaaattttcaatgcaccactgtgtcaagccttaaagttaagctctgtttccacagcaaccacactttagctcttcaagcatagttggactttttgtgtgtgtgtgtgtggtcttaacctacacgtaccagtaagac

SEQ ID NO: 3593 - DNA, 201 bp, Bos taurus
gcctgaagtacagtgcaaatactcttattataaagtgaatgatgagggaatttgtttccgatatctagtgtggacacaggaaatattatctattctcaaactataaggctccatgaaggcccatacttgtatgcctgtatcactataacctcagcctttatcatactgcagtccagcatatagcaggaattcactaaatat

SEQ ID NO: 3594 - DNA, 201 bp, Bos taurus
ttacaatctagagctgtcacatacactcatgcaggttggccgctacccagttctagagacttgaatgtgaattgcaaccctctggagtcacgtaatgctttctttctttctttctttttttttggagtcacgtaatgctttctaactgggaaatacatcttaactctaattttttttactaagaaaagaaacagccttact

SEQ ID NO: 3595 - DNA, 201 bp, Bos taurus
ccggatctgtgaggtaagaagctgaggttcgggggatatttattaactgatatagacatacagcttatatggagccagaaatatatggaattaacaatttataaactgaaatttaatttcagattttattttctttttacagtattttccttaaacataggctgccttgctgtataatgggtagatttgtacatgtatgtg

SEQ ID NO: 3596 - DNA, 201 bp, Bos taurus
actctatatccttaattaacgtttaattaagcagttgtttcctgatcctcaccgacgccgtccccgcttcgaattccctggatccaccggggctggaccccggcagttcactctaggactgagaacaaattgatttctgaacattctgatgcatttgtaagtaaacattcttcagggtaccatgttctattcccactgtga

SEQ ID NO: 3597 - DNA, 201 bp, Bos taurus
ctgaaattccctcagaatgggctctgggcagttagttctccagtcctgcggcgctcagctctggactcctgcccttggcccatgttgactcctcccctcccggtcacctcgagtctccctgatctgcagcatcctgacacagactcttcttcatcaagtgggccccacctccacgcagatggctgaagagatgattatacc

SEQ ID NO: 3598 - DNA, 201 bp, Bos taurus
atgggggctctctgtacaccacctgtttgtctaattctctacttaccaatctggagtagtttcccaaaactttttcagctgtagaatcttttaagaaatcgtatctgaaaatgtaacatgaaacaaagacactctggccgtgactggggagaaacctactcggggcgggttctgtcccactgtttggacagaggatggtgg

SEQ ID NO: 3599 - DNA, 201 bp, Bos taurus
gggatcaaacccacatctcttatgtctcctgaattggcaggcaggttctttaccagtgggaaacccattgagtgcacatataaatcaaataaacaacccagtccaaaaaaagaaaaatcatcaagcaaagtacaacatccctacttatccacaaagacagttcattttaatagatcctgtgacccactcaggtttcctgag

SEQ ID NO: 3600 - DNA, 201 bp, Bos taurus
tctcatctaatctgtagggcttgggaggcccagttgtcctgcctatattcttgctctctgactgtcatttgaccttggccagtcttctcgttactttgtccttaaaccactaagatgccctgacatcaagaactaccataagccccaggggcctcttgtagtggccttaatgttcattttcagcatttcagcataggggtc

SEQ ID NO: 3601 - DNA, 201 bp, Bos taurus
cctatctgttggaatagtcagtaagtaacatgcttctcaaacagaacggcacaggctgaaaggcaaggtgggaagagtgccagatttagagaccaacttgcgtttgagacctgactctaccgagcttggtcaaatcaaccaaccatctaagctgcctattttcatcggtgagataggatcatgcccacccatgcacctatc

SEQ ID NO: 3602 - DNA, 201 bp, Bos taurus
cgtgaatggaaggacggtttcactaactctttaactgaaagccttcaagtttccactcaccactggtgagccaggagtgggaagaagacatggagaaaacggatgaatgaatgtgcaccaaagcgggattcataggccaaaagaaatattaaaggaataaaatgtggaacctaggagaaaacctcaaaggagttcacgcct

SEQ ID NO: 3603 - DNA, 201 bp, Bos taurus
gagcacacaggcacacaccgatgtcgaaggactagagtcagaactaggacttaagcccaggttgttttcaatatgatgtgcacatgaagagccttgctgcaggagtgctgacagcagcgtagaagtgaaactcaccaaatgacaacagacaaatgaatgaaataatataccagctcaatgggatttgatgctgtcattaac

SEQ ID NO: 3604 - DNA, 201 bp, Bos taurus
agtaggtgcggccttggggaggtgcttccgtcctaaaggaaggctcagaaggggattactgccccaccataacagacccacagagatcccttgccccttccggcgtgtgaaggcccggtaagaaggcaccagcttcaaaccaggaagaggaccttcagaaagtcactctatgcagcagcttgatctttgacttcccagctc

SEQ ID NO: 3605 - DNA, 201 bp, Bos taurus
agtaccaagatctggagcttaaacacttagtaagtagagccaatataagtccaaaggtgttttcagaataacatgcaagaagacctcagtattacttcaactatcaaggaaattatcactagactcccattttggtaagagaactttcctgacagatctcacaaagattttagtttgaaggctgtacctacccttggggaa

SEQ ID NO: 3606 - DNA, 201 bp, Bos taurus
tgaaatataagacatatattcaggaacacacttgttatgtgtgtctggtctcatatagtttcagaactgatcctagaaacgtcttaccaaggacagaggaactgcttcggttcatggaggaaactgatctaggtctccttttgtctgagccactctaatgaagctactctgtgttagtcacctgaggttatcccagcagtg

SEQ ID NO: 3607 - DNA, 201 bp, Bos taurus
tgggatgggcccctaaaaagggaataagggtgggaatcaaggatgaaggaaggagattaaacaaaactaagaaagggcccttgctaagaaattgatgatgagaacctcccacgagtatctaaactttctccaccataaatccaaaatcccaaacccagtatagattgtaccacattccagcaaacaacccgaaatggtctg

SEQ ID NO: 3608 - DNA, 201 bp, Bos taurus
atagccattcctaaagatttccagtatttagtgttatattttaaccagtttcactatggcaaatagtgtatgtccatagactttgccaagaatcatataggtatgttgaaattacagtagtaccaaagagttatgacaaagtgacggcacagctttataatttgaaactagtagtatgtattttcagagcgtttaaaatta

SEQ ID NO: 3609 - DNA, 201 bp, Bos taurus
taagtgaataaatgatgagcatgattttggtgggataggtagagctatcaaatgttgattctggtgagaagctgctgtttattgcactcactattttcttgttaaacttgcatattaagatataataaccttgaaaagttagggtaccctgttatgtatccttcagtttggttgactgaaggatacataaggatttattca

SEQ ID NO: 3610 - DNA, 201 bp, Bos taurus
aatattttgttaatcacctctcggaggaacataaaaaaattacattgataaatgtatgcaccactgtgaattctttatgactgggttgtcagtcgcctccgtcaggcaatgagctaatgtttattaagtagctacaatgggcagagagtttttgcaaggctggggggaaaggcccaaaggaaataagcgtagatgtgactt

SEQ ID NO: 3611 - DNA, 201 bp, Bos taurus
aaaacataaataaaaataaaaattgatgcaaaaaaatccatgatgaacaaagaataattaaaaaaaaaaagtctataagatcagggcccagcctgttgccgcagtgctttgaacactagctggcatgtggtgggtgaatccatgcatgaatgaaccttgaaagaaagcttcctccagcattaccccatggccagtgtccct

SEQ ID NO: 3612 - DNA, 201 bp, Bos taurus
ttccctggcagtccagtagttaagattctgtgcttctactgcagcagcacgggtccaatccctggtcatggaaataagatcccacatgccgcatgatgtggccaaaaggggctacggagatttttttaaaaagaaaatgctaatggtcacattagtttggcttttcaacaaagtccaaaatagcaacgacctataaaaaga

SEQ ID NO: 3613 - DNA, 201 bp, Bos taurus
tcatcaaaattacagaaaatctatatcattaaataccttgagcataaaagtggtatcagagttgggactgagaggggccataagtgggaaactgaaattcagaagatgcagaacaggaaattttttgacaaaaatgtccctagaattccttgaaaaatgacagaagactggatgtagggctttggaggggacagattatct

SEQ ID NO: 3614 - DNA, 201 bp, Bos taurus
gacaagtccttcaggccacagctctacttctcactgtggcatttggtgaaggcctttgagccacatgaaggaaatttacttaagccagccccaggcagaattgggtaccaagcccattccctaggccacagctccttctaacctgctgcccccttgtagctgagaacggtcctgattccttctgctttctttacacttgat

SEQ ID NO: 3615 - DNA, 201 bp, Bos taurus
ctaacctagaaaactgtgatttgtaatgccagcgactgtgatggccataaattggatgatgcctctccatccttttcaacgcctgcactatctccaggacgtgaacatgatgaatacatttgggcctgacaaagtgatatatatgtatatcacttctccatatatatatatgtgtgtgtgtgtgcgtgtgtgtgtgtgtga

SEQ ID NO: 3616 - DNA, 201 bp, Bos taurus
ttggagtgctgttaaaatatttttttattgttacctgtctttgcttgatttttggatgtttttacatgtaattttatgtttaactacattttcctactctctgggttgcatttatattttcttctttgtacaatctgatgattttggtcatctcatgtgcacagatgactcattggaaaagtccctgattctgggaaagat

SEQ ID NO: 3617 - DNA, 201 bp, Bos taurus
ctttgcgatcccatgaatcacagcacaccgggcctccctgtctcaagcacattgagggtactgaattgaatgtacacagtaagtaaatcttaattgctcacatagttgaaaataattttatcatattgaaagaagttctcaaaattgcctaaaggcacagttttataagctgttgatcaatatctatactacttaataaca

SEQ ID NO: 3618 - DNA, 201 bp, Bos taurus
tctggttttctcaacaaagtgggcatgtggctcagtcctgttggactgttttgtgacggtcccagtgttcatggccactgcagcggtgggcccagatgccctcgggtcagacactgcttgtccttccgctccctgggttcgcatcaccatggaagctagttcaggcctagtgttcttccgctgaggcagtatgaaggccca

SEQ ID NO: 3619 - DNA, 201 bp, Bos taurus
ttttaaatatgaaatgaatatatgtagttatgatgttttatattatctgtacttagttttaatgctattataatttgattcttccagtatctcaactgttgtctcagtgaatattcagaatcagtgatataaaaaatcaacggcacaagtagaataatgtgttaaaaggcatcagtctcaccatgacatgcccttgctttc

SEQ ID NO: 3620 - DNA, 201 bp, Bos taurus
gaggggcttctctctcaataaatgattatttcattctccttactctataaatttggttactcaattttatattaacagtttccatgatgaatgtgggcttgctggtggctcagatgctaaagaatccgcctgcaatgggggaagatctcggttcaatctctgggttgggaagatcccctggaggagggaatggctacccgc

SEQ ID NO: 3621 - DNA, 201 bp, Bos taurus
cagagtgaaaaattctatgagaaaagctcccgtatccagtctgctagtcctcttgtccttcccctctcccctttttcttcccctctctactcaagaactggaggcctttgaaagtgaacctactcgttgtccaaggcaaaacagaacccaggtgccatgacttttttcttgggcctcttactattagtcattcaaaataat

SEQ ID NO: 3622 - DNA, 201 bp, Bos taurus
gtatatgcaaactacttaattttgcaaaaaactctcatgatcacttaactgcggaccccagggcctttgatgtttggcttatccttccttctgtgtggcccacattgccccatcaatgggatggcagctcagtaccagtttacccctaaggcaatatgagagagagattaggaagttcaagcttatcaagttcattaacat

SEQ ID NO: 3623 - DNA, 201 bp, Bos taurus
gcttaacaaaattaccaccttcaaagagaagaatagttcttgatagcattcatagtaatgcttccatttctctgtggaaacataagcgggaagcatgaagaagacaggggagagagtctcaggaaaagcaactggcttgctttcattcctgtgttcactctgccttatttctcatgtattctatcttaaaatagcaacaca

SEQ ID NO: 3624 - DNA, 201 bp, Bos taurus
ttctaaaactgtcaaatcatttattcacgatttgcttttgaacaagatttctttatccatctctaccactgaatctgcagatctctcaaaatgcaagcaaagtggcctccttttattttctaatacccggaaacactagctgcctttctccccagctgctttcctgcccatgtcccttttatgagaacaaacgttgccatt

SEQ ID NO: 3625 - DNA, 201 bp, Bos taurus
cccatggactgcggcccactaggctcctctgtccatgggattttccaggcaagagtgctggagtggggtgccattgccttctccatgtaacagcctaaggattatgtaattactggatttgaaatcatctatattttgggtctctgcaaaacttatacataggcaaaataaattgcatagacagaaggataaagcagatgt

SEQ ID NO: 3626 - DNA, 201 bp, Bos taurus
gtgtacctggaggtctaacagactacctcaaacttagttaagtccaagaccagaccactaacattcttttcccttttcccagcatgtttccaccacagccgcccagcggccacagaggtccctttaacatgtaagtcaggcagtcactcctctgctcaatgctttcactacttatctcatggagaatagcatgcagaatac

SEQ ID NO: 3627 - DNA, 201 bp, Bos taurus
aatataaaacagcaaagaaaacttgaggctgagacttcaccttcaaatgacaaaagacatgtgggttacttcttagcaggagtgaaacatacacatttcaatgagaaaacgggaagccagaggtcacatttgctgtggaacatgtttcaaggtggaatcaatatcaaaatgatcattaaaggtaccatggagggtgcagag

SEQ ID NO: 3628 - DNA, 201 bp, Bos taurus
ttgacttgcaaatgtttaaattctcaactctgaggtataaaatgcaacaatcaaggtgtaaaaattcctaaattattagatcagactatcacacagggtaacaaaacactaaactagtatgggtataaagaaagagggagtatgaagagtctagggacactgttttccaaatttcaactcccccacattaccaccaccatc

SEQ ID NO: 3629 - DNA, 201 bp, Bos taurus
cttgacaatgaacaaattctattgggaagagccagcagtcctgggaatctggcctgaggagccttgctcttaaattctagagaatgaatggagcaagtaaaaaatttggcataataatttatttcatagtggtcttattgcagagcctcagagaaatgtggctataagaacattcctggcatataacagaatgtctgccac

SEQ ID NO: 3630 - DNA, 201 bp, Bos taurus
agattttatctgaaaaatctgcactccccccaaaaaacatgtagcttaaaacccttttctctatgtaaaattcttagagcataggcagaacattctgatacaaattataccaatattattttggacatgtctctcaaggcaaaagaaatgaaaacaaacagaaacaaatagtgacctaattagacttttgcttagtgaaag

SEQ ID NO: 3631 - DNA, 201 bp, Bos taurus
gcataaccaagtaggaacatttgagctaggctgctgagattctctggccaaattgaattggaaaggactgaatcataccctgaagttgaaagaatttctacgagtattttacaaaaagtccctatctccgtatctactcatccgcttccatctgtgcccataaaccctgcctccctacgtttaccacaggtgtactaactg

SEQ ID NO: 3632 - DNA, 201 bp, Bos taurus
ggaaaatctgttgaccatgaaagggtcattccagaggcaaaagggaagaattagaagggaacagtgagaaaaatggagtagggagagaaagcacagaaaacatgggaataagtttacaagaaaagacaggtgtcaagaatagaggaatttaaggtggtatctgaggatggggtatgaaggaaggcttgatctctaagatcc

SEQ ID NO: 3633 - DNA, 201 bp, Bos taurus
ttatctgacctcatttttttttttcagttgcctttagggaacaatatgagaactctacttagttctaatttaaatcctatcgattcttatcaatataaatcgaagattatacaaaattatatattctattgacttggataagaggcagttcattgaattctgctaaaacagtttttatattaaagctgattcattttattt

SEQ ID NO: 3634 - DNA, 201 bp, Bos taurus
gcttccaaaatgggtatatattactaactcatgtattctcaccaacatttagaaagtgactccagggactgtgctctgagaaatcagatactttctgggatttgtagccatgggagagagatttttaatgctttctggtgagaaaagccatttggaatcattgttggaaagaagatgcaattgtgaaaagctacagttggg

SEQ ID NO: 3635 - DNA, 201 bp, Bos taurus
gatcaatgcatttgagtgttccacagcctggttggagactgtaagtagtatgtgaggtgaaatgaacaggaacggggacgtgacgtgtctaggataaatgagactcagagagagaaagattgctggggaaaaataatagagttcagatgtaaacatatctgactcagggactgtgctggaaattaatgaaatcaataggca

SEQ ID NO: 3636 - DNA, 201 bp, Bos taurus
cttgcaggccaaagacctagtctacaaaatcatagactatttttatacgttttggtcaaaattattttaatcaaaactatttttataccttttcaatctcatggcctaataatattttccagaggttatgtgatgtatagcaacacaataaattgacaaagcagcagacgtgagactttatagctaccttctattaaaaaa

SEQ ID NO: 3637 - DNA, 201 bp, Bos taurus
gctgtgttcactgtggctttctgctatccctttttaaaaagttttatttcttcacgcattgataatgtctttatcttcacccaggcccaattaacttcccccagcttttcatttaattagttctcatcgtccttttcaaggtgcaaactgactcctgacttggtgccattttgcctcattatcaggcccccattctaaaat

SEQ ID NO: 3638 - DNA, 201 bp, Bos taurus
aaccgctggggaattgtgagaaaagtaaaatatgttacacatataaacacacaccttcgaataagctcaatgaaagaaacaagttggccaatggttgagaataactactggattattatgggaagatgctagctcgggtattccctattccctttgctgctcctgtctctgacccaagcagttacaaaggcttatgtgctg

SEQ ID NO: 3639 - DNA, 201 bp, Bos taurus
acttcaaagaaggtgactgggctttggccatcatgcttgcccatgcagctatgtgtaacatggtctaacggagaacactgcacctgagagagatctccacttggagcctggccagggaaaatctggagaacccactgaagagccagcacatgccccccaacagagacactgcgctctgcctccttctacacagactcgagc

SEQ ID NO: 3640 - DNA, 201 bp, Bos taurus
attggccaggaatgtatttccccctgaggctcaaaagctttaaagccacataaaatatttcattgttttgtgattcatggtgctaggacatcttacatcacactcagttaaagaacagggcctgttttccccacatcagctttgcacagagaaactgaggaacgcaaaagcaagtgacagtcaggagtaaaatcgtcactt

SEQ ID NO: 3641 - DNA, 201 bp, Bos taurus
tgcagactatgaagcaagatgcctagtttgtttaaaggctcagcaaagaagaccattttggctaaaagagagcctggagaagtgtggagaaatgacatcacagatgtaacagggggccataccatcgcctcggagcaaccagaactctattttttgaatgcattataaacccactggagggtgaagggctttgaataaaat

SEQ ID NO: 3642 - DNA, 201 bp, Bos taurus
ccgaaatcctgaaatagatatggaaagaaatggtgtcgagggttcacactgagcgaaagcacgcagggggctttccagaaccttggaggtggagcttctcgggcctggagagtctcctgaggggtcgagaggagaccgccaggctcgcatgcgcgtgggtctcaggttggacacgggtgctgtgtccagaactgcccgggc

SEQ ID NO: 3643 - DNA, 201 bp, Bos taurus
agtttttcctatattatcaatatctaatcgcttatttttattccttgaatttcacttttagcatcattttttttgtttgtttcataaatggcattttctcacttttctccctgaagataccaattatggatttttggaagtttatttttctgaattgtttttgactcctttagtctccttattttggtttatttggcatcc

SEQ ID NO: 3644 - DNA, 201 bp, Bos taurus
ttaaaaaagcacttctgtgtatttttcctgctttgggttcttttcccttcctaatcttcctccttaactcctatttatttttcaaaccaacacagtcattatttgcttcaaaaagtgagtttatatcccatcaaagttaattttgactttattatctatgaacatcagtcattgatttgtctgatttccacttaaaactgc

SEQ ID NO: 3645 - DNA, 201 bp, Bos taurus
agcatttgggtggaagggcttattttcagcttcagctgaactgctgattggtcatgtattcagttgaaaacttactaacttaaaaaatcatttagtgagagtatgtgataaaatgaaacagttcctgatctcaagtaacttgcagttgtgtgtggggtgcgtacatgtaatttttttgccaactaaaggcagcagtagcca

SEQ ID NO: 3646 - DNA, 201 bp, Bos taurus
ggtggtgtttggaatttatttctgtaatatctgctccaggacgtttcctgagggcagctgtccttagcagccacccaggccccgtagattggaagtagaagtgttagtctcttcagttcagttcatttcagtcactcagtcgtgtcccactctttgtgaccccatgaattgcagcacgccaggcctccctgttcatcacca

SEQ ID NO: 3647 - DNA, 201 bp, Bos taurus
attaattgtattgctcttaaaaatatgaatttgtttttaaagtgcacagttttcagtactgttacatacgtattctttagcttagattctaatctgcacccagttctatggaatctgaagtaacatatctgaaatgaactgtagtaccatgttgcttagcaacagtatgctctttagacatttccccctctcctgggactt

SEQ ID NO: 3648 - DNA, 201 bp, Bos taurus
aggatggatcgtgggagagaggtagagaggaaaataagtactgcatccttgtaaatagccaatagttgtacaagtgagtttagaaatgttttcaagagagcgaacaagaacattatggaatgagacaagaggaagactccaacctgctaacccaaattatctcccctgtcaacctaagatgcctgaaattacttcaatttg

SEQ ID NO: 3649 - DNA, 201 bp, Bos taurus
ttttgtagaaacatttttctcaggagttgcagttaaattatacatatccccctatacataagcattcagcatatatgaagttgggtgcagatttattaacatataaatgaccctgttaaacttcatcttcttagatttgcatctctcttcaaaggtttcccttaaacaaaattctttatctaaacttaactacgtcttcta

SEQ ID NO: 3650 - DNA, 201 bp, Bos taurus
ctgaaatgatatactttaaattcttaaacagatctgtaatctctcaaaattaaattttaacaagtaatgttatgacaattagtcaggtgattgattcaagatagtcaaagcatgaacatttctatttgcaaaactgttcactccaatatacaagtagagttagtatatctttccaaggtccttaaaactgctactgtttac

SEQ ID NO: 3651 - DNA, 201 bp, Bos taurus
aactgagtcagacttctaagtaatacttggtataaaacttgttaaaaagcaataaaaactccatttttttttttgttatagcatgccaaagaactgaagagatcccatatatttttataactttcatatactttgctcctggatggccttctcttagaataatttttctttcttgtcttcctagcaaattccaaggtgttt

SEQ ID NO: 3652 - DNA, 201 bp, Bos taurus
gaagtcatcaagaaatgatgatgtatcaaaacccattttttaactgtaaatattagaatgtgtgaaggggaagtcaggaaaatcatggacaattgatcccctgttggtctcttattctacaaagtcatagctcttcccaactaagacttgccttcattgggcccacccatgtggtacattaagcctgtgtccatgctggtg

SEQ ID NO: 3653 - DNA, 201 bp, Bos taurus
ctagtcccaagcttacaaactccaatactttcagtcgggaattccacctgggaatgtttggttgaaatgtgatgcttctggggccccactccaaacccactaagtaaaactgttgagtcgtgggcgatggaatctttacggtgaacatgtgtgtgatccccaccagtgtgcctctaggaatcatactttgggaaactaccc

SEQ ID NO: 3654 - DNA, 201 bp, Bos taurus
cacctctttcttactcctgagcctggttctttccctcttcctttgagtctggaaattctgaaattgatttctgtacctgtgttcataggtaattgagtccataggtagcgctaagaacagaaggcccagagattcctttagtgtctttccatcttctacctgggccttcaaactctattaaaatgccactgaaaaaaattc

SEQ ID NO: 3655 - DNA, 201 bp, Bos taurus
acaaatttcagtgtccataagtccagttttcttggcatatagccatactcccttgtttatgtattgcctgtggctgcttccacacagcaatggccatgatgagtagtagacaacatatggcataaaaaaaaaaccttgtatagtcactaactggccctctacacaaaaagcttaccaactcttgtcttgaagcactgtttg

SEQ ID NO: 3656 - DNA, 201 bp, Bos taurus
gcatataatgaggctcaaggtctactgaaagttgaatcttctgttgtcttaggcctaatgagttcttactagtttttgttctattccccagtggccttggaattcttttaaagtctgtgccctggcccgttccctcttgtctcactggcatatttacattcagccagttgaccaaatgacttaatgaaaatttattaccca

SEQ ID NO: 3657 - DNA, 201 bp, Bos taurus
ttttaaaactaacagtttacttatcataattttgaaaaagaacttaaagaatggttaacttctagaaaattagtactggagaaatactttttttcccctcacaagtttagtttgtaacataaatcagagtatgtgcattttcataatttagttttaaacaaatttattaccacttcctggaagatcccctggagaaggaaa

SEQ ID NO: 3658 - DNA, 201 bp, Bos taurus
cctcccctgggtttcaatggagcccaggggcctttaatgtgtaggcattattctctgtctagaagtgaggcagtatattttcatattattctaaaacataggagctggccatgccctttatactttcttttttcttagaatgggttttgtccttctaagacagttaaggcagaaataaaatagagttaaattccatttatc

SEQ ID NO: 3659 - DNA, 201 bp, Bos taurus
gagtttctcataggcacatattaacatatctggcagaaagtaaattctttctgctccaattaaagtagcaatttaaaacttggtgaggactagtattttgaggatcagtcttttcaagttgcatattataactaaggaccacattactaactcagaaataagcctgattgtagtattatcttggcagttacagctagctga

SEQ ID NO: 3660 - DNA, 201 bp, Bos taurus
caggcaaccaggtgcttggcgagcacactgtcccaggaggaccatgcatcttaatcaccttcccggttctggctgcttggtttcccgggtgtgctgcgagagcactgtctcaggtgtgtctcctctggggagatgatctcaagctttgaccctcctggcagatgtcaacggtccaggatcccaggaagacttggttaggaa

SEQ ID NO: 3661 - DNA, 201 bp, Bos taurus
caatccaatctacactcagcacacacacagtagttttaaagcataaaccaggtcatgtcaattacctgttacacaactttcaaaggcctttggacactggagctcacaaagtaacagttcctgcatccttctcaaacctcatctggtgcatatcatacccctttcctggctatgctcagccacctaggccttctctctctg

SEQ ID NO: 3662 - DNA, 201 bp, Bos taurus
ttaccaactgagctatgagagaagctacttaagccctaattcctggcttctgtttctctataaaccagaaagagaaagaaaactaataagtgagaactctttacagggactctggtgtggaatgttgaacaagaggcttgcctgttgatttgatagtagttagcaggttagagtcaaggttaaaatgttttatgaaaggat

SEQ ID NO: 3663 - DNA, 201 bp, Bos taurus
taataaggaatgatcttataaagtcaggttgaagttactggtggtaagaaatagaatttgcatccacattgtagtctgtgttgtatcagtctttccatatatattcagttcagttcagttcagtcgctcagtcatgtccgactctttgcaaccccaggaaccggagcacgccaggcctccttgtccatcaccaactgccag

SEQ ID NO: 3664 - DNA, 201 bp, Bos taurus
cacttcttacttttcattttttctttccgttccactcacacttacctattttaagtcaaaattttctgttttcctctagtcttttgctctcaagtacatcgtgcttgctgttctaaatgacacacatagaagtcaatcagatcatcctgttacttcaatgctccttcctctcctatgtctccatcacctacaaaataaaaa

SEQ ID NO: 3665 - DNA, 201 bp, Bos taurus
aagagttggacacgactgagtgactgaactgaagagattttgcctacagatatacatacttgatgtaatacaaagcctaaaatttcatggtcatcatattgcatttattaaacagagtcttgaacagatggaagaaaaataaatgttgctcttgttccggtatatttaaaattattagtaaaactttcgtgagtgtggatg

SEQ ID NO: 3666 - DNA, 201 bp, Bos taurus
ctcgaccgtcagtcctctgtccttaccacgttctggttttgctttcacagcattcttaatcacagtcttccaactcgcttggggaatactaactccatttatttaatcttctaacctcatctctctcctggctttaatttctgactttaaccaacattttgactttatcaattctcagggcactttttagttcttaaaata

SEQ ID NO: 3667 - DNA, 201 bp, Bos taurus
ttctgtattactgtgtatacgtttccctcaaactgctccttaaagaatagaatcttggttacaagtacccagattttagagcctatattacaattttatttcagtttctgttcctaattactattgctcaaatttgtttatagtataattgcaggaaatgtggtcttttttcagatgtaaatatggctttaatgataatta

SEQ ID NO: 3668 - DNA, 201 bp, Bos taurus
catctggagcacctctatatgcagtgaatggagttgtggcattttcaggccttccaggatctagacttgcaactctgatagttgctccaaattggccatcgagccaactctataaggtcaggagcctaggagatattttgctctattttgtagacagtgacaactgagaagaaattaatggccatgcattcactatgtagt

SEQ ID NO: 3669 - DNA, 201 bp, Bos taurus
ttttcacaggtgtataaatatgtcactaattaccaaattgtacactcaaaatatatgtaatgtattcaattatacctcaagaaaaataaaacatttctggcgtgggcataatgttttaggaaagttggatctgagaaatggtccttgttaagagcatgtttgtatctcctcaaaattcatgtgttcaaaccccaaccccta

SEQ ID NO: 3670 - DNA, 201 bp, Bos taurus
aagaaagatttgcaagctctttggaacatgggtaaaaacagataatgacaggaaccatagagataatccggctaacatataggtggcctcagtcagccatatgacttgaaaatagatatctaaactgttttcattaagttcagttcagttcagtcgctcagtcatgtccaactctttgcgatcacatgaattgcagcacgc

SEQ ID NO: 3671 - DNA, 201 bp, Bos taurus
gatgactattggtttcatgtcattgttttggatggacagctcagagactctacttgtcagggtagattttttttctgtgaaatgtgttatgtgtggttaacgtcctatttagggccaggcatcatttgctggaagttatgtagaagcttatgcttggaaatccaatttctaaaaataaatgagtaagcacagtaaagatga

SEQ ID NO: 3672 - DNA, 201 bp, Bos taurus
attatggagactaatctcttccattaaatttcctactggttctgtttctctagtgatagtcagacagatatacctcctatatagccaattcccttaaatatgtattgaggccactgttgaatcagggaaaagatcaaacttttctttttaatcaactaggtgttgtggttttattttactcacactcacaggttatcaata

SEQ ID NO: 3673 - DNA, 201 bp, Bos taurus
aggaatgtgtaaaaagtgttataccatcctccttgagtgaggcaaaagaatctactcaatgaggtaatattgaccagtgatctctggcctagtaattttagctacatagatatgtcttctgttatttcatcaataatatctttataaccaattttaaatagtgtcataataagcataaatgcaaatactcagggccaactg

SEQ ID NO: 3674 - DNA, 201 bp, Bos taurus
actctactaatttgtattctttaattccatttcaagatttctaaatacaattaaataaaattgcataattatgctggtttggctccattaaaacttcatacttctcagcctcaataagcagttctcattaataagataagcagttctcttaatcattcttcatcccattgcacattcctttcagaaaccgttaaaaacaaa

SEQ ID NO: 3675 - DNA, 201 bp, Bos taurus
tctccctttcatttaaaaagctgaaacttgtttattttaatatccttgcaatttacaagtgtttaaaagactcaatgggacatcatatatttgttgaattagttttattccccttatcaagcataagaaacaagtgtgtaccaagtgcgatctgaaaagactacattcagcttaatttcatagaaggcaacactaaactga

SEQ ID NO: 3676 - DNA, 201 bp, Bos taurus
taatacagggcaaaatgtgttagctgttgaatagaactgacatccttgattccaccaccaatcacctatctgatctcaagcaatttattaaacagtcaacctcattttcttcatcagaaaaacaaagttaatgtaaacataccttgaagttttttatggagagctaaaaaagatatgtaacattttcaacaaaatggcttt

SEQ ID NO: 3677 - DNA, 201 bp, Bos taurus
gggtggacaacaaagaattacagaacccaaacatcaataacgtcactgaggagaaaccttatagatagagaacatttgttttgacatactgtgtgtgcatgccaagtctcttcaatcatgtctggctctttgcaatcctatggactgtaaccctccagggtcttctgtccacaggattctctaagcaagaatactggagca

SEQ ID NO: 3678 - DNA, 201 bp, Bos taurus
caaatatacgacagcataaagcagagaactatggtgaaagggcaatgttttggtgaccagggaagctgggctttgaaacctggctccagctgagtggcctgacaagtctatttaactaatgaggattttatctataaagcggaaccaaaattattattatttgttggcttagtcaactagggctatgctaggacagaatag

SEQ ID NO: 3679 - DNA, 201 bp, Bos taurus
ccgcacccccaccttgttctgctgcgggcacaccggcctactggctattacttggacactccagacctgctcctaccttcggccccttgcactagctgtatcttctgcctagaaaaaccgtcacccaggcagctccaagattctctgtgatcaacttccagtctgtcccgccctctggcctgtgttctagattccccttgt

SEQ ID NO: 3680 - DNA, 201 bp, Bos taurus
gcgtgaacagcggcccgaggtggctgtctgctgcgctcccaccccaggaagggcacaattacgcctgcagaggaggatcaaggcttccgctggttgaaagacccccctggcacctctggcccgccccggcaccactgcaccgcacaggattcgggcactcccggcgttgccagttccgagacgcactcctggcatctgcca

SEQ ID NO: 3681 - DNA, 201 bp, Bos taurus
cagccggagttggagcgggcccggcttagaaaccagaccggatctaaggttggacccgtccgacttagaaagctgatcgggtcaagggtcggaccaagaccggttagaaaccagattggttctggccctgactggttccgacttaaaccacagcaggcccagcgtaagatagagctttggtttgaggcggaataagtatgt

SEQ ID NO: 3682 - DNA, 201 bp, Bos taurus
catcggggttcagtgcttacttcagggccaagttgagcatttccatgggatagatagatttttctcaccctcttgtgaaaaaatacctgagtgtatgagggtagcctttcttggcctctggtgaacttttctgtatagaaaagcagccagccatatttagcagttttatccagcagcatgaatcatttaactgccttggtt

SEQ ID NO: 3683 - DNA, 201 bp, Bos taurus
gtcatttccttcactgtcccttcctccaaagcatgtgagagtaatccataaattacgttcagaaaagggaatattcagaaacaataagaaccacaaagcaatcttcagttggtcaaaagtgttgtacttctccaggcaagtagaaaattctaatttgccttctacctcctttccaagcctctactctgtgcctttgaagat

SEQ ID NO: 3684 - DNA, 201 bp, Bos taurus
agagtagagagatcacccgggttttcttaatatctaagatttcatgggagcaaatcacagacttaaaataatctatcaccttggaatcatagaacacaagatattatttgttcaaaattttattttacataaggggagctatgaaccttagaaaaaaatttttttagtgatgtgtccaagattgcagagcgatgcttctct

SEQ ID NO: 3685 - DNA, 201 bp, Bos taurus
ggcaagaattcattgatgtaggtactctctttaggacaaacagtgtgaaaccttgccaatgaatcctgaggtaagaaacgtggaaaatgatggccagcaccgagcaaagtggatttcttgatgtcttcacagagagtagaggaagggataaagagactgaggaaagtgggcctgctgtgaggtcagaaggctagccagaag

SEQ ID NO: 3686 - DNA, 201 bp, Bos taurus
cagtcataccaaatcagatcattgtcaacccaatactctcctggaatcaattcgagtacttttttctcacatggtttgctgatctgatttagacttctaggaaagctctggacagattatgacaaaagactgctgctgctaagtcgcttcagtcgtgtctgactctgtgcaaccccatagatggcagcccactaggctcct

SEQ ID NO: 3687 - DNA, 201 bp, Bos taurus
acacacacacacacacacactcattcagtctcccaaaatatccacaagtaattgacctaatgaattaatttaaagctcaaacagtttatgtggccactggtgaagaaatttgctctgctacttcaaataaacacaactaaatgcctgccagggattgtagcagacaaacaatagcaacactgtctcctgactatagactct

SEQ ID NO: 3688 - DNA, 201 bp, Bos taurus
ttaaacatacaacacggatcatttgtaagaacttgatggaaccatcagggaacatttcttttcccagatccggaaagcagccaaactaggctggccatggctatcaaacaattacctagtggggatctagcgggcacatctttcaaagggtttctgggtttgtagctcaactgatttttacatacagaaatattggcaata

SEQ ID NO: 3689 - DNA, 201 bp, Bos taurus
gaaaacttaatggagctgacataaataagatgatcttaagcttgcctcactctaaactgctttttttgttgttgttgccttctggaaagttgctggatcattgaacattaatgtcacgccagggtgtagaagaaaaactggtaaacaacactaagaaggtgaagtaggtccagaattgggccaggcagatcttagggtcat

SEQ ID NO: 3690 - DNA, 201 bp, Bos taurus
ataggactactttcagttctaaggggttggccgttgctgaacagcagtgcatagaaataatccttggcaatcccatgggtgacatttctccttccttatctcccatgctgcatgcggccagaacttgataagacacccagaaagaagataatggctgctatcaagctgtctaggtagaaataataataataatctgtttat

SEQ ID NO: 3691 - DNA, 201 bp, Bos taurus
gaatctgaatcaagcagaaataataaaatatccagcatttggccaatcctatgtatgttaaatcattcataagtaaagcatctcaaagccctggcatagagttcaaagtaatctcattttgaggccctagaaattaagattcaactctaagtaataacaataactgcaagtagctacagttatcatgtaatatttttataa

SEQ ID NO: 3692 - DNA, 201 bp, Bos taurus
caaaattcactggacatgacacatttaactgtatataaagtttttacagcaatttaaaggaaaaaaatttaagtggttcacttatactcaacatgtaaacccagaatgaaactttaaaaaaaattcatttaaataaacactcattgcaaatgacaagtgctgtaataacaacaacaaaaaaaaatgtggaaaatactcgag

SEQ ID NO: 3693 - DNA, 201 bp, Bos taurus
tgggagaatcattggccaaagcagagcgcatatgcttgggcagggtcttgccagtgaggtatagggatacggagcagtgcaggaaacactgttgagggcaagctatgccagagagccagggccaccaggttggaaaggaggtgctagatcaatttcttggtagagcagagatgaagcgcatatgagacgacgggacaagcc

SEQ ID NO: 3694 - DNA, 201 bp, Bos taurus
cccaactgtccttgtctggccccagccaggactagatcacgtctacctctgtagattctctctccagctccagctgaatcctagatttctgtaacctcagggtcatcatgcaaaaatataggccagagtgtaagtagcccctaccctaggatcaggattatttaggcatttttgttgcctggttatgatcatttcaaaaca

SEQ ID NO: 3695 - DNA, 201 bp, Bos taurus
gaaagaagttagataggcctgttggctaagcttttccaacagcagttgccatttttcccagggaaaaataaaagtgttgcccttaaacaaccagcctccgatatctaggggtgtgtgtggtggccatgcacacacgtcctgttccctctgaggccatatgagtaacttgcaaagattcttgtgtttaaaggctttctccta

SEQ ID NO: 3696 - DNA, 201 bp, Bos taurus
ctgcacggccacccccagtcctctgcccagatctgtcctctgaaacccaagattcagcacctagccccgacccgcactcgcagacacatgaatggagctggggagtgcagcaaggtggccgagaccaggtgtgctggtctctcttttctgcctgctgaagccaattgctgcactcttctctgagcctctgacgcttccgtt

SEQ ID NO: 3697 - DNA, 201 bp, Bos taurus
cgtggagtgttaactctcctctggatttctgagttgaatactgcctcctcaggcaaccactaaagacacctaagcctttttggatctgggtgctaagggcgctcctaaagctatggagcccacagagcccgggaggctgaagcaaccgctgatcttagacagtgatcacagggacagccacaggactcaaacgtatcagaa

SEQ ID NO: 3698 - DNA, 201 bp, Bos taurus
ctcctggtaaaactttccaccccaaagtcaatgctggtgaaatactttctctgagctgaatggtatccacctcttggttgatggccagcgtttgcaaatcaaaaggacctgcaaggtgggagcacttattgtccctgggcacagaaatacactctattaggaccacgttcatgactcaaatgctcagaggccaatgcatta

SEQ ID NO: 3699 - DNA, 201 bp, Bos taurus
cctgtgactgaacatgcagagcctcttactgttcagggtacagcaaagcagcaggatggctgcaatggggtgacccaaggagagaaatgcaggacatggtctcagagggaggtagatcccagatgcatggagagccttgtagctaggaggaaacacaatgaaaaacctctgcggagttctgagtgggagaatgactagatt

SEQ ID NO: 3700 - DNA, 201 bp, Bos taurus
aacaggaagtacgtggtccttcagtacttttaccaaggcatgtgaactggtaggcacacttcagagtgtattctgaattgggatggaattccggcctaacgctcggctctccttaaatgaatccctgcagtcagcaagctggcaatttatgtgcactacccaagatacagagataaataaaacatagtgcctgccccagag

SEQ ID NO: 3701 - DNA, 201 bp, Bos taurus
tgcagaagtaacctttctcctcacagaggcctgacattcctgttgaaatttgaccgcttgggaccctttgttgtctgagctacagccttctccagcctctgggttacccaggccctaaggagaccagctgccttcaaagaaaaaccctttgaagatgtaggcaggataaaaaagcaagagatgagacactgctgtctgcag

SEQ ID NO: 3702 - DNA, 201 bp, Bos taurus
aagcagggccaggaagaggctcatgaataattgtaattgggtaggaacgttttcttcttgtggcttgcctaagactagacttgaagaaaattaactgatcgcaaacagaccggtatcgctgcacactcactaagaggttttgctgtaatctttccaaccctttgcactgatgtaggtcctctgggtttgcagagctctctg

SEQ ID NO: 3703 - DNA, 201 bp, Bos taurus
agcccgtgcctcctgggtagccacaggccacttcactgtctcacctgtcaatcaaagctctcttggggacctgcttttaggtgagggcagtagaaccctcgccccaggccatctgagtacctgaaatctgaagacagaaataatttacaaatattctccttctcggacttccctggtggctcagacagtaaagaatctgcc

SEQ ID NO: 3704 - DNA, 201 bp, Bos taurus
aacaaaaactggccaccatctattgagtcttactgtgtagctgacattttatagacatgactcatttattactcacaacacctcaacggtgtggaagaggaaactaaggcctaggataactataaggtccaaggtcgagtgcttagtaagcagccctaactagcccaggatctgtcctctgcgggctagccgcatgaaact

SEQ ID NO: 3705 - DNA, 201 bp, Bos taurus
gaagcagaatcaactaactaccaaagacatatgatttaaaatcagaattctggaaagttacttggtttctttgggcttcattttttcctctatagaatggacagaaaatgataacgtacatgacagggttactgtgagaactgctctaacattgctgcttcatctctcatctctccaccaggtatactctgcccaaaacta

SEQ ID NO: 3706 - DNA, 201 bp, Bos taurus
cttgttcttatcaagggctgggggatggccaacggctgtttaggcctctgtgacctcacctttgttgttgttgctgctgctgtgtagttactaagccgtgtcagactcttttgcaaccccctggcctaaagcccaccaggctcctttgtccgtgggatttcccaggtaagaatactggagtgggttgccatttccttctcc

SEQ ID NO: 3707 - DNA, 201 bp, Bos taurus
tggactgcaaggacatcaaacagtcaatcagaaaggaaatgaatcctgaatattcattggaagaactgatgctgaagctccaatactttggccatctggtacaaagagccaactcaccttttccacctggagaaaactctgatgctgggaaagatgagaggcaaaggagaatggggcagcagaggacaagatggttagata

SEQ ID NO: 3708 - DNA, 201 bp, Bos taurus
gaagtgtgttttatttacaattttatgttactctcagtacttgagtgcaatctcaaaatgacagaatgatctctgttcgtttctgtgtgacatgacaaaatatgatccactggagaagggaatggcaaaccacttcattattcttgccttgagaaccccatgaacagtatgaaaaggcaaaaagataggacactgaaagat

SEQ ID NO: 3709 - DNA, 201 bp, Bos taurus
cttccatctccagagaagatttgatttccaaagagcaaattgtgatcagatcttccaggcaaccacagagtcagaatcccaagctccctctgtccatactaaaggaaaaacatctcagaaatgctacccttggatcagaagagactacagaacacactcccagtgatggtaggagatggggaaagtgggaaggggctgggc

SEQ ID NO: 3710 - DNA, 201 bp, Bos taurus
gaagggaaagagggaaaatggcagggaaagaagctggagggtgaggctgcagcctcctcagtgggctatcctcaaactgcactcccagcctcccagctgctcctcctccatgtgaaaagagcaggcagctccatgaggaagagccctggttccgtacagcccagccccagctcaggcttcactagggaggaggcgtagagg

SEQ ID NO: 3711 - DNA, 201 bp, Bos taurus
gtttagctttcatcctgtccatttttcagaaacaaagaccctgcaaccttttaagccactaactcctttaaatataataacttggcagtgtccccttcttaagtcagaatctctgttgtcttgcagtcaaccaaaccaggagccttggacaagagactatggctgagagcacgtggcggtgccctccttgcgatgaagact

SEQ ID NO: 3712 - DNA, 201 bp, Bos taurus
gtgggatagggagggggtagttggtgggaaaggaattgaaagaggggagagcagacctcctggagtgtctggagactcagaaaaagggtactgtggccccgcagcccttgacattgctcgaggactccttgctgatgactttgaggaaaggtctagcgtccagagtccctggaggttgagttcccttcttaggaaattgcc

SEQ ID NO: 3713 - DNA, 201 bp, Bos taurus
ccaagggccccctccctcccaaggagaaaatcccacaagtggggaacatctggatcaaaccgcaaccatgaaagcacaacatcaaacgagggcttcggagcgaccctgcccacaggccctgctccaagagaaactgcagatcttcctgctctaagcttttaagtgtcactgaaccactcaagtttgggatctccccttatt

SEQ ID NO: 3714 - DNA, 201 bp, Bos taurus
ggccccagggtgcaaacccatattgggtcctgaaggctccatcccccagaggccattctctcctcagagctgagggacttccctggccaggctcaataaagatgttacctccactcccacacccatttacactccactcacagcaggagcctcctggcctccagggcctagttttacctcaggccagtgctggggacacca

SEQ ID NO: 3715 - DNA, 201 bp, Bos taurus
cctgagggtctcaggaagaccccacaagcctttgatggggggcagcttggcttcccccagggtcttctggacgtcagagccctctaacctacatggcctccctccttttcaggactctttttttttttttccccttctctctgactccctctcttctctccaactgagggaagtagagcaaagttggggtagtggccctaa

SEQ ID NO: 3716 - DNA, 201 bp, Bos taurus
gttttcaaacattcctagcggaccttgtgtgtatgggcgcttcactagggcccggcatccgcccagcgcctcccgcccttcccagaagccgaggccgaagcacctccactgcaggggaccgaatcacttaaccgcattcgcctttccaggactgatcgctcctcaaaaccgttttccagaagttcacctccttgtccaggc

SEQ ID NO: 3717 - DNA, 201 bp, Bos taurus
gggctgagaattcccagggctgttgctaccaggtttgcaaccagacattaaatccggaggcatgagactataaaatgtggttggaggtatgtgcagaggggtgaatttgaagacagcaaaatatgatccaagagaacattagctaagggtctagggattttcttaaccaagggcttgggaaagggttcttccttcacttca

SEQ ID NO: 3718 - DNA, 201 bp, Bos taurus
aggccctaatgtgccagcctcaaaagcacttcatttggggaagttgttgccccactaatagcattatgtccccttctgatttttcttccttttcttgatctagctggccagacctgtgtctatggtgcccaacattcctggtatccctggcccaccagttaacagcagtggttccatttctccctctggccaccctatgcc

SEQ ID NO: 3719 - DNA, 201 bp, Bos taurus
tgctggagccccagtggaaaccgcctgctgttcaccgtgttgggggaaccgcttatttactccttgtcattcccagaacgttgtggtgagtcaggggcaacacttccggatgcacaatagctggggtagtcagagggaggaaagagccatctggaatatgctgccttgaaggaaaaagggaagtaaagaagctcggaagac

SEQ ID NO: 3720 - DNA, 201 bp, Bos taurus
tccctttctcgcagatgttctccctgtcgcttatgagtctggagccccaaatagtgccagaatagttagtaccaggcctttcacgtagctctgtcgagataatctttacccgagcctttccatcaggcgcagatctgcagattccgagggccgcccgtcagctgggagggaagttttttgcactatcttgctgagtacact

SEQ ID NO: 3721 - DNA, 201 bp, Bos taurus
aacctccacagcagcttaattgcggaccagatcgcaggcctccggctgcagtgtgcactgacccagagctggagactaccgagagccagttcccggggcaaccctgtctctctgatggccctcagtccaggctgtacgtccaggacatgcgtgtgaactccggagataatgtcgatggcagtatggtgtccaggaagacat

SEQ ID NO: 3722 - DNA, 201 bp, Bos taurus
ctccagttgcccctcaaacccatttgctcctcttggtcacccttcacccaccagcacatgcatcttgaattgaagatgcagatgcagactatttgaaaatgattgtgcaaatctcttcaaacacatctggggggcattcctgaagaaatgttgcaagggtcccatcttcgtttcccataaattcagatgcaggcaagaaaa

SEQ ID NO: 3723 - DNA, 201 bp, Bos taurus
ctcagatgactgcatgcccagctggcaaggcactttgaagatgaaacatgccgagtcccttagagcccagggactggcatcctttacacagaggagggtgagggccactattaaagcacattctagagaggcgttgacctcagctagccacacaagcccataaagcacaaattgccacaactgcatctgcatagccaagcc

SEQ ID NO: 3724 - DNA, 201 bp, Bos taurus
ccaagccccacccaaggagggttaagcaaaccgttgctaagtccaccgtatccagctgagcaggctctgtgtgtgtgtctccctggctccccttctcctccttccctacctcccaggtatgaggacgagatctccaagcgcacggacatggagttcaccttcgtccagctgaagaaggtagcctccccagcttaccccatg

SEQ ID NO: 3725 - DNA, 201 bp, Bos taurus
agcccaccactctaaaagtgaggacgaggaaactgaggcttgggaaggaggggccacttagccagggtcacacagctgactctctgagtcccgactgcctcgtctgcctcccaggtggggcaggccaggcctccccagcagcaggtctcgggcaggagccagggtctccctgggggctggggagcattgtagggttcaggg

SEQ ID NO: 3726 - DNA, 201 bp, Bos taurus
acggccggctggggatgagcacagtctcggggctattttcggaagccagaagggaaagtgaacgactcccagagggctattctgagcacagtgggacacgcaggccagacccgcggccgcctctggaaaagcagctcccttcggaatctgtcaattagcagccggggaagcagagcccctgctcccagacatgcgctcccc

SEQ ID NO: 3727 - DNA, 201 bp, Bos taurus
gaatgcttctctaggttggcatggaaagaggtctcccgcattgtagacagacactttactgtctaagccatcagggaagtcccagctttccccaccaccccttattttttccgttctccataaagaattaagattgctttggtgcttgaactttctgctgtcttaggtcaagtggtttactaaggaaacattcccacttct

SEQ ID NO: 3728 - DNA, 201 bp, Bos taurus
aatttctatcctcctgttccggttattttcccctgctgatcgttacagctggttagctctcagggaacattgtcttggcccagatttgaaaactctttgcggctggtgttcctctacctcaggggtagaggctgctggtgtttctctacctcaggggtagagggtttgaagctggccgggaggaagcaccgccagaaggca

SEQ ID NO: 3729 - DNA, 201 bp, Bos taurus
gtttttctcctaagcctattccattatctctctttgatcatcagcttactcttcaataaaaatggggattgtaataactaattgttatttgtgcttcatatagtaattcaaagataagctctcttattatttatccctgaaaaaaacagaagtaatctgccccctcgtcacacaggtggtcaggctttactatgtgtttac

SEQ ID NO: 3730 - DNA, 201 bp, Bos taurus
ctatgatatcaacttccagaactctccattccagtttttgggaaaagtccatttcttagaactaacctcagctttgtgtgtaacacaccaattcgttatggcacttagtctgaaaagcattatctggtcagacctgttatagttatgtgataccaacccgaaaataagaaaagcttaggatacattctaccccaaggactc

SEQ ID NO: 3731 - DNA, 201 bp, Bos taurus
ccttagtatacctccatggtagtgattctttactggtgtgattgtgttgcccaggggaatctggcaatgtctggagataatttggttatcacaaagcggggggcaggggtagggggcgggtagaggccaggaacactgttgaacttactaaaatgcacaggacagacagtcctccacaacaaagaataatccagtccaaaa

SEQ ID NO: 3732 - DNA, 201 bp, Bos taurus
gaggtgtcatttgacagaggccttaaataaagagttgagcagcttaaactcagtttaatgctgaatagatatctttgtgattttgagttgtgggaatgatcgaattaaattgttctggaaattatgagctcatgctcagaaaggggtgatgaaggagtggaggcatggagacctgtttgaagcattttctggtatgagaga

SEQ ID NO: 3733 - DNA, 201 bp, Bos taurus
tggacatgaatttgagcaaactctgaaagatggtgaaggacttggaagactggcgtgctacagtccattgggtcacagggtcagacacaattgatcgactgaacaacaaccttacaagaagtgctaaaggaggttctttgagtgaaagtaaaaggacactaattaacatcataaagacattaaaaggtagtgcaaaactca

SEQ ID NO: 3734 - DNA, 201 bp, Bos taurus
ttagttactgtaaggattagagaaaattcatgtaaaaagccaagggcaatggccaacatagaaaattttcagtcatcatgacttattttaatacaaagaggtaaatattataacagatctaaatcttgtaataaattataacaattaatattaataaggaaaacctagttatagttccacaaaacttattaagcactaact

SEQ ID NO: 3735 - DNA, 201 bp, Bos taurus
aagtttattttctatgtctgtgagtctatttctgttttgtaaataagtatatttgtatctgttttctttttttggccttctctgactaggagtctaatccatgccctttgtagtagaagcacagaatcctaatcactggactaccaggaaattccctgtattatttttttagattccaaatataaatgatatcatatgata

SEQ ID NO: 3736 - DNA, 201 bp, Bos taurus
tcttaaaataataatagcatttattttgctgtgagtctccaattagggcagtgcttgcctttgttgctttccccatcctcggtgtctcagaactggggccatagtcatctaaaggcttactcgtaagtcaggtggtggatgctggcagtcatctgggctctcagctggggccatgatcagaatagccgcacatggcttttc

SEQ ID NO: 3737 - DNA, 201 bp, Bos taurus
ctgtatgcagtcagctgcctcctgcagtcatgggagagaacaggtaaggacagttgccggcgcagtcgctgtgcttggtggccagagctggctttcacacttcatccatgaatccatgaaccacacattgagaactgaccagctaggaaatgtgtaactcagccttcacctttatttagtgaagctcaaggaaggaaagac

SEQ ID NO: 3738 - DNA, 201 bp, Bos taurus
gaaggacagggctcttacaccacatacaaaaaccaactcaaaatggattaaagacctaaacataagatctaaaactcctggaagaaaacacagaggaaaagcttcatgatactgacgttggcagtgatttcttgaatacgacaccaaaagcagccaaaaaaagcaaaaattgacaaactggaccatgtgaaaattaaaaac

SEQ ID NO: 3739 - DNA, 201 bp, Bos taurus
ggcttcagagactggagtgagcggataggggggctggcacaaagtgggcgctgggaggagaaggtcaggctggtggtcgctggagcccactgactggtgcggggccgtggacttgactctggatttctgagttccagggagcaggcttctgatacccctggatctaccctagtggagggctctgggagtcctatctgcccc

SEQ ID NO: 3740 - DNA, 201 bp, Bos taurus
ttctgtggggttctcaagagttcatcctcacagtctatgcccttctccattaattagttcctctggcagtgacccattccctgctaaagaggataggctaccttgaatgggatggccccaagttaatggacaagtgcatgcttgtcccaggatatgtaaaaatgtaaaaaactggccatacctgcttacacgattggtgat

SEQ ID NO: 3741 - DNA, 201 bp, Bos taurus
ttctccattggccacagtgaaaagattctcgaggcctcagtaagtagaatttggtgagaggtcactctcagatggtctcaggcccagctccagggaatctcatttagtttcctctgtgattataaatattgttgacctacctaagaggcaagagagtgagtctcagctttaaactctcagaaaagcaggtacagctcaagc

SEQ ID NO: 3742 - DNA, 201 bp, Bos taurus
ctacttaaaagattggtcaccagaagaagctctgattagagattactctctccctccctctcagaggccactggggccattcccatcatgacctgactccctgtttgcgtcagttttcacaaaaagtctaagctcctccctccatgactccacatacaggaacttttagtcttttatggccagatacatgccatagcctag

SEQ ID NO: 3743 - DNA, 201 bp, Bos taurus
gttaatccaaagagaatagaagtgtcacttttttaaaaacaacaacaaaatgctgtgaattattagagaactttaggcaattcttggttgggaattgggaagttctttcagagagaaggacacctaagaagtggaactgagtcgttggaaagtcagaaaccatataggaaagatgagagtgggggtgggggtgagacagct

SEQ ID NO: 3744 - DNA, 201 bp, Bos taurus
gccgggaggtccgcgctgggggaggggcccctgcgaggggcacagacaaaggtcctctgcgatgggtccgatgggggtcccggaggagagggctgaaaccttggggctccatctcacagtccgggccaggggctccagttctacttccacaggggagagtcattcaaattcagctttaactcccatttgctaaatgcctcc

SEQ ID NO: 3745 - DNA, 201 bp, Bos taurus
ccaatgccaccagctttgaattagccttgagcatccacccagctggtctttccatggcaagccttagggatggagaagaaaaatgaatactctgtgctcacgaggccttcagacctgaaacggaacacaccaaacagatccagagagaaaactgaggctcagaccccgtgactggaagaggcctcagagacaagtggacgc

SEQ ID NO: 3746 - DNA, 201 bp, Bos taurus
tgcaacgtatcgattaaacccgggccccctgcattgggagtgtgcgtggagtcttagccgatggactaccagggaagtccctcatgttaaccttttaaatgaaacctacattaatccttcactcccaattctgaaatcaggatgaagtgatagagtggagaaagggctgagtttgtaaagtaatttagaaatcctagaggg

SEQ ID NO: 3747 - DNA, 201 bp, Bos taurus
atgtccaggcctctcactgggcttccctctacctcccccaggctcttcacatatgtcaatgagaagctcttctctaagccgacctactccgccttcctcaacctcctcaacaactaccagcgggccacgggccgcggggagcacttcacagcccaggagctggccgagcaggacaccttcctcagagagatcatgaagacg

SEQ ID NO: 3748 - DNA, 201 bp, Bos taurus
ctgggacagtagaagtgatttcttccaaagctggagaagccacagctggagtctgtgcctcattcttcatggcagtggttatttagaacatctctgagctatggccaccattcctatagggaggaatcaatgtgtaaaggaaaatctccatttatgacatctgtgtattttcctgtggctgttacaacaaattacgacaaa

SEQ ID NO: 3749 - DNA, 201 bp, Bos taurus
ggacaactgggcctctgagccaggtttcatatgaacatcatcatgtctgggataatagaaaaccatgaaatgtttgagggtgagacgagatataatcagacaggcctttgaaataaggaaaaaaacaaaaccttcttacttctgggtagtgtttcatggtatagaggtatcctagtttatttaactgtttacttacaaaat

SEQ ID NO: 3750 - DNA, 201 bp, Bos taurus
tcagagatttcgtggcgtcaaggggggccccacataattgccacttccctggactgctactcacaggatgggcttcatcttgcaactctggccaggagctggggcttcaggtgccctgtctcttgctaagtgggagtgaggaacaatgggcatccatcctggaatcaggtccttcccctccatcttattggcccaacttgg

SEQ ID NO: 3751 - DNA, 201 bp, Bos taurus
gccaggcctccacctgtgcgctgtggaggctttggggaggttacttacctacttttagtatttgtccttcctacctggaaatgcctgtggctcaggattgctgtcaggcccaagaatggtttatgtcaggagttggcatgatgccccacacattgcttggtacaagttcatgcccttccttctctctgaatgcttcctgtc

SEQ ID NO: 3752 - DNA, 201 bp, Bos taurus
gatatgcaggaaggcctgtcctgggaaggccccatggggtccttacaatgtctttgcctttctgccacatgaccgcctacccctgccaagtgccactgtctgaggtgcgaatgtaagtgttcatgccaaaggtgtcatattcttggggtgtgggtgtggattttatgcagaggagaggagaaaggtactttctctacaaca

SEQ ID NO: 3753 - DNA, 201 bp, Bos taurus
cacattctttactgtctgagccaccagggaaactagagttgctgaaaaattaagtcagagtcacaaagaagaaatactgatgcacatgacttaatcgtaaataacttgaaacaatggtaagttctcactgtaatttttcttatcccaaaagcattgcagagaaatagaaaatgcagataagagatgaaaattttaaaacca

SEQ ID NO: 3754 - DNA, 201 bp, Bos taurus
aggaatgagacacagccagattcagacctacctgcctggaaatttggtatatttctattgcattagtctgctttattgttacctggcccacctcttggcctggagtatggatttccaagaagatttgaaagcattttcctccaggttgctaagtcagttgcctgtctccgtcacttgggcacgctggcattctcatccatg

SEQ ID NO: 3755 - DNA, 201 bp, Bos taurus
tactgagaaacaggcctgcggttctgcggcagtgtctcccagacgagggaagtacaagagcggggataaggatgagggagcaaggccagaggattctgccatcagctgcgttggggggtggtggttgatgatattcactcatggctcctgagtcctgtagtccttctttgcgggcctgtttgaccttcctctggttggtaa

SEQ ID NO: 3756 - DNA, 201 bp, Bos taurus
atagaactttactttaatgagtctgaaacggaaaaaataacagccctacttaatcacagtttgccagttttccattcattctactctgcttagtataagtaacagctaatggccttaatggttcctctgtctgcaatgagatattcagaaagtgtgactggctgtccctgaacacacaaccccatctgcaaagggacaggg

SEQ ID NO: 3757 - DNA, 201 bp, Bos taurus
gactatgtggaatctcataaaagctctttatctttgatttaattcgatttagttttgttaaatttttgatttggcaagaaattagtaagtattttactgataggtggattatgttcatgagactgaatttgatctttggcaaatctctatgaatgggaaattgagatatgacttgtcaccccacaaccctcacaatgtact

SEQ ID NO: 3758 - DNA, 201 bp, Bos taurus
ctatgtctccttcctctttttaatgtgcccccgtctcccttctttttcccagctaagaatgtgaaagtgtctcaggggggaatagtcaaagaacctgactaggtaactggtagtaaccttttctaaaccaaaactaggacccttgctttgccccctcatctgggaagggagtaatagagctgatgttggttgtgtcctggc

SEQ ID NO: 3759 - DNA, 201 bp, Bos taurus
tttagagggggccaaaaggtgatgggggcttcagcctttttaatgcacttcaacttttgcaaagaaaacacaggctgtagacattgctgctgtgtgaaggcactaaaagcaattagtcatggcccgagctccagcactgccaccctggctggaagaatcagcttggagctgccaggttggctttagatcaggagttcaagg

SEQ ID NO: 3760 - DNA, 201 bp, Bos taurus
tgtgattataataacaaaagtggccaaaggcatagacctagcttgcaagagtcaaaattgactcttggctgttacagttcctgagacactaatgatattttcccccatatttttctgttgttcagattgggtaggttctactgctcttgtctttaagtccactgactgtcgttctgctctttagtctgtccagtgtgtttt

SEQ ID NO: 3761 - DNA, 201 bp, Bos taurus
aaattttatgtacagtttcttttaattaatttgggtcagctttgactcttccatttatgtttgcttagtaaataacacatccccaggcataatgaagaaagaccttttgctaggtattcttttattattcatttattcttcattcatctcctattcttgactatggcaatgttatagataggcattttttcagaattaccc

SEQ ID NO: 3762 - DNA, 201 bp, Bos taurus
tgaaactattagcacattgctagctaggtacatgctatgtacttaaatcaagctcctctgtaaagattaagttccttgccagagttttgtattcattcctataacttttatatatcactgtaatggagttctgtatagagccttcatactctaggagtaacagtggaatataaatatgtaaaatcagactaagtccagata

SEQ ID NO: 3763 - DNA, 201 bp, Bos taurus
gagaggcaatcccaaatgtgctttttgaggaagttggtctcacttggtgtttaggtcaattatctaaccttgaatttttaaaattgttatgggtttaaggccctacatttgttgtgttatttatctcatctcttttgatcactgaaaaagaaaagtaagccccaaactgcttattgtagtatcattacagtttatagtagt

SEQ ID NO: 3764 - DNA, 201 bp, Bos taurus
ttggagacgatagcggcttcccagtgcatcagttctgctaaatggaaactgcttttcctggaattcccatccacgtctgcttctggattagggttggccactgtgattgccttgcatgtgatttgaaaggcagatgagagatggcagccatgatgcttgtgagggtgagttgaggccctggttgccatagcagattatgct

SEQ ID NO: 3765 - DNA, 201 bp, Bos taurus
tgagggtgcaagacccagatatatcatgctttaggccagaatcctttgtatcagactgagggaagctggagctggccattttctcttcctgataaaggacatctagatatgaattagggaaccatggtaccaatatctaatgatcaatccatcaatacttgccaaacaactctacctggtgtatggccacatgggttgtac

SEQ ID NO: 3766 - DNA, 201 bp, Bos taurus
gccatccatcccaattgtgacagagtaggatccagtgtttctttctctctgtctgtctccctctcacacacagaaaatggctcaatgacaagtaggtggcatctcaaagaaatatggctaaaacaaaatacttgagttcaattgttcttagtcatttctctcttaaagagcatacataccctaggagggcctgttaaaaat

SEQ ID NO: 3767 - DNA, 201 bp, Bos taurus
ttctaagttgtactttcctctagagtcaacagttcctctcatgtggatccttcctatcaccattaaaacctgctcaagtttctctatttgacagaaaaaacccatccctggccttcatattctcctctagttctctgagcccttcagagtcaaaccccttccttgaaagagagctcagtattttctacctccttttctcct

SEQ ID NO: 3768 - DNA, 201 bp, Bos taurus
ttgttgaaactatgtcgatggtgtatgtgactgaatcccatcaaggcctctagataaacctttaaaattctggcagttacctgggtggaaatctattcatttcttggctgcccagggccagtctcatatgtaagctaccttgcttatcaaacctgccaactcccaatctggaatggtctgtctctttcttgggactctctt

SEQ ID NO: 3769 - DNA, 201 bp, Bos taurus
aagaatccctattgcttcttttcttcatcattaggttactgttatcctttttctctagtctctttccatcccagttgctacctaccacacagacctactgggagttttaaatgccttaatatgtataagacacctatacaataccagttacataatgggtgctcaataaaggccattcttccttcccatcaaactttattg

SEQ ID NO: 3770 - DNA, 201 bp, Bos taurus
ggaaagttcacacagaccaaattggattggctttgctgaagagtgaaacggtatggattctgaaaagatatgaacttacctgttttgtcagatgtacttattacatgagccatctcattgctttcttaacccagcatataaatggatgtatacccccatatatatgtactgtacatcatgtttattgaacagccactatgt

SEQ ID NO: 3771 - DNA, 201 bp, Bos taurus
catttctaatctcacagaaagtaaatttagttaaacactagaagtgaaagccagatttctgaatgtacagttaaaaaccacagaagtggctagtatgaacttagctcttgctaagctcaacttagctctctgactacatgactacatgtccaaagcagctctcttgcccaggaagacacaagtctgcatgtggccctctgc

SEQ ID NO: 3772 - DNA, 201 bp, Bos taurus
agcatgttttttcttacttggccagcaaccgccatcttgttacaaaatcacattatttacagcaagaaaattattgaaatgggctggtgctctgacctccgttaacagtcacaggcttaggaaggcccatcaagttcttctctgctctcaggacaatgatgagatggtgtaagaacagacacagttcagaagactgcgtta

SEQ ID NO: 3773 - DNA, 201 bp, Bos taurus
tctgctagcctcccatgagttagggaagggaagcttacctaaccctaaccctaaccctgccaactttggattcctaaattcacctgatcccccatccaccgggggccaggataggcacagctgcaggaaggcacttcttcccactttctctctctcatccatcagatctcagtatcaatgaatttgtccttcatcattgga

SEQ ID NO: 3774 - DNA, 201 bp, Bos taurus
actttgaaaactatgttttaatgatgttgtggattaaaaccagcaccacaaagccacatccaaagaataatttcacctaatatgacaaaagagaagttcactttcacttgagcaagatatcttaaccaagagaggtcagatccccaaaatgacatctatccctttagaacttttcatgaaagagatctgggatttacttat

SEQ ID NO: 3775 - DNA, 201 bp, Bos taurus
gaagaacttttcagacaatgctacaagactgatgcggtacaacactaatgacatatgccaactacaaacatacgatagtaatttcaacagtactcttaccctgcctttgctccaacagaaaatcacctctgacctatggctccacacacagattttaggattcctgacttctcattaattcaaaagtctagcaaattctgg

SEQ ID NO: 3776 - DNA, 201 bp, Bos taurus
aaaatctggatttctgagttctttcaaggtcagaagtaaatagattgctaaacagcacggatcagctgctaccaggtagcagctgctccaatctgaccctcagcatttgtttatattccctcacatggtcactgtaagcacatgagttactgccattaatagacatgggccttattactacagataaatatgttaactact

SEQ ID NO: 3777 - DNA, 201 bp, Bos taurus
ggaggaggctcagaggcttgtgtaagcttcctgatgggaggaactggtggtgggaaaaactgggtcttgccctggtgggcaggcccttgctcagtaaagctttagtgcagttatctgctgattgatgggtttgtgctccctctctggtagtttttggcctgaggtgacccagccttcaagtctatggtagaattaatgaca

SEQ ID NO: 3778 - DNA, 201 bp, Bos taurus
tacatgtatttggaaaatatgttgacactgttatttagatctcaagcaaggaagtaaaatagtttattcattatggcctctggagaagagtctatggcttcgaatgaaaggatttatctggtttgtgttaatcaataaaaagtagctgaaagtcacctttagtacttctcttcaaagtaactaatcttttggttccatggg

SEQ ID NO: 3779 - DNA, 201 bp, Bos taurus
tgaatttgagccaacactgggagatagtggaggatagaggagcctggcgtgctgcagtccatggagtcacaaagagtcagacaagacttagcaactgaacgtcaacaatcagagaagactggaaagggaaaagattaatgctaataatatgatctgagaggtgtgaatagtcgtccaagggagagaaaaacaaaaaacagt

SEQ ID NO: 3780 - DNA, 201 bp, Bos taurus
aaaggtggcctagctgaaaaggatgtaagctgatctctaaaacctaccccagacacgcccagaagagctcacagatatgctacaaaaatagccacagagacttttccaactcctgtggcctaggcacatcgtgaatgcaaaccaactacaggtgcttctccaattcaggaacctgagctcttgatgcacagctgtgtcctc

SEQ ID NO: 3781 - DNA, 201 bp, Bos taurus
gctcccagaatctgccttatgtctggccaggttggagctttgcaaatggctaacatgtatcttactgacacagatctttaagtactggaggaaaagtatatggccctccaccttatcagagatgtgtctaagttcaggagctttctgatgatcaattccatagaaataggaaacaaaaatttactttaatgtcgaatgggt

SEQ ID NO: 3782 - DNA, 201 bp, Bos taurus
ggaagcatggttgaaatctctctgatagggaggcactcactgttcctgttcatgtgtttgactctctcagtgtgtaggcctggagaacagcggagaagcactagcccttttgtgcagagctgtccaaaagtgtcacactgaaaacatgagagagacaaattattggccaactttttgttctgttttgctttgctttcactt

SEQ ID NO: 3783 - DNA, 201 bp, Bos taurus
tctgaatggcgcctggtcagtcattgttccaaccagtgtgggcagggagggccattttcctgtctcagcctacaaggactgatgagatggaatctttagtgtgtctctgtggcaaattttcttggccaaagtggaaagcaaaggcaattatccaagaatctgaggtaaatgtgtgtttttctgacccaaatacttgaaaaa

SEQ ID NO: 3784 - DNA, 201 bp, Bos taurus
gctaccatcttcccaaatgagtattctatgaaatgaaaaaaatacatacttcacaaaattaatttaatgaaatatgccattattctatgtactagattaacaacactaacatctttgtatcattaacattttatataaattgcttgacagagacttttaaaagatgaaacattctgcctttgtatagaacattcttccaac

SEQ ID NO: 3785 - DNA, 201 bp, Bos taurus
tgtctactggcataaaatgttcagtgtttcctgaactaaaattaagataagattcaaaatcttcaagacagcatataatgtcctgttggcctctagctaaccctacagcttcattgtgttctcttttcccccttcttcactatattctagttactttggccatctccctgtttttcctaaccttaagactttatttttcct

SEQ ID NO: 3786 - DNA, 201 bp, Bos taurus
tttggcaacaaggagttcttagatagattgccgttttccactttacttcattcttcttctgaggttttatcttgttctttcctttggaatatgttccccaatcacctcattttgccaagcttaattgtttttatttctacctatctggtaggagatgttctacacatccaaggagcacattaccctctgaacactagagct

SEQ ID NO: 3787 - DNA, 201 bp, Bos taurus
attcagtcaacttctttgaataaaattttaagaggagttagaacattggccttctcttgataaagaggtttatagtagctatatccctcactaaactttgacttctctctgccctggtatcattgaaatcgtttcttgtgctcaacgtaagacatatttttaaagatcactctatttgtcttttaatattaccctctcacc

SEQ ID NO: 3788 - DNA, 201 bp, Bos taurus
gattaaaccaagctcaacaaatgtcctgaaataagattgtaacaagggagatcaatataatatactagtcacaatgtgtctctaccacagctgtctaaaatatatacattattttagactgaatacatcatagcaaagtatacttgtgtgaataagcacctagtagctttctttttattggcataaattcctactgtaaag

SEQ ID NO: 3789 - DNA, 201 bp, Bos taurus
catgtattgtggacagagagataaaatatttcagtattaaggtactaaggagagagagatgttttgtccatgaatgctcacaggtcatgatcctgcattatttctcaatatgggtcttactggtatttggggtagaataatgaaatcactgcagccatgaaattaaaagacgcttactccttggaaggaaagttatgacca

SEQ ID NO: 3790 - DNA, 201 bp, Bos taurus
cagaggagcctggccggctgcagtccatagggtcacacagagttggacacaactgaagctactaagcattcattcttagctcataggctacataaaaattggtgggacaaatgtggcccagtggttggtttgtaatttgccaacttctgttctcattcaatggacatcttcccaggattccagttgactagaaatgtgtgt

SEQ ID NO: 3791 - DNA, 201 bp, Bos taurus
taccctcagtttagcccattgcctgctgtgcttaatgtcttcttcaaaccaagtgacactgaaatccaggagaactgctgcagtgggccaagtgtaagtattgccttgactgctgccattgtgaaacaggtctcaggatggagggagttgtaattctccttttgacttggctgagaaggggagagatgggtggtgtctgag

SEQ ID NO: 3792 - DNA, 201 bp, Bos taurus
attagagttttgttttccaaatagtatctcatttatattataagttattaaaaatattcccttgttttcttctctataaatggcctagtttaaattatttgtggctaaggtattgagaagaatgtctgtcgcttcttagttgcagttgtgtgataatataccctcagagatggcctttttaaaaatgatgttaaatgtgaa

SEQ ID NO: 3793 - DNA, 201 bp, Bos taurus
agcaatatccctttttgttatactaattcagctcctacaatcttttatcttcctcctctaatctattacacttcagcattgcaccaaataccagcattttatgtttatgtctcactgtgtgttctgtgtgtgttcaacctagttttgaccataaaattagtgtgtgtgtgtgttagctgctcagttgtgtttgactctttg

SEQ ID NO: 3794 - DNA, 201 bp, Bos taurus
aggatcataggcaaagggaagtcaggcagaggaagactatggtatagggtgtaccttcccagcagaataaaattagacatacaaggccaaaattttacaacccaaaaagagactcagagaattcaaagataaacaaaggattccaggggaataaaatatgtgaatggccttgaatgaattaggaagtccttaccctcatag

SEQ ID NO: 3795 - DNA, 201 bp, Bos taurus
gctcccttcagggctggcaggtagattcatcaattcatttaatccagaaattcctgcagtgggttcactgtgagcctgttggacctttgggcaaaggaagaaacaaaacagataaggtccctgtgctcatggtgcctattctccagaagaagacagagacaataatttactgttttaaaaaattaaatagtgttcatattc

SEQ ID NO: 3796 - DNA, 201 bp, Bos taurus
gctagagagagttcacacatggaccagggccccagttacccagcacactctttcctgtccatcacagcagccaaggtcctaggaagagcccctgcactcaggttccagtgtggccactgcttagctgtgtcaccttgtaaacagcatttcagttctctggtcctcacttttctcatctgcaaaacatcacaggactatcct

SEQ ID NO: 3797 - DNA, 201 bp, Bos taurus
attttcctgttgcttatttcctataatgtgacagatgtttcctttccttctattaaaaattcattttctgtatcatggtcaactagtttataaagtgagagtagtgtcaaatgactgtgctctttgtagagggcagaaatttctagatctggaggtagaagccatgaggtgtgaaacgaaaaactcatcagaggtcttttt

SEQ ID NO: 3798 - DNA, 201 bp, Bos taurus
ggagagtagttaaatattctggaacaagattttttacaggagttacaggaatactttgtaagaggtgccacccccacaaaacagggtagctcacatttcatagaaagacagagagggcatcaaggggagatgaaaacacatcactctttctaatccaacacctgttactgcaatctggtatctgaagctgccttactagat

SEQ ID NO: 3799 - DNA, 201 bp, Bos taurus
ttgaaatactaacatcaaagatcactgatcacagatcaccaaaacaaataaaaccatgacaaagtctgaaataatctgagaattccaaaatgggataaagatataaagtgagcaactattggaaaaccaccaccaacacttgtttgatgcaggattaccacaaaccttcaatttgtaaaaacatcacagaattaagcacaa

SEQ ID NO: 3800 - DNA, 201 bp, Bos taurus
accacaaggaaagtcccatatttccacatatctctgagtagggaatcaatgaatccatcaaaatcctcacaacaaaattaacgtttttaaaattatgacctatccttctctacctactctcttggtgttatttgaatgtttttaccatagtcgtgtgttactagtttacaaataataatgaaaagaaatctcaaagtttat

SEQ ID NO: 3801 - DNA, 201 bp, Bos taurus
gatggctgcaaatatggagaccttgaaggatttgccagtgagcggcaatccacatgtgagacgcctagagaaagaggagatggtagtcagcgaggaaaaaaggaaaatacagacatgggggaaaacaaggggaatggacacagatagagaactaaaatggtatgaaagccagcagacaggtaaacttcacctatctcaaaa

SEQ ID NO: 3802 - DNA, 201 bp, Bos taurus
acatacgtcatttaaatcaaccttccccaggtactatcacctgttatgttgggagaagtagaaaagttaaataacttgtcagggggttcacaacagttaaaatttcaatctagggtttcaacccaggtctcttaggctcgttgctgattctgctactctatgtacgtgctgtatgtgcttagttgctcagtagtgtcccac

SEQ ID NO: 3803 - DNA, 201 bp, Bos taurus
atatcggggatatccattgggtaagttctgagcagcaaaccctggagctgagtttgcgtttattggtttcagaaagaatgcaggggtagggcacagagaaaaaaatgaatgaggatacaatcagaactgagaggtttaaggaggtgtttctggtaagatacataagaaactagagcaaaacagaacctccctccactttta

SEQ ID NO: 3804 - DNA, 201 bp, Bos taurus
gtgactcatttttcccaaggacccaggggtagaagaagtttcacagaataggtaaagtgtgagctagacctttagaggagtagacactgttaaagggaatgagggaactctaagcagatcaatttataaataaatctctctgagacccctttccttgtaccaaaaacttatgctctcacagcaatagacttctggtctttg

SEQ ID NO: 3805 - DNA, 201 bp, Bos taurus
accagagggacaagacccagctccacccaccagtgggcaggcatcagcctccctgaccaggaagcttgcacaagcctcttagacctcatccaccagagggcaggcagcagaagcaagaaaaactgcaaccctttggaacagaaaccacaatcacagaaagttagacaaaatgagacagcagaagaatatgtcctatatgag

SEQ ID NO: 3806 - DNA, 201 bp, Bos taurus
atctcccaccaagtgacaccttaaatcactggcctcctaacctgtgttaccagaagatgatactactaggagagttttcccctcaaaaccaggcaacaaaggtagaggccattatggcctcttatggacttggatactttattcaaactcccctaaaggctggcatgattggacaaagagagtgttgcctgtcacttcatg

SEQ ID NO: 3807 - DNA, 201 bp, Bos taurus
cattcatttacattaagttgttttatgtgacttcagtatgttgtcttcatttttttcacttattttatatacaccttccacaaagaacatgacacactacctgttgttttgactggtggatagcacagcaccatgttgctcagccagattcctatacttactcttttggtgtctattataaattcttaatttataagtcaa

SEQ ID NO: 3808 - DNA, 201 bp, Bos taurus
caccatacccagcacaacacccacacaatactcacagatgagctcgagaacagtttattagtcatatacagtcacagtctgggttaaaggacaccactaaccaggcagggccatgcagacgtttcgctcagcaacagagagaacaaccaggtgctgtgaaggcaggttttgtagtctcaagaggttgagatgcctttggct

SEQ ID NO: 3809 - DNA, 201 bp, Bos taurus
cttattgatttcaaagtgcttttgaaacatagaagaagaatttgcctcttccaggaattggaaaactaatagccctaaccctcgttccttgattgatgcaacctcttaacgttgaatttctagtcacagggcagagaagttggacgtaagtgtcgatatgccccctgaaacatgctaaacaaataatagtttaaatgagac

SEQ ID NO: 3810 - DNA, 201 bp, Bos taurus
acagtgttgtatgaactaatgaataaaattatagtgtgaaatgaagttccaaggatgaataatatggacaagtatataaataaatgtcttacttgataaatgctatagtaaagtatatttacctccaggagagattttcacgctttgatttttggcatgctacttcttgataattaatgaaaagaatctaattttaaatat

SEQ ID NO: 3811 - DNA, 201 bp, Bos taurus
cttctcaataggtcccccccgagtgctctggccttaagttgcaagagaaaagaattacaaccactgcccccgcaagtcgcccctgagttactatcatagaaacagtctatgagggccaggtaaaatgtgaaggaaacaaaagtcctggtgggatttttaaaaaatccattatatataaatatatatatatataattttttt

SEQ ID NO: 3812 - DNA, 201 bp, Bos taurus
gcaagaaacagttgccagtgacatccgacgccaagtccataaaggtgtgatggcagtgtcactttatggagatacattttttaaattcaaatatgccaagcttttatttacttttaggtaatttgctataactatagggtgagttgcccaccagctgaggttagcaccatatgtatataaaacctgtcttcttaaattcag

SEQ ID NO: 3813 - DNA, 201 bp, Bos taurus
ctttctctggttgcagggagtaggggctgctctctagccgtggtgcgcgggcttctcattgtgggggcttctgttgttgcagagcataggctccagggcacgcggcctgcagtagtttggcgcctgggctctagggcacaaacacaatagttgtagtgcctgggcctcgttgctctgaggatgtaggatcttctcagacca

SEQ ID NO: 3814 - DNA, 201 bp, Bos taurus
tacctgcgtgctgcccaagctgccaaaacttgaaatttacaacccccttgactttgtgtttcaggaaatttgattttgcgatttaattttagaataacaactagtcctccacagagagtctcaaatgttcctgtttctcaaggaattacaatttctgagtttctctatgaaaatctaaatatataatcttctatttctgtt

SEQ ID NO: 3815 - DNA, 201 bp, Bos taurus
actacaattcagtaataaaaagacaacctcaattttaaaaactggggaaagtccacaaaaaagtaaatggcaataaacaaacaaaacagcattaaacatcggtagtcattcagagaaatggaaattaaaactacacctatacaccaattaaaagagataaattaaaaagcaacataaccaggacttcctggcaatccatca

SEQ ID NO: 3816 - DNA, 201 bp, Bos taurus
tggccagtgggcacccattcaagttcatctgtgtgaatcttgacacgtcctcagaatctcttgttttctaaaataacaatattttagatttccaatcttagaatggccctgctccaaacctgcaagggtattgacaaaccaagatctgcacactgggggtgctcattcctttgggaatgttgctattcccaggccttctca

SEQ ID NO: 3817 - DNA, 201 bp, Bos taurus
atttgggaggacaaactgcagttccttcagaggccaaaataaactgctcggcagaaagagtcctagtagtgcagtggttggtctctgacaactacaaaccggtagttattgcctcaggggccccgaattcttcagtccccatcagacactcaggaggtgaagacttaggtgttatctagccagaaccccagcctcggggca

SEQ ID NO: 3818 - DNA, 201 bp, Bos taurus
gggtatcgctactttattgtgagagctagctaacgtaaataatatggaactttgtaaatatgagaaaggaaatatcatttttctgcttgaggagaaaactcattggtgctgataaggtttttctgaataatttagaagaactgttgtttggaaacatatcaatcctccaaaactcagaaatttgggagaattgggggaaaa

SEQ ID NO: 3819 - DNA, 201 bp, Bos taurus
gcagttttacgattattataaagacggtcataggtggtttttgctttcccagcctgtttggaatctgtgtttggcgaatccagatctgagttcatttcatcgtggatcgaagggtgtaagctgttcctgacggccaattaatgagtatgccgcgctgcctaaaaaccagctgcaactcattggtcatgtccaaaagggatt

SEQ ID NO: 3820 - DNA, 201 bp, Bos taurus
attgtcgtgattattattatttgaagcaagaaatatagagaggcggtggccttgacattactttttaacaaggaaattgggttatttaaagtgtactgtgtgtgtgtgtgtgtgtgtgtgcgctcgcgtgcgcacctgtgtacgtgcatgctcagtcgtgtctgactctttgtgactccatggactgtagcccatcaggct

SEQ ID NO: 3821 - DNA, 201 bp, Bos taurus
tccactgcttctggggacagtccttgggaagtgggctagacaggaagcagagctacccctcactttcacaagttgtaatagccttgcagatcgtgtctgtggtcaatgactggccagaactggccagcctccagccggcttgtttagactacttgatgagttgacacaagcaacgactctttccagtgctattagtgtctg

SEQ ID NO: 3822 - DNA, 201 bp, Bos taurus
gactaataggtccagctttgttgacaaaccgttagaactattaccaggtgtttagtgctgtctttgagttgagcagctctaaccctagcagactcaggaaagtgttaatagctcccttcccacgcttggttggcacgccagattgggaggtgaaagattctgagcttttccattcatattaattcaattcagtaatgttca

SEQ ID NO: 3823 - DNA, 201 bp, Bos taurus
tgcttgcaggtgctaaacaagccgaggatagacccaagacctgacccagcccgaggctcttctcaccacggactcagcagcagggtcgccaaaggccaaatccaattcagtaaacacagacttctgggaagcaagtgcgcttgctttccttcggtgtcagctggaggttgcatttgccttgagcactaaaacattctgcag

SEQ ID NO: 3824 - DNA, 201 bp, Bos taurus
ctataaacaattgaggccaaattttcaggcatcagcagctaagatgcaccagtgaaaatacatatgcttacccaatggacacaggaaagcacctatttctgcctgccagaacagtcagtgtgcaggccaacaggaaccggtgctctcggcgaccagtatgtgtgcacaattactgatctcacgtgcagctccagcactttg

SEQ ID NO: 3825 - DNA, 201 bp, Bos taurus
gcaacttagcgcacacacacacacgagtcagtgtaagtgaaaacactggaatacaggcatggctctggtatgttcaaagtaggccagttgagctccagcagcatgtccctgttgaggaatattaaaaaataagagaaacatggagccaaattttggagagcattcaaacaggccaaaggccttatcctggagataaggaga

SEQ ID NO: 3826 - DNA, 201 bp, Bos taurus
gatgtagaatatcttttttggtacgttccagtcttttttttaatcaatgattgtttagcagttgtgattttggtcttctcatgagaggaagtgatctcaaagtccttctattccaccatcttgtcctgagctccatctggactgattttgaaattgaaaggttgaggaaatacagcagaaaatgatatttgcagaagatag

SEQ ID NO: 3827 - DNA, 201 bp, Bos taurus
aaatctttgcacatggccaaaggggaattccagaagtgtgacagcttcttctcagttctttccagctgggtcagaagctgctgtgatgactcaagctacgtgagggccatggaatggacacacaggcgcacttctgaattccacacaagcatcagactgtacagggtgggggtggaggtaattatgattggggaattccta

SEQ ID NO: 3828 - DNA, 201 bp, Bos taurus
ggttggccccacactgactttaaaggatatgtaacatatggaaggctctggaaatctggcagaatgaaaagtagttccttaaataaataaactaaaaatagtaattcttgataccctggcccagaagagtaacattctgaagaaggaagcttagggtggttggatcaaatagactctttcaggttactgcttcacgaaata

SEQ ID NO: 3829 - DNA, 201 bp, Bos taurus
ccatctgtcatattcatgaatatcttcagatgtcaatataaaaacttgaacaaacaaatgcctggttaacactggggtcagactgattacaaggtactgcaattaaaaaaaaaaatccacttaacctattttacaaggacacttcactgaaacaatttactgttaccactataactgtatttactaaagtaggaaagggtc

SEQ ID NO: 3830 - DNA, 201 bp, Bos taurus
ttgggtcacgggggcgaggaagttataagatggatgttgttcccatgcacacagggaggtgaagggctttcaaggcagagagaacatcaaatgtagaggacggggagaggcctgtgtggccacaggaagcaaagtttaaggaaagaaaaaaaggtgcagtgggggtgtgtggttttttttggaccagtcctgtacctcact

SEQ ID NO: 3831 - DNA, 201 bp, Bos taurus
aatcctccctgccgtggagcctggaattgggctctggaagatctcaccttctctcgtgctgctccctgacctctgcagggtatccaaggcccttttcaatcctgcttaccttccggtgtacagaaagactttataccttatttgactgcaaagaaaaaaaaccaaaacagcaccttggttcctgaaggccagatgaaagta

SEQ ID NO: 3832 - DNA, 201 bp, Bos taurus
aaagaactgggagttagatgtaggtcaaattcatgatatgtcaattaccagttttacgacctctggcaaattaccagatgtcaataggtctaagttttctcatttacaaaagagtaataattatacatacatcataggattggcatcagactcaaattttttatctactacagtgcttaatgtgtattaggcatgcaatga

SEQ ID NO: 3833 - DNA, 201 bp, Bos taurus
aatgttatgaaatttaatttaaagcctccatatgctctgcaattattagcaaattctcttgtcagttagtgtggcatttttgtttttacactggcaaacttaatttaagaacataaattttcttcaggcttatccagtcaatagaaaaactgaaaagaaatctctgttttttttttttggtttctcattttgtttcaaatt

SEQ ID NO: 3834 - DNA, 201 bp, Bos taurus
cggggtgttcaatggctacaaagctgtcagaatccttctaatgaccttgctatcagtcatcaagagccataaaatattctaatagcatgaggccacactggatgtaaagaaaatgtgatcacaatttgtgaggtctcagttgaacacacactccttgttcctcattcagacaaggaagaggtgcttggagaggcctagaat

SEQ ID NO: 3835 - DNA, 201 bp, Bos taurus
catctggtcacacatgctctggtgacatgcactggccacagttatgcttcccactgtgatacagttactactgctgactggccctactgtggctctctctgtcctccgagatgcagcttcatcctccagcaaaaccttgtctaagggcagccctctgctacaggaaggcctcccttaactcagctgctaaccagtgggtgc

SEQ ID NO: 3836 - DNA, 201 bp, Bos taurus
tctcaagataccatgtgctgaattgtattagatgatattatatttttctctaatatgtgcatatcctatttcctctattgggctataagccactttagggcaggattcatttctagctttatatgacagagtctagggtagtcttacttaataaatacattttgaatgaatggttgggtttaatttagagagacagttaag

SEQ ID NO: 3837 - DNA, 201 bp, Bos taurus
gggctacagtcatgggatagcagagagtcagacacaactttggtcttagtgtagttactatttaaaccattcatattgaagagaataaatatatcaaagactagatttgtgaattagtaggaaatagcagattcaaactgggaaaatctgagaaaatatttaataaagagactattaaaaacgggtaaatagtagtatgaa

SEQ ID NO: 3838 - DNA, 201 bp, Bos taurus
gctcactgcatcacaggcctcatggaacagccagcgccccttcctcttgagagagcaggaggttttctttttgagtcacagctccgtgtggtttggattcaggctctggatcaggccggcttcaggcctcagacagtgccactgctgtttggctctgtcatcgtttgtgtgaataaacgtggatttgtgtggattatggaa

SEQ ID NO: 3839 - DNA, 201 bp, Bos taurus
tggttgtttgttttttaagttccttgtgagcaaaactgttaaaacatggcctttgttcactcctcgccacggcctggccagcctctgctgcgtgagtggtggcatctgaacagccctgtctggcataaaccactgaagcataaacaggattttctttctgtgtgtccaatggccatctaatagccatcgtgaaacaaagga

SEQ ID NO: 3840 - DNA, 201 bp, Bos taurus
tggcgcctttgtccccgcgcccatcgcgcactctgggcagaaggtcgccggcgaaggcggatcacccgccccagatcggctgcctggcccggggccaaagctcgccgcagccactcgctgccattccgacgtgagtgaagcctccttagtaagagtgtaaataaaaatccgggctgagaaatgagttttccatgccagcga

SEQ ID NO: 3841 - DNA, 201 bp, Bos taurus
tccaggccaatactttgaacctgattcttgtggtcttcctaccaagatgagatgagtagggaaggatgaacccaaggaaagaggcattacatttcttgctgagatttagagcagagatggcctaactagcccactcacaggtgtcctcagagtgggaagggagggattctccctagcttggcagtcctagtgaagactgtc

SEQ ID NO: 3842 - DNA, 201 bp, Bos taurus
gaggagttttcattcagaaactttctgactgagaaagtaattgcccattttctgttttagcctctgtttatgcatatcctagtattccagaaaattcagaactagatcattcttgaaggctagtagactgaagtgaaactaaaaggttattatttacttttaaaaaatctcactaagatagtaaaatgacagttgctttgc

SEQ ID NO: 3843 - DNA, 201 bp, Bos taurus
atttctctgttgctggaaaaaaaagaaaactattggttaggttttggaaagtttacatagttgggaagattgtgggtggaggagggctttggaactacaaggttgcagctagcagctactagcaaattctgttttgaaaatggctgatagtgtcctcaagtttgattcagtttaaaaaagtcaagttctcagtgatactgg

SEQ ID NO: 3844 - DNA, 201 bp, Bos taurus
ttcctctattatgagtcccttaaaggaggaaggaattggggcttgctgatcttggtattgcttacaatgcccaccagaaggccttgcatgaaagactcttaagagtcccgtggacatcaagatcaaaccagtcaatcctcaaggaaatcaaccctgaatattcattggaaggattgatgctgaagctccaatactttggcc

SEQ ID NO: 3845 - DNA, 201 bp, Bos taurus
taaaaaagaaaaaaaaagtgggggggtattcaccaaagaaagatttaaaaatagtattgagtgtgctgactgaaagcataatttcaacttaagacttactgtgggtgaatctgagaaagtaagcccattatgcttaagaaatctatagaggaatgggactttacatttaaagagataaaggattgttaatagaaaattatg

SEQ ID NO: 3846 - DNA, 201 bp, Bos taurus
gcccaaagtatttagcctggccacaaaagaagggtgtcctcaatccacatgggggcatctaggaatatagctctggtgagcagaagggagtacacaattggctcccactgaacatctacataaggccacttctccaagactgggaaatgtaaccaatctactgaacacatagaaataaacacagaattgggaaaatgaggt

SEQ ID NO: 3847 - DNA, 201 bp, Bos taurus
catgctggtgtaggcctgttttgagtctaatttagcaagctattagggaataatgtacttgcagatatccattgttataactgtcctattgcaacaactggctagcaggaaggcctaaacaaagattcattacaaatagactaatttattttagtaagtatcttactgtgtgaccccataatcattcagtttgacaagcca

SEQ ID NO: 3848 - DNA, 201 bp, Bos taurus
tcactaagtcatgtctgactattttgaccctatagactgcagcatgtgagcttctctgtcctccatttcattgaattggtgaggctatctaaccatgagttagtgacgctatctaacagtagtgcatggatacagccaaagacagatcaagctctctggtgcctccgcatataagggcaataattccatcagactagatct

SEQ ID NO: 3849 - DNA, 201 bp, Bos taurus
atcccgccaacctagggaatgaacccgcatctcctgcattggcagacggattctttcccactttaccactgagccaccagggaagccctactaaacccgatagcatgtcattttcttgtggggctatcttaactgtgcaaaacttttaacaaaaatacctttacaccagcatcttgtagttgttacccaaatgccttgtaa

SEQ ID NO: 3850 - DNA, 201 bp, Bos taurus
tcctactcttttctctgcatgtctgggacttttacatggtaaataaactaccttatattctcaaactctccagagaatactctcttcttttccaagcttagctgaacttgactcaccttcaggtctaatctttcaccctacaaccacacagagtatacatgttcatgcagggatggcccacaaaccacagggcaggttcat

SEQ ID NO: 3851 - DNA, 201 bp, Bos taurus
ttcgccatctgtcttcctcttcctgagacttcctactccctgagacacaacaacattgaaattagaccacttaataatcctacaatggcctctaagcgttccagtgaaaggaacagtcacatgtctctcacttaaatcaaaagctagaaatgattaagcttagtgaggaaggcatgtcaaaagctgagacaggctggaagc

SEQ ID NO: 3852 - DNA, 201 bp, Bos taurus
ttcacaacctcctggtcattttactgcacaccctgtggagataggggcagtttcaagaatgacaggtgaggcaatagcatctcttagagagtcagtgaagaaaaaaaatgtattaattaggaagtcatcagtggcctctgataacataatgaatagccaacacatttgttaaaattaaaacattcattaaatccctaccat

SEQ ID NO: 3853 - DNA, 201 bp, Bos taurus
gaagtttacttcaattttcataaacctgaagatagaatactgtatttaccagtgtcatgatgaataacttttaacgaaaaaaaaaaaaagagggtatacacatttcgtctttctggtttattaaatattgtaaagcctacatgttaaagaccactgtttacacggctctgtcccagtgaaacatatggcccagttaactga

SEQ ID NO: 3854 - DNA, 201 bp, Bos taurus
gaggaaaaaagcatggagactcatgtaccagttcctaagtgcttccacctggaaatgatagccatgcctaactgcaacggccttggatgcctaatcctctatgtacacaaaaatagaaggatatgagtaactgttggtgctattgccatgttagacatggccatccctgttcaaatagaatcactatatgtacacttttat

SEQ ID NO: 3855 - DNA, 201 bp, Bos taurus
ttattttcaacagttgaaatgactggtactaaagccttatgctcattgcgggagaactgattcttccccagctcttgctaaagaaaagctagctcagccaccatggagatatagttccccacgcaccctgaatggaatgtcatttcaggaaagcaggatatcacagcattctttgtttttatcaacacacaggtaatttga

SEQ ID NO: 3856 - DNA, 201 bp, Bos taurus
gattctgctaaacatcctacagcacacagcagccccccctcactttccccaacaaaaaattatctggctcaaaatgtcaatagttccaaaactgataaatcctgctccaaggccctgcctaaaaaaccctgtctataactcatcatcaatgctaacatatttttcatacacacaaacattatcatcatctgatagatgctt

SEQ ID NO: 3857 - DNA, 201 bp, Bos taurus
caactctcccacttattagctctggaaacttgagcaatttatttaatctctgttttccagatctttcatctgtaaaatgatataataacagaatgtacctcaaaatcatttacaggttaaatacagttatgtgtttagcacagaatctagctcatagcaaacatcagtaaatgctagaaaaaaggcaaccatacaatagaa

SEQ ID NO: 3858 - DNA, 201 bp, Bos taurus
caaggccacacaccttgtatgcagtagagccaaaattgaagcctaagtctgtgacacctgtgtcaccaccctgttgttcactggtcagaggagagatggtcgagggtcccttgctgtatcttgggccttccttctttttccatctcactctcatgcatgtgtcacctagaacaggctccatagctggggagagaggaggca

SEQ ID NO: 3859 - DNA, 201 bp, Bos taurus
ttagaatggatgcctatggtggggaggaaaaggcagggaggggagtttatgcagataaaagggaacacatacactgcaagagcggggtcttgtaaaggccggtgatgacagcctgccatgaactgaggagtttgatcacctccaaactttacactggagattgacaacaaaaggattccaaggagctcaagcgttctgagg

SEQ ID NO: 3860 - DNA, 201 bp, Bos taurus
gacacaactgagcacacacaaagaaaaaacagagggactacctgaagagagaggtgggccacgacaagggaggcaaatggccctggagagctgggtacagtttttttttttgggggggggtacagtttttaaggcaggattatttgcataatccacgggggccgttgatggacaaccatgattgacaactgcaggttatat

SEQ ID NO: 3861 - DNA, 201 bp, Bos taurus
ttgccttctgagcaataaaatcaaaatttgctatctgttcagtattcccccctgaggtcctgaattgtgaatttgggcccagccactcccagcagaggtgtggggtgggggtccctctggcagtccctatccaatgcatgtagctgcttcccatctaggtggtctgtgaaacagctgaggccaatggagccccttatactt

SEQ ID NO: 3862 - DNA, 201 bp, Bos taurus
aatatcttttggtaaagaaaaattcagtttaggatttttaaccttaaagctcttaaacttttttttttaagttggtaaaaagtttatattttttgagtaaatgtctacaaaaggtaaaaatctataattggggaattcttaagaggagataatacagattctaatctttttttattgattttatcacacttggggtactat

SEQ ID NO: 3863 - DNA, 201 bp, Bos taurus
ggcccaggacggatgagccctggaaccagccgcaggcaggtgaagttgccaagggtcacggcaggcaagatggggtctctgtcataagccgtgtacacgccggacaggaccgaggtggaaagggccctcgagctggtcagcaggccaggcaggggccaggctagggccgggcgtgagttacatcagggtaaggaatctagg

SEQ ID NO: 3864 - DNA, 201 bp, Bos taurus
agttctttgccccatggcctgtaatctctcctttccctcaaaggcctgacacagagagtttcccaagtccctgacctgcatcctcagttcttcctacgtcaccccctctcagagccaagggtctggccccaggtccttcctacaactgcccagggcacccctcctcatcatctggctgagcctcggtctcagtgatgcttc

SEQ ID NO: 3865 - DNA, 201 bp, Bos taurus
ctaagcaggcctcccacaccagccccttcaaactgtgaaggggcaccccctcacaaaatccagaggctccatgtttccaaccacataatacctccctggtgctcaggtgtccaggcccatatgtgacagggcagggcaagctctggcctgaggctgcttgtatggcctcttcctcagccacaacagccatcaccacaccaa

SEQ ID NO: 3866 - DNA, 201 bp, Bos taurus
atggttgaagatcattttttcaccaccttaaataaatcttcaaaagttcctactgatcctcatgctggacttgcatctgtttttagaaaaacaacaaaaacgacaaatgtggactctggcttgagtgggagatcatgctccagtattgttttccacgactggatatcaatgttagcaaaggaatcaatcatttactgaaga

SEQ ID NO: 3867 - DNA, 201 bp, Bos taurus
tcttacctattatcccctacctgctgtctgctgcctctacttcctcaccctcaggatgcacaagaggacttgggggtggggagcatcaggactctcaactctgggatgggcaaagggaagggcgagctgggcccaagctctgtgtacaactgacatcacagcttcttcccgccctggagcatctccttcctctccctacag

SEQ ID NO: 3868 - DNA, 201 bp, Bos taurus
gttattttcactaggagaggatggacatgaaacattttgtgaactgggaagccacatctgttcagtataaggtattactgctccctcacttcaggcctcatgctggaggctagggggactgttgggaggagaaaactgttgctaagaaccatctgattcctcaaccttagtggcccaagtttcttgggctctgtgggattc

SEQ ID NO: 3869 - DNA, 201 bp, Bos taurus
gtagcggtcataggccatggctgtgagcaggcagcactctgaaatgcccaggacaatgaagacatacatctgggctgcacagccccagaaggagatggcacgggggtgcgggaaggccaggtcagccagtgtcctgggcacaatgtcggtggtgtagagtagctccaccagggagaggtggcgcagaaagaagtacatggg

SEQ ID NO: 3870 - DNA, 201 bp, Bos taurus
cacaggttatatttgttctatggagagcatgcactggggaatcaattgagtgaagaggcataagttgccctggggattcttgttggagcaggctaaagactgtcctctgtcgacaactctgggaacaaattttaaacatatggctgttggatgagggtccagagagactagcttggaggtgaggtgggtatgggggttcca

SEQ ID NO: 3871 - DNA, 201 bp, Bos taurus
agcaatgaggcgcaaagtctttgaatcgatctcaaaagtccatctaaacagcgggatgtgggaggggtggtcagtgaaggattctacaggaaaacacagcaggcaggtctaatggcctgaaggcctaaaattcatgggcggggtaggcctcagaaagattttaatcaaaaacgaaccgtggactccgacccaaaagccaag

SEQ ID NO: 3872 - DNA, 201 bp, Bos taurus
gatcttcctgaacccgggatcaaacctgtgtcctctgcattgacaggtggatttttaaacaatggaacaccagggaagtccctgaaacctttttaaaggcgatttattcacactgggttttactacatgatctttttgactctgattggtaagattgcaagcctgatgaaacatgacacttggacaaggcaaagggccaat

SEQ ID NO: 3873 - DNA, 201 bp, Bos taurus
aaacctaattagtagggataatgaagaccacattggcaaagttaattgaggctaaagaaaaattgtaagttcactgtattttaggcactaaaattgcattactttggaaaatgtgttgattaaaatttataaaatgttcatacaagattatgctattctgacactgaatttttatttttttatgttttccctgaagtcaaa

SEQ ID NO: 3874 - DNA, 201 bp, Bos taurus
attgtttcaaactttgcaatatatgtaacaaactataatcacagattatgaagtggagtgaaatgcatttggagaggaatgaaatatcagtacactgttcagcatgatgatgaaaacaatattgaggcaaagatatgtcagatgaatcaatatgtatatatgtcttctgtaaagaaggtgttggatttttaaatgtttttg

SEQ ID NO: 3875 - DNA, 201 bp, Bos taurus
tgctgttggaatcactggaagttttcagcacgacactgttttgtgagcaaacttctgaaagtatgcttttatactttccacacccctcctccacaggcctccaaaactcagctatcctaaagggagttaagacttcctgcagcagtagacaaagcactgagtgttagccgctctgccaggttcggattacctccgacggcg

SEQ ID NO: 3876 - DNA, 201 bp, Bos taurus
tcatttcttcttctattcatctttatacccctcacctgtgtacacaacacacacacacacacacgcacacacacaccctccctgttatctggccacccttgatcagtcatcattcacagaaaaacctcctaacctttgttcattatattccctttatagagaagggccatgactctccacctggtttttccaatgtatcct

SEQ ID NO: 3877 - DNA, 201 bp, Bos taurus
agtgattaactagagttggtcctgcatatggggcccaagattaccaccagcttctgggaactggggaagacaaaagctggataagtgaggcaggaactggcatctgagagtccctggcccttgcagagtgtggtcaggaaccaataccaccagcacccctggaagctcattagaaatgcagaatcttgaatctcactttag

SEQ ID NO: 3878 - DNA, 201 bp, Bos taurus
ggacatattctaatagcctgagtttattagtaggtagtaaaatggtcctggtattgtgaagatgcaattcaggatgctgacatcctttatctgtttctcaggggagcagatctcctgcgtcagtagtcaatgaggaggtcagtacctagtcctcgtggcctgtttggggtgggagtggtgaggtacattcctatctgtctc

SEQ ID NO: 3879 - DNA, 201 bp, Bos taurus
attttccattcacttgtccaacctccccattctcaccttttttctctcaatacattcagttagctgttgattgtccctggttttagacccatttttcttggcccttggatttttcattttttaaaaatagattctggtcctattctatctgcaacataattactttcttgtgaagtcttgggtttttctcctggactcttg

SEQ ID NO: 3880 - DNA, 201 bp, Bos taurus
tcaaacatgggtatccatattcttggcttcttgatgttccctaactttaaacagcttacaatctgagttaggaacacaaggaacatagctactttggaaaaggcctcgcattgcaaggtaggcataaaacaggtagcatcagagttcgtccctgattgtgggagatgtcaacaaaggttcaagtatgaaaaaaaggttaat

SEQ ID NO: 3881 - DNA, 201 bp, Bos taurus
ataatctccctattatcactttgttgagcacttcttggcctcccttcattattttgctccccattagcagttagaagtagctgctttataggagctgaacattgttgaggccctttggcagtgcttctgcatgtggggagccagtgggagcacgagcaggaacacagcccctgtgtttccaaagtcacgcggatgctctct

SEQ ID NO: 3882 - DNA, 201 bp, Bos taurus
aggagagaaaggcagtgataagaccttccacaaacacagctgtatgacaaggcaaagcaggaaaggtttacaacttgggaaagaagttatctgagaaaattcagcaacttgggaaagaagttatctgagaaaattcagcagcagataatagagggggagagctgaagaaggaaggaggtgactggggcaggcgctgagcct

SEQ ID NO: 3883 - DNA, 201 bp, Bos taurus
tggtttgggcactggtattccagaggataagctatacctacagggaactaggtgcacgcccctagggaaagactggaatcaggccttgactcttctaggcgtctactttagaaccatttgcagattttaagccagctaattttaacatctcatgagaacagttcctggaggggcccagaggctggcattaaataactccca

SEQ ID NO: 3884 - DNA, 201 bp, Bos taurus
ccaaactaaaatgcttcttatcccccaaaatactgctctactggcagagttgccatgttgcagaattcaaggaacgatggccacagagtgtccaaggtggcaagaatatacagaagaactgtacagaaaaatcttcatgaccaagataatcacgatggtgtgatcactcacctagagccagacatcctggaatgtgaagtc

SEQ ID NO: 3885 - DNA, 201 bp, Bos taurus
aaacacttttgagaaaaagtatatttcctggccagaagttattcagggtctagtgaggagaaaaccaagtcatagacaaaccatgaagatggtagaagtatgtgtcgggggcctcagagcaggcaaggttctgtgcgggagcacgtagacccttgctgctgctcccacactgccatgttctccctttgcattatctctgct

SEQ ID NO: 3886 - DNA, 201 bp, Bos taurus
aagtggggtatacacactccagggatgtgcaaggtgattcagtagagtgaaggaggacaacatcagaacttccatttatagttattttaaatcttatccactaaaaactttctacctctggcatatgttttataatatattagcatagcatttcattaaggtaaattataaacaaatgcatattagaagttgtgctaattt

SEQ ID NO: 3887 - DNA, 201 bp, Bos taurus
aatgaaacattccatgaaattaaagaggttgtcaactccatggatgaaaagtccatgtcaaggaaccatgcttcaccccttaaaggaggccaggctagttgtggtctggtccagagagcacagacttagagtcatacaagcttgtgtctgaagttcttccactggccttggacaatttatttaacctgagccacagttccc

SEQ ID NO: 3888 - DNA, 201 bp, Bos taurus
tatgcagtgtcctcatttttgaaattttcctcattccttttcttttggagggaggtgcaaagtgtttattagggcagaagaggggccaaagaatgatggagcttgataaagtctctatgaacccactggagctctggcgcagtttaggctattagagcatcctgggcatggcagatagaaatgggcctttgggccccacct

SEQ ID NO: 3889 - DNA, 201 bp, Bos taurus
aaagcatgaacagctcactctctatctggttacttgtggttttatctttacctttccaagaaggtgggaaagaagaaatgggggccatttccttaaaaactgtgaagtgtagtgaagtaaaggtcgctcagttgtgtccgactctttgtgaccccatggactatacaggccagaatactggagtgggtagcctttctcttc

SEQ ID NO: 3890 - DNA, 201 bp, Bos taurus
actcaccaggctacccacttagaactgggacaggccagaaggccctggggtaacccagaagtataactgccagagcacctggggggcactggatgattctgtgtgcagagagttactgggggcctcagaggcaagcagtggggacaatgggccatgcagatcctggtctggattcagagaaccaggcccagacaggattgt

SEQ ID NO: 3891 - DNA, 201 bp, Bos taurus
agaaaaatggaaaaattcccctgtgaaggttaaaattaaatgaaaggcagataagaaaacattatctttgatggcatgtgactatttcataagggatttttctgccattatagccacttgcttttaaggataatattcattcattcattcagtcatttaatgattcattcatttatgtaactgagtcaccactacgattat

SEQ ID NO: 3892 - DNA, 201 bp, Bos taurus
aaatctgtgaatatattacgtcccatgcaaaaggagctttcttaagaatcttgagatggggagatcatcgtggattatccaagtggcccagtatcacaacgctcgttatatgtgaaagagggaaggagagttggtgttggattgatgcaatgtaaaagacttgactggccattgctggttttcaaggtataaaggcagcca

SEQ ID NO: 3893 - DNA, 201 bp, Bos taurus
aactgaagctcagagaaagtgaacaactaactctggcatataactagtaaacagaagcctacggatacaaatcctgatctgtacaactccaaaatatatgttctttccactatatgatgaccagcttagaaacgatataatccaaatatagagagttgagagcctagggtagagttactttatttcattcaataaatattt

SEQ ID NO: 3894 - DNA, 201 bp, Bos taurus
tctaccacatggcctcacatcctctgactggctagacccagcttcattacatgatagatgttatagatataatagatagaatgtacttcttacattataagaaggagagaatggaagcagtaggggcctcttgaggccaagtctcagatgcctcacagtgtcacttctcccacattttttggttccagagccatccccagt

SEQ ID NO: 3895 - DNA, 201 bp, Bos taurus
gatgactcactacttaaggggttggtaacatttctataaaggaccagatattttaggccttggccacacggtctctgtgagaaccattcaactccgccattgtagtgcaaaagcagtatagacaatacactgaaaagcgagtgtagttctgttgaaataaatttataaaaccaggtggatttagtccatgggctacagttg

SEQ ID NO: 3896 - DNA, 201 bp, Bos taurus
ggttggcaggggccagcatgctctatctagtacctaggctggaatcttaggagtcatctttgaatcctctcttatcagaacacactaacagtgaccttagacaaacaaatttacctctgaggcctcaattttcttatctgcaaaatgggatctctctgaggtttaaatgcaacagtacttgtaagagcttatgagcaacac

SEQ ID NO: 3897 - DNA, 201 bp, Bos taurus
tggtcccttccaccatagccccttgagttgtgaagtggaaatttgatgcccttatataactgagcacttgtattattcaattaagcaaggtgcttgctgtgtgaatcaacaaaacaactccaaacgaagatcaggaaaatacatctcaattagtgacagcaggaccagtgcccgagggccccaatcctcgagaaaaatagg

SEQ ID NO: 3898 - DNA, 201 bp, Bos taurus
taccagctttcacctcatgtggtcctaagtccattctttttatctcctcatatgctttatgcttcagtcttctaggtttttatatcttcatctgaaacctatttggaccataagtatatcagttcctgcttcctgatcagggattaagtttctcctttgtttctgtagctggggtattccatttcttattttcaagtttgg

SEQ ID NO: 3899 - DNA, 201 bp, Bos taurus
tagcttgactctcaggctttccagcctggtggtttttgcactgtgtgtctttccttggcaagatggaaggggatgctcactgatgtctgagtggcacagtgtggggccaggagtgggtttgtggaagaatggacgttagtcatgcagccacagagggacaaactcttgttcccagagccacttacctgggaggtaaggaca

SEQ ID NO: 3900 - DNA, 201 bp, Bos taurus
agcctgatccagaacacctgagaagagcttggagttgacctttccatttcacccaggcagaggagttaaaccacccctttatcaattggtaactgtacctcctggcccacctggccaaaacacctggaagctgcatagctcagcaacactcaagtagagagtatggcaggcagagatgataggctgcaaagcaaagccagt

SEQ ID NO: 3901 - DNA, 201 bp, Bos taurus
ggcaggacctgaggaagtgaagtgggaggagaggggagaggcacagttattgactcaggaggtggacttcacctaactgatcaccctactatttgtagcctagcagtgtgtcccagaaagcaggtcaggaaaaaggaatcctagagagacaggctccagtaatctcttgtgtgatttctgtttctaggtttttctgaaata

SEQ ID NO: 3902 - DNA, 201 bp, Bos taurus
aaccggaaagtgagggttctctagagctaatacacggccagggcccccagtcctgggggttgggaggaagacctatcctgtccccgtacatttatcaaacaggacctctctatgggccaacggatggggccctcaaaccagtgacccaagatgggcaaaaatcatgttctcacacagtatcccgcagaccccgggtctgca

SEQ ID NO: 3903 - DNA, 201 bp, Bos taurus
atgtttgaatatggcccacatatacatcaagatacagttccaacaatgtaaatccttaaaaacaaaactgtgtgccttaaaaaaatatagtaccagaaaacagtacaagtggcctgaggtgacctctaaaaatggtatactattcactcaacccagaaaaccccacaaaatcatgcagatcaagaggttcaaatcttcgtg

SEQ ID NO: 3904 - DNA, 201 bp, Bos taurus
ttaaacttggggaatgcttttgattaaaggatattaaagagttatgtccaccagatacagtgcaggagccctgactgcttcctagactaaaaacaaagaacagctaaaaagggcctttggaggcacctcaggaaatttgagtatagaccatctattcgatggtattatttagttggtattaaggtttttggatatgtgtga

SEQ ID NO: 3905 - DNA, 201 bp, Bos taurus
gatggccttagttgatggtggctgctccctcctatctgaacaactctgatattggcttctgagatgccatcttttctggaccctctttacctgactgtgccttaatggccttttgctggcctgctcttcctctacctgtcctgtgattacaggggttcctttccttctggttccttccttggcagccttctgaatctatat

SEQ ID NO: 3906 - DNA, 201 bp, Bos taurus
aaaacaatttttaaaaaaatcctaagacatcttaggcctcacagggaactctctcactcctgaaaacctacaactcattaaaaaaacatttggaaaagcacgatgtggactatcttaggccacagaccaagaacacaattccaggttcagtcctgcttggctgcaaaagaaggctaatggtaacagaacttctaaagacaa

SEQ ID NO: 3907 - DNA, 201 bp, Bos taurus
ataagaacaaagttttgagtagatgtagcactcggcaattccaggaactacctttaaaaggagacaaaattagcgagcatagctaatccaaggaaatggcatctccactcagttttgattcagaaagtataaacacaaaaatttaatgataagcctctgggtgaacatgcatatttttgagctcttgttttaagtcatcaa

SEQ ID NO: 3908 - DNA, 201 bp, Bos taurus
gttcaccttcctcattctcttgggccgataaacttctactccatcttcagttctcagtctaaatgtcacttcctctaaccaataccctccagtcagaattaaagttcctaattatatggccttgtgacacccgtgttttgactttggtcatacggatcgcatgtattgttctttctgtcattgtctgtctttctcaataat

SEQ ID NO: 3909 - DNA, 201 bp, Bos taurus
ttatgaccaagaacaaggccctatatttagtatgagttccagggctatcattgcaaagcaagaatggcagcctaagtaccttcccaaggctgtagcttgcaggcccttcctaactgctagtgcttcttaattaaaattgaagttactgagtgaacaatttcagtttaatctgttttatgcatattaatacccagatactct

SEQ ID NO: 3910 - DNA, 201 bp, Bos taurus
tggccactggtgatccattcattctccagcccctctccctccctgaggagtagggggactagaagacataagtgctaaatctccaatcacagggctaggtccccctggcaaccaggcccccctccttggttgcctaggagtactccaaaagtcacctaattaatataacaaaggatacctttatccatctgtatacttagg

SEQ ID NO: 3911 - DNA, 201 bp, Bos taurus
ccttctgttcccccctcagcccacggtattttgactttatccaccacttttccatggaaataaattaccagtattccttgttgctaaatccaatggattcagtcttattttagttgctgtgatccccagcaatagtgtctctctttctttttttttttttttttttgagtttttcttttgtgttttctacagaatttgcat

SEQ ID NO: 3912 - DNA, 201 bp, Bos taurus
tggggcggcttgtcttgttggggaggataggttctaggcgctgggctcagtagttgcagctcctgggccctagagcacacgggcttcagcagttgcggcccactggcaaagttgctctttggcacatgggatcttcctagatcagggctccaacccctgttgcctgcattggcagacagattcttaaccagtggtccaccc

SEQ ID NO: 3913 - DNA, 201 bp, Bos taurus
gcctgtaccttttcctttttaatctcaccttttgagatctatccatattattgcatttaagtcttgtgctttgtttaccaattgcacaatccctgattgctaaaatgaataaaggaagagtctaacatgaagtggattacatacagaaggcccttcctgactgttttcagggagccattgaacatcagataaggctctgcg

SEQ ID NO: 3914 - DNA, 201 bp, Bos taurus
atgtacgtgtgatacatgtgtgtcaactcagccccatgagcgtgcacagggcacactagacccagggtagcatgcaggcttgggcggccgcgggagcaaggtgcaaggtggggaagaggtgtaggtagccttggagaagagaagacctttggggtgggacacagttaactaggtggcagtagcagctggccctggtggccg

SEQ ID NO: 3915 - DNA, 201 bp, Bos taurus
aggtttggaggaaccctgccctaggaaccctgctttattggtggtgaggctggattcaggggcacagacctgattctgtcactcccagctccaccggccaagcagtgacagacctggaacccagtccccagaacttagaagttctttttcggctaatacatccctgagacacaggcctccactttgtgcgcacaaacctct

SEQ ID NO: 3916 - DNA, 201 bp, Bos taurus
cttcagcattccttgctaggactgttgcagtagtctccttgttgtcctgccttttgtgtctccccaatccaatgcacgttctctcagcacaggtctggccgggacacatttttggttacagatagtcacttctttctgttgcagtcagtggtatggagtcagctttccttgacatgaggtctgaggccacaccattactat

SEQ ID NO: 3917 - DNA, 201 bp, Bos taurus
gtagacagacactttactgtctgagccaccagggaaaatctaaaacttttcttagtccataggaatttgagaaagggccttactggctatctggttgatatttattaggctgcattttaggagctcagtggttccataatgatgagctacatcagaatccctggaatactggttaaactagagtcccaggcctcactccag

SEQ ID NO: 3918 - DNA, 201 bp, Bos taurus
cttcatttgaaaacaaatattgattgaactcctcctatgtgttagacactggagatagagcattgaacaaaagcccctgttcacaaagcttcagttctaatgggaagagatggatgattaataaccatgtggtgataagtgctgcaaaaacaatgcaggagaaggcaaatgacaaaatgagaggacaaatgtggtgtggat

SEQ ID NO: 3919 - DNA, 201 bp, Bos taurus
tatctaagtgttgtctttcatgcttcctaataactctttccccttttttttgtttgttaccttcatagcttgttcatcaagatctggatgaaatttttccctcatgggattttgtaatgtgcacagacatttccaaggaaattctaaacagtcgccacccctccccccaaattcttagttggtagttgaaaccacgggtac

SEQ ID NO: 3920 - DNA, 201 bp, Bos taurus
ctccagccacacccattggatgctgccaataccttcactctccacagcactctcttagagcgttgagggggaccccctcatatctatgcctcttctgagcccttctagcagttacccaaccttttgagagtgtgaacacccctcttcccgagccaggaaggtgtagtgctcagcaaggggctatggatgagactgcccatg

SEQ ID NO: 3921 - DNA, 201 bp, Bos taurus
cagagcatttccttctccctgaaaagtaccctggggtctcagcacagacagtcccctcccccagcctgcagaaggctctgccttaaacagtgcaaatgcccctaagatgaccacactggtgggtactgaatgtctgactacgaggacagttctcttctagacgggaagcactgggtgagggccagttgaggatggagtggc

SEQ ID NO: 3922 - DNA, 201 bp, Bos taurus
cggcacttagagcagtgcctgcctcatagcaagcagtggaaaaactatgttgaatgtcttcctcagtcatgaagagccatttgtcctctatattttatactttgttcttgcttctagtttggtagtttttttatgtggaatgatattcataaattcactcatgattataacccagttccctgtgatcctgaactgtgttcg

SEQ ID NO: 3923 - DNA, 201 bp, Bos taurus
accctccaggtttgtttcctcaagagccgccccatcactgcttgtgggcttggaattgagtcaggctctcaatcctgggatctgagggagtgacggggccactcagcccgcatggggactctgtgcttctcctggctgctgagtaaaacaaggacttctctgctgggggggaagctccaatgtccagtctcagctctcccg

SEQ ID NO: 3924 - DNA, 201 bp, Bos taurus
tgtccaaggtctacagcatggcccagaacctccagtggagagactcttcagtcataaacaaatgaacacagctcacgtcagagctgactgtggatggaattgattgtggagttaagtttcctgctgttttgctccatcctgtgctgtgctcagtggctcagtcgtgtcttactctttgccactccatggactgtagcccac

SEQ ID NO: 3925 - DNA, 201 bp, Bos taurus
cacctgcacagaataacgattattgtgcctctctttccccacgttccccacgcctcagaccatgctgcttccttatttgctatcccataaatgcccccagccccttgcctttggggaggcagaattgagactcattcttccatttccttgcctgggtgccttgtgaataagttcctctgctgcaaaccagcatctcagctt

SEQ ID NO: 3926 - DNA, 201 bp, Bos taurus
aatcgggacacctgttgattccagctcaaagtggccatggacagcccttgtctctatgggagcctctgatcctcattcgtgagcagactgacctaaatcattgtccttaacccatggcccctgagcccactgaagctttgttattgccccataatctaacttcagcataaactattagaaccccatttccacacttctcct

SEQ ID NO: 3927 - DNA, 201 bp, Bos taurus
ggcaaactgtggcgggcagtcacccatcttaagcaggcagcctcctctggctagtgggtgccacttagtcaagcaggcccagcactattagagcctttggtttttcaagagaagtcagaaaacagacttttatgtgaaatcgcccactgattaaatgtttgtccacttttttagaaagactaacgtggccaaataaagtat

SEQ ID NO: 3928 - DNA, 201 bp, Bos taurus
ttgttggttgcaggtggattgcggctctgtggctccactccagatgtcttctgagttctaggatccaggctggggagcagctcctctcagtctcatggccgagagtaagagagcagcaaccgaaccataccatggctcttaaaacttctgttcagtgagcgaccctgtcatgtctgcccacattccatctaccaaagcagg

SEQ ID NO: 3929 - DNA, 201 bp, Bos taurus
cctgcagcatggagcaaaatgactcactccagttgctccaccagtcttaagaggaaattcctagtcccgcatattctacacagtcaatagaaacttggcagggccggcagcatgctgggaaaaggaggcagcagttccgggctcagaagaggtggcgggattttttgtttcaatcatgcaaccaagtttcattgagcaatg

SEQ ID NO: 3930 - DNA, 201 bp, Bos taurus
ccgagggggacacaagggtccctgaggtagttttggggtcctgtccagtttcattcccatttgaagggattgttaataccaagaatatctgcctatcatgggtattaccttagatttattaaaaaagaaaacaagataatatttatatagtactctgtaccagcaccattctaaaatacatattcatacttttaggaatta

SEQ ID NO: 3931 - DNA, 201 bp, Bos taurus
ccctggccagggaactagatcccgaacaccacaacgaagatcaaagatcccaagtgctgcaactaagacctggatcagccaaataaataaatttttttttaaaaaaaaagaaactctagggtggggcccagccatttgctcaagaagcctccaggtgatggtgaggctgactagtttgaggaccactggctttgggctttg

SEQ ID NO: 3932 - DNA, 201 bp, Bos taurus
gaggaaacctttctccaagattgaatagcatgtgaagagacacagaaatcagagtatagagtactttttattgaggtgtctacaacttgactgtgatgctctggatgtggccaacaaaattgggatcatccaaactgagttgggcttccctggtggctcagacagtaaagaatctgcctgtaatgcaggagacctaggttt

SEQ ID NO: 3933 - DNA, 201 bp, Bos taurus
tgagtgaggttgaagcatggcatatttggttgaaaaggtaccaaagtattccatgtatgcaaacagagtgtgcaaagggcctttagcagaagggagtatggcgagaggagagcagccagtgtgactggaatgggagaagcaagtgaggggggccggttagaggctggagtaagcatcttccagagtaaggagtctgtgtct

SEQ ID NO: 3934 - DNA, 201 bp, Bos taurus
cacccacatgccccgcatgcctcaacccaactgtagccataacacatgaataggaaatctttttgacctgcaccgtgcatttctcaaagtgtggcccctggtctacctaaatcaatatcataggggctgcttattaaaattatattcatgagccctgtgcaatcagcattactggagataaggccaggaaatctgcattta

SEQ ID NO: 3935 - DNA, 201 bp, Bos taurus
ggctgggagcctcaggctcttcttgtcaactgcagggagccttctccactgatccactcaatcctcgtttcaaccattttccaagagtgtcatgatgtgtcatgacagcatctgctgtcccacgcggcccctccttgggtcttctgatctcactactggaggattgagtgttggtgtatgaaggatccttggggctggggg

SEQ ID NO: 3936 - DNA, 201 bp, Bos taurus
ttagttcccctggggacggcaggcctgcatcagtctctcacagaccccctgtccccgctcacatgccccggggctccagagttcagcactgcccagtggcgcaagaggcctgacttcctgttagaaggggcgaatccatttttgaaaccagagatacccaggctgataagggccctattcagaaggctcccaagaaaacca

SEQ ID NO: 3937 - DNA, 201 bp, Bos taurus
gtcaacattattttgctgggcctggtgttaccaccttctccagtcactggtgagagagaagatccaatttaaaagtgggtgcccctgagacaggccattgataaatggacttgacaccttgacctcccttcttttccagtgaggttcagtaatggtgaatttgaccatgggtgggcaaccatggccaaataatatatttgg

SEQ ID NO: 3938 - DNA, 201 bp, Bos taurus
cagctttgtggagatagtccccgcccatccggccatggctgggttggccactgacatggatgtgggctgagaaatgaggctggctgtttatcagggcttgcccttggctaaactggggcccagccacctttcaatggccccagatggtagctaagtggtggagactggacctccatgaggattctgatgtaggtccccttc

SEQ ID NO: 3939 - DNA, 201 bp, Bos taurus
tgcctgtggctgccggctgctgctgtatcccaccggaggccccggggatccgggagctgttggccacgccacgtgaaggggcctcaggagcctagccctgttgctgctgaccatccatagccatgtgacagcaaacgccacatctcatgggcatgatgttttcaggtcaaagcaaggtgaggtggccacacaggctaccag

SEQ ID NO: 3940 - DNA, 201 bp, Bos taurus
aaacaggtgtcaggtcatgggtgtgggacagtgcatctggtttgtgttttgctgaactggattgggatttcatggctgcaggtggccttggggggaagggaagataaatgagaagggtatcacaggagtgtgtcctggggagtaagattacaggtgaccagagtagaactgcatgagactgagccacccctgagtggacca

SEQ ID NO: 3941 - DNA, 201 bp, Bos taurus
aagaaaagagagagagagagtgaagagaaggcttcaacatgtaagatgcttatccaaagtggatttggtctggaaaggcctgtaaaaccttccacatgaccggcacagtgcagggataaatgaaactctcaaatcctaccaagtatgccctcattcaacctggatccttggagtggcctccaaagtgtccacagctcaaga

SEQ ID NO: 3942 - DNA, 201 bp, Bos taurus
actcagagaggtgcaaggacctgcccaaggacctacgtgttcttcagcaataaagcctggtccagaacacggggtggtagacgccaagggtcacacaagacacagacagaaacctctgcaggctctgctctccttaaagaaaatagggacactccaaataaaaccaaattctaaaagcaacggtattttttatttacaaat

SEQ ID NO: 3943 - DNA, 201 bp, Bos taurus
aaaaatgaatatatgtatatgtataactgaatcactttgctgcacacctgaaacccaatattgtaaatcaaccatgctccagccaaattaaaaaaaaaaacaacactttactgagagaaagatcagtatgaaatgaccagagaagttaaaattcgttttcttccaatgatttaacatttaaatgtccttgcagttttctcc

SEQ ID NO: 3944 - DNA, 201 bp, Bos taurus
tgacgaaaaaatggacccttataaatgttaagaagcttgaccagggatgagatatgacctgcactgtttcctttataagccaaaactcaaactcttaacccaggtagcatgttgatccccacaggaaggctaatgtgatgtcgacattctgattgatgcatagtttgctcagatggaaagtgaaagaaaatctcaggggag

SEQ ID NO: 3945 - DNA, 201 bp, Bos taurus
cagcattctttggtacatgggaggccagcagccttaaaaggattcaggcttccttatgtgcccgagggcttccttttctacctctgctttgctgtggaacaagctagactggccaggtgatgggacacagtaggtactagaggagaagcaagttgcgctagccgccagactcctggtctgaagctgaccacagacatttgg

SEQ ID NO: 3946 - DNA, 201 bp, Bos taurus
tgcaggcgacagcagatcctgggccagtaacttctgtgcagtgagcatggacccatctgcacttaagccttagataaggagcctggaaagtatggctgtcgaggggccagactagacattctggcttggttggcaaagggcagacttgggcatcattcttcttaagatgcaatccccactccaagccatgattctaacctg

SEQ ID NO: 3947 - DNA, 201 bp, Bos taurus
tcatgtcagaagagctctccagcggagaagaacagagcaaatcaaagacctcatagtgtagtaaaagtagcatggactccaaggttggccagagccaagggtagaacctcaggagcatcacttatttacctgtgaccttgaacacaggatttaacctctgggcctcagtttcctcatccatttgtgggtatgcacttgtac

SEQ ID NO: 3948 - DNA, 201 bp, Bos taurus
ccccatctactttatctgcacctgaccactgaggacagttcctggaccattcactcagcaagcacaggctctgccacaggggccgtgcagagaaagataagcagaatataacccggaagccctgcgccattcctggtctaggggtgatggtgcgtcatcagcctcaatcaccaggcaatgcctcggcctccctgagtcacc

SEQ ID NO: 3949 - DNA, 201 bp, Bos taurus
ttcaagtcactaagctataaaactgatattccataatgatctctgggccattgactcctctaaagcacccccactcctctagcttcgtgggcagacatgctgctgcttcactctctgtagagttggccaagtcaccatgctgttgtctccatcagacctctggaacaatctttgtttctaaaaatgaatggccagtggaga

SEQ ID NO: 3950 - DNA, 201 bp, Bos taurus
gttacaaaacaagccctgttctagatctaagggccagagagacaaaacagacagggaacctgccctcagggagcttacattctagaggtggtactgggggagtggccaagacagatagttaaccagcaaatacataaacaagaaagtatggatagtgaaggcaagcgttatataagatggttagacatcttttgaggaggc

SEQ ID NO: 3951 - DNA, 201 bp, Bos taurus
caaaggccccagctctgagcaccggatgcctgttatcttcagatccattataggacaatacgctgctaactacagacatcagctagagggagagaaggctccttctggctcctacgaggccgagggaagaggcctgatgtgcaggtccagtgtgtggaaaggtcacatgcatcccccgctggcatgcagtattgctctaac

SEQ ID NO: 3952 - DNA, 201 bp, Bos taurus
tccatgaccacggagtctgggacgctgtgctcatccctgtagtgtggccaaatccggaaataggaggtcggtggtcttggtctctggcccccaacacctcacttctccagccttgctttgcctgtcatgcaggtcacatgtctgaccaagttcccaaaggcaggaaaggagaccttttcctccatctcaaggcaggcctac

SEQ ID NO: 3953 - DNA, 201 bp, Bos taurus
ccccctttctggataatttccctgggcccagacttcatgaggacactgagcacccatgttctgtcaaagtggggttctagcctcttcagctttgtacctctagctccacacataataaaactggcccatttcagctgctcaagtatttgactctgcaagggaatccagagagagggtggtgggttctctgatggaattaag

SEQ ID NO: 3954 - DNA, 201 bp, Bos taurus
ggccctactttgattttaacagcagaggaaactgaaaaacagaaaaatgaggtaacatgcaagtcacgcagtttgtttgtggtagaggcaggatgagaatgcaggcctttaagtcttctggccccttctcctgcctccttagagatctaaggctctgtgaccctaagggttttgactgtaacattgtaagggtatatttct

SEQ ID NO: 3955 - DNA, 201 bp, Bos taurus
gctggtggggacctgctcatgctgggaactcagtaataatcacagtaacagccatggcgattgctaactcttatcaggagctgcatgcctgggcctctttatagagctcagcatgtatttaattaatcctcacaactaacctaggagatgggcatctgcctccattttatatgtggggaaactgaggccccgggaggttga

SEQ ID NO: 3956 - DNA, 201 bp, Bos taurus
tgaggcatccgcttcgaagatggtgatcttaaataaacacactggtagccccagcactcagtcaaatccagctgccttccccacagaggccccttggtttcagagctcttggttgatttaatcactgaccattcgggtcacttgctcccgtgccttcaatttcccctcttaagtttaaatttaccaataaagagggagccc

SEQ ID NO: 3957 - DNA, 201 bp, Bos taurus
aatttttataaataaataaagccattttatttttctgaaaaattggccctttggtttttataacattgtaacattgtgtcactgctactctataaatatgtgactggaaagatgaaaaggccaatcaccagatttaaatgactataagcaaagacattactcaagagaaaacccattcatttggaatcattccaatccccc

SEQ ID NO: 3958 - DNA, 201 bp, Bos taurus
acatgagcatgtgtgtctactatagtagaattccataattaaatggccatctgcttttttctttttaaagcaaaactttgataacttattgcaaataaccgagaattataaaccaaaagcaggccttataaaaccagagcatatataataacaatgaatgcacaccatgcagctactgatacagatctaacatgtgatgaa

SEQ ID NO: 3959 - DNA, 201 bp, Bos taurus
gacaggactgaagcaacatagcacacatccttattccaaactattgataaacatgatgtgtcagcctttggtcaagtacaaagttctgggtagtaagtcctatggaggcccaggctctctgggaacctcccaggtttagcaggaggccctcacagggtgagtgctgacctatgctgcccttcgacctgatctgtcctccgc

SEQ ID NO: 3960 - DNA, 201 bp, Bos taurus
cacaagtggctattgtgtaagacagaacaggaggcctccacggtggctcactggtaaagaatctgcctgccaatgcaggagacacgggtttgatccctgaccgaggaaaaccccacaggccactaagcaaccaagcctgtggattgcaactcctgagcctgtgctctagagcctggatgctgcgagtactgagtgtgtgcg

SEQ ID NO: 3961 - DNA, 201 bp, Bos taurus
aaaaccttttgctgcagaacattttgctaacaatctctgtctatgtaacagaccacagttggtaaacacggccaggcccgtctctgctgagatgctgcagagaaccgctaatcaatggggtagtccaagaaattaaccagagggctgtgacagacagcaaccagggctaaacacgtcattaggcaaataggccggtgtcac

SEQ ID NO: 3962 - DNA, 201 bp, Bos taurus
aggccccagtccccaggcacaggagccagaggtctggtaggcctaccccactagcacccctgacaattagaaagaaactcaagggacttctcttgaattccgttaggaggccccagataagcccctcttggtcaaaatgcttctggtggctcacgcaggtaagctccttgtgcacaggtaaacctgccaaaaccactgctt

SEQ ID NO: 3963 - DNA, 201 bp, Bos taurus
atgtatcggtttttttaataaataaaatttaaatttaaaatggaaatacaatacattatgtctataatgtacaataacaaaacataataaattaaaattttaaactaaattttaatctcatgggtagaggccttgtctggtgtaagaagatacccaaatgcaaagtataacccggtacccacacaggccagaatgtacctt

SEQ ID NO: 3964 - DNA, 201 bp, Bos taurus
tgctgaatatagcctcccttgctggattatgggaactctttattattaagtctttgtgggcttcgtggattgagcccctgaactcggtgggcatccattccgaggcctgcacatggaccgtgcatgcacaagggtttggatgcaatgaaagatttctatctccaggcctcagttcccaggatgagaaatgaaagattctta

SEQ ID NO: 3965 - DNA, 201 bp, Bos taurus
ggccaccacatggtctgcccaaggtaacatggtgagtcagagaaagaataggaacgaaagcaaaagaatctgtcagtggtttgcccagaaggccttccaacttttaactcaggctacactggttcctttcaggctgccctactctgaggggtttgtccagtagttttggagtcaggcatcgagccaggtctcaaaggtcta

SEQ ID NO: 3966 - DNA, 201 bp, Bos taurus
tctccatttagtctcagggtctctctgtgtggtgagttcacatggagagtttgggtttcctcaggacatggtggcttcaggccagtcagactagtcacagggggcttaagactgccagagcacgcattctgactaataagctgggagctgcatggccttctatgatccagcctcagaagttgtgtgtgtgtgtgtgtgtgt

SEQ ID NO: 3967 - DNA, 201 bp, Bos taurus
ttgcaagtgaagttaagttgcacgggagcaaacacagccatactcagttgcttccgggtttgcttttgtgctacaaggtcaaggttgagtagttgagacagaaactttatggcccacaaagcttggaatgtctcttttcagaaaaggtttgcgaatttgttatagatgattaaaaaatatttttggattaagtcaactcaa

SEQ ID NO: 3968 - DNA, 201 bp, Bos taurus
gcctgttccagctgaaatctcaatattagttatcttgataaagaggaatttctataaccagcctccaactctgcttcctcatttaatgtccttatacaactggggaaagacagactgtaccatgaatagcatcatcactaaaacatctcctgcagcttgtctgtctggcaagggcttgtgaaatcatggatgattagtgaa

SEQ ID NO: 3969 - DNA, 201 bp, Bos taurus
tttggaggcccttaaagtagctttcctgaaaagttcaagaacttctcctatcactctccatttacatgggatccatgagcagacagacctgcccccaacatcctcaaatcccagtaaggacactagcctgccaagggtctcaagttcacacacagagacactcctgctgctcactctgcagagggagagaagaaaggctgt

SEQ ID NO: 3970 - DNA, 201 bp, Bos taurus
ctaacatcttcttaataagggtcggctttttaaaatgcaaagggtatgttctgcttctccagcagtatgtcagccctaatccaaaccagatcggccactgtacagggttcatggtcccaattaagaaccaaggctaagctctcaggagccggcaccttctggggctgctcagagtcctgggccaacctgctgcctggcaca

SEQ ID NO: 3971 - DNA, 201 bp, Bos taurus
acatcttttagtaattaatagatatagaatcctgaattcaaactattttcaaatatatattgattatctataaaaattgaccatctgctggattataaagctccgcatttgaaaggactgcaatcattacaggtcgtgttctctaatgatgatgctattgagaaagaaatccacttttttaaaaagtgatttttatggtgt

SEQ ID NO: 3972 - DNA, 201 bp, Bos taurus
tgagcctaatgctcggggcagagctcccatggggttctccctgtgcctctcctcttgggctggtcccttgggcctccctctttgggaggaaaggccagatattaggcagggaggacccttgggatggcagagggagcattggagtgtcagaacacggggctcagcccagaagctgacctggccatgggggatgtcataccg

SEQ ID NO: 3973 - DNA, 201 bp, Bos taurus
tcagtaccaatcccgttctcctgcctcctccaccctaagtctctcccagcccacctgaccccacccctgacaaatcactggccaggagtatcctgggaaaagtcagggagaaggaaaactcagccccaaggatgaggactaggaagccaaaggccttatgggaacaaaagccatgcctgtggtcaggccaaagctggtcca

SEQ ID NO: 3974 - DNA, 201 bp, Bos taurus
ggggtggtaacatccggcagctcccatgcctggcccttgcccccactctcacccccacgcccccattccccacccccggaggcccttgttctgcctcagcatctctcagctcccaggaaccagaggctgtgtctccttgagctttctccactgcatacaccagccagggccagggctccacctagcacataggctcgtggg

SEQ ID NO: 3975 - DNA, 201 bp, Bos taurus
ttctatgacaaactgtttaatgttccataatgtgcagcttctgaggggaaaaaaaaaagcccattaaaaatccacaagctgtacattccggtaacagagtggctggccccctccccacccatccctctgagaggcagggcagggaggggcgcaggtgctgtgagaacatggtcctcgggtgtgctcaccaggaacacacgc

SEQ ID NO: 3976 - DNA, 201 bp, Bos taurus
atctaaaatgggggcagaagacgtgctttaactttacaaaatatatacaaatattgttaaaaatattttccaccaagtttcataaaataaattcaccataattgtggacctgcctgtacataaacttattctggaaacaaaccttgtgtctgggttgcactttgcggagaagcaagtatagtaaatagaagttgccaacac

SEQ ID NO: 3977 - DNA, 201 bp, Bos taurus
aacatttgtcttgctggaggtttacaggaacagcttgatcagacctatatggacagctgtaagaacaaaggattagcatatcccctctgaagtttggctggcaccaggaagttcacatcaaccagccacaccccctctccttttactataaaagaagcctgaattctaactctgaataagatggttctttgggactctagt

SEQ ID NO: 3978 - DNA, 201 bp, Bos taurus
atgacagtagattaatcacattctgatttgtgctcccattttattcctactgcactaaaagtaaaaaatgaaaagagtcatagcaactaagaaatttataacagaggacaaatataattttttgaagttcattctgttaccatgtaactatgtcatataactagtcattagtacagtagatttaaaagcatttctgaacaa

SEQ ID NO: 3979 - DNA, 201 bp, Bos taurus
ctttgcatattatcccttttaagtctaaatgcaacctccccagaaaattattatcgatattagtcatgaaagtggatctcatcttgattacagagaaattctgggttgatctgagtaagtattattgagaaagggtcctaaagcagtgatcttgtttacattctggtcatagttagacacttaaaagccttacctcacaac

SEQ ID NO: 3980 - DNA, 201 bp, Bos taurus
ctgagcgactgaactgaactgaactgaaaccaactatttaaaataaattaaaacaaagcacctcaaggtaggctgagactaaggttttctacatgcaaatgctcaaaaatagcagagttaaagattaagaacttagatctgggatatttgaactcaagctctacaacttacttattctatgacctttcatttaacttttct

SEQ ID NO: 3981 - DNA, 201 bp, Bos taurus
gtgaagaactaggcctaggtcctcaggtggctccccagggtcaaattggtgggggagtaccagactggttctccactcctccacactagagagactctcctctaactgccttgtctccatctccacaggacctacatgggcagagggtgccctcagagggggccgtggaggacagagatgacccacgtgggagtaggtgaa

SEQ ID NO: 3982 - DNA, 201 bp, Bos taurus
aggggcagggaagtctggtgggccgccatctatggggtctcacagagtcagacacgactgaagagacttagcagcagcagcagcagcagtcccctgtagcctttctgtctcactgaagagaaggaaatgactataaaacacttggtaagacccaggaacacagtcccactaaaaatggagatttaaccagaagattataaa

SEQ ID NO: 3983 - DNA, 201 bp, Bos taurus
ctgcctccggcaaccctcccagctttggcagtggcaatcacatctatttctgcaacagtgttgaagcagccctctcaacacatcctaacaaccaccagcctccctacctctcccaggggtctttggcagagcctccactcccagtcccaccctctgctgtaggcagaagctttctagccactctctcagctccctgtcccc

SEQ ID NO: 3984 - DNA, 201 bp, Bos taurus
ggaccccaaggctggggagtctgacatggggtttggactccttgttccttgaggagaacctttgcaattgtggctatttatgagctgctcccatttatgagctgcttacctagggtgtgaatcatactaaactgactctctgcccttcctacctgtctcactgtggttccttctttagtgaaaaatcttttccgatagact

SEQ ID NO: 3985 - DNA, 201 bp, Bos taurus
tagcttttgcttgtctgtaaagcttttgatttctccctcaaatctaaacagcagccttattgaatagattattcttgattttaagtttttccatttcatctttttatgtgtattccgacacgcttttctgattggcagagtttctgctgaaaaatcacctgataggattatggaaattcccttgtatgtcatcagttcctt

SEQ ID NO: 3986 - DNA, 201 bp, Bos taurus
acacacaactatttactacctactttcacattcatgtgctccttcacaatggcacttgctcagttgcacttaaatcatgagagagccaagtttttgatgaccttctgtcacctgaagctaaagtactaagtcctttcaatgatttgtcacagaagataatgccatagcatgtttcacaaagattccaattttaaaatccat

SEQ ID NO: 3987 - DNA, 201 bp, Bos taurus
attcagtccaagattttcaccccttccttaacctactcccctaggcaccccaccccccaccccaggggacttcatctggaggttccaggaatttgtaaacgctttgaaattctgtgcagaaatttgatatgatcacttttttctgggagaaagcgcccctagcttttattaaaaattttaaaggatctgtgacctccatag

SEQ ID NO: 3988 - DNA, 201 bp, Bos taurus
atctcttttctgtgtgtgggttggaaaactaatcagaaataaagtaatgcttttaataattcttgaagcatggaaaaacgtggcttaattttgtttaaaggaatagtgcatatgatagaaaataactcattgaaaatgattcatcagctctctgctgaagctccctgaactcattacaaagaatgtaagaaaccattactg

SEQ ID NO: 3989 - DNA, 201 bp, Bos taurus
gtcaaaatggtggagtgttacggtgtgaagttcatgtctcctcacaactagggcacctacttgacgttggtgggggatagatatggacacctaagagaatgagaggaatgcccaagctactacatagaatgtaggggtgggggcgagcagggagtggggagagatggaggcaggaagggacaggtacccttgagagggaac

SEQ ID NO: 3990 - DNA, 201 bp, Bos taurus
tgctggtaggaaatccacgcttcgaaacaacctcatgcactgagacctccaaatgaatcctcaaggtagatgtgaggttcccccatcaatgccttctgaagctgggacttggttttcaagctgctcaaatacaagccgtctgggcagctgcccttggcccatcctggagcacccctgggtccaggggcactcccagaggag

SEQ ID NO: 3991 - DNA, 201 bp, Bos taurus
ccatataaacatgctgcaaatgagagttcaccatgctcattaatactgtaatgcccagtcacagggtaccaggcagcagcttgacaaacaagatcagaaagttttaagattgccatgtcaatatgtgccattcctctagatagaaatcagatgtcaaatggacaggtgtttcctcttattcaagccataatccttattttt

SEQ ID NO: 3992 - DNA, 201 bp, Bos taurus
ctccagtattctggcctggagaattccatggactgtgtattctctgtacttgggtaactaatggcacagcctcaaaggcggttgtgaagatgaagggtgccagagaatgccaactcaaaacaggccactttggcctgaggattattttgagctaaaggtacacagcaagtgagctgaccagctctcttttcttcctaaaag

SEQ ID NO: 3993 - DNA, 201 bp, Bos taurus
ggaggaatggtaaactgaaaaagggcaaaggcgtggcctttgaggaagcagcccagatgaaagttcctgcgattgcataaggtaaccaccaggtggcgcatgggaaagcatcaaacttgggccctcggcggactacagttcagttccctcagcccggtccgcctcttagtgaccccatggactgcagcactccaggcttcc

SEQ ID NO: 3994 - DNA, 201 bp, Bos taurus
gaactgcaggagacaatctttctagacaaggcagttgaggaggagggagcgattgaaggggggattgacttggcgtgcactgtgcccctcgggaacgttattgcgcgtggaacggctgcttttggaaggtgagtaactcgaaccattactgtggtgcaaaactgtctcacgaggctttgatttcagagtggtttcttttct

SEQ ID NO: 3995 - DNA, 201 bp, Bos taurus
ccagtcctgtggccactgctgagtttcctgttctctagcagcctgcaactctcaagttgtcattgtcacccttctcccacagaaaaccctctcgttcaccatccctggcccatccgttactctctctggtggtggtttagttgataagtcatgtctggctcttgtgcaaccccatggactgtagcccatcaggctcctctg

SEQ ID NO: 3996 - DNA, 201 bp, Bos taurus
acccaaggcctcaaagttactgatctctcagtgaagatgctcttctactggtagaagaagattctaccaagaagaatctactggtagagtctcttctactgaagagggccataggaagccatcaactaggctgtaatgtctttccagacattgcttgctctgctgttacctgagctcaccaagtgccacctgtgttcctgc

SEQ ID NO: 3997 - DNA, 201 bp, Bos taurus
catacagctaaatttaccccttttcacatgtatagttagatgagtttttatccatgtgtaaaaaccatcatcacaacaaacagagcattgctataccccagagaattccctaatgcttatctgttagtggctagatatttaagtagtaaaataaattcttgacctgaaatagttgatactatacctgaaatagctgatagc

SEQ ID NO: 3998 - DNA, 201 bp, Bos taurus
tggaatattcaacaaagaagatgttatgactgactgaattgcttgtcagtcagaaatgcctagactgtgttatcttctctttcaacatatgatcctggccatttatctgaaggtagatacctaaattgattagttttaactgagaaaggaaatagtttatcttccattgactgaaattcatatgggtgataaaaaatggcc

SEQ ID NO: 3999 - DNA, 201 bp, Bos taurus
ccaagatgacttcttcacccaatgaacagcactgtggccaggatgccaaagtatgggctcaactggactgccaagcttaatgccaacatgatttccctggcatcgcatttaaggttaggccactcctccctcagtgcctcaggactccatcagcaagtgttcccagtgaacagagtgaaagctgcagcctcagaagcactt

SEQ ID NO: 4000 - DNA, 201 bp, Bos taurus
aaattagatgaagctgtggtgtgcataacagagctatgcccatggccccatagctttttagtagggatactactcaatagccaacagcattggtcacttggtgtacactctactgggcctatttccttttaggattcttataaccatgggtttctaaatccactccttgtttcatttttttcttctttgtgatgcaatgtt

SEQ ID NO: 4001 - DNA, 201 bp, Bos taurus
tgataaagtgtgaagaattcttatatcccttcaggaaatgttgctataaactatttggatcttggatcttcattaagtgagtggactgtggaggttttgctactttcctttatttattttagattatagaacaaaattacccctttatatgtatcaaaatttagtgacaggtgaaagagaagtcattccttgagtaaggtt

SEQ ID NO: 4002 - DNA, 201 bp, Bos taurus
agtgtgaggctgggcatgtataaaggatgatgttaacaatattaggccaacacaactctgatgattgttttgaagaaggacagaaaatcacatatactaattgtttagtgtgaatcaagcattggcctggggactttacataggtcatgtctttatgctttttaatttaggtaatagggcttcccaggaggctcactggta

SEQ ID NO: 4003 - DNA, 201 bp, Bos taurus
tggtccaccatggtcagattggccccaaaaacctggcctctcctttggtggcccctgagtggacaaatcctttgtaatcatttgagtcttttgtttgtctctctgcaggcattcagccctgtgggccacatccctataatgaaaactgaataagccaattggagtaaatcattcataggggtttgaggaccagcagatacc

SEQ ID NO: 4004 - DNA, 201 bp, Bos taurus
aaattcagtgaagaatactccaactaaacagaagcttttaaaaattagatatattaaaactgtaattaattgatacagtgggttaaactggaaatgttcacacttatttattttatgttagcttaaaacctataaatggattttcatacacaattttttccttttgtagatctagaatcttttcttcgagtataggtacac

SEQ ID NO: 4005 - DNA, 201 bp, Bos taurus
cttattcagcctattccatttatataatcccaattcaaagaacaaggatactcataagccccactgcataaaaggcaagatggtacccattgcagatcaacgtgaaagctgaagaaataactcaaagttgtccaagtacctggggtcctgattttcctgactataacacctgaggtcaaaagattttggtttgaatgccat

SEQ ID NO: 4006 - DNA, 201 bp, Bos taurus
gtctaactactttcatggccaatacttctttttgcctgctgctttgtggtcagggtcagggaacagatcatgtcttctcattgtgtgtgtccacatagggctaccaccttcttgctggcccagcagtgaccagtttacctatgaaaactggactgtggagtcagatatttccattctagggtttgtattaataatacaagc

SEQ ID NO: 4007 - DNA, 201 bp, Bos taurus
ttcatttatgtatccagatttctccagcaccaggaagtctttctctccttttattaagtatagttcagtggttgttggtataatcacaaagttgtgcaacgatcacaacaatcaacttcagaacattttcatcaccccccaaaagaaacttcatagtcacttcctattcctcttgttcccttctccctgatgccctagaca

SEQ ID NO: 4008 - DNA, 201 bp, Bos taurus
gttccaagttcagggaactggcccacagagttaccatagatcagatctaccagcatctaactggggttttttaaggtttttgttgccaaggaaatgtttacggtcctcacacaggggcctgggattccatggtgtctatagaatctcaggctttcctcccaccactccccctaacccggtcaacaggaagactgccgccat

SEQ ID NO: 4009 - DNA, 201 bp, Bos taurus
acattttctccaggccagaccacctacctgctagctggtcagtttgggatctcaaaaaatttatagcatgatattaagaatcagggatttggtgtcatcttggccctggcacagttataatgagcaggtatggctgtgaaattgtatatacctggtaatatccttgctccttccaatctgatgatcacagatacctctaag

SEQ ID NO: 4010 - DNA, 201 bp, Bos taurus
ctcactactggaaaaactaaaatatacagaagctaattttgaatcgaatatgtgttttgcaggtttatcatgtataaggctttagtgaaaggcatggagttagataatatgttaagacatgatttctgtccctaaagagctcaactaagttatttatgtattcagtactaaatccattccaaaaaagaataaaaaggttgt

SEQ ID NO: 4011 - DNA, 201 bp, Bos taurus
gtctttactctttttccttctttttgcagctttgactaaataagttcaatgacctatcttctaattcactcactcactttttttttttgtgggggccaaatggtctcttccttcagtatttatggtttcacttcagcagggaaagacattcaccagtcagcttggaatattggacaggcctgctggtagtgtctgttggca

SEQ ID NO: 4012 - DNA, 201 bp, Bos taurus
aggtgttatagagatatttcaaactcatgctaatccctcccctggcatgtctttcactcataaatggacaatttctatttcactttatataggaagccatactaatctctccagcctgaagcactcttttctccttctgtttcccagtaccctgttacttgcttatcactttctgcttgatttacacttatttgtactcat

SEQ ID NO: 4013 - DNA, 201 bp, Bos taurus
atatatatttaaagatccctttgggtttttctggagtaaagcaggaagttattgtctctttttgctgtacttctgcttttaatatttttttattactggagtataatttagtttataatgttgtattagtttctgctgtacaacgaagtgaagcagctatatgtgtgtgtatatatatatatatatatatatatatataca

SEQ ID NO: 4014 - DNA, 201 bp, Bos taurus
tgattctggtgacctacacattgctgtgacttcagttcagactttgggctcagtggaggagtcagcacaagtcactgaagccctagaaaagattatgtggacatcacatgccttattcctggctttgcccacagctgctacttcagtgtcttgtcactccggttccaccacctctgattactcttcagtctttgatggcat

SEQ ID NO: 4015 - DNA, 201 bp, Bos taurus
catttttgtgatggatatgtcatgtcttctagcatgaatatgatttactttacagtttctgtaaccagctactccaaatgcttattggatgaaaactttgaccatatgatatatcctggttaaacttgctgcataccttttgaatatagtttaactatattttagtatatatatatatattaatttaaaagaaaattctga

SEQ ID NO: 4016 - DNA, 201 bp, Bos taurus
catattttatttcatggactacagaggataattctgctttcttgtatgactcctcatgtctttgcctaggtgctcttttataaataatttactcatcctgacagttcatctccaggtgatcctacctgctgtcttcttgcctaaaaagagtcatgctcctcaatgctttttaaatacttcccaactgctaattttcttaca

SEQ ID NO: 4017 - DNA, 201 bp, Bos taurus
ttttacctaagggaataatatggcccagtagagtgttcaggcagaggtgcgtgggctggtttggggaagggaaagacgaagtgagaggtggtacttggcaatcgacaagatcaggagggggccgtgaaggagcaggggaaaggctgagagctgagccagggacacctgacactgtgagcctggtcactgggagaaaggcag

SEQ ID NO: 4018 - DNA, 201 bp, Bos taurus
aataaaaatcccactctgttccctggccggagatcctccagggctggtattgctcaagtcttagttcacagacatgtcactgtattcattcgctccatacatatgtgtgcaggttggcctcatacacgagagtcccagttaacagaaacttgatgtttatggcaaaaagaacacatgttcattgtgaaaatttggagcttc

SEQ ID NO: 4019 - DNA, 201 bp, Bos taurus
aaacacaggaaatgtgcatcagatactgttatctaggtacttcagagaagagctaaagcagaggatttgggggagcagactgtcccaggaaggccccatatccacttaggtacaggattaggagcacagggatgcacactgagctgcagatttagagtggtcagggcaggcctcactgagaacaaagatttgatcaaagac

SEQ ID NO: 4020 - DNA, 201 bp, Bos taurus
aaaaagaatgttgtcgaagaaatatgtgcagtagatatatggttggactacctgacttcttagggtgatgagctgtctccatttcccagggattatccaagttttaacactgaaactcctcaaactgaagaatccctaaattctggggaaaccaggatagttggttgccctttttgagattctttaaatcctaagactcta

SEQ ID NO: 4021 - DNA, 201 bp, Bos taurus
aactgcttaggggagactaaggtcatttcaaccatcactctgagtggagccatgcagtgtagtgggaaacaaggtggaccaaggcaccattaagggctccaaatcggttcctttttctagctgataacctcagcaagactacctctctgagcttcctttcctccatctgtcatggaggcagtgataaccttccattcagat

SEQ ID NO: 4022 - DNA, 201 bp, Bos taurus
gatatatgcccaggagtggaattgctccttcttctactttaaagatgattgtgatttctcattcattggtgttccaccatcctttgcttcttaacccagttgttatctctgtaaacagtccctttattatactgttaggcttaagccctttgaagtggatacttgcagtgttcctgatactggaggagggagccctatcat

SEQ ID NO: 4023 - DNA, 201 bp, Bos taurus
gtgctgcgattcatggggtcgcaaagagtcggacgcgactgagcgactgatctaatctgatctgattcaggactttcccagtaatttagtagatagggatcggcctgccaatgtaggggacatgggtttgatccctggtccaggaagactccacgtaccccagaacaactaagcccgtgtggcacaactactgggctcgca

SEQ ID NO: 4024 - DNA, 201 bp, Bos taurus
aggcctacctagaagccagattataaaagtgagttgaaagaagatggtcatgtatgttcagaggggctaggaactgcacctgtctggaggtaaaagtgaacagaggaaatgggccttcttattcttgcaggctgtaagactagtagaggagaactatataagcccactggtataatctcatagcagagcagtcgcctagaa

SEQ ID NO: 4025 - DNA, 201 bp, Bos taurus
tttctttttactcctagtatctagtgctgcctgtacaattcaggcactcagtaaagcttcattgaatgaatgaattagtaagtgagaagtgtcagaggccggatgaaaaggttggcagagaatgcatggtattaaaactggtcaagaggaagatacaaaaaatatagtgatgagagtaagagaaaagatcatctactaaga

SEQ ID NO: 4026 - DNA, 201 bp, Bos taurus
ttctgatttgcctggttcacagtctatatttggtgtatctcaggatccttctatgtgtgcacatgcatctcttagccaaaatggattttactgaaaaggcgtatgggtagaacagcccttgacatactccccctttgaccttcaaggaaccttttatgtacatgtgtggttggggcgatctcctgacttggagaaaagaaa

SEQ ID NO: 4027 - DNA, 201 bp, Bos taurus
gaatgacagtgcagatagaaagcgctgtagcaggtttaaagaaggaaaggtctttaagaggtaggtggcgtgaacaaggccttatagtccaggtaagattgtttctggagaaaggaataatattagaaggcatgggcaggaaaacatggcaacaatctgggaacgctttgttcctctagtttgcttgatgagtgcactctg

SEQ ID NO: 4028 - DNA, 201 bp, Bos taurus
aatcaggtcagctactaggaagtatataaagggcagttcaagagaacggatttcagtgagatcagaacatgctatatgtaaagcattcttaattctacaggggatatatgttaggggaaattagtgttattgccactacttgaagttttctcattccatttttcactcaaatatttgccaagtgctgatttctctatttgg

SEQ ID NO: 4029 - DNA, 201 bp, Bos taurus
acatcaagattatatcagatttactgaaataaacaggcataaaattgcttacatagaccatttccgcaccaccgccccccgccccccccacccccccaccgccaaaatcatctaatcacctagaagttgaaagtgcttaaactggaaatccatgcagtaagaggttctgtgtttgttgctgaattcttgatacttgcacct

SEQ ID NO: 4030 - DNA, 201 bp, Bos taurus
aataaataacaacaacaagagagtaaatcctaagagttctcatcacagggaaaatattttttctatttctttctttctttttttacttatatgacatgatggatgttcactaattgcctggagaaatgtcaataacctcagatatgcagatgacaccacccttatggcagaaagtgaaaaactaaagagcctcttgattaa

SEQ ID NO: 4031 - DNA, 201 bp, Bos taurus
taaagagagctgactcagccaggagtactgcctttttgactccttccctcatttttcttccttctggctagaaagtggccatgataactggagctccagcagctctattaggtcatgaggtaaccttgtaatgaaaaccatgtattaagagaagagcaggaagaagcagctttaaggcctgatgataacagaacttctatt

SEQ ID NO: 4032 - DNA, 201 bp, Bos taurus
tcctataaagggaagcaaatagtctagagcaacatatcagtaaattcctggtagcctatgacctaaggaaaagaaaagaataacagccaagcaaacaatctccagttccctctgtgggaaagatcagaggtgagattcattctgagaaaaagggatgtgatgacctcaggtacttccttatgaatttagaagaggacactg

SEQ ID NO: 4033 - DNA, 201 bp, Bos taurus
gacacctcaatgctgtttctctgaagcatccatgcaaggatatcatggacaaactgcctctatcctgggctaaaatgactcaccccaaatagacactttttggaaatgctagcactgctgtccaccaaggagtgcattccaggcttcccataaccctcttaacagcagttcagttttactcaaaagtttcagcatgagtat

SEQ ID NO: 4034 - DNA, 201 bp, Bos taurus
aattggttcctttcctttagttaattaggtaaaattctactgatccaatggtaatacggtttataaaaacagaaaggaacatttgcaatgttggggaggtgggaaacaaatcgtggctaacactgttacagattcaaacagattttaagattctactcatggaactagaatttaccattttaaatgcctgtgtttctactt

SEQ ID NO: 4035 - DNA, 201 bp, Bos taurus
atattaaagtgagtgtatatttaaaccacactataatacttatatttgtaaaactgatttaggttctaggtaggtttttgacccatctggctatctggtgcggacattttgatagtcatgacattggacaagtcttcattgttggggactgtctcttgaattgcaggacacctagcatctctgagcttcttcgcttaatag

SEQ ID NO: 4036 - DNA, 201 bp, Bos taurus
aacatggttcattttcaaagtgggagatagggatagcagggaagtctcattgtgtatatttaccatcaatttatttgaatgatgacgggaacagcttcatagagggaggtgttgacggtggaggaacagttagaactcttgctctgccatctgtccactagctctgtgttccaccttcatcatggacacatcacatgagct

SEQ ID NO: 4037 - DNA, 201 bp, Bos taurus
aacatctcatattttattgataactttggtaatcttataagttgattttaatgttgttttcaacctaacaactatggaaaaagcaatttctgcatgcttagagaatatgagaactggcatcaaagatactcataggagaacacttagacaatttcattttctgagaaacatagcaatcttttatatgccagctctaaggca

SEQ ID NO: 4038 - DNA, 201 bp, Bos taurus
tggccctcggtccacttgattgccaggccttgtcttgtgtagaagttggtgccagatcataaggtggcttgctacagagccctatcatgtctcagaactagtgctggcccactggtggttggagctgggttctgtggcagaagctgtgggaccagggatcctggatttaattttgtcctggtggtggatgggtccagttct

SEQ ID NO: 4039 - DNA, 201 bp, Bos taurus
attatgaaaggagtcaaagttagagggcttaatcaagtgaaatttctctggataagagagagagaggtgatggagaaaaggccagtttttggattcagttcagttcagttgctcagtcatgtctggctcttcacaaccccatggactgcagcatgccaggcctccctgtccatcaccaactcccagagtttattcaaactc

SEQ ID NO: 4040 - DNA, 201 bp, Bos taurus
accaacattttatactctgaaaactattacacataaaatttttcttgctacattttatttttcctgtctgctgagactcagacttttaactctttgctaaggaaaataaaaaggtgctgagcaaaaagacaatagcaaattaaattcattcgagaatttttactctgggcgatctgctgttaatgcattggctagcagctc

SEQ ID NO: 4041 - DNA, 201 bp, Bos taurus
agttcaacaggttcaaacctgggtaataatctttcccctcagacaaccttctcctcttgtgttacatatcattgtaagagccacaagaaccgaaaccaccggcacatcttagagggacagaaatctgacaactggtacagaattcacactaaatcagcatggacactgcatcgtagacctccactgcttacaccacttttc

SEQ ID NO: 4042 - DNA, 201 bp, Bos taurus
aacattttcaagttaagatagtgtagtgatatggaagcctaaaaccgcactcccctaagactcacatgcaagtaggcaaaaataataacgataagcaaagctaaggagtcaccagaagaaaccaactacaggacgagattggggcaaacatttccacctttcaaacattttattttctaataacagaagccaaagaatcta

SEQ ID NO: 4043 - DNA, 201 bp, Bos taurus
aatcccatggatagaggaacctggtgggctacagtccatggagtcgcaaaagagtcagacatgactgaaggaaaatagcagcgcacactcctgcacgtaagacatcagaatccctggctcgagatcagaattcctggtcttgggcaacttggcatcatcaggggtacttcctgtggagcagtatctggatagtcatgctgt

SEQ ID NO: 4044 - DNA, 201 bp, Bos taurus
ctgtgcagttgtagatgtgaaaccgtttagtatgtatccagcagtgagctcggtgaataactgccccttgcagtttcgttcactcggggggcctgttgatcactaaagccagatgctgtgtgacatgtgccctaccaccgtcaccttccatcttggacggatgcaggttttgaggagcaagttttactgaattaaattata

SEQ ID NO: 4045 - DNA, 201 bp, Bos taurus
cctggagttcactcaaactcacatccatcgagtcggtgacgccatccagccatctcatcctctgtcatcccgttctcctcctgcccccaatccctcccagtatcagagcatccactatacagtagatccccttgatccatttcatcttcccctccacctctttccttttggtaaccgctactctgttctctgtatatccat

SEQ ID NO: 4046 - DNA, 201 bp, Bos taurus
tctattttccaaagaagaaactgagtttcaaagaagaaactgactcatctaaatgtattagctggtaattgacaaaggcatcatttgaacccagacctgtgattccaaggctgggatcattgattgctccccaacaagttgatctttggtgctaatttaaaaattgcagagggacttccctggctgtccagtggttaaaac

SEQ ID NO: 4047 - DNA, 201 bp, Bos taurus
attggccctcagttccatttcacttggcgtggaagggtagctcccttcttttctgttcctggtgggaataagttgaaaaacaagacaggggccagcagttggaaaagcaaataaaatctttactgtcaataaaggttgggttggatgaatttagcatgagaacaaaaatggacacaactctatatcctccaatccaggcct

SEQ ID NO: 4048 - DNA, 201 bp, Bos taurus
tgaggcatttaaaaatctctctgtatataatatgtaactaagtggggataagtttaaattaaacttcttcactatgagttggacctaaatgattttttacgtaagacatagtagatcaatatgttatatttgttcctttgctatgtcactttgtatatcatattctaattgcatttataggtatttataacttccctccaa

SEQ ID NO: 4049 - DNA, 201 bp, Bos taurus
tttaaaaaattgctaagtgcatttattcatccctttgaattatcttcaaagatggttacaatctaaactttcaaatttaatttacagtcatactgattcaactgcattttccatcaataatttacttgaatttctttcatggacacacacacacacacacagagtcatatgcttgactcctcaaaacttagtttaaaaagt

SEQ ID NO: 4050 - DNA, 201 bp, Bos taurus
gcagagataaagatgaaggtttgcatctgataccctacagaaaacttagtttctcctcattcactagatatttcttttccaattaatgcaggaaggacataaaaacaatttatgttattatctggaagctaatatttgctaggatgtgttccatgtattctacaagtattatttttaatgctcacaaaatccttgcctgtc

SEQ ID NO: 4051 - DNA, 201 bp, Bos taurus
atgtggctcactgggagcaggagtgatctgtagagttggatcaggtgtgggttagtatgcccaaggacatactgagctgctctctgaggctattttaggccgtgactttggccaaccctctcctctgtcctggatctcaggcttcattataatttgcctatcatccttaccccatcacataaattaacttccctatctaag

SEQ ID NO: 4052 - DNA, 201 bp, Bos taurus
ctgctatacgtcaaatttataaaattaatattcttcagagaaatctcaaaattgaattacttcccctggtcaaaatcgaaaggtttacctgaggggcgctcgtggcaaccaggaaagcattagtccttcccgggtgatcatagtcatgcatggctgcagccacatacaaggccatcaactccaaggcagggatatttccag

SEQ ID NO: 4053 - DNA, 201 bp, Bos taurus
caacatagcacactcccatctagtccaaagttaaaaaaaaaagcaaaacataaatttatctactatagtcagctaaaaaagggccccaaagatagtataccgtaatccctagaaactgtgaactgttatgtgaaaaaagggacttggcaaatgtgattaaattaaggatcttgagatggtaagattatcttggatcactgg

SEQ ID NO: 4054 - DNA, 201 bp, Bos taurus
acgaaagcatgatcatttgtattgagattctgaatcatatgcgccagatttcagggctttcaccctggattggctggcctttgggagcaggaaaacagaagaggaaatatccatgtttgagctggcatgtactgtacaattttatccagcactgacaagtccctgctgttggaaacctgtagaagttgtgcagtttgtaac

SEQ ID NO: 4055 - DNA, 201 bp, Bos taurus
atcactttcctcagagttaaattctgcctgcccccatttttctgggaaattaggatttacatattttccactcttccctttttcctccctctgcttgatgctatcttatgcatgaaattgtacaaggggttcaccttcattttctttttctctttttaaaaatgttttattttgtactgagatatagccaattaataatat

SEQ ID NO: 4056 - DNA, 201 bp, Bos taurus
aagcatttgagagggcagctgtgctgggtagaaccagcagtgggcatgacgaccaagggcgtggattggaatctagttctccacatcctggccaagcctcttaaaattgcagagcttcagtttcctcctctgtaccatgtgaatgatgccacctacatcacaggattgttgctatcagaagggttttgcatgcaaacactt

SEQ ID NO: 4057 - DNA, 201 bp, Bos taurus
ttaatccaccctacaaaacaggaaggttatatctaattaatttcactttaaagaagggtaaattgagacccagtaaagtacagttctatagctagtgaaatgagaccaaaatcgggtctttggactcaacagttttcttcacatttctttaaattatgatggctttatgctacaaagcatcgctatgaacaaagctagtgg

SEQ ID NO: 4058 - DNA, 201 bp, Bos taurus
ctgatctgggtagatatttaccccagactcctccttccattttttgttttctttttcttttcatgtgtcattcttgtgatgaatatttgaacatcagcgtagtgcttacataactttaagtaccaagcttttcagagggaactggggcagccaagtggaacatattatggctggggaggggggaagtgctaccatgttgat

SEQ ID NO: 4059 - DNA, 201 bp, Bos taurus
gagataagagtattgctgaagaatactgcttaataaacctgtgagaccctgaagttattctgcttttattaaataattctacgggaaactggccagagctctatttttcctactagtgctaccaaaggcgagcatagttcaagctttatcttttctgtgacagcattttattaatctttgaatccttagaactgggcctcc

SEQ ID NO: 4060 - DNA, 201 bp, Bos taurus
attcaataaaacagtccaggtaagggaaacactgtgtaggaaggcccaaggcaagaactgtaagaagagaagtacagccagtgtggctgagaagcaccatgcaaggggagacaagaaagaaggcccaagataagaggtagggccaaagtcagactgggccttgtgggctatacagagaagttagagttttatcctaaaggc

SEQ ID NO: 4061 - DNA, 201 bp, Bos taurus
agtgtatgaccttgaagaaggtcatacacttggtaccattgaagatgggcctcaaagtgaggcaacctaaatccagagcctatgcttcttatgatttactgtgttgcctctctatttcccctcctgggtccttgaaattatacatctaagttttctaagcatgtgcttgaagttgtggggacaaagagggaaagaggaaat

SEQ ID NO: 4062 - DNA, 201 bp, Bos taurus
atcaaagagagcagtgaggggcgtgctcctctgctggcctgcctggtaaccaaggagtcaacctgttgttaactttccctataactggtaacctccccctctctctaagtgcaaagatggccaccgcgtcctgcccaccaactgccacacatggtggggtggctccaggaccttgtttgagacatataagagcccccatcc

SEQ ID NO: 4063 - DNA, 201 bp, Bos taurus
tcttggagggactactccaacaggaaagtgggaacctaaaagtaaaaagagtagtaagttctataaaacatcttcacatgacaccatctctctcactgatctattcagtttctgagacttttaaaattagaatgcaaatttattgtttgaaaagagatagggaaacataataacccttcattagtcattttatctataagc

SEQ ID NO: 4064 - DNA, 201 bp, Bos taurus
aagttagcaatcttccttatatatgtgctcaactgttgttgactcaaaaaaaaatttaactgtatcatagatctttgtccaaaatataggaatatattttaaaaatgccacaagctcataattcagctaatatttacatattttagaagctgatttcctctcactagcttttaatatagttgaatattaaaatgattcata

SEQ ID NO: 4065 - DNA, 201 bp, Bos taurus
ggtactgttagtcactattctatggtgcttctctaggtctcatataaggaaggagacaagaagcttctcctgggaaaaatcattatggaactactaatgatctgggtcttgatggatgagtcccatttcactgagtaccatgttgaagtgtgtatgtgtgaaggtggacaggagagcaggattagaagaaggaccacccca

SEQ ID NO: 4066 - DNA, 201 bp, Bos taurus
ctttcccactttctaggaggaaggttctgaaaccatctttgccttttgggggcttggtgtgtggtttggccctgaaggcctactgagttatgtagggctgcctgtgtctacacctgtgattctcaaactgccctttaggaaagaatcaccctgtatgcttgtgaacattagactttcccacaccccaaggacagggctcag

SEQ ID NO: 4067 - DNA, 201 bp, Bos taurus
ggatatccaacctgagggaaaaacacagacagcaacagcaacctttgagacctaatttagacttccacacccactctacagggacttcaccatcagcactcggtgtctgggccctcatcatcatcatcatcatcatctcatgaaccacaataagctgtgaaaatgaatgtcaggctttcttcctatctttctaaaagtact

SEQ ID NO: 4068 - DNA, 201 bp, Bos taurus
agaagagggtggagggagtaaattatgacattgaaggaacatgatttttgtttcagatagcaagttgtaacgtgttgaaaatttagcagtttttaaaatacgtattcatgtcttgggagataaagattgtgccagcataaggcatgtcaaagcataaccaagctaagccatctgtatttcagcaaggtggagggcaagtcc

SEQ ID NO: 4069 - DNA, 201 bp, Bos taurus
gattttgctgcggtcatccttagtccacccatggtagtgacacaggtttcaacattagcgctggcaagtgtatgtggaactgtgacaaacttgaaacatttgtctggaaccaacccaaatatacgataaaacattctaaagaaatatttaaatgcacaaaggaaattactgtgcactatatgagtatataatataatacct

SEQ ID NO: 4070 - DNA, 201 bp, Bos taurus
tgattctagagaattctgctaaataatcattcaaataattgccaatccaaacagtgatgatccaggggcttatatgttaagtcagccttataaagcaagaagatattatagataagatcctcctagaggaattgctttatactacctacaggtacctgttaagtgtttctgtaaagcagtgcttaaatattagcatttttt

SEQ ID NO: 4071 - DNA, 201 bp, Bos taurus
ctttcactggacaatctatgctatagactgttcttcatattctttgggttgactgctctgataaaagataaaataaaacacttgatgataattagagataggcaggagaggcaagcggtgacgggagtaggatatctgaatatgtgtggttcattcaaaaactattcaatgagtataaaatatgtaccaggctctgtggag

SEQ ID NO: 4072 - DNA, 201 bp, Bos taurus
gattttgagtaagtaaataatgtattacaacggaaagtgcttgaaataggagtttaaaccaatctgaatttgaatctcagcctcagccttggttggtgtgcaatcttgggaaaactactgaaccactctgattttgatttcctcatccataaaatgggaagagtaatgctcatctcacaggataatgctaacaattatgta

SEQ ID NO: 4073 - DNA, 201 bp, Bos taurus
ttgccactgagccaccagggaagccagtccagtggggagtcagtgagcaattttaaagaggaagctcagtgtaggcctaattgagaaaatggtaactgagcaaagtcttgatggaggtgaagaagacggatatgtggttacctgggagaaaatccttctatttagacagaggaaagggctgaggaaaaggcccttccatga

SEQ ID NO: 4074 - DNA, 201 bp, Bos taurus
actgattataggtctgaatgggcaactgaaaaggagcagttacctgaacctaatttcatagcactctggctacaggacaaggtgacagtccagactgtaaggctggacttccctggtggcccagaggctaagactccaagctcccagtccaagggcccgggtttgcttcctggtgagtaactaggtcccacatgccacagc

SEQ ID NO: 4075 - DNA, 201 bp, Bos taurus
tagtctttctgagttacagaagaaccacagttatactctgaactttcccatctccatgaattttcctcctagacttggttttactttctcagtcagtcccgtcttgcttcaaaaccatccatcacaacccagctcaattgttacttcctttgcatatctttctccaaatcccttaactggaagtgctctatttcctgacat

SEQ ID NO: 4076 - DNA, 201 bp, Bos taurus
tcagatgaccagagaagggactcagccatacatattcatgtatttattctcccccaaacttctcttccatccaggctgccacataacattgagcagagttccatgtgagaagcacgcacattttccttcagtttgctacggctccatttctgtgcagatttcttacatttttgggcatactgacctcatcagtaacattct

SEQ ID NO: 4077 - DNA, 201 bp, Bos taurus
gtcttttttcccccaattcaatcaagcacatctcagaaaccttatttctgttttggtcaagtaacaagttgtaggtctttgtgtgtatgtgttagtctgtgtgtctgtgtgtgtctgtatgtccgtataaaatgttactttcatttttcaacctctactatctcctcatcataagactttagtaggaaacaaagactgact

SEQ ID NO: 4078 - DNA, 201 bp, Bos taurus
agcataagagatatataaataaaagttaaatgcaattcctcaaataaaaaaaaatacttaaaaataatttgaaggaaatggcctcatgaagtttgttgacgtcaaggaccataagagatttcaaagaattttaatgttttttgcctggatctgctgggcccttgtccttgaaacaaatactttaaatatgcttaaggaaaa

SEQ ID NO: 4079 - DNA, 201 bp, Bos taurus
acgaaggcttgtcagccctcagcactctccctactcggtggcgttagtaccactccctttccatcacatccatcctgtgcgctggtgtagacagtctgacatggtgcgagaaaggccatgtcatttttaattggaaatgtaagaaaagaaagcctgcttggtggaatgtgccagaaccaaggaaccagacaccccatgaca

SEQ ID NO: 4080 - DNA, 201 bp, Bos taurus
tcccagttcccgcgagaggatacggtaggctgccgttcccagttccggagagtggatacgtgggctggctcgttccgctggagctgagaaggcagtggccgcagggcatcttgctcctggtgtggaaggactctttgccacccggttggagtgaagccaaggagaagcaggaggaggccacggagaaagcaggatacctct

SEQ ID NO: 4081 - DNA, 201 bp, Bos taurus
agcttgtaccccctgatggctgctcctatagacatcatgtgctcaaaatgtggctttggtggctaatgcaaaataaggcctaccctcaaattctttgaattttatttagtaatagatttatccactgatgtgttcattccagatgctgtgttggccttgttgtacaaaggtgtaaaaaatagagttagccccagccctaca

SEQ ID NO: 4082 - DNA, 201 bp, Bos taurus
gcattgaaagggtgtgtgtgtgtgtgtgcacgcatgcactcagtcgtgtctgactctttgtgacccagtgaagtcaagagcttcctaaatggccagcttgctccttatacttttcaagtccagatctgagtttatcatcttctccctcaaattaattcttcttccagcttttctgtttcattaacagcatggccagtttcc

SEQ ID NO: 4083 - DNA, 201 bp, Bos taurus
ttaaaatcagaaaatgtctaataagacggtggttttccaaggtctctttaaaattcacagggaaaggcagcaaagggcctagatgagctggaaagagctggaggtgtgaagcctgccaccctcggtggggaggggacatcccttccccctttaggcctgatcttttggttttagggggctggtctcctgtaggcatggata

SEQ ID NO: 4084 - DNA, 201 bp, Bos taurus
gtttgatttcagaaaacccagtcccactgcaaatgtaaccctcaaaaatgcttatacactccatacatgcctcatgacttccaactggccctccagttaggtggactcagcttttctaataatcacctctggtcatctctgcatctccacaagacatcataatagagaataagcaacactgacacttggaatcaagggccc

SEQ ID NO: 4085 - DNA, 201 bp, Bos taurus
ccggtcctcgtcaccccctgctgtgcgtgcccctccatccttatgaccacggtcttcatcatctcttgcctgaactgttgcaaggcctcttgagcatttctagctcttccacttctgccccttctgacctgcccctctgtctcctccagccctaaagctaaggaccaccaatggcactccgcccccttctgttcgactctg

SEQ ID NO: 4086 - DNA, 201 bp, Bos taurus
cacatgttttccttaaaaaggaagcaaatccggagtgtttggtggcttcgccctcactcagctccctttgctggattgacaggccacaaactcagaagaagagaaaagagtggaggaggactcccctggtggtcggtccagtggttaagactccgagctcccactgcaggggccacagattccaaccctggtcagggaagt

SEQ ID NO: 4087 - DNA, 201 bp, Bos taurus
cacagacgtccccaaactcagaacccaggcctgcctgcccagggttctggaaagatggaacaacacatggaaaggagctgtttagctggggatccttctgctcagctcctgagcccaggccagccttcatagctttgagcgggtggcttaaccctttcctcctcggcttcccagtctgtaggttggggctaacacctcctc

SEQ ID NO: 4088 - DNA, 201 bp, Bos taurus
gcagctgaaaaaagcacaggtctgtgtgaagggtgtgaagggacaggagagcatgtgctcctcatgtcaggaacgagtaaccacagtggaaggccagtccgagtctcgacatcagctctgtgacaatgtcccacagcaacaatgcttgaacacacagacgggggcccagtactgtaggagcagggccgtctggacacgtgc

SEQ ID NO: 4089 - DNA, 201 bp, Bos taurus
gtgtatcagtgactgtgcattgaacccttttcggagacaatatcaaaagtataaaatagagacaatttgtgaatgtgagatttaggccaaaggtttttcagactttcctttgtactaggtcctaatgtgttcagttcagttcagttcagtcgctcagtcgtgtctgactccttgcgaccccatgaatcgcagcacgccagg

SEQ ID NO: 4090 - DNA, 201 bp, Bos taurus
ttctaggtttgtcaatgactctgaaatttccaacttatgctgcaagaggtcaaaagcccttggagagaagtcaatgggtaggtacgactatttcaatataatcaaaaaacagaagttaaaattttttactattagctccctagactgcaaaaatgtgtgcatcttttctcttgactcagaagtgaaggagcagtatgcctc

SEQ ID NO: 4091 - DNA, 201 bp, Bos taurus
ctccctctgatattcagttatgaatgaaaacaggaggcagttcacttgccccagtggcagcggtttggagactatgttcctggccttccttcctcacagcctcacgtttacgttgtaggtcgaccttgactgcagtcagaaggttgtcgtgtatgatcagagctcccaggatgtggcctctctggcttcagactgttttct

SEQ ID NO: 4092 - DNA, 201 bp, Bos taurus
ctgaaggctcaaatgattagctggagaaatacagaaagagggaggtatggcttcatattagcacatttgaaagaggccttaagattttagatgattcagtgcgactccactgcaagaggctgccacaagggcaacttcaaacttgggctgtcttaaaagacatacagtatgcaaagcaggcagtaggctggccctcaccac

SEQ ID NO: 4093 - DNA, 201 bp, Bos taurus
acagtatgggaggtaaggattagctacaattactgttaatatcatgactatacttactatttccacccaaccgtcttcctggcctaccttttctaatcactgttcgagacgtttcttcttcacgagtgaagcacaagcagtaacttaaatattcactggcttttttttgtttcctggcagcctggccactgcctcttgttg

SEQ ID NO: 4094 - DNA, 201 bp, Bos taurus
tcactcccactcaccaacctccaacccatgactcagagcccacggtcttatggagagattcgttttctcagacgtctggatcctcggatcacttggagaaactactcaagattgatctggagagcccaccgtcatctgattataaagaagaaggccactctcagacgtcacagtcttcctcaggaccagcaatagctaatc

SEQ ID NO: 4095 - DNA, 201 bp, Bos taurus
gggcctggagcaagagaatagagtgctactttctgtatttcctcccttttttttgtttataattctcaatatcctgtcttctaaacatggctcctgtagaatggccaatttaattaaaccacacaggaggagtggggaggatttggaaagtgttgtgcagtgtgtgtccttgtcaccatggggccatgggagaatgtgggt

SEQ ID NO: 4096 - DNA, 201 bp, Bos taurus
gagatgagaggcttcttgttggccactcatgaagcagggcagccactcttgagagaaggatttatagctgtcaacatcagggtctcttgctaggggagtcgagggcctgactgcaacggagtgaaagggttcaaaagaaaacttagagtcagtgagagtagacagcactttcaaggaattttattgccaaaagggtaaaga

SEQ ID NO: 4097 - DNA, 201 bp, Bos taurus
cccacatgtggtgcagccaaaaggaaaaaacatgaggaccagcacctcacccagattgaggcagggagacgtggaggaaaggaaggtagggtggaaccagggatgtgcggaaccagggatgtggggacgggagagtcagggaaagtgttcctggagaaagtagcagaacttgaagaggcaagcagacaagggtgaggggtg

SEQ ID NO: 4098 - DNA, 201 bp, Bos taurus
gatattattatgagtgtcttttggttcatccccattgtgaaggcctccctggagcctccccttaaaatcaagtggattccactttccaagcctttattgagcacaaaccatgaggcagacgtggcccctgtccctaggaagtcactttctagcaggtgatgtggacacggcactgagtagcatacagcaatgaattcctgt

SEQ ID NO: 4099 - DNA, 201 bp, Bos taurus
gagctcacatagtaactcaagtgatggggagcaggtataaagctgtgctcagttattcgttgcttatctcctgctgtgcagcccagcttctaacaggccacggatggtactggggggttgggaaccccggactaaaggacctactggaatgatactgaatttatcttgctgagttaggggtaggtggtggcacagggtaag

SEQ ID NO: 4100 - DNA, 201 bp, Bos taurus
gcagtaacacaccgactgtgaccctgggttccgcggccaggacaacactcatcggaccacggaaaggatgctgtccagcctatgggttccgttccaaggaagacaaaacactcacttgggcatcccataccacacacttatctcccttgtttctctttctgttcatctctagggtgactgacgtggtcttcatttttaaat

SEQ ID NO: 4101 - DNA, 201 bp, Bos taurus
ttgtttgtatgtagtgcagaaagactctgttgagtaatgcaagagaggaaaactttcttctctaccctccctaggttcactggccgcccacttctccaatcaaactgataagaaatagattaataagagaacaacaaaaaaacccagacttcattatgtataggtgcaatgagtttccaaagaaatgaaagctcaaggaag

SEQ ID NO: 4102 - DNA, 201 bp, Bos taurus
acacagctttgcatttagatgcaaataaaattttctatcttagatgccttattcttcttagcttgacctatgttatccattttcatctctccctggcctcgttgtgcttttatttttctccttggtgagacacaccaagaatttccaactcaacctgaatggctcagaagacaccagctcagaggcccataaaaggaccgt

SEQ ID NO: 4103 - DNA, 201 bp, Bos taurus
gaatgatttaaccaaatggcctgtcttgttgggtacacatgggctgttgtgttgaacaactctgggagacaccatagatgttatattcatattatgctgttacctgaatgatgaaaaatatttgccaaagatgataatttggagtttagagaagatgaccctaagcaatttctttttttttttttctgatagtaatcagat

SEQ ID NO: 4104 - DNA, 201 bp, Bos taurus
ctataagaaaggcttcaattatttttaagaaagcaggggataatatattgatatacatttctgtttaaattgctgttattttgtaaattcttcagtactggaaaagtaactttctagcacctgagtttcccacaaatacaaacagtaattgtatcaagcatattaaaaaaagctaaaaataataattgtatatacttatac

SEQ ID NO: 4105 - DNA, 201 bp, Bos taurus
ctactgggtggatacaggagcaagcatgcctggtaagagctgcagctttgcaattaacctgaggggcagctatggattctactggagttcctcaggcagggggccagaatgagtgtcacccatgggtgacaaccttaagactgaatgtagagtgtctatgttcatcatgtatattttatgtatgatagtttatgtctgctt

SEQ ID NO: 4106 - DNA, 201 bp, Bos taurus
aggactccatgttctcactgctgatggcccaagttcaatacctgtttggggaagtaagacccacaagccatgaggtgaggccaaaaaaccccccttttttgggggaggaatcaaatcttttacatgtataataaaaataaggcagtgacagcgcacaagtgcacaaggcggcttcgatggcgcataagcgtggccgagagg

SEQ ID NO: 4107 - DNA, 201 bp, Bos taurus
caaggatatgggtaattaactagtgtttatttatatttgagagaataatattaaaagattctcctcaacctggaatgtaagtatatatatttcttgaaagaataatagtaaattatttctctattcaaatcaaagataatgataagtatcataaaatatttagttcaattttattggaaagtagcatgaggcaaaattcag

SEQ ID NO: 4108 - DNA, 201 bp, Bos taurus
tttatataaaagtagaacttaaaacattgaaggcacccttagcaaagcctaagtttgtagtatgtgtgattgagataaaaacaagttaacaagttaaaggtgtagtcatcttttccccagtatcttttagaaaatgaaaaaaacttctcagaggcacttaccaaagggcagactaaatgacacactacacacccaaagtct

SEQ ID NO: 4109 - DNA, 201 bp, Bos taurus
ctgcaacattctcaacccctttccccacctgtcttgtgcaaatgtcaaaaatagaatctctgcccaaagcaaaggagagcaggaagttattgtcggttcatggtctctggccccagcttgcccactccggttcttccatggaaatcagattttgcagcagtgtttgttgtgagactaaagtatccctattttttttttcta

SEQ ID NO: 4110 - DNA, 201 bp, Bos taurus
cttgaggttgggactactatcatatcccttttacagaggactaactggtaatcaggaggattaactaaattacccagttttatgtggctattaagtggtagagttaagactgagctataatatgggaggaatattgaccagagggaaatgtcgactgaaagatttacccagatattttctcctaatgctaggattgagcaa

SEQ ID NO: 4111 - DNA, 201 bp, Bos taurus
catttcttcaacaattttcaactttctctcttgctttattattctctctccttcctttagttcattacccctttctggtacagcgacatactttttggtggccatggtggtttagtcactaagctgtctccaactctttgcaacccctgaactgtagcccacctggctcctctgtccatgggattgtccagacaagagtac

SEQ ID NO: 4112 - DNA, 201 bp, Bos taurus
ccctgtctgcatgtatacaggaagactctttgggggtcaaaatggagggtgcaccatcccataataagtgtggacgtgtacccacaggcctctgctgtgcgatccatctcagcaaaatgtttttgtgcacccacgttggggagggtccaggactagtcaagtgtgggaaaagaactgagataattggccaaaggtaaacaa

SEQ ID NO: 4113 - DNA, 201 bp, Bos taurus
ccatacactgtgtgattccacacaccggaaaacatctctggtgatttccagaaataaaggaagtatatatggattttccagagactgggaaagggagaagggcagaggggatgttaaggcccctgcagtcaggcaaactgtctgttggtattgctgaaaaaatacctaaatctagaaactgtaaaaactgggaaatatgag

SEQ ID NO: 4114 - DNA, 201 bp, Bos taurus
taaaaattatatggtcattgtatcagccttctctaacaacagagtaacaatgtcaaaaaatccctttctttgactcatggcttttatgggacctaatgctatttcattacttagtgacatagattttttaaaagcctgccctaagtatatgaattagtattaaaataaagttactttgtaaaagcaaattgagagttttgg

SEQ ID NO: 4115 - DNA, 201 bp, Bos taurus
tcccagaccaggaatcaaaccaatgcccctactttgtgaggcagattcttaaaccattggcctatgagggaataatctttttaccatcacctttgcctttaccagactatcatatagctggagttatactatacgacttttcaaatggccatctttcccttagcaataaatattaatatttaaagttccttcatatctttt

SEQ ID NO: 4116 - DNA, 201 bp, Bos taurus
tactttgagagcttttaacccaatttaaggaccctgttagttgacaaaaagtttttccccaaaagaggtgaatacttaaactcactcaaagaagagagacagaagctccctggagggtcatttaattcctttttgctttataggtgacaaatgagaccctgaccttgaccttcacagttctgcaagacatcccagtaaggg

SEQ ID NO: 4117 - DNA, 201 bp, Bos taurus
tcttgggtcattctgagaccagcattatggcttactgtgattgatagccccatcgaaccacatggactttgagaggagaaactctctaaagaaagaagagggttggggtaaagatgctgggggaaaaaatatgaagtctattataatgcccaataatatgagtttggttgaaaacattgccatagtaatataaattaatac

SEQ ID NO: 4118 - DNA, 201 bp, Bos taurus
agataagaccgttaaaaattacgctgtatagacttattctctgcgccaacttctaaagtacatgtttggaagttaagggatgggtgtgcaggcaccatcttatctagagccggggcctgccgacacacctgaggtcttctctcatctgttcctccagttgggaggctctgccaagaatctcccttctcaagattttttttg

SEQ ID NO: 4119 - DNA, 201 bp, Bos taurus
aagatgtgacagggactaaggatgtggtcagactgaattagggccacatctttgcagaaaaaatgtagctggacacagtcacccaggctttctccatggggacattgagggaaggtagtcctggccataagtatagctcttctcagcttgatgagcagctgtagaatttattttcaccacttgggtagaatacaagtggag

SEQ ID NO: 4120 - DNA, 201 bp, Bos taurus
cccaaaatggtgattcacgcaacctcaccgtttccaggtttcaacatggcttccgtaacccgcgccaacagaggttaatctcaggacgccggccgaacgctcgcggaagtagcgtcagcggaagtgcgtcagcggaagttttttggaactcagctccccggctctacgtcccgcccccgcgctgacgccccgcccccagcg

SEQ ID NO: 4121 - DNA, 201 bp, Bos taurus
catatacttaagccctacccctcacagtgaccaagtaggagacagggcctttaggatgtaagtaagcataaacaaggtcataaggatgtggccctaatgcgatatgtgaccttatgagaagaggatgagacgcctcttcctccctctctccagatgctcatgtaactggaaagcccaggtgagcacacagtgagggagcca

SEQ ID NO: 4122 - DNA, 201 bp, Bos taurus
tcttgccaaccacattggctgtttttggtctttgcattttgtataaacttgtgagtcagcttatcatttttcaccaaaaaagcataaggtattttgactgcgatttgatttaatctaaatataaatttgaggatgattgactgtagtaattttgagttttccaactcactgacatcatacattcctctattcaatttggtc

SEQ ID NO: 4123 - DNA, 201 bp, Bos taurus
ctattaaaaaaaataccacttatgtttgctttatgcttcattgatcattcgtgaagacagtttgtgtatgtggataaactgtatataagtcatcaatctgaggccataagaaatgtgaacaagctagtcctgcatgtgaccagtggagtttcaaattttaaacagcacattatattcatttagttattccactttattcaa

SEQ ID NO: 4124 - DNA, 201 bp, Bos taurus
ggagcccagaggggaaaggagagaggtggccacacaggcttgatgatacaagaggagagaatgttctccttcatttgaagaggagaagtgggctccaagcatggcctgacacccaaggctggggacaggaccaagaggtagaaagcagccccttcaagtacccacctggacagagctcacccctgctccgtgatgcctccc

SEQ ID NO: 4125 - DNA, 201 bp, Bos taurus
caggagaagccaagtcccagcctccggcaattagcccagggcggttcgagggtgtgggacccgcctttcttttgtgcagctcagttgggatgaaagggttgctgggagaggggccctgaggcgcacaggtgatgctccaccctcgcaccccctggagggtgacgcctccagggagctgagctgcctgccgagttgcccaat

SEQ ID NO: 4126 - DNA, 201 bp, Bos taurus
gggcccaggagatggagaagagcagtagaaacttatatgggatggagctagactgtgagtcccttgagaacaggaaccatctctgattccttcagacggttcccagcacagcacaaggcctggcacatagcaccttctcagtatgtgagtggagtgaataggattcaggagtctcgggctacaaaggttccagtgctgcgt

SEQ ID NO: 4127 - DNA, 201 bp, Bos taurus
cgggccagttctgggggccaggaactaagaacctgtgtcggaggctgttgtccactattctaggtgctgctccctttttctcagccggttggataggtggcggcctgtaaccttgttagaggtactttaggatctgtggcctgcactctgggtagaggtgatgaggaagctgagtttcagagacttcttgtgggcttccat

SEQ ID NO: 4128 - DNA, 201 bp, Bos taurus
ccacacagaacctgaccgagctggacacgaagatccaggagaaggccatgaaggtggacatggacatctgccgccgcattgacatcactgccaagctctgcgacttggctcagcagcgcaactgcgaggacatgatcaagatgttccaggtgagggttgccggcgcctcgccccagccccggcggccccacctcactggtg

SEQ ID NO: 4129 - DNA, 201 bp, Bos taurus
ttgccctctgggatgttcagaagcccaaagagccctggggacagaggtcatactggtgaaatgaaggcaggagatgaactggtatttgagggtaagggccatgtctttggacttgcttgaattacagcaggattccggcggcaagcgcttgccctgcggacaggacccctcagggccttcccagttccaccccatctggaa

SEQ ID NO: 4130 - DNA, 201 bp, Bos taurus
tgacatgtgtccttttaagaaacacagaggggagacagagagcgagaaggagagaccatgtgaagacagaggcagagactggagcgatgtggccacaagctgagaaaggtctggagcccctggaggctggaagagacaggaaactccttctctgtcttagagccattggaggagcttggccttgttgccatcttttttttt

SEQ ID NO: 4131 - DNA, 201 bp, Bos taurus
ggaggctgggagaagtggttatctgcagagagagagggtggggcaggagtcgggggtcactgagctggggttgggggtggggtgtacggatggcagaagcggggggcactgaactggagtcgggaggtcgagtgtgcaaagggcaggagtcagccagacccacggccggtggaggcatcaggcccagtccctctggggttc

SEQ ID NO: 4132 - DNA, 201 bp, Bos taurus
gccactaagcatgctattctttttagcctaacctagaagcaaaagggcttcaacacttcctgctttaaaaaaaaaaaaaaaaaaaaaggccacgttctctctctccttattttcccagcaacatttacaaagttgggaaagtctcttgatacttgagcccaagagggtcttatctgccccatattgtcagaggcccccaca

SEQ ID NO: 4133 - DNA, 201 bp, Bos taurus
gtgatttggctcctgggagctcagtgtgaaaatatatttgggtcactgaatattgccattaattggatctttttagagaatattttccttatttttggccatgctgggtcttcaccggtttgtgcaggctctctagttgccgtgagcgtgggcttctctctggttgtggtgtgcaggcttctcgctgcagaggcttctctt

SEQ ID NO: 4134 - DNA, 201 bp, Bos taurus
ttttattaatagaagcatatgcagcagatcaaaggagacgatggccccaccgcgccctgcacgggacagagcgcagctggactcctgcctcatcctcttacgtacactctggagggccactgacggataggaggctatgcggagggccagaagcaggacggcgcaccgcctgcgacctgattcaccgatgcgccaagacat

SEQ ID NO: 4135 - DNA, 201 bp, Bos taurus
gaagacaagcccatggcctgagaccctacacgctctctaattggtgagaacggggtgttggtgggaatgacattccgacactaactctgaacatccgacgatgggggaagggcagtggccagatatcggcagaaccccgggctcatcctagctctgactagctttctcagacttagagactgagtcaccctcctgcccttc

SEQ ID NO: 4136 - DNA, 201 bp, Bos taurus
gctaaacaacaacaacaatccaggcaacatgtacgctgacaatcacactaggggaccaaggtgagactaagggtagtggcctggatgatgaagggagcccatgttctccttcccaccacagactgacaacctctcagtggaacaaagtttcagtcatgacctagtgtgtctccagcactgggctggccatcactgtgcttt

SEQ ID NO: 4137 - DNA, 201 bp, Bos taurus
tgagatttaaaagatctggaaatcacttaatgactaagaaagacttcatctaagaaaacaagaaggaagggagggagggaaggaggaaagatggagaggaggggggaggagggaagatggagagagagggaaagtaactgagaaacagaggaaagggatttatcatacttggtatcatataaaaagctatgaccgcttcca

SEQ ID NO: 4138 - DNA, 201 bp, Bos taurus
cctcggggacattacagagccccccaaatttaaaatacaaaagcactttgaagatcaaggaaagcaacaagggaggcaggggtccagacgacaggcctagctctaagaagtctttcttctacaaggaagtattcgaatctcgtaacgcgggtgatgccaaagagggaggaaggaccttaccggcggagagaaagatgttca

SEQ ID NO: 4139 - DNA, 201 bp, Bos taurus
ggggacccaggccaaggctggagcttatagttggaggggaaggcgtggggtctcagcgaaggccctgggcagcaggcctcagcctagaaaccttccccacgctgcccgcagcctccactgtgagtgagtgctattgaaatgattctatgaggtacccttggcctagagcaagctcactcgattcatggacatttcacttct

SEQ ID NO: 4140 - DNA, 201 bp, Bos taurus
gtgccccctagtggccacttccttcatcacggaggttgagatccgcgggatgtcaataggagtggcgacttggacgctaattttatgaatagactgcagtccttgcctagaaagagctcacggccctgagtggaggagccacctgcccaaccgatgctgcttcaatcagaacgcgtccgagggtgcccaggaaaaggtgac

SEQ ID NO: 4141 - DNA, 201 bp, Bos taurus
caaggccagaaggcaagataacagtgggttggataagggaaagaaaagcaggcacctaagaagtaaaggtgagtgagaaggaaaagattagaaaacgaagaaaaaaaaagaaccacaaaggaaaaatccaaacacaccagaaaccagagtcaacatggattaaaccactctcaccagttaacaaaaagactgctttttttt

SEQ ID NO: 4142 - DNA, 201 bp, Bos taurus
cttcccctttcacacacaggcactctctgtggacagagggaccaaggccagctctttcacaagcagctttccccctcaactgcccacaacgccccagggttgctactgccgcctccagacctgggcctctgagcccctggctgccagagctcagagacagaaccagcgggatccacgtggggtgggggtggggaaacagga

SEQ ID NO: 4143 - DNA, 201 bp, Bos taurus
gaacaagagtgtgcctgacagacagcagcaactcgggtacagtttgctcattcactctcaagatagtaaacgctcttagccaagggcatcatagtcatggacttccctgggggtccagtggtttagactccacgcttccaatgcagggggcacaggttcagtccctggtcagggaaatgctgcaggccttgaggagcgtgg

SEQ ID NO: 4144 - DNA, 201 bp, Bos taurus
ggaagcccttaagctttttaagtacctattttggccactggtgttggtgttgacttcgcagcctggctgagggtgcagtgccccaggggacggaagtccaggaagtaaagccatggggggcagtttaggtgaatggacttcactggcctgctaacccttaggtccccttttctagtttcttggcccatcacagcaccttgc

SEQ ID NO: 4145 - DNA, 201 bp, Bos taurus
ctttgtgatgacatctctggggattcaggactttctagtgatgtcgcccacgaataggaggagaaagacaatgcggccctcctggaattggcatggtgggcactgcacagggcttaggggtgagtctggtgtcagggcagaacagtcggagacaaagctgggcgtgcgtgttcatggttgaggcctgaagggatggcgtgg

SEQ ID NO: 4146 - DNA, 201 bp, Bos taurus
tcacggagcagctccttctgatgtggggtgggtgtttggtattccgtgggtggttcactgacgttgtcgtctatgcttagagctatgaagtggccttgctctgtctcatctagccagggtctcctcattaacttctcctgaggttggtattctgcaagttgatcagttcagtccctcagtcatgtccaactctttgcgacc

SEQ ID NO: 4147 - DNA, 201 bp, Bos taurus
agggctggaagctgccctcatggtggggagggtcccagggggccctgcaggagggctccaatgctccagttttaaggggtccaggttgggtgtttctagggtgccatcatggccacacctgcctttcttccacttcgcctataactttcctgattgtgcacaaggtgcccaggtccctgccagccagtgggggaaaccccc

SEQ ID NO: 4148 - DNA, 201 bp, Bos taurus
gacggatttgagaataaagagaagcaaacactccacgggatggtggccaccccagttacgtagccaagcctctttaggcttcagagaaaaaagcaagtcctaggatgagggctgagaggagatggccagcgtcaggccctgtcgcacactttaccacagtgaccacacaagggcaggccgagaccttctagagctgttgac

SEQ ID NO: 4149 - DNA, 201 bp, Bos taurus
ccccaagctgggagcccacctctctgcctccccagagtgagctggggcatcaccagccatgtcagcgctgcggctgggagaagggtctgcggccgatgcccgacgactggtctgatagtcagaccccacttcccttggggaaggcagtaggaggtgacagtagcagagctgggccccccaccaccacggctcaaatccccc

SEQ ID NO: 4150 - DNA, 201 bp, Bos taurus
ggagaatgactcgcctgcccgcctccttcagctggagaaaaagccaacacacagcctagagggccggctgggcggggcggccgagaatgcagaccaggccctccagactagttctgaacacaggctccctacggctcctgggtggggagcacggttacaccgctccagccagcatcacatacacacctcacctggccccac

SEQ ID NO: 4151 - DNA, 201 bp, Bos taurus
gatcagggcccttcctaatcttctttgtaagaagagattaggatgaagacttctcacagaggaaggaccatgaggacatggagagaggatccatctctaagccaaggagaggggcctcaggagaaaccaagcctgcctacaccttgaccttgaacttgcatcctccacaaccgtgagggataaatttctgtgtaagccacc

SEQ ID NO: 4152 - DNA, 201 bp, Bos taurus
gctccctggtacaggtgcaggagtgtgctggcccctgctgtcaccatgatccctgcgctcctggggctcaccctgttcctccccttccacctgttgcttccgccattgcagaccccaggcccaagaatgccctccgctcagcagcgactttgttggaataaacacccgtttctctaagctggtgtccttctctgtttctag

SEQ ID NO: 4153 - DNA, 201 bp, Bos taurus
atgataaaccctatcacagtggttacaggactaaaccagtaaaacactgaatttatcagcagcaaaggggaaagtatttatgctacatttcctcatgcttactaaactccagtcatccaatcaggtctggtttagagagaagagggaaaccagaaagtccaggagaggttaagagcaattaccagcttacaagtgagccaa

SEQ ID NO: 4154 - DNA, 201 bp, Bos taurus
tggggcccaagtcagtgggggtaaccggagagagcccaggcagcagaggcttactccctggtggctgctggtcacaagtgggtgtggagcattagaaatgcggcctgtgtgtgcagctgaggaactgactgaactcttaatgtgcttaattttcagtaaaaatcaatttaaaagtcggttgcagatgaaccagttggttgg

SEQ ID NO: 4155 - DNA, 201 bp, Bos taurus
tagacgttgttgtatttgagaggtgtgtacttgctcaaggagaagaaaaaagtggcctagagagacagggggagggcaggcgcagatgcaggaggggcccgcgaaccctctcctcggggacggagcacagttagatacactggtgcttctggaggtggagagtacacgccatcgcagaccgtgggccaaggcgtcagtcac

SEQ ID NO: 4156 - DNA, 201 bp, Bos taurus
ggcctggcgccccactggagaagggatgggaggaagggggatggcgtcaggattctgcagatggtcccaggaccccaaaacagctcctgggaccagcatgctagagggcaggccctgccccgggaggaggcagccacgtcctacttctgcacccccgctccttcagtgaagaatcaggggctgtggtcgtgatcccagcct

SEQ ID NO: 4157 - DNA, 201 bp, Bos taurus
agagcccaacaggtatctcaagagagtctttaaaaacaaaagtaaaaattgtgttaagtcacaatcatctaatccagaatatgtgctccttgctctctacgtgtaactcatattcctaaatatttaatcctatctcctaagtgatatttacatttccctttagttatttaagctatctctggattactctacgcatataag

SEQ ID NO: 4158 - DNA, 201 bp, Bos taurus
cctactgggcggtaggggagcggctggcctcacggggcgctcttccggcgcggaggacgcgtaatgagccgggggcagaggttctgcttccggcaagctgagctgggcccttctttgtgtacgtacggaccggaacacaagctgcctatcttcgcccggctgcctgtttcaacttccgtgtccgcctgtttctaaataact

SEQ ID NO: 4159 - DNA, 201 bp, Bos taurus
ggagcacctgcctgtgaggctttaacacctgaaaggagagttttggaaggaaagtgactctccagtcataattataaccagactggcccgctgccctccataagcaggaaagctggttctaaacatagtggggcgctgaccctcccctttgtaggtgccctcacttggggtggggggcggctgtgtgcctgggcctcgggc

SEQ ID NO: 4160 - DNA, 201 bp, Bos taurus
actttaaggggggcttgagaagacaattcaagacaacaatagcagaatttaaatctacattgaatatcatttaaaaaaaagcagatgccacagaaagtcagtaataatgagaagtgaattcaaagaagagagaaacaatttatggatagttgagtttctaaagggaccaataattgatagcctagaagatgatttttctga

SEQ ID NO: 4161 - DNA, 201 bp, Bos taurus
taccaggcccaggtggcagaacagtttgagggttttccatacagctcaccagtcctgtcaagtcctatgaagcagacacctgagcagaagccagtgcacgggggccccacctccagttctgtctttgaatttccatcgggacaggctttcctggtaggacacctccagaatgtaagattagattcgggactgagcccaggc

SEQ ID NO: 4162 - DNA, 201 bp, Bos taurus
tttatgctgatgaaaacaggccaggcttgttgtcttgctggtagaagtagtagttgttgttgttgttttttgaccaaagtcatttcagcgactttgaagaaaggatctgaaaatgatcactcagcctggtatttattttgatatatatgctgacctctacctctcagagccgaacagcctaatccttgaccatcccagggt

SEQ ID NO: 4163 - DNA, 201 bp, Bos taurus
tgtgcctgggcatcttttatatgtttcgccccaacatctcctttgtggcccccctgcaggaaaaggtggtcttcggattattcttcctgggggccattctctgcctttctttctcatggctgttccacacagtctactgccactcagaaggggtctccaggatcttctccaagtaagtatctgcagagtccctgtttggat

SEQ ID NO: 4164 - DNA, 201 bp, Bos taurus
ggcccgaacctgacgtgacagcacctgccctgggagctacgcaccagggccaccggccttcatggtgcgggccgacgtgtcctctggctgggctggcctgcggctgatcttcctgtgcaggacgcatgtcctcctgcctgtcctgggacaggacccgggggctgtgaccagtgtctgagggagaggcggtcacccgctacc

SEQ ID NO: 4165 - DNA, 201 bp, Bos taurus
gaagtggtcacattcaagagtctttgggatttcccgaagggccggatgagagaaagcaatcaagaaccactccagatctttgggcccatcaactgagagaaggggagcctgttgaggagcaggttttgcacagaaaacaaggaattccacattggatctgttgggttttgagatgcccgagcggagactgagttggccgtg

SEQ ID NO: 4166 - DNA, 201 bp, Bos taurus
tggccatgagggacagagtgggcactcgcaccttcctggggggagctggagcctgtccccaaggcgcaggctgggtgatggcccagttcattcctggggctcctgggaaggctctgcactaacaaagcacagcgaaggttcttcaggcaagtgggggagagcctccctttgatgcttatgctggtgacaacaggcccgagg

SEQ ID NO: 4167 - DNA, 201 bp, Bos taurus
tcaaccaaggaccccttggccgcgagctatggcttctggtctgtggacactggtagctaagaccactgactcaggatgggaaaggagaatcgcagaaagacgggcctccagaagagtctatagctggaaatatctgagaagatggactgtcattcagtcagcaagcgtttaccaaccatccccgagacagaaggaaggaga

SEQ ID NO: 4168 - DNA, 201 bp, Bos taurus
tgagctcagttgcccctgaggcatgtggcctcttagttccccgcccaggatggaaccaagtcccctgtgttgcaaggtggattcccagccatgggccacccgggacattctggcgtgtaatgaactgtaccctaaaaaaatactcttctggttttaggttttgtacatctgtaagtagacattttcggagctctgccggcc

SEQ ID NO: 4169 - DNA, 201 bp, Bos taurus
catcttccaagcagtaaagcaaggttgttgttaccacgcgatgggcctccatcactgttcctcaccctgccactgccaagctcaccttccctctgcaagagtctgaggaggtggggccggaagacctctgacacctggtgctgagggaggcttttgctcatctgagccccctttcaccctcaaagcgcccccaaagcctca

SEQ ID NO: 4170 - DNA, 201 bp, Bos taurus
atcaccaatgggctccggctgccaaaatctctcagttcacagaggctgggatgttgggtgtggtgcccagagcaagagtgagactggccctgggccctgcactggtcacactgctcagccccataaccagccctggcataaatctccaaggatcagaggaaagagagcaggctggggggcctggcaagggcagcgagggcg

SEQ ID NO: 4171 - DNA, 201 bp, Bos taurus
tggtgcttgatctacaaaagcccacctgtgactccttcccaggtcctggttctcagccttatctgcgcttgacacaatcacaatttgcaatgatatcagtgccgtctccccagtggcctctgagcctagtatgaccaaaccaagtttgttttgttccctcctggccaaagtagagggtctttcaatgggagaaaaggaagg

SEQ ID NO: 4172 - DNA, 201 bp, Bos taurus
tgccgtgacaagggacttgttctcctgagggcacaactgagcaccaggggtgctgggtgctcaagtacgtgtcttgggacagagcatcacagaaggatctcggccctcagggtcaggaattctggagtcatggaaatccccagtattggttttggtcctgcccctctacaggggcaggagtctggctacacatccatccaa

SEQ ID NO: 4173 - DNA, 201 bp, Bos taurus
atagtgcccagaattgttgagagagcactggactgggagtcaggaggcctgggccttatcttggttcccccagtgactcattttgcggccttgtggttccgtctgggctccaattagactggattctggtcccagctctgacacgtcccagcttggtggctttgtgccagcgcttcacccctccaggcctcactatccttg

SEQ ID NO: 4174 - DNA, 201 bp, Bos taurus
aataaaagattgttgtcagtgggcacccacaggctcagggccttgtgctgagggcagtccgggaattcctaagcagccacttccagggcccatggggcacaagcatattcacatgcagaactgatcacagtgccaggtggggcaccctgtttctacagaagtggccaggggaagggctgctggagcgcagaggatggagac

SEQ ID NO: 4175 - DNA, 201 bp, Bos taurus
tccagcgtgcagttcctagacttccctggtggtccagtggttaggccttcacgcttccattgccgggagcacgggtttgatccttggtgggaagatcctgcgtgctgctcagtgtggccaaaaaactcccaagcagtccctaagtctgtggagcaccgggctgaggactcagccttaaataaggtctgaaagtggtggtcg

SEQ ID NO: 4176 - DNA, 201 bp, Bos taurus
acagtgtcacagcagcctgcggtgggaacaccaggccatgtgtgcaagagggcagctctttggagggtctgggctgtgactggggtactagggaggctgctggatcagcagggccaggaatcccttaccaagtggctgagtttagttctgtgggtggcgggggtgtggaaatgttttctccaggtagtgataaggtcagat

SEQ ID NO: 4177 - DNA, 201 bp, Bos taurus
tctccttggtgaggagaggacaagagcccccatccacagagaattaactagaacacatataacactgagtgcagggccagatacaagaccagggatgaagaacaggtattgatgagtgtgtcccaccctctgcttggagccaggctccatgtggcgctgtgctgggcccacagcggggtctcagtaagggtgaagttcaac

SEQ ID NO: 4178 - DNA, 201 bp, Bos taurus
ttgctcagatcgtgccatcggcccgtccccaccctccacgatacaaaactagacttgaccccgcatgcctctggtaggattgtccagctggaaagttgatattcctgcctctgctttgggcctggatgcctggccctccagagctggaagactcattagaaatcaactagtgaagcccaattcacagatgggaaaacaggc

SEQ ID NO: 4179 - DNA, 201 bp, Bos taurus
gggctgggagccagagccacgggaaggcctttctgaggggatgctggagtcaagatgaaagagctctgctggtactgggaaaacagatgtgctgtgctgggtgggaaaggaggccggcggtgctgcagggccggcagggcccaccctgtgcctgcattctttcttaagttcaaaggccacttcctgcaccctgcgagtctt

SEQ ID NO: 4180 - DNA, 201 bp, Bos taurus
gggtctcacagctagcagaagaggtgctgggccacaagcccgtgtactctggctgcctgatgccagcatgaatgtctcacccacagttggaccggtcaacgcgggaggtggaactgggccttgactacggaacccccaccatgaacctggccgggcagagcctgaagtttgaaaatggccagtggatagcaggtgggctgc

SEQ ID NO: 4181 - DNA, 201 bp, Bos taurus
gtagtgggtccagttggaatgagtgctggccagcattggggcataggctcaagctctttgtgttctggagcccgcctcatgccctctgcagactttatccgtggccttgagtaggggcccttgagaaagtggtctgatccctgctccatacagcctgtctgagatcttggaatcaggctcaggcttgctttctctccagaa

SEQ ID NO: 4182 - DNA, 201 bp, Bos taurus
cagatgtggcaaggtgatcggcctcttgggatgttggttaggggcgccatgtgccacaaggtgggaaaatctggcagataagagctgtgaagcacctggcgcagggctgggcccaaagcaggggtttgagaagggtcagctctctcccctttgcagcctgggactcttgggagacacccagcttcctctcccttcagctgt

SEQ ID NO: 4183 - DNA, 201 bp, Bos taurus
ttctgacagctctgctttcctctttatctcagaattcaaatactgttggaaaaagtttgtaaacagtcagaggaggcccttcaggccttggaagaaactatacagaaattatcagcggctggttgaagagcttgaggacattctcgggtgagggcttctttagcctcccctttaccccgacccacggcctccccctcacct

SEQ ID NO: 4184 - DNA, 201 bp, Bos taurus
tccttgtgggccacgttccctgttggctgttgcctggagacttccctcagttccacgtccgtgtgtttcttcataaggcagctcaaatcctggcagccgcctccctcagagcgagcaaggaggggccggagagcaggagcttgaccgaggccggggctttgtaatctcctcacacaagtgacatcccgtcacttcttgcca

SEQ ID NO: 4185 - DNA, 201 bp, Bos taurus
gaggccacagggctgactgtggcttagccggggatgctgaccacttttcttaccgcatccaggcaggtgtgggcgtggctggtctggccatggccccgccgtccttcgagctccgggtcttactctcctcccctctctttgcaggatggtcgagtactccctggacctccagaacatcaacctgtcggccatccgtaccgt

SEQ ID NO: 4186 - DNA, 201 bp, Bos taurus
cagggctacagatggactgagcagcctccttcttcatgaagggaaggacggtggtgagggccccgtggagtcccaaggccgtgaggcatcatcatctctatagcaagtcacattcctgaggaatcggaccacacaggagtgaggctccagaaacccctggccaggcatgagagccgcagaagagaggaggccagcctctaa

SEQ ID NO: 4187 - DNA, 201 bp, Bos taurus
tgacctctctgagctattctagagaactgaacagagcaacttggagttgtcatgagaaggaaacaagttaaagggaattgtttggtgagggccctgcaaatggtgggcagcccctcaccgcccccccaccaccaacttggcagagacaggcttcctcacctcaccccactcccagacatgctgctgcaatggcctctttgc

SEQ ID NO: 4188 - DNA, 201 bp, Bos taurus
accccgttctggcggccgtgcgcccaccacccctgccccgccatgtgtccgcagagctgtcgctcatcacgctgcactggttcctcacggccttcgccagtgtggtgcacatccgcctgctgctgcgactctgggacctgtttttctacgagggctccctggtgctgttccaggccacgttgggcatgctgcgcctcaagg

SEQ ID NO: 4189 - DNA, 201 bp, Bos taurus
acaataatcaatcactgtgaaagccccacccctaccaggaaaggccaagggggagtccagacttccagccctccacggctgtgatgaagcatcccagtcctcctgccacggggcatcgaaggaggccgaggaggaagctgccccaacccaaggagtaagtgcagaccatgtagggagaacatccccgctagcagtaaggag

SEQ ID NO: 4190 - DNA, 201 bp, Bos taurus
tcgaatctcctgcatctccagcttcgaaggtggattctttatcgctgagccacctgggatccccccaaatatatgcacatatatatggcaaccacgataccattacatctaagaagatatacaattattccttaatattatcaaatggccagtctgtgttcagatttccagcagtgtcacatatgcataggtgtttccaat

SEQ ID NO: 4191 - DNA, 201 bp, Bos taurus
cccctcaccttctactcccggagctctaactctgcagtctcctcctgccagcccttcactgtttgtctcttcaagccacctcccgccactgtttactcattgaaaactcggcaccagggccccaggcaggggcaggcagtggaaagcaaaggggtcagagagctgggctcatggttgacctcggggtctgaactgctgtca

SEQ ID NO: 4192 - DNA, 201 bp, Bos taurus
gggggagccccccctcccggcccacagacctggcagcaggggcagagctgaatgggaggctttgtgaggtgagggagagacaggcaccacgggagcagccgctggagttacagggcctcctgctctgaatctgggcctgggcctgagacccaagtccctggaccagcccagcaaggaggggcctcgagggccaggcagccc

SEQ ID NO: 4193 - DNA, 201 bp, Bos taurus
cattctacttggcagcttcctccttcatctgaagagcctctaggcaggtactgtttctatctgggcagcattctctggggtcctggcctgtcataggtacctcagttctgttcagtttagttgttcagtcgtgtccgattctttgcgacccatgaaccgcagcacaccaggcctccttgtccatcaccagttcccaaagtt

SEQ ID NO: 4194 - DNA, 201 bp, Bos taurus
ctcatatactccctgattttgtgctcacgcagacctgcaaaatgcaacctgccttttcagcacaagctcggtccttttctacacacagacacacacacacatgatctgctgtgtgtttatattctcacaacacgctctccttcctcaacttgcaaaacggccacttttcctggcttctgccagctcagagctgtggcctca

SEQ ID NO: 4195 - DNA, 201 bp, Bos taurus
tcatttagaagctgctaattgcaggccaaggtccacatctggtggctctattgccttggcatatactgacacattaaaaaaaatttttgttgttggctgcgctgggtcttcgtggctgtgctccggctgtgctctggctttctcaatttgtgctgagtgggggcactccgactcctcattgcagcggcttctcacgttgca

SEQ ID NO: 4196 - DNA, 201 bp, Bos taurus
aggctgcctttgaatgttggcgtatctgcaagaccttgggtgagttactgtcctcctccagccctcaagttcctcgtctgttaagtggggcccatatacactagggctgttcatgcacataacccttactgctgctactagtaattattattgttgccattgtctttgcttagacatttcagctctgacacctgttcagtt

SEQ ID NO: 4197 - DNA, 201 bp, Bos taurus
tcctttctggaaaaatcagtggacagaggacacccccctaagtcacaaccttcatggaagccagccaagaaaaccaaagagaccagagaaatgggcggccattacagcagctgagaggtgaacgagcccaagcccccatcagacagacaggaagactgagacctagggtggggccacaactgacttgggtccaaggctctg

SEQ ID NO: 4198 - DNA, 201 bp, Bos taurus
agggctgcccacattctccaaggctcctgcaaggtgggtgcctctatgggtggctcccagatctgagttccacggaagatgattcagggctggcccagccttcacttggttctgaaccatttatggtttataaaacaccttccctagtgtcagtaatgcctaacacggcccccggcatcactgacaccccagtgagcccag

SEQ ID NO: 4199 - DNA, 201 bp, Bos taurus
ggctagcccagggccaggggcaggggccagggcagatccagatgctctgcagtgaaccagctgctggcagagaggctgagctgtgctccaagggaccaggggctgtctcctgggcccccagctccttaggacagctctgagaaggggaggctctgatttaaagggtgtgcctgttttaaatctttgggagaaggtaaggga

SEQ ID NO: 4200 - DNA, 201 bp, Bos taurus
atttttttttttttttttttggccacacctgaccagggattgacctgtacccacctctgccgtggaatctcggagtcttaacccagtggaccggcagggaggtccaagaggcctgcattttcattgcccactgggtcccacaaatcctgcagctggctctggcctcatggaagctttgcctggaggaagtctgctgggtct

SEQ ID NO: 4201 - DNA, 201 bp, Bos taurus
gggcggggcttactgatgccattttacaggtgtggaaactgaggcccagaggacccagaattgtctcaggtcacacagtgaggcatggacagggctgggacattaaccccaggtcccagaggccccccagccagtgctcagtgccaggctggtcagggtgatgctgcctaccccccacccctcttcttgctacctaccagc

SEQ ID NO: 4202 - DNA, 201 bp, Bos taurus
gagggaaatggcggcggggccactccctcctctgagcttcccaggtgtcattcaggctgccaaggaccagccttgaccttcaaaaagaagctcactgccacggactcgtgtccccagaggcctctccccagaacctggagaagtatctggttccaggcaggcacccagggctctcaacccacctccaacttcctctccatc

SEQ ID NO: 4203 - DNA, 201 bp, Bos taurus
aggctcccccgtgggcctggagccccgcatgcatgccaggctgggcgggaggaaagctgcgatgcctacccccacggggcttccggggcaagccaccaggtacctccttacaggaagagggccagggctggcagctcactgggaggcgtggccagatccacttcattagaaacaacagccgcaatgcctgggccccggtac

SEQ ID NO: 4204 - DNA, 201 bp, Bos taurus
tcagtttctcaaacagggcaacacatccctacccaccccgtcatggggctgctgtgaggatcaaatgagacaaacagccggccgcctccatcgggtcctcgtgcgttgagggattgactattacagtgatcacggtgaacatgaagtgtccttggctggattctgagctgctagaaagtgggcccatgccccccaccttgc

SEQ ID NO: 4205 - DNA, 201 bp, Bos taurus
ttgtcttgggacctccccttgggagaggagaattggcagatcgggctcccaagtgcggccccggggcccatcaggaggcctgtgcagaagcattgcccagaacgaggctctggacgaatgaatgaatggatgagtgaatgactgaaaagtcagaggcggaggaaagggtggggtcctggccaccaggtgcacattcactgc

SEQ ID NO: 4206 - DNA, 201 bp, Bos taurus
gctccagctgattgaaataagtcaggccagagggtgcaggtacgacccaggccacaccaagcaatggtacaggcaaaggcaggcaggtggaaaggactggatcatatttaagggcgtcactggggccctggaggtcccacagcaccctggttgactgttgtattggagcattcgagttgcaggctgctctctgctgccagc

SEQ ID NO: 4207 - DNA, 201 bp, Bos taurus
aggcggcgggagggtttccaccactgcagctacgccccgtgggccggtggcaggagtttggggttgattctaggtgagctgggctcttcgggagggtttgtggaagggagtgacctttaaaaaggcctggactgcaaaggcagaatggaggccgcaaggccagtgagggccgaggctctggaatgttccagaagtgatgtc

SEQ ID NO: 4208 - DNA, 201 bp, Bos taurus
tctggccgggaaccccctctggggactgctcactgcccctccaccgtgcgcttcacccagggcggcacagagaagatgctatggccccctcgctcagaagggagacagaggctcagagacgcgacatgctgaggtcagacgaggagtgagagtcgggacagtggggatggccctgtgtgtctgggcccaaggtacaagcgt

SEQ ID NO: 4209 - DNA, 201 bp, Bos taurus
tgtctccccttcgtgtatccacgtccctcgcttttgaccttgaagtccctgtctctgaataacatccatttccccactccttgaagccacactcagccacgtgacttgttttggccaaagagctacaaatcagcacgatacaaccgaggtctgagaagcacctgtggtctggggccttgagatcctggagagggcatcact

SEQ ID NO: 4210 - DNA, 201 bp, Bos taurus
acccgtggcacgtcctcctcaggccccacaggtgtgaccagcatagggatggaaaccacccagcaaagatccctctgctctctgatcaatgacacccctcgcggtgtttagggaaaggccttcatacttagacacaggaggcgtgtttccaactgttcgaaaaagtgtaagatgcatctgtaggatcacttttttttttct

SEQ ID NO: 4211 - DNA, 201 bp, Bos taurus
tgccccctcaacgctcaccgacgggacccaggctcttcgccgtccttggtcccgctgctgcttcagggccttggcactgactatccctgggcccagagaggtctgcagggggctaaatcccagctgagtccttcagctgccatctctgctcaagtgttgcctccccagtgaggcccaccggcacccactactgggggttgc

SEQ ID NO: 4212 - DNA, 201 bp, Bos taurus
agcctcaggttccctgccggcctctgttccctcacctgcaaagtgggagtcaccgcagcgcgacctgcagacgcagaggcagggctcaggcaggcgggctgggccttcatttcagcccaggcatcaaaccacggcccatcctctgggcagctccttggcagagttcagctcagcacgggttcccctgtagacagcagccgc

SEQ ID NO: 4213 - DNA, 201 bp, Bos taurus
catgtgacactttttggaagaggagccatccagaaataaagcgttagtatagacgttgttagggtggttttctttttctttttttctttttttttttttgcgttaagaacaaaggtcaagaacataaccttattcctgtctttctcttaattttgtagcatcaactttagaaatcaggttcacaaggaaaacgttatcacg

SEQ ID NO: 4214 - DNA, 201 bp, Bos taurus
tctagaaggtaggtagcattatcatcccagtttcaagctgaggagaccgaagcttgaggaggtttaacaacctgcccaggttgctctgccagagactctctggcccgctctgtaccccgggtcctcttcatgacgcagtcctcaagtgaagccaaagatatttctggactttagatatttctttaccacaagaaatattca

SEQ ID NO: 4215 - DNA, 201 bp, Bos taurus
aggagctgcagttcctgccttggcagctggctctggggtcctggctactaattaccagccacctgcttctcaaggaggccctttaggaaaggcggtgatacgtagtttgtgtgtgtgtgcatgtatagtcgctcagccctgtccgaccccgtggactgtggcccgtcaggttcctctgtccctgggattctccaggcaaga

SEQ ID NO: 4216 - DNA, 201 bp, Bos taurus
ttgtggggactgggtaggatgtgtttgcatcataaatacttggtaccaagagtgaaacaaacatccccgagtcccgtccggcccacccctcatgttacccgggtttttttctctgcactctccccactctcccctccgccacctctcagttcaggcctcacttcccgcgtagcccctccctgtccattcttctgtgagatg

SEQ ID NO: 4217 - DNA, 201 bp, Bos taurus
ttcagacatggcccgggaacttccctgggggtccagtggttaagaatctgccttgcaacgcaggggacactggtttgattcctggtctgggaaggtagcccgtgggccgccactactgaagccagtgagtctagagcccacgctctgcagcaagagaagccaccacaatgagaagcccccacaccgcagtgaagagtagct

SEQ ID NO: 4218 - DNA, 201 bp, Bos taurus
ttttctcatctgtaaatagggccagctgtgtgtctgtccggcggaagctccggggcatgagtgagcctattcataacctgcctttgcaagagtctttgcagtgtgaggcccgtactgctgttaaagcgtgaaccgaaagcgcttctgaagtgccttcctgctgagacatgcggatgtcttgtcttctctcccacagctctg

SEQ ID NO: 4219 - DNA, 201 bp, Bos taurus
ctccatgggcctgcatttgagaacatctggagacacgggcgggggtgatggggtggactggagtgggggacaggagcagacaccctcagacccatcccccgtctcaggcccctgggggattctttctccctgatacctcggagaggtgacttgaatcagttgaccctcttgctttcggtctgaaaaaatgatcaagtcatc

SEQ ID NO: 4220 - DNA, 201 bp, Bos taurus
tatttccattttacagaagggaaaactgaggccccagaggctgtgggacatgcccggggctgcccagctggaactggggctgacctcttgaccctcagcccatgttcttcttttggccatctttgtgggtctcatctccatcctctcaggaggcaggggtgctcttgactggaagagtgatttggggctcagagtccccag

SEQ ID NO: 4221 - DNA, 201 bp, Bos taurus
aaagtcctgtacatgttttcttagatttacactttaattcttgaagattttttatagtcgtggatttttatttgtttaattggccgcgtcaggcccccgtcgccattgtggtgcgcgggttctctagctgtggtgtgcgggctgcggtggttgcgacacaaagtctctctggttgtggcctgtggactccggagcgtgctg

SEQ ID NO: 4222 - DNA, 201 bp, Bos taurus
tgctccacttggacaagtccccggggcaggtccggggatgactcagcatccagggtgaaggaagcagcgctgatccctaagcaagagccaggcagaggttctccagcttggcctccaccaactgtggccctgggttctggcagcactgtctggaggagatgagactcaagccataggtcggggtcttcctcagcttgccct

SEQ ID NO: 4223 - DNA, 201 bp, Bos taurus
taaattccagatgtaaggaactggggctctccctgaccaagtcatccggccaagctggggtccgaactgcaggcctggcttgggggccacttggtccctccaggaagtgggtggaggtggtgggcaaggtgttcaactctttgagcctgtttccttctcaatccaaggaggctgaagcccccaggccggggcctgcctacc

SEQ ID NO: 4224 - DNA, 201 bp, Bos taurus
agtcaaagccaatcatgccaggagaaagcggacccaaatgtcagctccaaacaactttctctccttctgtgcccagggtcacacagggccctgcgaggaacgccgccagagagccttgggagtgaaaagagcagctgctggtctgggaacgagggaaggcttcactccagaccccggcctgcactgggaactggaggcagc

SEQ ID NO: 4225 - DNA, 201 bp, Bos taurus
tcaagaaggccacagacgtccaacagcacctgtccccaacctgtaaccgtgagcaccaacggcttgccacacctctaagccaagcgaagctggggcagcagccagggccgggcacaaggacccacatgcagaggcaggcctcagcctagcgaggcacagcggctgaaacaaggcgcggatgcgaatgcagtaggacttctg

SEQ ID NO: 4226 - DNA, 201 bp, Bos taurus
ggagtgtggctcgtttatatttttctagaatagcgcacactgagcacacgggatgctgtgtgaccctgctcgtgggccgaggctgccgggcaggctcagccggtgtggacacagcaagccaattttagagtcagacgcgccgcaggggcctgcccccggcccttgtcccactcacccaagagggcagctgcaagggccaaa

SEQ ID NO: 4227 - DNA, 201 bp, Bos taurus
ccaaaggtcaagttcagatcgcgcgcttggctcgggggctgggatgtgtgtattagattctcaagaagtgcttactgggcggaaaggaggaacgtgcagacggcctttgacaagttgtgtggccctcgcagcctccgtgtcctcagtgaagagagctgccaaccccgccttaacccgggagtgttgtgcagacaggcctgc

SEQ ID NO: 4228 - DNA, 201 bp, Bos taurus
caaggggcccacttcaggtataccagacgtcaccccaccaagctgcctcctaattctgctcccaggggctgcctccccgacctgctgaatgtcaggaccacggccggaaccagagcgtcttgtcaaaagtaattgttgaatgacctctcattattacttaaagaactatgtatttggccaaatgggagctttgaagacttt

SEQ ID NO: 4229 - DNA, 201 bp, Bos taurus
gctggcagagacactgttcccacccccgtagggggcccggaggaaatgtgtagttcaaaagtgatctcggaaaaagccttgatggtgagcctttgagctagtcttcggccactcctctggtgaccaggccacgggaaggcagaggggcgctgcacttttatgagccggggggcagagcgggaaccatccatctgtcctgca

SEQ ID NO: 4230 - DNA, 201 bp, Bos taurus
gtatcccgacagcctgcttagccagtggtcacggaagacaatgagaaatgatcttgcaacagcacctgaccagccacccatgctcccgtgatccaggaggaccacaagaccaagattagaccaactgcgtgtcaagccttgcccgtgagacctctgttggagacacaggggacagaatgtagccgttcccctgcaagaata

SEQ ID NO: 4231 - DNA, 201 bp, Bos taurus
tgcactctggatcctgttcttggcaaaacagggtcatctgccctgggagcagctgtctctggggacgtgatgagctcagtggctgaattactgaggcccatgggtgggagccagatcaaaccagtccaccctaaaggaaatcaaccctgaatattgactggaaggactgatgctgaagctgaagctccaatactttggcca

SEQ ID NO: 4232 - DNA, 201 bp, Bos taurus
aaggcccttggccccgttctcagaacgaggcatcccaacagggaggtgctggggtaggttctccgtggtcccagggaggcccccacctgccagccttcaagtggcttcaagtcaggttgggtgggctcgagtccactcagtgtctctccagggccagagcaggtggtcctgaccccagcgccctggacgctccgtgggtca

SEQ ID NO: 4233 - DNA, 201 bp, Bos taurus
tctgctgaacaggacgtgagagtgttacacacacatatacacgtgtatgttcattttcctgttctttcccactacggtttatcatagggccctgggctacacagcaggaccttgttgctggggctgtgttgtttcctggcttgctattaagtctctagctgtgacatggacttactcgtccttgtctgtcagctccggtgg

SEQ ID NO: 4234 - DNA, 201 bp, Bos taurus
agaataggaccagaagcccatgtccacttgagatcaacctgctccgggagacaaacttccttgcttatcactgttatgttttctccatcatagtttcttgagtttgtggtacagtaccagagaaacttaagtctctctttctctagagggtctgtttcctctggatcagaagacatatttccattgagagtcaccccatct

SEQ ID NO: 4235 - DNA, 201 bp, Bos taurus
agccccccaccgtagcccctccacacgggcctgagctgctccccgcccgggcccagggtgggtggggctctgcgcctggacaagcccgcgccttggccccaagagacacaaagcccccgagacagacgccctaatcccgagcacttcccatggtgcgcggaggcagaccacaggggcggcctccaggtctgcgtgcaaact

SEQ ID NO: 4236 - DNA, 201 bp, Bos taurus
tgggaggggaggaaggggtggagccccacccgcgtgtccgtggcacggctcctgggcatgacgacagccctgatgactcaggtgtgggctcgggccccggggtcccctttaccttccctgctcatcaccagatcccagggcagccaggaatttacagttaacaattgggagaccatggagaagagatgggcagggccggac

SEQ ID NO: 4237 - DNA, 201 bp, Bos taurus
ctccagcctccttcccaggggctcgtgtggccgcgacttctcccaggttttaaaaaagcggtttctctgtcacccttgctggtgggtggggccggagaccgcgggtcactgggcgggcagcgcggagacgggggagccgggtccacccgctcctgcattaggtcctcaagcagacacagaggcccccatccccaccccagt

SEQ ID NO: 4238 - DNA, 201 bp, Bos taurus
ccaaagctctgcccagccgggtgtggcccgtgctgcccagagctgggggcgtctgccgcctcccccctgcacccggggtgccccagctctccccgcggcctgcctccatcccaacggtaagatgggcagaaccttctggaatgggctccctcctgccccaggctccctgcgtgctccggctccctttctcctccaagaggc

SEQ ID NO: 4239 - DNA, 201 bp, Bos taurus
ggcccgtggctggtggtggggggagccgtggcccttcccagctacatggagtaattgttcctatctgcccatcctgccttcccagcctggtctccctgatatctgcctgtggccgaggggccagccagctctgcagccctctgcctccctctccctcactttccatggctgctttctcttccagttttgtccaccatgtcc

SEQ ID NO: 4240 - DNA, 201 bp, Bos taurus
gctcagaaggggatgggccatctgtgcggatgggcgggggcatggccaattttgctcatcctcagagactaagaagacttcctttgaggattctgtttcacgacgatctggttgacctggggcagtttacctaacctctctgttcccgggttgcttcatctacagatctgacaatagtaactaccctggcgaaacacagag

SEQ ID NO: 4241 - DNA, 201 bp, Bos taurus
ttgtaaggaaggagagaggaggacccaggagaggtggggtgcacccaaggagcctctcgaatgagctggggtgatcagacagcactgtgttccccttccactcagggcctcccctgaaactcagctgctgggcagatggcattcatggtggcagtcaggccctcactgcctgcagaccaggctggggtgaaacctcagatc

SEQ ID NO: 4242 - DNA, 201 bp, Bos taurus
cgccatgaaaatgggctgcttaaaatctcctgctgagaggaccctcattcactcatggacctggatggtgccccgtggaggccccaccatctgtgactccatatctttttgcatgatccctccatccgatggttgagcaccgcaggggtgctgatctgggcccacgcatgcgagaaggggactcatctgatgggcaacttc

SEQ ID NO: 4243 - DNA, 201 bp, Bos taurus
ctggaggggatgtgggaccctgacttggccaagaggctgtcaggagcagggagccagctggcatttagggtgcaagcctgcagttgtggaggtctgctcttagagcctgggccccgtgatatgcaccccggctccccttctgggatccaccctgcttcccagctccccagacaggcccctgggtttaggcatggtcccctg

SEQ ID NO: 4244 - DNA, 201 bp, Bos taurus
ggtccacatgcagagctgttggctgtgggccagaggccccaggtcctctccacgtggacattgctaggtccccgggagggaggggtcactcacactcagcccgggcagagtgggagaggggagaggaaggccttctgggaggagctgcttcttgagccagaccacgtcagcaggacgcatgtgatggatacagggaggaac

SEQ ID NO: 4245 - DNA, 201 bp, Bos taurus
aggatatgactaatcatactttacttaaaaatgaaaatgaataagatatgtcagaaaatatgaattacaaatcaactcaagaaacaaccatcatagaactggaaacagtaatttaaaatatctgtataaagattcctcaaggtccagtcagttttagggaagtaacttcaacctatggcggctcagagagtaaaggatcca

SEQ ID NO: 4246 - DNA, 201 bp, Bos taurus
ccctcacctggctcctacctgtgccacacaaaggccgctggctctcccgcgcccaggctggagtgggtgcagtgacgtcgacgtgtctgagccgccctctttgagtggcagatggccctgcctggtgacggtaggtctgcctgatgtgcttggctacgggcaggtgtccttctgcacagaccccagaggagccagctcctg

SEQ ID NO: 4247 - DNA, 201 bp, Bos taurus
cggccccattgttcttccccttgacaaataagagagatgtcatggagcctggcgctttgttagaacacagggaaggaaattaggtcctctccatctgtcatggcgatgatggagggcctgccccagcctcctgtgcgatgccctggaatgagcggtgctctgccatgagcccgccttaaccgcgttcccctgcaagcctgc

SEQ ID NO: 4248 - DNA, 201 bp, Bos taurus
gtataactgatggctgttgctggccattcattcttctaacaaaaatcatgtttcccagtgctgttcttgcagaagagaaagtggccagtccagaccccactgtcccggacacatgtccagggatgggggacagatgacaaatgggtggacacggaggataaaacagaatcataagacagaagtaaagcagagatcactgag

SEQ ID NO: 4249 - DNA, 201 bp, Bos taurus
gttatgtggacacagatgtctgtctgcatcagtggtggcgactgaatggatggatggatgagtgaatgcagggtggccaggcagctgtggcctcctgccccggaacacccatgagccttcttccccggaaagctccatggaggatgtgctcttgcggtgttgggctccagagcagagaccagggctcccggccccatccct

SEQ ID NO: 4250 - DNA, 201 bp, Bos taurus
aacaggcagccactgctctctcctccagccccgtgggtctgcctcccggatgtcatgaagagagtcaccacaccgggggcctgtcgaagctagttccctttacccacacggtccctcggagatcccacctcctggtgtgtgcgtctgtgttctgttcgttcatgccgagtcctctcccacagggcaattccatggcccgga

SEQ ID NO: 4251 - DNA, 201 bp, Bos taurus
ggaccggttcccaagcgcagagcccagcacactctggagcatggagggggaccaggccagggacacaggcggtgggtccgtggctcgtgggggcggcctccgcctcctgccctcggcatccgctctcacagatctggaaactgtggtcaaagcctggaggacggaagggtcataggccccgcgaggccgaccccaggctga

SEQ ID NO: 4252 - DNA, 201 bp, Bos taurus
ctcctcaactggtcccagctgcctcactcatgttcatccacccgcaagtgtatttactctcagccgctagctgcgtgttctggatgctgagccaggtgtcgggagagtctgcaaacctggcctgtgtcaaccgcagctctaatcactggggttctcaggagggtaagccgcaacgcctctgaaaagaggccacttgccaac

SEQ ID NO: 4253 - DNA, 201 bp, Bos taurus
actactgtttgccaggtccggggagggcctgggtcaagaccaaagacatccgacctccgtgtgagcttggtggtggagctgctgcagaagagaaaggccgagttccactccacagacaggattctcagcaggattcggagccgctcagctcagaggcagctctgaagccgcggggtggtgagctgtcttcctgaaggccaa

SEQ ID NO: 4254 - DNA, 201 bp, Bos taurus
aacaataagacgatcagaaagaaaaataactgcaattgactgaggctcatcaacatacaaaattcatgcgttcacagtgatgtcccagaagcacatcctccttggtcagaagcagaaggctgctcttcaccttgaaattgaagagaggaaggtcaagtgtttatcttcccacattcagttcaaaattgatgagataaaatt

SEQ ID NO: 4255 - DNA, 201 bp, Bos taurus
ggccaggctgctgacggacagtggacaacgtccaggcacgaggaggcctggatgtggatacacctggaagtaaccagaaccagggtttgaaagagctcgttgacgcctgggctgggggccgagaggccagcccctcctctggggagagccacagcgcagggcccgcgtggaacccactctgggtctccgtgacagacacac

SEQ ID NO: 4256 - DNA, 201 bp, Bos taurus
gactccgtagagctggggccccagcgaccgctctgcaagtatggcgaacatcacactttcaaggaccaaggagtccacgccctgaaggaagatggacagtgaaggtttttcagtcacaaggggccaaaggcagaggggcgccaacacacacgagggtcgactcgctcctcccaccacagctgggactcaccgccggggggt

SEQ ID NO: 4257 - DNA, 201 bp, Bos taurus
acaaaaaaaaaaacctttttacttgatataaaagtaaaattcacagttaagtttttctactggtctagatattcctcctagttttcatccttccaacccaccataaatttgaggtagactttcagagagtgacagcttctttcttggattatcatattattattttgcttcagtcaaatagcagcaaaatttctcaactgg

SEQ ID NO: 4258 - DNA, 201 bp, Bos taurus
tgaattctgcttttattggactcagatttgcaaacaagcactatgttaagttttgactttaaattttaaaatatatcttatggtctagaacaaaagcaacgttcttaagtaactctgaaaattcaaatgtaaatgatctatgcaacttcagttggggatcaaaatcgtcaaacttcctccagggagaagagttgaattgac

SEQ ID NO: 4259 - DNA, 201 bp, Bos taurus
acccctatactcacttccatccaggaaaataattggtcctccttacattgcacagaccttattctcctgaaaattagatccacaaggtatcattaaatgttgtgggaaacaaaaatagaagaattctatagcttgagaaaatgtgagttaagaatacttaaagaaatatattgtcgtcaaacttctcagaaattttagaca

SEQ ID NO: 4260 - DNA, 201 bp, Bos taurus
gagggagtcagaataatggatggagggaaggacaagtgcaaaatctgttggaaataagatcagagcaatagtaacagaggtgtgggtggaatgggcatggcttaagagcagtttaggagacttatgggaaacaatgacaagacattgcctccaagtgattgatggaaggaataaggctttaagggaggcagtttacatgaa

SEQ ID NO: 4261 - DNA, 201 bp, Bos taurus
ttattactgaaaaatgaataaggagttggagagctgtgagcttgaccaaagtacactgagctgtggtgggcagtgagacaaaggggcctgagtcaggccttcaaaggctcagggtggtacctaactgccagccaacaggaaacccgacttgaggacttccactccaagaaacgtcattcagccaacagcccgagggaactt

SEQ ID NO: 4262 - DNA, 201 bp, Bos taurus
tacaaaggactttcttaaagatggagcatatttagtactttttcttctcaaattttaaaaatgagcatttgaacaattgtcagaagtagactttaatttttactgtgtttctttccttaattgaagtgaagggggagcaagggaaaggcaatgtcttcttagacaatacaggcaattatttgaagtttattgtttagttgt

SEQ ID NO: 4263 - DNA, 201 bp, Bos taurus
aatttacaaattaagagctgaaagtaatgattgcaaagatgttcaaaggacttgggagaagattagatgagcagagtgataagttagatgtgtttaaaaaggagttaaagaatataaagcagaatgaaatacataatacaaaaactgaagtaaaaagacactaaaataactcaacagtcaactgacacagaacaaatcagt

SEQ ID NO: 4264 - DNA, 201 bp, Bos taurus
ccaaggccattagagactcaaaggaggacactgaccaaattgctatagactcaacataataagtgcttgatgattctcctggcttcaccaacagaacactctgcttgtgagattaaggccatagagatgatcatactccaagttgccattcctcttccaaaccaagtctccatgtccacccgtgaaaggatgccttggagg

SEQ ID NO: 4265 - DNA, 201 bp, Bos taurus
cctcaaaagaaattacttcctaactgtttccctgcccccacaacacaccagaaacaaatttagaaaatttttacttctttgttgactctctatactgagacattttacactgtattcttccaaccacagctattcattttgaagtcacgttaataaaagttatggatttgttgtgagaattaatgcaaaagaagtgtgtga

SEQ ID NO: 4266 - DNA, 201 bp, Bos taurus
aggggcagggtcctggttttaggagttggcaagtggcttaaaaacaaattaataagaggcaacagaccagatgttccataaaagtggagtggagatttgatcagggtatgtttgtaggtttatgagaagggtggtaaagatttgggcccaaacagactgcagggctaactcccgagtgaagtagcaaacaccatctctgga

SEQ ID NO: 4267 - DNA, 201 bp, Bos taurus
taagaaactcattgtacagtcaacaggatttaactgaagaaaaaatagtggcagtatattgtatgtctgtggcatgtgtaaagtaaaatgcatgacaaaacagctcaaagaatgggcagggatgattgggaattgttgtacggcaacaattatactactttagcttcccaagtagaatccagaaggtggaggatcttaatg

SEQ ID NO: 4268 - DNA, 201 bp, Bos taurus
ttcctctagtctagggtcttggagtcagttctcccattccaaaggctcagggcttgatctatgctttttaagcaaggtacaattttcaagtttgaaaatatgtcttttatgattcagtggtctcttaaaaagttcctaaaatccagctggaggaagtcacataaaggacataatgactgactgaatggagagctggatggg

SEQ ID NO: 4269 - DNA, 201 bp, Bos taurus
gagaaaaggagtactgaaagcatttcagctcatgacactggtgtttgctcaattctggctctatcttgaagtttaacttcagctttggaaatggatgcagtcttggaaatggaaatggaaattttatcgcaagatacttttgtgtaatgtgtgaattagagatggtttagttggcaatgatttcagaaatacatgtttagc

SEQ ID NO: 4270 - DNA, 201 bp, Bos taurus
atatgtgtacatacctatgtttttttcatcctaagccctgcacactgtctcatttgtttgttctactttggacagccactgatttaaatggaacacttttccaaaattatccccaaatgtcaccaactgcagaagaaagtaatttgcactctgaagattgaagcaatagttttaagatgacagtcactaaatttttctaaa

SEQ ID NO: 4271 - DNA, 201 bp, Bos taurus
aagttctagaatcactcttcacaaggtattcttaatgtattactggataagagaagccatttgtaaatggttatgcataatcattctttagcacatccatgaattatctgtcaggctcttctagtgaagtagacctaaacctgtcaaggcagcaggaggcaactgtttcagcgtcttttgaaacaataattaattttcaaa

SEQ ID NO: 4272 - DNA, 201 bp, Bos taurus
tctcttcctgagccccatctgggcccacaatgttgcctctacaatcttgtggtgagacaaccaggagacagatgatccttggaagggaaatactgtataacttccaattcctctagatatccaggccttcatcttccatgtttcctacaacatgtgcaacaacatcatctcttagtgaacatgctagggtgggtgacaggc

SEQ ID NO: 4273 - DNA, 201 bp, Bos taurus
cctactctctgctgtgggcagagtcatgtgagtcccttctaggctgggaagttcagcagcgatatctgtggtgaatggtctctgttttgccttctgagtttcaaccattacactcctctgtggttctgaagctcctcctagctctgcctgtttggggatttcctagtgtgtggaaatgacacttttcttcttcatgacact

SEQ ID NO: 4274 - DNA, 201 bp, Bos taurus
tatcatccatagggtcacaaattgttgaacacaacagtgtgactgagcacacattccctgagacactggacactcaagtgaattctgaggctacatagtggggaaagcagtcagggcctcctttttaactacttttattcatgagagtctgaatagcttatgaataggattgtttttcttgtacttattcttggttattca

SEQ ID NO: 4275 - DNA, 201 bp, Bos taurus
tttcttgagtgtctactctgtgccagtgtcataagggtttaggatggagaaaaagagatgcatacacttgccctttgaagtacatttgtcagcaaggcaactgcaacttcataaggcaatggcatggatgttctagaatgatatacagatagaaaggcaacttctagagtgactcagagcctttgctttataaaatgtttc

SEQ ID NO: 4276 - DNA, 201 bp, Bos taurus
ggaaacatgaattttttttttatttaaaaagtttggtacactttattaccttggagaaaaaagctccatatgttaaaggcaagttatttcaactccctttgcattataaatgatatttgctttagactttgcctgtcataatatattcaagagcctatgagaatctaacggaacactcttacctagctccataagccctct

SEQ ID NO: 4277 - DNA, 201 bp, Bos taurus
aatatatctgcctactcctgaagttttcctcctgtcctgatcctcctaacatttaataagatatcaaaccaaatgtgtcatcaccattaaaaatacacataagcaagggaaagggacttctggtcctctttcttccacaactttatcatctgaagggtaaggccaacaaatgtatgacttcttgtatcaagaaatggactt

SEQ ID NO: 4278 - DNA, 201 bp, Bos taurus
gactccgctggggcctgggtcggagcagcctgtggttcctagaaggtccctggggtgggggtggaggttagccgtggctcactctggggataaggacgttagtggctgaggccccagagaatatttgtggtgagctgtcaccatgttggtgccaagacctggccccaccccacaacctgtagagtccagtgctgggacgct

SEQ ID NO: 4279 - DNA, 201 bp, Bos taurus
atctaccaggagggttgcagcctgagatcagctccccagaggagacacacggcacctgagatggcactctcatggcgcacccaggaaaccaagtggccaggagcgggtggtgattaagactcacagcccacctgggaaggtgcgcttgccaagcacatggttgcctgagctgctcggaactgggtagggcacaaaacacag

SEQ ID NO: 4280 - DNA, 201 bp, Bos taurus
cattatttaaaaagcaagccggggacttccctggtggcccagtggttaagatttcatcttccaatgcaaggagtacaggtttgatccctggtcagagaacgaaggtcccacacacctccaggccgaaaaactaaaacataaatcagaaacaatactgtaacagattcaataaaaacttggaaagaaatggtctacatcaaa

SEQ ID NO: 4281 - DNA, 201 bp, Bos taurus
ttgaccttactcaatttgctttgccattttaatggacaacgagtgggaacaactgagtgtcagaaagcataattcacatatttgttgaagaaattgtttacgttgctcttttagatatgaatgaaaagaaccagtttttcaaaactcatggacctgtagctttccttacattgtgaaagaaatgcacatttctaaggatct

SEQ ID NO: 4282 - DNA, 201 bp, Bos taurus
tgcttactaactctttagtatggaggcaaaaatcaacttcttctgtacaaaatgttaatttaaaataaagatcacatctgagtcctgatgtcttggtgacctctcagtaagaaggggagcatacgcaactgatgatgtaattccctactgaattggggtctccataaggcctcctcctctgcccgttgtctcttcttagat

SEQ ID NO: 4283 - DNA, 201 bp, Bos taurus
acaaaaaaatcattatgtgaaagtagaaacatgtttctgatcaacatgagaaaagcctttctggcagagagttcctattgtgggcaatgtttgagttaagctgggtgaaggtaggagctttgctggaaagggtgttcctctcccagttggaaactggcacagtggatctatgtgaaaacttctgtgtcttcttccatgtac

SEQ ID NO: 4284 - DNA, 201 bp, Bos taurus
cggcctgaagatgcacattcgtactcacaccagggtaagaatattctatctcatttcttataagatccacacttactttaaagatatttaactttacctgagaaagcaaaggtggtagatctgaaactttatgtttgtggtgaatatttaaggatatctttttttttttttaaagacataacaatgaaagacacaaaaatc

SEQ ID NO: 4285 - DNA, 201 bp, Bos taurus
aggtagagatccaccttgtgggactgaaaggaggcgcttctttctttatcattcctgtgaatatttacgagggctctggcacaacatgactggtgctgctgagaccatgcctctcacagaatgctcatctttcccaactagaaacaaatgcaggaatacccctggtatgcacagggcttcattcatgactaatggagacag

SEQ ID NO: 4286 - DNA, 201 bp, Bos taurus
ctttctcgttaaagactactgtctgagtttggaatttgtgtgtgggtgtcatgtcagtgctgtggatggcacctcagtgctggcctgaagcatgaaaagggttattcttggtaagatttgcagccactgtgctgaataaacctaataataatactgactgtggcaggcagaataatggccccacaaaaatgtcaatatatt

SEQ ID NO: 4287 - DNA, 201 bp, Bos taurus
aacctaaggctggcatctgaggcctccagttaaagacagaaggtgccatatctgaaaggagatgtgtggatactcggagaagggagctttcagttctgtatgagtccgcctcttggatctggcctgccagagtccagtggacctgtgcctcagtgagcgatcaagagaatgcttaaagggagccaagggcgtctagcaacc

SEQ ID NO: 4288 - DNA, 201 bp, Bos taurus
ttccacaggactaggggaaatagaaactccactcttggagggcacacgcaggatcttgtgtgcaccaggtcacaggagaaaaagcattgacgtcataaagggaccgcgcaagacccacctgctagtattgaaaggtctgctgccgagggtgggttggggggcggtgctggctaacacaaaagaccctcaacagccaaagca

SEQ ID NO: 4289 - DNA, 201 bp, Bos taurus
ttgctaatgccagaggcctcagtgaattggtatatcatttaaaataacaccatcagtgctcagaattggtgaattctgaatggcataccgattagaattactgttcatatgaggcctgtgaaaatccagtcctcactctcccactaggtaactttgtgaacttctctggtgttaagccaccctttgagacttgattttttt

SEQ ID NO: 4290 - DNA, 201 bp, Bos taurus
tgaaaagcctcatgtttgaagaagtaatatacatagcttgagaatagctgagttagaattccagccctggcctactttactatacaatctagcttcttttcaggatgcaacactgccttcattttttttggacagtaaaaataacatgactaaacaataaaaacttctggtcctatttagaagctatatattttcaccctc

SEQ ID NO: 4291 - DNA, 201 bp, Bos taurus
tgctttgaacacggagcatgaagtccaaggccccagttcaggacatgcccctccgacccctcgtctcaacagtgtagcagtggggcctgcggggaggacgcgaaggttgaacccagacgctacctctggttcattacccttgtgatgctggtgacgttcctaggcctctagatctcattttcttcacttgtaaaatgaaga

SEQ ID NO: 4292 - DNA, 201 bp, Bos taurus
aggctgggatgcctcaggcccagcagccgacaggagacaggctgattgaagatcctcagggcacaatttgcccactgggtggcccaggacacagctccacccactagggcagcaggcaatagacctgcaccagggctttcaagccagagactctaggacccaggcccccctgcccccccaccaaagagcagacaccagcca

SEQ ID NO: 4293 - DNA, 201 bp, Bos taurus
gttaaagctgccacaatcagaatgggtgaggctgtgttgcagttacaaacagtccaaagtctcagtggcttaaaatcagaaaggtttgtttctcgccatgttcttggccatttacggactcagaccagtgagactttcacgtttgtaatgtttctaggcaacatgaaaggagaagggaaggcagagaatcaatcacacttg

SEQ ID NO: 4294 - DNA, 201 bp, Bos taurus
tctggttaaataggcttagtgcttccaacacagttccagtaacctcttttatggttagctgttgcttttaagacttaaaaccctttcttcctcttttttcttcccagagaaaacttccctagttagaaatcaataggggactttggacatttcatagccaaactgttgacatgttccttctcaagtggttaacatcaactt

SEQ ID NO: 4295 - DNA, 201 bp, Bos taurus
cagggaagccatagcaagctctcttatcgtttcagtggccctcactgcagagctgagatgtgcagcaggtcattcaccctctgctctcccgcaggcagaaggtggtggggccatgctcactgcatagcacaagtctctccagaaatcttcctcacaaattctccttcattgccggaaacttgatcattttatcatggtggt

SEQ ID NO: 4296 - DNA, 201 bp, Bos taurus
tttgtgcagtcagaggagtggaaactggcaatgtaatattgctttgggtcaggttgtcctgtgtgtatggctttgtgaaaatatctgcactgtcaccatatagtcataggtcaacttgtagcctattattcattttttttccaattccacagagctggtattacatgcaattaattcaggctagattactgtacttttaaa

SEQ ID NO: 4297 - DNA, 201 bp, Bos taurus
tatagtaatcaatttcccatttgtctttactattttattttctactggttcaggacttagacaaaaagaggtggtatctgaaaagctcacccataacaagtgaatcaatttcctaaaattaaaggaaggggatgagagactcaaattctcgctctcccactcaccatttggtcaaaccagtttgcccaaatgggccctacg

SEQ ID NO: 4298 - DNA, 201 bp, Bos taurus
agccatcgaatcagggagcagggagaaaatgttttgaggtttggatctcctccaaatccctgtttaccacatcagagtaggtggccattaagtccctacttggttccatttacctctcacgagttcctctacctacaataggacaatttcccaggtatgcttagaaaccatcctgtggaggtgagcagcttccagtttctg

SEQ ID NO: 4299 - DNA, 201 bp, Bos taurus
ctatcatcaagttttgagaaatagttgtcagtcattgttatagaccaggcaatacaaaagcagtggggagtcctacaaagaattatccagtttctttacattgagaaactcatggaattagggagtattgatgacttttgtttatgagcatttttctgtacagtgaaagtccaggttctcttcgttctctttaaatatggc

SEQ ID NO: 4300 - DNA, 201 bp, Bos taurus
tgaaagttgtgcttaaaaccctttacctaagattgggactcaaacccacgtgtcagggactctgtgctgtgcttagtcacagtcaagagtgtgggccatcgcagaggacaagtgcagcagccatgaaatgtagtgtggtttagtttttatgggctgggtagtttcacatgctaatgagtaggaggatcattccaacaattg

SEQ ID NO: 4301 - DNA, 201 bp, Bos taurus
gtgcgcatgtgcacccacatccatctagctatcgatctgcacactagacttctaaaattagcattccttcagtttatttggtcatatctactttgaaatgtctaacaaaattaaaagaatgtgtgattttaaaatatattaaaatatgcattttataatattttaagaatttattgactgtgtagatcacaacaaactgtg

SEQ ID NO: 4302 - DNA, 201 bp, Bos taurus
aaaatgtgaacatactaaaatttggtattagactatagtactctttacaactttatagagatctcttaaaattctgcatgacttcagcaagttattgcttcaacaagcaccattttgtatcaagatttttcacatcattaaataaagctttatattttacttatgtggaaatgagggattaggaagattaatccctaaata

SEQ ID NO: 4303 - DNA, 201 bp, Bos taurus
tagtccttggttgtttcagtagtttaagggaaaactgtaaactatggaaggggacacagatcatttccaaacatctagatctctctgacacaaggagaatactgcaatttgagaatgtatggatgaaaatgttgatatataggcttccttaagcaaatgagtaataaatcaaggaaagtgacataaggctgcttataatta

SEQ ID NO: 4304 - DNA, 201 bp, Bos taurus
gatttccactcagcctttgtctatctaggtgcaaagaattttctacccatatatagtcatttcattttgtaagaatgaatacaattatcaccttgctagacgctaagggaattatttttttaacctagctggagtgaagtgacccaattaacaccttgcatgaatactctgaatattattaattttataaggtgttttgag

SEQ ID NO: 4305 - DNA, 201 bp, Bos taurus
aattttttttccttgtaggcaattaagtgttagcttgaatttcaatttattattttgaagctttgtcagggaatgtctggggttccctacccactgacaaatatttagccttaatactaagccatgacttttacggagggttactgaattctactccagcacaatgaaactcaatttcattatagctatgtgaaagtctgg

SEQ ID NO: 4306 - DNA, 201 bp, Bos taurus
ttgaattcattatatttactctatagaaacagcaggaagcatatattaaaatgcttggggtaattcaaattcattcttatttattatgatattcttcagctcttaaaaatatctattttattaaaacacgcttactccttggaagaaaatttatgaccaacctagacagcatatttgtagaaggaaatggcaacccactcc

SEQ ID NO: 4307 - DNA, 201 bp, Bos taurus
atgatctagaaccactgctaatctaatttctttaagagtttgtattatttaatatatattcttgattattgaaagaatatgtggaaaagttgatgtcaatagcacctaattgttgagaacaggtagtctcgatgattgcattattgtctgtataaataaaaagaaatcaactaagcaatataatttaaaaacttctgaatg

SEQ ID NO: 4308 - DNA, 201 bp, Bos taurus
acaagagtactggagtggggtgccatcaccttctccgcacctcagagagtctggggcttttggtaactttcccaatgttgtggaatggtgttgactggccgttatctccttatctggtattgctggttggtttcagaatgcgtttacccctgtagcttttgcactcgattatttttactcctctagccaaattgctggcca

SEQ ID NO: 4309 - DNA, 201 bp, Bos taurus
agactacatgttatgaaccagttccttaaaatctctctctctccctctgtatctctcactctttcatattcctcatgtattttattagggcatgatggcttagccaagttgatatatacattaaccatcacattgatggaaacattaaccttcaagagggcagtggctgaaagaggctgctagtggtcaacttgtaaggaa

SEQ ID NO: 4310 - DNA, 201 bp, Bos taurus
tgacactgctatggaggaacagcttgattttttcattcgtaataaacatcaatccctttgtctagtacattaactcctctcagttcagtagcaaagcttcaaatagcaagtggacctcttaggtttcaaaaaaataaacccataattatatttcctgatgaaagcatttctttttgggtcctagagaataaatagagtgat

SEQ ID NO: 4311 - DNA, 201 bp, Bos taurus
tatactcaggacctgaaataaatatgaattaggaatactgaagattatggtaataatgcctagaacgttcttagaatagtctaatgaaatacattattgggttacaaaatagttaattgaagtcatatcattacaatagttgattcctttgatgtattgcctctgggcatgattaaagatttaacaatattggtcttatat

SEQ ID NO: 4312 - DNA, 201 bp, Bos taurus
ttattaacaagtgtgtatggagggggaaaaaaaagactaagtataagtattaagttagagtattaaaataatttaaaggatttgtaactatacctatactgatatggaattgtaagacatttctatcttatttaagtcaaagtctttagggaaataaatactgcctgaaatatgtaatcggtgaggagtacaattccagtt

SEQ ID NO: 4313 - DNA, 201 bp, Bos taurus
aaatgaaaatctctttacaaatgtaccttaaaaatagtcatttgcatctcacagaataaggccccaaattctcaacatggcctttgctctccataatctgcctctgccaacctctctcatcatatttctttatacactcattattcattgagctctaaccccacttagcatcctttgtaaactccaagaactctcaacttg

SEQ ID NO: 4314 - DNA, 201 bp, Bos taurus
cacaaaggacatcccataacttaaaatatattaagtcagtcattgtatacatacttgaattgcatttttggagcttgaaattattcagaaaaatcggtgaatctctttctctactttttaaggatctaccagcatttaacacttaatattattgactgaatggctggataaagtaaatgatgaaagcatttgctacttctc

SEQ ID NO: 4315 - DNA, 201 bp, Bos taurus
agttacttgagcccacggactttattccgattactgctatcctacctgcacctataaaagtgctgggcacttagatattattcaataatacttgttaagtgtgtgaaaatgaatcagtgagtgaatgaatgaatgcattatatactgtaaagcatttcatacgtgtacaaagaagggagttacctctaacaaactcacacg

SEQ ID NO: 4316 - DNA, 201 bp, Bos taurus
catcgcaaggaaccctgggagaactgctctgatgaggtgaggggagaaaccaggctatatagaagttttgcaacaaagggcaggtagtttgaacatcaaaagatcattgtgaattaaaggaaactagatactcaaggaatttagcgcttttctatgtgtgggaagatgcaagagtctgggcttactgaaatcattcttttc

SEQ ID NO: 4317 - DNA, 201 bp, Bos taurus
tctatgtttactgcagcattattcacaataggcaagatatggaacaatgtaagtgctcatcagttgatgaatggatgaaagaaaatttagagatgagaaaaaaggaaatcctgacactcgtggcaacatggatggacctggatcttgagggcatcgtgctaagtgaagtaagtcagaaagagaaaggcaaatactatatga

SEQ ID NO: 4318 - DNA, 201 bp, Bos taurus
gccatcagcaccagacagttttcatattgtgctactccagagacttctgccagctggaaaacttgtgctcaaagctaaaggtgctactcttgggagccacgcttaaagcagaatggagatgtttgtttctcttgctcctttatgaaaggtggtctgtgatgagttcaactgttgtgcttccgtcagttgaccaaacactat

SEQ ID NO: 4319 - DNA, 201 bp, Bos taurus
gcctcggaaagcgtactcccttaagaagatcgggcgggaggggtggactccgctcccagccgagagccagctggaagccgagccagtttccgcagcccgagcccggggccccctcccgggagggaagactgagtcaggacgctgcgctccctcctgggaccagcgctctcagaaatcacatgctgatttctggaaatcctg

SEQ ID NO: 4320 - DNA, 201 bp, Bos taurus
taccacagctttaaaaaaagcaaactgagttctagaataggtgatacctccatacaactgagggatattatggagcaatggggagagaacttgtggtcagctgcagctctctaacttttaccttcattcagtggagcccatagtgtttgagttccctggcagtcatagagaaaggaaaatgtgatttcattagaagaatat

SEQ ID NO: 4321 - DNA, 201 bp, Bos taurus
aagataaatcttgaatatagaatatagaataaatcttgaatctagaataaaataaattttattctaagataaatcttgcttgtcatgaagctgaaactaggttccttagtatacaaatccagcatttacaaagacggtaccactgagaagctggtagaggggttacagccaagcacgcaaagtgttttaactttacaaata

SEQ ID NO: 4322 - DNA, 201 bp, Bos taurus
gcattttatgtttatttgatccctctaggctctttatattggacgtaggaaattagcaaggtcctcttttaaaggaaaatgttttcttgctaactctacactgctttccaatttaggcccttgtcattgtgcttccacaaatgacacaatttcacagagcatgggtggactctagagaccgagaaggctcatgaaaacatt

SEQ ID NO: 4323 - DNA, 201 bp, Bos taurus
tgcaatgctccctgactttgtaaacaaccagtatgttaactacaacaaaataaaatggggtattctttaccagacctgcacaagcactttccagcagaacgttccacaatgatggaaacatttagaattcccccaaagaagtataatttgttcaaaataattaggagaagagagagatgatgtgagaagaaggggtttgga

SEQ ID NO: 4324 - DNA, 201 bp, Bos taurus
gtctttccccaccctcaggctctccgggcccaggcgagctttgaatgtattaattaaataaagcaggcagcccttgaatcgctccaatgcagggcgctcccgggagcgtgaaagtcctggcctccgaatccgccaaagaaaatgtgtgaaaagagaattagtgaaattaggttagaccaataaaacgtgagggcgccagca

SEQ ID NO: 4325 - DNA, 201 bp, Bos taurus
aaatgtgcacacacacataccctacatttttttacatctgttttcaggatgggaaatatggggttctaattgagtttgtggtacaaagggaacttcatggcgaggaagctgagtcaggtggtaaaggaattaaactccacaatgagatttcaatacacagatgattgaaaaaatgctaaagagcctgctctaagggctttt

SEQ ID NO: 4326 - DNA, 201 bp, Bos taurus
ttgctccagccctgtgattggttccaatttgtttagttgtgtcctgccccccaggcactgccactggatgtcccagagagcctcccaaagaccggcctgcgctctgcctgagcctgtctggcactggttgtggcggtggggtccatgtgggcgccgctgacagtatgtgcaggtatctgtggctcccaggtgccagcaccc

SEQ ID NO: 4327 - DNA, 201 bp, Bos taurus
gttctgagcataccatccccttcagggaccctggccaattttatgtttaaaaaccatgacccttcctcacatgcgtttggttaggattgacctaaccaaaagcaatttagaacaccattggccattatggggaactgttgaaacacccaaacttacttttcttaaaaccaaatttgatgctgtagctttaaaatttcctag

SEQ ID NO: 4328 - DNA, 201 bp, Bos taurus
cctgattgaattgaattggaaatttttgtctgcaaaaatctttattgcttccatttggtccaagatttgtgagagggctccaggatggttaaaaaactgcttaagtggccacagagaggggtttcaggtagaagccctgacacctgctgctactgctgccgctaagtcgcttcagttgtgtccgactctgtgcaaccccat

SEQ ID NO: 4329 - DNA, 201 bp, Bos taurus
gcacttcatgaaagccaaaaagcttacagagcaatgtttttaagagaacttcatctcctgcaactagggagccaccagagctgaaaattaggcctgaaatttgataataatactggcagagttacaaaagactgaattagtaaccttagctggtcttctgtgttaaagcaaaggacctggaacggggacacttgagtagat

SEQ ID NO: 4330 - DNA, 201 bp, Bos taurus
tttacttatatataattttatataaattttaatatggtatgcacatatgttggtgtatttttttctgctttagtgcatagtagaataacattcagtgtgatgggctagttgaaaaattaaatgaagggaaattcaagatttaattgtccaagagttttgagagtttatagggatggcaacccactccaatattcttgcctg

SEQ ID NO: 4331 - DNA, 201 bp, Bos taurus
ccttccaggtaggcaaggcatgtgaccgcttttatccagtgagcattttgtgaggagaaaacggttcattattctgggccaaggctgcgaaagacacatatgtggttctccaggtttttctcttccctttcacggtgaccaacaggatcaaatctctagatggtgcaatacgaggtggtgacacctcctttgtctccgtca

SEQ ID NO: 4332 - DNA, 201 bp, Bos taurus
actttccagaggaaacaaagcagagctgtattctatatgatttgttaacatagaagcttatagggtaatatgatataatccgagggatgaattgtgtttcgttcacacctgatgccaagagatctgatggcttttggggggttttgttctagggattttagagaagaggtgtcacttaaactcttaagtgctatcagtttg

SEQ ID NO: 4333 - DNA, 201 bp, Bos taurus
actgtaaaaatatccacatgtccctgagataaaatcctaattcaaaataaaataactggagacaaaaatacataaagtgcctgatgcctgcccagcacaccccgtacttcaagaatttggaacagcctatatttcaaagtagtactggggtgagcaggagtgtagacagtatagcaaatctgaaaatagtgcatttttctg

SEQ ID NO: 4334 - DNA, 201 bp, Bos taurus
ggaaactgaggggtggagggtgaggccctctgtatcctgctgtatcaggatgactagaatccctgccaaagtcctaaaattcacagccagggaaatggcacaaattctccctgttgatatttaaggccaaagagacatttaaagcagaaggaaccaggtggttcctaacatggagggactggaatttatttgttttgcaaa

SEQ ID NO: 4335 - DNA, 201 bp, Bos taurus
ctatatttgcaaatgcaggcctcatcactgaattaactggctatcatcaatgtatttaacacatctcatgcagacttctctccaaatgactgagaaatccaaggtgacttcacaatggcaatctcaaaaactgggttatttacaaggttgcctgactgagggcagcttcaaacctctaaaccccttgcaagcatcatgcct

SEQ ID NO: 4336 - DNA, 201 bp, Bos taurus
agaaataaaatatctcatatagttttttctctttccatcaacatatttctttcctatgtgttctattatctatatgctagtaattgttaaatctacatcttagtttataaatctcatgttttgttgtttatggatatttctatttttggaattcctccataaatattaaggagagacatcaaatgggagaacgagctccca

SEQ ID NO: 4337 - DNA, 201 bp, Bos taurus
tatgctattcatatttaaactatggctctgaaatacgtaggatacacacgaacattcacatgacacttaacaactaagagactccatttcttttttccttattttattgaccattccgtaaaaaatttaaaaagtcaacggaaacactctcccaaaagaaaaataataattgaagacagctgaaaagcaggagcaagctat

SEQ ID NO: 4338 - DNA, 201 bp, Bos taurus
cgctggtatccaaggaaagcaattctccttaatcaagtcgtattttcttagtgtatcctaggctctaacccagggaacttccctaaggccctggtgagaagtgcagaaagacaaggagaaattctaaaaagaggaataacaatgtgactagatgtgtattttagaaagacacctctggaagcaaggtggttaagatagcca

SEQ ID NO: 4339 - DNA, 201 bp, Bos taurus
taaccaatgacagttgggagagcaaaaggacaaaagcattgcagctctcaagcctcccacacatgtctggccatcttctggcctagtgaggtagaaagtagctcagggagaactccatggagcccagagaactaaccatctggcaaggaacactcagggcctgagaagggtctgagaagtaactcagttggagtgagatga

SEQ ID NO: 4340 - DNA, 201 bp, Bos taurus
tctttctcttcgcatggaaatatcatctccttcatcacatctttcttccaaaagttttagtaataggggaagagaagaaaccaggccaaatttagagatacatgtccaaaacaatggaccactgcctaatacttaaaaccaaaggaagggatatgttttttttgtaagaggcctttataagatttaaaccatgactatagc

SEQ ID NO: 4341 - DNA, 201 bp, Bos taurus
gtggagagagggagccttagcaggcaccatcaagccccaggtatgtgactgaggccgctttcgaccattcagtccagcctatccaccctctgattgtaacgacatgaaggagttcagcaagaccaacagaggaactgtccagctgaaacaacaacaatttgttagtcttaaatttttaagcaaataaaatggttattgtct

SEQ ID NO: 4342 - DNA, 201 bp, Bos taurus
taatgagcccagctgggataaaaaaagcaaaccaacttttgaatgaataccactacaattctatcattttacatcttaaaaaggaccatcaatatttaacagtaattgttttttacatgtctctaatcagctctctctcctttctctaggattttagaacttcttgatgctcctcaaaccccctttcatacctctactcct

SEQ ID NO: 4343 - DNA, 201 bp, Bos taurus
tgtgtcctcaaagcctggctacatagtacctagaactgagccaaatggcgagtgagcccttagaggcgtttttggctatggtgagggccacagccctggggtgggtggtccttacttaagggaatcccaacttctagaggtattggcaattccctgaggcctatactgtgttacggggaaacatcttagcagttcttttga

SEQ ID NO: 4344 - DNA, 201 bp, Bos taurus
tgcacccaagaaagattagcttattacatgtctccaacagttgcactggacccctgaatgttcactttggaagaagctgaagttgaagctgaagttgtatgaagacctacaagaccttctagaactaacatccaaaaaggatgtcctcttcattacaggggactggaatgcaaaagtaggaagtcaagagctatctggagt

SEQ ID NO: 4345 - DNA, 201 bp, Bos taurus
gcacgcgctgtccctcacggaggacagagtgaagggtgctttcccctcataccagcctagaaaagaggttttaatgcaaccacttgaagagttttatctgtgtatcctggaactcatgtggacacagtggcctggtatctgatccccaagaaatctagaggatgagagactgtagttgactactgctttaacatcagagtg

SEQ ID NO: 4346 - DNA, 201 bp, Bos taurus
atgcctactcttttccttttttattatttcaaatgcattgttagttttgctcttcttttaggctcacccctttagccgtcttttcttagaagtgaacaattagaaagatccaataatttaaggggtgagtttctaaaatcatcttaaattaccagtggttagtgttctcccagatactgggtgattaacatgcttgcttta

SEQ ID NO: 4347 - DNA, 201 bp, Bos taurus
ctgagaagcactggtgaccacaggggtttccattgtgcggggagaggtgggctgcaccaagtgaccccagccctcacaaaactgtacactcagacatacacagaatcattcatatgctctcccccttagtgtgtgatatctgcaccctcatgtcaccataaagggcttcaggcaagattaagaagctctggattagatcag

SEQ ID NO: 4348 - DNA, 201 bp, Bos taurus
acttaattgcacagaatattagatgcatgtaaaccttaaggcatgagtcgtgttctctcactattaacaaaaagctagtcgagactttaaagaaattgtatgaagcagtccaaaaactattacacaaataatacttaactagcagttctttgattaaatgttagttaagtaacttaaaagaagtgttttgagcataatttt

SEQ ID NO: 4349 - DNA, 201 bp, Bos taurus
tgtgcggatcccacccatcgaagtctatgtactcacctcgcttcccagggtagccaatgggacagctgcggcaacacacagacagaagtcagcagtgagctatggccagaaacacttacattcttgtactagccagtcatctctcagcctctacacttcagcctcatactttgtgaagaatatggaaaatccatcagggct

SEQ ID NO: 4350 - DNA, 201 bp, Bos taurus
agcactgggggcatcttcctctgatgccagtcaggggaccagcaatatcttcctgttttccaagtgaagaatgaggccaactgtactacatatcccatcattcccatgccatgtgacttagcaacaaaagaggaaacataccctctgtctgtccagtagagtttatggccaatccagtcaacagcaagaccttctggtaaa

SEQ ID NO: 4351 - DNA, 201 bp, Bos taurus
tttaagtagaggagttaacccctcagatttaccatttataagcaagaggagaaaatgaaaagattaagtggctgctccaacaggccggataagacaagccagctgtttggactatggtggtggcagtggaagagagaagtggacatttgagataaattagaatgtaaaatggaaaggatttggcagtaggctgaaaattgg

SEQ ID NO: 4352 - DNA, 201 bp, Bos taurus
tgagcagagtgggagtggagggcccattgtcttaaaaaaaaaaaaatggtagtgctccagctagtgtatcgcagttgatcttatacacactcactgagaccctggcccatccacagacagaacgcacagcacagagtctaagatggcagcagagtcagactgccagagctcaagttctcttccacatagtaactatgtacc

SEQ ID NO: 4353 - DNA, 201 bp, Bos taurus
gttttaaatgcctcagatggtcctcactcttaaatcatactgacatttctgttaaaaataaaacagccctgaagtcacacaattactttctagaatcctaaagttcctttaagatctttcctagtaggttttaacttttttagtttccatccattgaaatattttgccaataaataacttcattattttacacatttcatc

SEQ ID NO: 4354 - DNA, 201 bp, Bos taurus
gcaccttggcctgcccgacgagtgcggccgcactgcaagcactgcaagcactgcacaggcgttgccttgccccgcctgtgacggccagacgctcacgcctgtaagctccagattcaccctctttcactgctctatgaacatgaacctgagttctttcactgtttttcctttgatggttggccctcaagttctgtgagtggg

SEQ ID NO: 4355 - DNA, 201 bp, Bos taurus
gctcactgtcccccaatagtgacttgatggagctcatatcaccctgttctgatctactgcacagggtccttgcatgtggatctacagctggggcctgggcgattctccactcaccagtgacactttttagaccctgaaaaaactttgcctctaattttagacaagagttttgagattacgtaaaatatctttatatactac

SEQ ID NO: 4356 - DNA, 201 bp, Bos taurus
catgcttttaaaaataattttactttatttatttttggttgtgctaggccttcgttgctgctctgatatttttctctagtttcagtgagtgggaaggccacgctctttttttggagcacaggctcttgggcgcatggacttcagtagctgccactcccaggctctagagcacagactcaatagctgtggcacacggtctta

SEQ ID NO: 4357 - DNA, 201 bp, Bos taurus
atcactatgctctctacatatggtagaacatctctgttatttcagaaatgttatttcacttctctggagtgacccttcaatagatgctttgaccttcaaaataagctttctttccacaccttcatactagttaattatgtcctgcataccagtcccaacccagagtgccaactacctggagacctttcaggcttctgtctt

SEQ ID NO: 4358 - DNA, 201 bp, Bos taurus
cagatgaacaggcatcaatgaaagtttcattttttctaatttgggcacgtgacaagatggtagaatggatatttcctttgaataaattgattttgaaattcttttatgaaggtaagaatatgctactcttttcccatgttaagtgatagttaaaattgcgaaatacatataagtaaaagcaacctctgttataatttaaaa

SEQ ID NO: 4359 - DNA, 201 bp, Bos taurus
tgcaaatgattgcaatgtaactttatagaggaagaagaatttcttccatgagttaagacattagcaattatagtacaataacccagtgtaatcgtaaaacgttttttgcccttttagaaagacactatatgcttcacattgcctagttttatctggtaggtgtacaaaatcatctttaaataagttacatttagtccaagt

SEQ ID NO: 4360 - DNA, 201 bp, Bos taurus
tattttcgttttgctcacattaatagtataaacgacttggtgagtgagcgtacaggacccatacttaagtcagacctgggctctggtcctagaagagtgttaagttaccttgtgatctctgtcacattaaattcctcttctatgaaagtctgagtggcaaggtgggaagtacattaacaaaaaggcaaggtcaagtccaca

SEQ ID NO: 4361 - DNA, 201 bp, Bos taurus
ctaataaaaagctaatcaggtggggagcctttcctactaggtctgggtaagtatatctggtgagaacagggggatatcctgcttaggcctttggaaccctgaaaaactgaaaggtattaaggcaagctcttgaaatcttagggctttatgatgcattgcccaagatctcaagtctgtgctccactgtattcttatgttctg

SEQ ID NO: 4362 - DNA, 201 bp, Bos taurus
ggacacgactgagcgactgaactgaacttaactgaagagtatagcctttctattcttttaggaaatagccttccattttccaaaggaaaagcaaatgattgggtgataaaatcataccttttgccttgtgtccctctgaggctcctggtatcattggcatccttttgtcttgtgctttccttctctaagagctttcgggaa

SEQ ID NO: 4363 - DNA, 201 bp, Bos taurus
taggtggctgcgttttacattttgcggcaaacctcacctttggaaacactgtttctaacgaaatcacccagcgtcttactctatttgcgtgactgttttctctccccgtggcgtgcggggtgtttcgttcgctgattgtccttagcattgttgcaagtcttctgacaaggtgcatttaaaaggggcttttctagaaagcat

SEQ ID NO: 4364 - DNA, 201 bp, Bos taurus
actcttcacctctgaggcagttgtattttcttttctgtcagcagcatgcaaaccctccaggtcctccaagagattatagtccttcctgaagggaaaaataaataggccagcatatagattatgctatataacgagtctcctgtgtattattatagtgttgccaccccaactctcaattatggcaatttttgctgaggggca

SEQ ID NO: 4365 - DNA, 201 bp, Bos taurus
catttattcaaaaggctcactgacctataaaacacagatattcttccttttgtgctatataatatgaaatgctatagttttatattatgtcatctaaatatttggttttaagcttactgacttggccctcagtatgagatattagaacctaatgtttgattgccagctctgccatgaaacttttctgattttcagtttcct

SEQ ID NO: 4366 - DNA, 201 bp, Bos taurus
ctaccctccccaaatgaatgtgctttttcttgttttaaaccttacagctagatttttactgctgttactaggctgcctgacaccagtcaaaggtgccacgcggcctctgctcttagatctgaatgccttagtggcgacagtgatctggtccttgtgtcccctgccactcatcacctgtacgtggtcttgtccggtaactca

SEQ ID NO: 4367 - DNA, 201 bp, Bos taurus
gtccctgaatgcagttttcagaatcattgctggtcgtttgacaactctctccattaggatgtcagctaggcaactagctggccaaaatagaaccctattcgctacaatccccgcatccagaaaaaaaacaaaacaaaacaggatttgtgcttgatttctcctactctgtcatttcacccatccaggcctatccattaagtc

SEQ ID NO: 4368 - DNA, 201 bp, Bos taurus
tcattgggatgaaacgttgatttaaattttagagatggagacagaaaggtgctgagggagctgctacgctgaaatagtcaagttcaagtaatagacctttcaggaacaaatccctgagtaactgtggactgtgtgtaaggaggaagcagtgtctactcatcattaatgcgatgccttcagtacacattatctgtgaatggt

SEQ ID NO: 4369 - DNA, 201 bp, Bos taurus
ctgtccgtactgaacactaaaaaagaaaatgttgggagtggaatggagcaagttacaaaagttattggagagaatacttctcctttttcagactttctcagtgtcacttattatcctgaacttaggtgggcagcaaaatgtgttctctcccaggtggtaaatgaagttcctttctgaattctgaactgtttctgggatata

SEQ ID NO: 4370 - DNA, 201 bp, Bos taurus
taagaaccacaatatcttaggatttagggctgtgatatctaaaggccatgtcataggtatggggataactgggcgtgtatcttaaagaattagccgaaatgatctaggaggagtttgagtgatagaagaacatttctggaagagggaacatgaggaaatgtagaaaggataaaaatagcctggtatctatggaaaaccaaa

SEQ ID NO: 4371 - DNA, 201 bp, Bos taurus
attctgtaaaaatgcactgatagtctaagttttcataatctgagtttgtacagctttcactcgagaagatacaggagcagagttctggcctgctgtgtttgcttctgttgtacttccttgcgtccttttctaaaaatccttctggaattagaaattgatttcttcagaaacacactcatttttctcttctcccagagacct

SEQ ID NO: 4372 - DNA, 201 bp, Bos taurus
atggcctttggactcttaattaaaagttcggagttggaagagtgtctcaagtttctttgtaccattggttgagattatatggatgctgaattttgtattatgtgcaggccctattagatataatttgaacttggatgaagattatattctataatattattaaggattacttctcattcctggatacaaatcaactgtttt

SEQ ID NO: 4373 - DNA, 201 bp, Bos taurus
ttgcttaccattgctgtctatacactagatcatcaaaatatcaatattattgggtactggaatttgagcatttgttatagtgggggtagtttatccattcttactttgaaaccacctaaaaatccaatggggtagttatccttacttaccagagtaacaaactgagactcacagagtaaattagagtacagagatatatat

SEQ ID NO: 4374 - DNA, 201 bp, Bos taurus
ggagtatgtaatatacttctttcaatgtattagatataaactgccagtaagagtttctatctggtaatgagctaaaaaccttcattcagatggggaaaccgtcatttaaaatcaatcaactgagatgacagctcagagtcaaacaacagtgttcacttgctcattctaatttcatctcagccttttgaaatttggctcaac

SEQ ID NO: 4375 - DNA, 201 bp, Bos taurus
ctgagtaagtcagtagtaaggacgggaacagcacggtttctgccaagtgtgctacacactcagcagagcagatcctgaacacgtgcaaggcctcaaggtctgggtcagcaacagtgtttaacagtgatgtggagctccttctaggatgagtcacgagtgtgtaatttaccatggagtggcctatttatggtacacaggggg

SEQ ID NO: 4376 - DNA, 201 bp, Bos taurus
cagggcctgaaaaatgtatggctatcctcaaaattctgatgcatggccataacaaggggagttgataggtgtgtataagaattatagacatgatctgaagtgagtttatttcaaacaatagacatgctgtccatattttggggtgaaaactggcatgcccatgagattgaacagaattaacatggtgggaaacttgcttac

SEQ ID NO: 4377 - DNA, 201 bp, Bos taurus
atatgaatgtccttttttaaaaagaaatgtatcaagttatatattggaactgattttctaagatactagtatgtttatcacccaactgtatttcaatactatatcatttcacaatggatgaaatgctatttgaaaagtttcaatttcaaacgaggatgaggttaaacgctggggttctcagtgcacatagatttttctgac

SEQ ID NO: 4378 - DNA, 201 bp, Bos taurus
actcttcctagctcaacagcctccttgagccccacagtgaggttatgagaacaagcccagctgcagctgagaagggccaatcagagaggaccctatagacggctctccctgtggagctatatttttcatactataatttgttaccctcaggccatactgaacacaaaagagaagaaggaatagggaagagtggcatctatg

SEQ ID NO: 4379 - DNA, 201 bp, Bos taurus
gaggtaggaaaggcataaccaggtttgagacttgtatttgggaacaaatgtcaggtacttattggcacgtgaaactgattagaaccaagtagatcaaaatcttcctaaggtgttaaggacatggcattaccaaagaaattatacagacctttgacttcttgaatcttcaaccaatccatgggtgcccaaacttacctgaac

SEQ ID NO: 4380 - DNA, 201 bp, Bos taurus
tccaaatagtattgtttctcaagttgaaattcctagaattagccagcattatatatctggcatttccagtactttatatccagttgttaaaggagactaatagcataaacagcaaaacagcacttaagatttttctttcacaaatacattgtacatttttggtctcaagaagcctaaaacaacatttgtatatggatcatc

SEQ ID NO: 4381 - DNA, 201 bp, Bos taurus
ggaaaatatcaatatcaatgatactaaagaaggtttaaattttataaaggaagttttacttttatgcctctaagtggaaattgtacagtgaatagtgaaactgtgtataaaactgtctaataaaagaaaaactatattctgaattttttagtattataattattttcttcataaagcaaagttgtataatttttcctaagt

SEQ ID NO: 4382 - DNA, 201 bp, Bos taurus
ttagtctaatgataatgacaaacatagatttatttctgattgtaacaaaatcaaattctcaggaagggctctaaaatgccttacctgctaaagagaagctattgagagagttcagtcaaggaactcaatgcttttaagattagagtctatcattgagtctttaattttttaaaacacctgagcaagtgatttttatttgtg

SEQ ID NO: 4383 - DNA, 201 bp, Bos taurus
cctaactctggcttctgaggcttcagtgtatttttttatctggcccggtgtccttcacttgacttaaccctgaggatacagctgggccaccagcccatcactcttggctgggacactgcccactgtgatgggctttcacagtgcttatctcaaagcacacctgcatcaaaacacacctctcatccaatactgtcttcatct

SEQ ID NO: 4384 - DNA, 201 bp, Bos taurus
tgaatatgtggccactattattgttctttcaccaatttttccccctgtttttctaacctttctccttttggtttcatccttattcaggatcctgtttttttctaggcctcaattcttatctaaactggaaagtataccatttctgaattgactgaaactcattaacacattttttctcctaatttatctgcatttaaaatc

SEQ ID NO: 4385 - DNA, 201 bp, Bos taurus
ctttaaggccctggtagagttcttggaggtaaaattcacaaaaatgtgcctgcccgccccctatagctaggctcccctaatgacttatccctatgacttttatccacagtgaagctccagcggtttgctaattacaggatttttttctaccatggcactggttcctgtggccatttctactcacatatttctgctccaaca

SEQ ID NO: 4386 - DNA, 201 bp, Bos taurus
aggggccatttctccccaggtctgggagaggcatctctccctgggtctgcgaggcccccaaaagccagagcacatgtagcccaacctggcctcaggtccccagtctaactgcctgggaggctgaggaatggaagggagcaagactctgtgccttaaggagacatggcccgaccaatctggacttgtggagtatgtaggaga

SEQ ID NO: 4387 - DNA, 201 bp, Bos taurus
gttgctttggtagtatctgtgggaatgtcaacacagtgaaaaaagaaaataacctcttagtattattaaaatatttttgacagtggatccactaaaaggggtctctggcattcttagggttgggcagagcacactttgaaacctctgctttaggagatgtgctttaaagaaacactctgtgttagtgtatgatagctatta

SEQ ID NO: 4388 - DNA, 201 bp, Bos taurus
gactgagcaagttaactttcacttttcaaggcttaatggggtcatgggggtgctcaggaatcaggatgttgtcattttttcttgacttgggataggtgaactcatgttttccttctttgaaatttttctcaaataaaagtttttagaactattgagagaaaattgatatagcaatgattgagttcattgcctactcttgaa

SEQ ID NO: 4389 - DNA, 201 bp, Bos taurus
gtgtagattacagtagattgaaattttgtatcccatttttcatccctttccacatccacctttttgtcatgacctaatctggacatagtgttctttcctatgccttgattttgaccttaggcatatgtcttgcattgtccaattgcttgcagagggtagtgacagtatgcctattctgaaccttgacctcaagtggaatta

SEQ ID NO: 4390 - DNA, 201 bp, Bos taurus
atgtcagctgaaagtctcagagatgatttcattggcctccctttatccatggcacacagttactttggtaaacatattttctgaacacatcctttttgcatatgataaaatatggccttggggtatgctccagaaagaaaacttatgtgcaaaattaggaactatcgaatcagcaactgtataaacataatgagtgaagca

SEQ ID NO: 4391 - DNA, 201 bp, Bos taurus
tagagaattattttaatatgtctgtgtttatatttcaggccctgaagaagttgaagggtgtttgtgtaaggttatccttgggtccttgtctcatagaagcgtgtacatctgctgtcctggcctacttcctcatgggtttaccatggcagtggggattcatgctggggtaattcatgatttttttgttgttgttgtatgaaa

SEQ ID NO: 4392 - DNA, 201 bp, Bos taurus
aagctaaagtccaaagttcttagctaagtttggcccatgcgcccactgttctggtcttctgctggtctcttcgcactgttttcatttcctggaacacaccgtgttctctagcatcttgaggccttcatccatgctgttccttctgaaagcatgccttcactccctctcccctaaacaccctgggcaagtggtactcacctt

SEQ ID NO: 4393 - DNA, 201 bp, Bos taurus
gtagtaggaccaacgagagggaagacgagagcttgaagtggagtgtttgaggttgaggttactcccaggagaggctgtaccagagtcaaggtgtttatgcgagaatgggtaactgaagagcaactccaaactcatttgcagggaactttaaagagtttttatgtccatttgactggtagaggttgaattgaatgatctctt

SEQ ID NO: 4394 - DNA, 201 bp, Bos taurus
ggagacatagttactgaagttggcagagttttaactcccatttattcactgatgattctcaaactcacacctccagcctatatctcctaagcttcaaatgcggctccttaagtcatttccatggatgctccgtgggctgtcaaattcaacatttctgcatgctgaattattatcttctttccctaatccacttctccagta

SEQ ID NO: 4395 - DNA, 201 bp, Bos taurus
ggccagacattctaggatatggggtcatggccctaatctgggcactgtggctgtagctcccatccagactgggtgactcatttacagcccgcatgtctctgttccatgtctttaaagagggacaaccataaggcatctttgtttacactccactggcaaaaagggaattaatcagcatacagtttttttcaagcctcagct

SEQ ID NO: 4396 - DNA, 201 bp, Bos taurus
cttaaaaggaattttaccaaaagtgtctgctttcctccattcacctttagaggaaagaactgtgagtttactgtaacatataaaaaactctggagacacacacaaaaaagccaaaaacttctatttaaattatgccttcattaattaaaatgcttttacttcattaaactttctgtctcttgctgttaatgagatgtttac

SEQ ID NO: 4397 - DNA, 201 bp, Bos taurus
tttgaacgcatagctgactatataggaaatttagtgacaaccacatggccaaaacaaagattgaactatcataaaactaatattgtggtgccaaagtgactagaagacttgaatttaatggccatatgaggtgggaaattagaacttggattttaacaacacaaagtaggaactgagagctcttccaaagctgcatccctg

SEQ ID NO: 4398 - DNA, 201 bp, Bos taurus
tggattaagggcccaccctatgtcagtaggacctcatcttatctttatagcttctgcaaagactctttccacatcaggtcccactcacaggccctggagatagaacactgtatctttcagggggatatatccaactgaaatctctgtatttcaatttctccagactagagtgttggttatgagcacaaaaacaaccccggc

SEQ ID NO: 4399 - DNA, 201 bp, Bos taurus
gataaaagaaacatatgagatgaaatgagcatggccaagccatccacatcctgaacaaggcagctccccactgacctgtcagctgaccaatcataagcacgatcagggccaggaccagggggaggagagtgaggcacttgccttgagtgcaaaatataaggaggcaccaaaaaacccagaaataaaaataaataatatttt

SEQ ID NO: 4400 - DNA, 201 bp, Bos taurus
aaaccctgtaaacaatactgtagcattctacatggtccaatcgcaactctcagaccctccagggcccccataactgcctgaattacatggggagatgtcttgaacacattgggccatacatagttaagaacacctatattcgttatgaacttgactatatcttgtaactttattgtttattttgtgtttaatgcacagctg

SEQ ID NO: 4401 - DNA, 201 bp, Bos taurus
cttcttatgacagcagcgcaaactctaaaatattttaagttgtacatattaatccaaatctcttaatgtttcttgccaagctgcagtctactgtcaccaatttagaataattctacctctcaggactcagacctcaggtttaaagtgtctcccaggagtgaaaacctgaatcaagctgtgactgcctgcaatccccctttc

SEQ ID NO: 4402 - DNA, 201 bp, Bos taurus
tttgccacaaactttcactgtcatcaccaataaccagagtagcacctctgaaatctcaatggcaagtcaatactaattactgtcttgtatttacctgcttattataaaatcctagcagctacagtaacgtgttgattgtattgattcctcttattcattgacccctcaactttttcccctatgtaattcatccagttctgt

SEQ ID NO: 4403 - DNA, 201 bp, Bos taurus
tatatttaccaacaaatagtttatcaagtgccagcattttatatgaattatctcatttcattttcataacctatgaggaatatccaattaatagaatacccatttcatagatgaggaataaggataataaaactaactttccccaaggcattcagtcagtaaaaaatggctgtaatttgcagtgtgttagactccagggtc

SEQ ID NO: 4404 - DNA, 201 bp, Bos taurus
tggatttaggatacagaaggtttttctctaacaagacatcctttagataattctattattagtcttctcaggctgccataaccataggccagttggtttaaataacaaaaattaattttttctgagttctggaggctgtaggtctgagattagggatcattatggtgagattctggtgagggttctcttggcctcacatga

SEQ ID NO: 4405 - DNA, 201 bp, Bos taurus
attaagtggaaaattactacagtctgaacgtttgggtccctcactcctggcccaaatttcgtaagttgaaacctaatcctcagtgtgatgtagttggaggcggagctgttgggaggtgcgggcctcatgaatggaattagtgtctttataagagatgtcagagagctcacttgctgccactgctgtgtgaggaaacagcag

SEQ ID NO: 4406 - DNA, 201 bp, Bos taurus
aagaatttggaaattgagttttctttagtgttttctttcctcctctcctcctcctccctcccttcctttttctctctgtcatctctcttttctctcccccgttcgctctctgctccctctcctttctggctgtcttccttctcatttataggaaaggagtcactatttcctaaatttctactacatgcagggagctttatg

SEQ ID NO: 4407 - DNA, 201 bp, Bos taurus
agtctgggattaaactgaataaagataaattttattctgtaggctttgatctgttactagttcatcttttcttttattgcatagtcttttaggagtcccaatagaaaatttatgatgtttactagttctgcttcttcttggtgggtcttaaactctttgtttctctagtatttataagagtgtcattcactttgtttagct

SEQ ID NO: 4408 - DNA, 201 bp, Bos taurus
ggacagggaggcctgttgtgctgcagtccatggggtcacagagttggacacaacttagcaactgaacaacaacaaaaaataaactttgagcggcctctctaaagaaaagcaggctgaagggtagttcctgagcttcgtgataatttaaatttgtaaaggaattgttaattattacaacttattatattttgtatctgtggc

SEQ ID NO: 4409 - DNA, 201 bp, Bos taurus
gagatcacgtagagcatttcatccttactcctcctgaataatcacagaaatcatactgtgggcaaacttttccttgggaatttatgggcctttcataggcatcagtgaaaaaggcttttatttaaaatgagaaatggctgacctttagacactggcatgggacagcgatttccctttcctagctattttatgagtgtgttg

SEQ ID NO: 4410 - DNA, 201 bp, Bos taurus
ttattccaattgaaaataaaatttttctttaattgtacatttctaagtttaaaaagctgttatttctgaacagaattaaaacttaacaaagttttctatatctagtggaattatgtagaagaattatattgatctttggcctcctggaatccattcagccttccttaatggtgcccagttttcctctggggaaccactcca

SEQ ID NO: 4411 - DNA, 201 bp, Bos taurus
aaagtagacaatagagtcaaaacaaaaattaagtgtataatatgatataatatattataattgtaagtgctaagaagaaaacaaagaagtggagataagaaatgttggcaggataggtgatatgttagtgtgactgggaaaggcctttctgagaggcaagtttcaagcaaatcctgaaagatatgaaaaaactagccactt

SEQ ID NO: 4412 - DNA, 201 bp, Bos taurus
gaggcaactgtccacctgcccccatcctcccatccctcagttccttgagggccgggcctgtgttttatttacttttgcatctccagttacaagccaggccctgaaaaatgggtgtccaaccagtgcctgctgagtgaagccaccttcctgtcctctctgctctaatctatgtttcccaggacaggccctccctcctcgtga

SEQ ID NO: 4413 - DNA, 201 bp, Bos taurus
aagagtttatctccttcaccgtggatgtgtgggcgccaactcacacatctaagaagccaagtctctagtgtgacaggtttcttccttccctcccaccactatgtacagtgctcactgacttgaaacttaactgaggtgagcagtcatgcaagcaaaagaaaatacctctccatccagaagaggtcaaactccgaccccagg

SEQ ID NO: 4414 - DNA, 201 bp, Bos taurus
tatgtgggaattatgtattctcaagatgagtgtgatttctttggttagagaagatggcaaaaacttgggtatgagaatgagggaagtgatttaaaagtcattgaggacttccactttcaggaagacttttccctgttattcacactaaagtacaactgaaaattagttataaaacaaaacaaatataagttactcaacata

SEQ ID NO: 4415 - DNA, 201 bp, Bos taurus
tgttttacctgcagcaagctataaagagttagttgttacaacctaatgaggcattagacacattgataaaaatctagaatcgccattatcccaatttttacttaattgtgtccaggaagtttttgccagtgcagtgatgcatgaaacaagaaagtcttttataaatgaggtgaccaagattgtgattttatttctctctat

SEQ ID NO: 4416 - DNA, 201 bp, Bos taurus
cactaatatgttgtatgtcaatgatacttgaattaaaaaaaaaaaaaagaaaaattggaggagctaaaagtgaggctatcaaaaacttcaggtttggttacaggcagaatactaatttttttgataaatgaaatccttatgaggtcacaagttctgaaatgttgccaataattttattttgaatggacatttcagtttaag

SEQ ID NO: 4417 - DNA, 201 bp, Bos taurus
gaaggaccaaatgcctctcagatttttggagatgctgctaagctttgtaggccttgctatgtctcccatccctcattccaggggccctgcctttggggtacaccccttttagtaaggagcaaatccatctgggtttaagccaacaatgctgacagggaaacacccccagagctctgggccaagtgaaatgtggaaccagat

SEQ ID NO: 4418 - DNA, 201 bp, Bos taurus
ggagaaaatactgaattcttagtaaatggttcaactaatgttaaatcttacccaaaacaatcgagttggcattgtacaactcaaagacattaaacataataaactcatgattgaaaagagaaatgaccgataaaattgaaagagaatattttttcctgaggaaaaaaaatttttcatacaatctcttggttttccattttt

SEQ ID NO: 4419 - DNA, 201 bp, Bos taurus
tactcctaccagcctctgaaccaagatcctgaacaagaggaggtggaactggcaccagtgggggatggagaagatgtagttgctgatattcaagatcggatccaggccctggggcttcattcgcctgccggacccaccactagaaagtgaggacgaagatgagcagggagatacaacattgaacaaccacagctctattcc

SEQ ID NO: 4420 - DNA, 201 bp, Bos taurus
gaactgtccaacctccagagacgtccttccgccccaccaccagctttaccagacgttagcacttccagactctgctccctgctggagaggcttcagaactgtctcttccccaacttccacagggcagcctccagccttctctgagtatctctccaaggttatgcccttgaagtaggacagagaggggaagggagcattttt

SEQ ID NO: 4421 - DNA, 201 bp, Bos taurus
gcgtgtggagcacacgttctggtgggggcccgagagctcggggagaggagtgggggaggggcggcgcctccggcggagccttaagaccacgaggatggagggtgttcggggccctgggctagggttgtgagaattgtgttttcgggataggagggcgcggggccggctccgagcaggcatcgggatccgcagggagggtgg

SEQ ID NO: 4422 - DNA, 201 bp, Bos taurus
acgtgtcctgatgaattttgcctcttgcttgctgatttggtaaagaagtgtggactcaagttcatggtgccactagtttgtgattcagtctcaggatacccctgttcctgggccctggaaccacggggaactgagtcagcagtgtcagcctcattcagttttggggcttgaacatacgcttcaggataggagctcagcaga

SEQ ID NO: 4423 - DNA, 201 bp, Bos taurus
tggtttgctgggtgatttaaaaatatatatattgcaagccctgcacaaagaaataataattcttgctgaagttcaggatttctgtggaggcccacaaggggttcttggaggaaacacatgatggagcaggctttctggtagaagggttgttcaacgcattccttctaagccttgtggccttggaataagctgcagaaccaa

SEQ ID NO: 4424 - DNA, 201 bp, Bos taurus
aatagggctactgaatttattaaggcccatgaaagttgtacagatggtcaagataatgtagaataagaatgacagcagggtgcaggaattggtttgtgggctgtactctaaagctgtagctatggccactgtcccctatgtctgtactgtctcaagagtctggaccagaaaatcttcaatggttcatttatgttcagaaat

SEQ ID NO: 4425 - DNA, 201 bp, Bos taurus
catctttaaattatatatcatgaaattgtagaatcccagaggtagggaggattgtatatatcatttgatcctctctctgcttacaaatcagaaatgtaagagcccaagggttaagggattttcaaaccatacatagcttgtgagaaaaagagcaaagacttaaatctctgctatgtttagatatagatataaacaatatga

SEQ ID NO: 4426 - DNA, 201 bp, Bos taurus
ctgtaactaaatgaacttttctgcaggagtcatgaagttggccaaacagaatttgaaagtgtcctaggaaggatatcttccacactgcagtttgtggtagaacgtaccatctggccactctctcaaagcctggaatgagagcaacaaagggctgccaacctcccgtgatcaaagatgagagtttctgacaatgcctattaa

SEQ ID NO: 4427 - DNA, 201 bp, Bos taurus
aaagaatccccctgccaactgctttccaaacaggatctttgtctgtgtaaaatatctctccttaaagagcgaaggtatccaaattaaacctaagcaagggggctctgttaattctgcactgaagctttattctaggcaagaaggtgaatgacatttggaaaagaattgtaagatgatccctgaacatcctttgcacttttt

SEQ ID NO: 4428 - DNA, 201 bp, Bos taurus
ttatagattgttgggactgctattcatgtaacttattctcctggatataccctttgacgtgttttcataaatattttctttgtctctccaaatgaatttcgaactcctgaagcttagagggcagataaagtgctttattagcaatataccccaggtctcacattcacttgctgcttagtaaatatttcctgaataaatgaa

SEQ ID NO: 4429 - DNA, 201 bp, Bos taurus
ctcctggatttttccccttcaggttactacaggttgaccaaattcttctactgaagaataggccaatctattgtaggccctttccatacaactgtactatgtaggttctagaaattaacacttctccttgccccttcagatacagttgtcataacatctatccaatgtcacgaggcctaggatacatcattcctggttagt

SEQ ID NO: 4430 - DNA, 201 bp, Bos taurus
acattatattcaagtatagaaagcatagaaatgataataaatgattcataaatatctgtaatccattgcaagagatggccacagatcatttttacatctgtacacatatttctttgtaatgtgtctactagcactttttttcatcaagtggtaaagtctatttccactctttttgaatttgagttggccctgaggacattc

SEQ ID NO: 4431 - DNA, 201 bp, Bos taurus
caaataatgaccctttgttcacttacaacatgcagaagctgtctctctaggtcactgtaggagtagccattattcttattcaccctgttccctctctgttcggatcaagagtggctggccacacgagctcctggcataggctgagggagagagagcaagggaagaggtttcagggcttaggagccggggagccctcctgca

SEQ ID NO: 4432 - DNA, 201 bp, Bos taurus
atttaacctggctgaaacaacctcccggcggcggaagaggccaagcacagcaggagcccaactcagcgagtggtagaagcagaatgtgaaggaaatccagcgcaggggaaggcccatcgtgctggaaactgggacagtgaaaaacaaactctaagttcatgcggctcggtctcagattccagaagaccgccggttaaggta

SEQ ID NO: 4433 - DNA, 201 bp, Bos taurus
cttcatgttccttgttactttatataattaagttgggtaccttggttcaaatattatgcatcttctaagacaccttagaaatcttcagttcaataccctagaaggccaaggaaatcataattggccagtcacatgataaaaatcaagagaattttcctgcagagatacagatatttcaactctctgcaagtgtaagagagt

SEQ ID NO: 4434 - DNA, 201 bp, Bos taurus
aaaacaaaaataatagttaaaatgttaggtgaagtttctaagttttaccaagaaattttagtgctttctctagaagcataacacaaagtaaatcaactacttttaagtaaccttaaataatcctaaattactgcgttttgtatttacaggaagttcttaacacaaaatttgagaaattgttgagaaaaagattttaaaaat

SEQ ID NO: 4435 - DNA, 201 bp, Bos taurus
ttatgtccaatatttgaagcagggtggccttccaaagaaggggtgttttatacctgaagaatgagtaggagttatgacatgagatggtgataaagtgtgggaagtgtaatggccagctttatgtgtcagcctggctaggctgcagtccccttgttcaatcaaatagtaacctaggtgttgctagtgaagtcttagtgctgc

SEQ ID NO: 4436 - DNA, 201 bp, Bos taurus
aatgagaacatctgaggctgtgagtcagcactccatggccagccagggacagttcggctgggtttccacctagaccccattgtcatggtccagacaagacatacggaggacccaaagtgggccgtagccctaaggtctaagttctctacacctctgccccaacctctatttatacctaatagaagtgttggccacttgtgt

SEQ ID NO: 4437 - DNA, 201 bp, Bos taurus
ccatctcctctgcacttggacaaatgggcaggcatcaatctggagatgtgtgttacagcccagtcttcactgtaggctttctatataaaatttaatacctaaaaggccataagccaggcaggacttactccctcactaagaaaacatatcattctgtccttgaagtaccagaggggctgtgtgatcctccagagggcaggg

SEQ ID NO: 4438 - DNA, 201 bp, Bos taurus
gtgactcaacaacaacaacttagaaaagggccatggtaagtaagcactccacccatcttagcaaatgtgattatcatggttatgatgataccttccactgccctcacccacaaaactggcctgggctctgagctctggctcccttcaactgtacctcttcccggtgagcagtgggtttgcaaaactccagtgaagtgtcca

SEQ ID NO: 4439 - DNA, 201 bp, Bos taurus
catgttacttttatgttactttatgacccagttttcaatgctgtcatattattttgtcatttgttgcttttataggattactacttacctaatgatctgaattcttttgtttgaaatacaattcaatagtcttaaaaatctggttgatattaaatgaccaaatcgactctactaggttgcttgctggaatttatatcacag

SEQ ID NO: 4440 - DNA, 201 bp, Bos taurus
acgtttccttaatttgaataattcattatttaaatatgccagataagtaagaaatcactcaatttagtaattttaaacctttaaacctcttttcaagatacagtatacatcaaacattgccacgtaacaaaaaatttaggccccggatcaaaagaagaaagaataggttgaaaacaacaggtaaagataggttaggaaata

SEQ ID NO: 4441 - DNA, 201 bp, Bos taurus
taagatgctggcagggttcatttcttctaaggcttctctctttggcttctagatggccgtcttcacctggtcttccttctgtgtatgtctgtgtcctaacctcttcttattaagaacatcggtgatactggattaggacccattctaatgaccccattttacctcttaaagaccctatctccaaatacagtctgaaatact

SEQ ID NO: 4442 - DNA, 201 bp, Bos taurus
aaagtgacttcttttttcttgaaattcaatgtgcctattaaattattccaatgtgtcattcattagtagtagttactggatgtctgacaatttttttgttgtttgaaggatgaggaaaaaggaggagacagtaagagagtatatcaatatttttcaatactcaatccttctagatctctcacttccaatcataacaagcta

SEQ ID NO: 4443 - DNA, 201 bp, Bos taurus
acacactgcatctcagtaaattcagtaaaccatccaacttaaagaccagagaaagaagatggaaaactatagcaactaacactgttgagggccatagaggtgtaatctgtagcaaattatggtagcgccacctgggaagccctgaataaaggctgaattacttttaaataaaagaaggcaaaactcctgaaccgcatctgg

SEQ ID NO: 4444 - DNA, 201 bp, Bos taurus
tatatttgtttaatctactgatcttaagagtttaagaagtatcacacaggggtcaatgaaattttgcttgtaaaggaccttcactgtgaaaaggttaggatacagtcttaatggatttcaggtggacaggctggtggagagaaatttttggcaaaggagttttcttgctgcagctgccaatatgataaaaaaaagagcaaa

SEQ ID NO: 4445 - DNA, 201 bp, Bos taurus
ccctaatatagtaactattagatatttcttgaagaaatattaattattctgactttacctcttgtgcactctgcttcactggctggtttattggaggctgttatttttgtcaaccttggcaactatttatgggcaaagtgctcctggaatacttttcttgaaaaagagcagtatattttctacatgttattttattttaaa

SEQ ID NO: 4446 - DNA, 201 bp, Bos taurus
tcagtgtcaaccaaacaaccttctaatggaagaaggttccatctaggacctccagagctagagaggagaagtcaatgtctggcttaaaaggataggctgagtctcctgttaggggctaatgtagctggtgactttagttgaaaccactgctaatttatcatgcccgaaaatcttaaggctcttaagaattatgctaaatct

SEQ ID NO: 4447 - DNA, 201 bp, Bos taurus
ctacatcgctgtagagagttcctttagtaacctttcatcaatgtcccaaacagaatgtaccatctatgtcctatctggtatcatgtaaggtcccatgaaacgtaagtgcataatgggattctgggattgaattgctcatttatctatgtagtgtatatttgtgggaaatggaacactggcaacccacagcttgtggttaca

SEQ ID NO: 4448 - DNA, 201 bp, Bos taurus
gaattttaattttcattactgtaaacttttcaatcattctagaaatcacttgagactgctctttaaagatgttttaagagctctgtagtagggaaatgtatgtcctttctaaatgagaaagaactagctcccagaaacagtttgtctctatgagaagtgaacctataatggctgttctccaagcaattctgtgtggcatta

SEQ ID NO: 4449 - DNA, 201 bp, Bos taurus
tcaatacagcatatgccactgtcactcaggaaaagggcaccagtctgcagtaccagccatcccctctcagggtctttcactacatatactgtcaggccaacatcactgaaacccttcccaggcgtgcactggtcccagggaaccaggctgtacccatactgcagcagctgggacttgctggccccagggttgccacacagc

SEQ ID NO: 4450 - DNA, 201 bp, Bos taurus
attctcctcagtttcactaagatatagacggttttctttctgaatctagacctttgaaatcccttttcttagaatatttactttagaacatttgcaatcacgcattctttctcttttcctttaagatacaaatcttcttctaacctcttgctagttttacaatactaacaatgtctttctcaaagacctaggagtcattct

SEQ ID NO: 4451 - DNA, 201 bp, Bos taurus
atttcttttttcatagatgtgataaatatctatacatgatttttgtttgtttcagatatctgcctccttcaggtaaagatttgaggtcatttacagaaatccattctgtacaatataaaagaggaaaaatattaacagaaaaatatggctgtggttagctttgaggacctgttggaaattggtaaaaaatcctactcaaca

SEQ ID NO: 4452 - DNA, 201 bp, Bos taurus
aaggatatataactttattcctttatttttctcataatttcaaacatacaggaattaaatgtttgtattctcatttttcattgtatggggaatggaggatgaatattcatcttttttatttactcttgatctgaatttttttatgtcaccagagcactaattcatcccctgtatactcaacatatataatcaatggatagt

SEQ ID NO: 4453 - DNA, 201 bp, Bos taurus
atccttaaaagctagcatatgatagattcctggcaggagataacacttccaacacaaaagcagctttgaaaatctctgggttcaactgtatgagcaggcacgactactagtctacctgtctgtacactgaaaaagttgcttaacaccttgaagaccaagtgagtactgatttgtgagcatgcaggcaaagaaattagataa

SEQ ID NO: 4454 - DNA, 201 bp, Bos taurus
agttaaattttatgtgtcaagttgactagaccatggggagaccaagtatctgcttaggcattatttctggatatgtccctgagggtgcttctggacagttgctattgaatctatagactgagtagagctgtgtgccttcctcagggtgggtgggcataatccaatttgttgagggcatgaataccgcaaagaaaggtggag

SEQ ID NO: 4455 - DNA, 201 bp, Bos taurus
gagctcgtgttctaaatatttttgtggcttcagaatctgaaggaagaaacagtttctttgatgtagacactctcttctggggaaaattctggttttgcttgactagaaacacattctaaaatgaaataggtttcacatgaatgctctcattgctctactaccagaaaagtgatttttaaatactcttcacactttctgtat

SEQ ID NO: 4456 - DNA, 201 bp, Bos taurus
aggcctttctaatcaaaggatcaacaaaagggaagcctaggaagacaaaaagttttagaaaatattcactgcactacagccagacaccaaagcaaaagccgtgggccccacctgcatccatggcagcaaaagctgaatggggagccaggagttctaaccttgccatgctgcactgaaatgctcaaactctgctacagtggt

SEQ ID NO: 4457 - DNA, 201 bp, Bos taurus
attcatttaggttgattgtttttaagaaacaggcctcaggaaggtgttcttgctccctgcccttaactgcctaaaatattttaggtaaagggcctgttcctggaacaggagtatcaccagaaataactcgcaaagaatactggactggtgtggtgggggaaattgacagggcctagagatcagagtccattatgtgtccca

SEQ ID NO: 4458 - DNA, 201 bp, Bos taurus
tacttagtctcttatttttggcccctctttttattatgtgtagtgatctgattacatataatgctgtattttcaattcttcaattgcttttcattttccccaaatcatcaattctaaaagggcctttaagaagccccatattttgccacttaaatgttaacaaatgagttgaaagcctggcttacatttaaataaagtaaa

SEQ ID NO: 4459 - DNA, 201 bp, Bos taurus
tcagtcaccatggatatttaacaaatcaggtggtgtgttagaagcagactttagactacagtggactcagaagcaagctgaagatgagggagaaataaggggttaccaactacacacttggaaattaaagcttcttccaagaatgaagaatagtagctaataggatcgagatatgctgtgcaagtacattacatggaaaac

SEQ ID NO: 4460 - DNA, 201 bp, Bos taurus
tcccaaattaaaatataacatgattgaaaatttaaaggtgacacactaatcacaaaattgtattcttacactgagtcctattttgaattgctgctcatctcgctagaaatttgtaatgaaatgagaaattatatgttatttcatgagtaaataatgaagtagacaacactgtattcattttatatttttatcatatgcata

SEQ ID NO: 4461 - DNA, 201 bp, Bos taurus
tcctggcctctatagaaaaaatatagtaccagggcaacacatggtgccccagaaacaggtgtttttcacaatcataaaccctctgtaaatgaggggcacgagttgacagtgtctccaatgtggcctcccaggttgctggcaagccttgggtacccactaaagctcaaataattgaacccagtccttgtttgaagggacttc

SEQ ID NO: 4462 - DNA, 201 bp, Bos taurus
catgattaatgtctataaacatttgacattaagtaaagccgattacctctaataatgtgggtgggtctcactgaatcagctgaaggcctaaaagcaaaaaccgacatttcctggagaaggaattttgcctcaaactgtaacatagaaatcctgcctgagtttccagcctgctggcctgccctacagatttcagatttgcca

SEQ ID NO: 4463 - DNA, 201 bp, Bos taurus
tgtacaattaaaatttaaatgtgtttgtgtgtggcctgcatctattccatatagaataaaaacaacttaaaaccatgcactaggaaatattaagaagtttgttcaggggccacttgataaagcatgctggagaactggtgatcagtggacatctctgtgtgggtatgtgatttgctataaagtctttgaaagcacaaagcc

SEQ ID NO: 4464 - DNA, 201 bp, Bos taurus
tcatattagctttataggtactgaaaaatacaagtatagtatttactgttcagccactcacctatctattcatccatttctttgatccatatttgttaaaatcatgccatgtgtaaaatactgtgccaggcatcatcagaaatatggggatataggagaccaatttcttctgctttaggcattgacatctagctgttaatc

SEQ ID NO: 4465 - DNA, 201 bp, Bos taurus
atgccagtcaccaacctcaaggaatgattggatcagctgatgacccaggttgtaagctgtgtgtggaaacgaaagcttggccaccatgtgtaccacagcactggtacttgagctgtgccataaggatgagagcagcgaggatgttgaggttccctgtgtacaatacaccatctgctgatccatggcctctcctgtagactg

SEQ ID NO: 4466 - DNA, 201 bp, Bos taurus
tacatattgcagctgttatttttttattatgttgagtcacacatgaacacattctaatcacttaaaaattggtcagattccaagatcttaggacctgtaagcccacctttaaatctctttctgctttcaatacaatggaagtgcagaagagtgcgtgaagagaggccagaaagatggatgatggatttcagagtgccatca

SEQ ID NO: 4467 - DNA, 201 bp, Bos taurus
ggaggtccaaaacctagcaaaaattccaatagatcttaacgcttcagaataaacctctttgtttcagtgatttgccgcgcagaaccatggggctggcagcgtcattcccagggccctaaggaagtgaccccacctgcttcagctctttgcagggccacctcctttaaaactaaggagaggagatgtccttggtcttgagcc

SEQ ID NO: 4468 - DNA, 201 bp, Bos taurus
gggtggttgatgcacaacaatggggttactgggaatatagaaatgatctatttgatggtactttacatggtagaataatcagtctgacaaaatcccttgacaaaatagcagcaggaattgggaggagcctttagaattcataataaaagtgggtaaatgtctaagtcaggcatggacaaggatgttgtctaactctcttga

SEQ ID NO: 4469 - DNA, 201 bp, Bos taurus
gccaggctcctctgtccatggcattctctaggcaagaatgttagagtgggttaccatgccctcctccaggggatcttcccaactcagggatcttaactcacgtctcatgtaattatttggtatgaaaagaaatgttatgctaataaagtctttacttcactgccgatatgtttgaacaaagactcaggaggtaaattatga

SEQ ID NO: 4470 - DNA, 201 bp, Bos taurus
ttcttggccattggacccagacagcctcccaccttgagtcaacaaaccttcagtcagtaagcacaagcataatggcaggtcctctgtggaaaggaataaatagggaaagtaagtatgcactggacttaattgtggagaacagagacctggctctatcactcagccagtcccgtccatgtggcagcctaaaactcctggtag

SEQ ID NO: 4471 - DNA, 201 bp, Bos taurus
tcttcagatagagattatcctggattatttatgtgggcagtgagagtcagtgtcttagccccagtccaaatgcaatctcatgtattcttataagggccagtaggagattgggcatgtacacagaggagaaggtcatgtgaaggtggagtaaagagaaatttgaagatgttggccttgattgaagattaaaatgatgtggcc

SEQ ID NO: 4472 - DNA, 201 bp, Bos taurus
atcaaggtgctgagggtgggtgcttgctgaggcctcgctgccttgctggcagtgcctgctcagtgagggtgtcctcacatggcctttctccgtgctctccagtgcctgcctcttcttataaggatgcccgtcctcttggattaagtccccaccgtcatgacctcacgcaaccttagttacctcctcagaggccctgtcgcc

SEQ ID NO: 4473 - DNA, 201 bp, Bos taurus
gttatctgtggttgaaaaacaatcagggaaaggcccaggacatattagatacagtatcataagaaacaagatataagaagagaggtttcatatctactatgttcctaatggaataataatttagttttcctaaaacctactattcaaactccatcactcctcgatatcccaaatccccctaaagtagtatgtgagaaccat

SEQ ID NO: 4474 - DNA, 201 bp, Bos taurus
agatataatcaggtatcctgaactggatcctggaaaaggaaaagagtattagtggaaaacctgataaaatccaaatagagtctgcagttaaaagtattgtgccaatgttaatttcttagctttaacatagtatgttatggaagatactgactttaaggggaagctgggtggtatacataggaactctctgtattgatcttt

SEQ ID NO: 4475 - DNA, 201 bp, Bos taurus
atctcactttcatcttttggcacactcttacttctcagacctttccccattcttacatcttcaaatctaatgtatttttcaaggccaagattttttaagacgagctgcctccgtgaagcttttctgacccctgtagcctgcagccatctcttactttgagatcttaatgcttaatctcacttccattaatttggccacttt

SEQ ID NO: 4476 - DNA, 201 bp, Bos taurus
aggggacatggcaactcaggtcaaaagggcacagatgtgctaggacaaccacccctgctcccgcagcttgacgacattccagccttgaaatacacgcctattcaggctgcagttttgtgacactagcctgggaaaaaagggaagagagaagtacagtaggcagttcttttaaaaaatttttaaaaattttatcaatttctg

SEQ ID NO: 4477 - DNA, 201 bp, Bos taurus
tacctgaggcccaatgtggtgggctagggagagatgtctgggttgttagggggtccctgtgctacctagcaaggtaggaattatggatgggcaagaaggagaatgatgggccaagtctgaccagaaagttcagagctttagtgacagaaagacatcccccattcatgggaacaagggacatctaggcaggagtctgtttgg

SEQ ID NO: 4478 - DNA, 201 bp, Bos taurus
caacaacttccatttacagaagcccttcccttcatcaggcatcatgaaggagcagagcgaccacactgaagtcatgaagaccacacatgaaggagcagagcgacacactgaagcgacacactgaagtttcctgccccaggaaactcacaatttagcaacaagtacataaaaaaacaaccatgaagtgatgaaaaatgacat

SEQ ID NO: 4479 - DNA, 201 bp, Bos taurus
attttggctgatacaagtgagtttgataatgatgagaagactccacacattaacgggtgaccaggggctgaaaaactacaaatgaattgaatagttcatccatttttagtttcttaaaaatcccactgcctttcctctgacttcagctgacggttcagagctagttccatggattcagacattcatctgttcattacttcc

SEQ ID NO: 4480 - DNA, 201 bp, Bos taurus
tgcatcttgggttatcagtaggcaattaagtataatgctgtttctgatctgaacaaggacagcaggtttaaaaagaaaggttgaagaaataccaaacatatgttaaatatttgctttttaagatttttttcctttcttcatttatatgctcagaaaaataagtgaaaataaaaccagttttgcttataaataatacatcag

SEQ ID NO: 4481 - DNA, 201 bp, Bos taurus
cagtatgtagtataacagcaaggagatgatttgatttatgtgtccttccttcaggcttacttagctgtctgtcacaactttatcaaagttcttgtgttttgtgtcagtctcagcctattgatggtgatgttgtcagttaggaatgcctgaggcactctctgggccctcacagacatttcccagaccagaggcaatgttgtg

SEQ ID NO: 4482 - DNA, 201 bp, Bos taurus
ttgcaatggttcagtacaattttaattttaactataaaataaaatatcagaaaattaaaaaaaaatcaaagtgttggttacagtgttcatgaagctgtccttttttcctgatcatctgaaaggaagattcaaattcttagcaggatgataggaaaatgaggctggaactcaggtaaactctccaatctcaaagtgtggata

SEQ ID NO: 4483 - DNA, 201 bp, Bos taurus
tggagcatctgtatagcttccagggtgttgcttgatctatcttagttctcagaggaaacgaaggcagcatacgctcaaggccagttgaccgttgcaagttatataacaacatttctattgcacctatcttcccataattcagtctgttataatcagatgtgtatatgtatacaatatttatgaacacttaaagtgctgcga

SEQ ID NO: 4484 - DNA, 201 bp, Bos taurus
atacacattattcatcagtctccccagtggagtattttttgtagagatcagtgaaaagatggtttgtgggatttacatacataagtcttaaaagatcctacgtattttaaaatcctattatacagaaaattaattaaatcaaattataaggagccatactttttccattaatgttaccaatttaaaactttaaaaataaca

SEQ ID NO: 4485 - DNA, 201 bp, Bos taurus
gactgccataaatgtctttaggttgtaccatcttatcactgcaggaatagtatagaagtatgtgaaatgctcatttaaatcccatcctggcatccccatcctcctttgcctcttctttctcacaagcaggcgcacatttttaccctcatatgtaaagcatgaatacacacacacagaggaagatgctatcatttaaacatt

SEQ ID NO: 4486 - DNA, 201 bp, Bos taurus
atagaattgtaatgaacaaagcaacatacctagggttgactactaaccggagggcttgctcactttaaaagccattccatttaggcaatgccttattttcggtactctctagctgaccctgcccaaatccacacaggtgacctctcaggaacccgacaggatacttatagggaggcttccattctagtcccctcactctgg

SEQ ID NO: 4487 - DNA, 201 bp, Bos taurus
aggtttttgtgtgagagaaattccccatagccaaatgatgaaacataaggaaattattctgatgaatatgaaacatgttaagcattatttacttttcatcgtaaaatagtataatgggttttcatttcactacgtgtagcttttggaacatacatttttccaacaaatagcaaacgggaaagcaaattggaattaagcaag

SEQ ID NO: 4488 - DNA, 201 bp, Bos taurus
aggccaggagtttacttaattgataatgtaagacaaaatgtcactaaatttttatttcattggagcaactcataattcacaagtctgtgtagtcctgagtatacataattatgtcctaattcttacctacctaagagatttgtaaattagaaatttgatattttcctctggttctttttcttgtaagttggcttgacataa

SEQ ID NO: 4489 - DNA, 201 bp, Bos taurus
tggcttgtcagggtttcctggttagggacgcttgtgtcagtgttctggtgggtggagctggatttcttctctctagtgtgcaatgcagtatccagtagtgggtttggaggtgtcagtgggtttggtgtgacttttggctgcctgtatttttgtgctcaggtttatgttcctgcattgttggagaattagcttggtatgtct

SEQ ID NO: 4490 - DNA, 201 bp, Bos taurus
agacatttacatcaagaagttaagtgtgtttctttctagatgataggattacaggtgatttttatttccaaatttctagcttaataggtaccctgattctcattttattttattttgattcttattttaaagtcagaaaattctataactatttcaaaacctttctgcctcttggtcaaacatttacaaatgcattagtat

SEQ ID NO: 4491 - DNA, 201 bp, Bos taurus
tttcaacttgcagattccttgaagaactgatgaaatctctggaaatttgtctgaataaaatgcccacaaataattttgcacataatttcagagacatagaaatctcctaaagatcagagatagactttttagttgtctcttaaccctaaatttagatattctataatatgcaaaactattaaagtttgcagttttaaaaat

SEQ ID NO: 4492 - DNA, 201 bp, Bos taurus
tgactctcttgaatcctctcacaggctctacgttttcttaaatgtactaatcctactgtggatttctctatccccagaaagcataagtacccatcttgctcatttacatttgtaaggttttgttctttctggatatctttgtatttgcatgctttttctttctccttctctctttttgaccattgcacttgtctttaaaaa

SEQ ID NO: 4493 - DNA, 201 bp, Bos taurus
agtgttggaggtttgttttttttttcctagtgattattcccacatgtgggaatacaaagcagtgagcctggcatactgttttcttcatacttgtctatctatctgttggtctttattcactcttttttttttaattaatctgtgattatcaacaggaaacccctgagaccactattattaacttgaacacaaatggaagat

SEQ ID NO: 4494 - DNA, 201 bp, Bos taurus
attcttgagagaatgaggagtttagcagaaggatgtgtgacagcagaaaaatagttttctacaataatcatatttcacttgacttggtagtggattatctgatcagagatgacctggagaaaattcacggggtactattatattagtgggaaagcctccaaagtttgacaggtaaggttgtttgtatgttggtgataacta

SEQ ID NO: 4495 - DNA, 201 bp, Bos taurus
ttttcttcactaatgcccaggctaacacagttgtgctttcatgccgaggtaaatgatatagttgcagaaacttctctttaggatggattaatttaaatttgtctcaagccctctgcatattataacttatatcttggattacttgtttcacaatcattattggcataagatttgtatatttagacactcatatttacctga

SEQ ID NO: 4496 - DNA, 201 bp, Bos taurus
tgcagtggttttcacatgaaatattcacataacggattgacagagtccagagagtgttaccaaaaatatctgtagtacttacacatttaaaagtcaagatgttgcctcagaagcagcttcaaaattaattttatgcatataacatttttttcaacctataacatgctttctgtaaaggaaatggcttataaaatttaatat

SEQ ID NO: 4497 - DNA, 201 bp, Bos taurus
ttcctgtgcagaccaacccaccaatatgtatttgaaaagggagcatttctttacatgggcaaaacagaattaagcatttgaaattcttcatgtctatattcgtttcttcattagagagtgtttgcctttagcactctcatccttcaaactaagtcacagtcaagaatatatatattgatcactttggataatcttatcaga

SEQ ID NO: 4498 - DNA, 201 bp, Bos taurus
tgcagtccattcagtacttccaatcctgttcccaaccacatgtgctgtcaatgatgatgtggtgcggggggtactcttcctccctccagctctctggaccacagttcccaagccacacagatgctcttttcctttctaaacctcatcccaaactttccactctgttcacatgatgatggtggctcaactctgcccacttgg

SEQ ID NO: 4499 - DNA, 201 bp, Bos taurus
aacaattcatgctctggatttgttgtcagtggtatgctcccaggtggatattatcttttaaaaattgagtacatgccatttgtctgtaaggtaaagggtggtatttttaacagtaactgaaaaactgttttggaaagaagctctaacacaggtgttttggaagtggacagggaaatgtttgcatcattgtgtgtgtgtgta

SEQ ID NO: 4500 - DNA, 201 bp, Bos taurus
gatacagacaaagagggagcaagatatcagagggaatgggattaataacacagggaaaatagaacatccttttcttttgtactggaaagaataaaccaataaataaatctgaatcaagtgccaatggttctctacaccctgagctaggaattaaggatgggtggtgattgataaagacagacaaaatacctcagttcatag

SEQ ID NO: 4501 - DNA, 201 bp, Bos taurus
ggggcggggaacagaaaggggccaatcattctaacttcaggaacctggtagctagagataccaatgaataaatgatggtgatcataccagtacatttggcgggtggtttgatctacatcctggcctgagtgttcaaagagcagtgggcaactggccagcttaggggacagctaatccttaactcatggtccaggtgtcatc

SEQ ID NO: 4502 - DNA, 201 bp, Bos taurus
ggccatgtatgacaatttttgccctacttaattgacaatgtaacctaattctcagactagttcccaaaaaaagaatcctttctcttttgaatctcagaagagctcttaaaatggatgggccctctgggactcacggatgtgtttccactgccacatagtcaaagaagcctaaaatcacagggatttatatcaaatggcatt

SEQ ID NO: 4503 - DNA, 201 bp, Bos taurus
ccatagcaagaactctaaccccctaaactgccaatatttatctccaaattcacttgccaggatacatcttgtcctccttctgggacattttctctgccctcttgctcatacctttctctatcatctaagtcactttgatgagtttgtagatttctcttgccctgggtattctcccactcctcaatactgttaagtgatcct

SEQ ID NO: 4504 - DNA, 201 bp, Bos taurus
atgctaatgattaaaataaatgtggcctgttatgttatctaaacagtgttctttctttggaagcccaggatggcagtcaaagcacttcctggagaccatcgtggccttgaggtaagctttcactggccttataaggccaaagatgggttgctaataaatcaggttaagtgctgggtgttggagtaagtggtttcatatata

SEQ ID NO: 4505 - DNA, 201 bp, Bos taurus
tcattcacttcttactgtccagtatattcattcttcttttggtaaaacagtaggaagttctccctttaagtaagtactcttccccaattttcactatcagctagtagatgacaccaccatcaactctaggtatgggtccaaattaagttaggacaattgatataatgttccagagacaataactgattcatgaagcagggt

SEQ ID NO: 4506 - DNA, 201 bp, Bos taurus
acaaaagggtgagtccagcatggtgtgggtacacatgcaacactgtgagtggggagggctgtgatctctggaggttgggtcccacttaaaaggggcggccgtactcagacctgcttcaatattccttgtttatgtgagcccagtgctgctagagtcactctttttttttttctttttccccctcaaagacatcacagcata

SEQ ID NO: 4507 - DNA, 201 bp, Bos taurus
aatgaaaattgccccatatattcttgatctttaacatggttatagaaaaatgtcctgtacaaagaaaaaactttttactctaataatatttcattgggttggcattggtgattttatgaaaaatttgagctttaaactccctgataatcaatattttgcatcttaatgtcagaaaaatagacagaacaatgtgtcctgtcc

SEQ ID NO: 4508 - DNA, 201 bp, Bos taurus
caagagtagcataatttcaaagcaggcaggccaagtgaatatgaactgtttattcaactgtcacatgtcagggccacgtgaactgtgaaataaaaactctggtcaccttgccaggaagaaatttgagttttatgaatttttaattatgtgatattttcaggaatgcatcctttgcatgatatgcatcagatgaaaacaggg

SEQ ID NO: 4509 - DNA, 201 bp, Bos taurus
gctcatgaatacccatggatttcagcaagcactcaggagaacaggattctcatccgggaaagggcaggacagcctctcagcgggtgtggccatgtcttgaaaggaagggcgaggctgaaagctccctcccctcctcatccctcagggtctagagattctatttcatactgtccatttgatcattcctgaggccaaacatct

SEQ ID NO: 4510 - DNA, 201 bp, Bos taurus
tgtgaatatgtaaatatgatccaagtattaacttttgttgtgctaagtttgataattacatgaggcttatatataaaaatgttcttttcatttggagatgctcatgtaagaatttgcagaaaataagcattatgtctatcatttattttaaaaagtgcttcccccatcaaataacagctgaaacaaggttgcaaactgttg

SEQ ID NO: 4511 - DNA, 201 bp, Bos taurus
tacaagctaaaaggtttccaaaaacctgcacggtaatacatgtgtgaggagtcatctctaacagataaaacagtgaaactcatcaaaaagcaacttccgtatattcaaaaatattattggcaacaataatactccctcaaacctacattactgtatttttcattcagttatgttatttcacatctttgtgactcactgatc

SEQ ID NO: 4512 - DNA, 201 bp, Bos taurus
tacatctaaacagctttgccattccaattaaatatatgctaatatgtaaaatggatagtcaaaactcttcaaataaaaaactccaagctgtgagttatgattctgcttgtagtagtattacaaaattgatttttcttctgcataaagcttacttttacatgacccaatttcagagagcatccaaatttatggttcaatctg

SEQ ID NO: 4513 - DNA, 201 bp, Bos taurus
tagttctaacagctgcctttagactactacttccaagcaaagcaataaaaatctttagggaaaaaaattgatcccataagtataaaaagataggaaggactccaacacatgactatcttacagtagagaaacggggtcaatttttatagtatttgagagtctattatatcttcaaagaagatgcaccacatatttcaaagt

SEQ ID NO: 4514 - DNA, 201 bp, Bos taurus
acccccttctgagacaatcactggagtctggtctactttctgccatctgcattctaaagtaaattcagtatccccctcaccctagcccctgctctcaggaggaggatatcatggggactcattcctcttgaaggtcttacctcactatacccgaagggtacttggtagaattggaagaaaggtaaataattaaatcagcct

SEQ ID NO: 4515 - DNA, 201 bp, Bos taurus
cagtcactgatgacaccagtggtggcttaggcagccaagataaatacccacttggaggatccaggaggtgagagtaagccatgggactcccaccacgaccgtgggaactgcacatctaggttctttcatgttgtggagaatcggagcccgtgtttatttggtgcaaaggacttatttggatattgctggccaaatggctgt

SEQ ID NO: 4516 - DNA, 201 bp, Bos taurus
cagctctaggggtctcagatatactagctctcctgatgtctgattctgtgtagattgggagatgttcccagaggtacagtccatcagctccaagtatcctataaactcccaactctctaagttaaaccacttcttgactaagacacctagggtggtttgtgtttctggattgaaccccagctgatactgaagtctggaaag

SEQ ID NO: 4517 - DNA, 201 bp, Bos taurus
ccacattgcaggaggattctttactgtctgagccaccagggaagcctgtgttctaggtacagggaagtactatgttccagggactgctatggaagtactatgctcctgtgataggcctgcagtggagtactacagcacaataatctgtggtgaactatagataaactcaacaacagagatgaacctcaaaataattaaatc

SEQ ID NO: 4518 - DNA, 201 bp, Bos taurus
gttaatatatcttggacctagccaaatgatactgtgtcccgttctccatttcctctagtacgctgctgcccaaagctaaccctgatgtttcctgtgacataaacctaaaggaatcaagtgggtttactttgcagaagaaagagtcagaactgtcacttcacctcttatacatacaaacctcctatctacaaaggaagagaa

SEQ ID NO: 4519 - DNA, 201 bp, Bos taurus
gtgtactgatagagtgatgattaataacaatacacgatatggaaaaaaacatgcctggatggtcattcaaatgtgaatgacaaagaataaaagattacaatggacttaaattccaattttttttcctgttaccagaaacatatcacatcattctaactttgaaagaacatataatcttttagaaaagaaaatgtagattta

SEQ ID NO: 4520 - DNA, 201 bp, Bos taurus
attgtttttctaagattacacagttagtaagcagtcaagccaggatgcaaattagatttatctgataccataattccacacttttccatgatgcttcaaaagggataaggaatacttaattgcactcttaggcttcaatcacactgtagatagatgacaaatatattgtccaggctccactagctggggtattaaggtgtt

SEQ ID NO: 4521 - DNA, 201 bp, Bos taurus
atttgattcaggcataaaatctgtaatcctttcatttcaatttggacaaaccaaaccttcattctgccccaaaccctcaacttgtatatgaagaatgctgcaattattcctctcctcttttcctcttacaccacagctgtcttctttccatctccccaatcccagtcttccccaacctcagatatggggacctcggggcaa

SEQ ID NO: 4522 - DNA, 201 bp, Bos taurus
tatagagttttaaaaatagattttgccacacaatcatgcccacaaatgctgacttgcagtctgggaactatctcttcgtcaggcccagcaagatgaaagccggttctattttcatcgtgagagagctgcagggtggaggcacaaaggcgaaattcacttttcatgtccatcaggcagagcccctcaccaaccaaagcgggg

SEQ ID NO: 4523 - DNA, 201 bp, Bos taurus
gagtgccatagttcgccccttatcctcagcctctaagcatccaatgtgcaaccagttttgcttacaaccagctaaagaaacgacagcattattctgaatctactccaaactgacaggagagaaccatttgaaaggaaatcatgtattcaatagtaaaatacttgcctattaaggtcacctaaccatcctacttgattctgt

SEQ ID NO: 4524 - DNA, 201 bp, Bos taurus
ggaaatccgatgagaaaacaggaatggaaagaagccatgagaaggtaaagaacggatttgcagaagctttctggaagtcccatttttcacttgtcattggcagctgacaacaggagagtcctatgggctgaatgtcagaatgggaaggggaactatccagagcttattgaacagtttcactatctgacaatctctccccag

SEQ ID NO: 4525 - DNA, 201 bp, Bos taurus
tcaaaatgacacatggtgacacagagttctaccggagcagggggcccttggctaattggcagggctggccactagaaagcacacttcactcttcagaagctgcaaggtcacttgagcagcacccaaagaaacatttcaagtgggcaagagtcacaaaactccttgcgtacagcttacatgacaatctcctcctcacttgtt

SEQ ID NO: 4526 - DNA, 201 bp, Bos taurus
gtaaaaggggttcagcctccagtttccatcaaatctcaagctaccactaaacctctctgtcttggtctctgctcaccccttcctctcaggggtcctcccccagactcataaccaacagagccacgtggctgggggtgggtgatgactgaagctgagccctgaactcaggacaagccaggtggaaggatatctggaaaacaa

SEQ ID NO: 4527 - DNA, 201 bp, Bos taurus
tggcccctatatatagctctccttacaacatcatgtctcacgggtattaaaaatagacccaaatcacttgaagacattctgaaaaatcaaaggcaaaagcgctttccaagaggaagttttaaatgttttctttcttctcgttgagatttttaaggagcaaaagccgtggtgtggccctcctcttcctaggaggccaagttc

SEQ ID NO: 4528 - DNA, 201 bp, Bos taurus
tcagtttgcaagttaaagagaagacataaaactccatggacacagtactggtgtgaaaaatattggcttacagaaacaaacaaacaaacaaaaaatgcccactgaatcttcctttgttgcattcctaaaattatgcacttccttgacatcttgtatccaacttctttagttgtactctgtcctcagccatcattagggaaa

SEQ ID NO: 4529 - DNA, 201 bp, Bos taurus
agtgttccttatgtaatcagtaggatgactaacacagcgattaaaaacctgacttggctaaagattttcttatgagattaagctttagaggcccaagatcgccggaataagtccacctcttttaacaaccaccacaactgcaaaataatcggctagcaaatatcaacagtggatgatccatcattcctggttttcaggaat

SEQ ID NO: 4530 - DNA, 201 bp, Bos taurus
tagtcaatagtagttgggaaaccctggtcgaagaccagcttcctctgtatagttgaaactggctgctggcagctcccaggcccacatccaacagctttggcaatccaagagggactgacacttgctcctgctgatccaaatgtcagtattcccagggaagctccctgattggcccagctctgtacagaggctcaccctaga

SEQ ID NO: 4531 - DNA, 201 bp, Bos taurus
ggtctttctgaacctgagagaatattagcagtgatttcttctgagaaatgtactgcttaagaggagctgataaccaatgctcattgaatctcatgcattcatagttcattgcttgattgaacaagcatttgttgagcactttcaatatttatctactgaggtccttgaatgtggcaacggaaggactgaggttacaaagat

SEQ ID NO: 4532 - DNA, 201 bp, Bos taurus
gcatatttcatgataattagaaataaaaacactggctagaatatgaaaatattaaaattttttcaaaaggttatttcctgggggccataatttcatctgttccagtgctgattattgagagcttgtcttaaatcatctgtgatccaaaacctcagattttgtttcccaggcctctgtccgtttatctatccttccatccat

SEQ ID NO: 4533 - DNA, 201 bp, Bos taurus
ccaagtgtgagttcttggcttcacacaggaaaaaactcaagagcaagccgtaagaaagtgaaaggtttattcaggaaggaaacacattccatagtcggagcgtgggccatctcagaaggcaagagaggcaccagggtttgcgcttgtcagtttttataggggtgggtaatttcatagggtaatgaatggcaggagtattcc

SEQ ID NO: 4534 - DNA, 201 bp, Bos taurus
gaggcccatttcaggttgtagggcagctcacctaatgtctcaagaaagcaccatagtctcacaacaataattctttcaaaagagaatatagacggagggagtagagaaaatcagaaactggcccttcattccaactaattcttagtgggaggcactttgggtttgaatagtatcctttagtaggttgaatcttgactcaaa

SEQ ID NO: 4535 - DNA, 201 bp, Bos taurus
gtcaaaaggtttacctactccttatgttgtcttctaaaggtgttatgtttcaggtcttgtatttaagtctttagtccatttgaatttgtttttgtgtatggtgtaagaaggtggtctaatttcattctttgtgtgtggctgtctagttttcccggcatcatttattaaagaaactttttcctcattgtatattcttgtctc

SEQ ID NO: 4536 - DNA, 201 bp, Bos taurus
aacctggcctggctgggctgatttctaggtgacctgacagccgtctgttgattactctgcactggacaccaacaaatcacctgagggaagaagcttcaacagtccacttgtaaagctcaggggccatgggtctgcttagcagacccaggtagctgggcctgaggcagaggggaggggacggagaagggagggtagcttcag

SEQ ID NO: 4537 - DNA, 201 bp, Bos taurus
ttctctagggaacccaatgtgctttgcaaacgtattaaataattaactctctcaaatctgagtgaagtggaaaggcagtgaaaatattccaggaagagccaagcaggttggtgagtgatgaccagatgtgttgctttgaaaaggcaaatccacatggcacctggcagagaccacaggacacgaggcttcttctgggggctg

SEQ ID NO: 4538 - DNA, 201 bp, Bos taurus
tttggctgtcccacaaatgagacagttggtggctgaagagggtgacacatgcaagacaagttggacagccaaagccaaggtcagcaggcaaggcctcaaatcaagccagtgccatgaaagtgatgggcaagggaagcaggagtgagtgggtcttgaacctgaagctggccatcaggcacatgaggctgggtctagacaccc

SEQ ID NO: 4539 - DNA, 201 bp, Bos taurus
gacctcaccaccccattccctgcctctcagcctgatgcctcacttgaagacagctcttgtaggttcaggagccctgcttgcaaagctctgtgtgaggcactaggggccccagatgtcaggcacccctgggtgttctttggagccagagatgctacctctcatctgcggtcatagttcaaggagctggggtacagggatctc

SEQ ID NO: 4540 - DNA, 201 bp, Bos taurus
tcagggtcactctcaggaggctccctggaagccgttatgccggtgagcgcgggcatcagacaacagtaacctaagcctgttctatacccctgccacctccgctgggatcatgaacaacttaattggcctttctgagtctcagcttgttcatctgtaacatgcacacagcacagcactatctataaacaaagcaacacatgg

SEQ ID NO: 4541 - DNA, 201 bp, Bos taurus
tcattctttattcaaaacaaaatatctgcattcttgggagagttgatcacaacacagatgtgaccttttcattcttcacttcgaaagtaaggcctgagtataggactaaggaggattctgaacctgactctggaaaatgttatttctaagaacagaggtggtcaaatttctgtaaagagtcagtagtaaattcttttttgg

SEQ ID NO: 4542 - DNA, 201 bp, Bos taurus
cttccaggctcattcagtgttggcagaattcaggtccttgtggttatagtaccaaggaccttgatctcctgatgtcttttggccctttgttattctctccacagcatgatggtttgctccttctaggtcaatcttttttacatgttgtgtctttttgaccttttttttttttttaatgggcctttttaatgtgatgaggtt

SEQ ID NO: 4543 - DNA, 201 bp, Bos taurus
ttgttcatgtacaaataaggtgaaagactttgaattgttaggtagccctagggcaggtggttcttacaggcttcctttaagtcttatgatggcctactcatgtttaccttcccaaaagaggaatttacggttgaaattttagttagttcatagagtgggaaagctgatagagaaaaattaagaacctgtagtcgacccata

SEQ ID NO: 4544 - DNA, 201 bp, Bos taurus
aaggagagaattgggtatttaaaaagaactctatcctatatgattatggtaacaagaaacacaattttatgagtgcttactgtgtgccaaaactttatgctgtgtacatcattgcaaatggtttgctcataaattttaatcctcactgtacatagatacattctcatttacagatgagatgtgtacgcagagaagttaaat

SEQ ID NO: 4545 - DNA, 201 bp, Bos taurus
tcaggaaatcatggtcatatcaaaggggcatgggtctagtgtcggaggctagaggaaacctccttagaaaaaggaacgtggaaggtgagatcttaaggccaacgagcagctcaccagatgcaggcaggaggtgggggagaggaagcacagcacagtgtctggaggagagaataaaacagagaggatatgacctcaggccag

SEQ ID NO: 4546 - DNA, 201 bp, Bos taurus
gttaagggttatatttgattatatacagtaatatctgccactatttgtatattcaataagcatttgtggagtcaatgaatggtgcatttattcaaaagatctgtgtatacttatgaagattctgatcatgtgcagtgtggtattctgattcatagagggatctaagattattggtatcttcataagaagagaaaaactatt

SEQ ID NO: 4547 - DNA, 201 bp, Bos taurus
aaaatcaatcatttgtttcaaagactatcattggacaaaacactgggacaaaatgccaaactgtgaggtggaaacagagatcagagtttgatgaaaacaatgacattccttagagactcacttccagtaagctaacaggattgtccattctttccacacattcttgagtacttactgtgtatatgtttctgattttgctat

SEQ ID NO: 4548 - DNA, 201 bp, Bos taurus
caagtatgacttctgtctaaattaaggagttttaaggccacctgggttttgcgttttctgtgctgaggagtgaaatgcaaccctagggccctctacgcacgaagaggatgctctccaagcatctcaagaggcaatgtatcctgtgctcaccgtgcagtggacactcccagtaggaagagggctctggccgctggtctggac

SEQ ID NO: 4549 - DNA, 201 bp, Bos taurus
tattgtgtcttgataataatataatgaaacacattaatcaaaccaggatctcttgcattgcaggtagattcttttccaatgttaaataatttggccagggctaaattccttttctttatgtaggctggtcaaactctttaagttacatatcatctccccttggaaccagatggcctctaatacatagtgactgagatctgg

SEQ ID NO: 4550 - DNA, 201 bp, Bos taurus
acattcctcttctgctgtatttttagtctgccattcaatcctggcttggcctgttaactgtgttgtgtcacttttgttatacctagaactgcatccctgtatgttaccaaactagcattggccacaagaaaaatatacgcatagtttataagacaaaagtgaatcagtaaccactgcttctgaaggtatttttgcagtcag

SEQ ID NO: 4551 - DNA, 201 bp, Bos taurus
gcatgcagacacttccctctggcggatactgacattctggagtaaggcaaaggggaaaatgtaaagatggtacctgccacaaaaggaaaaatgaaagctaaaaaataaggctttgccagggaaatgtgtctagagttaaataaataaataaataattttaaaaacttaaagtaaaaaatatggtgcccaccagactctgtt

SEQ ID NO: 4552 - DNA, 201 bp, Bos taurus
agcacaaagatgtcccaaagtaatcttatctgagtatttcaaacaactatatcatttctacctcaaaatcttcacatcttttttcatctccttgatttccgttaactatacaagcattaccctagatatcttcaaaagtttaaataaacccttgacattaacatctgattttctctcctgtaaaaactgattcaactatat

SEQ ID NO: 4553 - DNA, 201 bp, Bos taurus
cccactataattgtcaccctgccatttaatttctgtcatatgagttttctaaaatttaaatatagtcatcttgcttactgatccagattttccagtggctattagaaccttatgataaaattatgtgccttttgcatgatagatgaagccttcataattggacacctgcccacctccattacatcattcctttttacacat

SEQ ID NO: 4554 - DNA, 201 bp, Bos taurus
gcctgcttacccctaccaaatgaatcagagactgaatattcatctgaagttgttgttcctaaaacactttgccaagtccaggaatcttttcagttgacagagatattttcctctacaaagcagagtaagtctggctgcctattccaccattttgtcaggttcattgtggtgatatatttcttccttttatagatgaagcta

SEQ ID NO: 4555 - DNA, 201 bp, Bos taurus
ttgatttatgacattattattatttttgtcttctagtctgcatttctcactataatgaaagatttttttgttgttagtttacttataatcatagtagttaatggaatcactagacataataaatactcagaaaacattgttcaaaattccctgaattgcctcattgtattgcctcccaagactctcagacggaagttagca

SEQ ID NO: 4556 - DNA, 201 bp, Bos taurus
catagtcaccactcagttccaaaaagacagacctccaactggtctcccatggtcattctagcacgttctaattccttccttgcactgtaataagagatgtcttcaaaattcaaatctcctcatgacatttgctgtgataaaatatctctatgtgttgcccaagctcttaggtttaaagatcaacatccttgcagacagtct

SEQ ID NO: 4557 - DNA, 201 bp, Bos taurus
gtaagagtatataatcatggactgggaaattttgtggtctgaagtcccatgtctttgccttttctctttcttttcatttagatgttgacctaaaaaggtatggatcatttttaaatgtgatttcagctcagctaacagcataaacttgggacttggaaaattatttttgttagttctgataataaaatatttaagaatgct

SEQ ID NO: 4558 - DNA, 201 bp, Bos taurus
tgaattaatctattcattttcatatccattttctaattaactgatataaacagttcaggtactgcctgatagtttattgctgcatggcaaaatgcctcaatggatgtgcaattctaaaaatggttctgcaattatagtagttttatttatccataggcacttaatgcatcaagcagcttctaattgctaacgaagaaagac

SEQ ID NO: 4559 - DNA, 201 bp, Bos taurus
ataaggtgataatattacttaatttctgattggttacacttttgattgtgaaagagatactaaccagccaaccctccagaaaacagtttgagcaaatcaggctctatagttatccaaaacatgtactgcatctttataactttcccatgggtgctggaaaattatatattttctatagttgttgtgcaaagtgtcctatat

SEQ ID NO: 4560 - DNA, 201 bp, Bos taurus
ccatggattatagaaatgcataactacctagatttttatttaaaatgcggtttaatgtcactggtactgtgttgttatactacactgaattttttccttaactgtcttcattattaaatttaaagtggtataaccttcacccatctcctatgacaattagctttgtttggcatggaaagaagtaaagattttgaaggacag

SEQ ID NO: 4561 - DNA, 201 bp, Bos taurus
agagtaatggagtggcgtggcattgccttccccggtgtacccaactatatatccttaaaaatatgtgacacaagtaaagactcaaatatttgttgaatatatgcaaacaaagaaaatcttcacacctacttggagagtaatagtgaagattagcagaaatcaagggtgagaaataaagtaacatactgcatggtaattggg

SEQ ID NO: 4562 - DNA, 201 bp, Bos taurus
gcagtttatgtaggggagatgtgcaaagtgagacccgtcttgccaaaagatgtggtaagaatgatgccaggtttataattttacattgtaggcagtaagacccttttagggcagggacagaaaaaaagactaaaaattttgtcatatggagggatttcctgaattagcagccttttgccagaatagtaataagaaataata

SEQ ID NO: 4563 - DNA, 201 bp, Bos taurus
atgattttaaaattatttgaagtgttcactaagtatagtttctctggaagaatatagtttacatgagtggatatattgctgtctggacaatgtgaaggaaaaacaacacttcttgtgacttcacgtgtgaatcttcaaatgtagagtataggaggtgcaaacggcagtaagtgctgccagagagggcccaaggagatagca

SEQ ID NO: 4564 - DNA, 201 bp, Bos taurus
cccaacttttacttatattacttgccacccacagccaacataatctctcatacttttgaactgtgatttctgaattattgtaactctccaaattaattctgtaagataaccatcagaaccacaaattcctacagatgggttacaaaattgtttctgccaatagcgtggagggattttccaggtggtgctggtggtaaagaa

SEQ ID NO: 4565 - DNA, 201 bp, Bos taurus
gtcatgtgttacttatttatactctatgaggtatatgttatataaaaagtgctatttagtagattagaagatatgtaaatgtacctaaaatgtgactcctgtgtttgatatattcaaagactgacaatcacactaatttacatcagacaaaaaatatacctaccacggtagagcaaaagtgttttctaccatccttagaaa

SEQ ID NO: 4566 - DNA, 201 bp, Bos taurus
agatactgaggaaataaagatacgtgaaatcaagtactgctttttagaaacttcaaattctaacaggagatgatgggtggatagatggatagacagataagagaaatagcagcataatgggtggtttaatatgataggggaaggaaggagtaggtgccttattctgccagagacacatggaaattgaataaattccaagta

SEQ ID NO: 4567 - DNA, 201 bp, Bos taurus
caagaggacatttacagaataacaatattcagagtgacctacatggacaagggtattaaaatcacatttttcttagatgaagtgattttttttttaaattatggaccaactgaacctatctaatataaaatcctttaatatataaactgtgatcacaacagcatccacatagcagagagaggatgggggtgtgggcgggga

SEQ ID NO: 4568 - DNA, 201 bp, Bos taurus
cttataacagcacctccaagaacaactaaattgtatggcacagatggaaaagaggagaccgtgaaaggagtttaggtgtaggccaaaaatgtgttctggtgtgtggaaactcatggaatgttccaaatagaatgaggtcaccagtttcaaatattcagaggattatggtagatgaagactgaaaattatgatttggccaca

SEQ ID NO: 4569 - DNA, 201 bp, Bos taurus
gaagccaactactcaataatatgcattaaaaacaagtgtcactctatagcagtttccctttcaggtcagcaaagaggtaaaatagtttaaaatacagatgactttagctggacttaaatgtttattaaaatagcattactttgactttcatattatgctatgtggaatgctttattggtcttatagtccctcctaaagcca

SEQ ID NO: 4570 - DNA, 201 bp, Bos taurus
ggtaaatccctatcagatcctggatccttttagttcggagatttcagaattctttcgactcatttctttttccgggttcggtccggaaaccagccagaataggagggggtccacgatctgacccgatccgactgaggaaccatactagatccactgtgaagcccaggtgaacaaaattttgttttaagcctgaataggcgt

SEQ ID NO: 4571 - DNA, 201 bp, Bos taurus
ctaataataacaatatcaaaaaataatagcaaaaattgacttaacttttactaggaactagactttgcaataaaaatattatgcagaagagctcatttaaccctaatcataaaatttattttcaagcagtaaaaaccaagtttgcaatttagtattttaaactgaagatggctttgggaaccaataggtggagatcagctc

SEQ ID NO: 4572 - DNA, 201 bp, Bos taurus
tgtcacattcactcactgttgaacttcactaagtgagatgagtgtcacagagttcattacagctgactcactttaagccaaacaggctagcgcagttgggcattccgggcccctccttgaaacacaaataaaacattttacaacaggaagctagcttttggctgtcacaattttcaaaaataaagtagcaagtgacagacg

SEQ ID NO: 4573 - DNA, 201 bp, Bos taurus
tattgcaaacagtggtcattcactaggtctctgttaggagaagactgagctaaagcagaaatgtaaattattttaaaggcttgatttactcctttgaaaatgttatccacccccacccttccctgagaagcacatagttttggttacatgaaaacatccactcataaaaaaaagtgtgtttctcccaacttggccatagga

SEQ ID NO: 4574 - DNA, 201 bp, Bos taurus
acctgatatcatgtcatgcctccaagcatgacattcacttttactgtcctgtcaatggagtgctctactaacccctacactattccttggtaggcaaaactcaatcatttcccaatctagattaaatgatcttccctcagatatagacttctatagtacaagactttgtgcatttacagtttctcagtatttgtgttatct

SEQ ID NO: 4575 - DNA, 201 bp, Bos taurus
acctgcctccttataatatccctattttaaggagagtttattaggaaacttaatacctcctgccaccttaattctcctctgtcctgtcatctaacaggctcacagattctggggactaagatgtagatgttttgggagggaagcatctttctgcctaccatagtaaggttgtgggcgcaggatggcatttgcagcatcaca

SEQ ID NO: 4576 - DNA, 201 bp, Bos taurus
aagtgtcttttcagccatcagaaaaagatacaattatcttcagtattattttagtgctaactctttgacttcatacccaggtgtggaaactctaccttatgtggatattgtgcactgtaggattttccttggaatacatgagtattagataaataaggcaagacacaaggttcaaatgatgctgaataaagaaaagaatgg

SEQ ID NO: 4577 - DNA, 201 bp, Bos taurus
tcagtaatatggtccctgtttgtccctatagatatgattttctcaatgacccagtatctctctcctagacttgctagcctaaaaatttctgaaccacttcaaaagtttacttcttgcattttgagaaactgttattttctatcttatatttttgctttcatttttggaactagtttaattactccagttataaataattgg

SEQ ID NO: 4578 - DNA, 201 bp, Bos taurus
gacaccttttcccaaagctatattattgtttctctagactgtccctcacttgtctctgtatcctctccctttcctaattggtaactgtttgaacctcctccttggaactgagggaaggtcataaatgaagcctatttcctatagtcaagaaattggggacatagaaatacagggtcctgcactctatcagtcaaattcaga

SEQ ID NO: 4579 - DNA, 201 bp, Bos taurus
agagagttttgagatacaagaatatagcctaatggatgaacgggtaagggcatttgaagcagacgttcaatctttgatacagccagcaggagcctcgagtggctaagtttttgttgtgcagtttttggaagaacaggaatgaactgtatattcataaaagtcagttgttttatgagcagtccaaacaaggtgaaacttgaa

SEQ ID NO: 4580 - DNA, 201 bp, Bos taurus
gaattaggatacttcctgaacctctatgtagaagtggcatggaaaccaggaagtggatattgagggaatgcttttgcagactcaaaaggaataaaacacaacgttcatagaatttaggacattgatgagcctgtgaatgagtaaagaaaatatttctgaaaaccgaagaaaaggcaattattgctatacagtgggagaaat

SEQ ID NO: 4581 - DNA, 201 bp, Bos taurus
agatgtatccaactttgaagtcagatgatggagttgcatgacctatccaagattctactgaccctatgatttcatgagaaaagaagggttctcagcttttgagttcccattctaaagcttattcaaagcaaagaaacagatttgaatgcaattcagggtgataaaatattcttatgtttaactttatgcacaatactgttt

SEQ ID NO: 4582 - DNA, 201 bp, Bos taurus
catgggggaagtctgctctccccatgccagatatggtgcacagcccaggcactacagtctctgagaggagttgtgttcaaggatacaaactagccagtcacactgtttccagtatttgggctccattctaagcaccttcattcctaggtctcttatcgaaggccttggccagagatattcttcaggtacttctgctgatgc

SEQ ID NO: 4583 - DNA, 201 bp, Bos taurus
tattacaccggcgggcccaaggcagagtcttctcttagccaatgacccggaccagtttttgtgaaaccttatataccctaagtatccatgcctaaatccacttccccaaattccctgaaactagtcagaaaaaggaaaagaaagatacaaagttaaaccgtaattcatatgccttaagcctaggtagttaacactggacaa

SEQ ID NO: 4584 - DNA, 201 bp, Bos taurus
agaagtaggttggccacagagaacaaacaatttttgacaatgaagctactgggatttaaacagacaggtgaaattagagatattttgactatgtaagaacttattacaggacttctctggtgggccagtggctaagactcacactccaaatgcgaggggccggggtttgaccccttgccaaggaactagatcctacacagt

SEQ ID NO: 4585 - DNA, 201 bp, Bos taurus
caagtctgattttttaatattagtgatggttctgatctccagtgtcctgagcttgcttggagtggggcttagttttcaggccagaaattgaggctggattcagaagtggttgaaagcaccagatcctagccagtataccagtgatcagtgacagggccctggcccctttgctttgcagaaaagaatttccagaaaaacaga

SEQ ID NO: 4586 - DNA, 201 bp, Bos taurus
catggcccatccagcgaagcacagccatggttcctgaccttggacatggagtatctctccacagctgctctagcgaagtgcaggagcctctcctgaccttggacattgggtatctcctcaaggccgctagagagtgaaaaaattggcttaatgctcaacattcagaaaacaaagattatggcatctggtcccatcacttca

SEQ ID NO: 4587 - DNA, 201 bp, Bos taurus
caactaagaaatgtgcatcagactctgaatctgtgactcagttatcttaatcattaaccacttggttctgtactgggcccttcagggttccgctggattccattatgtttgacaggtaaagacatgctattttcagaacaaggaaaaataagtatagggccattgaatcctagaatgacccttgaggcccaggtaaacaat

SEQ ID NO: 4588 - DNA, 201 bp, Bos taurus
ctgaaatttatttatcaaaggtcctatggaatatgtaaagaaatgctcaatttgtggaaaacaattgtaatgcttgctaagaatgcccaaatattcagttgcaaatataaagataagtgactagagattgtagaatcaaccacaagtaagaagtttagtttcagaatgctgtagaagctccaacaattaaatagagggtgt

SEQ ID NO: 4589 - DNA, 201 bp, Bos taurus
gctcctgtggcctgtggcagtcaagagtacacagcagccagcagcctccttagcatcctcttggatgacgttcagtgagtttcagcccatgaatagcttttcctggccacgtagaggatgcatttccagcaaatgtggccaaccagcaccatgctggcttttgtggcacctagtgagtcaaacttgtgctctcgccaacac

SEQ ID NO: 4590 - DNA, 201 bp, Bos taurus
cacagaatccctctttgaatgtatgtttggcaggccccatgaattcacgtttgagattatgccctctactgggttttagtgaatcctctcataatcacaagcatattcaatacttaaaagggcctctttcttccctagaaattttgagacttaaagccataaggatccagaaggacttgtccctatggaaagggttatttc

SEQ ID NO: 4591 - DNA, 201 bp, Bos taurus
aatccatgtacaatgtaactttttaatattgatataaggcctacctaaaattttatacaacttgcatcgtggatttttcaggcaaagaggagactttagcagtgaccaggcctgatgaggaataaagtggatttggaaagacagagtcaagccaagacaagatgcaggcctcctgcatctcccttttctgagcaggcaaaa

SEQ ID NO: 4592 - DNA, 201 bp, Bos taurus
gaggatttgctgataagattagggtgtgttcaggacctgtatcctttaatttggcctcaggtggtggtctcttgaaaagcttctcttgttccttaaatctggaatgaagaatgctaacatcttcaatttgttggtggttttagttttgtaaaaggctcaaagattgttatttgtatcccttgaggcagaaccaggacactg

SEQ ID NO: 4593 - DNA, 201 bp, Bos taurus
gtgtattatgggagtgggtctggtaagatctttctattgttagctctaatcctgccattttaaaatgtaaattgtggaagtggtgctagtaagacctttacaaccttgagatattcttttgattaactgtaataaccaactgcagtgtaatataattatataatggttactgtaataaccatgaaaagtatgaaaatacaa

SEQ ID NO: 4594 - DNA, 201 bp, Bos taurus
agaaagagcaattgaaagggtatcactcagaaatggatgtcatacttaataagacttttgttccttgcttttatgaaaggatgagtatgttgtttctattgggatatccatgttgtgttaaaggggggaatttgggtgtttgtttgtttgttttatattgctgtttggaagtttaagtaagggaagaaaggcatgtgagtg

SEQ ID NO: 4595 - DNA, 201 bp, Bos taurus
ctaaactattttttagtgacttgaacctcaagtgattttagtaaatcaagactgcttccgtcaggctagtctgtcataagagcaaaataggcataaaccactgcatttttttaagggcttttgttttcctgagtgagatactgctaaatttcaaggttgcttttcagttaaatgtgacatatagaatataaccttgcatcc

SEQ ID NO: 4596 - DNA, 201 bp, Bos taurus
tccaggatcataaataagcatagggaaaagtgaacttaggattgagatagcatgagtaaatatcttgtccaatcatgtccacaaaataatattacattaaaaaatgtattgatggaaacacacagatacacacgaagcagaatgatggtcaagctcttctcaggggaataatgattagaataataatgttttggttcctgg

SEQ ID NO: 4597 - DNA, 201 bp, Bos taurus
aatgctttaacagcatcatcttttaggatttagttggaattctatcacctccactagctttgttcatagtaatgcttcctaagcaccacctgatatcacacgctaggatgcctggctctatttgaataaccacatcatcatggttatctgggtcattaagacctcttttgtactgatatgttgagagtaaacaatatgatg

SEQ ID NO: 4598 - DNA, 201 bp, Bos taurus
ttcttgcctgggaaatcccatggacagaggatactggtgggctacagtccatagggtcataaagaaatggacacagctaaagcgacagcatacacgtacagatggcccacacacaggaaaaaaaaaagaagccaaagctgcctgatggaggaccaagatgttgggtttaacagacaaaaacatcaaaggaaccattataaa

SEQ ID NO: 4599 - DNA, 201 bp, Bos taurus
acagtcaaaggcttttgcatagtcaataaattccaaccaaacaaattaaaacagttaaataaaagaaaatgacaagtaggccaaattataaattagatatagaaataaagtgaaagtcagtcatgtctgactctttgcaaccccatggactatacagtccaaggaactctccaggccagaaaattgaagtggatagccatt

SEQ ID NO: 4600 - DNA, 201 bp, Bos taurus
aatggatatgttatgaatttccagaaaatactgttgaatgaaagagtcacagaaaagagggcatggtaggagtctgttctctttagaagaaatactaacaaatagcaattctatatgtgtgcctgatggatgggagtacttatgcacattcatatatacatattacagtactaccatatggatagcagtaaaagatgaaag

SEQ ID NO: 4601 - DNA, 201 bp, Bos taurus
actaaaaactaaatgtttaagatactggccctaaaatacctatgttcatttatttacttatccattcaactaagcattttatacacagacgtttttgtgcgtgtgaaaattaccataaattaaaatgctgaatataaagattcaaaagaacacattttccaataaaggttcaaagacaaagctacaaatcaataaccagaa

SEQ ID NO: 4602 - DNA, 201 bp, Bos taurus
aaattgccaactgacctccatttttggtgctcagggtcctttcttaagatcatgtcgttgttgacagaattcattccttgctgctataaaactgaggccccgtttttttctttttggctcttattcggagactgatctgatcctgtttgttgctccccacagcagcttgccaggaggccccctccttagcccctcacactt

SEQ ID NO: 4603 - DNA, 201 bp, Bos taurus
aggaacatattactcttttgattcttctttacagtactttgaatcattatcttgtgtgcatttttcctaaattactaccttatgttaagcaaagacttatgcattatgctactttgtttttctagtacttcccacaggatcctaaacctttcagatgatcagtaattttggtgactattggtaagttaagaatagcaacat

SEQ ID NO: 4604 - DNA, 201 bp, Bos taurus
aatgtaaatgcaagatttttctcatgtattgataacaatgctccttcacctctgttagggaactcaggcatttattggccaaattttccagataaaaacacagcttttcatcttatggatctcagtagtattgtctctcccttttcatgttaatgtaacagaattaccccagatgccaggtccatgggccacttacatcag

SEQ ID NO: 4605 - DNA, 201 bp, Bos taurus
agtgaaaaatgaatgtcttgaggaaatatgataagttagagatgaggtagaggaataagagatgaagaaattatagatgtagtcaatttctctttgatcttagccgtcagtgggagggagctggaagagaacatgctagccagtgaatcttcttttccattcttttctaaatgtggaagcaaccatccacatttgaatttt

SEQ ID NO: 4606 - DNA, 201 bp, Bos taurus
aatcatttgtataataacataatgtggtcttaatgatgctgcttgagttcaacccactgtatgtcagtgtgtgctctgaatcacatttcaacatgtcatttcatgcatcagggctaacaggaggctcgaggaaacaaaatatcaggaattttcatgagtccatctaaatccaaatggctggataataaattatgaattttt

SEQ ID NO: 4607 - DNA, 201 bp, Bos taurus
acaccatcgaatgcattaaaattgtttaatagacttatatgtcatatatacatatatcactttgattttcaggtggtgagagtgctgttttgagcaaggaggtgaagggaagtcaacgaaaacaggagcattccttttggataagacttttccattccttactttgactaaaaatcaggatcaaaaagacataacaatcaa

SEQ ID NO: 4608 - DNA, 201 bp, Bos taurus
aattctagatttaaatcatacagaagcttgctcttaacttaagaaaacttctcagtttaatgaatgttatattaataaatagagactccagtggtttaaaaccctactttagagatactgtcctcaataaaaataatctatccaaataatagatagataggtagagttatagagatgagcatttttactgacctcaataaa

SEQ ID NO: 4609 - DNA, 201 bp, Bos taurus
gtaagagttccaatagtgtagcttatggctgttctaatcttgagctctttttagatttttacatgattagtcagaaaaccagattctttcacctcttcccattgttaattgtggattgatatttgagaaaatgataaagtaatgataaagctgaaaatataatattttgaaattaaagcattcttcttttagtaacatgaa

SEQ ID NO: 4610 - DNA, 201 bp, Bos taurus
actctaagaggaatagaagataacatatctggttataaaataccaaaataaaatgtatttttgttcagggtttgcctacaaaagagaaaatcaaagtgagcaaaattttaaaatctgaattccatgatgtccttgattttataagattttatttcaatgaaatgaaaacaaagtatctcctttaaattttttcacttgata

SEQ ID NO: 4611 - DNA, 201 bp, Bos taurus
tggatataatattccctgagttttggctgtttttataacctgataaatctgtttttataaccatgataattgaaggacagtttggttggaagtaaaatccatggcttacatatttctatccttaagcagtttttaatgatattgtatggttgtctttattttttctgttattgtcaaaaaatcagaggtcaagtgattttt

SEQ ID NO: 4612 - DNA, 201 bp, Bos taurus
actaatatgtgatttaagtagagacaacagaaaattcctttaccttcatatacttccataaaagtaaagtatatttctttattaccttaaatgaatgtaaatgttggatgcttctaaaatctattctttcttgtgatgtctatattttaaactcttgagataaagtgagcaaattgggaaaattaaatcccctaaacactt

SEQ ID NO: 4613 - DNA, 201 bp, Bos taurus
ccttcaggcctcttgtttttctttcttccaaaactaatctgagttttctgtatttattctttctaccatcttgcatccccattgagcctttaaccacttactgttgcttcaggcctaattcccactctgttgggaccatcttcctcaagaatatgctttctagatgcttttcaatttttatgtaataggatccccttgcag

SEQ ID NO: 4614 - DNA, 201 bp, Bos taurus
tgctggccattacaggtactgtaactgaaccatttcaaaacttgctacacagtgtgagcaagaatattatctaagaaaccagactactggacttctatcaattaaccctattagtcaacgctctgatgatgaagatcttaatctcacattgcatcactttttagtctccaggggctaaagaataaaaagatacagattcag

SEQ ID NO: 4615 - DNA, 201 bp, Bos taurus
ctgtatctttgtggtatttgttactacatgacatctgtagacttctaccagaggatagaaatcttgtctatggttcactgctgaaggtcttaactttgaataccatcaggcacataaaaggtgctcaataaatgtgtgctgaaagactccctctcaactttgagatgatttaaggtaacaagtggaaagtacaaagtttta

SEQ ID NO: 4616 - DNA, 201 bp, Bos taurus
gagtctcccagagaacaggagcctgtctggaatgtactgtcttctgcctctggtgctgtactctccctaatgaaaggaggggcctggagaggaggcagcaggcttctctgggtttctcctcacaccctggactcctccagtatcaagtcctgtaatgccttggcctctgtacaatgtgccaatggaggggcaggcagcaat

SEQ ID NO: 4617 - DNA, 201 bp, Bos taurus
cttgaagctaacagagtagacaaagagttgatatgctgcagtggcgttggggaaggggtagtagtcaatactgcgcctagtaaatatcaggcccattacactcctcacagacatcccttggacatcagtattataattctgttttatagattgtctcatcatggccgaaatgcatagtgtattcgagttagtattacatgg

SEQ ID NO: 4618 - DNA, 201 bp, Bos taurus
agaccacaaaaggacacctgtttttaggatgaaagctgaaaccagaaagcagagtatcaccttattcaacctcaactgagagcacatacatcaaggaattcaaattcagagggttacaaataaattttatttagaaggcaagtttgcaagtggagaatctgaataatgaggactcatggatgttaagatgttagtgggtgc

SEQ ID NO: 4619 - DNA, 201 bp, Bos taurus
ttctctctcctccccccagggacagtaatgtctagtcatttcctacctgggaagaaaagaaccttcaggcaagcttctcacctgtcacttaggtggacgacttgtttgaatcactgtttctactttgatgtgaggtggtagaaggagaaaatccctcctggatcaagaacaagaaggggaaataaattccagaaacaacca

SEQ ID NO: 4620 - DNA, 201 bp, Bos taurus
cctgcctcttgggtccctggaaactagaatgggaaggaaagagacatggtaatcggatcttccagaaagcaggtggaaaatggccccaagctttggaaattatactcttacaagagaggaaataccatgtacacatatgtgtcctaggtaaacaggaaattctctctcaggtggcagagggtggggccagctttggtctct

SEQ ID NO: 4621 - DNA, 201 bp, Bos taurus
aggcagtaccatagggcttggtgcagttagcaaaaggacgcatcatcatccattcccttaggtttccctaagggagaactgccctgggctctgtgagggtgggggcatgacctggcctgagaggccagaatggcttctctgagggaagcctgtcccgccaagctgggaaggataagagggatctgatcaggcaaagtgggt

SEQ ID NO: 4622 - DNA, 201 bp, Bos taurus
ggaagactccatgatataaatgaaaaattttctgaagcccagctccaccatttgctagttgtgtaaccttatatgagttagttaagcttgctaaaccattctctatattcataagatggagctagtaatgcgtatctccaagttacgggaagaagacgaaataatgaatgtcaagcaccaaacgcaaactgggtgttcaag

SEQ ID NO: 4623 - DNA, 201 bp, Bos taurus
tcaaaattggggcaggactagggtgaggcagtcacatgctccgagtgcaaattttaaggaggcactcacttttagggccctgcaagtatggaccctgtgcacacatgaccctgacagtgagtgcctcctttatattttgcatcctaggggcccaccttcctcaccctactcactgctactctacagctgggacaccgctgc

SEQ ID NO: 4624 - DNA, 201 bp, Bos taurus
ggcatatcatttttctaagaaatgatttagaagaaagggaaagtggattgagtgtaaaatagctctgttcaaaaggcctctgttatgtttgtttgtttttatttaaaatgtattcatttatttttgactgtggtgggtctttgttgctcacgtgggccgtctgtagtcgtgacgagcaggggctactcggtgtttcttctc

SEQ ID NO: 4625 - DNA, 201 bp, Bos taurus
aaaaagatctaatatttgtaatctccaaaggctgaggaccctgtatttaggcatgtctgtaactgtatagaagtgtaccagttgggaagatctgtacttactgtaaaaaaccaaatgccaatagcaatggaaagaaatttagtaaactctttccttatgtttgtgtttagctttctatttcaatcgttatctagaaacttc

SEQ ID NO: 4626 - DNA, 201 bp, Bos taurus
tattccaatattcaatagaaaattagaatcttttcaacttatggtgctgaaactgttgtatatccataagcaaaaaatgaagcttcattctcatgtcatagcattaaaacaaaataatgacataaaaaaatcaatggggcttccctggtgactcagtggtaaaaaatcacgccagtgcaagagacgtgggttcagtccccg

SEQ ID NO: 4627 - DNA, 201 bp, Bos taurus
ggtgatgcctcggaacctttcagtagctgtgaatatgatacttacaaaaacccggaaagagattcattcaacattgtgggtgactggccttccctcgattcgttagctcagagagagcacagatcaagaataccaaaggctggcttaaatgaacccagcctagaatttggaaccaacagcagtatgaatgaaatatcctta

SEQ ID NO: 4628 - DNA, 201 bp, Bos taurus
cctgatctgggaagatcccacatgctgcagagcaactaagcccgtgcgccacaaccattgagtccatgtgccccaacgactgaagcccttgctctggggtgcctgtgctccacaagagaagccaccgcagtgagaagccggcacaccaaaactgcagactagcccctgctcaccaaagctagggaaaagcccacgcagcaa

SEQ ID NO: 4629 - DNA, 201 bp, Bos taurus
aaatagttcagaaaaatctcttatttttctctcctcccctcttccacccactttaaacatgaaaatttccactctggcctcttttctgaccagaactgtggaaaagtgaggaacacaaaggacagcaaattccgctatagtcagggatatttctcctgatttgaaatgataatggagcgatgggggcccttacgcaatctg

SEQ ID NO: 4630 - DNA, 201 bp, Bos taurus
gccacatgtctccagttggttgagctcctcattcttgaagttctgtcagacagtcacctctgtgatgccctttcatctaccacactccaccatccagcgtaagggcctctttcccctgaggtccttggccctttatacagacttctcttacaatgtgcagcaacatggcggtaactacgtttaggtgtatctgcctttgcc

SEQ ID NO: 4631 - DNA, 201 bp, Bos taurus
caggtatttttgtataacacgacaaatgttagatatattgtttactgtcattattactttgaaaccggtagctattagactccccactaaatctgactatgtaatgcattaagcagcacatacaccatgacatcacatgtgtatttaactttttgacaattatatttcagtacagttggtctcttttgtaaccctttgtgt

SEQ ID NO: 4632 - DNA, 201 bp, Bos taurus
cttctcagcctctttgaatgctttgtggttcctctgtctcactttggttcccatcacgtcagccttgaaggtggagtggcctgtcagcaccacatccttctgagtggagccacagaatcaactttatctgctcaacttcagactctgctgtgtgaatccagcctcagggacttaaggttgagaggatgcagggccgtctct

SEQ ID NO: 4633 - DNA, 201 bp, Bos taurus
ctctgttgggacttgatgactcttacatccttttactacaacaaagatttaacatggcatatggttctctacttggcccggagagctaggtaagaggaaggaaaacttttctggctagatcaggaaaagagtagtggttggaatagatatggagatgagagcaggcagcatcattgtcacaatgacatttaaatagtctgg

SEQ ID NO: 4634 - DNA, 201 bp, Bos taurus
gattatctaggctagccttttctcattctgaagagtgatgaagaattggcttccagaaagcgcaaaaaatgaaacagttttacttcttagacacaaattcgtattgatgataataattaagtaaatactcatgcatgttgtattttttttaattaagcaaacctttcattttcttattataaagatatggaaatacaacaa

SEQ ID NO: 4635 - DNA, 201 bp, Bos taurus
gaacaaacctgttgttctggcttaagatatgcaaacagatgggtctccacaaattttagtatctttgagaggtgatactgactgcatgggtctttggcaacctgatttaaacaaatactcaccttggtcatattaatgtttgaatcaggctgtggtaagcacagtgttcctggatttgaacctggaaggaattatgaaaaa

SEQ ID NO: 4636 - DNA, 201 bp, Bos taurus
gcaaagagggaggccaggggtgtgagtccccataatgataaccatcatattaatatattaaaacccacctgtgtacaaagtgcaaggtgtatccttcttgatctttacagttgccctgtgatgcagttattgctatgccttagctataatctcaggagacaagggtgctaagaggtgggttaccagctttccaataaaaaa

SEQ ID NO: 4637 - DNA, 201 bp, Bos taurus
gagaaatggatactcttcaaaaattgcactgacattgactaactaaactcctaccaggaatttgatcaacaagagactgaagccatagcaggctgggaaatgtacccaacaattctgtccttgatgcctcctaattatacagtgaagaaacagaaggatgtcacaagagcatgcacttcaataaacatttgcttgaaatgg

SEQ ID NO: 4638 - DNA, 201 bp, Bos taurus
ctctcagcccccgtcctctctccccagggagggggagcgactctgaatccgacctgccccatcggaagctgcctgatgtgaagaaggatgacatgtctgcaaggcggacgtcccacggtgagccgaaatcagcagtgccttttaaccagtacctccccaacaagagcaaccagacagcctacgtccccgcacctctgagaa

SEQ ID NO: 4639 - DNA, 201 bp, Bos taurus
aaaatataagaccacaaggccaagtttcccaccagtttatatacaggactgctatagaatcatgtcagctaccacatggccattgtaccccatggtaccatcaccgccatggctaaaccctagagtcgatccctaagaagcagcaaacacattactgaggccagctctgcccacacaggctggcaaccaaagcccctgcac

SEQ ID NO: 4640 - DNA, 201 bp, Bos taurus
acttaaattaggtggagtggctgtttgttgttgcttggtcgcgaagtcccactctgcaacccagtggactgtagctaaatttagtctaaactgcctttaagtgttggtaaaaggaggtgaaatagtgtaatttgtaattcattattctctgttgaaatttatgtgctcttctctcatccctctgtgataagaatcgcctgt

SEQ ID NO: 4641 - DNA, 201 bp, Bos taurus
gcctcggttctttgggtgtgggtaccctattaggcgtggtctcagcattcctcatctacactaacacggaagcactcttagggcgatccatccagccagagcaagtacaacggcttactgagctcctggagaacgatccgtcagtaaggtcagcttattccagtgatgctgttaaagtttagagaaatagaaatgcttgtt

SEQ ID NO: 4642 - DNA, 201 bp, Bos taurus
gttaaatggaacctctttcttcctgctcctaagccattctattctaactccagcttgcctcctaggcttttagcagctttatatcatctaattgaagcagtgatgatctgttgcctacatagcccctcaaagtttgcaatgcttgttgctttgaacctgtgactagatctggcatcttttggcttctcctcagttgcgctt

SEQ ID NO: 4643 - DNA, 201 bp, Bos taurus
cttctgtgtttttactcaaggtggttcattgcaattatgatatagttcttgaggctagctattgggtgactctcagggccttcataaattaaactgtgaaactgacaaatcttatatgtcaactatgattcttcttccaggttggaagagtaatccagggccaaaattaaaacagaggtagccataatttttgaaaggtaa

SEQ ID NO: 4644 - DNA, 201 bp, Bos taurus
ttctcaaagccaaattcctaacatttaagtagtcttctagtacataatgactaaaacagaatatatgtttcttagccaaggaagggaagaagacagattacagtgttcaaagcatttgaacaaagcttaggaattaatttctggttaatcatctttaatacaccagtttaccatttgtcatcacttgtatagacatttaaa

SEQ ID NO: 4645 - DNA, 201 bp, Bos taurus
aggattcatttcagttcagtcgctcagtcatgtccaacagaactgaactgaactgaactgtccaactgaactgaattgaactgaactgcccaactctttgtggccccatggactggagcacaccaggcttccacttccctgtccatcaccaactcctggagtttgctcaaactcatgtccatcaagttggtgatgccatcc

SEQ ID NO: 4646 - DNA, 201 bp, Bos taurus
ttacagagtagatctggaaattgcaattttaataaacagaaacattgtgttctgtttatacaagccatctcctggcaaatgttcaaactcctactaaaatttgtggcagaagagaatcaagcatgtagctgaaattgtatttaaaaaaatctatttttctgtattttctgatgctttgacatctggggccttgctgacact

SEQ ID NO: 4647 - DNA, 201 bp, Bos taurus
atttaatcttcttcttaacaataattatctgtcaatatcttacacttgtatttgtttttacgtccattaactatatctcactctatattataaatgtcttgtgagaattcttacttcttttttctattctagcaacaaagaaagagtctagcacattaaaggcaatcaagatttaatcactttcggattgcagaatatcta

SEQ ID NO: 4648 - DNA, 201 bp, Bos taurus
ccaacattcactatagccaaaaggcacattcaatttttatacagtgagactctgaatgaaagaaaatgcaagagcaggaaattagtatttttgagaactaactctgctattaaattttttatgaatggttcttctaaactagagtttctagcaaaatagagaattcattatgttataaagattatcagtgtatatgccttg

SEQ ID NO: 4649 - DNA, 201 bp, Bos taurus
gtacttcactcttctccatttcatgccaattacctccccaggtagatttactaataaagaaactggagatgcaaccaaatactaactccagcacaaaccattgggacttcccaaagtgccttttatcctgaccccactaccagtctcggctgtgtgaagcgggttcactttcaagcccatttaaatcaatttgtaaaactg

SEQ ID NO: 4650 - DNA, 201 bp, Bos taurus
taaggttgcacttgggttctcaccaaataccatcatcagtagaatcgaaaaatgctgattctgcacaatatcctttatatcaatgtttgcacgaatcttcctaacaagttttagttgaacctgtttttctaagtaaatctcacacagagtccaatatacagaacagacgaaaatagagctgacttgttaaaagaaaaagga

SEQ ID NO: 4651 - DNA, 201 bp, Bos taurus
caaaaactaatgagaggatgaggttgaaggcaagctttcctagtactgccatcttctagaatagaattcttagccatttaataattataaatttaaatctgccattctaggtttttgtgaaaatatattagtcaaagtatgaaggtaaactctgtcttatttaataatttgctaattagatacacaactttaaatattcat

SEQ ID NO: 4652 - DNA, 201 bp, Bos taurus
tcttcctgccagaaatgctttaggtaaaacttgcctgaaacaatgaaaaatgtattagacagtgtaagaagccttttttggtcttatggtgtataatgagatattatgtgattatctggggcatttttaaacatgcttgcctgaacaacaggacactagtaatacaacagaatcttatgtattctgatggtttggggtcag

SEQ ID NO: 4653 - DNA, 201 bp, Bos taurus
aaatgttttgttaacatcggtatactcaacatattctctttaagaaatgacaatcccacacaataaaattagaacaaagagcctatttttattaagcacagattacttggaacatattattgatgaaattccatggaggtaatatgaaaaaaatatcaatttctaccattttctacataatgaagtacagcagagttagcc

SEQ ID NO: 4654 - DNA, 201 bp, Bos taurus
ggcaagaaaaagcagctaaggctgtggtccccgccccggaaggcgaaggctgcaaactcaacctcacctgcctggctgctgggcccatccctccgcaaactataatgaatgcaaatgaggatgactatcgcgcaattctaacaagtgtctgaaggcccccagggaggcaccctcccggaggctcagttccgaagaggaaaa

SEQ ID NO: 4655 - DNA, 201 bp, Bos taurus
agaaccctgagaaaaagttgaaatctgggaatgtggcattactaatagaggcatgtggacattgcctactttggtcagaacagaaggattcctaccacttgagtctctatggaatacagtttaaaaattgggatccttgacagtaaggtaatcttcaagttacatatgctatgtgctgacttcatgtttcttatatatttt

SEQ ID NO: 4656 - DNA, 201 bp, Bos taurus
taaacctattgttgtattttaatccttctcaaattttaattaagttatggttttaatgcaaagtaattatgcttactgacagacctatgattgaggcaaagcacaaagcaattagctgaatagaaacaaaaaatatagctaatatcattgacataatggtcctgggcagaatcaacattatttttgaaatgtgaacccttc

SEQ ID NO: 4657 - DNA, 201 bp, Bos taurus
agaaactctgttttggcatggtgcctatcttcatgtcatgtcatgcacacagcttggtttagtcctcagagattatccagtgtttgaattttgatgaagttagggatgatgggctgaattttgtaacttttaccttaaaatgtattttattcatccatatcttatatctgccagcaaagcccttttgtgtaatccttggtg

SEQ ID NO: 4658 - DNA, 201 bp, Bos taurus
ggggtcacaaagagtcagacacgacttagcaactgaacaacaacaacaaagtactgaggcttggcttggctttttaaaaacagtaggtagtgtgaagctgctcttcagacaaacaattccagttttaaaatcttcagttcagttcagtcgctcagtcatgtccaactctttgcaaccccatgaatcgcagcacgccaggcc

SEQ ID NO: 4659 - DNA, 201 bp, Bos taurus
catctcttcctaagtaaaataaattgaacttttcagggattctcagctaagcagtcaaagagatctcaagaatggccttgagtatcattgaaatagacacattgacctttcaatgactctaggcaagatctttggtcctggcccattgccataaataatttggtgaaggaaaggaaatgcttggttttaaactattcacaa

SEQ ID NO: 4660 - DNA, 201 bp, Bos taurus
cactttaaaagggagagaatacaaatgagtagaacagaaacaacaaaacactctcaacaactacagttatgacaatctgaaggttttcagaaagaattgttactaaggaaatgacaggaacaaatgtacactcataagtcacctgcacagagtaagaaatcagtttaaagaacacagatgtctgattaaaacttaatctaa

SEQ ID NO: 4661 - DNA, 201 bp, Bos taurus
caacatgtgctaagtgtttggactgaagtacagagaaggctgatagttaggaaagaaaaaaaaaacaaaacatatatgagttttaccaggatactattaatgatagaaattgtgacaaaaattaaaaatacataaaagtatttggcagatatttattataatacatggaacacagggcctagatcagtctaagggaaaata

SEQ ID NO: 4662 - DNA, 201 bp, Bos taurus
tattggaaaagtgaaaacaagtatgttttcatcacaaggtataggagaggaatatataatgggtatctttgccccccatttttggagtaaatatacacaataaaatttactatcttagcagtttttaagtgtacagttgagcagtattaagtacatttttatactgttgtgcagtcatcacaccactatctccagaacgcc

SEQ ID NO: 4663 - DNA, 201 bp, Bos taurus
cgtgctgcgattcatgggtcgcaaagagttggacacgactgagtgactgatctgatctgatttgatctgatttatactgtgctcacaactgtgactacgtcctggcccccagtcacctatctgctctgatacatacccctacattttactcacctgttgagttttttcactccattgctttacctttactcctgctgttac

SEQ ID NO: 4664 - DNA, 201 bp, Bos taurus
tatggttggcaggaaaatactggtaacaagaataacagtatttctctcccatcaataagcttctgaagcatatcatctccagaaaaaccttttctgcagaacctggaaaaatgtcattccccattctcaatggaaaaatcccacttgctactgaaactatagagaaatgcattatttaagaatgctaaatatttgcacaat

SEQ ID NO: 4665 - DNA, 201 bp, Bos taurus
gcttgcatcattcattaggggatacgcatgtggacaggaagatgcaaaatgttaagataaatcaagggaggcaaatgagagagctagacagaacactttcttatataaactgaactaaattgaaatgtcgagagaaggcaaaagaaggggaggcagagagaaatttgggaccagggtgagtttagagggtatagttaactc

SEQ ID NO: 4666 - DNA, 201 bp, Bos taurus
ctgaattgaactgaactggacctctcctccttgtcatcctagatccagcttttctttgtcagtgacttatcagtcacttgctctggcccaaagtctctgcgtgtttttatcctccagctcatctgttccatcctaagtgtccagagttctatttcttcagggtacctactctctgcacagaaagagacatggtctctcagt

SEQ ID NO: 4667 - DNA, 201 bp, Bos taurus
aatttttactaactttgtgatttcttccttggttcctgctttctttggtagagaacattattacattattctcaaatggacctgaagaaagctaaatcttataactattcacaagctatgtcaatactatcttttgaatattaaatgtagttaaattgtatctatctgaatttcccttaaatggagcttcttgcacttgag

SEQ ID NO: 4668 - DNA, 201 bp, Bos taurus
tttttcagctttaagaataaactgagagtgggaactcactatgaatataggtgagttgttttttttttttagttcccaataacaaaggtacatgcatatacttgcatcacttacctgtaggtttgctagcttaattcagttttgagtcaaagcatcagacagaggtgactcatttaggtgtgtgatcccttcaaaaaaaag

SEQ ID NO: 4669 - DNA, 201 bp, Bos taurus
aaatgtttttattcatgcaaaaagtttactgtgctttgaaatacatctctgtgaccttattggtatggctggacagagaaaaactgaaaaatacttaggtatggggtgcaatttaatttccttaaaaaactgcatctctccactctatagcaagtcctcctttagcaaagtttaacctcaacttcattgtcacaaagacag

SEQ ID NO: 4670 - DNA, 201 bp, Bos taurus
acaaccttgcctttgttcccccccatgaatataattaaaagagacaggcttgcaaagacctactgatgggtcacactgggccctgccaaagtatgggatcgggatatgaagcaaatcccattaattatagcaatcaatgattcctccagagagtaaggcttacaattagaggttttcaaaaactttcgaggccactggaga

SEQ ID NO: 4671 - DNA, 201 bp, Bos taurus
aaatgagtctgtcaaggaaacatttttccgaaaactgtgtctgttaacagtgcttgcatacttacttctacaatttagaatctattgttttttctctacttggtttttattttatggtaatgtaggctttttccagttaaaataataaatacctttgttatactcaaaacattctttatacattaaattggtacaaataac

SEQ ID NO: 4672 - DNA, 201 bp, Bos taurus
ggtggaatgttgccccagtggggaataactctgccctacttcggtactatacccacttcctgctgagttagttcccaaagagaaagcagtgaggttggggaaaaaacccacagacagcaagtgtttaatgcagagactattcctccactgcagctgaattcacagtaagccaaccagaagcaccaaaggcacctgcagctg

SEQ ID NO: 4673 - DNA, 201 bp, Bos taurus
ctgggcctagaggcccaaataattgaataagtcttcataattaggaatgaaaccaagtacaaaattatttgagactttgtatttttgtgggtacccatccgcattctctggcctcttggatgcaatggtatatgttaatgattctgagattttacttttttttttttaactttacaatattgtattggttttgccatatat

SEQ ID NO: 4674 - DNA, 201 bp, Bos taurus
ataaaaattaacccatgttgcagaatatatggccattccgagagatgctctccaatgccaaatacatgacccccacagcccaagagccaggctatactcactgtgggcccaccagcacctgggagggggcattatctgtttgattttctcttctaaagggatataagggtaaccctttagctcccttccgagcacagaggg

SEQ ID NO: 4675 - DNA, 201 bp, Bos taurus
gtaacaacaccacacagaggagagcagagttgtcccagccatctgagttgaggccatcctagacaatcagcaaccagctggccctcccaaacatatcaggaaaagcaggcaatatggcagagttgcctacctgacccacagctgatcacagacatgcgcaagctcagtcaggatcagctgagcctggcccagaagagccgc

SEQ ID NO: 4676 - DNA, 201 bp, Bos taurus
tccagtggaacaatacatcagggtggcctgccaagcaggtgcaaagttttggaagacattgcaataaaggtatctctggataaatgggcaagtcaataaacgtatgccctagggccaatttgcatttattattattttaattatttatttaaagtttatttttggctgcactgggtcttcattgctgtacccgggctctcc

SEQ ID NO: 4677 - DNA, 201 bp, Bos taurus
ggaaatgggctgaatgatgtggctgcttttcgaagtctcgggccaagcctgttgcttcacatctttgtgaagcaaagcttcactgaaaggagctgtctgcggatgaccttgttgagtggccactagatggcaacgtacagttcagacagggtgactcagcgaggcgtggatccctggtgggggttagtccacgggctctat

SEQ ID NO: 4678 - DNA, 201 bp, Bos taurus
aactttttttaatgccagggttatacatacgtccttgaaaagatttttcaaggtaagcagacagatgaaagatctcacaattagatgtagggaggccctcggtttctggctgtcctcactgtgccaggtttgtctactgagacgctgagacccagggagggttatagaaatctgcccctggcccttggggaggagctcaac

SEQ ID NO: 4679 - DNA, 201 bp, Bos taurus
ttcaattatacatatgtatttacattttttaaaaatattcttttccagatggttatcatagggtgttgaatatagttccctgtgctatacagtaggacactgttgtttatccatctaaatatactattttgcatctgctaacagcagcctcccgctccactcctcccccaacctcctccctcttggcaaccccagtctgtt

SEQ ID NO: 4680 - DNA, 201 bp, Bos taurus
acaattgtttgaaaaagaataacaattattttatgtccttttttgcctgccagtgacttttgacactgattgtttaatatttgccaaaaagaaaagaggaaaggggttacagattaatgtcctgaatatttggtccttatctattaggaatataccaataaaaagaaatacaatacacactatgaagttgtcagggcttcc

SEQ ID NO: 4681 - DNA, 201 bp, Bos taurus
catgcagatactgactgggttggcactaatggggcccacctgtctgcaaagcactccccatcaattgtcatgaccttcttgaagcaaccttcaaggaaagataaaaatacttggcctaacaccctaacaagcagcactggctccaaagacccctgcctgccagttgaagttagcagagtatttgttgaagtttaacttcta

SEQ ID NO: 4682 - DNA, 201 bp, Bos taurus
cagctcaggaagagggaagggagctaacagggtcttcatgaaacctgagagccacacttcctggccacgcctcaggtcaggcccactcatcctctcgcaggaggtctggaagggtcaagagggagatctgataccctggggggcttccagatcactgcaatgtcacccttttgtcagaacagctaccctcagacttccctg

SEQ ID NO: 4683 - DNA, 201 bp, Bos taurus
gtccccaggtcgctactgcaggcccaggctctgctgagctgcaaagctgtatcacaggcacctaaactctaaaacacaagttattttcttctccatttcttcttctgagtcagagagaatgtaaacacctgccatcgaatcatccccgactggacgaggggccctggataatgccctcatttacttccacatcccatcaac

SEQ ID NO: 4684 - DNA, 201 bp, Bos taurus
atcctcaaagcaagtgctctacaatggatatgcttctgggacaccaggccaaaggggtctcatttttatcatctctgagcattttcataactttatcaatcttcaccaaaagcagggtttacattcagttacccaaaccctataatgaaaagtcattcacacaaacacacacacgagaaatgtggatcaaaggagacaaat

SEQ ID NO: 4685 - DNA, 201 bp, Bos taurus
ctttcttccctttctttctttcatcagtatttattaacttttctacttctgaaataacttagaaagtcatttaaaataggttgatttgtgttcatccttacgtaaaatagaaaatttgctaattaatatgaaacataaggggaagattttagagcattttatttcaggcagttaagtttatattttttaaagacactatgg

SEQ ID NO: 4686 - DNA, 201 bp, Bos taurus
aggttctggcctaatgggatcacctgaggaacaacttcccaagactcaatcactttgatagcaagttataaaaaattctaaagggaaataactcctggaccctgatttctgaacactggccggctaacaaactccagctcactcaccatgaaagggaaggaagagtcccagcataaacactgccctggcaagagcttcagt

SEQ ID NO: 4687 - DNA, 201 bp, Bos taurus
aggaaaatatttaaaagaatgtattcatattttctagaaatcaatttctttgcacttgcctaggatggctcttggctggcctgcaaggaaatatggaaacggaaactgtttgcactgaatgcttggcttccaatgacttactatgctttgggagttagtagaggaaaatagcaaattcttggccaggtactaagaataaaa

SEQ ID NO: 4688 - DNA, 201 bp, Bos taurus
tgaagcaggtgaagtttgctctcaggattttgcactttttattttaaacaatatcatactactccccttgtaggtcaccattagtcactgatagtccttgtgacacaatgaccatcatgtcccacttttagacaactctcttctttaaatgtttctaagaagacttgctgaattttaagtcaacatatatataacatctat

SEQ ID NO: 4689 - DNA, 201 bp, Bos taurus
tggaagggtggcctgttctaatcaagttggcatcttcaggcttgcagttgacagacatgagcggcgagcttcgagctgcccgcacctccgtttctgccccgtcagcagggccatttgtcagtggagctcacgtggtgggttgctggtagagtgaggcaactgcagcggtccccatgtgcccgcaggctcgctgtcttcctg

SEQ ID NO: 4690 - DNA, 201 bp, Bos taurus
aacaatggcacatgtgttcaatttggtgggaatccggtgagccataaatcagaaaaaagcctgggagggcttagtggggcctccttcctgggctgtgtttgtaccaccccagagctggagccacagccctgggtgagccttgccctggcacgcaggactcctggggcctggcacgctgcttgtctgctggcggttgtgcta

SEQ ID NO: 4691 - DNA, 201 bp, Bos taurus
gatgtgaaggcctaacataaaccaatggctgtgagacagccatcagcacagaggattcaaaggctgacgcttccttggaaatttccaaatgtgagacaaccgaggcccactttcagtaatgaaaggggagaactgttctctcaagccaattatagaacacatgataatggtaaaaatgttccttttcaccttgttaaactg

SEQ ID NO: 4692 - DNA, 201 bp, Bos taurus
gggaaccaaggagaacctagcgaaagcttcaggaagaagggggcagaggggcaacaacgatgacgatgaattctgcaccaagcacatcagcttagaagcagaagccttctgagctcacctttcaccatataggattaaaagaacacatgctgtggctcagaaggtaaagactctgcctgcaatgcaggagacctgggttca

SEQ ID NO: 4693 - DNA, 201 bp, Bos taurus
aggccggaagcttggagaagttggtctggggcccaggctagggagaggggtgggatggaggatgcagctctgtgatttctcgggaaagcgtggagaaagaggggggaggaggctggcctccccgggaaattaacaaaacctacactttgcaaagtctcccccatccccctcctccgaattcttccctgccgcgcgcccgcc

SEQ ID NO: 4694 - DNA, 201 bp, Bos taurus
gatcattacaattcaacatgaaaatggcttcagcaaagccatggcctgaaaacaaatggctaactttacctagagaaactaaaggaacttactatatcttaacgtttccacagtaacaaatggcccactgaaaatcacagaagttccttgtaagtgatagataattcatgattttcacaaatgatttttctgtccctctaa

SEQ ID NO: 4695 - DNA, 201 bp, Bos taurus
ggagtctatcaggggctaagagcgtgaatttacaatgccctatggcccagaagacacgtttcatgtatcttagcaacaactctatgaaatacacgaagtcaagttttatgtacccattttacaagtacaaagagagcataacaggtgcttagcagcagggctagaattggtgaataggcttcacaattctgtctccagcag

SEQ ID NO: 4696 - DNA, 201 bp, Bos taurus
ggtatcattgtaaagatctttttagatttggttagcatttacagtcaggagactttgagtaaagcagattactgtcagtaatattggtgggccttatccaattagttgaggaccttaggagcaaagattgaagtttccaaagaagaagcaactttgccttagactgcaagatagaaaccttgcttaagtttcccacctgtt

SEQ ID NO: 4697 - DNA, 201 bp, Bos taurus
aggccacctgacccatgaaaggaaacaaaacaaaggttcatggtcattgtctaccgaaatgtcgtgttttggtccaaccagaccttggaaacacagattgggatatgagatgccaagcattgggccaccttaggaaggggcagaggaaaaaatatttcccttacccatcagatagtgctggataaaaaaaataaggcagga

SEQ ID NO: 4698 - DNA, 201 bp, Bos taurus
cttccccattttgctgggactggcccagtctcattgtttgagtggtttgggctgagatcatgagaattattctggctggagctaactgctttattgtaaacttcaggccgtgtgaaaagataggaaaaagaagtgcctggttacacattcacttactatgtgaatttagatgttttacctagaacctcagtttttcataga

SEQ ID NO: 4699 - DNA, 201 bp, Bos taurus
agtttctgagttcttttattttccacggagtgttctcaaattctaagtaagattattcttcgggggctatgagagggagaagggaatgataaattaggcctccttcaaatctcaatatattgctgtatggcttttgtgattggtttctttcagttagcatacatactttttttaaaggcccatccatattggagcatgtag

SEQ ID NO: 4700 - DNA, 201 bp, Bos taurus
ttttagtaacacagatctccttccttctcattatgtgctctagtttccgtatgttcaccctccttaacttcatgtattatggcttttgccctcacacttccacagaaagtgctcttcattgtttctacctcttcataaaactcacatgttttcattcccatagcatgaaacttaccttcctaccttattgactatttctct

SEQ ID NO: 4701 - DNA, 201 bp, Bos taurus
ttacaatctcagttaaacttttactaagaatgtttacaacacagggattctcaaacttgttaaacttagcaaggattgtttttcagaagaaaagaaaaaagtcagtacattttatatcccatagcgttgattctgcagaatatagctggtgttctgtttaaaaagaaaagaaaagtttaagtacaaatgggtatatgaatg

SEQ ID NO: 4702 - DNA, 201 bp, Bos taurus
tcatgcttgtgactcttcctaaaaagccataatgccatttttctggctttccaaggccagcataaacctcaccctaaagacatgactattcccacaaagtatgttagtgccttcctgcagcaattacatctggcagccccgctaattatcgtctcctggagagcaggaactgggtccaccctccctagagttcccaacact

SEQ ID NO: 4703 - DNA, 201 bp, Bos taurus
agattttttacataaaaactcaactaatcctctcagtcattaagtctcctctactagtttcctgttatttcactgcccacccagtttttgaacccaggcaccatcactgagtcctctctccctgaaaactcctatctctcatttaagcacaaagtcctactgatgctacttctaataatatgtaacatgtgttacgccctt

SEQ ID NO: 4704 - DNA, 201 bp, Bos taurus
aatatatagaaaataattgtttccttagtgactcaggatcctgataagaacattagttatgttctattctttaatatactgatgtcccaggtttattagtatttgtaaggccttcatttaaatgatttcagattgctgtgcttttgctttatttatttgattaaaacatgtgttttcttctttcattttgaggaccacttc

SEQ ID NO: 4705 - DNA, 201 bp, Bos taurus
ccagtggaagagatacagcagttaacaataattgactgtctgcctctttgaatttacagtctgtctgaaaacaaacagtaaacaggtaattacaaaggtggtccagattaaatgtatataaacttaaactgaattgattgatacaaagataaatatgatttagccccctttctgaaggagcttataccttaagtgttgaaa

SEQ ID NO: 4706 - DNA, 201 bp, Bos taurus
gaaaacacccaggtgtaggaatttgcaaactggtcacatttcatgggttctctaagcttccccctgagaatgtgagaaaggaagtgaatagaggtgggttaagggttgaaacctaagttttcaacttgggatgaaagaggagttgtagggacttacttggcggtccagtggtgaagacttctcacttccactgcacctggt

SEQ ID NO: 4707 - DNA, 201 bp, Bos taurus
gactggctctttcccaagcaactttaactcaaaatgatcagggtacccacatggcatattttagggtggcatattctgcttgccttcagtcttatgttccagtctctccccttctctgacctccacttctgtcatcacacctcttcctatgaccctttaaaggtacttgtgtttgcattgggcccacctggaaaatccgtc

SEQ ID NO: 4708 - DNA, 201 bp, Bos taurus
tccagttgaatagcaagtgtatatcaattgtttgattagaaaagatattctgagtactgccgtctgtctatgctggcctggatgggagacatggagatgtgagatattgcttctataattagagagtgtagagtctacttgaaatgcaatcttaagttgctcagttgtgtccgattctttgtggcctcgtggactatggtg

SEQ ID NO: 4709 - DNA, 201 bp, Bos taurus
tataaactcaaaagataaactaaaacctccactacttaacaatttttagtagttctgaacaagtgctataaatactagatgtttgttaacaaatttttgtcccaaagaatatgtatcagggtagaaataaaagtaaatctctaccatatatacattaacaattactaacatgatttatttggtacaaaggatcttttctaa

SEQ ID NO: 4710 - DNA, 201 bp, Bos taurus
ttaattatcaatgaaaacatggaacagcaaagtaatcctcattaaaaaagaaatctgccttcaagagttcagatccctccaccacattcttgtgtttctgtacaggatcacgagtagatgttgtaaggtcatgtaatacttgagagagaagacaagcctgcattaagatgaagagatgtaggttgaagacgtggctatggt

SEQ ID NO: 4711 - DNA, 201 bp, Bos taurus
aatctaattccaatcttcatttccaaatgctttcctcaggactcctctgtaagaatcctatgatttagccaggagggtttccttgtcatttcttaaacatgctatttccttcctccaagcctttggtggtgcgttctctttcgtgtccaactctttgtgaccccacagactgtaaccctccagactcctctgtccatggaa

SEQ ID NO: 4712 - DNA, 201 bp, Bos taurus
gtccccagactttctttgttttcttggtaataactttggtcagtatgatggagtctatctccagtgataaagttcactgaagtggggagtgaaaagtcaaatcatttcaaatggtgtctaaaaaacatacttgaaagacttttatatagtatgaaagactttggaaactgtaaatagccaagctaatattggatattatgg

SEQ ID NO: 4713 - DNA, 201 bp, Bos taurus
cttatattagtgtcactggatcagaatgacaacacacttgtatgtttttcattgaatgagtgatactgttgtcactgtataaatctgtatctctgttttataccaaacaataatgattgcctgaatgattttgcattgattactgttatcttttgctatattttaaagttgatttttactagttgccattgtaatatagca

SEQ ID NO: 4714 - DNA, 201 bp, Bos taurus
tctcatccaatatattactttagttatattggaacaaaatgctcacctttaattcatcttgatttgggggaaataactgaaaatttaagactattttaagtacctgattataaatttttctaagtttaataggtcctgatccccagccccatcataccgcaacaactaatcaaggaccagaggctcctttttcagatccta

SEQ ID NO: 4715 - DNA, 201 bp, Bos taurus
ttaatgctaaccctaagtctacaggaagttcagggatctgtttcaggccaattaacttcacagcattcatctcatcatgggacctgggacttgacttgccaattcattgtccacagctatagggccactcaatcgactagaaatacttgaaggtaaacacttctgactggtgtaatgttttatgtacagtgtttacagaca

SEQ ID NO: 4716 - DNA, 201 bp, Bos taurus
caaaacatagttttgaaagctctaaatatatttcttgcttccttccctctaaagcctaggtctaaaaggaagcatgtctcttggccaggggtcttagtctcttctgtggctaacgtggacacagtgagtaaagtggggctgcgtttgtgtgtactgctggctctgtttctgatgcttccttgtctgtcctcaccaacacaa

SEQ ID NO: 4717 - DNA, 201 bp, Bos taurus
agaaagggctggcctcagtcaataccatggcgggtctaagggagccacgccgctgtaatgcacatggtcgtccctcagtatccattgggggttggtaccaggagtcctgtggatatcaaaatccacagatgttcaagtcccttacatggaatgatacactacagtgaatacaggcagctcttggaatctgagaatgcaaaa

SEQ ID NO: 4718 - DNA, 201 bp, Bos taurus
acagtgctactcctggatctaaattacaaaaaaaggttacactcatatgctccctggcataaaagttcttttgataatatttcaaggttcttttttttttccccccaaacagttggctaaaaacaaaatgttatctgtcttacagttaaaaacacagacgaggtgagatcatttgtgaagcagcttaaagtaaaggaagca

SEQ ID NO: 4719 - DNA, 201 bp, Bos taurus
tcccttcccaaggagataccaatctaaatatctctggaggcttgttgtctttctttttagcttagaagagagctggctctgtagccctgagtcactcatcggaagaacagggctgtgctctggagtctccctatcatttctggaagcaagaactccctgcagttagctattccctctgtgtaagtaagggcttccttgata

SEQ ID NO: 4720 - DNA, 201 bp, Bos taurus
ctgtgtggtggggaggtgtcctggacctacagtgggaaggtgggaggtgaatgaagtaaatattcagtgaactataaggcagaccttcccaggcagggatcaagtgaatctgtgggcctgaaccacagatgatccatacacaacaggaacagttggacagctggtagtagctaccagaaatcaagtgtttctgctgggctc

SEQ ID NO: 4721 - DNA, 201 bp, Bos taurus
cagcctctctgggtttggcagtctccctctatccagagccagtacagttggcaactcacttatttgtcacctttggagatgaagttgttctcagatgtgatgtatccatctaaaggaaataggtatttcagttttaaaacattaaaacatagccatctggacaggagcccatctggacaccctgcactggctgatagcttt

SEQ ID NO: 4722 - DNA, 201 bp, Bos taurus
ttctctgaaatgctgaaatgtgattctaaatacactttaactgaagggatagtgaccaaaatttaaagtagaaaagaaatgaggtacttctttcagtattccaacaaattctggtgtcaatgaaaatctgggaggagaaacgttagccagtttgtaaactgcttttaagttattgacttatcaatacaattcaccttttct

SEQ ID NO: 4723 - DNA, 201 bp, Bos taurus
attcatgcaaaccatgaaatattcactctatttactttttaattaaattctgatcactatgataatttatttcaataatttttgaaatagcaatcccttagaaagatcagtggtgaacaatgtttaagacctacataactgccttcaatctcttgcattgtttctcagtttacttactctgaaaagtaatctgaggaatca

SEQ ID NO: 4724 - DNA, 201 bp, Bos taurus
gaaacaggaatttttaacatttttgtgctgacagtttttttttaacacatgattatttggttaacctgaagctcagattctaggcgctgtattttaaatagacaaaaaggctgctaaatgagcaaaacctttaagctccaatctttttgatgaggcaaggtaagccagagcttacatttgaggccaaatctattctctttg

SEQ ID NO: 4725 - DNA, 201 bp, Bos taurus
ggcaaattgttgcatcctgtagacatactgctatttttcacacatttctatttattcaggttatttccaaaacctagaagctgtttctctttcttccccctctctctctctttttttttcactttaccccaatctcttaatgtatagaatataatataggttctaaaagtgtggtccatgtatcagcagcattaatatcac

SEQ ID NO: 4726 - DNA, 201 bp, Bos taurus
atgctaatttcatattagctcaagttgaaatagttgtaaggcagtagaaactgatgttagctaacaataaaaatgggatttatgataaatatgtgggagagttttccttatggagggaaaaaatgtagaaatttaagttttgatgaatatatggtctgaaatctgagtcctggtaccagatcatcagtagtcagagtctag

SEQ ID NO: 4727 - DNA, 201 bp, Bos taurus
ttaacatgtgtatgcttcatttaggaccctaaatgcaatgaacatatttccttatgcagatgtagcaggttataaagcctcaactgctgttcctacaaacgttgttaggagtggggattttctatcacctgcaaacaaggcatccatccgtgaaagctacagggtgtttgagggaaagtaacatcctgtttggatcaagtc

SEQ ID NO: 4728 - DNA, 201 bp, Bos taurus
aaatggtgctcataagcattcctaatgtatgagtgcaaaaatggtgcctgctagcacttctgtccttggggggtatcccaacaggccactgtccctccaacggatacttatgattagcaaatgaatttctttcacataaaatctgagtgcttttcatatggctgtttctgcactgaataatgtatctggatggcctttaag

SEQ ID NO: 4729 - DNA, 201 bp, Bos taurus
ccaaaccacagccatgaagcaattttcctcaaattttaaactcaatagtcatttttctgattttagtgtcaatttttaagagatacatcgcaagaaaagtatattaagccatagataggaagcaaatccaaatcatgaaaaactttacaaggaaaattatctggcttttcaacaaataccacgacaaaaattgcaagggga

SEQ ID NO: 4730 - DNA, 201 bp, Bos taurus
accccttttgtcaaaaagggcctctactattttctacaaagagtctttgtgaaaactgcaaagcaagcagcacttttagacatattaatacaagacagccctctcaacaggctggcccagatcaaaagaaagcaaagggtttgacaagcatgggaagtactaggttttacctctttattctcgtcttggctagatgccttt

SEQ ID NO: 4731 - DNA, 201 bp, Bos taurus
gaccagttgaaatcactccccaggcttgatttggcctgaagccagatggttgatactgttaatagagaaaacatctgtttacactaatgtgttagtttttcgtgcttggaggccatcaatatgagctgctatgtgcacaggtattatgaaaggaatgaataatcttttttcatttgaaagtcaacagtagatagaggactc

SEQ ID NO: 4732 - DNA, 201 bp, Bos taurus
ttccagtattcttctctgtctcccatggacagaggagcctggtgggctatagtccatggggtcgcaaagagtcaaacacgacagagcgattaagcatgcacacatgcacgcatgcacacttacaaaatgcttgtaaatcccttttaaaatggcataaggaataattaaattattgttaaatcaacataatatttaccaata

SEQ ID NO: 4733 - DNA, 201 bp, Bos taurus
aggatacaaagtagttatagcacctaaaagtttctccttactgcccatttttagtcattttctgcctgtgtctctaatctatagcaaccactattatgttcttcattcctacatttttaggttttttagaataccatataaatgaatcatacaataagcagccttttgaaactgacttctttcacacatcataatgccttt

SEQ ID NO: 4734 - DNA, 201 bp, Bos taurus
ggatacagaatggtggaaggccatacatatgaaagcagagatgtttagaaaacaaaggttgctgttatcagtttcttaggtaaaaagataattctgttaacagctctcttcctgatacaggcccctttttccaatggaaattaaggctattgggggggtatagagaattgttcctcaatctgttgcgtttttgattacctt

SEQ ID NO: 4735 - DNA, 201 bp, Bos taurus
ttaaaatgcagatttcctatctctctcaaatcacagccctaagatgttgattcagcgtcaagtgagacctggggacagtatttttaaaaagtgattctggatttgaaaaaatatatcactgctttagattccctaaggtataaataaaatttgtatcttagcaggaatgttattttaatgcattaagaatctgtggagcga

SEQ ID NO: 4736 - DNA, 201 bp, Bos taurus
ttaccagtgtgatggcacagtttgtgatatttttggccatacattcaagacaatctatagtcagacccttctgactggtcagtatgtaaagaattaaacttatatttctttgtggtggatcctggtttttgcagccagtgcatgctggcctagacttacgtaaattttatctatcgtttcatctttcttcttccctgaact

SEQ ID NO: 4737 - DNA, 201 bp, Bos taurus
gataacttggcatagaatgatcttctggatgttaagattttgagaaagacaaaaatgtagtagaaagtttttgagtgttcaatatatgatataaaagtatgttattattaaagctcagtagttgtcccaagcaaaagagatttctaacatcaagaaagaaatatttgagtacaatgtagcaattacaattcttctagtagt

SEQ ID NO: 4738 - DNA, 201 bp, Bos taurus
attcatcaaactacttctgtatataaatacacatgcttgttcatccatcatagcattgagtgtgtgtcagagaagtcaattttgactctttccagaatgctctttcctaaatggatatgcaatatcattattgctgtaatcagcaatgcttttttttcttcacaacggtttcagtctccttccttcagattctctgtgctc

SEQ ID NO: 4739 - DNA, 201 bp, Bos taurus
cttctggggaaaagagaaatacttccacaacaggaaccaatagccattcctacttcattactacctaattgaaggaatatacatcctgagcaacactctttcaagtggaacagcatcacagagtctttcatctctataatccacatatacccctaagaaatagtgaaaaaaaatctaggttttcctctttgcatttattta

SEQ ID NO: 4740 - DNA, 201 bp, Bos taurus
cagatttgatttaaaacacaagtaattgttatatttatcagtaagttcaaataatcttttaaaacttgtatttcaaaaatacttctgcagactacagaggacaagggtaataaaatcctacacaatttgcagtgcagccaaggaggaggtgcaaacagaaaacctcctataggcttttacaatttgtcttcagagactata

SEQ ID NO: 4741 - DNA, 201 bp, Bos taurus
catgcaatatacagtggtgcgacaagtaaaagatgatagctataagcattcccatccataaatgggagtcacaaaggagtcagtggtctgtagcagttttcaaacctatctgggcaaatgttggctgtttccttgattaggtttcagtacctaggaagaactgtccatgcctctcagctctatctctgggtccttgatctt

SEQ ID NO: 4742 - DNA, 201 bp, Bos taurus
aggctattaactacacctgtgatctctgtgtctcactatatcccctcactccttatgatttcttgtatgctggcctgatatcctactgccagcagttgacccttatcactggggatttttctctaaatcctaaggcccattctatttatttgtgctgtcaatccaaaactgatggattttttaagcccctggggtaactat

SEQ ID NO: 4743 - DNA, 201 bp, Bos taurus
gagaggatccatgaacaaagagataaaagaggacacagcttattggggaaaaaccaaacaatctagtaggtagagaccgtgacaaatagtatgatttattgatgaaggtaaacaagttattcattctgaagatgggtctctttgagtaaaggatttggatgctctctgaggctttggtgtttgcactttggaagcaggtgg

SEQ ID NO: 4744 - DNA, 201 bp, Bos taurus
tggccaaaacgtttggatttttccctaaggtgttatggaaaaatccaaacaaacttttgccaacccaataataacatcctcagggtcttcctcatgcttttcccagtagacaccaccatttctgccctcatcactaacacaagataatgagattctgagagcttcaccctcagtggagatggagaggggcaaacataacat

SEQ ID NO: 4745 - DNA, 201 bp, Bos taurus
aagcagactaacccactttgaagtggtattgacccatcttggttccctctttgatggttcctggggctcgattggttgtgccctatataaatgaggcatggactcaagatcaaccaggaaagggggcatgttttcctgccagaggttttcactcctgtccatgatttctcttatgcaaatgagacataagcctgagaccaa

SEQ ID NO: 4746 - DNA, 201 bp, Bos taurus
gcagagtcagttgggcctgtgttttgtgcctttcccagatcccagcagctcaggcgaccaggtgcttggtgagctcactctctccaggtgggacgatgtgccttatcacctcccccatctcagccgcttggttttcagcaggagtgccctctcaggtgtgccgtgtagggagagattcccccccccccccccgcctttttg

SEQ ID NO: 4747 - DNA, 201 bp, Bos taurus
tatgtagtgccaattaaagcaaacatttgcatactgagttttatatgatgagtatataataggagagagagaaatcctctctcaccaagcccaatattaacgtgaagaacagaggaaaacaacctgaagaagaagaaactaagactgtgagtgagaagaataaaaaataggaagttatgctatcatgggataaacatataa

SEQ ID NO: 4748 - DNA, 201 bp, Bos taurus
cactgcaaggaatagacaacacagcaataaataaaatacacttaaaaaaaaagttttattttgagtttttctaaatcaatcagtcatgagtttgctgatggcatgaaaatgaagtaaaagtcaaagttgctcatctgtgtccgactctttgcaaccccatggactctacagtccatggcattttccaggccagaatactag

SEQ ID NO: 4749 - DNA, 201 bp, Bos taurus
tttataagacagattgcagtaccacacacccatgatctgaaaaacataaatagaacttctttcttaataaacacaatttaaaaaggacataacatgaccaatgcttttatgatctgaaatattccagcctgtacctaatatcataaaatgagtagtatattacaatgtaaaaattaacacccacaacgcccaactttatac

SEQ ID NO: 4750 - DNA, 201 bp, Bos taurus
tggccaaatgaccttattcaagaaccctgagtggctgagctgtgattcttctattggtatttttatccacgttacccttatctaccttcattactgctgtcatcatatgatgtgcaagaccaacttgctaaagtggtaaggacatttactagagagtcctttcttaatcaggccctattcaaaactgaccactttttaaat

SEQ ID NO: 4751 - DNA, 201 bp, Bos taurus
cattggcccatattagtttgctagggctgctgtaagaaagcagtataacctgggtaaaaaataaataaatttactacttgcagttttggaggctaaaattctgagaacaagttatcagcaggtcaatactccctctgaaggtgttagtaaaggatccgttccagacctttctcaagcttctggtagttcctcagcttgtgg

SEQ ID NO: 4752 - DNA, 201 bp, Bos taurus
gcgttaggtgagagcctccatcacgaaggccttctagcgcccgaccaacttcagggtccagccgttagcctctgtaccacagagccctgtccaatggccacgcccaacccagagaagctctgccctgtcacgcagccctcctcatggtcttgccgaaaggatgggtcctgctgcccctgacagtggtggggtgacccacca

SEQ ID NO: 4753 - DNA, 201 bp, Bos taurus
tcccccttcagctctgacaaaatggtctctaaatggttccagcagcttacagttcactggttttctgggtgccagtgaacttcttgactttataatacgcatggagcttgtagtgtctcctgctgttgctaatgtttcaccatccccagtttgatctcatagctcttccattaccagtgtgacaaactccttctatttcag

SEQ ID NO: 4754 - DNA, 201 bp, Bos taurus
aaataaggtgatattttagaaaaatatttgacttagagagcatagtgaatatttatgtggcagagcctgatttgggcctcccaaggccaatttcagaaagtgttcactgctcagatgcagatgagtgattaggtaacagactccaatagtctacaccctcaggttctgccttggtttccaagcagaggtgcttcttttctt

SEQ ID NO: 4755 - DNA, 201 bp, Bos taurus
agaataaacagtgatgaacaatacaataacgggaatgaaaaatgcactagaagaaatctttagcagaataacaggcagaagagtggaaaagtgagaatggcgagaaagtgagaaagacagaattgtagaaatcactgctatagaacagaataaagaaaaaaaaaaaagagagagataaaatgaaagtgaaaattgctcagt

SEQ ID NO: 4756 - DNA, 201 bp, Bos taurus
tgttatctatcatgggactaagatttatgtaccaatagtgttagatatttctaaatgaacatatgaacaaatgtttattgacagtgtttaaaaataggtcattgtcattaataaaatagactgggttcataaaccacacaaataattagcaacattatagagttatatagtaaaatttaaaaaaatatcttaaagagatga

SEQ ID NO: 4757 - DNA, 201 bp, Bos taurus
ggctggcatgctgcgattcatggggtcgcaaagactcggacacgactgaacaactgaactgaactgaaaattatttgggagagtttcataatctgcgaaaatttcacttccatcatatgtagagtaagcatgataaatttaatagaatctaactcattgggttagatgtgtattaagagataattcagtgttataactagc

SEQ ID NO: 4758 - DNA, 201 bp, Bos taurus
tggcctccctccttgctgtttacctggggccaaactatggtggaggtaatgaagataattgtgacctccctcaaaagatcccatgctgttgctgcaatgtcgcttcagtcctgtccgaccctttgcggccctatagatgccagcccaccaggctcccctgtccctgggattctccaggcaagaacactggagtgggttgcc

SEQ ID NO: 4759 - DNA, 201 bp, Bos taurus
aaaatactttcttacagagacaccaggattagggccccactattatgacctaatttgcctcatttatctttttaaaggccctttctctaaacacagtttcattcaattgctcagtcatgtcagactctttgtgaccccatgaatcgcagcacgccaggcctccctgtccatcaccaactcccggaatttactcaaactcat

SEQ ID NO: 4760 - DNA, 201 bp, Bos taurus
ttaaaataaataaacttaaattttaaaaaaactaaaaaaaaaaaaaaagatttcagtcctaaggaaaaaaagaaattcttatctagatgataagaattgaagatccagtctggtggaggccctgccgtctagatattgctgctggctgcagcaagagtagaaagtgcatggagcgccacactgctttcccaggctttggac

SEQ ID NO: 4761 - DNA, 201 bp, Bos taurus
gagacagacttagtgattgatcaacaacaacaaaacctgtagcctggaggcatcaaccttcagcacagcaggatctcctggcctgcaggttaaagcggattgtagcatttctgcttcgctatgctaggttggagggctgagcatttgcatttctaaaaagttccctggtgaaatctgttctgctagacctaggcctttgtt

SEQ ID NO: 4762 - DNA, 201 bp, Bos taurus
caaagtaatgcttatttgaactctgatgtgtagcactgatttaaaacagagctgtttctaggatgcagagggcatacagaactctcattcagttcagtccttcagttgtgtctgactctttgtgaccccatgaatcgcagaacgccaggcctccctgtcgatcaccacctcccggagttcactcagattcatgtccatcaa

SEQ ID NO: 4763 - DNA, 201 bp, Bos taurus
accgtccaatcttctgaatgatttttcctggaggcacaatttaattaaaatacactcaatttgtgggtcaaaatggtattctcagtggttatcttataactttaagctatgtttcccaaacagtactataaagcacttaaattattatcttaaaaatgtctttgatgtggggatgtcataaatgctgcagacatataaaaa

SEQ ID NO: 4764 - DNA, 201 bp, Bos taurus
tttatacatatgtggagctgggtgctggtagttgttaggagagcaaatcttttgacttcatagggtgtctacccctaccagagggccacgactgtccccagtttttggcatcactttggagatttcaataggaagttcactctaaagctgaagctccagtactttggccacctgatgtgaagagctgattcattggaaagg

SEQ ID NO: 4765 - DNA, 201 bp, Bos taurus
ctttacaaagatctttaaaaacatcaaaaaattcccagtataaacttcttactaatgaaaaatgtgtccaaaacaaatcttttgccagatatgtctatgttctggccacatgcttgataaaattcttacaatgtgctgtgtgctgtgcttagttcctcagtcatgtctgaatctttgggactccatagaatgcaacctgcc

SEQ ID NO: 4766 - DNA, 201 bp, Bos taurus
tctaggttcatataccattaaagattaactcttgtatcatacgttacacgttcactaatagattttaattctaagtcaattttactctgtaattatttacatatgtgacaaatattgcattctaaatgatcatcttcttgttttccactgtatagcattagatttctatcactttcataatatttgtgcatttttaataac

SEQ ID NO: 4767 - DNA, 201 bp, Bos taurus
atattgttttaaatatcacaactttgaagtataatttgaaattgggaggtgtaatgcttttgcttttgttagtgtggatattttagcaatattaattcttgtgatctgtgaaaacaggatattttcccattcatttgtgttttcttctgtttccttcaacaaagttttgcagttgtaatatgccaatgtttcacttcattg

SEQ ID NO: 4768 - DNA, 201 bp, Bos taurus
gtgaccagaagcgggcccaggactgtgatgaggtaggtgctagactggtcgtggagcccaagcagagcccagtgccaagagggctatgcgtctctgtggaaggagcagggtggaaggggccagagatggccctggacctgggggtgatgccctcccctccattcctggctgagccagccacccaggctgaagcggaaaaca

SEQ ID NO: 4769 - DNA, 201 bp, Bos taurus
agaaatcttcacctgaaatttcctttgacttcttaaagtgaatttgaaattgaatgtatcattgtcatctcaaaaattttttttcaatcaattctttcctagttcagtaaagtctactgctctccaagaagccctgtctggttccatgtcttctatcaacacttagcttttatgaaagcatctttatcactcaaatgatca

SEQ ID NO: 4770 - DNA, 201 bp, Bos taurus
aaaataagactcttgtttatttctttgacttccattaacctttgcaggatccatgtgagtgtcaatgttggcttgaacagtgttgttttcctggcaaccacgtcacctagtatgtcattattacctcatgtcagaatgttctcactatctgggaaatttcactgggtaaatgctttgaactaaacacatctgtaatagctg

SEQ ID NO: 4771 - DNA, 201 bp, Bos taurus
tctctggaggttaattatatgacctagaaataatatagtatccttcgcattgataaaagccaatgttagaccacattaacctgaacaaaacaattcactcccaagcccattacagaattaaaataatgaaatattgtaccaaaggatatgatgtaccaaaagatattaaggatatgccttaatcatagaaaaatgaatatt

SEQ ID NO: 4772 - DNA, 201 bp, Bos taurus
cccagctggtaatattttattataataatacaaaattaagtctacagaattaaaataattaaatgaaatttactttgactaaattctacatcaaatcatgctagagcctcccaaatgattcgttatactctggaatttattctgtatttattttcccaaattcagttctgagtggtgattccgtatatatgcctccttgtg

SEQ ID NO: 4773 - DNA, 201 bp, Bos taurus
cttcagttttcctcctccagtggtttgtggtgaggcataattctacgttattaaaactcacactatgtacttattattaccttcatttttgaaatatttaaatttctaagagtttttaagaatagataagagaaaagcaaaggggaaaggaaagatatacccatttgaatgcagacttccaaagaatagcaaggagagata

SEQ ID NO: 4774 - DNA, 201 bp, Bos taurus
ataccactagattgccttatttttcaaatggtcttttatattggtgtgacttaataaacagtaaaggtcaggcagatggtccctctccctcacatattcagtttcaccagatacagagctcttctggcagaagtagtctgaatatttttctgatatttacaccgccatacttacctacagaaaaataccaggtatacatct

SEQ ID NO: 4775 - DNA, 201 bp, Bos taurus
ctagcactaccaaaggaagaagcacactatacttccaatctgggattccgaacgaacctgtgttgttaggttgctggcagcgcttccatccataaagtttagggcacagctacgacaaggactcccttttgggactctggtcctgtatggaagaagccaagagagatgctgctgaagctagagttccacctcattcccaaa

SEQ ID NO: 4776 - DNA, 201 bp, Bos taurus
aagtcactatttatatcccataaacttttataatctaatccttagaaaataaaaagcacttcacaacaaaggccaattagtttctacaactgtgaagttattgaggtgtaatttccgctatagatgaagacactaaaatttaatcactcatctctgatcaccctctgagctctgagttttataaagactgcagttttcttt

SEQ ID NO: 4777 - DNA, 201 bp, Bos taurus
ggcctcttatctattacagctacattaagaactttgctcaagcaactcctggaatataggtttcatgagttgggactttggatattttaattactgttgaatttccagggcctagaactgggtctgggtacatagtaggagcttagtaaatatttactgcataagtggcaaagttgatgaagatccatgtcaagaatcctt

SEQ ID NO: 4778 - DNA, 201 bp, Bos taurus
gtcaatctctcccatggccttatttctctttcctcagaaaagagtatacattgtctatcaatactttccctacctcacaatgtgtaattgtctatttctcgcaacttttcccacctcagtggtgcagttaaaatgataaactatttcaaacattcagaaaactacattgaaataaaaaactttcaaatatttgggaattta

SEQ ID NO: 4779 - DNA, 201 bp, Bos taurus
aggtagctgaatcccatatgtttatgtgtactgctgtaatttctctagtatatgattgtagcactttaacactttgctttcccagaggacatgtagtctgcggtctggtaatttgatatatgatgtaatcacaggaaatattgcagttaatcaaatgtcctaaacccacccacaccttcaaatcctgtctgataaatgagt

SEQ ID NO: 4780 - DNA, 201 bp, Bos taurus
actaaagaatttgacttacaaggtatgaaaggcttgggttatgtataaaggactttcagattatcaggcaggttagaagaatgaaatgatggacaaagagtatgatacacatttgctaccttggatggtttggttattggcttcctaaaacacagatgatcacctacttaaaacccctttgctttaactcaaattatttgt

SEQ ID NO: 4781 - DNA, 201 bp, Bos taurus
agctggcacgtatacttgtctcttggtcaatgtccggtgctatttttattcttttcaggtattcttattgttctgctaggccatttgccaccatcactcaggttggtggagagaagaaattggtagccgctgcttctgaccacctactgggtcctctgtgtgtttggccaccctagcttggctagcctgaacctttcctag

SEQ ID NO: 4782 - DNA, 201 bp, Bos taurus
tgtctactgtgaccactcacactaatattgatccctgcaagtctttgagaattaatgaatacttccactgcccacacctcactgggttcagacccaccttaccttacagcttctgagccccttcctgagtttgacccacttctacatcttctcctcatcctggcccctagccttgtctcagctatccttgtgatcttctgg

SEQ ID NO: 4783 - DNA, 201 bp, Bos taurus
ggcacagagcacagtcttgattgcagggtactcttaaaacccaaccatcttgcttttctcaactcccatgagaaattccaataccctgataagtcccttctttaagcttattcaagcaatatttatttgcaattaaaagcatcttaactaacatacttttagaccaatctttcctctgttgctgtcattatttatctgaaa

SEQ ID NO: 4784 - DNA, 201 bp, Bos taurus
tattttagaaaacgttccctgtgtgcttgagaagaaggtatattccgctgttactgggtagaatgtcttttatgttctgtggggaccattctgtctgtagcagtgctcaaggccactgtttccttattgcttctctgcctggatgatgcctctattgttgagagtagggtattaaagtccccacttatgtctgtattacta

SEQ ID NO: 4785 - DNA, 201 bp, Bos taurus
tatttcctaattttttgtataaataatttccctctgttatgtctttttaagatattactgctctaccaaatcaattcttaagcaaattcttcatttatcacggatatgatttattactttgctggtttcatttattccctaattttttatataaataatgtcccacttttatgtctttttaagatataactactctactaa

SEQ ID NO: 4786 - DNA, 201 bp, Bos taurus
tacattgtccattatttcctgagttcttggtgacattgtcctgcagatccagtggtgaacttcatagctggcagtgaggcaaacatagggcaagtctctagatttataggatgaatcatgtgcatttaatttttcctcaataacttcctaatggaattacaggaagaaggtagtaattgggaaaatatcaataagaaatga

SEQ ID NO: 4787 - DNA, 201 bp, Bos taurus
atgggtgaaaaagagaaatacagcctgttaaactgattatctctgtagtcaccaggttttcattaaggcttgggcatagtattaagatctattgtttaaagaaatgcaatctttcaaaatttctccacatagtccaatacatttctcttgcatattttgttttcaactctattactccatttcttttattttaatttattt

SEQ ID NO: 4788 - DNA, 201 bp, Bos taurus
cactggaagggaatacaatcctgaggttgtatttcacttcccaaggtgccccctacattaggcataaacttcagaaactggaaatagacccagataacacaacctacatcttacttaattgaggttgcttaccaggtattcaataaccaagatgtagagggaaaaaaggtagaagataaaaaggctcagcagcaagcccac

SEQ ID NO: 4789 - DNA, 201 bp, Bos taurus
agggcatgcaagtgcacaggtggagttgctggctgatgatgggcacagtgatgctgaccagagacagaagatagggcttgattcaggccccagaacagctcggggaccctagctgttgacatggtctctcatggctctacagtctctcccaaggcaggcacatggcagtggaatctggtgataggtgtcaggccagtggtg

SEQ ID NO: 4790 - DNA, 201 bp, Bos taurus
cgactccataaggtaccagggaaaactgtgttcatgagggagtctgtgcttgaacttgaggagggatttgtaggtgaggagtggggtggtcctagagagaaggaacagggggcatctaggccagccatcctgggacagtaagaggaaagagaaagtcagatgctggatcagtctgtctgtccattcctaggcctataactc

SEQ ID NO: 4791 - DNA, 201 bp, Bos taurus
tcagccagtttctctaacagacacataaagtttacaagtaatacaagaaaacacacaggaagaacagaatcccagaaaaactggcgacatggttttgcaacaagaatctctctactcaagagaatcttgagaatctactcaagtggttaaaaagttgtgaaagacattacagtcagaggttgtgtaaaaggttaaatttga

SEQ ID NO: 4792 - DNA, 201 bp, Bos taurus
ccatacttcattgcacaatgatagagaattgacagaataaacattctttcttgaaatctgagaagcatagatctcagtgaggcaatggcttgccttagagctttccttttgaccctgagagtttatgagctgcctggtgttggcacagcctgagatgacacatcacgggcaaaaacacgatgacaggcctctccggtctgg

SEQ ID NO: 4793 - DNA, 201 bp, Bos taurus
tgtcctgtattttgagttacagcaatcattcagaaaatatctatagagtacttaatacatgccaaatactgtgcttaggtggcactagtggtgaagaagtggcctgccaatgcaggagatgtaagagatgtgggtttgatccctgggtagggaagatcccctggagaagggcatgacaagcccctccagtattcttgcctg

SEQ ID NO: 4794 - DNA, 201 bp, Bos taurus
actaacataaaaattcttgagttaaaaattatcttaaagaagatttcaaaatacttagaatctaatgaaaatgttttatttgtcaaaatttgtgaggcatcgctagctaaaataatacttaatagacagtttgtagatttaaagtatatttattagaaaataagaaaatcttaaaagggacacaacttaagctaaatattt

SEQ ID NO: 4795 - DNA, 201 bp, Bos taurus
tgagaattcccttgtttcccatctggtagagattttttgtttggcatttggggcagaggatatttaggatctacaggccacacattccttgtacctgtgcctttaaaacaccttaaattgtttcactttacttcagttcagtcatgtccaactctttgcaactgcacgaattacagcacaccaggcctccctgtccatcag

SEQ ID NO: 4796 - DNA, 201 bp, Bos taurus
cctctgtagtgcgctgattgttacctaccccttggccagcttcagaaggggaaagtacagagctgatcttgagcggaagagaagtcattgcttctctgatgaagcagatctaggaagcattatggccttctagcctgtgaggacatttccatatcttttctttcctgttgcatgcctgctcaaagctattgggcatgattc

SEQ ID NO: 4797 - DNA, 201 bp, Bos taurus
gcatgagaagatctggatttttaggcaaattaaagtcagcatgctttacacaggtgacaaattaggtggtaattaattgcattaaataaggattcaccacggaattccttcaaacagcctgttcccctcattgcttaatgtatttgattaaaattcattacccacaacatctcttacataaagcatggttcctcatatcaa

SEQ ID NO: 4798 - DNA, 201 bp, Bos taurus
acaaagacactggagaagcctgcagtgtaccttcaggtttgtttcctgacagcagagggtgccacaatgtttctggtgataggaatgttttgtgctgaatgatttttcttctacctggtacttaaaataagagctttctcaggatactgacattgaggccttttattatctattatataatagtgacacaaaccaacatca

SEQ ID NO: 4799 - DNA, 201 bp, Bos taurus
atgaacatgaaattaaagaacatgaaattaatgaacatgaaattaatttagcaattcagctgaccctcagagagattatcccagtgggcccaaggaatcacatgtgcccttaaaagcggaagaatgtcagagaggtgaggcagatgagttaagagtgagtcaaaggagtaagaaagtttcaaccacagttgctggctttga

SEQ ID NO: 4800 - DNA, 201 bp, Bos taurus
aattacttcctaggcagttctggccctgggcgaagacagtgtgagtccacagaatgtgaccggactcctaaccacctcctcccctccctgttgccacctcgcagtcagggcctgtccaccagtcccgccccttccagtcctcaggtaactttataaggatgtgttatctgcttcaagaggtgtccctgacttttattctta

SEQ ID NO: 4801 - DNA, 201 bp, Bos taurus
atcagttacccatcgggaaacccagtggccatggatagagatatgtgtaagacctccacactgtaaacaatattgatatccctcttcaccttgttgttcccggcccttacaccttatcagctcccattcctactgaaagcaagcttttcactgtgagtgatttttgttatcctttgttgttcagtcgctgctgtgtctgac

SEQ ID NO: 4802 - DNA, 201 bp, Bos taurus
tatccttaagaattctactttgtatagtttttgactaagtactacggttttcacctacatttccaaatatttctggctgcttctatatatttggaactatatacataacacctgaaagaatatgggccccttggaggggtggcagtggaagcccctgcagtaaagatctttctttaaaaagcagattgtgttattggtttg

SEQ ID NO: 4803 - DNA, 201 bp, Bos taurus
agctgatgggcattaactggcagcacccagcaccatatttgcaccggaactgatgaatggtatcgaccaactagaaaggcaaagtgaagggatgtgttgacctgttatctttgagaatcagagagcccccttttcagtacatctttcttttctcctaagttgttttctgtttgtagctcttattaaaggtgctggaagttc

SEQ ID NO: 4804 - DNA, 201 bp, Bos taurus
ttgcctggagaattccatggacagaggagcctggaaggctacagtccatggggttgcgatgagttggacacgaccgagcgaccaacactttgctactgtcggcatcttgatttctttgcctgtggactttcttttgcctcctcctttggttaatgactctaagagcaactctcaacccatgactgagtgaagatctcagct

SEQ ID NO: 4805 - DNA, 201 bp, Bos taurus
tgaagctataagctgagatgttcaagggtgaaggacattacaaggccatcagattttgctttacctgctttaccggagcccaaacctggtcattggaagagatccctgcactgaatggcctggatcaactgacacttttgggtaacagcgctttggtcactgtagatgaaaataaaggagtatcattttttaaaaaagaaa

SEQ ID NO: 4806 - DNA, 201 bp, Bos taurus
aaatgtctaaacacagacagctttgggaggaaggcacaacacttgcctaatctaccaaagccaaacgcctggctcttgagcgagttccttcatcaggtccatctggtccagccatactagaccccgtgtccacccccgtgtcccaccattttcctccttgctgtagattcctttcgatttatcaattcaccctaatgaagc

SEQ ID NO: 4807 - DNA, 201 bp, Bos taurus
attcagtgtttcctttctccatgtggcctctacagaggttgatgttagtttaagaagaaggatagggctttagaagctgatgcaacctcacagtcacttactccactggccaatgagagatttgataaaggagaaacaactatgaaggcagaaattctgccccaaatgatgaacctatgttttctaggatgattccaaact

SEQ ID NO: 4808 - DNA, 201 bp, Bos taurus
ccatgcagacccacagcctcatccacgagccagccattgggactgcaggtttagaaaagaatgtcagttctggtcctcaaaagacctcagaagacatcagaacagagacgctagccaaggaaattatccaccaagacaaatctctggcagacattttggacccagactccagaatgaagacaactatggacctgatggaag

SEQ ID NO: 4809 - DNA, 201 bp, Bos taurus
aaggtcactgcagcagagccaggaagctgaaagcaagaagccatccgtgtaccaggcgtcgcacaggaggagttagaaccgcacttctcttccaaagagattgaaaactgagaacagaatgaaatggggaggaggaagtgtgcggagttacgggaaagaaaacagtgagcatctcaagcccaggagagtcagtgcagtgaa

SEQ ID NO: 4810 - DNA, 201 bp, Bos taurus
gcaggccatctcacttgacctctcaaccaactcctcagcaatttttccactctccctggattctctcactgaatagctcaaggatgggggtgtggaggccgtgttggagagaggggctcccctcaggcactgtcctcttctctttccctcagattggggcatttctcatactggttggccagcttccatttggtgtgctga

SEQ ID NO: 4811 - DNA, 201 bp, Bos taurus
caactctctggatttctatgtctgcatctctgtgtgttgtgggcattacaattacatcattttgtgtaaatcactcagtacagtgctagatagctaattattaccaagtgtagatttattgtgaagctagtgacatgtagttttgggctcctcattgcccatactctttctgagatctcaggaggggccatagcagagtgt

SEQ ID NO: 4812 - DNA, 201 bp, Bos taurus
ttttgaaatgtatatccctgttgtaagtgagatcatggagaatttgacttgaaacttctagaaccatctggctactaaagagctgcccattctccaatccaatctagggacaggcaagtagaaagtttctttggtcagtatacactaaatcccaaactctggacaataaaaggaacaaaatcaggttttagaactgttgtg

SEQ ID NO: 4813 - DNA, 201 bp, Bos taurus
tttatattatgatatatttagtgaatgtaaaagttcacatagtaaaagaatcttacactgtcacactcctttttatttcaagggtggtaagcaattcgtgggagaaaggtagaaattttcacagttattgaagtcataaattttttattatttggggacataaatgtttaatgcttgaggaactctttggcccgtatgtca

SEQ ID NO: 4814 - DNA, 201 bp, Bos taurus
tttaaatggcaattcaattcttagcttgaaaaaaaacattttttttgcctcatctgcataagtagatgcattgtaggatacattaaaagtctatcagcactcaacaaagctttctgttaaacacacaaaacaaaaatcatttctgttgtagtgaagatgattggtttcttttagccactactttcccaggcatcctttggt

SEQ ID NO: 4815 - DNA, 201 bp, Bos taurus
ttcaggctttaaagtggctttaaaaattatggcatttcaagataccttaaatctaaaggaaatttaaaattttggcctgatctcctttctttggctatggtttgttatttatgtagtgcctgactcttatacctagacccttggctgtaggagctggggcctcctgctgttaaatgttctaatactgtacattagtatgga

SEQ ID NO: 4816 - DNA, 201 bp, Bos taurus
agcctttcaaggcccataagtccattatgtttcaaacagagaaagagcagattgactcactttatcaaggacagcagaaaagcaatgtatctttagacctgtagccctatattggcctcttttctttctttctttaaacctcattcatcttggatatgtgttttcagtactttacctggaagattcctgaactgtgtcttg

SEQ ID NO: 4817 - DNA, 201 bp, Bos taurus
ccttaaaaaatgtggctttgttcttttgcacggcagcccaacagaatgctatttgctgtattaagagttgtctgttggctctcactgcatattttggtatgtcttggaaaagactctcattccccaaatgctgtttctacagagatctcatccttgatcattcactctttgaattgcatggatgaccatcttcccaccttt

SEQ ID NO: 4818 - DNA, 201 bp, Bos taurus
tgagacatttcttttacccttaacagctacagataggtctaattaccagtcatttaagctaattgttacagaatgaaactgagccttcaggatacacacagaggagccgccaaactctagttgcaggtgttccaaaaatgtctagccaaacatctggaaaattcagtaagatgataggattgttattgcttgtcaatatat

SEQ ID NO: 4819 - DNA, 201 bp, Bos taurus
tgtcatattttttatagattcatccagtaataaaagtaacctagtacagagaaaacagttgtcattttaattccagtgattcaggtgtttaaaattaatccctaatagagagtaatgcattaatctagctgatcatatgtaattggattaaaataaccacaggcatgactggaagtttccatgaaaaattaaggttatttg

SEQ ID NO: 4820 - DNA, 201 bp, Bos taurus
caatcacaaagtcagcaacttggttgtggtggagcaatggggtatgaacttggttgggataattaactcagccacgtaattggcccaattctgtggcaaactgggcttcccttgtggctcagctggtaaagaatctgcctgcactgaaggagacctgggttggggagatcccctggagaagggaaaggctacccactccag

SEQ ID NO: 4821 - DNA, 201 bp, Bos taurus
ttctgagtaacatggagagccgttgcagggtgttgagcagaggcctaatggcctttttaaaggcatcgcctggtggctgtgtggaagtagactcttgaggagagagagagagagcaggtgggaggccatggtgggaggccaggtgtgggatctagatccccgcagggtggtggcaatgtcatgaggagaagtgattggatt

SEQ ID NO: 4822 - DNA, 201 bp, Bos taurus
aggtgggtgattagaatgggccagagctgctttataaccagatccatcatggaagaagcacagctttgaaggcaaacacggacatcactgcatctgagcacggctctgagagatgctgaaggatggccgggccccagaagctggctcattcctcatcttgtctgtagagatctgcctcctcgaactcatggaaggtcaccc

SEQ ID NO: 4823 - DNA, 201 bp, Bos taurus
ggctcccctcactcgtctcctgatcccttccttaaatagtttcctcttagttttgagaatgcccttaggatgttgagaatgccattcctcagtgacacggctatcagtgtgaggcaggtacacagcatcaaaaccaagaatgaaaggtagtgaaggttaggaaactccattcacttatcttgctctgcttactggtggcag

SEQ ID NO: 4824 - DNA, 201 bp, Bos taurus
catggaaacttggaggaaagtggcagaaaatgagttctcatttagattttgcaatatctcagactagggttttgaagaaacataatgagagcaggtgagggagactatggagaatatcctactagattcaaccccatgaaattgctaattttataagtcaaaacagtccaggagcagtggtttacacctctcaacctaata

SEQ ID NO: 4825 - DNA, 201 bp, Bos taurus
gtccaactttggctttttgacctgaggagtcaaattctctattttgttgtcattgagagttagtggccccatcattaaccccattgcctaggccccaaaactagaactatccttgatccctcacttcctctcacacttcaaagctaccattttttttttttccccagagaagctcagctctcttcttaattaaggctcttt

SEQ ID NO: 4826 - DNA, 201 bp, Bos taurus
gatgtagttaaaacaccacttagctgtaattttgtaattctcctgggtggggaagtggcggatggtggcagtgaaaccaaagcccagatttgagcaactgtgggctgttgactttaggctagtctttcatgaagggaaccctcaaaacaccacggccctttagcaaacagtgtgcatttcatctaagcctggctggctttg

SEQ ID NO: 4827 - DNA, 201 bp, Bos taurus
agtgggtagccgttcccttctccagggcatcttcctgacccagggattgaacttgggtctcctgctttgcaggcagagactttactatctgagccaccagagaagcccactttagaatagaagcatcaaataattctcaaggagaaaaaccaagcccttgattctgggtaaaacggctcatagacttcaaagaccctccaa

SEQ ID NO: 4828 - DNA, 201 bp, Bos taurus
agtgaagaaaggtctcagattgcaaaggagggaaaaaaaagcatttggggaagagactagggatttgggaggattgttttataattaaaggatcaaaagagaaaaggatgtaggagactgggtataatagcgagacagaagagcttgcaaagggcttggggtgactgaaatgagaagtcttgggcagaggtggggaactcg

SEQ ID NO: 4829 - DNA, 201 bp, Bos taurus
agttcaattaaacatctttgtgtttattgatactgagtgaggatttgtgcttgttaggaaaaatatttaaactttgaccttgtatttactattaagaagttgatattattgcattgaaaactgtgtggaaaacttgttactttctaatgctgttttggagaactctttggtagaaatataaatcatatctgccttatgttt

SEQ ID NO: 4830 - DNA, 201 bp, Bos taurus
cttcatcaactagtaaatgggtttaggtttcttccagacatccttaaactgtgctggaagttgcttttagttgaatctattatgttgcattgataattttgaaaccagttccaataagcagatgtaagttccagtcacttactgattataggtatttcacattagtgtttgactattgaatacccaagtcattgttacggt

SEQ ID NO: 4831 - DNA, 201 bp, Bos taurus
gagattaccatgtggccacagctgacccaaaggtggatcagtggcccatgagatgtaacacaaatgtccatgcaagtgtcatggtaattagctttcttcagtcagtttctttcttgggaatttggcctggagatgtgggaagagtgcttccagcccagtatttgaaacagaagtaggaagatgcccagagatcatcagagg

SEQ ID NO: 4832 - DNA, 201 bp, Bos taurus
catgacatgttctgccctctccctcttccaagactttcttttttctgtttctcagtattgcacttgttctttaggattcagttcagatacctttctgtgcatgtgtgtgtgtgtgtgtgtgagaaagagaaacttccctggctttctcagacagtttcctactttttactcctacttcacatgcctatactataattttta

SEQ ID NO: 4833 - DNA, 201 bp, Bos taurus
cccagtttgtatatatcaggtgcagactttgaagacagaccaagtgaaccgatctttgtctctctcttcctgcattcccttccaggggttattctctggctgatattttcccatttatccaggacattagaatcagtcatatgaacactagcgctatgaagatggagggatggagagtcattaaagaaggaaagttgtgag

SEQ ID NO: 4834 - DNA, 201 bp, Bos taurus
gctccaatggcagacattgggatgcagatcaacttgtccatgttctgttagaactgcagggagccctactgaactggcctccccaggctcacttggaaggtggtggaaagctactgcctatcaaactctggatgaaaagctgtggaagagagcctgaaatgggccataaatttggagctgaggtgataatattggtgattg

SEQ ID NO: 4835 - DNA, 201 bp, Bos taurus
gaattcaggattaaaattgctcctttcagattgtcaaactgatttatattttaaccgttgagcagctgaaatggcaactaaatagaatttgaatatactaacttcttatatttttctctttgcagatgataacttggcaaagtattaaatttttgaattgcagtatgtgtacctccttttgttagcattaagactttgtat

SEQ ID NO: 4836 - DNA, 201 bp, Bos taurus
aatttgctaagttttggcccaattagcactgaatatattgtgtgctgccagtacatatttattaaataaaaacaatgaacaacacatgtcaaagtgcttcagaaaattataaagtaataagtacacattattaatgtcttcaggtgatttgcctggttatcattaaacacgctgaaaaaatcattgtctgatgtcatattg

SEQ ID NO: 4837 - DNA, 201 bp, Bos taurus
tggaatcttcctggggccagggatcgaaaccatgtcccctgcattggcggggaggactcctatccactgtaccaccagggaagtcctactataacactgtataatggctattagttcagttcagttgctcagtcgtgtccgactctttgcgaccccatgaatcgcagaacgccaggcctccctgtccatcaccaactcccg

SEQ ID NO: 4838 - DNA, 201 bp, Bos taurus
catttataacatgaagatttctgaggctgaaactcactctacaagagtgaaagaaaagcaagaagagtctggaaggggtcaagagtctggaaggggccccaaaattggaggaaccatggagagtagatgtcttagaattctgtatgaaaaggacagaagcctgtttggtggctcagtctcagaaggccagagcccaggaat

SEQ ID NO: 4839 - DNA, 201 bp, Bos taurus
aaggctagttttctattcctggctctctggattggcagtcatttggtcatgtggtaaatctgtgtctcgtttgtctgaggtataagctacctgtatatcacagagatgcctctttatcttcagggtccctgcctgctaaccattcaatttgaattctgctgctgatggctcagcagtcattgaatgccactgatacgtggc

SEQ ID NO: 4840 - DNA, 201 bp, Bos taurus
tttttattttcttcatattcagttgcagatatggcagtcttctcaatttcatgagaatattttgttgaccttaacatttatcggttttgtgaattaggaacgatagcatgacatattattaatgaaatcttgggatgcatttcaacagtctagcaaaatgtcatctttcacccagcagaagactgactcaagagaaatgct

SEQ ID NO: 4841 - DNA, 201 bp, Bos taurus
caatagttggatataaattgattctatttccttgcatgttccttagatgaaaggaactttcactccctgtcttcatgtatttatgatttaattgattatctttttatctttgaaattaaaatccttggttataaagacatggctgtagtggagagccctgacaaaagaggtatacattggagggtaggagtgggagaagag

SEQ ID NO: 4842 - DNA, 201 bp, Bos taurus
tgttttcctgagctgtctagtctgaagtttatcaatattcttggtcttcttagagaaccagttatttgtttcattgattttcttattaattttgtattgtttatgcctttgatgtctgccctttatgattttgtttctcctgcgtactttgggtttattttgtgtgtgtgtgggtttcttcttaagatgagagtgtaggtc

SEQ ID NO: 4843 - DNA, 201 bp, Bos taurus
tttggacaaatgtaaaatgacatgtacccatatgccctgaaaatgctttgtgctctgccttttcatcactctccactgcctggcccccaaacctttggctatacagtatacttgaaatttgctatgagaatagatctgtgttctcaccaagaaaaaactgatcttttactgtcttcatagtttcacctctttcagaatgtc

SEQ ID NO: 4844 - DNA, 201 bp, Bos taurus
cttactcacttttacaagttcatttcgatattccaaaacaataaacaaaatctatgtgattttaaaaggaacaaatggcccatgtaaaacttagaaaagtatgctttaaattcttctattcaatctcagtattctgaagtaggcttgcaatgataacagatttctaaatggttcaatttagtgaaataattgaatttttta

SEQ ID NO: 4845 - DNA, 201 bp, Bos taurus
tacttttaatgttaaatagaaatctgcagtaatttgcaataaggtcagaggagtagttttttaaaaaactaaaggctgaaagagggcatacagcaatactgtatcatcaccacttaaaattaacagaggctatagattactccttcattatggtaagttttgtggttttgtttttctctacagcagacaaagatgattctc

SEQ ID NO: 4846 - DNA, 201 bp, Bos taurus
atttcttgtgagcacaaaggccaaggcaaatttacttgtgtggcatttcatagcttactcgtatatacaaatagaaagcatatgataaggcatatttgtcgagggcccaagatctaaagctgtaataccagggcttgattcctaattctgtcccttatgagttggggaaccctgggcaagtcacttaatctcaagttttct

SEQ ID NO: 4847 - DNA, 201 bp, Bos taurus
tggcaggctgcagtctatagggttacaaagagtcaggcatgacttaagtgactgaacacacacacatgcatgatgtaggctataaaaattaaaaagtaacttccaagtcacatttcctagcttgatgtcaggaaaagggacaacagcaagcagtctaggctttgagaactttcccaatcagaacacccttattttcaaacg

SEQ ID NO: 4848 - DNA, 201 bp, Bos taurus
agtactcttcttctcttcatactctttttctttgcttcttcacagtgaactctcttcatgtcttcgtcctttatgaatgaaagcaacaccaaacctaaggacatcttataatcagaagtgcttctgaccaaaaattcaagaagggaaccagcatggatcccagagccttgagctgcacactgcaggcttacaagccctatg

SEQ ID NO: 4849 - DNA, 201 bp, Bos taurus
tttatattagaaacagtagaatcagtgtagcaaatgtgctacttcctacatcatactgtgcaagattaggttacatttacaaaatcaggccattttaaaaaagcaaataacattacaggtgtgttatacaatgaaaactgtgactatggtaacgtaagggattgcaagggctttcccccgctcccaatgcagggggcctgg

SEQ ID NO: 4850 - DNA, 201 bp, Bos taurus
caatcctcagaaagcctcgatcccatctttagttagagccactttcagacctgccctggaccatcgtctttcctacactgggacacactgacattcactacagacagttattgtcaacactaccgacaatctctactgtcttcattacatgactgctggcaacttatttagcacttgaatcacttttataggcaccaaatg

SEQ ID NO: 4851 - DNA, 201 bp, Bos taurus
tcgagttcaaagctgacagacttgagatccaggaagaactgatgaattaatttgagtccaaaggcaggaagacacctttgtccaacttcaaaagcaatcagacaggaggaattttcacttccttggggaagagtcggcctttttgttctattcaggccttcaactgattggatgaggcccatctgcactagagagggccat

SEQ ID NO: 4852 - DNA, 201 bp, Bos taurus
cctaaaaccagaagagaaaaatctgcccacagatgaataaatgtacaacgctaagactcagtgtctaagagaggacttccctgttgtcctaggattatagttctaggcagcatgctatgttctttgagcaccagaggaaacattcataatgacttggacccattgcttttcaatttgcacaagaacaaaagtataaatttt

SEQ ID NO: 4853 - DNA, 201 bp, Bos taurus
accaaaggaaatggaagcaggtgttgaaagactgctgaaagtgaaccaacctggattaatatcctacaaatctctgttcctaactgatcaatcccaatagccaatcatgctcaggtctcaattttcacctctatgtatcaaaagtgagcagtgctccatgaccaaccccaaggaccatgtggaatagaagaaccatctcta

SEQ ID NO: 4854 - DNA, 201 bp, Bos taurus
gctgctggctttttgcaacttgctggctctagggcacgtgagcttcagcagttgtggcacaagggctcattagttgttgcttgtttggccatagagcatggaggcatcagaagttgctcccctgcacatggaatcttcccaaaccagaagtcaaacctatgtcccctgcattggcaggcagattcttaccaccgggccagc

SEQ ID NO: 4855 - DNA, 201 bp, Bos taurus
gtgctggacaaggccaccgttgggtgttcaaactaaaactaggctgtccaagaaccacaggtgactacttaaatttaaattaatacaaacttgaaattgccctaattaaaagtccagctcctcggctgcacattcaagtgctcagtagctagtggctgctgtactggatcgttcagaaacagaacatttccattactgtag

SEQ ID NO: 4856 - DNA, 201 bp, Bos taurus
gtttctgctttggttccctgaaacattgcctggatcactcatgaaaggaagctggtttagcctaacaaagaatgagaggccctgagaaagagatccgaggcgtccagccagcactcagcgcccagcgcccgctgtgtgagtgtgagtgatgactacccatccagcccaggtgagaccaacagagaagcaggccagccaccc

SEQ ID NO: 4857 - DNA, 201 bp, Bos taurus
attacctttactgagttgatgaggaaatggaggctctgagactttaagtaaattgtgaaattcaaacccttctctggctcactccacaggccctgtttcttcctttgctctcagctaaaaagcctgctccttcagagcactgactgcattgtggcattgtccttggtttgttgtgatctccttgagagctggaaccctctc

SEQ ID NO: 4858 - DNA, 201 bp, Bos taurus
aaaatgacctaagaaaatagtgacaaacaggaaactgttctcaaacgtgctgagttcaagcttattttgaaaagcgctagggtggagttttgtcatggctgtaccctagataagataagaaaactcttattttttgattgatggttttcagccaaaggctatctccacagaacttggaacttccatcatatacacacacac

SEQ ID NO: 4859 - DNA, 201 bp, Bos taurus
caaaacggcggctgggagaaggaaggtgtatgcatccccatagcatcgagtggagtggtggcaggcctacagcgggctcctgtctggcccagtgggccctgcctgggctctggatgcagggtcttgtcctacttagcccaggacatcggcatctgctcacactgaatcctcctggcctccagcggcatttttgcattgacc

SEQ ID NO: 4860 - DNA, 201 bp, Bos taurus
tctgttactgaaatgggaaacactccttgactttatcccaaacagcggcatctttgtgctagccaatgagtttaactctgtattaggccaatctacagcaatgggattgtgggggcaagtggaggagggctgggtgagaatccagggtactgatctgtgtgtagtcacatagcaccagctcaggggcccataagaaatctg

SEQ ID NO: 4861 - DNA, 201 bp, Bos taurus
aagctttctcctgtaaaaaaattagtaaacagaagcctcagttaaatataatccggagaccaggagggggagctctcacatcctgtgacaataggcaagctcaacaagaggaagaaagacctttctttcatatgggaaagactcagaatatgaaaagccctgggtgccttgtttaatgattgccctccaaactgccttttc

SEQ ID NO: 4862 - DNA, 201 bp, Bos taurus
atatatggataatggcccttttaattcccattttccttatgatatcatcacgtactgtttgtcaaaatgttcttggaggaaaacaccagagctcagagatcaggccaattattgtggagactcttttgaaagaatattatgcttccctctgctcaagggtacatggcacatcgtaggacccagaggaatctacactaggtt

SEQ ID NO: 4863 - DNA, 201 bp, Bos taurus
actaaagctgggtgactttccctcatgttcctatggaagtacatatttccttattcttatcattagtggtctgtttctctcctgggacactggagcttgcgtttcattcatgttgtgtctccagcacccaggacagcgcctgatactgtattcaagaaatacatgttgaatgaaagaaagtagaaaagaggacacttctct

SEQ ID NO: 4864 - DNA, 201 bp, Bos taurus
ctcttgtggatgttggccatacttattcaattaccctggatatttacacagaaacttcatggtggacatagtagcttggtattatctccattccaactgcgttcccttgggccttcctaaaatgcagagtctggaaaactaaaaaaaaatattagaaacaaaccactgcattttccagattatcttgtagctgggctcctg

SEQ ID NO: 4865 - DNA, 201 bp, Bos taurus
tgggagctacaagatagcagggcccccaaaatgataagaataattaaattattattgacctccatgcccagacaatataaattattctggttcttaagaagggaggtttctaggcctgaaaagaaccctttagcatctttcagattgcatacaatcttttgttatggattatatggtttatttagagggcttcccttgtgg

SEQ ID NO: 4866 - DNA, 201 bp, Bos taurus
aagctgcaaaacttcttttgctttggggtccaatccaagtcaaggcctgagtacagcaccttcctctgcaaacagaggggaaaaaaatgaaactcagtatgaatgtgagctctggaaagggcccggctttggcatttgcaagccagacccctgctatcctgtgaagagttagaaagtcctgaaagtgaagtcggtcagtcg

SEQ ID NO: 4867 - DNA, 201 bp, Bos taurus
gcttcccaggcccttactgacagcagagggttaagcaggtcaggtcacactcaaccaccagggaccagccaggttttttgctcaggggagctctgctctatgaaccagcaaaggcccaagaagaaaagaatactgctgaaggctctgtccctcaggaaaacaggctgaaagaagttgagctgaaagaagtgaccttccggt

SEQ ID NO: 4868 - DNA, 201 bp, Bos taurus
aattccctggatccaccggggctggaccctggcaaattacagtattccatctttggccaacctggctcttatctcattttgatataatcctagtatagttcggtgacttttttgggatcacactagaatatctaatgcatatcttatgaatttcttgatctgaatctgtccctttccataaggatctctagtttcttttta

SEQ ID NO: 4869 - DNA, 201 bp, Bos taurus
cttttcaaacctttccaagattttccttgggaagctacagtaaaatgttaaaaaaaaaaaaaaagattgtacttctctcctgaccaattcttcttggagaccctgatttcttagctgcctgtatttaatcatcagtataactactagctctttatttgtgaccttggtagtttactgttttaattaatgaagttttatgtg

SEQ ID NO: 4870 - DNA, 201 bp, Bos taurus
attctctatcacattcatgacactgtatattcactatatctttcctctctctcctttgagtctctattctctctgccatttctttttcttttgcaaggaaaatccgtatcttttctccagaaaagtactggctgtgtagaatccatgtattgaataaacttgtcctgtttgcctgtctgttttttttctagatgagttctt

SEQ ID NO: 4871 - DNA, 201 bp, Bos taurus
gaatgagtacaaattaaatcattaattaggtctcatctagaatctaaacaaaggattaggggaacaaacggaggttttaggacctgagtgactggagaaccgaaacagactaaacaatcattctgactctttggtgagttcaacgtaccttctagtaatgaagattggctacaacagatcaagattgagcttaatgtttct

SEQ ID NO: 4872 - DNA, 201 bp, Bos taurus
gctggtttgatatattttaactattttaaaaattagttttatttctggaaattgtagtcactcttgcctcctagaacttaattattgtgtccatggggaaactttccagtatctgcaactcgattttcttctataaagcctgttttgttttttttttaacagtacacccaattgcaatgttctaaaacagagcatattaaa

SEQ ID NO: 4873 - DNA, 201 bp, Bos taurus
atgatacggccttcctatggggactactggggcaaagctgactctgcagttctcttaccgtatagaatgatttgaccaggtactccaggtagaatgcctttcccagctgattcaccgtcaggttccctcgcaaaatttcatctttaaggagccttggctataaaatcacaacagaacaaaagccgtccttcagtgactgac

SEQ ID NO: 4874 - DNA, 201 bp, Bos taurus
agaaccaagcagaaaaccaaaccatcttatttgctcttttacccattgcaaatactggcccatgcttccagatgctttctttatacacttaaactttaatacaagtttcttttcatctgttgttgttgttattcagttgctcagtcatgttcgactcttttgaccccatggactgcagcattccagtcttccctgtccttc

SEQ ID NO: 4875 - DNA, 201 bp, Bos taurus
tcgagaaagcccagaccactcccaatgggagcttacaggccagaaggacctcttccctgaaggggtctggtaccaaaatgggcacccacagcgtgcagaacggaaccgtgcgcatgggcatcttgaactctgataccctggggaaccccgggaatggccgcagcatgagctggctgcccaatggctacgtgaccctgaggg

SEQ ID NO: 4876 - DNA, 201 bp, Bos taurus
tgctcaggtgcacacacacagcaagagaaccagaagcatctgtggtcataaaatataacttatgtggtcagaagggacaagagggccatgcctagagaaacagatgggtcagagaaaggctggatcaagaacggtttcagttcagttcagttcagctgctcagttgtgtctgactctttgcgaccccatgaattgcagcac

SEQ ID NO: 4877 - DNA, 201 bp, Bos taurus
agatttcttgaccaagtggacaccctaaagacaaattgagccaagaggtttatacctgagggaatcatctgagaaaacatcatgattatacaacgaagccgtaacaaactcactcctgactgtatagcctacacatcattgaaccctaatgggaatgttaaataaggatattaaatgactgtactaaaaaaagcttcatgt

SEQ ID NO: 4878 - DNA, 201 bp, Bos taurus
gaactgaactgaactcaaccagttgcaaatattccccacactgtagtgaataggagctttcgaaagcaaagtgataccaggcctgtcctctgacaaaatcctctcaatggtcttccacttctcctagaataaagcctgaattccctactatgacctacaagggcccacgggatcagctttgcccgtctccagccccatgct

SEQ ID NO: 4879 - DNA, 201 bp, Bos taurus
gatccctggtcagggaactagatcctataggccacaactaagagttcgcatgctgcaactaaagatcctgcatgtcgaaactaaaagatccttcatgttaaaaagaagactgacgatctgcctgcctcactaagacctggtatggccaaatatataaatcttaaaatcatttttttaaaaagatctcaatagcttttaaat

SEQ ID NO: 4880 - DNA, 201 bp, Bos taurus
cccccaacccatcccttctctggtgaaggtgagactgtcccctccctgtctagagaaaccaccctttgcagatccaagcagtagctcagtttgaatgatgagtggctcttggcatttctgaggtgatacgtttcactaagtgaatagtcctttgggtacagcctcccaaagtgcctttttttatacccaggaaagtgtttt

SEQ ID NO: 4881 - DNA, 201 bp, Bos taurus
ctatttttgaatcactaaaagcctgtgcattaaatggatggcaaagtagttttgccagagccatctttcttggtccctctgccccaagttgcttatccgctaccctccagaggtattgtaaagataaacagaggagactgaaagtctcaggcactaagtctatctggaggatatatgctgtttactggattgctgagtaca

SEQ ID NO: 4882 - DNA, 201 bp, Bos taurus
cattgtttaaaaagaaaaaaatcaacaccttattctcattcaggatcaccaggagaactttataaaacacagatggctgggcctgacccttccccactcccaagagtttgattcagtgggtttgggtaggtctaaagttctgaatttctaaaaagttcctaagtaaatgctgatgctgttggtcaagaggccaccacgtgc

SEQ ID NO: 4883 - DNA, 201 bp, Bos taurus
gttccccattgcttgtattaccacctgaactgttccccacctcagtcactcccattaccaccaggcctgaattatccatccctgcccccttaccctgatcggtgtaaaaattgtcttccacgaaaccagttccttgtgccaaaaagcttggggactgctgtgttagaccattagcttatttttttttttttttaatggatt

SEQ ID NO: 4884 - DNA, 201 bp, Bos taurus
gtttttcataccttgattattaaaagcatggttgctcaaaaaaaaattgactgtaacttaggaaaagaaaaggaagtagattaagacatagcctagcaaagtaaatgtctaaatttaaatacctccactgcagggggaacaccttttgaattaaaggagttatatctgggcacaactggtgaacatcttttgtgttggtaa

SEQ ID NO: 4885 - DNA, 201 bp, Bos taurus
ccaacaaaagtcaggccctagaagtgttttttcaaagttggtggtttttcaagcttttattgctaggactcccttttaccctagtgaaagctgtggccaaactcctaaagtccatccatgaacctcccctcccccaagggattccatgaagttaagaacctttgattcaggttaagggccagggaacacattcatcagtcc

SEQ ID NO: 4886 - DNA, 201 bp, Bos taurus
gcccagggcctgatcaggacatcagtagggaatgtttttggccaaatggtcgaatcctctgcaaccttgattgcataaaaccccggagtccttcaaggagccttgtcctcctgctccgtctttgcacagaacgagaaaccaagaggctgaagaaggtatcaaggttggaaagggcccaggttcccatgagccaggacatcc

SEQ ID NO: 4887 - DNA, 201 bp, Bos taurus
gcaggaatgcccacagtggtgccaaaattcatcggcctgcaggccctgtcagttcccatcaggaccaatgctaagcatggccctactgtgtgcggctgccttcccagggtggacccaggctggtgacaccggcaccatgtctctatctgtggtccacgtgcgggagcttcagcactgagctctgtgcatgaggccaagctg

SEQ ID NO: 4888 - DNA, 201 bp, Bos taurus
ttcaagtgttctgcctagtgggtgctggtgagccaaaaccaggctcaacccagcggtgtgggtctcatgagcaaagagcagggctctgggccaaagagggaagtgagggtggcttgccgtgaggtggggaaaatgcaggtttgaggtcagagttgagcaagaatcctgctctgcctggtgactgctaggtggccatggaca

SEQ ID NO: 4889 - DNA, 201 bp, Bos taurus
ctgggcctccagctgcacaggtgggaaatgggagcaggtacccactccacacaaaccaccccccaaacctcccacaagccccttcccatctatctccatgcaggtgacctgtccaggaaggcctgccttggcccaggcatggcatcccagctctttccaccccacctctgaccccagccctcaccctccaccaagctcagg

SEQ ID NO: 4890 - DNA, 201 bp, Bos taurus
catggatgcaaaaattctgctttaggcataaatgatcagagatgaagttggcctttaattttctttgcctgcaatctttgtccagttttattaagaggattgttctcttgtaaaatgagctggccgctttctctctttttttcccctagaacagttagtataatatatctgctccttgaagtcttagtaaaactcacatgt

SEQ ID NO: 4891 - DNA, 201 bp, Bos taurus
attcaattattaatagtcatctattgaactatgataggcatcacctattagaaagccctgaaatcaatttagggggctgtgcccagtagttttaaaatataaaatagaagacaaagtgtcagagtgcacctctgaagtagggtgactattacttggcatgagtttggttttaattctgtttgtatgcgctgggtcacacag

SEQ ID NO: 4892 - DNA, 201 bp, Bos taurus
tctctctgaatgcagcgtttatcagttctgaggaatgccagctgctgcctcccaccgggggtggtggatgtcagtcacgtcggtcagagatggaaaagagataggccgtggatcgtccctcgtgttgagcagccagtgtttagcaagcacttgctgtgacttgtctctctggtggctcagaggttaaagcgtctgcctgca

SEQ ID NO: 4893 - DNA, 201 bp, Bos taurus
cagtaacaaaagaaccctgaaaggtcagttctaggtcacccgtgcgctggggcaggtccactggagctctcttccaacagtgatccagggatccagccctccccatctgctcaggccacaagctctacacttgacttgtgaggtctgtgcagcaggaagagagagaagaggaaacacatgggctcttacgtgcctttgcac

SEQ ID NO: 4894 - DNA, 201 bp, Bos taurus
atcatcatgcagcgatgagcaagcatctttaatcataagtttctatctatgttttaaaacacttccacaggatagattctagaagtgcgatcactgggccaatgggtaagagggtttttaagagctttgacactgttcagtcgtttccagaaaaatggtaccaagtcgccttctacatgaacgctaccactgccggtttct

SEQ ID NO: 4895 - DNA, 201 bp, Bos taurus
cacagctcaggccccaccctggaactgatgggtcagcaactctggggcagggcctctgggatccacagggcctccaggtgatgctgatctgaatttaggagtctggacagaaagtttccccaggcctgaggatgggtctacaagcttaattcgggctgatgtaaattgcctggccatcagtccgacagccttttcccaagg

SEQ ID NO: 4896 - DNA, 201 bp, Bos taurus
tcacctcaaatgtccccagtgccaagatggagaatccctgatttcaattaaaagagcaattttctttccagatgggaatggcctctcctggcagtggttggtctggaagcttctggatattcccagcatcctctgggagaaccatttctccttaggggagagcagctgtctagcagaaggcctcacggttcccagaggaag

SEQ ID NO: 4897 - DNA, 201 bp, Bos taurus
ccacggctgagtccttaacctctctgggcctccgtttcctccactgaccaggatatggcctgtcagtctgagtcctccacctggcccctcctcacctctcacaggtcagcacttcggggaagctgctcgccccgaggaagctgcgacccaggaacctgtcgtcgctggcggctgagtggacgctggaagaggagctgcagt

SEQ ID NO: 4898 - DNA, 201 bp, Bos taurus
ccttaagggagcctcggctaagagggcctttctgagttgtttgctccctgggcacttggtatcctgctcctctccctggagtggaagtgtctgttggaacagggcctttgtccttccatcaagtcagggacctgccacagagcttgctgtgcggcgaatgctggggaaagaataggtggagaattccaggggcagggatgg

SEQ ID NO: 4899 - DNA, 201 bp, Bos taurus
actagcttttcagcctccatgctcccctcaaggactcttaccctgggatgtgctacctgccaatgatgtctgcagaggcttccaattaaaaataaaaagaatcagctgtctcgttttggaacgttcagcttggtaatgggatgcataataaaattttcccctggacagctatgaggtgacctctgcagcctgacggagtag

SEQ ID NO: 4900 - DNA, 201 bp, Bos taurus
aggagtgggggatttgaggcgtggagatgaagggaccacaagttcacatgaaggtgaaggcggaggttggagtgatgttgctgcaggccaaggtacaccaagagccatcggaaggcactgccaggagacgaggaaggagcctcccctagagccttcagagagaaagaaccccagccctgctgacatcttggacttctggcc

SEQ ID NO: 4901 - DNA, 201 bp, Bos taurus
ttgtaccttttatggtccacacagaccctattaaaacagaagatcaagaattatgttccaagagctctttattaggctggcagcaaggccccaggctgtagggaagagttggttattttgtgaggtgtcacatctgagcattactttagcaaataaccctgactgcctggggccggatcctggtcagccacgggcagctgc

SEQ ID NO: 4902 - DNA, 201 bp, Bos taurus
tagttggctgtgcggccgtagacattttattttcaagttttcaaggttattggttcatcaggagcaaaggaaaaatgtggcggggttttcatgggtcctgatgagagaggggccagcgaatggtctgggaggtggactggaaatgaacttgttgcgaagccctcaaccccacacacttccctcccctacaacatcaggctg

SEQ ID NO: 4903 - DNA, 201 bp, Bos taurus
tctgacccaggcatggaagggttaagtaggagcttaacagacaaggaaagttcaggggagagggacagagtcttcaaaggcctgggatttgacctgcattgtgtgcagcgtgactcgttctggatggagtggaacatggactgtacagtcagcctttggacatggccaagggggtagacggggggcggggtgggggcagga

SEQ ID NO: 4904 - DNA, 201 bp, Bos taurus
cagttccctgtcttgttttgaccttttattgtttacctctcattggccagacctgggtctccagggggaccccaagctgccaggatactggggcactgagtgtctcatctttgcaacctctagtgggggatggactagcaagatgggggagctgctgggggagctgtcagtggtggctgccaaagtcctgggaaaagcagt

SEQ ID NO: 4905 - DNA, 201 bp, Bos taurus
ggaatacgacctcgctgtctttttcttcttccttttgcattttcccaagtaaatgtcttgaaccactgattagatctatgtgcccacaataacataagcaggcatgaagcttaaatctgatttaaagcagtattgtacagactgttactccattaaagtccttcagagtctagattaaaatagaacagtatgaagagcgtg

SEQ ID NO: 4906 - DNA, 201 bp, Bos taurus
tttcattcaaattcatattgaacatgaacattcatacttgaatattgacaaattgaatattggctactggcaaagcaggagggtcaggcagaggaactgacacaaactaagacccaaggctccttgaaggagccccagtcagggtcaccccaactggtcagccagtcccacttgctagagccaggctttgggaagggccag

SEQ ID NO: 4907 - DNA, 201 bp, Bos taurus
tgtcctcgaataagtgtcatcttagaggaaaagagacagaaacacccactcagaggctgagaactttgagcagcattgtgttcttgctgaggcctcagtttgcggggagttggagcagccaaggcatgagagtgctgcccagaggtggtccgtgcaggctgccttctgcttcctcaaaaagggttctttcctctgattttc

SEQ ID NO: 4908 - DNA, 201 bp, Bos taurus
catccaacctggccaacgggacgccttgggaggaagccggggagtcagataggagtgcagagaactgcgactccagcctgaaccgcacttacgccatctcatcctcactcatcagcttctacatcccggtggccatcatgatcgtgacctacacgcgtatctaccgcatcgcccaggtgcagatccgtaggatctcctcac

SEQ ID NO: 4909 - DNA, 201 bp, Bos taurus
tagttcatggggtcacaaagagttggaaacgactcagcgactgaacaatagcaacaagaggttaggtggcttagaatgacagactgggccccagttcaggggctttgggtgccaagctgaggaatttaggcttcatttgctgaacatgggatccattgcctggccaggtggcaactattaatatttacaaaattaggcaat

SEQ ID NO: 4910 - DNA, 201 bp, Bos taurus
gagtgaaaaaacagtgcttttctgcacagatggcgcctggatccctgaggcatgtctgcaaagtcagggctcctgggatccctttgagatgcactgattcggcctccccctctgttttgcacacagcataggccccccaaacaaggagaagccttacaaacactcggcaaagtccacagcctgcactctatctgcctcttt

SEQ ID NO: 4911 - DNA, 201 bp, Bos taurus
acacaggataatcacaagtggttttctctgctctggcggccagcctgtgctcttaaccaaggaatggcttgcaggagaggagatgaaagagatggcattcctcctgctgggcccagtgaaccgggtcaagaacaaacgccaaccttcttttcagacaacatagacccagccagctctgctgaggtcaggaggccaggactt

SEQ ID NO: 4912 - DNA, 201 bp, Bos taurus
ttcttcccccaggccctttgcccacttatccatgccagtggaagagtagttaactgtcctcatttgtgaaataggatatgaaacctgaatgtcttagtacgtatctttggggtctgaatctaaggccggctttggggtcagataccttatttgacagtgaccccaagtagcacaaaggtcaaagaggtgagcatgagactg

SEQ ID NO: 4913 - DNA, 201 bp, Bos taurus
cttttgctccatccaggactgccatggaattcctttcctaaggaggggacatttcagtaagtcaacgggaggtacaacaatgacaaagattataggctaccgtgctggccaggggagtaatagagatccccttgctgtgagttaaagatttaagagtctggagtctaggggagttaacctctcatggtggcagaattgtaa

SEQ ID NO: 4914 - DNA, 201 bp, Bos taurus
tgaagaagtctgagaacagccacaaattttcctttgcttaatgcagccttgaaaatatttcaagtattctgttttacaggcatgcattcactctgcttagggaaaatattacttcaagcacatcttagcatgccaagaacgcttctagtgtctggcacttagtaggaactgaatggatgtttgaagtttgacttgagttga

SEQ ID NO: 4915 - DNA, 201 bp, Bos taurus
tgggaagattccacatgctgcaggccgactaaacccacgcactatgactacggaagcttgtgcatgctctagagcccgtgtgatgcaacttctgggcccacgtgttgcaactgttgaagctgaagtgccctggagtctgtgctgcccaggaagagaagccattatgatgagaagctcacacagggaaattagagagtggcc

SEQ ID NO: 4916 - DNA, 201 bp, Bos taurus
gagcccttctgcagcttctgctggaatctgtacagccaggaagcgtggctgggagcagagtaaggtcaaggcaagcttgactttcaagactgtgtgtgtgtgcatgtgtgcccagttatatccaactctttgccacgttatggactgtagccctccaggctcctctgtccatgggatctcccaggtaagaagacgagtggg

SEQ ID NO: 4917 - DNA, 201 bp, Bos taurus
ctgttgataccctctcttccaatttctcagagatgagcaaagaatgggtctattctccatgaagagctttacagtcaggatatgtcactggccagagtcttctgttaataagaaaattgatttgataaattgaattcattaaacatgtgtgtgattcaagatattactaaagtatcacattataatttacatttaaaaata

SEQ ID NO: 4918 - DNA, 201 bp, Bos taurus
gctggcattatggacacaattcccccaaaggtgctgacccacatatattttaaaatcttttgaagaagatatgtgtataaaatgtaacttcagtattttgcaatgaatagacttatgtacaaattgctttgggaatgaagagagcttgattaaatctgttttggtagggaaagatattcccatgctggtaatttcatttaa

SEQ ID NO: 4919 - DNA, 201 bp, Bos taurus
tatgaagatgttgacttttccaacatcttgacaaatgaaagaatatatcagttggcactccagcagtagaaacattctcataatcagttgtaatgataaacggccaaagtctgaaataggcattgattgaattgaaaggctctccgttgtgtccaactttttgcgaccccatggactatacagcccatggaattctccagg

SEQ ID NO: 4920 - DNA, 201 bp, Bos taurus
tagcctaggtacccaactaacacaatcagtttttacacaaacaatacacaaaagcaaacacaaaaaataaagaaaacattttaaatcttgcagtacagtacgctgagaagagtagtagtgcagtacaacagctagaatcctggggctggcactgagtgaacaggcaggaagagttactgactggacgagggaaaggcaacg

SEQ ID NO: 4921 - DNA, 201 bp, Bos taurus
aaacactggccccgggtacagcgggggtggtatttcctctctcccgcaggctttggttttccaacaggacattaacatttatgtcatgttaacgcgcacccaggcatggcgtgtggcctgccgccacggccacggacaaacgcaaactccagcgccgcctcggcatgaccgccaggctcgcagtgtaaatggagacgcgcg

SEQ ID NO: 4922 - DNA, 201 bp, Bos taurus
agatggggctccccttgtggctagtgaacttgacctcctcatgtatttctccctggtcctgtctgccctgggctcctgcacaaccctactaaagccagcagttacatgcagtccacaccaggggatatccctcacgatcctggctctggaggccacagaagcttgtgtttctgggtcacaaaggactgaaacaatcagaga

SEQ ID NO: 4923 - DNA, 201 bp, Bos taurus
gcctctagggcaggtggagacaaatggggaatcatttctcctctagggcatcatttctcctctagggcaggtgcaggatcaagtttccttagacagcatgcagcttatgcaggagtatgcccacactcatcaccttgactgactgtcacagaagagaaaacctcaattatgacagcaaagctgtccagacttgagcctcca

SEQ ID NO: 4924 - DNA, 201 bp, Bos taurus
tggcaagtctgtgtaataaatagcctaccacatgttaaaagaataaattcacaggatctgggcatttaaaagaaactttaggattcacccagagaatccaaggacttcattttagagatgagaaaactgaggcccagagaaattagaagacttattcaagacctccctggaaagtagttatagaatcagggctggaaccca

SEQ ID NO: 4925 - DNA, 201 bp, Bos taurus
taaaattttgagaactgctattatggatgatctcagtccagtagggtaggtaaaaaacattattgaacttttcaacatagtcagataaattacacaatattaatgccggcctactatgtctccttgttaattacttttaatggattatcaggttcactcctcatgggagccctataaattgggtagaattatctcatttta

SEQ ID NO: 4926 - DNA, 201 bp, Bos taurus
gcgtggcgcatcggagctacaggcgcaccgcagcgcggcggccttgctgggggaataggcttaaacgcagagttctggtcccaggcctgacttcactgctgcgctcgctgtcccttcctcgagcgcaggtcttcgaccgcccctgtgtccccagtgccctcggagtcgagggtccgaggacaggccgatccagcggaggcc

SEQ ID NO: 4927 - DNA, 201 bp, Bos taurus
cactacaacgagaatgtgcatgagccattttgaaaaggaaatgaaagctcataggtgatgaacaacttgcccaaattcatgttgctgtaaaaagatagaagtgggaggcagattgcatccaaagctgggcaactgacatgttttttccctgcaccatcctaagcagaccgaaggtgttgtagccacgcgttctggcaaaca

SEQ ID NO: 4928 - DNA, 201 bp, Bos taurus
tgctaattatttttatgacgccaggtcagcagtaaaggtggccttcctgctctgtttttcctccacagctgcataacaggacagaccgttttttcattttgtcaaatgagttgaggaaggcccagctctccaggccagggaggccctgaacatttgcccagttcttcttgttcctttctctttgcattttcttgtcccagg

SEQ ID NO: 4929 - DNA, 201 bp, Bos taurus
taatgaggttggtgcagacaaggtccatttaaaacctacatcccaggccagaaagtacaaataaattaaaaaggagcagtgttttgttgtatacatgtttacatggataacttttttgttttttggccatgccacagggcatgtggcatcctacttccctgaccagaggtagaacctgagcccctacagcagaagtgcaga

SEQ ID NO: 4930 - DNA, 201 bp, Bos taurus
acacaaagcccaagatcatgtgtgtggtgtgttataagcttttaatacactgttcatgcagtacagtcaaactaaacccagaaaaaatataagtcctctgctattttaatggctccatattgttatctgacaacatgaacaaatagatgtaccaaaggatgtgattgatgaagtcagtttgactttcaaataaacctcatt

SEQ ID NO: 4931 - DNA, 201 bp, Bos taurus
gagtcagagccccagacctgctttgagattttgactgtgcttcctggtggcaccctccccattattgtctttccatgtgcctctcatctccttccacacaaccgttccatcacatcccctttcggtccctccaacatcatccacttaactgtccagaatgattttttacactcccatcaaggttgaagacatctgatcctt

SEQ ID NO: 4932 - DNA, 201 bp, Bos taurus
tcagaaccaaccttcttccagcagactagtactgctatagcaattggtagacttgctactcaactgacattatcataaaaaaaattaagaaacaataagcgaacaaaatactgtctatttagtgaggttttctaatttaatggaaggataaaatgaaatacttgaaaaaaaagaagtctgcatggctggttcatggaagag

SEQ ID NO: 4933 - DNA, 201 bp, Bos taurus
tgccccagctaattatagtcaccgattacctaacagcaagccccgctgtcacctgctttggcctgacggattaggccatctgggccacgtggccggggtctgagagccatgagaggtcacagagaggggcaaatggctctgaatgggaagaaatgtgtttacagccctgacagctgactgggccattaaaggggctttagc

SEQ ID NO: 4934 - DNA, 201 bp, Bos taurus
tagagggaaactgaaggcctcagatcaaagggagaaaagcaggaggcaacaggcattgctgacaagttgccttcttgcattgctgcaagaaggacaagtacgaaggcctgaaaccacagaaaggagcagaggtttgtgtaggaactggagagtgagtgcagtggacatggaaagcctacccccacccctcgctaattctcc

SEQ ID NO: 4935 - DNA, 201 bp, Bos taurus
actgtgttcctcaattcagttagaaatccagttgactagtgaacactgccactattgaataattcagatattgtagaagagtctagctttaacatctagaaataccttagggaagttgcattatatagcaatgggtagattgtctaaaaaccaaaggttttactggctgatgttagaatgacagctttaatgtttgtattt

SEQ ID NO: 4936 - DNA, 201 bp, Bos taurus
ccaaaattcttctaaataaataaatagaggtgtttttttattttctccattagagtttacagaccttttgaactcgatccacaggcccaagactaacaatgctttggctactgggacccagaaggagcaaacaatgcagagggcacgttggaaagagcagtggcctttggcagagggacgcacatccacacagccagccca

SEQ ID NO: 4937 - DNA, 201 bp, Bos taurus
atcatcaacttgatggacatgagtttgagcaagccccaggagttggtgatggacagggaagcctggcatgctgcagtccatggagttgcaaagcaatggacagacttagtgactgaacgatcacaaatttatgtaaccacttggaaaaacactgtgactccttgagccccatggatcttccatggtggataatgaatggtt

SEQ ID NO: 4938 - DNA, 201 bp, Bos taurus
tgtgtcgcagtgctcacattatctctgctttttcttcttaataaacccgctcccttctgaaatgctctatatctggaaatgcttttccaacccatgctcaaactccctcagtattggcaattccaataaccagctctgcatgactttgagacaagccctctacaccctgtaagtcttttccatagtacatccaaagcagaa

SEQ ID NO: 4939 - DNA, 201 bp, Bos taurus
ctctgcccagctggcattgctctgtggctgtcgggcttagccattcacatcagcttcccgatacgaagtgtccactgtgctctctttagtctctggggcagaattaaactcgctgttccctggcccttctcattcatagattgtgttgctttcaccttccaggaagtgttcatgggtgtcatctcagtgacaggcagagac

SEQ ID NO: 4940 - DNA, 201 bp, Bos taurus
aaacaggctttacaaccatagtggaactgcaatagcttatgatttcatttgtctccaaatacttatgtttaacttttaaagtaatattatgtctgggatatagggggcaaataagggaacacataatggtatatcaaagaggactggcctcgggtgtgtaactgctgaagccaatgatacataggcttcactgtattatta

SEQ ID NO: 4941 - DNA, 201 bp, Bos taurus
gatcttaatcatttcattgcataggtaacgcatgaacaaaatatgaaagagtataatgaagcatgtaataaataccaccttccttcccagtacctctccctaggcaatctcccacctccctacaagcgcctaccatatactcttgactattacagtcatctttttataacaaccatcctgcttgagccttttctttccctt

SEQ ID NO: 4942 - DNA, 201 bp, Bos taurus
ttccctgggggccggagcccaacacttcagtaatttaggggctttcccgaaggtttgtgagtgcggcagggtgcatgttacatctgcagcctttaccagcgccagggactgtccagctggccctgccgccctctggccttctcaaaagggacctggtgaccctcccacctgagcaaagcccccagaagtgtgggtctcccc

SEQ ID NO: 4943 - DNA, 201 bp, Bos taurus
caggtccagttggaccctgaacttcatcagcacaccgcagggccttgggttcacccatgtgctctctgtgattatcaggtttccttcacgcctgtctttctttctgggcttctgaggccgggaccagtggccagagagtctcaggtgaaccctactgaatgtggaaagtggaacaaggatccaagctgctgctatggttac

SEQ ID NO: 4944 - DNA, 201 bp, Bos taurus
gcctcactgatattccccgattcctgggctcatcaggaggaatgagccactcgacttgatattccccgattcctgggcttatcaggaggaacgagccactcgatttggccagcctgagtcaagaaggcagaagacccttggaatgactgcttggctagtgccctgcagggacaaagcaggctcagagggaataagaaactg

SEQ ID NO: 4945 - DNA, 201 bp, Bos taurus
cagtttcgatcttaaacaaatagcctctcattaaaaagtctcgtgattttccaggcatgctagctcgatttcttttctagaagcttggggcctccaaacccggaaactgacatcatatcctaagaccaacaacaaaaattcactttgaaaacagccaccttcctgaaaatgactgggattcagttttcaccacagtaactg

SEQ ID NO: 4946 - DNA, 201 bp, Bos taurus
ctctccctttgtcccagtgagaagcatgctgaaatttaatgaagacaatgagtctcagacaggctaaataatttaacccgtgtcttgtacctgggagctgtaggggctgtggtttgagccctggtctctgacacaaaatcacattcaatccccagctctccttgtggccacatgaatgtcggtcccatgaatgaccaccga

SEQ ID NO: 4947 - DNA, 201 bp, Bos taurus
ccctaaggcagtgggccagctttttggtacctcatgggagtcagtctggctgactatgatctggctgtgacctgcctcttgagaggaagggctattttttcgggctgaggaaagttctatgaaggacagggcacagatgtgacagatcagtggggagtcagtggacaggagcatggttcacagaggttttctgaaagctgg

SEQ ID NO: 4948 - DNA, 201 bp, Bos taurus
tcctcaaagggcttaaaattcagggagtaagagggctacagtcagctgaggaatgaaaaaggaaggtttaaacaaaacagattttgtaaaattttgcaaacggagtgcaaataaggtaggaaacatgaacacaccaaacaataagatcaagtcaaggaaatagtgccaaaggacaggaggggattgggctcatttccgggg

SEQ ID NO: 4949 - DNA, 201 bp, Bos taurus
aatgctccttccctaatcttattaccgagcgtctcttctcatcctccagaacctctgaaaacattgcttttccctgacgtctactgcctaatgtcttctctgcctgcattcctttaatttcagacttgatactggattaaacattcaaagcaaatggaatgtggcctgtggctaaaggtacaagggggaaaactatgtcac

SEQ ID NO: 4950 - DNA, 201 bp, Bos taurus
tcttcacccccttgcagctccagggacacccctggttccctgaaagcttgatcacaacccatccctcattctctgttcctcacgcttctgtgagcctctctagatggcctttcctctgacatgcctggcaaaagctaacagcatcactccaccccccgggtttcaattttcttctgagtgtctggtagataggggttccct

SEQ ID NO: 4951 - DNA, 201 bp, Bos taurus
tggaggcctcacaaggccaggtctgcactcacttctagggacctcatctcaccccagatttcagtgagcaaggatctttaagcaggcctttcccactctcccactctctcagctgagatgtccctcaggcagtttccaaaagtgtcacacagagagttatcacctggcccagtgatgccactcctaggtatatatccaaga

SEQ ID NO: 4952 - DNA, 201 bp, Bos taurus
tcctaggagctgcagcatgctggcataagtctttttgaaggaggtcaccattgttgccattatccctaccatagtttggcctcaggacaaactacaaggacggaacagagcctaattcatcaacagaaaattggattaatgatttactaagcttggccccacccatcaaagcaagacccagactcccccacagccagcccc

SEQ ID NO: 4953 - DNA, 201 bp, Bos taurus
gaacctattaatagcatcgttagtttcaaggaggcagcttacatggaatttggatcttaatgtacagaaatagatactcatctactttccctgcaatgcaacaactttaatggaataatcttttcaaaatgaaaactctgccttaatgaaagccccctttttcactgaaataagaaagtgagacaacaaaagtaagtctct

SEQ ID NO: 4954 - DNA, 201 bp, Bos taurus
gcagtggaaagggtcaataagcagataggaaccggagtgtagtaattagggaagcttcggcactggaatacggagagacagaacaggaggttgaaagggacctggtgagtcagttttttctgttgatgcccacaagtgacagcatgatagctacctggtacctgtgttggtgtggggcccctcgagagcctgggaagtcac

SEQ ID NO: 4955 - DNA, 201 bp, Bos taurus
taaggaggatggtcagctccaggtcacacaggccttaggggcagagctggggtctggctgagggttaggatggggacccagagcatggtcaggaccagggcgtctgaacctctgtggccgtgagggtcccgcgtgaggaagatacacaggtccagcggtgcatcttcctcacgtctcaggtccctgtgagcgagtgctcct

SEQ ID NO: 4956 - DNA, 201 bp, Bos taurus
gggcttggtgtaactcagtttctgctgtggaaacatcacttttgcaactcagagttaaaacccacgtcctcaagacccaacccaaaggaaaggccacgaccaggaagcggaatgagcgagcacagatgcccatttgcctcactccaacccgtacccggataggggtggctcagcctttccacctggggcgtggccgtaaag

SEQ ID NO: 4957 - DNA, 201 bp, Bos taurus
gaatcccggaagcaaaatgtatgaacttcctgcacactgtggcagaactgttatttttaggcattttacagctcaactaacagtattattaccttttcaacatttgtatatttgcaatactcttaggaaaactactgagcccttaaatccttgttaattggagcctaacaacttattgaccagagatgtattcatacgtct

SEQ ID NO: 4958 - DNA, 201 bp, Bos taurus
ctgagggccctgtacggggcaccagccttgcgaaggcctccggctcgcagaaggaggcgtctctggactgagaggccgtttgggtttttgcaccaacgtgcgcggtgagcccacagctgctaggaacacacagcgggcttggctttcctctgtgctacttgtttcaggaggcaaaggcttacctctacaaggcaaaggcca

SEQ ID NO: 4959 - DNA, 201 bp, Bos taurus
tccatgctctgagcctccctttcctctctgctcggtggcccgccaggctcggaatgggacctcacccacaccttcttctcgcccaggtgtctgttcttacgttcagggcagcccccctggtggcccccagggttgggacttaaagccactgtccgcaagtcccgaaagctaagccccaggcatggctgcaggaataggtcg

SEQ ID NO: 4960 - DNA, 201 bp, Bos taurus
gagctgctgcccccgccaccccaaactcttgtttaaacaattaggggaaacccttttcaggcaattaggaaaaggcatttgcagccaatcaggcccctccgactgtattgttctgcccagcggaaggtttccagaatgctggggggtggggtggggggaacccgtgccttaatatgcaagtcagcaaggccaggatgtgag

SEQ ID NO: 4961 - DNA, 201 bp, Bos taurus
catggccactttggtgcacggccgtgaactccctcgaacggtgggtgttttactcgtgtgtgcgaatgtgcgagaagtccagagaggtcaagtggcccacccagatgacccagcgagtcggaggcatgtggggtgatagaatttagggctctgacttctgtagggacgcaggcattcagcgccgcttgtgtaccggaaacc

SEQ ID NO: 4962 - DNA, 201 bp, Bos taurus
cactgctgtggagtgaattttggcagccactggcctctcaagaccctgtgtcctcaatggggctcgttgttctctgcacaggaagggaagactatggtaacgcttgggaagggcccagcacccagccacgtgcatagtaggtgctcagttaacgcctgttccttcctacgcacacagcccactgcctgcacagagctcatc

SEQ ID NO: 4963 - DNA, 201 bp, Bos taurus
cccaaggccgaaaccacagaaccacggccgagcttcactggagggaggaaatccgtgcccaggaaggctggcagctggagttctgagagcatcacagctccgcggccccaacagacgggcgcgaggtttccagagtgaaataaacgctgccgtcacccagtggagctgagaatgtcaatatcatttgacatcatgctcatg

SEQ ID NO: 4964 - DNA, 201 bp, Bos taurus
ctctctggtcctttcagagcagggtcgccaagcctggtcccgggctcctaactcctggggctgcccaggagaaggctgggctggaggcccatgtgagtggttgcagccaggatgttggagttttgttatgaaataaagagctcgtccagatgggacagaacaggaacccgagacggtttcgtggaggttgcagggagaagg

SEQ ID NO: 4965 - DNA, 201 bp, Bos taurus
ccgcggagccctcctgccgcccagggctcccgggactcgggtgatgaggaggctccctgccctccggactgcccgggcggctcaccttgccctcctttgcataggccagcaccttgtcctcctcctgggggtggaagatgagcgtctccacggagaaggggacgagctgcttttggaaggtggcaccctcgtccgcgctga

SEQ ID NO: 4966 - DNA, 201 bp, Bos taurus
atgggaagagtttccagcattttgcacgaggcccactgcaatctcaggggtcttcacgagtggaaggagcagaagggaacagaaaagcacacagaatcacagaagaatggccaaggagctgctgtacgactggctgaagatggaggaggggctgcaagccaagcacctcgggtgcctgtagacgctgggccccaacagctt

SEQ ID NO: 4967 - DNA, 201 bp, Bos taurus
tggggcaagaatcttggcaggagctgaagggccgctttctgctccgtgaagacgcatgtccatgccagcatcggtctggacggagctgtgtccactttctagggggcgaaggaccagggccgggctttacccagtggggtcccaggttccgggggcggccgctgcccactctgagcgctcacaggccgttctgcccacagg

SEQ ID NO: 4968 - DNA, 201 bp, Bos taurus
gtcctgaggggccacctgagaacagctctcgggcacgccggtcccctgggtgtgggccaccagaacgtcctaacaaacgaagaggccaggccacatgctcatcccggccctggcgttggcgttggaatcccacctccttcgtgatcttgagagagttcctctctgtcccttcacctcgtcgtttttacctcgaagtaacta

SEQ ID NO: 4969 - DNA, 201 bp, Bos taurus
ttctcaggcgagacagaagaggctctgaggggcaggggtggggagggtgaatcaagggacatgcagggcatgaccagggcctggatcctgtcaccggatacgagggacagctgtccccaggctaccggcttctgccctcaatgttccggaagcatctgtggagacgagccccggaagccaactctggggccatgaccagcc

SEQ ID NO: 4970 - DNA, 201 bp, Bos taurus
atctgcccccctcccagccgagagcgagacccctttgttcaatctcaaaccccggtgtagccccagcagctgcaccccgactagggaagaacaggctccctggggcctgtgcaggagaattattgtcctctgcaaacgcctcctgcagcgactcagccctgagggacagctggctcccggacacccttggctctggggttt

SEQ ID NO: 4971 - DNA, 201 bp, Bos taurus
cttccaaatccacttggcttttatgagcatgtgcgcacaggcaagtggctcccatccggggcagagcatcttggtctgtgaagagggaacacgaggcagctggcccgcgggcgctgccgtgaggagcagcgactgacctcatgggtccagggcctgcaccgtgccccacgagctcctctccccggtctcaatccctggaat

SEQ ID NO: 4972 - DNA, 201 bp, Bos taurus
tctgggcagctttacccgggtgagggctgctgggcatttgccccagatgtggggcctttctgcttctttccctacacctaggcatcgttggccagatataccgtccaccagagaggcagagggcacaggctcagggcacaaaaaggcagccagctcagtgttgagaaaacaaaacgcccaagcagacctttgtctgaatgt

SEQ ID NO: 4973 - DNA, 201 bp, Bos taurus
tccccctaaatgtcccactaattcagaccaggcctgagctgctgaactctatctagggagcctcaaggagtcacggatgcaatgcatcaaatgaggagcacgtttgcactgcttggccccgaacagacaaatggaattctagactctctggggtggaaaagatcttaaaaggcatgctatccagccagccccatctacacc

SEQ ID NO: 4974 - DNA, 201 bp, Bos taurus
ggcacatgggaggggcccaagaaaatgtggaaaacttctgtgatcaatgcccatggacggggcagcttctttgctggcccccagctcccctcaccatcaccgctgcctccttggctcagggagtttattacaggtaatttctctacatcaaattcatcaacactccctcaggcctagaggccatgttcaaacccctctgtg

SEQ ID NO: 4975 - DNA, 201 bp, Bos taurus
ctgccgtggacttggggctccatcacaggcccttctcccggctggcagctctgccccctctatcctgagtgctctcctcttcctccaaaacatgaggctcgagattcctccccaggaggcctgcccgctctccccagctggcggggagcccccttcactgggatcctgtgtgcccctcagggacgaaccatcatcagacct

SEQ ID NO: 4976 - DNA, 201 bp, Bos taurus
ggttggaggacattctgatgaaacgtcccactgtgacaataagtccctaaggcagggttttaaacaccttctctcttcttgttcatggcccactgcccaccgcctatccgggcactcgtctcagacctggagtggggggtctccagagcagcagttccctccctgccagcctcacggtccgtctgcgggttccacggcctc

SEQ ID NO: 4977 - DNA, 201 bp, Bos taurus
tgccccccaccagcgggggttcaccccaggccgacccgtccaagcctcttcttgaaagcgttactcattccatttatagacaacacagcttagccttggggattcaggcctgagcacaattaccgtgagaacgagccagcagcgaaactccccgctgagacaaaaggacccctcaggcctccagtctagctgcctccagct

SEQ ID NO: 4978 - DNA, 201 bp, Bos taurus
ggctcggagactcagaaggcatagcttgatttctttaaacttttacagcaaatacccttttcaagaaacgtaatattaaatgacaatgatcagacatttgcttgttttacttatttcccatattagacaaaaatttaaagagccctagtcggagaaggcaatggcaacccactctggtactcttgcctggaaaatcccgga

SEQ ID NO: 4979 - DNA, 201 bp, Bos taurus
acgcagacgccaccggggaaggtctgcctgtcagcaaaccagcacaacttagcagagcagcatccgacttgtaagcgagcttctcctaacagtgtggctagcactaactggctctcagggatcactgacactctgtgaattcacagatcagagctctggaaccagagaggggaggaccagacccccagccacatgacaccc

SEQ ID NO: 4980 - DNA, 201 bp, Bos taurus
gggagggccgagcaccggcccatgggtgggccgcctgagtgagcttctcggcgtcgcaggagctgagtcggagcgttctgacagagatggaaaaccagccaaggcactatcggccactggtctgcgagaagagcaagccggtgccgctgaaactgtttaccccccggctcgtcaaagtgtgagtgccgagggcccagcacc

SEQ ID NO: 4981 - DNA, 201 bp, Bos taurus
gtggacgacagtaactgccgtcagggaggcgaagcgggagtgccaggtggaggaagcactgcgcaagcgtggcagtgtgcatacaacagggccagattcgagttgtcaaaggttcactttgcagcaatgcaaagaacagacacaggggaagttgcctcagtttctctggcacagatccctattgcagcccagaggcacagt

SEQ ID NO: 4982 - DNA, 201 bp, Bos taurus
ccagcgagcccacgagtccaggattctccccgtcagcactcaagactcacttccaacctactggtggcgcaactgccttgcctccaatcatggaaggtgtctgggggcggggcccctggagcctggacctgccgccccgcgtctcgcttacaccagcacacgccatccaccccggccccaccccgggtgtgcatgggaata

SEQ ID NO: 4983 - DNA, 201 bp, Bos taurus
aggctatgcctcagggcacagagcctagcaagtctgtgtcccccggctttgcgtattttgtgtacagagctgtgctatgggccgaagactctagaagctaagctgtttcctattcatcccacagtcctcatttccccgtagaagccaactgcacatggaagcggcctctctgcctcaaggccgcctccgacggccgtggtc

SEQ ID NO: 4984 - DNA, 201 bp, Bos taurus
cttcagccttcccggccactaaggcagcctaaactggagcacagagtgcaggaccacagagctggagaccccaggtctggttccaagaaaagtggcgcaggaggaggaaggtagggccgtgacagtcgacgggcaggggctggagttacacaaaagccaacaccccccgaaaacgcctaccaaggctctgaactctcccct

SEQ ID NO: 4985 - DNA, 201 bp, Bos taurus
ctcctagtggaagctggccgagggccctagtggagctgtgcccaccgaaggaggtcagagacacgcgccgccggcctctgaggtggaggaacgggcctcaagtcagagacagcggggtgtccagaagccggaaaaggcaaggagactctctccgagaccctccagagggagcagccctccgggcccctgggtctcagcccc

SEQ ID NO: 4986 - DNA, 201 bp, Bos taurus
tcctgtcccaagacagcagccgccctgctgaccgcgcggacgccaggccccctctggtttctcacagaaacgtctctgtgactgagcgactgtgaacccgggtggtgcggggtggacggggccacacacggcgtcccccgggccaggccgccccccacaagtgctcgactggggcctgggcccgggcctctgctagttctt

SEQ ID NO: 4987 - DNA, 201 bp, Bos taurus
ggtgctgctctcagccctggggtggaattctcaaggctgcctcccctcaggaagccacatctcctctctggatagcatttgctggccctttgcagtttgggggcaatccgggtctatcaaggaaacaaagcgcaacaagatgtccgcgttcctgagccatcccgtgtctgtggcctctgcttggaggaggccatgagcgtg

SEQ ID NO: 4988 - DNA, 201 bp, Bos taurus
ttccaactttcttcttgcaggtgaagaagaggccgtgctccttgcagtggttttcgttccttgttacacgctgtgcccagtagtctttgtgcagcaggctagggttggccgtgcagccctggctcctcctggagtccagctccccctgaggccagggacaggagcgtgcaggacgagggtccacggggccaaggcttctgc

SEQ ID NO: 4989 - DNA, 201 bp, Bos taurus
cctgggggcagttagctgggcctcacaggaccagccccaccagctgggggaccgcctggacctgggccccagggggccgatgagcctaggagcccctcccgagaatcagagccattcaccacccgccctttgatgcagcccccagcactggcctgtcaccccacttcctcatgccaagtcccgacagtcgcgggatgcaga

SEQ ID NO: 4990 - DNA, 201 bp, Bos taurus
ggccaggtcaacaaagcgtcgcaggtgcacctgaagcagaaacggacggatgccgcagtgctcgtgatccagcatgcaaagcgccccagaacttgtgtacaagcctcggggtttcggccgtgagaggaggaggctcgtgacacctcccgtcaagggaactgccgactggggggggctccaagggggtggactggggctgcg

SEQ ID NO: 4991 - DNA, 201 bp, Bos taurus
ggggggcggggcttctccacgtccagtcgggctgcctggcctggcctgcaggcgctgctgcactccctggtggcaaggccacagctctggggtcctctgccggataaaacacatctttctgaaaacgggttgtgaccccagttatgggactcttcctgcccctgctgtgcttccgcggctgcacctggatcctcttctggg

SEQ ID NO: 4992 - DNA, 201 bp, Bos taurus
gctccacctccacctccaggctcacttggaacaagtcggggtacttctcctggatgtcgcaagcatccagatcatacctgcagttggaggccaggcgcaggttaggaaggaccacgggcacgtcggggtcaccccaacgtccaccaggatgcaggcacggggcagggccgtgttctcggcgggcaccacaccggcacctca

SEQ ID NO: 4993 - DNA, 201 bp, Bos taurus
agttagtacatgcagatcagtaaactttaaagataaatttagccttaagaaattaattgcacctattctacttacttttggtaagtcatttaccccatcttatgagtgtcaagatgccaaagccacatgtaaacgctcaccgacgtgctgggcgcacgattaggtcccgcttgttgggctccacgaggacagcaagccgcc

SEQ ID NO: 4994 - DNA, 201 bp, Bos taurus
acttttttaattgagtgtttgtctttttattgttgagttataagtgtttatgcattgcttgtattcttacatattcttttctcgaggaagattttgggttatttctttttggtcgcgctgggtctttgttgctgtgtgcaggctttctgtagttgcagggagcagggcccactcttcctcgcagtacgggggcttctcatc

SEQ ID NO: 4995 - DNA, 201 bp, Bos taurus
cttgcccctaaataagggccttgggagctcaagctgcccagggcctctgggtcacctttcccatctgccccctgccctcccagcggcctgatatcccccccatagtatgagcatgagcttaggcctcacaggccagcctccccaccccaggggcagcacaggcctctgcattatctgtccccagatgcagctggatgcccc

SEQ ID NO: 4996 - DNA, 201 bp, Bos taurus
tcaccctggctcacctggaagccttgtatcctgggaggccccccagacccctccatgcttcactcttagaggacaagaggttgtccatctgtcccctcctatatcagaagtccctaaggagaggccatctgtcctgagcacagttttaccaaagccaggatggtatggccaagtcagtgagctgtccccatccccacctcc

SEQ ID NO: 4997 - DNA, 201 bp, Bos taurus
agagtggtgactgttgtgacattcctctgatagagtatgcaggaggagaaacaggagccaggggcaatcaggggttgagggaagggtgggagatatgtacgtttcgtttggccctatgggatttggggtgcctgaggaccctgaggtgtagtgtttggaaggagcttgggagttggtccagatctggcaagaagtgcttgg

SEQ ID NO: 4998 - DNA, 201 bp, Bos taurus
gttggaaaggaagccctactgaggaagacttgcagaaaagcaggtgcttgccctggacttgggaagatgaaggttggccagaaacacagaagcgggagggaagtcatttcaggcagagagacctgaaggtgtgcaggagctggagtctgctgctcccagggggcttgataatgcttgagagtgagccagaggccctacaga

SEQ ID NO: 4999 - DNA, 201 bp, Bos taurus
ttgtcctccccaacgtgagggggccgcatccaatcagttggaggccggaatagaacaaaaaaatagagaaattgctggctctctacttccgaccctgggacacaattctcctgcatttggcctgaaattcataccactggctctcctgactctccagcttgcgcacagcagatcttgggactctcagccaccacagttact

SEQ ID NO: 5000 - DNA, 201 bp, Bos taurus
cctggagcatctccacaaatatagtatacacaggatacctttgttcagaggcctgggaaggcagttctgaaggacttgaagctggaaggctggcaactgggcccactggatctctgcagagaaggagaatttcagtttgggcttccaggtgacctggatctaattgcaaaagcaggggtgagttatatgtggtagagtcag

SEQ ID NO: 5001 - DNA, 201 bp, Bos taurus
ttgtatctgtacctgcaaagatacctggaatatacctgtagttccacatctcaagggggagatccgtgttttagccctcccctgctcacatgtcaattctattatccacccttcatttgagaaacagcactttgtgctgtgcattgtaatatgaactaatatgaactggtgagagttgataaaaagagccctgggccacac

SEQ ID NO: 5002 - DNA, 201 bp, Bos taurus
gggctcctagcttagaagaggatcctcccatgttgagtagactgcaactggtaaagagcattcctagaaatgaattcgagcatcccagagacattcacggcgaggcttttgccagaagtgtgttggagtgtcctccaaattcccttcttacccaatgggactttgagcatcctctactttcccaactggagagtctctgat

SEQ ID NO: 5003 - DNA, 201 bp, Bos taurus
ctggccgcaggttcttcttccgtagtggcaacatcgagcacccagaggacaagctgttcaacacgtctgtggaggtgttgccctttgatgtgagtgtggtggggggtgggtgtgcactgaggcctgcccctcccacagccaccggcttcagccccttgattttgcccccagaacccccagtcagacaaggaggccctgcag

SEQ ID NO: 5004 - DNA, 201 bp, Bos taurus
ctcttttgtctgacacagatccctgtcagtgtatgtgttgggggggatgctcaagaaactgcaagaactacacccctaaaggccacctggctggcatgttctgtttaattagcattcccctgacatattgcttaccaaggctgctcccagccagaactctgcctgtgcgtctgacggggccattgcacccgctgtttgcca

SEQ ID NO: 5005 - DNA, 201 bp, Bos taurus
atgtggaatctgagaaataacacctccaacccccacaataaccctgttcccaaagaggaagtgccgaaaccaagagagcctgccatggagactggcctggagctgatgctcagatctggagctgggatggtcgtgtgtgtgtgtgtgtgtgtgtgtgtgtgtgtgtgtgtgctcgtgtctgtgggctgcctgtcagggccc

SEQ ID NO: 5006 - DNA, 201 bp, Bos taurus
atctgctgtctgtccatgtgagattgcaggaaagtctccacagggacaactctgcttctgtggagtttttatattaaagacccacaaaatcccctacaggcgccgggcccaccccttcaaggaggggatctttgtggtgttcacagcccacccacatgattccacatgctttcacactgttctaaatctgcaagaagatca

SEQ ID NO: 5007 - DNA, 201 bp, Bos taurus
tgggccacagtgagcccccggggactcagctggcccttgggcaagaccctgctcccagagccccagtgaagagataggtcaggagcaagagggaagagatgagtgagctggccacggggtcacgggaccaggaggtccctgcctgcctacctgcctctcttcctctccatctgccttaagtaagtcactgactctggaatg

SEQ ID NO: 5008 - DNA, 201 bp, Bos taurus
agatgtgtgcagtgggcctgggggttaggctggttagtcacctcggcttcacatccatccacccatccatccatccatatgtcaggctttctcttccaccaggtgtcactgtctctgatggttggccatcaatgtgacaaggcagcaatgatgtgatggtgagcaaggggatggggaggggcctggaggaagcacagagag

SEQ ID NO: 5009 - DNA, 201 bp, Bos taurus
actatgtccctaatttagggattatccaagggtgagagtcaagctgaagcccagaggaactgggtaactcaggaatttagatcaacctctgccttccagaaaggggtcccgtgttctgaaagctgggtttagtgcaatatccagaatcatgggctgtgtatgaggtcaagtcaccagtcctcaagagcaaactgggtggta

SEQ ID NO: 5010 - DNA, 201 bp, Bos taurus
ctcgcgtcaaatcgttctgtacgcaccgagctgcgtgggcttttcccgtgtgcgcaggttagacgtggactctcagaggaacacgtcctgtgagggccatcctgaaaggagaatccaggaacagcccgcgaaggaatgatcttccagggacacgcaagatactcacaaaggccaagtttgtttcaaagagtagaagtacag

SEQ ID NO: 5011 - DNA, 201 bp, Bos taurus
ccactggtcccccaaggagttccccagggattcattaagtatggcctgattctggagggtatccctcctgaatgctttacatttactcctgtcaggtgttccaggagtatccttggcctaaagcttcatttttagcctaacttcttattctggggtcccaaatatgataaattcacattccgatccatttattttcgcacc

SEQ ID NO: 5012 - DNA, 201 bp, Bos taurus
catcttggcactgccaggctcctccccctgaggccaagaccctcccctcttgcaagcctaccagggagcctgcggctgacccatgtcacccctacagcccttcgcttttccagaacttggccactcttgagtcctggtgggacttgggccattttccagatgagcccagggtgagaagtggttcgcagccacacagaagaa

SEQ ID NO: 5013 - DNA, 201 bp, Bos taurus
gcagagttcttcaaggggccagaaacaaccacatcaaggccctaccatgtctcccaactgccccaagtctcaatgaagcagagttcaatggtaagacaactaacacctgagaacctaggagggccctggccgagaccaagagccaatgcctcctaacaagctgagagctcagcataccctgcaggcaggaccgggtgagtg

SEQ ID NO: 5014 - DNA, 201 bp, Bos taurus
ggtgggcatctagggtgcagccacgtttctgaaggtcactattgggaaacagcccagctctgtttagggtccaggtgttggggtctacacgttctctccacacaccactagggaagggaacagcagtcctggcgcttctgggccccagggacagtgtagccaattggtgcccaggctctgggaccacagtctgcccagggc

SEQ ID NO: 5015 - DNA, 201 bp, Bos taurus
gggtgggcccggcacctgtcgggggttttgtgggtccttactgagagaagtagagggatggcttgcaagatgccattttgaaaatgtaaagaccctgaagtgggcctgagctggcaggggtcccaaatgggttatgcggatgcaaatatgggctgatttgtgtgaaggcatagtgtaaaggctgtgtcctgggatgtaggt

SEQ ID NO: 5016 - DNA, 201 bp, Bos taurus
gctcggtgtgcctttcctgccactctccagagggtctactcacctggtaggatccacttggttccagccgtcacgcttaccacctaggccgcctgagggtggcaggagagctcaccagctgacctgcttgtccccttcccttggcactgcttctaggagcatctcaacagctgtccccctcgcggcctccccatgtccaga

SEQ ID NO: 5017 - DNA, 201 bp, Bos taurus
tcttcccacctgcaccatttccagcccttgaagcccaggagactctcctcctcccccagttcccagcctggccacctaggccctcaatctgtctacactacacattacaacaaaagtctctggaaagttcttctggactctggttcttaacaaacattggtccactgttactagatcgccaccttctggccacacatttta

SEQ ID NO: 5018 - DNA, 201 bp, Bos taurus
ctgggccctccagctgtcaaaaggcaggaagatgaatatttacgctgactctaggtactgtacatgtacttggggctttatataaagggagaggtcttctaatggccagtggaaaggacagtaaaaacaaggaagaaatcttgactctgttagatgctgtatgggaacttgaagaggtagtggtgatgcattgtcagggtc

SEQ ID NO: 5019 - DNA, 201 bp, Bos taurus
tgcagagcagagggctagggcagtcagcatgcccgcctcggcgctgcacagtcaagaagacgggcttgaacggagcgtcccgttgcccagggaggccctcggtgcccccaagtggaggagtcaaggtggggcttcctgcctgtaacagggtgagccgtctgtctttcagggccgagatggtggtgcctgacttctcggagc

SEQ ID NO: 5020 - DNA, 201 bp, Bos taurus
tgatggcacccttgccaaggggcgaggtaaccgcatctataaagtgctcacgacagacactgtgcctggcgtcctgtgcgcagcagggcgtccaggccgcgtgacaagctcttaaggggacacccctaccgccctgtctcaagaagaaacagcctggggagctgaagtgactgtgcacggctggccagacacacagccaga

SEQ ID NO: 5021 - DNA, 201 bp, Bos taurus
tactgggcgcaccttgcaggacccctctggcctcctccacggcccaccccactgccatgctctgtcaccagccgcctcacacagacctaggtcccagtcattgcagctctgtccccaaggccccagtgacatgactgctggaagtgggggctccgcggtcccccgtggtccaggactccttccagtgttcatcaagttttg

SEQ ID NO: 5022 - DNA, 201 bp, Bos taurus
gagagggggagtggagggcagaggaagggagaggggatattttttggagggaacccttttcttctaacttgggagcaatgcagtggaggcctagctcagatttctcactcactattcccctgcaacccagggtgtagctatcagagacaagtgccatctgtccccacatgaataagtgaaaaaggctgagcccaactcatc

SEQ ID NO: 5023 - DNA, 201 bp, Bos taurus
aacaacaataaaaagagctcatccttctcccattcctgaccataatgccatgtctggctctgtgtatatcagcctggggcctcttgaggcctcttgtccatcgcttaccatggacagggggagtgaatgtgaagccctctccccctctctcatcccttcagtggtgtttctctggaggcaggagggtctcccctccccatc

SEQ ID NO: 5024 - DNA, 201 bp, Bos taurus
ctttccaccactttctatcaggacttccggggccggtgtctgtggctgtttatccagctaaaccgaaggtgatggggacaggcaccgctgacttgcactttgtgctcctgtggccagtctcagggttggtgctttcccgagtcttcctgtggctcccagagccctggctcaaacagccctccttccgttgaggcccacagg

SEQ ID NO: 5025 - DNA, 201 bp, Bos taurus
tcacggggcctccaaggacacaagactgatccaaggtctcatggctggagcctggagtgggtacggatcatcccacccacgggctgagtccccagtgagcaaagacaggcctagggggctggggcagaggttctcatcagcccatggagctggcagggccctccccatccggaggggaggtggaacccggatgacactcct

SEQ ID NO: 5026 - DNA, 201 bp, Bos taurus
ttttctatggtagggcccctcccagggtggggcaggttgggggagggctctattcgggacatggacactcatgagacttcccatactggacatcagccctgagacaatggcgatcaaggggcctgtgggccaggaaagggggcacctgaccctgtgtcaggacacaaggagacatcctagaggaggggtaccccttgtgtg

SEQ ID NO: 5027 - DNA, 201 bp, Bos taurus
ccggggtgcaggctcaggcggccacagacccctcacctgaagcatcatgcccaagagcaccaggtacgcttgacctggcacctctgtgccccaaccccacgccaagggtaccccggggcctctgaccacagctccctcagaacccagggagggtggggggtggttgctcccgttttgtcacaactagggtgggggcaaggg

SEQ ID NO: 5028 - DNA, 201 bp, Bos taurus
caaaaaaaaaaaagaaaacatttggggcctgggtctgtccgactggggtcagatcccagctctcccgcctctaatgctctgtgaccttcgctccctgagccgctccataaacccaggaggaggccatcggtcacctaggtgttgtcagggcgccaggtttggggtgtgcacctcagggaaccaggggcctctgccaacccc

SEQ ID NO: 5029 - DNA, 201 bp, Bos taurus
caacacccaatgtctgtagctcctgtggggacacagcatggaccctgagtgtctggtcagttttgcaccaggagtccttggtctccatggtcatgaaggttgagatgagcatctggtcacctggcccttcgctgggcacagagcatccagtgtggccggccttctggcggtgaggctgaggccgtggccacggggctgctg

SEQ ID NO: 5030 - DNA, 201 bp, Bos taurus
tccatgcctccaggacctgtgagttcacgttgccctggagaaacaacctgagtttgtacattagcaatattatctccaaagatcattttggtacattaatactgttatcgacatcagcagttgtaatcatctgactggttgattagtgttcagttagcacaggattgaggtcacacgggacaagaaagggaataaagtttg

SEQ ID NO: 5031 - DNA, 201 bp, Bos taurus
tgcgcgcgcaggctgcagggattcctgtctggacgttgaccttggtcctgactactgctgggcgtctgacctaagttccacaataatagtacttaagacgctacgcactgttctgggcacatgacgtgctttaagaaatttgacagcaactttgtgttgctgcagtgataattatatcaccatatcacctcctatgttcct

SEQ ID NO: 5032 - DNA, 201 bp, Bos taurus
cttgatctagctccaacaccaggcagtgctgtgtgggtgtctccggaaggaacgcagagtgggctgcagagcctggaaagtgcccttatcatgtgggacacagccattacgttagccatctcccaatggaaaatggaggctctgagatgcccggtgggtcacacagcatttcaggggagagggttggagttggagtctgtt

SEQ ID NO: 5033 - DNA, 201 bp, Bos taurus
atctgattttctgctttactacagcttacttgttttcactttgagggttgttttcatgcgtggtatttttcatttctgtctgtttcttttctgaattttgctttgttctgtgcagatgggcccactttcacatggccggcatattttcctgcccagtttgggatgcacttcgagctcattttaagctccgggcctatctga

SEQ ID NO: 5034 - DNA, 201 bp, Bos taurus
aagtcagccatgtgggaatgctacgctgacttctccctcccaagttgccccagatgcctattctggacctgatgggtcttaaagggacatttggggctaggttttgaagtgtgaacaggagtttgccagactaaaatttcatgggtttattgagtcatccgcatgtatcaaaaaaaacattttttttctgtgcttaactgg

SEQ ID NO: 5035 - DNA, 201 bp, Bos taurus
agtctcccctctgcgggcgtcttgtcgaactaaagaaccctcaacagactacttacgtgaagaatggcgtttcatggtgccctgtggagaaaggggtggcgtcaggtccagcggcatttggccagtgctcccgccccacgcagggcatctccccacgcctcaccccggggccaggcgcctcacccctgggccgggaggaag

SEQ ID NO: 5036 - DNA, 201 bp, Bos taurus
tgtcctcctttccatcacccttaagcccagctccaatgtcctctcctccaggaagccccgcctgaatccctcagctcccctccctgcttctggccttcccgtggctttgtggtgctgggagtgtctgtgtcagactctgtgactgtgggcttctcagggattgcccagtatggcccaggcttagagcaggcaccaaggagg

SEQ ID NO: 5037 - DNA, 201 bp, Bos taurus
cccctgccccgcccgcctcaccctgcacctgtgtcctcccacttcccctgggccaagttccccagaaccggtggtttctgtaggggctgccccagggtgcgggtggagaaaaaagacctagctggccttggagggtggatgaagggcagacatctggcagcacatgagagcaactgttagtgtggggagggcagggaaatg

SEQ ID NO: 5038 - DNA, 201 bp, Bos taurus
ttgaaacttatggggcttggtggttaactcagagcccctcaggggtctgagcccttcagaccctcaggggtctcccgaggtcctggccccatccctgtcctgcaaaactggaaaataaattccatgtcattatctccatgtcacttgagccacaaccaaatgtgcctcatggccaagttaggtctaggatgaagggtgcac

SEQ ID NO: 5039 - DNA, 201 bp, Bos taurus
gcagcagtgtggataagcccacctcacaggaggtagcttcccagctccagggctatgttcagcgtctccaggaacgccgtgctctggtgaagattccctctgagcctggctccacctgggtgcccatatctaccgtgccccatgcagaagccatggtgcaggccattctggggacccagcctggcccagccctaccccggt

SEQ ID NO: 5040 - DNA, 201 bp, Bos taurus
ttccaagatgtggttgaatgagggaggtggaatattggcccctgggcatccctcagccatccctctccgggaacctggagcctcctgtgtgcatgcctccagagaacttggcctggagtgggtctgtaagcagtctctaaaccccaaaccacaaaggcaattgtaaattccagtgcagaaaggcacaataaaggccttaaa

SEQ ID NO: 5041 - DNA, 201 bp, Bos taurus
cactacctctgccccctcaccccctcctctcatgccccctgctgccctcacaataagaccaactgcctggccctcttttggaggccccagcccccctgactttctgccttcttgtcctcctcaatcccctgctgatctgagcaaaccaagctctggctccaggggatagagcaacaacctcttcaggccctggggtgggtg

SEQ ID NO: 5042 - DNA, 201 bp, Bos taurus
atcttcccggaccaggggctgaacctgtgtcccccgcactggcaggcagactctcaacccctggaccaccagaaaaggcccagtaccttttttttgtcagcgtgtggctgacacagtttttgagtgtcgtgccctgaacccattttcccaaaagccctgtggccggcgtatgtacagagtgcggtcaccctggtgacgtca

SEQ ID NO: 5043 - DNA, 201 bp, Bos taurus
agagtgaggcaggactgtgccagcgcaggatttgatcctgtcgttattttcactttttgactgtgctgtgggatcttagatccctgaccagtatcgaacccgggccccctgcattggaagctcggagtcttaaccagtggactgccagcaaagttcccatcctgtctttattttaaatgttgctatttggggcttcgctgg

SEQ ID NO: 5044 - DNA, 201 bp, Bos taurus
cttacagagactgtgaggctagcatcatgcctggtgtgattaattgctattttcatttatttatttttatttggttgtgccaggccttagtcccagcacaggaaatcactgagcctcattgcggcatgcaggattttcagtgggagcacctgaactcttgcttgcggcacgtggaatccagtttcctgacgagggatcgaa

SEQ ID NO: 5045 - DNA, 201 bp, Bos taurus
tggaaatcccatgtctaccacttcctgacatttttaaaaggctttttttcttgcaacagaatggtggtgatcttaatgaatgtagctttatgttgttgaagaagaaagcacgacaacctctgcataattcaggaaactgatattttccaagggaccaatgctaccatgttcataggaggtccattcggacaaacccaaaat

SEQ ID NO: 5046 - DNA, 201 bp, Bos taurus
ctcatttgtatgtggtgtgactcagttgttccttccccatctgttgttagtttttcaaataaccattttatcttggaaagagttaggtttatagaaatgttgcaaagataatacagagaattcccttatgctattcattgacagcacaagggttaggggagttgaccgtcctcgaagttgaagatccaagtgtaactttac

SEQ ID NO: 5047 - DNA, 201 bp, Bos taurus
ggccctaggtgagttggtggcgtcttttcttggtgaagtccatttatttgatctgacctttctgtcacttgcaaccaagagagccagctgagcacagtgtctggtctctggcctcctctctcctgccctgctccagcctctctcagctgcttgtcagctcctgacctgctgttgcacccccacctggatagtctgccctcc

SEQ ID NO: 5048 - DNA, 201 bp, Bos taurus
gtgggtgcttaaactttgaccatttcatggcatttcggggggaaacttccccttcactgatgaaaggtggttatcactaagggatttttcttatgagccacttcttcttgaatctgatttctgccgcaaaggcttactaaactcttttcggcaatgacttcgggaacctctttgacgtatctgcactcagtcctggacttt

SEQ ID NO: 5049 - DNA, 201 bp, Bos taurus
aggaaaatgggccccacggtggcaagtgtgtgaacaatagttttgggggctgaatgcatctctgagcttggagcacaggtcaggtctgagaagaccactgtgggcctctttccatcagagccaggctgcccacggagatgggcagggctggggagcagcttggagccctgggacaagttagctagcgccctttgctaactg

SEQ ID NO: 5050 - DNA, 201 bp, Bos taurus
ctatggcccatggggctacagagagtcggatatggctgagcacacagaatacagtatagccccaccacaaaagatgatccatcagcccccaatctcaacacggccaaggtcaagaaaacttgagctacataaactaacatgaatatcactccaaaatactgagtaagaaagcaaattacagaaagatatctacaaaacaat

SEQ ID NO: 5051 - DNA, 201 bp, Bos taurus
aaaggatgaacaagagtccttgagcacagtgtaggcagggcattccagatggaggaaccaggatgagggaaaatgtacagaaaggcccagaacagggttagcggagactaggagttcagaccaggaccaaattgtgaaggggcttgaaggcaccttagaaccgtcactctaaggccaaaggaaatgatgggctggaagcaa

SEQ ID NO: 5052 - DNA, 201 bp, Bos taurus
ataaatgaaatgggcccaccagagaggtggatgtcacaggaagagcagcccccaatcctgcaccagccagaagccttcattgctctgggtctgcagatgagtgagactgagggctggcctggcagggggcctgggatactacggatgcccactgcgtcactctgccctctggtttgaaatattttcttctcattgttcgag

SEQ ID NO: 5053 - DNA, 201 bp, Bos taurus
ttatggtctacatgcaggtcacccgtaacactacgtcagcctcgtttggctaatcctagtttctcacttctcagacattttcctcatttcagtactttctcggtgttgtgaaatgaacaccatctctcattcttgctgccttgcagattattcaattctgcattgttccctatgcttcctttctactgggaaactctcatc

SEQ ID NO: 5054 - DNA, 201 bp, Bos taurus
acctctcctgtgaccctctgccctctgctccctctccacaacctctttattcctggctacatctctcacctgctatgaggataactctgtcttccatgacctacgatgtcatctgctgtaacccatgctgtatgcctgtgaccctcacctgtcccatagacatctatctgctctgacctctgactccactcctgtcccttc

SEQ ID NO: 5055 - DNA, 201 bp, Bos taurus
gttgcgcggaaagtgccagcaaagcgctggccatcttcttcctgagtatcctcgtggtactaatctccttcctccttatccttctctcctacgccttcatcgtggccgccctcctgaggatcccctcggccgctggccggagcaaagccttctccacctgcgctgcccacctcaccgtggtcatcgtgcattttggctgcg

SEQ ID NO: 5056 - DNA, 201 bp, Bos taurus
gatgtaagtggagttggaatgttgccaaaccaaggaagttttaattcatcacattgtctgaaggggccattcaggcttatataattttcccctaaggcccatgtgtccattcttctgtctctctctgtctctctcagactttttaaagtatttctttaaatacagggtagaaagtggccataccaagaaggaaccccatgt

SEQ ID NO: 5057 - DNA, 201 bp, Bos taurus
acacaccacctcctattaacaaacatatttctaacttttactctcttcttctgtattgttcattttaatcttttgtggttaaatgtatttctaaaagttgcgttacctttagacatcatgtagaagtcattttttaaccatttgattaaatgttacccttgtctttcatgaacatatttgaatccatctatctttagttaa

SEQ ID NO: 5058 - DNA, 201 bp, Bos taurus
tgtcatggcacacagcctggtggggctcctctgggccccgggacacggaccggaagcgcaggaatagcgggatgttgtccttccggaagccctgcaagggcgttcctgcgggtggccacaggggggcggcggccccaggccagccccgagaggcttgggccacaccaggggcatctctgcagggccttgagggagaggcag

SEQ ID NO: 5059 - DNA, 201 bp, Bos taurus
aaattgtccaacttcaggtccctgtgagagggggtggaagaatgtaaagagggatgagtggggaagtgggttctgcctgaagcctgagggccccccagtgggcaaagcgggtatgtgcatgtatgcacgagcccacaggcgtgaacctgcacacgcacacacacctgtagacaatcttgtgttcgtggagaaactgcagcc

SEQ ID NO: 5060 - DNA, 201 bp, Bos taurus
aagagagcaggcagaagacgcgaaaggggaccagggcgcaggtccagcctcgttccaggaatcacagtctccgtccaggccatgtctgctacatgccaaacgcatgcatgtgccaggggagtcctacactgtcctcccagggctgatggggtagaggcagggacccaggccctccccagcccccaaggtctgaccttatgt

SEQ ID NO: 5061 - DNA, 201 bp, Bos taurus
agaagcccgaggtattatattgtcctcccagcccttcaccccacccgtacctccccctgtgggtcatgggagaaggtcacaaacccaactgaaaccagtcacctctgattgggacctgaacccacatggccggggctcaaacctggccaaaatccacagtctttcagttgagatcacacagctggttttgggacctaatgg

SEQ ID NO: 5062 - DNA, 201 bp, Bos taurus
aattcctgaattagggaattctgggtctttctcagatccactgttatcaatctgggcacccaaatggtggcaattcctgctgagctttgacccgactgctcccatcttcccagcagctgggaatcctccaaaatcttagaagcccagctgagcccccttctctggctgtgcccaccctgaacccccaaaatctcgcagctg

SEQ ID NO: 5063 - DNA, 201 bp, Bos taurus
ccaattggaaggcagaaggaaaggagggggacggggaaactgcaggcttctggttcagacagcagggtggacctagagaaacgaagagggtggggccagggagcaccttccgctctcatcatcaccccccacacgtagagtctcatctcccctcgcccgagtcagggcacatcttgtccccactcagtctcagggtgggcc

SEQ ID NO: 5064 - DNA, 201 bp, Bos taurus
tctggcctggaaaatcctgtcgacagaggagcctggcatagtcggacacaacttagcaactaaacaataaattgcatcacagaggtatttggtttttgttccactggttgctggccctacaagatgaggatggagatgttggtggggatgagagtagggatgctgttgagaggaaagtagtgatagttcagggtttggctt

SEQ ID NO: 5065 - DNA, 201 bp, Bos taurus
agttgatccctatgaccttggacaggtgtcttcgcctctctgggcctcagtgtcctcatctgtacaatggggataaaaaagtatgatctggccaagctgacgccagggttccacgagtgctcagtccaggaaagccataactgtctttcttatcccaggttcgaggccttctcctcccggactggagctgctactgcaaca

SEQ ID NO: 5066 - DNA, 201 bp, Bos taurus
acagacaaacaaacccaaccctccagggattcccatggctttgagaatcaactcgagtccctttccatggcctgcggggcccctgcttgcctccccaagccctctctctctgttccagtcacactggcttcctgccttaggaggctcagtgggtgcaggcccactgcctcaggtgctcttctaccagcagtccgtcctttg

SEQ ID NO: 5067 - DNA, 201 bp, Bos taurus
agagaagccaccactgtgatgagaagcctgcacaccacaactagagtagcctccactcgctgcagccagagaaagcccgcccacagcaacaaaggcccagcgcagacaaagcataaaaaaagatgaggaaactgaggctcagagaggttactcaagctacagagggtcgcacagctagtaaaatggccttggtgagactca

SEQ ID NO: 5068 - DNA, 201 bp, Bos taurus
ttaaccgctgtgttggtcaaccctggaaccacccccacgaaatcactgatctatgccaatgtggctgaaaatgccagccaatgcttatacccgcctctggggtggaaacctacaggccagcctttgatttgtatcattatgaaggggcatcaggggccccaggacccaacccaaatgagggggcagggggagctcagggag

SEQ ID NO: 5069 - DNA, 201 bp, Bos taurus
acccgcacactctttttctggttctatttctttttttatttatgggacgcacaggggcgagtggaagttttcctccccggccatacacacgagcctgcctgccgtgctatgaatagaaagagaagaagaaagagagcttggaaagtgcccatgccagcagcacttccagggcagggacccggcgcccagggtgcggccacc

SEQ ID NO: 5070 - DNA, 201 bp, Bos taurus
gcccctttctctccccagatgccctgccacactcaggcctgccacacagagctgaccccttgctcctttctggggtgtcagagagccaaggcctggccatcgccctgagtctgggggctaccccagccctccctcatcttttcaccagtggaccagctggtgttttctttctcagggtgctgtgatgtctgaggagccaat

SEQ ID NO: 5071 - DNA, 201 bp, Bos taurus
cgcccacctcgccctccacgtctgagatgtccaccagctccccggggggctcattcaacatctggatgaactgctcctgatgccggctgatttgctgtgggagacagaggagggaagggtgacccacggcctttgtccccgctcccccaggtccctatcacagccctttgcactcactcagcaaacatttacagggcacct

SEQ ID NO: 5072 - DNA, 201 bp, Bos taurus
ggaagcagggccagcagcatagacagcgcgacttctgccccggaaacgaaaaggagcctggcgccagcaggtacagaagaggtacagaggtcgcagatatcggttctgggtgtagattcaggccgtccccgagactgaaagcctccttaaatttcgatcttggtgcctcactggcctcacactaggcgctagtggtaaaga

SEQ ID NO: 5073 - DNA, 201 bp, Bos taurus
tgaggtcagagatcacaggcctggacctcccactccccaggatcagagatactcaggccagctagtctacaaaggccagaattaggtctgaagcaggagatgaagggcaggggattaggcagatgaacagagagtgagatggagcaaaagatcagagaacacagtaaaaggtcagctaggccggctgggctgggctagacc

SEQ ID NO: 5074 - DNA, 201 bp, Bos taurus
agtaggggacagcaggccctgggctccctctcagagggagggagcctatgcagagcaaatcacaaagattcaaatcacgacctcggatcccaggggttacagaaaggagggctggtggcctgccccatgtgcctccctgagccccacccccctccccgatttcctctcctgccccagggaagtgctcggcggctgcactgg

SEQ ID NO: 5075 - DNA, 201 bp, Bos taurus
ccagcccatcctgtccctccccacagcggaatggcgctgactatgccgtctacatcaacactgcccaggagtttgatggctctgactcaggcgcccggccggatgaagctgtctcatggggcaagatccggatggatgcacagcctgtcaaggtgagggtcggccagccagctggagcacagggtctcctaggctgcagct

SEQ ID NO: 5076 - DNA, 201 bp, Bos taurus
tgaaaaaggagggtttttaaaaagtggatgggcattgcttcaaacatatgaggcctttcctcaagcaacttcacttatattgacattttttattttcttacaaccagcagtgccagataatcagacaggtttctgaccataggtaatatttatgggctccttcctccagaaaaacaaacagacaaacatatgaggcctgct

SEQ ID NO: 5077 - DNA, 201 bp, Bos taurus
aagtaaaaaaaaaaaaaaaaagcagtggacaggaggacaagctttcaagggtcactgcagtaacaggacaatgaccttgacccttcccaggcccaaacagacatgaggcaacttgatactgtgtgtctggagagttaagtcagaaatcaggggtcactgagtgatgggatgtcaggaccttcacagagccctgtggtctgc

SEQ ID NO: 5078 - DNA, 201 bp, Bos taurus
catgtttccagagacacacagaatttttttttcaatcggtatcaaatactttcagaaaaagattggcagttgagtttacattttgctgtatttgtttgtcatggccaggtaaaacttctttaatatccttctgttcctgaatatatatgaaggcttgatttttcatcaaatcccacctcttatgaacagtcaaaaaatgta

SEQ ID NO: 5079 - DNA, 201 bp, Bos taurus
tacagccactgactttcaacacattttgaaatgaatccaaggtggggaacttgaatgaggtgctttatgttctggaagaactgcagaacaggccttcagagagtttctttcaggaaagattttatgagctcagattcttgtatcttctcataatgaaaaaaagtactgaagtcattaatggtgacatctgttttggccatt

SEQ ID NO: 5080 - DNA, 201 bp, Bos taurus
ggacccagtactgtatctgaataaggtgagttaggccagtgctgggacttgtggaggttgtggatcaggagctgtctgtatacctgactggcttcctagatagtctcagtgtgtgtctggcccacaaaaaccctcctgttccagcgttgcttcctccaaggcaaaggtacagttggtgggagcagagagagtgcaaacatg

SEQ ID NO: 5081 - DNA, 201 bp, Bos taurus
aacagaattcacagttgccctgggattggtgagcttggtaatggacgggatatgagcatccagtgagatgaggacagggtgagggtgaggaggacagagcatgaggcccacaagtcaagtatcctgtactattcttgatgtgactctcatgtcggtaattttatatttatttgtgggtcagaggtcgtgaccatttttgct

SEQ ID NO: 5082 - DNA, 201 bp, Bos taurus
aaaatattatcatgtcaaaatgtaatcagtacaaaaagttaaaaatgtgtcatttcacataaatcttcaaaatccaacgtgcaatttgacactgacaacacgtctgaataaggagctaccatatttcgagggctcaaatgctacatgtgaccagtggctactctatcagacagcccagttcttaatggtttatctatatta

SEQ ID NO: 5083 - DNA, 201 bp, Bos taurus
atatggccaaagagagaaggaagaacagaagttttgttttgttttgtttttttatagcaaagtctagagactgggcagcttaaatgtactgtatttatttactgggactcctggcaatagcctttaagttcctttcccacttgtgactctcagatgctgcaatgaataaagagttgttttgcctccttcacaaccacttgg

SEQ ID NO: 5084 - DNA, 201 bp, Bos taurus
aggcttttgtcttcctggagtggggtggaaagggggcatggtcactgggggctgtagatcctacccttacccatcccacatggcccaggtaaaaaagacagttgtggttattatggatatggcagcacattgtcacagtgacaaggcagtccaagatccccagtgagtccttcttgttttcccagcactggaggccaaggc

SEQ ID NO: 5085 - DNA, 201 bp, Bos taurus
ctccatccccatccccttgtgaatgatcctgtggaacagggccccacgtgtgccaggcactgggcttcatgtgactcgtccttctagtcctgcctgccaacgacctgatgggccaggcactgtttttttccctcatttttagttgctaaatcgtgtccaactcttttgcgaccccatagactgtagtctgccaggcttctc

SEQ ID NO: 5086 - DNA, 201 bp, Bos taurus
ttacagtgaccctacatggaggtactgttagaatcagcccactttggagatggagatactgaggcttagagggcaaacccacctgtccaaggcctcatagcccatcagtggtggagtctgcaactccagactgggaggtggtaggaactggaggaagccacccgaatggtgtggaggtgctccatttatatatcacagttc

SEQ ID NO: 5087 - DNA, 201 bp, Bos taurus
gaccaggcctgccctcgcactggtggagggatgcccatggatacccttcggcacatctatgggggagaagcagccctgagacagatgcaggcaccacgccggggaggagacggagcgagaggcctgtggaagatgctgcagaggggcagggtcttcctagagctgggtctgatcttcccaaactgggagtggagaatagcc

SEQ ID NO: 5088 - DNA, 201 bp, Bos taurus
cgtctgtccagctgggccctgtggggcctggtaggggtgggaattggggacgttctgcaggggagttcatagatcacatcagtgaagggcgtgtatagagcacagtgtaggccatgagctcagtgcttcctaaatgtgggtctggccactggttagcaacaccccacaggcttctgagtctgttggctgccctgggtgctg

SEQ ID NO: 5089 - DNA, 201 bp, Bos taurus
gcaaccagcctggccacatacatggcaaccctgccaccagagaagggaagagaaatctcgggatccttggggcttcctgaccctgtgccccagacacagagcgggacatgacacagcagggcctgaggtgtgaaggttgcagctggagggcttgaggggaatttaattctcacactgagggcaatgggtggctctggtagt

SEQ ID NO: 5090 - DNA, 201 bp, Bos taurus
gcccagagcccattttacagatgggaaaggggaggctggggtcactgggcttgggtcccaagctcctggcgagacctggatgccctgccttatccgtcaacagcggcagcctaaaaggcaaggccgtggtggtgaacctctctgggctcacagggggtcccctggggaaaggcgtggttgtcactcaggtaagatgagggg

SEQ ID NO: 5091 - DNA, 201 bp, Bos taurus
cctgaaaacacagtgacaactgaagcctggaggccagggagagactcagggtgtcagtcacatgggtctccctccaccctttgctcagactcacaggagctgtgtaatggccaggatcttccgaagaggcataacagcagcactaaggtctaccccacctgggaaaccccttcctgccacacctcaatctactgttgcagg

SEQ ID NO: 5092 - DNA, 201 bp, Bos taurus
gggggaatcaggcctgtctgcgccaccccctgccctgtgtggggacacctctgacctccttcccaaccccaccagctgcccaggaggcccgcaacaagttcgaagaggctgagcggtccctgaaggacatggaagaatccatcaggtatgggggtgcccatgtggtcgcagcaaggccacttctccactgccccatggccg

SEQ ID NO: 5093 - DNA, 201 bp, Bos taurus
atgtggtaatagacacatttgtctcgaagccacagggagaaggggccctcaacgaagattgggcgggctgggtcatggcgggccagggcactctgctgctcaggactctggatccctggtgtggagacacacacacatggggtgggggtgggggtagttctggctcaggggctgtgccccagggcccagagagccctccca

SEQ ID NO: 5094 - DNA, 201 bp, Bos taurus
cgctagttgggcctgacaccagagagttgtaagaacttaaaagcaagtctcagatacccatgacctctgacatttctgggcatcccagcagaagcatctgacatctggcaagtgtggtctcaggcctggggaggaagcagaaggattggccagggccatcccccaactagagacagccgacccgccatcatgcctccgtca

SEQ ID NO: 5095 - DNA, 201 bp, Bos taurus
ggtagggggcctcctctgaggcccctgtatccctcttacaccagtccatctgcaatacatgagctctcctgggatccagagctttttgaggatgaaacctgggcacccttcctggaggggccctgagctcacagccatgtagctcctccttatcccggggtgaggggcgggaaacaggtcagcaggaagagggcaggcctg

SEQ ID NO: 5096 - DNA, 201 bp, Bos taurus
cgcaggtgccccagaaatcaaggggatgctggtgcctcagaggaggggaggcaagatggggtcagaatcagggaaagaggttgaagtacctgggctccgggggcccgtcccagcgctccgcgttggccccaactggggagtaacctccgggagagcggttccccggataccccccgttctctctgccaggggccctcgccc

SEQ ID NO: 5097 - DNA, 201 bp, Bos taurus
gcaactggaggggcatcctgagcggcccctgccccatgacccctatccaggctgacccagtctgtggatcccgacttcccaaacctctggaacccatttctctcccggccccaacaccccagacattctccagccacctctgagccgctgcccaagtcctcgttggcggctgtgctttcaggataaaacctgaactcttcc

SEQ ID NO: 5098 - DNA, 201 bp, Bos taurus
aatgacagttatcagagcagaagagcccagggccctggactaccggctaagtgagtgtaaggaacacccccaagttggctcccatgtcccacagggtcccatcgatagtccccaggatgggcccagggtgggggccaaggaggggtgtgggggactcaggcataccaggcaggggcagcaatgacaagttctactgccaga

SEQ ID NO: 5099 - DNA, 201 bp, Bos taurus
cctcgccgggcctctggctacaacagcaccgggccttggtggtgttgaaagctttgggtactgagcactttccggcctcgaaatgggtaaagcagaaactttgccgtgtgtctgtgggggtgattccccagtgaaactgctagaagggccagccacccccagttcttgtgaatggggtggtcctgaccctaccagcagcca

SEQ ID NO: 5100 - DNA, 201 bp, Bos taurus
gcgttgcccacctgtctccttgtggaaggcctggtgagtgaagtgaagctgcctcctccatctgtatatagtcccaactcctcacctacacacatcctcatgtccaacgtggccacaaagccgtcatagcagaggcagcggtgaccccctggcatgttggtgcactggcccccatcacagatgtccggattctgctcacat

SEQ ID NO: 5101 - DNA, 201 bp, Bos taurus
tgcctgggctggaggcagctggcaatgccctggtgttcagaaagacagaaactgcctgacccttgctgcacggccagagcgcttctcaggccaagagatgccgagcggaggagccgattctgtgattcctgagtgaagctgttttcagattgattttgcacactcttgtacacgaggatgatgaacagacagatgtggtcc

SEQ ID NO: 5102 - DNA, 201 bp, Bos taurus
caggatgactttcttccccctcacttgcttcctcctaccttggcatcctcctggcccatccccctgagattctctcagtcaccatgtctagtgccctgctatgaccttggtcctcagctcccccagccttcccaccacctctgctgtggtctccatccttagagagccagttctggcacattccaagctcccactttccct

SEQ ID NO: 5103 - DNA, 201 bp, Bos taurus
gctacaggccatggggtcgcagagagctggacacaactgaagcaacttggtgtgcgtgcatgtgagggacatcactcttgatcctagagtgttgatttgcgggctggcctcagtttcccctctgctcctgggacacagacgtctcagctgtcctcctctgccaccctcagagccggtggggggcgatcctactcaagcagt

SEQ ID NO: 5104 - DNA, 201 bp, Bos taurus
ttatggtcagaattcctaggagtgttgttatttgactgtttatgcctccatgctttttcaaacatggccaagagcacagaataaaagactaacttcaaaccataacattagaggagaaaaactgcattcccaactcaagaaaccactagagttcatctcaaaacccagtgctgagtttcctggtggccaaagcaaggaggc

SEQ ID NO: 5105 - DNA, 201 bp, Bos taurus
cttcatcatcagaataagagagtgccagtttcctcagagcctcaccaacaggaggtgttatcaaaccttttgatctttgccaatctgatcggttaaacatcgcattgtggtgtagttttaatgttcacttcccttatgaagttgagaatcttctcttgtgactaagaaccatttgtttctcttcctctgtgagctcaaagt

SEQ ID NO: 5106 - DNA, 201 bp, Bos taurus
gtatgtgagacagcccagccaagatcagcaaagctgacatgcaactgcccagaaacacatggagaccagcccagtggaaaccgaaagaactgaccagcagagcccaatctaaactgccaacacatggaatgcagagagctaaataaatggttgttgttttagtcactaactctcagggtgattttgttactcagcaatagc

SEQ ID NO: 5107 - DNA, 201 bp, Bos taurus
aggaggctggtattcaggctgggtttaggtacaggaaactctttgaggcgctctgtggcttcagctgcccagagacaccattgagtcatttcctctccggagacctgcagtctctctgcaacagggaacaggactccagcctcttctagttttcagtcccctttctccagaatttctcagggggatgtagcctttcccctt

SEQ ID NO: 5108 - DNA, 201 bp, Bos taurus
gcccctggcccgattatttggcgagatgatagggctaccctagggggctgtggggagaaatgaaccccaaagaggctcaggtagagccgcagcagtctgctgccaaggaggcctcggttgctgtggtaacgcggcctcctccaattcacttccgtagtaaagtagcgcatgcgcaaatagcccgacaggccgcgaatgtgg

SEQ ID NO: 5109 - DNA, 201 bp, Bos taurus
ctggcctcgggacacttggcccatggggctgccctacgtggagatgggtgatgaccacaagagctgctgaggtccagcagggcttcttgatcacccgacatctatgcacccacccaggacagcggcctgaattgggagaccaagagacacagttctgccctccggctccctctccccttcatcctggtcctccgtgccccc

SEQ ID NO: 5110 - DNA, 201 bp, Bos taurus
gaaggaaccaaccgagccaaccagccttgactgtggggagacttccagcatccaggaccccgaggaaagattcttgtttaagtcccgggcctgcggaactgtcttctgtggcggtcccaggaaacgagcacagggcatccgagcagaagggtttgaccacgagagaattataggtaggccttggacaatggaagatgtgtc

SEQ ID NO: 5111 - DNA, 201 bp, Bos taurus
tttttatcacatgccctgctccatgcattctcagtttgcttccgcctcctctcgcagttgcatcccagtgcctaaaacagctcctggccaggcacacagcggtgtattcagtcagtaaagacttattgcccaaccctcaatattcactgaaaggacttatgctaaagctgaagctccagtacttaggccacctgatgcgaa

SEQ ID NO: 5112 - DNA, 201 bp, Bos taurus
agggagcttccagaggccacaagcagagagcacatttattctagtgcagatagaggccctgccccgtaagtgtccccctgctgctctgggccccgccatctttctgtccaatgttcccagtcacgtgaggcatgtggtgcgtcagttcacctcagcattcagggtggacgtcctgtgtatccgtgggcaggccagctccag

SEQ ID NO: 5113 - DNA, 201 bp, Bos taurus
ccggggctaccagggcgacccctcatctgcactgcttgagctgctggaccctgagcagaatgcaaacttcctggaccactacctggacgtgcccgtggacttgtccaaggtgcgtgtcctgcccggggctgggccagcggggagggatgggcaccctgtcccccaacacctcacggccccacccccaggtgctgttcatct

SEQ ID NO: 5114 - DNA, 201 bp, Bos taurus
gtcaagttgtaattatgacactccctgtagctggtcacaaggtgactcaggagactgcttgccccctgacccaaagtgaggctgcaaagaggaccttcccattggagctctcactcctccttgattggaactgcaccctccccacctctgacatcagcctctgacgagggggcgcttccacccctcccttaccctgggggt

SEQ ID NO: 5115 - DNA, 201 bp, Bos taurus
tgtcatctgccaggaaggccgcctgggtaggttatctcctcctgggaccagccttcaaggacagaatgtgagcctggctgtagggccaccagggtccccgctgctctgctcagctgcctctgagccaccttttcaagttcacctccattccctccccggccacgggtcccctgggaggccctggagatgcccagaggcctc

SEQ ID NO: 5116 - DNA, 201 bp, Bos taurus
caaggtgggccgtttcggtcaatggatccctaaacttactagctccagccttgctgttcctccaacattccaggcatggaccagcctcatggcctttgcacggattgttccctctgcccagaatggtcttcatggaagtctcttttgtttcttgttgtattctcagacccccaaacagggcccagcacacaataagagttc

SEQ ID NO: 5117 - DNA, 201 bp, Bos taurus
ctggggaccagtgccaggcaaggagcctgggttcttctggagggtggaggagactacagcagggcgggcgacacagggtggtgtggccctgtttccatttcgaaaagctccctcgggctgctgtgatgtaacccaagggctctgtaacttcagcactgttgacatcagggccgttctgggcactgtgaggggtggagcagc

SEQ ID NO: 5118 - DNA, 201 bp, Bos taurus
gccaggtgaaaggccaaggttctacaggctgcagcctggttctcatggagctggtagagcaggtgaggcgagcggctggggtggctgctaccagccccaccgctcagaggccccaccgggcccaaggggacagtctggactctcagacaggtgagttgcagcgctaggattctaggtgctttctgtttgggatggggggcg

SEQ ID NO: 5119 - DNA, 201 bp, Bos taurus
tggaacagtttcctgctggtgatgcggggccaacacctgggtgtgctgacacccaggaccacagcctcgctgggtcttaggcgatggaacttcacctctgggggcccgacccaccaaccttgaaaagattgttctaggcagcccggtgccttcttgcgagtcggtggcggggatggctgagaactcaactctgggaactcg

SEQ ID NO: 5120 - DNA, 201 bp, Bos taurus
gcgggaccgagatgctgctccacgccccatactgctgggggatgaaccccccacggagaacgatcaggccctgacgtgcagtgccaaaggggaggccctgcactaaatgatttatcgcccctttatgtgaaccaggagggaagctcagcccccaccgcacaacggtgacctcactgaatcccaccaagtacacgtggtggg

SEQ ID NO: 5121 - DNA, 201 bp, Bos taurus
cattctgtgttttatgtggtaaccttagcctggacgagcctggggaggcaggcaggaaggcttccaggaggaagaggcagtggtgctaagagcccatggttcggccacctttccttcccctcccccacccagcgtgccctcttggctgtgctcacaagagactggaggtggagacgatccccatgccagggttgaagatgt

SEQ ID NO: 5122 - DNA, 201 bp, Bos taurus
tactgtgttctgcagctgtcatttttatctcatttcaaaatattttcatcagcctcaaagacagccacatcccatcagcagtcactctgcaccctctttccaccaacccactctgtgcgtcagtggatttgcctgttctgggtatttcgtatacatggaatcacacactgtgtggccttctgtgcctggctcctctcactg

SEQ ID NO: 5123 - DNA, 201 bp, Bos taurus
gggctttggcgtgctgcctgcggagctggtcaaactcagcctggagagcgtcatagagctccagaggaatgacctcggccggaccatctgcctccatctcatccttctcgaagtgctccaggatctggtggggacaggggaaccgagcaagagtggaagtggccgtggtgggcgtgggggggcacagggcagccacaccac

SEQ ID NO: 5124 - DNA, 201 bp, Bos taurus
tgggtcgcctctggctgtggtctggcctctttcctgcagacgtgagtgagcacccactcgccaggagcctgggaagtggtttgttttccagcctgctgctttggtgtcccgaggccctggcctggcaatggctcagagcagcttgcctctcccctgtgctgtccccaggatggcggctccctggaccaggtgttgaaagaa

SEQ ID NO: 5125 - DNA, 201 bp, Bos taurus
tggttccacccttattagctgtgtgaccttggggaaattaattctctgagcctcactttgctcctgcgtaaaataggccacacaaaacccggggtgtggggaagattacatgaacgaataaatttaaaaggtggtgataagccttcaacagcatcaaaggcagatgcaaggggcatgcagtggcggcctttggtcagcagg

SEQ ID NO: 5126 - DNA, 201 bp, Bos taurus
gggaaggtgtctatggctttgggctctggctcccaggagtatgaagggaggatgccctgccctgcccactcctgacccgccctcagcagccaaatttgccaccaaagggcctttgcacatgccattgtcttttctgggatccagccctccccttacccaatcctcctccctcaggctagctttgactaagccatcctgcat

SEQ ID NO: 5127 - DNA, 201 bp, Bos taurus
ggcacagggcagcacatgctcacctgtagagaggcggagggaaatccacttccagggtcccccgggggacacagggccaggcagcctgccgcctcagggtctgcatgtctgcctctgcgtgcctgggggctcctgcctccaagtcctgtggggccattgttgacagcaacaaaggccaccccagtgtcctggcaacagctg

SEQ ID NO: 5128 - DNA, 201 bp, Bos taurus
gtgaggggctctaagacctcctcctgagaaagaaccagcatagggtgcacaagcggcaaacaggatgagacaagacaagacctatggtttccagactcctgtcccacaggcaagagttgggcaggcgtgctgggcagagtgcccggcacgggaagtaacccaagagcttgtgccaggcgtgtctgagctgtccccatttca

SEQ ID NO: 5129 - DNA, 201 bp, Bos taurus
ccacaatccacaggatggccccacggagaacagtctggccctcaatgtccacagtgctaaagtacgtcctacctcagactagtggtttttcacccgtgctgtccagaaggggtgaagggtgtgaacccccaagaaatcacatgcaaggtttggtgtgggtgtccatatttgtgggtgaggaaagggtattttggagtttgg

SEQ ID NO: 5130 - DNA, 201 bp, Bos taurus
tcagcaccttcacccaagagggtggagtgacgggggcccccagaaatagcctctgagtcatttggaagcaaacccatggaggcatcagggccagaaggcccgactgatgtcatgatctggaggccagaagtccaagaccaaggggtcagtggtctgggtccttctgaggccatgagagtgagtctgtcccgtgtccctcct

SEQ ID NO: 5131 - DNA, 201 bp, Bos taurus
ccctggtcccctggcctggggacagctttggagttggttaatccaggctggaggggccaggaggtcttgatctgggcagtgtgatcctgttatgatactggcaggggccttgggagaaacgtagaaaatccacttggcaggactgaccagcttgtgtctgggtcttggttcacaacagcctgacccacctgctggtcatgt

SEQ ID NO: 5132 - DNA, 201 bp, Bos taurus
tgtgtgtgtgcgcgcgcgcgagtgcaagtgtgagagatctgtcgaagcgttcacttcccttatgtatgagatggatcaataatagttctcacctcctatactatgaggaataaattaagaaatgtgaggtgtttacacacgggaggcggcccagtgactccactcctgggtctatccaagagaaatgattacttggctcca

SEQ ID NO: 5133 - DNA, 201 bp, Bos taurus
gcggtggatctcattacctacccccacccctgctccgcatggatgctgcctccattgcgtgggcagagaatgactcatatctggcctctgacacactcttccccatttgaacaccacccagaaggaagtggggagacaatcccattctacttcccttgacagggctccatgaaggtgagcacttggccaggtgcttctctg

SEQ ID NO: 5134 - DNA, 201 bp, Bos taurus
ggccaggaggcagctagagctgggcagccatccgttgagcctggtcggcacctggacagcatgcagtcactgcgtccagagcactgacagcagggcttttcataactgggagctggcccggatccaagtgcccgggtcagacagctcggggaggcgagggaggtcagagcacccgaggacagcaccctgctgccccacctc

SEQ ID NO: 5135 - DNA, 201 bp, Bos taurus
cagcctgattcttccactcctgtctgaacaccaatctctcccaggtctaatccagggtcacctccagcactgcttacactggagccacatcactcaagggaacattcctagacaccatggggtggccctggccccatctacctgaggccagcagtaacaccccctcccctcacccctcgggtgctaacagctggtccactg

SEQ ID NO: 5136 - DNA, 201 bp, Bos taurus
cacggcctccgcgcctgcccttgggcgtggggtagctcctcccggccctcgctgccccggcgttgcgcagccactcctgtgggccctgcccgcccgtgtctgggacgtgcgagtggacgctctcaagaaaacgctccagtagcagtgctgctccagccgatgggccacgccgtctggtacagagttcgagctgctgaagtt

SEQ ID NO: 5137 - DNA, 201 bp, Bos taurus
acccccaatcctaggctgccagattcagtcacctgctggcggcttccggacagcccgcagcctcaccttgaatagggggaaacaggctcagcgccctgaaaagatgatcgaggtcacagttcgtcagagacacgcttggactgaggggaggtggggagcagggactaccgggtggtcccaggatcctgttggggcctctgg

SEQ ID NO: 5138 - DNA, 201 bp, Bos taurus
tctgaccccagtctccccttctcctcctagagctcacagttctggccacagtgggagattggagtgtgagaaagactctcacaggcctgcctcactgcccgcctaggcagattccagaccaatgacatggtcctgtgacagctcacctcagctcctaccaaggatctagagcggtcagcaagctgtgcccatccagggccc

SEQ ID NO: 5139 - DNA, 201 bp, Bos taurus
tttgctattatcaaatgtgtcctggatttaagtgtatccaggatttaattcatttttatattttaaaagaacacacgattgtattcaaattttccatcacaatggcccttaaacagtatttccatgtcttttacccatacacagtgagtacgctcttaaaatggtatattctgcagtctaaattatgcagattttgctttc

SEQ ID NO: 5140 - DNA, 201 bp, Bos taurus
tttaagaggtggtagtttttgataaaagcttgtagaagtgactttttaaaatgtatactataatttgatataaatgtaatttaaaaatgcatttacatttcttacttgtgacaccaggagcaaccttctattattatagtcaggaacatttgtttattcttttctctgccaagttacccagggggtgagtacagggctttc

SEQ ID NO: 5141 - DNA, 201 bp, Bos taurus
taaggtgtggtaaggagttggtggagccagggcactctcactgggagacgaaccaccacctattcctgagtgtgctgacaatggcctccacagctccacttggatcacattccagccactctcagctgtctctgaatagctagatgaagtcctttcccagggcctttgtgttcaaggttcagcacttagccactacacact

SEQ ID NO: 5142 - DNA, 201 bp, Bos taurus
gtcagtgttctgcatatgttctcagtccatagctgaaaggggccagaaccatttcatagtctcctctagattccccactccaaatcttcctgcctgttacccagtacgctggtgggtaagactcctctctggtcccttggtccatgtttctgggtcccactgttcatggataggggctgagtttttgttgttgggataggg

SEQ ID NO: 5143 - DNA, 201 bp, Bos taurus
agtactgaattctgtgtctcatcattaaacaccgatgctattctgatggttattacttagatcatagccaactgccctttcctgctggagtgaatctgtcagctagtggtacaggggaggctgggttctagtccagtcactgatttccggtctcttctggctctaagttacaaaccgcctccccgtcgcttctgacaccca

SEQ ID NO: 5144 - DNA, 201 bp, Bos taurus
ttgtggaaacagttaccttaatattaaaaaccaaattcccctagtttgaaggctctcacacacacagctgtaaaaccctgggcctctgcggaggttctctcttacagactatctctggggttttgcaggtcatcgcagtgtcacaaggcacgcttggccactgtgcgtggcgctgctttcagttggctctgggccgccacg

SEQ ID NO: 5145 - DNA, 201 bp, Bos taurus
cttcttcccatacacagacagctacatctgtttgctatctgacccctaaggtctcatccatgttcaaaaccaggacctccagatgatgtgctgtagccttcccattaggtccagctgtgggtcacatggtagctgcctactggaccacagcaaagaacaacaggatacagcaatagaaacctggaatggaaaacacatggc

SEQ ID NO: 5146 - DNA, 201 bp, Bos taurus
tctttcagtagaataattgtttattttatgtgattcagatacggatttgtaggacatgatttattggaaaaagttacacaagctatttaaaggggcacacaattggtctactttggctgaaatgattctctgttcaagtaatgttacatcaacactgcttaaaagtctgtatgctaaatccaaaccagaagacacctttat

SEQ ID NO: 5147 - DNA, 201 bp, Bos taurus
taaagaatgtccatctcatggtgatgaccttggcataagagggcaagtaaaaacacacgatgccttttaaatacttctattggccaaaacaagttacatgttcaatcccaacatcactaggataagaacatatactccaatcatagagggaggtgtcactgaaaagtaatgtggccaaggatgaagaggtacagtcctctt

SEQ ID NO: 5148 - DNA, 201 bp, Bos taurus
taaatttatttattttagcttagtgatatatcttgcgtaaagggctattcacctcaaaaaaatcctcaaaaaattcctttataagtcatatggagttaagcaaacatctcaacgccttgtgccatgtatttcattaatttattcagcaagcatttttcaatattcattctgtttaaaataagaacttaagtaattcaccta

SEQ ID NO: 5149 - DNA, 201 bp, Bos taurus
tctcaatgacctcccccattacttgggccctttgggctcttcagagctggcagaactctgatggggacagcacatgagtgtgatgtgggctgtaagctaggaagcttgggcctgggccctccagtgatatcgtgatgtctgagaacatgcctccctgcaacctgagctgttcagggcaccacataacacaaggggcagaca

SEQ ID NO: 5150 - DNA, 201 bp, Bos taurus
tttgatatctgcatatcaattcaaaggaaggatattttataaagtttcaaatgctctctttcttcaaataagtttgccactactcaattcctgaagattttgcagaatatgaatcagagacagattatttctaggacattgaatgcctcatgatagaattcttaacctaactctaatttcttagaagctcaaaaataaatg

SEQ ID NO: 5151 - DNA, 201 bp, Bos taurus
ctaggagtttttgaaacttgccacaggtagacaaatactttaggactgagccaagtctgggagcagggttcttctcgcaatatgaatatctgtttcatctatctggcccatgtcagtttacagagcacctccttagctccatgaccttgattattatatcattcagcttatagactccctgccccaccgccaccacttttt

SEQ ID NO: 5152 - DNA, 201 bp, Bos taurus
aagaaaagtctcagaatacaagtgagtgggaaatataaaggtgcgagtaaagagtgctcctccatagatggataagaaaacacaaaacagactatagataaataataaaatagagcaagataagacatatataaggacagaaaatgcccccggcaatctaatgatgaaattaatcactgtacaaatgagcaagaataaaaa

SEQ ID NO: 5153 - DNA, 201 bp, Bos taurus
catggcctttccaaaaccacctgtatactgtcatgggggagaagggtccccgtttgcaatactggggttgaaaacgtgacgccaattagtccccattagaccgtgctgctgatggggtccttgggcctcaccatgaaccaagactcccaggtgattctcattctacgactggtccgtctcacctatcaacaaggcctcggt

SEQ ID NO: 5154 - DNA, 201 bp, Bos taurus
aggaaaaaagaaaagaaaaagggcctcatcttctgagtcctcctccccgaagaaggaattgcccagggataatctgaaaatgcaactatgaaaagtcagagtggcccagctatggggctgctgaccagagatgggcttcagctttccacatgaaaaacaagggaacattgttaacttacctttccagtgagcacttagtgt

SEQ ID NO: 5155 - DNA, 201 bp, Bos taurus
ctattcctcaacttagtcaccatcgctgtaattatagagatgtgcaacctcacaatcttttctcacgtgactcacccctaacgaattcacttggtggccctctgtgatctttaagcttggtgttccacctgtctgaagtgcctttcctggcatccttaaacctgataacaataacctctccattaggtcttatttaggtgt

SEQ ID NO: 5156 - DNA, 201 bp, Bos taurus
tttgtaattgatttacttcttccctccaagcattatttagtagtgtattggcctttattcagtcattagacatttctttttagggtaaagttataactaaatcaagtttatttatagtttgcgattaccaacgacacattcaaagacataggaaacagatttttacatccttggtttgccctgtaaaactatttctatacc

SEQ ID NO: 5157 - DNA, 201 bp, Bos taurus
tcaaaaaattcttaacaaattctcaactgaggcattgtcctaaaaacaaaaggttgaaatgaactctgaatagccaggaagtccatctcatggaccagcctcggtgtgcaattccttcttccaccataaagatggatgagcttccaccacagctcaaaaactgtagtaagctcaaattttagcaagagactgaccatggac

SEQ ID NO: 5158 - DNA, 201 bp, Bos taurus
catataatccacctaaagaaatccctaaatgatttcttatatatagtatctaggagactggcatcccgagtgatttaacagattaatactgtttctgtctccttcaattatacactgtgcacttagatccaaatgggaaaacgatggcaatggtattggtgttttcccacatgataaaaatcagatgacttcaagagctgg

SEQ ID NO: 5159 - DNA, 201 bp, Bos taurus
ttaaatctcctgaatcatgtgtgtatggccattgtgtgagagagaaagaatgacaggaaaatgagagatagagaaagagagttagttagttagttttagaggtgggaaaacagagaagcaatgggccagagactatatatatgaaccatagctgaagttccaagctaataagccagacagattggacagagcccgtccaca

SEQ ID NO: 5160 - DNA, 201 bp, Bos taurus
atcaccaaatgggctcaatgaacaaaggggccatgatggcagggatggagtttagacttggtctcagtgatatggccatccactcactgaggccaatctggctatgaccaccactgagttcctcatctgctagcaacagaggtcaattctgagcccttactatggcatcctagtagtagattgattacaatgggccacttc

SEQ ID NO: 5161 - DNA, 201 bp, Bos taurus
tcaagtttctataaagaccttacctggtttcccctggagggtctccccatcttactctctcatggttacctcctagtgacagggccccctacaggaccagcgggtgcaagatttcctagcttcagctctctgatccactcaactggtggtcacatcctcctcaatggcctcctccagtgcacttgctatttgtgctaagct

SEQ ID NO: 5162 - DNA, 201 bp, Bos taurus
ttttcctatgccacttcaaagaagatgttgaaagttaatttaatattactttagatgtaaaaaagtctcctctcttttaggaggcacattatggccagcaagatattccatgaaaatctttatatgaggtaagtggcaggatgaacatctggattccctctgtatcatgaaaagacctagggtttggcctcttaggaactt

SEQ ID NO: 5163 - DNA, 201 bp, Bos taurus
ttgggcctccatgctgcaactactgaagcccgagtgccctaggattcgagctctgcaacaagagaagcttgtttatagctgtggaaatatacctgggtcaatgaggggcctgtgaggataagtgggataattgatgcttgtgtaatgcataaaaattattggagaaaaaaattgttcatatgcatttattcttttcctctc

SEQ ID NO: 5164 - DNA, 201 bp, Bos taurus
tgatatcctgctacttacatttactagagcatgcctatacatatttttttttctttccataagtactaaatggctccattttcacccatttctgtttggtggcagagaaacaagacaagggaaccatggggctgtattctgaacccacagctcatagacacactatagtataaaaatggaagtgttctgaaatgcactgca

SEQ ID NO: 5165 - DNA, 201 bp, Bos taurus
gtgcttttttcttttttttccttcccctgccatgtatgtcttcctttttctttaatatgaaaacattcactttaagaagtatttccaaatagcctcttgaatcttaaggtccatggcaggtttgtgttatctttggagacaaattgtctgctgtgttcatggtggaagcccatcagccaaggcctggcatgctgggggcag

SEQ ID NO: 5166 - DNA, 201 bp, Bos taurus
cgagcaaaaactgttgtctgtgcagcttgtctagccaacttggagacagcctccctgggccttcccagcattgtggtcaaaccggccgagtggccacctcgcacaggagagtcctgatgctcaaaaggaccctattttcctccctgcttaaacttgccaacattcattgatccaaaagactcattgttctggggcccctgg

SEQ ID NO: 5167 - DNA, 201 bp, Bos taurus
acaacagaggttcaacaaacggttgttaattgaaataggtcaaaacttggggcacacagcattcacactaaattaactagtgatctgagaggctgaagggaagccaggggattgtatcctgtgagtcccagacagttgatatgagtctagaggcttgaggtgagagattaataaactgagaaagggatccatacctgagga

SEQ ID NO: 5168 - DNA, 201 bp, Bos taurus
taattccagctacctttacaacccctctgttttaatttctacctcctcagctcagtgagactgatgtttttcacctgggcttcacaaccgtgtgccacattcaaggaaggtcccatagacataaaacaaggttgaatgtgtgcttatctcatgacgtctggacttttcaggactctagtcctgcactgcctattatccaat

SEQ ID NO: 5169 - DNA, 201 bp, Bos taurus
tccgtgcctggcagctagccagcagggggtcagtgccaccttcaaggcagctgtacaacctgtgcttgaacagtcagtcttctctcctccaaagagaaggcgacattccagatcctgtcctctggccccgagtctgcactcttctctcatggtatttcatttcttcctgacctagtccccagctggtctccatacatacca

SEQ ID NO: 5170 - DNA, 201 bp, Bos taurus
gaactcgctttctccaagttccttttcttgtatatttccagttatgggaccataagctaaatccccacgaaatgttctaagggccttgccacttacttgctagctcacatcattggtgtcaagaggcagtggaatcttcaaaagctccacctttcattaggtcaccttgaaggtctctgattcctggaccaggtgtgtgtt

SEQ ID NO: 5171 - DNA, 201 bp, Bos taurus
tttgtgacctatatgtttattcccatttcttccttaataatggtcagtggcctttgactagcattagatgcttctcagtcaacaatacgctcccatgaacgaaagtcaatggatactttttaggccttatcaaaccagcactgcactaacattcctttgtaaatctccttgttccatgactcaagtctgggcctaattctc

SEQ ID NO: 5172 - DNA, 201 bp, Bos taurus
ggaaattatttaatcagttctagtagctccctttccagtttatttacttatcaatttttttaagaattataatcatgcatcacatcagaagggtatgatttgtgagctagctgttagctatcactttatacagatcatccactaggctggactaaactttgcatcttgaagatttcaagcaatttccaaatgtctgactta

SEQ ID NO: 5173 - DNA, 201 bp, Bos taurus
cttcattcccgatcctcactccctttctcctcggggcgcaaatgagcgccacaggctggttgtgggccgacgtccccacgttctacatgttcgggaaaatttgcccttcgaggagaacccagcgacgcccagtggggaattccgtaggtttagaaaacaaggagaggagcacgggaggcgggaaagagacaaccgcacgcc

SEQ ID NO: 5174 - DNA, 201 bp, Bos taurus
gcagaaaatttggctacatttgcctttttaaaaataattgttgttgagttttcctcctgtcattaaaaaaaaaaatcgaattatggaggaattcagttcatttcagttcagttcagtcgctcagtcatgtccagctctttaccactccatgaatcgcagcacgccaggactccctgtccatcaccaactcccggagttcac

SEQ ID NO: 5175 - DNA, 201 bp, Bos taurus
gtacttgtcagagtacggggccacagtgcaggactcactaccattcagcacatgctggaaggtcagctgtgaaatcccttgttctctaaatctgtaccagcgttagtcctggcccttgcgttccttcctccagctggcttcaaatcaatgccccttttgccctctgagacgacacacatctcgttcctaaattacctggct

SEQ ID NO: 5176 - DNA, 201 bp, Bos taurus
ttatatattatgaatgacaggagaactaataaaaataaaacaatacctttttttctttgttctgttattttgttctatgattttaggtaactatattcaccctaggaaatcttttttatacttttacaatctgagatgtataataaaccatttatatctttccatgtttcagaaccctgaagcctgtatttgaaaactgaa

SEQ ID NO: 5177 - DNA, 201 bp, Bos taurus
aatgttaaatgcaaatataaggggtttctttgataatcactgtgtaaaaacaagacttactggaacttttgcccaaatggaccagtgggattttgcatacatttttaggacaaaatttcgcatagagttctcttttccttcctctagctgactaccaactttgtcttaagaaagatcatccttatgggacattttatcaca

SEQ ID NO: 5178 - DNA, 201 bp, Bos taurus
ctagggagcttcatagaaatgctattcctggctctgaagtctcagaacctcagcaattccatccacaaatggtcacctactacaactcttgtttatttcacttatgttttccttttcaaagggactacaggcttaaattcatttataaacacttaatcagcttctttgcaggggaaaatcctcttttaaatatacctgatg

SEQ ID NO: 5179 - DNA, 201 bp, Bos taurus
aataatttccaagcctccgttaagcatataagtccatcaattttttatgcatcttcgtaacaacaaaacattgccaagttttacatttgaatcaatttccgtcatttgaaaaaataattgtagtgaaaagttctgcctttgctctctgaaatgcctttaggaatgcttttattttccatttgcaaagatgtcctccatttt

SEQ ID NO: 5180 - DNA, 201 bp, Bos taurus
aagatcccctcgaggaggaaacaacaaaccactccagtattcctgcttgggaaatccctcagacagaggaccctggtgggccacatggagtcacaaagagccagacatgaattagcaattaaacgatacattggatcggggtacttgttgcagatggggagcaaagctgcatcatcattaagagtgtggtctctacagtat

SEQ ID NO: 5181 - DNA, 201 bp, Bos taurus
ctttacagaaatttctcagtaactgtcttactatcttaaaagtaaatacagcaattactgtatcatttttataaaagagaaaagtgagcaacaggccaggtagctgttaagtgatgtgtccccaaatagaacatagctctagaaagaaagtgacttatgttattcacacttctatctccagcaccaagggccatgtctaac

SEQ ID NO: 5182 - DNA, 201 bp, Bos taurus
gtgaatgtggcccgtaaatttggcatgcttagtctttataggctgggtaattatatatgctaatgagtaggaggattattccaactatttttgggaaaggacggaggcttccaggatatgggccaccacccactccttggtcttttaacaatgccctggaactgtcatggcacctctgggtgtgtcatttcacttgctgat

SEQ ID NO: 5183 - DNA, 201 bp, Bos taurus
ccttcctgggccccagtaagtttcctaggtacgttgtttactcagaaggctatttcctttctaatatcaaaaatgcaatcaataattattagattttgtacagggcctagcaactggctgcccaaggaatgttgcattcattaacactttcccttgtgtttaagtacttctgaagtactgtaggtttttgtgataaccttc

SEQ ID NO: 5184 - DNA, 201 bp, Bos taurus
ttacagattatcaattctgctgagcaacagagagacatatttgggagtcgcataaacaaatacattcaactgtgctgtggattaacctaaagtgacacatgtatttaaaaatctgcctactacttgtcctcattgattaaatgcccttaagaaagtaagtctgatgaaataaaagccattaagatgcagcacacctccccc

SEQ ID NO: 5185 - DNA, 201 bp, Bos taurus
tctacctacagtactgcctatcttttgtagtgtggcttctgataaataggcccccagaagagacaatttggggagctggaaagtactttatttttctttaaaacctgacatagcattgtccaggccttgcaggtgggaggaacatcggaagcagaaaggcaggaggagacctaacggtaatagtgactgacaaatcaaaag

SEQ ID NO: 5186 - DNA, 201 bp, Bos taurus
aaagtaacatcccattcctttggaaggctttgctttgcactctttgaaaaaaatacctgtggattgtacttgaaagaaagtatctccctgtggattgatcatgaaaaatgactttgtatttcatgctccgttattagtgtcactacctcagaaaatgtcagagtggtttctcctgccacatctgactgggagaatctgggt

SEQ ID NO: 5187 - DNA, 201 bp, Bos taurus
caaaagttcatcattggcctccattaccgcagcagtcaccaaccaggctgaacaggggaaaggttgaaccacagtgctttaatatttatttggccatgtcgggacttagttgtggcgtgtgggatctagttccctgacaaggggtcaagcccattaagaaccctgcattgagagcatggagtctttgccagtgggccacca

SEQ ID NO: 5188 - DNA, 201 bp, Bos taurus
caaataggatgcctaaagttgtattgagctcacagctaactataaacgcaccccttgacatggccctgcccaccaaagggacaagatccaaatccacctgcagagggcaggaaccagtcccttctaccagaaaacctgcacaaaccccaaaaccaactttgcacaccaggcagcagacaccaggagcaagaactacaaccc

SEQ ID NO: 5189 - DNA, 201 bp, Bos taurus
atatatgacatcagcaaaaaaaaaaaaaaaaaggagaattagatgtcttcttatttactgtttccttttcagcatcccatacacagatatatgtctaatagccagcagcctgtctaaaaaaacctgattacttggccagactattcttgcctgacccagtgaacacctcagtaaaatgttgctcagttgaggtctcaaacc

SEQ ID NO: 5190 - DNA, 201 bp, Bos taurus
aagacaattttcacaatgaaaacaatgtaaagaaggaaaaaaaaaaaaaaaccaaattgttttatccccttaaaagcaacatgctatcactccatagtttctcaaaaacatgttcaattatgattaaaaatctctgctttttctattttgggcacttataaatggaagtgcttgaattttatgaattcctttcatatcagg

SEQ ID NO: 5191 - DNA, 201 bp, Bos taurus
cagctaggtctggccccggatcttgtgaggtccctgctttttcctgtgttcctggtgtgcatcctccaagaggggagttcctgttttccctcgtctgtggctttcctgtgagcagactttgctggccttcaaagccagcttctcgcaagaccagccctccacactgcggagcctgatgtggggctcagaactttcactcct

SEQ ID NO: 5192 - DNA, 201 bp, Bos taurus
aatagcttatctaatacttggacagcataacccttttctcgattaacatgttaactagtcaaaagcctgcagacacattggatgagtgctgaattttcctcaatattgcagattaaaacttggccagaacaaataaaatattaccacaagaatcctactttgacattattgtaaatttttgtgaatgccagcccgatagtg

SEQ ID NO: 5193 - DNA, 201 bp, Bos taurus
aaaaagcctatgaacttatttgttctccttgaaacaattcttgcccttttccatccatcaatatactgtgcccaagtatgtgaacactcagaacatcaggagcaccacctttgctcttacatacggtttgaagaagtatttagataatactcctgagtgacagactatcaaaataaagaagagagaggcctactgaagttt

SEQ ID NO: 5194 - DNA, 201 bp, Bos taurus
ctgctgggcccacagaaacaggtctgtgacacggagaagtaaaataaattgccaggtcatcacaccttgcccatatcagacctcctttcaattcaataaacgatgtgtcgttggaggtgggccattagcatcacaagggaggctgtttcaggagctctttttctctctcttccgaacactggggctgtggctgagtgccac

SEQ ID NO: 5195 - DNA, 201 bp, Bos taurus
agcagggggtgggcagggccttgagcgggaatggggacaaatactggattcaaagctgaaagaaatgtggtagcagagaaagctgagagaattggagaactaggccgtgaagaaacagtctgctggaatgaggaccatggtgggggtctttcctgctgcatgtagaaagaaagggcccaagatggggaagatttgtgggca

SEQ ID NO: 5196 - DNA, 201 bp, Bos taurus
tctaccaaacatgatgaaagcccatcgaaatccatgagtgtaagtgcgaatacagtcactgctccctttcccacctttactaagtcgtgtgggtttacacagagctgagaccacatttcactgattgcttgctacagcccagcctgctccagaagcacatgctttcttttattcactgaatcattaaaacaccccaacaaa

SEQ ID NO: 5197 - DNA, 201 bp, Bos taurus
gggaaagtagtgaccaggtcagggttgcagagtttgactatggatagggctctttgttcatctctcctaaaaaggaaaacaggctggggctttagttctattcagaaagaggcctactatagggctgaatagaggcatagtatagggctgaaaggtgattgtagccatgaaattaaaagatgcttactccttggaaggaaa

SEQ ID NO: 5198 - DNA, 201 bp, Bos taurus
gtcgctcagtcgtgtccaactcttagtgaccctatggactgcagcctaccaggctcctccgtccatgggattttccaggcaggagtactggagtggggtgcaaattacattttccctgggtagctactaaaaattcaattcacttaaaagaaaattcctgatgatatatgaacaactgtatctgtaaagcagaaaaactag

SEQ ID NO: 5199 - DNA, 201 bp, Bos taurus
accattgccagtaagggataaacatgtatgtgatacaatgtattattattattacaccataacattacaattttcctttagttttgaaatattttccaaaaagttagagggaaatacaaacaaaaagaaaaaaattgcaaaaaggtgtatttttacaaatcagagagagaagaattaaaacagctgccttgccatctgttc

SEQ ID NO: 5200 - DNA, 201 bp, Bos taurus
tgtgttgtacaccagaaactaattataatcaactactttgattaaataaataaattggagccaacagaacttttgcatttagttcttcacactggccactcctctggaatagtgagcaagagatcaagatgatggagttttgctgacaactgttgtgtatacatgttgtatttctctaacaattagctttagtgaccttgc

SEQ ID NO: 5201 - DNA, 201 bp, Bos taurus
tactgtctgctccttcctgcttctgagactgcactgcttgtttgcagttttaagtcatcatattcttatgtgtcagtcaggactcactccctttaccccaaatttgtagtcagtatctcttcaagagtcactactgcagcccaggctcttctctcctctgggactgccctgcccttcttctggagaaatgcctgttttcca

SEQ ID NO: 5202 - DNA, 201 bp, Bos taurus
catcattctaccaaaggagtctgtgacatgaaatatgtaagtttttgttttacaactcagttgatttatataaaaatgatctaggtaaactagagacaatattattttctcataacagttaggtgatctcattaagtcctctggcatggtggtaattacaaacacattctgatgactcttattacaaagccagaccatttg

SEQ ID NO: 5203 - DNA, 201 bp, Bos taurus
gaagctctatgaaagaccgcctcatttgagcctttcttctttcacataatactgcttgttttattcctgctttctcttactttggccttaacacccttcagggctgagcttgtctatttcttccttcagagctatctggcacttaaatgtggttagatgccttctcaatggcctgtgtatacttctgcatatacaaatggc

SEQ ID NO: 5204 - DNA, 201 bp, Bos taurus
aagtctcacttccttctttggcctgaaagaaactttgccagtgtatgggatgattgctcgcaaaatttttttgaagaactctatcaaattcagagatgaaatagaaaatgtcctaaaaaagatgactgctgaaaggggaggcagtgtcagagttaagtcattttggaatttgtgccaatgaggctgagttgcttgctaacc

SEQ ID NO: 5205 - DNA, 201 bp, Bos taurus
acttaaaattactacctttcatcagggccactttgagataaattttgactgtgagatctttcacataatgtgggttccagctaaaaacctaggtgagagctaacttaatgtggtaaatcctttggagggatttttccctttagtaaatggtaatttttgaggcagattatattttttatagcaccatgggggtgtatttgt

SEQ ID NO: 5206 - DNA, 201 bp, Bos taurus
ggccttttgcaggaaacatcctgtgtttcccagtagcacacttctctcacatcactgaaggtatatgctctggggattccctccttgagagctgtgtgaatcgtttagttgcctgttgccaggccctgccttctgcagaggctgctggtcactaactggcaggactggatgacaaggtgactggctgtggaaactcctggc

SEQ ID NO: 5207 - DNA, 201 bp, Bos taurus
gtttgattttaccttatcaagagtaaatctgagcattcttttcatgtgtttaaagactattgtcatttctacaaaaaacccagaaactgggcagaagacctaaacagacatttctccaaagaggacatacagatggccaataaacgcatgaaatgatgctcaacattaatcattattaagttcagttcaattgctcagttg

SEQ ID NO: 5208 - DNA, 201 bp, Bos taurus
tttcattttatataagaatattcaacccagctgcaccagattcttctctagagcatctacatccacgattgtcccctaataatcagttgtcatctaatcatgaagttctgttcagctccttgaagccccatgaactgtaactaccagcctcctctgtccatggatttccaaggcaagaatactggagtgggttgccatttc

SEQ ID NO: 5209 - DNA, 201 bp, Bos taurus
agatgatctgggatagggaaatgctggtctctagatccttgcttttcaaatcagaaagaggacatgcttttgctccttcccccaaaaaaggcacataggctattgctgtgaatgcatttacctagaatgcacgggagaccaggactaaggctattgctcgctttaacagaattttctaaaaccaaagccagagagagtctt

SEQ ID NO: 5210 - DNA, 201 bp, Bos taurus
ttaataaatgacatgcagaacttgcatttcagaatttaaatttcaaaagcaagagttggctgattacaaaaactgcactgccacttacgacactttaattgcaagtttccaggcaaatattatgacactctatgttaattactttccatgttttacaagtttatatatatttagaggcatgactaagttccagtgaatgtt

SEQ ID NO: 5211 - DNA, 201 bp, Bos taurus
gtttactatttttaaataaaaatactattattagactggtattgaaataatttggaatactattagattaaatctaaagaatacaaaatatatataaccaatgaggatcagagaagctttcttcatggtttactactatgcatcagaactgtgatgaataattatgattatatatacatatacactcatttttattcatag

SEQ ID NO: 5212 - DNA, 201 bp, Bos taurus
agctaagaacggattttacagatgaatatcagcagtcaatttgatgagagggaacaataactttgaaccactattaaggaaaatattattccccctcaaaatctaataattcaattagacttgtgttacaaatatttgtactcattattatattttgaatttcatgaatcaaaatttatggaaaagtgttcgttatataac

SEQ ID NO: 5213 - DNA, 201 bp, Bos taurus
aagaatgtagaaatttaaacaaaatttttgcatacgtgtaaaatatattgaggcataatcaaagaagcttacgcagcatatcaaagaagcttatgtggaaagagaagaaggaaaagagaagtttcaagaacaaaaaaatgaagaagacagagaagaagggaagaacaagaaaggaaagtgtgacagatgaggtagaggaag

SEQ ID NO: 5214 - DNA, 201 bp, Bos taurus
cctaaacagaggcaagggcagagtcatggaggaactcaggagaaactttgtggagagagcattacttaatattgaaggaatggtagggataaagtaagcatagaagtgagagtaggtgtgaaaaagacgtgagggagatctggaatagttttaaactgaaaatgagcatggtaatgctggagttcaaggtaaggatggaag

SEQ ID NO: 5215 - DNA, 201 bp, Bos taurus
tgacttctctatatacagaaagaatgtaaatagatggaaaagcaggaaagtctccactaagtgcctcagcaaacacctgggaacctatctgcttctacagctatagctggtcatgacaaaattatctttcaccactggttaggttgccacctcttaagctactcacacaagtgaatcagagtccaggcaactaagaaaaat

SEQ ID NO: 5216 - DNA, 201 bp, Bos taurus
ttcaagtgttttctttttctaaatggaagaaaatatttcttattaataagataataaccatctggctataaggaaggatttagccaaaaatctgaaacaacggggaacagagaacagaccaacaaaggcttgtattttatgagaaagtcttagaaacagtattttttaagaagaaatttttttttctaaattactcaggaa

SEQ ID NO: 5217 - DNA, 201 bp, Bos taurus
gaaggagttcagaaagattcaaaacagagaacacaaaataaactacaaaagtatgaaaacacctgatgcactcaggatcaataagggaaaccctctctattacacacgttcttttcatatcatagccagatgtccttgggaccctaaaataccttcaacagataaactcctcaagttcccattaatctattgttctttttc

SEQ ID NO: 5218 - DNA, 201 bp, Bos taurus
cccagcccagggattgaacttgcatcttctgcattggcaagtggattctttaccactgaatcaccagggaagctccagtaatcagcatattttcagtcaaacaataaatgttagtgagtttttaaaattctgtaagtcactttagtttcagaatttgaatcaaacaaatgccatcaagtttacctccaagatggctaagtt

SEQ ID NO: 5219 - DNA, 201 bp, Bos taurus
ttctttcaggccttcctgaatctttaccttcctaagtaaatagctaccatgtggtatcacctgcttccctttcgtgaatcctttaatgaagacttgcccatgctcctcactggcaatttgtttgtcagtgacaaggtgatagttttggttagtttaacaaacaccaatttccaaccactgaaaaaccatctgggaatcctg

SEQ ID NO: 5220 - DNA, 201 bp, Bos taurus
attatcattaaaggaaaacatatgctaagaccacaggaaaaacgatcacttgtcataaaattttaaaacagagaaagcaaaatgttaagttctagctagacacttcagcacattgaagactctgaacttgacatatgttttaaaataaatgacctaaatgtacacactgctatatttaaaatagataaccaacaaagacct

SEQ ID NO: 5221 - DNA, 201 bp, Bos taurus
gggttttctttcacagcgacgccccctgggttgttggccagaatcagcctggcaggaagctgggtactttgaagagtcatgctgtgtgttcctgagatcagatgaagagggaggctccatggaggcctcctgcacatttcagtaaatggctaaagtgatatggtgtttctctttccaaataattaatttgcaaaaattggc

SEQ ID NO: 5222 - DNA, 201 bp, Bos taurus
taaagccaggttcacctgggcctgaagctaactgagattccttaagaatatgccctgatttatcaaatgttcagccacttaattgaaatgttaataaaaacgctaacaacaatggccaatcgttattgggtgcttcagtgtacactgtttgaagtgctttgcatatattaaccttcttatccttaacataaccttgtgaga

SEQ ID NO: 5223 - DNA, 201 bp, Bos taurus
gttccttcaagaagaacttggaatcgacgaagaccttccaccaggcagtgagcagcgagaaagttcgctgtacgaacctcaactgctcagtgattgtagaaatgaggcacaagggctccgagccttgcgtggacgtgctgttcggagacgggcattgttgattatgcgcagcgcgcacctcaccgcccacaccgcccagga

SEQ ID NO: 5224 - DNA, 201 bp, Bos taurus
cttgactgctaccaacaagtatttaaagtgccttaaatataaaaggcatgtgcaaggactattaaaagatggaaaaattaagaaaatgccacatcagagaaagagaagcctactcaaagcatgggctaatggtggttaccctggctgaggacagtgtgaggtttacccttaagcttcctgatagtcaaagaaaaagtgcaa

SEQ ID NO: 5225 - DNA, 201 bp, Bos taurus
cagcagccagggttttaatgtaaatctgaaaacgatgcttcacttaaattctctgctaaccatcatacttccttgttcctgaaatcctcatcatttgcttacgttttcattgtctgtcttatttgactagaatctacgcactctgagagcagaagttgtatatattattcactgtgtcgtccctctaggcccacgagggta

SEQ ID NO: 5226 - DNA, 201 bp, Bos taurus
gtattaagagagggaaaatgacattatttagggagacagcaaggtaaaataaaatataaagtttatctttgaagtactaaaacaataactgtaggtagagagatgctgaaaaaccattggggatctgtcaaaatagtataaattcctcctgacaaaagaaatcttaagaatcgctaaaatgattggaagtaacttttgggg

SEQ ID NO: 5227 - DNA, 201 bp, Bos taurus
caaaggattcaagatgctccccagccgtgcccccatcagcctagcactgttctacttctgggtccctgttcacccactttccttggcctctggggtccatcccaccatcatcagctacaaactactgccagtctcccaaggctcagtcacacaaggccattgtgatggctatgttgctgttgtttagttgctaagtcgggt

SEQ ID NO: 5228 - DNA, 201 bp, Bos taurus
aacaaaatgtttattttcaccttatttactgcactgattcctgagatctgagagaaatctacaagaggcttggtgggaggtgattaaagcttggtctatggaaacactttaaaattcagtaaacctgagcagcaagctacatgatggcataggacattcttctcatctttgacacattaactcacctctcctttaaagtaa

SEQ ID NO: 5229 - DNA, 201 bp, Bos taurus
gttgtgttctgaaaatgacctaagcccttacactgattctctctacttgctgtttcagttcagaaaggctataagtttcccaaaagagaatttataatttcatcaaagtaaagttcattagctaggacatgatatatccccagaagatgaactctttacttctgacagactataggctgttcaaaactttgccaggccagt

SEQ ID NO: 5230 - DNA, 201 bp, Bos taurus
ccttgcctgtttgagtttgaagaaaagcaaggccaaagtgagtaaaggtaagtgaacaggagacatagcaggttatgtgggaaaagagccagttgaggtctggggcatgtaaggccttgtagttcactgaagggcctttggttttgattctgtgtgagatgggaagccattagatgatttgatgattagatgatttgaaca

SEQ ID NO: 5231 - DNA, 201 bp, Bos taurus
ccaatgaaataatctgtcatggtggcccactttatccatctcacctcccaggggaaagaggcaaatttgatgataaaactcttgcctttccctcctcccccctaaaaaatgtcctggcccccaaataatcctttcttttgctaatagcttccttgcccctcaatagaaccaccccccaccttttttacaattaaaaaaaaa

SEQ ID NO: 5232 - DNA, 201 bp, Bos taurus
taatagcatctgttgaagaaaacatatagtggggagaagcaataggagaattgggtttctcactgacattcacctgctgaagcagagcacagaaatatttataacagtgctgagtgaaggccctggcccttgggatgtagaattttaaaaattaattattggaggatgtatcagcccatcccctgccatgatcaggagctg

SEQ ID NO: 5233 - DNA, 201 bp, Bos taurus
tcatggatttcccactattatagaacaaaaggcagagagcaggttgtttctgtggccactgcaagtagggtaaaccactgttaaaattagtgggccatggcgatttgtttcatcatcttggttcttaaaagtgacagttgtgttgcaccaagtggattcagcataatcttctggtagcatcatacttggccaacagtcatc

SEQ ID NO: 5234 - DNA, 201 bp, Bos taurus
agatagtaaagtgttattagttcatatcaataattttattaaatgctgaattggtacaaagaaagactacaatgtatgtggaagatattaaattaacactaaaacacaaatgtgaatcctattcagtttaatatatggaatgtttcagtacttttgaaggtccttttgtgtccattaaaagcccatctgcctttccctggc

SEQ ID NO: 5235 - DNA, 201 bp, Bos taurus
tgctgagctaggagtgagtgatgagaggacaccagatgctgctctctaaagcggggcccccactgtgagggcctcagcaggccagagaggagctcctcactgcttcttctgagtaaggcacaatctcgtgtccagattggggctggcagttgcaggctcgccaggaatggagagagagagccaactccctcacaggctgat

SEQ ID NO: 5236 - DNA, 201 bp, Bos taurus
ctttattaaatgtttccatcagtccatgcttgctaggtgctccaagggagttaatgggagtcagcagtggcctctctgaattctgtggaaaagacaagatgcgtatgcttcctctgttacagtgttcagtgtttgcaaatgaatagttgtgcattgttatgcaaataccaaggtaatagaatgtgtgtaaattacaataag

SEQ ID NO: 5237 - DNA, 201 bp, Bos taurus
gtgtttgctgattggtgcttattgaagttaagttcctgtacttccacaaagactgggagataggcatactgtctccttgatgattatgtttcaaagggatagctttcaggcccttgagaaagacattcttgggttgtaataagggcaagaagcttttagaaagatttattcaaagggacagagaaataatttatgatagaa

SEQ ID NO: 5238 - DNA, 201 bp, Bos taurus
caaattaaaacctgtgcataatttgaaaattcaaaagctaaaacaattatagtaaaaaccttcactcccccttgaatctctgttccactccccaaaatatcttcacccttgggccatttcttatagcatttggtatttgcttcccatatttctaagacagaggaaaatattacacaactcctgatttctcggttttttttt

SEQ ID NO: 5239 - DNA, 201 bp, Bos taurus
gggttgggtacccataaaacaagacccttcaggtgaggaagctgggctgaatagagggagaaataattgaagttgccaggcatttcaagtgatacaggccgtatataaactaaaatatttccactgcccaaagtcggcaagtgtgttcctgattaacacatgcgtgggtctttcagctgatagtgacccagtcttttagca

SEQ ID NO: 5240 - DNA, 201 bp, Bos taurus
tagaatcaaaagattagagtggcagagtttgcctgaatttggtatcaaaaatggtaaaaaatagaagatagggggaaaccgtaaatctggctaagagcatagttgctacagggcagcacctggtgggtgtgattctggtgcccctggaagaccattcaataatgaagaaacagcaaacatttggaggtaggagggaagggt

SEQ ID NO: 5241 - DNA, 201 bp, Bos taurus
caagcaaaattcatcaatgaatgctaaagcaaggaaaaattttgatgatcaagatatgtccatggactttcaatatctccccatggactgcttattagttacaagaagaaaaaactaattatacagtgagaaaatcaaataacacttggagcaggtggatcacaattaacacaactaacaagagacagatggttatatgtg

SEQ ID NO: 5242 - DNA, 201 bp, Bos taurus
ctgactgaaaaataaagctacaatggatccagactttgcaagacatcctaaagtagccaataacattactaagtgagaggaacaagaagtggctggagaataaagcatggagtgctgtggcactgaccccattagggtcaaaacaccctcctcagctccagaaccatcttcccattttttaatatgagcaatcattttttt

SEQ ID NO: 5243 - DNA, 201 bp, Bos taurus
gggaagagaaccagttcagaccagaaactcagagtttcctccagagcccagggaccaccccctgcccctaatccagtggtatcggccactgagcctaggaaagccctaactcacatctggctgtctctaaccttgaaagtcaaagtgaaaatttggtggtgtccaactctttgcaaccctgtggccaatacagtctatgga

SEQ ID NO: 5244 - DNA, 201 bp, Bos taurus
ggatttaggagttctgtgctataaatatataaagattggcccttcagggtaaagaaagtcttgatttacagtgtttactgactttgtggtataaatattcgtaccatggccagttcaagataataatctgaggtcactgaacaaaagtcttaggaatacaatattatataatattttcactgcagaattacaaaagatgga

SEQ ID NO: 5245 - DNA, 201 bp, Bos taurus
aattggtgatggacagggaggcctggtgtactgcgattcatggggtcgcagagtcagacacgactgagtgactgatccgatctgatctgatctgattaaacgtgaggccaatgttctgcatccatctaaaggttttatttttttgttatttttttatttttctcattctttttttcagttttttttttttaactttacaat

SEQ ID NO: 5246 - DNA, 201 bp, Bos taurus
tcaaaatgtcaaatcaaaatccagagtaattattatgcatgtggatatagaaacagacttttgtggttaacaggaaacatactcacaactgacttttgtaagatattacaaagtgtcaaaataagtttgcccttgggagagcaaaagtctgagagtgcttttctaaaacatacaccatttgatacattagaaatctttatt

SEQ ID NO: 5247 - DNA, 201 bp, Bos taurus
cagtttgattttttgttcagttactgctacttaaaatactgtctaaaaatgtaatccctagaacggtgtttttattgtttgaaactcagaaaaacagcaacgtgatctttcagcttgtgtgtattagcaaaagctaggtcaccttcttgggggtcaacatcagtttctctttatgttaaatttctgcctttaaatggaaaa

SEQ ID NO: 5248 - DNA, 201 bp, Bos taurus
attaacattccagacaatcagtctcgaccatctctcatagttgaatgctaagctttcccattaaagtgtatctagcccccagattttgttttgcaagatcctgaactgagccatgaaaaactttccaggaacatcaatattttcttcttcctgtacagctttcagcactatgggggactaactgtaaataatcaaagagga

SEQ ID NO: 5249 - DNA, 201 bp, Bos taurus
aattttttaatgttggaaaatactttaatactattataaaaccttatgattatcccttgctaagatgaatgtgacagattctacctcctaaagatattgaagggcaggaaactgcaatatatgttaaaatggtcatgaaaggtctcagggactctgagaaaacttctgaaaaaaaaaatgaatatagatgagcagcaaaga

SEQ ID NO: 5250 - DNA, 201 bp, Bos taurus
atctataaaagtacctgtcattctctccttcattccatccaaagttggcctttcatctactccctgatgcaatgacatgagaaatcatggaagtcaacttgatctagctgtcatcacagctttcaatgacttacaagttactcataatgagaaaagacttagagacaactgaactgaataaagagctatgaagcttataca

SEQ ID NO: 5251 - DNA, 201 bp, Bos taurus
ggaaggtggaggagtagtttgtctctgagcttttaatataggaggattaaaagaaaatgtttcttagggttcatcacttgctataatatcaaaatgtatctcatagtgccctcacctattacataatccccatccatcttgcaacaaactcatctgttctgtggatgtctttaagctctactccccttcagagtcctcatt

SEQ ID NO: 5252 - DNA, 201 bp, Bos taurus
ccccagccttcttcatgtcactgtacaaaggaaatataactgaacagttttttggtgaaagatattttggcaagagctaacaggctgtgagctccacctactccaggcctctcccaacagctccaagagtcaacaagatcagtatctggacatacctataatccactcaagaaatactgattggctgcccattgaaatcac

SEQ ID NO: 5253 - DNA, 201 bp, Bos taurus
tacttactttccctacatgggtgaggccagtatttcccatagcctcgtgattgaggtggttagagaaagaaagcaccatggtagcttctgtgcttccaacattcaatgagaagttccccaggatgctcaaagtctccagagattttttcatatgaaaaggagtgcaccgaagccccaggacagtcagcaagcgctgcatag

SEQ ID NO: 5254 - DNA, 201 bp, Bos taurus
cggaagttgctctggggcatgatggtcgatgagtgaggaagctgaacccaaactggaaacagtctcagagatacagtgaggtcccacctcaacaatctggtgcatctaagtcacactctattctgctccccattttatccccctacccagaccctctgcagcttccagctcttctttcacctgcgccgcagcccacccttc

SEQ ID NO: 5255 - DNA, 201 bp, Bos taurus
ttttttgatgccaaactaaatgactctttttatttccttccacttattagtcaaggtttccaggcctctcctttggccttcgcagaatctgttacttttttaacagttttcttttaaactacaaggcacggcgtggagtgcaccctccgtacagtagactattgtttgcgacactcggcccggcagccccatcgctcaacc

SEQ ID NO: 5256 - DNA, 201 bp, Bos taurus
tggggctgggagcctgggccaagtacaacacagaaaaaccctaaggaagcttcccatgaagtctgtctgagacaagagattccaggtcagttgaggatccgtactggcctgcagttcttgctgtgtaacgctggccacctccacatcaggatggacaggaacagccagcgtcgacatttttcaattgcacacacggaaata

SEQ ID NO: 5257 - DNA, 201 bp, Bos taurus
ctggtggggagaggaccaaaggaaacggcctttcacatctgcaacatgaagagaggatgcaaaggaaatgacctttggactagaaaggaacattcacaccgtaagctggccacgatgtcaggggttctaagcagaggagtgtgtgaaagggtcacttgcgtgagaagaagagctgggatcctttgcctaactttggaagtg

SEQ ID NO: 5258 - DNA, 201 bp, Bos taurus
ctgctccttgactgctgagaacagggccccgctgacagtgcgctacctgaaggagacgccgctcaggagttgcaggacctgggatttctgccagtgtcctcggaacacagagggcctttttcttggtccaaccccgataagcattttgcagtttgtttctggtcatggcctgccagccagcatttgttgcacaattttgtt

SEQ ID NO: 5259 - DNA, 201 bp, Bos taurus
ctttgggtgaagttaaaaaaaaaaaactccattcattacttcagacaaatatttgaaattccttaagcagagagtgaaatggccccatttgaaagcatctgaaagtctgatcagcatgggttcacccatttcaatgccctgctctccagaccgggcccttcgaccggaaatgtcctttgacctgcttctcctctagccccc

SEQ ID NO: 5260 - DNA, 201 bp, Bos taurus
cttaacaaaggctcagcagaataaagctcatggagaaatccgcaagcacacaagtcttcaaatctaagacagacacatttcttcagatgcttaggtctctaaagtcagcacgcattacacagtcaatgtctacacacaatactgtttttcccttggcagcctcttcctcttgtatacacacatacacacacacacacatgc

SEQ ID NO: 5261 - DNA, 201 bp, Bos taurus
atacttagcaggaaaaagaactgtttctaaagacctgaaaagtatttcagcagcaccaagtacatataaatattagtaattcagagaatattaataataagtcaattattcattaaaataggttccctcatgctatctatgatgcaagactagattagcctagttggagatacatacttgaaagtaatatgactacatggc

SEQ ID NO: 5262 - DNA, 201 bp, Bos taurus
caattctaacagaaaggtcacccagaaaactccgtggtcggagcctccctccaaacaacaaatgtgacaattaaaacaaagcacccttcatttgacgggcgcggaagcaactgggctggcccaggcccgtggcatttgttacctgagggaaacaatagcagctctgtaggcacgtctggccgaaagggcaggagctgctgc

SEQ ID NO: 5263 - DNA, 201 bp, Bos taurus
gtgaaccaggccacgtgctatcactcgtattggaggatctagtttaacagtctgacaatgaaccttgatctggaaaattttgctttttctaggcacctacgtggccctatggtggtcccactatagggaatgaatgggttggctgcttgccagaaaaacaccaggcgatgctgctgctgctgctaagtcacttcagtcgtg

SEQ ID NO: 5264 - DNA, 201 bp, Bos taurus
caggaagtgcctcatactggctcttagagcaagcacaggttatgaagtgcaaaatacaagcatttgcaaatctgggtagtatccttcctcactgatctcactgggccaggtaaaaagagccatcctcactgtagcagattgtgtgtgtgtgtgtgtgtgcgcgcgcgcgcgcgaagtcgtgtctctctttgtgactccatg

SEQ ID NO: 5265 - DNA, 201 bp, Bos taurus
agtctattactctattgtcccaaccattaactgctcaagcctgctcttttgtgactcagggatgactgagagatttctgtttctctacaaacaagaggccagggacaaacagaagcctttgtactttggggagtcctgcagggttctgctcagttccaccatacatgtacaatatttgctcaggttgacttctggaaggat

SEQ ID NO: 5266 - DNA, 201 bp, Bos taurus
aactgacacaaatgactggtaaacacaatccggttaggaaatgtttatacttttatgcaaagtggctaccgttaagctgctaagtataaggttcaagctccaaattcaacatctcatcagcaattaaataggagagaagtatatactaaaaaagataaaatattatataatttctacggcttcacatttctgaaacagttt

SEQ ID NO: 5267 - DNA, 201 bp, Bos taurus
ttttccttcaaaagaaaacgctgtcgaagaaatgaagaagggcatttaggtccattaatcaaatcaggtatttaggtccattaatcaaatcaggaacattttaaacaacctgtcactaggaggccctccaggagatgccaagttttactccccatctttaagctggcaatgcccaatttacaaagtcagattccaaaaaaa

SEQ ID NO: 5268 - DNA, 201 bp, Bos taurus
ttggcagagtccccaccagctcaaggattatagatgaaggtatggatttggtctttaccctgagagcaatgggggtgaggggccatctggaagtggatatagtgtaagcaactctgtagtcagcttgagtggggaggtaaggtagagttagaaaggttagttgcagtgggccctggtgtgactgtgttgctgctgctgctg

SEQ ID NO: 5269 - DNA, 201 bp, Bos taurus
ggggttctgcagttgaggcccactctgtctggcagagacagtatccaggctcaataaggtcactcaacctggattcaaacccagatctcccattcatgtctggggcctttcccctgccacaccactcagtttgctatggtcacctacagtgcttggcctggagcccggctgagaatgagccccttgtggatctttgacttt

SEQ ID NO: 5270 - DNA, 201 bp, Bos taurus
ttcagcctctgctcaaacacttccttattagaggccttccctgacgatccctgacatttgtcctctgcacccctctcctcccctatacagtactttgtctttatcatctaccaaggcctgatagatttatttttgtatgtgctaattgcttatctaccccacttgaaagccctccaggagggcggggactttgctttgtcc

SEQ ID NO: 5271 - DNA, 201 bp, Bos taurus
gagaagatgggccagagggcagaaacccgagaaggcctgaggcaggcaggggcagagtcccaaaaggagtggacagagagctctgcctaagtctggcagagcccaggtggccgagtcccaacaattttcatgagcccctaatcttccagcttctggttcgaaggcggtgaggggaaatgcctcccacccctggcccagtat

SEQ ID NO: 5272 - DNA, 201 bp, Bos taurus
acaatcatacagttagcaagttttggagcacgctcaggtctgtcagactctagcccacttattacagttaaccattgccagaacctgttttgttttttaaaatacccagtcctggccagcaacttgtctttaatcttagtgggctttttaccagagtctattcttgtcattagcaattttaccagagcttcttacacagtg

SEQ ID NO: 5273 - DNA, 201 bp, Bos taurus
gtggtgaagagtgttgagaagaacctgagggaaggctctagggaagttgttgcagagcagagaggggaagtggggcctgttactccctgaactcaagcccagtggaagtggtcaggcaaccctcaactccataaaaacaaatacagatggggccatggagtggaggtcaggggaagaggtgagctccccatcactagagct

SEQ ID NO: 5274 - DNA, 201 bp, Bos taurus
caagtagccagggaaactgacccatcagcacataaggctttggtgtgtctaggctcagaaggggaggtagactctggggcagggcttcccatctgaacccaggagggctccaggcatgcttggtaaatgcaggtggaatgaatgaaactctgtgcacgtgtctaggtcaagagggcactgcaaagccagtcccacgtggcc

SEQ ID NO: 5275 - DNA, 201 bp, Bos taurus
atctcccccgtccccgtcctcgtctgtcaccacccgggtccacattattcccgcccgactctgcaagggggctgtggcgggtttggcctccagcagtcgtgtttattcttctcatctggccgcatctggcctccgtgctgagtcattcgctccatctgcctacctcactgtgggacacagtcggctcttcctggctctccc

SEQ ID NO: 5276 - DNA, 201 bp, Bos taurus
ggaccacaggctgtgagggccaggggtctggtggtaccagggaggagcagagggaaaagtggaggggggttgtcaggaacctctcaggaagatgttgggtcccaacacggccacctcttcagcagcccttttggaagtgattctgggccagcctacttggatctccctagggcctgtagggtagcaatgggcactgagtaa

SEQ ID NO: 5277 - DNA, 201 bp, Bos taurus
agcagtgtccagactgagctaggcgggaggctggggatgacctgagccaaacgtggacaccccctagttctagcaggccagggtagtgcatggatgggcctacagggggctgtggtgagctgtgccatgcttgaagagtgttgccagtggtggctcctggacacgaaggccttgtgtggccctggcttccgatcaatgggg

SEQ ID NO: 5278 - DNA, 201 bp, Bos taurus
gtagtaagggaaagagtgggacttgaatccagacctctctgactacagagatgtttccaaataaatgtgaagccttgtaaaaaacactgaaaagaacccaaagctgatgaagaaactccatcatcaagaacttggggtgagaaagcttacatctgagtccttgccctgccacttcctagcaatgtgaaagtgttagtcact

SEQ ID NO: 5279 - DNA, 201 bp, Bos taurus
aatttaaattaagaatctaggcctcagcttataccattaagacaaaccatctcttatgttttatttgtttcttttgcgttgaaagaggaaacacaactaacacccaaacatttaaggcctgaaggcaatcattaaaacaattctgacaaagccattcttactcccttttcaatgttttgtagtcatcatttttcctacagt

SEQ ID NO: 5280 - DNA, 201 bp, Bos taurus
ggagaaactaagtaatcagtctaggctaacagtataactgatgtgtgagaagggacataccaaactccaaggtactctagccatcctctcccacctaaagagggaggaaaaaattagaaacacttgtgaagttcacagactgaaatagtgagaactaattagggaacttccctggtggctcagatagtaaggaatctgcct

SEQ ID NO: 5281 - DNA, 201 bp, Bos taurus
tggaggtgatgaagctgattggccgacacaagaacattatcaacctgctgggtgtctgcacccaggaaggtgggagcggggcggggtgagggacagggacagtgggggcatggagccacagccttgtcagcttccctgtcgcccctctcctctgcagggcccttgtacgtgatcgtggagtgtgctgccaagggcaacctg

SEQ ID NO: 5282 - DNA, 201 bp, Bos taurus
gcctcaggtcactttagccttgagaagtctcccacaggaggtaacgctccacactaaccaatgtgtgtccagcggtggctggtatgtagggtttaggaaatgttgcctgaggtcaggggccctgtgctatggcttctcccctgcttcagccatcctgggccccaaggccttgacttcacatgcatcctctctagcccatca

SEQ ID NO: 5283 - DNA, 201 bp, Bos taurus
cacattcagggtgccccatgcctaaaacacccctactttataactttctatgtcttgagaaccctatattctgtgcacctagcacctgggcacccgggccgcagatatggatggctctgcttacctgttccctgctttccaacgcttgccctctttttgttgtgcccagtgtcttgggcccccatgctgactgccctgggt

SEQ ID NO: 5284 - DNA, 201 bp, Bos taurus
aagtgctataaacatgcctgggagggtggcctgggcccaagctgcctgccctgcagggctcggggggcccaacacccctctcccaggtgggactgccagctgccagcagcagggtacaaggagcacctgctcccacaccagggtcctttgagtccattccaacagtgactccaagcagccctggaggctctgtgagggctc

SEQ ID NO: 5285 - DNA, 201 bp, Bos taurus
aggtctgcactgtaattctcccatccaagtactaaccaggcccgaccctgcttagcttccgagatcagacgagatcgggcgcgttcagggtggtatggccgtagacagcactgtaattctcttggtgctttccagatgctccgcacagcattcctatttgtcacagacacagcgagtgtcattggttctgctggatcatga

SEQ ID NO: 5286 - DNA, 201 bp, Bos taurus
aagacagacagatggccaaaaagcacatgaaaagatgctcagcatcgctcattatcagagacatacaaatcagaactacaatgagggcccggtgggcagcatagcctctgagcagtagagggggcttggggctgagtcctcgctaatgccagtgtggagatggcaccatgggcaaggggcagaggggcaagttggccacca

SEQ ID NO: 5287 - DNA, 201 bp, Bos taurus
actgaatccgcagcgttcactcacttgcatagtcattgaggccctcctaccaactgggcctgaaggtggctaccagtgaaagacaagggcctcacacctgttttccatagccctggttcctccactgccccaacctgcccatgctaggagtgggagtgcccatctatggtaggggccatgatgaggccccaaattcccctg

SEQ ID NO: 5288 - DNA, 201 bp, Bos taurus
ctgacactgtgggtttgtttttggccataccatgtggcttctgggatattagtttcctgaccagggattgaatccgggcccctgacagtggacgtgacagtggaccatgctcaaaggtccttctgattgagatcgcaccactgcacagagctgccttagccatgtcttgaggttaggagagcaaatgtgccttgtgggcca

SEQ ID NO: 5289 - DNA, 201 bp, Bos taurus
aagccatgcataagaagtgagccactttcctttttttaacctcctgaaataccacggcagttctgagtttagttggccttggcctgcagtgccttgaagcgggattctggtaccagagcctaaagccaggtaccccagagactaaagtcaggccaagggcactgaatactagccaccagaccagcagagccagtggccagt

SEQ ID NO: 5290 - DNA, 201 bp, Bos taurus
gaattctgtgaatcagtcaggttttgctagagtatgctgtggtaacaaacagcccctgaatatctttggtttctgacaacaaaggtttatttctagctttcttttcatgtgctgcatgagttggctgcagctcctgcctgagacatgctaatctcctagcagagggaaaaagaaccatggcaaaatcatgtgatggtttgt

SEQ ID NO: 5291 - DNA, 201 bp, Bos taurus
aatatgtaaatacattttcctgaaaagagtatgacttttaggaatagtataatgtcaaatggattttttcccagctttcagcccacagagtttctggcccaaaatatgaacttgtccatatagcagcctgtaaacgtggggcacagagcttcccaaggagcacatcttgtcctgcatctttcagccctgaaacttggggtg

SEQ ID NO: 5292 - DNA, 201 bp, Bos taurus
ctgcttaggacttggcgcagctttaaagaaagtggagtggcagaggttggaggcagttgttcaaggaggtgaagacagtacagtgaggattacaccttcaatggggacgctggcccaggccagttggagtctggagtaccctggaacacctgtcttgacttgccattgaaaatgggattctatcccagcgaagttgtgaaa

SEQ ID NO: 5293 - DNA, 201 bp, Bos taurus
aggtggtctgacagcaggcacagcctgagcgtccactttgtgccagcctctggaatgctggagatatctcagcaggcctctgttcagggaacttagctcactggaaagccattccagatgggacaagtggtgctcagaaggacgtgcatggggctctcaagatggatagcctggggcctgaccaggtctcgggggtcagga

SEQ ID NO: 5294 - DNA, 201 bp, Bos taurus
gtgtatcatgtattcttactgaactttcttattgaactgaatatcttttcagaaactgaggatgtagacagctcctggaaagctcctagagagcaaagactatgactaccacatgctttactgttcatcatctggttccctacacaaggagagactcaaatacataatcattttcaccaagaatgtgctctaagtacagct

SEQ ID NO: 5295 - DNA, 201 bp, Bos taurus
ctttctagcacctcccgcagaagctcctgtgctttgcccgcttgtgagcatagcttcagatgaactgaccaggagaaacgacagaaaggccaggagcagcgggagacatacagagagacttttacacaggaaggagtgaaaacaattggtgtgaaaggaaatgtggaaaaaggccaggaagacagagggagcggggaagaa

SEQ ID NO: 5296 - DNA, 201 bp, Bos taurus
ctattgggcaggggagcccagatgatgcagtaacaaagaggtcagcctcctaagggcaaagagctgagtcagagtggtggagggaagatctaggggatgggaatccactgcattccctaacatgcatatagattaccaaggtcagtctagctactattgcctctgaaatggctaacctgtcagcgataggcactaatcctc

SEQ ID NO: 5297 - DNA, 201 bp, Bos taurus
gttagatggatggggtagtgtgaaggctaaaggcagcattaaaatctttgaacccaagtcaactttccagacctatatccttccccaccttattctacaggtgttcagattcaaaattattcctataaaaatgtcacatgcatttgaagtctcaagacttttcacagtcagagaactgagggagctatttgctgagaatta

SEQ ID NO: 5298 - DNA, 201 bp, Bos taurus
gggtataggatgggaacaatataaagttttaagttgcatatgagccatgagagcagggagcaagtaataggggtcttagagacctgggcaatttgttaccatgtcagagtgaacataaggtacatagggtaagatcaggaaggtggtatgtatgcttagagaggtggaaggctgttgaggagcatgccttacatggggacc

SEQ ID NO: 5299 - DNA, 201 bp, Bos taurus
aacactgcaggtccccacgaggccacctgtgggccgctgtaccctgcacatctcacagacaaaccctccaccctcgggaactgcaagcaccataccagtccgtcaccgaggttccagtgagggcctgaggtaggaggtgggtgggtcccagggctggacagtgggtgtttgtcaagcagagtaaaattgaagctttgtttt

SEQ ID NO: 5300 - DNA, 201 bp, Bos taurus
ttccttacacacctgccactttccctacagcagctgctgtccctgttgcacccagagttcaaagcagaaaccagctagaagcagactcttaacaacacaaacaaggggggtgctgcttttcctgcttttgcctcacttacaccatctggaagacacgacagaatgaccagggaggcccagtggaaacaaggggtcttatat

SEQ ID NO: 5301 - DNA, 201 bp, Bos taurus
ggtggcccaattcctggaaatctctgctccttccccaaattagaataatcttcccattcgttagcctatgaagttactcagctaataaaaataaccaccatcacacctcagggccactcttgccttcccagaccatatacactgtggagtattttctcccagcgcctcgtacttccccagaccctgacctcatgctctggg

SEQ ID NO: 5302 - DNA, 201 bp, Bos taurus
tgcactgccaggcagattcttaaccactaggccacccagggaaacccaggaacattcttttacaagggtgcagagccagcatgactaagcacagtcaacagggcccaaggttaaaatgaaagaactaggtctaatatggagtcagatttgttctttcctattacatatagagtctggagactctcagagtcgaaagaaacc

SEQ ID NO: 5303 - DNA, 201 bp, Bos taurus
tctcttctccctttgggcattgcctcactgtcttgcttagcaaccagcctctaattaagtaatttctacttactaatggagtctctccaaagcaatttttgctttgaatgtatctttacagcccctataactgtctagaatgtagaacaaaatagaaatctaaagaatgtgtacttagttaaatatatcttttttccccct

SEQ ID NO: 5304 - DNA, 201 bp, Bos taurus
gaaaatgtgttggctaacatcttaggcaccaccgtggaggtaattgcaacctcaaggaaagaaagattggctacaaaaaaatacatgggtgaatgcagacagtagtcaccacacaccaaaaggataatcatggtgttgccaatcagagatatcatgtacataagcaggaatgcagaaaaaagaagaatttctacttctttc

SEQ ID NO: 5305 - DNA, 201 bp, Bos taurus
agaaggcagaatacatgtgaagtgtagtattagagaaggatgatggcaggaagcgaggatgttaacgaaaagatttagaactgtgcaacctgagactgagccagagaatggagttagggtaaaggcgtaggtgcactaaaatgtgattgtatcagcacaaaggcatgttttattcacccaggaagaatgattgtgaggaaa

SEQ ID NO: 5306 - DNA, 201 bp, Bos taurus
tcgagaaatcaaccacttcttttgtgaggcaccatcgcttgttcgccttgcctgtacagacaccatgatttttgaatttttcatgtacatctgctgtgtcatgatgcttttgatcccagtgtctttcattttggcttcctacggtctcatcctgatcactgtgctccgcatgcattctgctgcagccaggaagaaagcttt

SEQ ID NO: 5307 - DNA, 201 bp, Bos taurus
ctgagttttggtacttatatatttgtttttagcatatttattaatcaaaatttgtacattgtgacattgactgaactcgtgaaactaatttaaacaaatataggagaaatacacaatattcatcagatacatcacatcaacattgactaaaatgaatgaatgaatgtgtctgtagctccctcaacataaaagtccccaaat

SEQ ID NO: 5308 - DNA, 201 bp, Bos taurus
aggcaaaacaaatgaagaagagggaaccactctggaagtgacaggtgtaacagattaaaaccttgtagttaacattgactaagggttggaggcggccaatagacctcgagaacaagtataagcttgtacttctctgaaactgaactgaccccacactgccctcaagagctccagagaacttcctagatttatttttgctat

SEQ ID NO: 5309 - DNA, 201 bp, Bos taurus
atgcaattgtgatggatgacaacagtgtaaaagtgagtgtacatgatggtgacaacagtgactgataaaagtgctaaaatttgtaactactttccaattacatttaaccccaggtatgtactattttcatattttatctaatggatcgtttttaatatctcatgtttctttaaatctgttctacagaaaagatgcatgttc

SEQ ID NO: 5310 - DNA, 201 bp, Bos taurus
caaaattttatcttctgctggtgaacggagattcctgggccgaagataagtgtagacaaaaggtgcatagtaaaatgtcactacagttaaatgtgttgaacaggtggtgaaggccttttttcttccatcttttgaacgcatacggtagacagcaaaaagaactcggccataggaagcagtgatgccaaggaaaggaaggag

SEQ ID NO: 5311 - DNA, 201 bp, Bos taurus
gagcaatttatattctgagggaaattcaaaatttttcattaagcttaccacagaattttttaaatttgtattgctatctctccataataattcaactttacacatcacaaaggaggaaacagagggaattttctcattatatttcacaggaatgaatagaagcatcttagtttttaaagggaaagattctggcactattat

SEQ ID NO: 5312 - DNA, 201 bp, Bos taurus
ctgaccttcacgagagagagaatgggcccggcccagctggcagatggggcactcactgccctcagcacagagctcacacagcacggcctgttggcacggaggcactgctcggttctgctcctgacacttaaggcatttcaacgactgcatgtggaatacggcctgcggaggaagggatactacagtcagtggcctgggccc

SEQ ID NO: 5313 - DNA, 201 bp, Bos taurus
tataagatttgaaacagccaatgtgataaatgcaataaacactggtcattattttttctgttggtaatgagggtaattgcctttcatgttcctaatatttgtgatttagaaaaaaaaatcaccccatttatcattcatctttctatccttcacacatataagcatgctgctttattaattatactaagaaagattgataat

SEQ ID NO: 5314 - DNA, 201 bp, Bos taurus
tgatggatctccctggttttgcagaaggggaaggtcatggtgactggtgtgagcataaagccatccactgatcccaggaaccagcagccagacaccaagaggtgacacactctatggctcatgagaatagaataacggagtggatgacagatggccacatagcgatcataggccatggcagccagaagaaaaaattctgaa

SEQ ID NO: 5315 - DNA, 201 bp, Bos taurus
cactcagtgccctcactataactaaatatttggccatttctgaggaccccagtcttctcctgtggatgcatggctccctccacataaacacagagcctcatagcaaggccagaacctataggcaaagggagttcaaacatttagtatagattttccccaaattatgtttcagctattttcttttttttttttttaatttta

SEQ ID NO: 5316 - DNA, 201 bp, Bos taurus
taataagacttagctatagggaaaccatttaaacgaggtgacagttatgaagatgagaacaacatactttcagaaacccatgtaaaaaacgattataagctctgaacacaatgaatgtatctgggactcctgagggacaaagtgacaagagaaacatggccatgcatggctctgctagctgataaagcacactttgtctgc

SEQ ID NO: 5317 - DNA, 201 bp, Bos taurus
ggtaatgtgagtgatgggaagtggccataaatacagatgaagctttgctctctcaccttctgctctgcagcccagtccctaacaggcaaggaccagtaccggtctatggcccggggtttggggagacccctgcactgaaaagaatttaaatgttccataagaagctgacatatcaggccgtgactaattcaacacacagag

SEQ ID NO: 5318 - DNA, 201 bp, Bos taurus
tttgtcccattaagattgctaattactgagacctgttcacaggcaagcattaggcttaaaacaaaatggcttaggccaaattaggttctcttatgtcaaacttgctggcatattaggttctcaatatgccagaaaatttggaaacctcagcagtggccacaggactggaaaaggtcaattttcattccaattccaaagaag

SEQ ID NO: 5319 - DNA, 201 bp, Bos taurus
gaaggctttgattggtttaggcctaggggacttctcattgcccatccctccttggtcatttcctagtgcatcaccaggccaggatccctggtccaaagctttaaaacaagctggacactcttcctcttctgagcactgtactggaggcaaacttccctctgagtccctcctgcccttcctagtggcacaaggacacacccc

SEQ ID NO: 5320 - DNA, 201 bp, Bos taurus
gccaggactgggtgacttggcagaggaagaggtgtgggtcttaaaatgatgggtatgccaaagacaataaggcagaagccctaataattttgaaacaacaacagcaatcactgttgcttcctctgtggcaagctatttccatatgatttccttgtattcactcaactagccagttttccccagctagggccaggcacttgt

SEQ ID NO: 5321 - DNA, 201 bp, Bos taurus
aggactgcatacaataaaaactctaccaccaagactaactttccagaatcctcaactaaggctttaaatccaaaaaaaaggggggaggattgtaaaagtactagttaaaaataaagatgaattatttcatctgctctaagtgcagaaggtctttctaaacatagtattaaccaaacattatggaaaccaaagtgaaaaaca

SEQ ID NO: 5322 - DNA, 201 bp, Bos taurus
tggggcatagtaaaacgtgaccacagtaagatgggaggagcagcagccagggcctcgttcctgccttcaggggagttcatttgcaggacctggaggaagacgagagtataggaagtcagaatgaggcttgtggggagaagaaccacaacgatgctggtcactactactcctttctcataggcagatatgtcctcacaagac

SEQ ID NO: 5323 - DNA, 201 bp, Bos taurus
ggatctccttgcagtccaagggactctcaaaagttttctccaacaccacagttcaaaagcatcaattctcctacccacatccaaatctctggcctgctccaggtcccccagcagacacatccttactgtggagacacttctccgcccaaccaggactcaggactctcctagcctctcaggccttgggggccaaacaagagc

SEQ ID NO: 5324 - DNA, 201 bp, Bos taurus
gaccactctggggtcagggctgccagggtcagggccaccccagggtcaggactactccaaggtcaagaccagtggaccctaacacaaggacagagttcattggatatggccacagggtccagcccatgaggctgccacctgccgcactctgctgcagcatcagaaagcatccacaactatgtcaacagactggtaaatact

SEQ ID NO: 5325 - DNA, 201 bp, Bos taurus
cctgggcctcacacccccaccctgcgtagaccatatgaagggagactttccttctactcggttgtgactagaggacatgggcagcgttctggacatcaggcagtgaccatgggctccctgccctgatggccggcacatccagactccccagctggctgggtgtcccttccgtgggcccctggggagccgaccctccatggt

SEQ ID NO: 5326 - DNA, 201 bp, Bos taurus
aatcatctctcctcctccatcgaaacatttttcccaggaagcaacggtctctggcagcaccttctgtgctcatccaagggtgttctgagcaggaaaggccgctggtcaggcagcccagaaggtgagtttgcccatcacaaggcaatagcttttctcttctggtgatgcggcagaatttcctgtcttctgagcactgtgagt

SEQ ID NO: 5327 - DNA, 201 bp, Bos taurus
tcccagggcctttcatcctgtttccaagtctgtaagctcctctgagttctgacctgagtctctcctgctgctcaatgttcccaaattgtgtgccaccagaaggcctgattttgcagggaaaagagaagtgggtccctttcctggccctcagcagagttcagacaaagccaggtcctgtggatgctggcctgtatctgtgac

SEQ ID NO: 5328 - DNA, 201 bp, Bos taurus
gaacaccaccagactccacagatgtggccccgcgctcagagagactgagttggaggggaggtagacagtgagctgagcaggggcgtaagaaatccagccacaagctgggggccagggaggcttcaacaaaggcaccggtcaggctggagatggggaggcaaacatgccagggtgggaacctactggggtgtttgaggcagc

SEQ ID NO: 5329 - DNA, 201 bp, Bos taurus
gtgggcgggacctatagtcccaagagagtatcacaagctcaggtcttgtgggatcgggaatggggaagagtagggtacaagtttggaaagggggcttctggggcccctatggggtgagaaatacgagtatgagagtcagaggaacttattggcgcaaagtggggaaagattgaccgtagatctggggcgtggcgtggttcg

SEQ ID NO: 5330 - DNA, 201 bp, Bos taurus
acctgtgcctgtgctcagtgtagtcagcacccagcagcaggggtgggcctggagtgagcactgctttgccgtcacaggctgcgtggcctcatctgaggcctctgtctcaccgtttcagtttcccatttctttaacatgggaaccagctgaatggctggagtaggtgagcacttcctctgtgcctgacactgaaggccaaga

SEQ ID NO: 5331 - DNA, 201 bp, Bos taurus
ctggccatggagaacaggagagaccgggcaggcgaggctgatttaaaaagccccagaggtaggtggttactctaacatgggtgggattacaggtgatgctcggcctcttcctccccccaggtatttttagtggtcttgtatcttctgacacctgctgccttgtctctggtctgcttttctctctggagtctttgtttcctt

SEQ ID NO: 5332 - DNA, 201 bp, Bos taurus
gaggctgcccagggctgggagactcatctgaaacccagctggggatgtgtcctcttccagggttgctcactggcagttggctgcattcagttcctggccgcgtgggtcttcctgaattttcaccttggcttctagcaagacggaagtcaaaactgtttacagtctggtcacaaaaggacatccccacaccctggccatgtc

SEQ ID NO: 5333 - DNA, 201 bp, Bos taurus
gggactggaacctgccctcatgggggagcctcaaagcgggtggaaccctgcagctttctgttcacgggaccccatcctgccctgacctgagagcagcctcaggtggagccctcagtggccaaacagaaccctgctcaccacccccacttcagctgtgatagtcactgccccccccaccactaagacccctagaggtggcag

SEQ ID NO: 5334 - DNA, 201 bp, Bos taurus
aggccaagagagtggaggtagacagggattttgtagcagacatcagactttcctcccagcgaaaaagacccagaaagaatagaatggctcttggggatatgaggtggccatcaaattgaactcatgagctctaaactattagttcaaatacttaataaaaatagcttattttgatacagagtgatttataattcttcattt

SEQ ID NO: 5335 - DNA, 201 bp, Bos taurus
ctgcacatgttccaaagcaccgtatgctggccatccttcgcttgaagcccttcggtcttccccttaggactcatcagccctgacccttacctactgtcattctcaatcttaggcccttctcatatccatttgtcctccaggcatgtggaatatttgtggttccctgaacatgacctgatgttttatgctcctgtgctccac

SEQ ID NO: 5336 - DNA, 201 bp, Bos taurus
ccgcgaggccaacacctgacaaatgtgaggtaccacagggaccctgctaaaacactctgggcatcacagcatctggaattccttgagtggcagtgcagccgagctcggactctgaggccagactccggggttcaagtcctgaccctcaatcccagctctgagatgcagcaagttgctccagcgctcgatgcttctgggctt

SEQ ID NO: 5337 - DNA, 201 bp, Bos taurus
ggcccataacaaccccaattctacattcccgcagatagagactgccggcttctcatttctggtgaggccatttgtcttgggcctaatcttgttcacgcagcgtgggaggctccaactgatcccaaatttccccaaatgcctcaaagtgtggaggatagagacccttcttcgcctcggaaggggccccagctggaattcctg

SEQ ID NO: 5338 - DNA, 201 bp, Bos taurus
cagaaagtgaacaaggcaaggcccctgctctcttagctgcacacaagctggtgagaacaacagagagacaaatggaggcaacagagcatagatgtgagacgagttccaggcctgacgcagcacgaaggagaaactgcctaactcctccccctgtgttaggaaagattcacaaggcaaggatgccaggcctgaaggctgagg

SEQ ID NO: 5339 - DNA, 201 bp, Bos taurus
gccctaacttacagatgaaggtggttctacaggaggaaaggctacagcgtgctcaattgtcacagggcagcaagtggccaggctcaagtcttggaaatcctaccaccatgctctgctgtgtgtgctaagtcacttcagtcatgtctgactctttgcagccccatgcactgtggcctgtggcccaccaggctcctctgccca

SEQ ID NO: 5340 - DNA, 201 bp, Bos taurus
cagagagggttaagcaccctgccaaggccatgcggcaaataaatgacagagctgggactccaaaccagccaggtggacacggatctatattcagaccttgcccactgaggcctcttgatacttagcaatatttcatttggatgaatgggagtttttagtacgatggggaaacatctacgtagaacaagattggaggccctg

SEQ ID NO: 5341 - DNA, 201 bp, Bos taurus
ctctcctgaggaagagctttccagagccagtgttcgaacagggctgcctccttgtgactcaaagagtttggggttctgtagaggcctccagctactcgacgtgggtgcctagtggggtgcgcttgacctcagtacatttgtctgctgaggattcaaggcctcagggacaaaatgctgtgtgacccataaaggcctgtgagt

SEQ ID NO: 5342 - DNA, 201 bp, Bos taurus
aggtttgcgccaggagtagtaagtgaagcagggcaaaccttcaccccacaggcatatgttctccaacctcagggaaataaaaggtgattgttatggcccttcctgattccagcagccctgggtcagatgcttcccataaacagctaccagaagaactcagctgtggccccatcaagtcggtgatcccttcctggaaatgtt

SEQ ID NO: 5343 - DNA, 201 bp, Bos taurus
tctcatatattcagcatcaagccatttttctttcctctcaaaatccgtctactactggccagctgagcctactactaccaattcgaggcccaaagcaaacggagtcccagtatcttaagtttggaaaatgtgtcactcctcagcccgggcacagagccaggccagcaatgggtactggtcaccccagagcctgagagagtc

SEQ ID NO: 5344 - DNA, 201 bp, Bos taurus
attctgctctccatagcctacaatttaagacagccatgccctggcaccatctgcctttccaaccacccctctgaccttctcactctccagtcaaaccagatgtcttctccagcacgggtcccttcacttatatcagcccctctttgtgcaggtactcccatgccccacaccctacctttccttcgggacccagggccagct

SEQ ID NO: 5345 - DNA, 201 bp, Bos taurus
tgatcctggaaggagaattaagatcgcttacgcagcacagttgcaaaaagaaaaaaaaaaaattcagtcatgtggaggctgtgggtacggcccctcttcaaccctcagttccccaccagatttcttagcttaaggtctctactctgaatctcaacattgtcatctccaagaggcagaatgtgcaaaccaagttatccccat

SEQ ID NO: 5346 - DNA, 201 bp, Bos taurus
agccccttggagcaggatgtctgaatggaccacaggtgggcatctcaggccacgggggcaacatctatagaggcctgaaagagcaaagagcaggggtccaaggccactgggccgtgtgtccggaagcctgccctgagctactagctcaaggaaggacaagagttcaacatgttgaagctagcaagttccttttaatgactc

SEQ ID NO: 5347 - DNA, 201 bp, Bos taurus
tgcccatccaaaaccacaagagagagctgaccaggcctggccaccagatgccaagagggctaagatgcacagcacagcaccttggagttggggtccagagtccagagttggggccctaccacttacctactgggtgaccatggcccatcccttccctctctgagcctaagcttcctcacctgtacaatgtggtggtgggaa

SEQ ID NO: 5348 - DNA, 201 bp, Bos taurus
gaagctggtggctggatacagatcctggagtcaacaaccaaggtctggggacctccttctgagtgccagacacatgcacatgtggcctggtcttggctccagacccagccgcaaggacaacaggagctaagccaccacttgagaacacccactccagctctctgaaatggcgcccctgctgtctgatccaggcctttccct

SEQ ID NO: 5349 - DNA, 201 bp, Bos taurus
ggaaggagtgaggagggaggtttctaaggtccaaagtcacaggcaaagccagtgctccaggaagttaaaagggtggccttactgcagggctccatagatatgctgatgaacatgcaggtgacatattcccttacaccctctatgcaagagagcagagtttgctgatttttttcacaaagctacttgagggcccaaagttct

SEQ ID NO: 5350 - DNA, 201 bp, Bos taurus
atcgtcctggggtgttgagaaagaaggcagcttaggcagggggctgggggcgggggtgggagtgtggagaagaacagagcaccctggcccctttaggggcgaaggtcttattgaaaatatgaggaggagttcctggaccccttgaggtgctggagaatagaagaccgatgccacaactctccccaggcccatgatctgttc

SEQ ID NO: 5351 - DNA, 201 bp, Bos taurus
cgaactcggccacttcaaagcgctcggttagaggggcagaggaaggggcctgccttggagacccacagagggaagcctccagaggatgcgctccttcccacggagccgggaactcacttgtggccctgtcgtgccaccgctatgcagggggccggacggcttcctcgcccagcccctggggtgggggtcctccgtgcccct

SEQ ID NO: 5352 - DNA, 201 bp, Bos taurus
agagcaagaggttggggccatcaccccacagcacagcagttcccagatggtgggatttcacagccctgtaaaatgtccaaagaaatttggggtgggacagggaatagaaagtggccaagtttttcttttgataaataaaaatattttaaaaatcaattcttaccatcattttagtaaagaaaggctgttttcacaccaata

SEQ ID NO: 5353 - DNA, 201 bp, Bos taurus
tttaggcctatcagcccggcaacaggaataacctgacactaccttacaggcaagtgtgggtggtgagcatttgtggctatagttcaaattacttggaaacatttcctgagaaattcaaccacctaagaagccctgatacctaatgccctagtcactggttcaagtcagctgtggctcaaaaccagtgtgcatccttcccca

SEQ ID NO: 5354 - DNA, 201 bp, Bos taurus
caaaaagcaatactataagagaaatactaataaaatgaagaatcactcttcatcaaagacactaagagagttaaaaggcaagctatagaatagcagaaattattgcaagagataagattaacaaagggcttttatctaaaatatatacagactcattagaattaatgataaaagacaaccaaataaaaaaatgtgcaattc

SEQ ID NO: 5355 - DNA, 201 bp, Bos taurus
ctttgttgtgtagacaatccgccctgtctgaggatttgtgctgttattatgagtttgtttattattggatttatttctcctataagcaaatgtgttcacagcattccatcagggaatctccttaattgtcacataaatgtcatcttatgtaaattgaatatttatctttccacagaaggggtggaggggaaagaaaggata

SEQ ID NO: 5356 - DNA, 201 bp, Bos taurus
tcctaaatattctaaagcaatctcctttccccacaaccctctcatatatttaatattaaatatgcaaaacttcagagcatactagccagataagacacattaaaatgaaacatttgcccaacaaggatgccaaacattagggtttgttttattgcatgacgtttgcatgagaaataataattgaaactgtaaggcatcatg

SEQ ID NO: 5357 - DNA, 201 bp, Bos taurus
agttacgcagtttactcttaggagaaattcttgcttttctcaacagtattgtagccagatatccaaactagtagaacattttaacctctttgacctcttggatacctgcttttttttttaaattgaagtatagttgatttacaatatagtgttagtttcaagtgtacagcaaagtgattcagttatacacacacatgtgta

SEQ ID NO: 5358 - DNA, 201 bp, Bos taurus
tgtaagtcagatgctacttcttaggtcacatagcggttgtgtgtgaataaatttgggaagtttggaagatggtcaagttggtgatgaaaatgaggccctgccttcagtgtggataatgtttacctgaaattgtttatgaagaaagaaactgccccacaaattagtatttcccacaaaggcttcagggaaagatctcagtgg

SEQ ID NO: 5359 - DNA, 201 bp, Bos taurus
tgtttgcatttccagttgtattctcttggggtagattctttggatctgaggatatgaatacaactaatgtttttcagaaaaattggtcagtttacattcctctggaagtttatgagaatgctccatcatattgtgctcttgccagcattaaatattatcaagtttaagtcttctctaatttcataagcaaagttaatggtt

SEQ ID NO: 5360 - DNA, 201 bp, Bos taurus
cagaggaaagacctctggctgcaagtcagaagctgaagctcctgacctggttctgttactgcttcctgtgtgactctggccaagtctttgtccctttcccgcctgtcacaggaaggactgacactaggaaagcagtgtgtgtaaagctcggggctgtgctcagtgtgagttagctggggtcacactggccactactgcagg

SEQ ID NO: 5361 - DNA, 201 bp, Bos taurus
accctggttctgccaacacctctctccaactcccatcacactgatggggggcgggttgagccgacctctgggaaggggcaccttgccatgggctggcctcggtagttgaccccatcatggaatccatcccgtggcatcagaactgaaaagacttcagagactgccttgtacaagtcacgccagactctagtgaggcccggg

SEQ ID NO: 5362 - DNA, 201 bp, Bos taurus
acacttgttacaggtatcaggaggctagtgcttgccacgtgttgtactgagtgctgggacggatgacattgagtttggatggtctcctggaagcagagagaaccccacagggtctttaccttggggtgacatggtaagatgggaaacggagcagccccaggggcagtggcttcagtgagttctctgcagaatggtttccca

SEQ ID NO: 5363 - DNA, 201 bp, Bos taurus
tggatgaggccccccctgccatgcctggcaagacagatggtgaggaagatcctagggtgaagcctgttccgcttttcacagctcctcttccagctctcccacccccactttcccaaaggccctgacaggcctggagctgggaggacttgtggactcgagcctggaggatggtggggggttgggcatccttagattcagggt

SEQ ID NO: 5364 - DNA, 201 bp, Bos taurus
tatgattttatttgcatgcaattctgggaaaggcaaaactgtagttacaaaatgcagatcaggggtgactgaaaatcaaggtacaagggaggggatcgactgcacaagggctcaagggaaccttttttggtgataaaaatgttctgtatcttgattgtggtgtggttacatgactatatataattaccaaagttaatcaaa

SEQ ID NO: 5365 - DNA, 201 bp, Bos taurus
aagtaatcaagggttgtacatgggagggtttatgggtcaaacaaggaatctgtatccatcacttcaacccactcagggtattctactggccagaatccagccacgtgactgcgcccacctgcaagggtggctaggaagtatagctcagtgcttgccacaggcctcatttgtatgtgtatgtgtatgggtatgtgttggttt

SEQ ID NO: 5366 - DNA, 201 bp, Bos taurus
ctgctgagtggaaggtggctggccacgttccagagcctttcctctcagcctgtaggtctgcctcgtccagaccaccagccagctgcatgtctctgaaccatggcctcctccccatggttcctcacacacactgccttcccgtcttggtgatgctcaggtatttcttcccgccagcagagatgggctccaggaagaaacctg

SEQ ID NO: 5367 - DNA, 201 bp, Bos taurus
gggcaggctttgtgagacatagaaggtgtcttcttctccctaggctggccaagcaggtatgagcagaaattcctgagttctccccgatgtcaaggcccctaacatctatcacctgtacatagaatattcatgtcccttaagggacttaccgctccctggggcacattcttagatcctaattagaggaaggagtgtgagctg

SEQ ID NO: 5368 - DNA, 201 bp, Bos taurus
ggacgcccctctctccagcaacgctgccttcaggccccagttcctccttcatgcttcaggatttgtgccttactacagaagccccgaggaggggctgcacataagccctgggccccctgcctctccactgtggggccaggagtccacaggaaagctgcccaggcccagggcagccacactgtgagggagcaggagctggtg

SEQ ID NO: 5369 - DNA, 201 bp, Bos taurus
gctaaggattttcaggagaaactgatgtgttaagaaatggtgttgtgtccacctccaacccccaccggcaaacagaggagatctggtgtccctgaggcctaggctctccttacttcaagtggatctgtgactagtcactgtgcttcacctgactttcctgtctccaaggccatgacccactgaagacactgaacagcactg

SEQ ID NO: 5370 - DNA, 201 bp, Bos taurus
aattgctttttttttaatttaatgaagtttagttttctccaagctttcattctacctggtggcagaaagagtgattttgccatttcaggtgtaaaattccagaattccaagtaaaattcaggcagttcagtacttcctcctcctcctccctctcctggggtgactttgaattcttggggcttggggtttgagggagaggct

SEQ ID NO: 5371 - DNA, 201 bp, Bos taurus
gactgaataccatccatccatagggctacagtgtgcatttgggtcaggagctaggcagaggttatgggaggtactcagagggccttaaagagccaagtgaccagaggctgaatcagccagggagtcccagagcctttactgacctctcaccagcccctggccaccagtgtcagcagtgagcgccagcagggcaagcagtga

SEQ ID NO: 5372 - DNA, 201 bp, Bos taurus
acaagacccaaaaatttacgagaatggaaggagtcagattttaatactctgtggacagctatgtaggacctacgtaaaagcttttcatctgaaaaagctaactttattggaaatgctgactaaatattaacagaagtgataaggctgggtgaagagtggcttttctctgggctgttactggtgggaggatatccacatgaa

SEQ ID NO: 5373 - DNA, 201 bp, Bos taurus
aactggctgccccgaatcacaggaccaagcctggcgtccacacaggacgggggtaagcaaaggcaggagtccctagaggcgtgtgtcctgggggccctgattgttcgttctccacaacctcactctttcttggtaagtcaccccaatacgtggtagagcaggcagcagccaggcctgtgtccacctgactttttccaccag

SEQ ID NO: 5374 - DNA, 201 bp, Bos taurus
tactgggcctcttcttggtgcactgaaaataccaggattctgagctgaaaaactaggaaagaccagggaccatggtgaaaagcccaaagcaaaggatactgtgacaggagagggcctgtctgccagcctttccctttgtgcatcaccacatgtacagaaagaaatgcatcttttgtcataattttaatttctgtatgtaaa

SEQ ID NO: 5375 - DNA, 201 bp, Bos taurus
tgtgccaccatatcagaattaactgggagctgataaaacctgcaaattcccagaccttatgccggaattagtaaatcggaatctctgaagcttggacctgcgtaactgcattttcccagactacttagatgatccttgtataaacccaaatctgagaactgctgtccaagatgttgaccagagtctgaacggctagaggag

SEQ ID NO: 5376 - DNA, 201 bp, Bos taurus
ggtaaaactacctctgtttggagggaatagagggtatggatggactgaaataatttcatcttccttgagtttatcccatggcccaccatgcaagtcatgccaccagattcctgacttaagtgccccctcagtgaccaaagcaagtccaggctgctgacctttgttgtcacctctggccaaaacatgtttattctttacata

SEQ ID NO: 5377 - DNA, 201 bp, Bos taurus
ctgtgaactcacacgctgtgttagttgtggttgttatcaaagagcagccagctgtggaatctcagaggggcttgaggtcctgcttggcccctgatcagccgtgtgaccttctacttgacttctctgagcctcggtttgcccatctgtgagtgggggcaactttccacacctcccacacaggaccattgtggggcttagcta

SEQ ID NO: 5378 - DNA, 201 bp, Bos taurus
ccgagtagagactcttgtatacaaggcacggtggcagatacttctctgcaaggtggttgcttttccagaggaaatgggcagatggagagaaggatggccaacctggaacagggcaagtgtaggtaggaagggacgaatgaatagccatgaccagagagaatgctctcctgggcctctgctctcccaagcctttggccacag

SEQ ID NO: 5379 - DNA, 201 bp, Bos taurus
ggccactcccaagcaccgcttcactgctggactgcctgccagagcataggagctccccacacatgttcttaggaactgagggaactgaaagcatgtccccaaaagagcggccacaggggcaagcattgctccgacttcaagaactaagagatgggataggactcattctgcacggtcccagggtcaaattggaactaacca

SEQ ID NO: 5380 - DNA, 201 bp, Bos taurus
acacgaggggccactgagatcccatctgtgagccaagtgttccccacattcctctcattatctcagaatcctagtgtccagctcgaggagggatgaggcagtgagtggggccctcgtctgcatctggcctagtccttctgtttccagtgccctggactccagctggccttccttctgtatcattccactcttgttggacac

SEQ ID NO: 5381 - DNA, 201 bp, Bos taurus
atggatgtgagagagctgcccaacggtgaggccctgtcccaccccttcccagtggcgtgaccctcagtcagcaaggtctctgaccccttccatgcatttccgcattcacggcccggggatgataactcttacttcatagcgttgtggtgagaattcaaagagcacactcaataagtgtcatttcctctcttttacctgatg

SEQ ID NO: 5382 - DNA, 201 bp, Bos taurus
ggatggaagatggttaacagaatagatcaggaacaggagatgtcatggtgccaggtggtgggggcggggggagcagggaggagcgcagtaaggcctcataccgcttgttcaccgcaagtgtttgaaagtctctttcaaggaaaagaccaccatcaactaaagggaaagggaagaggaacagagaggagagagataagtaag

SEQ ID NO: 5383 - DNA, 201 bp, Bos taurus
ttaacacttacagataaaggccaaagccatcaagttcccgagcctggtgttttttgctgagctccactctcaattctctaagagcctcatttttcacttgacctttctccagagggcctaggaaagaaacagagtttctgatctaagggtagactgctgctttttatttcatagactcagatactccctttggtgtcaacc

SEQ ID NO: 5384 - DNA, 201 bp, Bos taurus
aacctaaagtaaagagttttcagcagtaatcagagcctgcaagagaagcatatttgcccagtggagctgaatcacattaggggccaatggagcctgacacaacagagccatgacttccagttgctgaggagccttgaatttaaattccttcccagctccagtgactgcccttggaggtcctgagaggcccaaacctctata

SEQ ID NO: 5385 - DNA, 201 bp, Bos taurus
gcgatcctgaatcctccaccctcctcacagaccgtgggctgagctcgggggagaccagcctcaccgtgtcggtgtggggtttgctcctgccccttggccaccgctaagaggggtgtctcccctcacatcccgaggcttcttgcttctcagccagggtagccacgaccctcagtgtcacctccctgggtgacacctcaggcc

SEQ ID NO: 5386 - DNA, 201 bp, Bos taurus
cagaatattttttttttcagccttcttgggcactgcactttttagggtttttttgttgtgtggtgaggcacattggtgtatacaaagttaatagagctggctaagcaacaggaaataatagctgttatcttccattatcttacaatggagtgtaatatgcaaaaatactgaatcctatgttgtacacctgaagctcatata

SEQ ID NO: 5387 - DNA, 201 bp, Bos taurus
caccagaggcctggaatttaagaaaggcattgatctccatccctaacactgcttctaatggtaactgttcttatgcaaactcttcacaccacgtatcagttcagcaaggcccagtcacttcactcagtactctacacagaccccccacgaagagcacctcccactctgcgcgtccccctctgctctcctggagtctcgagg

SEQ ID NO: 5388 - DNA, 201 bp, Bos taurus
agaaaaataaagtaccgtttcttcttcagtatacacaatcaagtgagatttcaagtaatagaatcataaaattttagctctgcatcacatctcagagctatggcctaaaaaggccatgtgacttagtagggccggattaagaacctggatttcttgactgctcagtgtcttttctggcaggcactgtacccttacacagtc

SEQ ID NO: 5389 - DNA, 201 bp, Bos taurus
tgataacaacatgaatgttcgttcccaataatggcctgcctggggatctcctggtcccagggatgacctatggtaggctgatggtagaaacacagtgcctgtcctcaggctggcctaggctcagggaagagatgtggctcctttgctcagatctgagagaggagaaggaagctggggaaaatacaaaccacagtattactt

SEQ ID NO: 5390 - DNA, 201 bp, Bos taurus
tgaacttgggctctgatgccttgtggttggttgaggccgaaggaaaagtgacagggaatgagagagagagagagagtgtgtgtgtgtgtgcgcgcgcgtgcgcctaagttggggtgagagcagggcctagaattgcgggcagctctcctccagcagtcttacgtcctgctgtggggccgcggaggtgggggcctgactgtg

SEQ ID NO: 5391 - DNA, 201 bp, Bos taurus
cacatgtgttcttttggtgactggcttgtagcatctgtcaggccagtgtatgctctccggttcttctgtctcatctcaacaaaaatttgaagcaacagacgttagagacctcggcctgtcacagctctcggacggaccgtgttatagctctcaggtctcaaacagaccgtgttatagcccttagacagatcagtgttacag

SEQ ID NO: 5392 - DNA, 201 bp, Bos taurus
ggctaagactttgccctccccatgcagggggcctgggttcaatcactgatcagggaactagatcccacatgcccaagcgaagatggaagatccctcgtgtcacaactaagatctagtgcagacaaataaatattaaaaacaaaaagaggtgaccagcagttctgtcaggacatatatgagctttcaggatggagagttgga

SEQ ID NO: 5393 - DNA, 201 bp, Bos taurus
ttcgaagaaaataaattgtacgaaatatccgtggaagcgattgacaaggggaatattccaatggcgggtcattgtaccattttggtggaaatagtagatacaaatgacaatgctccagaagttaccatcacttctttggctctgccggtgagagaggacgctcaggtgggcactgtcatcgccttggtcagcgtatccgac

SEQ ID NO: 5394 - DNA, 201 bp, Bos taurus
ctgataagatcgcagaggcctacaatgtgctcagtgacccatgaaagcacaaaatcttcaactgctgaggggtggaaggcttgtagggcggtggccccagtggcaggagcagaagcagtactaatggtacctccttcagctacacattccacggagaccctcatgccatgtttgctgagttcttcggtggccaaaatccct

SEQ ID NO: 5395 - DNA, 201 bp, Bos taurus
aaaagttacaataaaatgaacaaccctaataaaatcatggccatttctaccaatacaaaaatgaaatggattcctaaaatgcttacttacgatacataccagattattcctggcccctcttttaaataatttgatttgatacttctataatacctatttcttggcctcaattttcctaatagcctaattgttccctttatt

SEQ ID NO: 5396 - DNA, 201 bp, Bos taurus
agacattgtgaaagtttccctttgcattacagtgggaatccaaaacgccatatggatccctgtcttagtagtgtgaaaaagtcaacatctctccttctaatccacattccttaggctatgacctatggaaaagcacactttcattctagaggagatcactttcacagaagcaatttcaagacctgaccaaatgtacaagag

SEQ ID NO: 5397 - DNA, 201 bp, Bos taurus
aagaatacagtggaagaaactgcgaactactgcagttttacaagcgatgaaaacaaaaacattttctctttcaatgctgacctctcacagtaatgaaattgagtatgaaaccactcctcacttctctaggagtgattctagctcttcttgcaaagagctgagctgctctttttcccggtcttccttctgtttcagttcatc

SEQ ID NO: 5398 - DNA, 201 bp, Bos taurus
cgggagaaataacaagtcaagaacctctggattttgaagaatacacaatttatccaatggaaattcaagctcaggatggtgcaggcctcatggccagagctaaggtgctggtcaaagttctggacataaatgataatgccccagaggtaaccatcacctctgtcactacttcagtcccagaaaactttcctcctggggcca

SEQ ID NO: 5399 - DNA, 201 bp, Bos taurus
cttccaagctgcactaaattcaggcctctataccactggattctgggtttcttttccgaatacacagggcttcacgcagacgtcctgtcatccagaaatataacaggagataggccagtgtctaaagatcagcaggacaagaatggcggctcggcagaggggaggggactacagagcattcatcctgctctccattctcct

SEQ ID NO: 5400 - DNA, 201 bp, Bos taurus
gcaagaggtgagctgctggcaagcaagtaaagcttcatctgcctctccccatggctgacatgactgcctgaaccatcttatttcaactgctgaccactgaagggccattgccaaccattggtcaggacaataacttgctttttgcacttgccacaggatctccctccaaggggaacacattaaatgttcccctttaatgtg

SEQ ID NO: 5401 - DNA, 201 bp, Bos taurus
agagctccatttttgggtggataagggaaacatagtgtggtgtagtggagggaagacacaagctgatctggttttgaatttctgctctgccacttattgacagcatctacttccctcatagctcagttggtaaaggatctgcccacaatgcaggagacccaggttcgattcctggatcaggaagatcccctggagaaggaa

SEQ ID NO: 5402 - DNA, 201 bp, Bos taurus
gagggaaaaaatgcacctaatgcattacgctcctggcctgtaccactcaggtgaccggtgatggttatttacaaggctggcttattcatggccactgaagctaggagaggcaggatggagacaggatctaacaaacgagttatttatatctacaccccccggacctcagaaggaaaattcccatacttaggcattcctaga

SEQ ID NO: 5403 - DNA, 201 bp, Bos taurus
gggatgaggtgagcttgatgccatgggtaagggccagatcaaggagtggcttttcgacctcattttagatgcagtgggagccattggaaagttgaaaactagggcccctcatgagctgaggcatgttttataaagatcactggctgctatttgaagcacctctgaaggtagttgccaggttgaaatgaagtctcttccgca

SEQ ID NO: 5404 - DNA, 201 bp, Bos taurus
ccagatacagtcgtctcagtcatagtgtgcctggccagctggaatccgtgcagccaccgtgcttgacttctcagtcccaaggtgaaccctaatgtagagcaacaacacctggccccaaatataatttcctcttgcagctcattgcagccatgaggaagtcgccaggggagggctggggagggcggcgcagcagcaccataa

SEQ ID NO: 5405 - DNA, 201 bp, Bos taurus
agttctggattttaatatgtgcttagatgcatgtgactaccaccacagtcagggaacccccccccccccaacacctctgtgccatctctttataagcatacgcttccctttgtcccagctcctggcaaccactggtctgatctctacccctcgaatttttctttctgagaatgtcattaaatggacacttacagtgtgtca

SEQ ID NO: 5406 - DNA, 201 bp, Bos taurus
ccctttatagacatagagtcatacagtccttaccgagaccctttaggataacaaaagggtctgatattcaaatgagagtgattttcaaatgaatttcaaatggaagtgaggtggagtggtagggattcccaccctcacaccacctgcccccacagcccttactcttccctctcagccttgcatttcctgtgggaagtttct

SEQ ID NO: 5407 - DNA, 201 bp, Bos taurus
ggtcctggctgccactgtcatgttcaacctgtcccaagggtgctggggctatacagcagacaggcaaaagcaggctcagaaccaaggcctgtttccatagtaacaggtcaataccacccagggtcaattgtgagtgcctgcagccttgtgcaccatattaagtagcatcaatggatctctgaagttcaatattttaaatta

SEQ ID NO: 5408 - DNA, 201 bp, Bos taurus
tagaaatgagtccagcagttctgaaaggctttccaggaaagacgtacaagaaagaattaaccctccttagggaaagttgggccattaaccttaccgtcagtacttctccaatactctcaggcttctaatggaccttctactagaacctatccccattctgagacagggcttaaagttctagttactatataataaacacag

SEQ ID NO: 5409 - DNA, 201 bp, Bos taurus
cacattcctgaagttcccttggtgtgctcacctctcctgctgcttctgcaggccctggtccacatacagcacagtcacatggccttttgacagcttttatgataggcaggtcagtctcccaccttgagacattgcacttgtgaacccttccttctgccttttgcctttctgggtcaggctttaatactttttccttggaaa

SEQ ID NO: 5410 - DNA, 201 bp, Bos taurus
tggtcaagtctgaattttttctgaattcaagaaagtacttctgtaaaatatgttaatcagaataaattatttccaaggcccttccagtcttgaattctatatgtgttcatccatccatccatccattcattcagtcactctttcattcatcacttcaaagcagctgagcacctgctctcagctaggccctgaaggtgcaga

SEQ ID NO: 5411 - DNA, 201 bp, Bos taurus
caacctgaacgccgtgtcatcgtcgaggctccgaagcatgaaatggggttttgcgctgaagtctgagagacacggtgcattgagcttggtttggctatttccccccctgctgtttgtttttaaagatgaaataaggacaggcatgaaaaaggtctcctaggtcctctgtacgatatgacagccagcagtacaggcaggaat

SEQ ID NO: 5412 - DNA, 201 bp, Bos taurus
ccttgctgtccaagggaccctcaagaatcctctccaacaccacagttcaagagacctggtaggccaaggtaaacattgagtgtgaatctctctttctaaaggtggaggaactcaagctcagagaggcagaatgccaggatggtaaatagcagcctgggctctgactgctgctctgacctgtacatcacactcacacttctg

SEQ ID NO: 5413 - DNA, 201 bp, Bos taurus
ctattttctttggaatcattgatggatataaaaagtttaatttgctattaactgctttcatattctgtttagttcttatagtatggtaaatgatacaggtgcagtatcagtattgtaacattgtgtggtgaaaactacaaaagtcattctgtggatatattttacaaggcagaccagaaactatatttcagattcttgtgt

SEQ ID NO: 5414 - DNA, 201 bp, Bos taurus
ctcttgggtttgaaaggggattattcacatcaaaagataattccctattcttcactctagtgggttcttagaagatgagacctgtttgctaactggcatctgtagtcaccagggaagagccatattctgatctttgaactttatctgtactttgcctgaaagcatgattgtttgaatggtttgatctgcccagtgtactac

SEQ ID NO: 5415 - DNA, 201 bp, Bos taurus
cagggatcgaaccccagtctcctgcattgaaggtggattctctaccaactgagctccctgtaccttggatcaaatactggctcaaagcaaccgtatgcaaacttaatattagcctttttcttagtttcacagtaactattttattattttaggaagtataaataccaatgaacctagtgaaataggtcacttatattctaa

SEQ ID NO: 5416 - DNA, 201 bp, Bos taurus
attcatctatcacctgaccgacattaggacaggtacttcacagtagtgtttgggtctcagggggcttgcttcagtactgagtcagtacctaataactctcgttaaatttgtaaatgtctacagatcccttcaaggaaggcttggatgaatatttataatatacaccaaaggttgttgagattgtcctcagatggaagggag

SEQ ID NO: 5417 - DNA, 201 bp, Bos taurus
aggttcaaaagggagaggatatacgtacacctatggctaattcatgttgatgtatggagatatcaatattgtaaagcaatcaattaaaaatataattttaaaaactgattaaggttttagattagatattttaattaacacttcaggtgttgaacaaaatgctgatttatatttagacacaaccagtttcaaaatatcagc

SEQ ID NO: 5418 - DNA, 201 bp, Bos taurus
aacggggtaccttcacaaaaccccatttctaccaatactgctagttcactcagggttaggctagcacataaaactgtgaaccagggccatatttcatggaataatcaggcattaacaccaagcataattcacattcctcctcacagagccaccctccaacaaaccactcttacattgttagagcgccatctagaggccatc

SEQ ID NO: 5419 - DNA, 201 bp, Bos taurus
caattcctaaagtcctgaatttaggagtgaaatcatgaggacaaataaaagagtctaaagaattaaggaagatatagcccaagaaagacattgtgaatggtattcaagtgtttggaatttattctcaaggctatgggaatcaatgaagttttcaagaaatgtacatctgaagagaaatgttacagcttccatgtggcaaag

SEQ ID NO: 5420 - DNA, 201 bp, Bos taurus
actcatttgcaaaaatctgctctcacaattatttaatttcaaggaaaagcagtcctctggggcatgagaagaagtgggatggaaggaacaatgaggcctgtgcataattccatagctgccaatgtcctacagacctcagtttggctctgactttcacaggaaagatttattctaaagatgaaccaattggcctcatccatt

SEQ ID NO: 5421 - DNA, 201 bp, Bos taurus
cacccaagaatcaggtatggggtttaactcctttatttgccccagcatcctcttgtgaattctatgagccatgatgcctagaacaagcagaaacacacagcactttccaggcctctggcccatccttagctgccctgacaccatcaccaggcaatcagcaggatgtcctgatgaaggacggacatcagcttctccagaatt

SEQ ID NO: 5422 - DNA, 201 bp, Bos taurus
gacctcgtcaccatccacaagtccaatgtccacacagatgccagagtgatgcttccaaagcacaaatctgaaaagtcctgacacttcatgcagcagacaatgttcctcaaaaccgaaccctgccttcctctctagactgacccttgtctctctttcaggagccgcctggaattggtgttctaggcatactggcagctcagt

SEQ ID NO: 5423 - DNA, 201 bp, Bos taurus
tggaaagacactccagcaccacacctacaggaaaagctctctcggggaatgggaaaaatgaatgagggcagaagggcccccagaatgggtgaggtggctcttccctttgtccttcaggctcccacacacctccagcccttccttcaggattccctgtgccctcctggaagaagacaaggccaccagcagcttcaggatcag

SEQ ID NO: 5424 - DNA, 201 bp, Bos taurus
atacaattgtcacaggttctgaataaacatacacacttgtacatacatactcagtaatggattcacaactgctcaaacacacattcttcaaataatagttgtacccacaaagcacagtcctaaaaaggcacatatatgtagttatcatcattaaaggtagataactgaagactggttgaatgtatttactttggatggcat

SEQ ID NO: 5425 - DNA, 201 bp, Bos taurus
tcctgtactgataggtgaatgatagattctctgagctcctcagggcctctccccgctcttgcaccctggctctttctccaggtcctccccatcgctctcccatccaaaagctaaggccagctgcagttgagacccgcagcaatgaaacccttcttcattctgattagctggtgcctatgacatactggcggagaaggcaat

SEQ ID NO: 5426 - DNA, 201 bp, Bos taurus
tctgagacttttcaacatcaaatggctttattttacaaggtggaaaaacaccataaatgactacaaatgctgattctgggcttattgctcattctaagcgcagcatggctagtttatgcttaacttgatctacagaaactgaagatatcttctgacttatttcccacccttttctaaagtagattgctgggtggtccgtga

SEQ ID NO: 5427 - DNA, 201 bp, Bos taurus
gtggcccagtctcctccctcatcagtacatggagggattcagaaggtaatctggggttcacagggaattaaaggtccttttggcctatcctctagatcattgtttctcaatttgttgtctttggtcttctacatcagagccagccagtttggtttgtaggccagcagcatctgatctcctaggagcttattagacatgtaa

SEQ ID NO: 5428 - DNA, 201 bp, Bos taurus
ccttccctgctccacagcctttgctggggcctctgggaaagctcttcttctactctccctgaattgtttgcatgtctgtcttcccacctaaactgaagcacgtagcatcatgagggcccagcacagtgatcggcacacactaactgtgcaactggattaattcacattgcagttttaaatatctccacgggtggctttgga

SEQ ID NO: 5429 - DNA, 201 bp, Bos taurus
tttcctcaattaaaaaatcttacgtttccagcttttcctttcattccctttttatcattattgtaatgcatcgtgatgaggcttcattcttcttctaatgtacgtaatttccattcctttagccagcttaaacaaattgaggtttctaaattaatcaacccatgtagtcatcagtggggctgtatttttcttaattcgtta

SEQ ID NO: 5430 - DNA, 201 bp, Bos taurus
acaataaacttggtggccttcatatcagtgttacccaatagaactttgtgtgacgatgggcatgttctgtatctgtgctatccagtgtgggagctgccagccacatctggctgttgagcacttgaaatgttagagcaactgagggactgaattttaaatttcatgtgatttaaattatagaaataatcatgtgcgactaat

SEQ ID NO: 5431 - DNA, 201 bp, Bos taurus
ctccttttcctcaagtttccaagacgtagagaactagaacgctgttcaaaaccttacaactcagtgtattccagccttcacagtctacagtctttaaacaagcccagaagtagcttcctggtatcctccaccataccatgcttcctgcttcctctctacctgaggctgcatggtacagataaccagtagcagattcatcat

SEQ ID NO: 5432 - DNA, 201 bp, Bos taurus
gttatggatattattgttgtaagatcagtgttgtctctcaagtgcctgccatgtgcctgctgcagcatgaacaataaatattaactctaaccactctcatgactcatgggaagtacatcagtttgaaacattattacggactagcctcaaacacctcttcctgtggccaagcaggcattactaatcaatctttccccttgg

SEQ ID NO: 5433 - DNA, 201 bp, Bos taurus
actcaatgcagcccactcttatagcccagccaggttccaggtgtgccagccaccaagcttgggctccgcggggttctcccagtactgggagaatcaggccgactacctaaccaggactgtgatcttgagttaggacgtaacctctcagcaccccagttttattagctcacagtggtagtattaataccaggctcacctcac

SEQ ID NO: 5434 - DNA, 201 bp, Bos taurus
ttgtgctaaaagagacagaccaggaaaggcacagagatccctgaaaaggctaaagcaattcttgcttatgcttttggcaaaataagatctgcactggcaaagtcagtattcccaggagtctcggctttgcagatggttctgccctaagctataaactgaataaggttgttattaatcttaagagtttccaataaggctgtt

SEQ ID NO: 5435 - DNA, 201 bp, Bos taurus
gagcttagacaactctagtggaagcagtctagctggaataggatagatgaggcctggaagaagcaacgattctaactcagataatcctcaaaccttgagaagcagattgccaataagaaatggccttcctctactctgagcctcccaaactacattctcttgcacaacagctgactccttcctgacaccttctaatcatga

SEQ ID NO: 5436 - DNA, 201 bp, Bos taurus
aagcaagaaacttttatattttttaaacaaagaaacaataaatttatgagcaattgacaagacaaagaaacttaggttttgggtgctcaattagtgaatcctctaaagagagtctgggctttgggtagtaaattaaagaggtgacaagttttatttatacaggcagtttggtgccaattctctgtctctggtgataaggcc

SEQ ID NO: 5437 - DNA, 201 bp, Bos taurus
gggacctaccccaaggcttctcagctcagtccccatagaacagcccttgttccaaaaaaaaaaaaaaaaaagatggctcaaaggccaaaccagtccaactggaacaatctggcttcaaatcagatcaaaatgccatgacctcttccacatagaagagggccttcctgtaaaagatgaaacttgaaaatagatctaaaaagg

SEQ ID NO: 5438 - DNA, 201 bp, Bos taurus
caggtctcctatgtagcttcttctccaatatcttctttctcttcctcctctcatgcctctgacacataaccaaaatgatcagtcaaggaaggcacacccagattaccttaatatccctggtctaaccaagctaacatcttccttgtcagtgttactcaggactgtctgagcacctcagcttccacaatagacctggtcaac

SEQ ID NO: 5439 - DNA, 201 bp, Bos taurus
tggctggggggaaaaagttattttaatggttttctttccctcttcagggcagaagagccttcttaggtctgaatccttagagactaggccagtttgagaccaccatgatcaagttcaattcagagtagtgggttatcttaggtttggaaagacagctgtgcaagaaatgatgaataaactgtcttgagcatttccacaggc

SEQ ID NO: 5440 - DNA, 201 bp, Bos taurus
ttttaatagcttttatagcaaaattagttcttagagtaggcagggcaatttttaaaaaacaaaaacaggcaatgttacttccttttgtaaaactttctgacagctcccctctgccttagaataaatctagtttcttgatttgggccataaagtgctacataatctggcttgttctcaccttgtactactccccacctcaca

SEQ ID NO: 5441 - DNA, 201 bp, Bos taurus
ctgaccacatcagaatccagaagtttccagtttcttaatatcaacttgatggtgaaatttgcattatgaagtgcaaaatccaatcctcttggcattttcacttgatctttgtttcttggttatacaacttcctttgtctaattttacctgttatttatttttaagcttttcaccccctctcactcagctttcagtagagac

SEQ ID NO: 5442 - DNA, 201 bp, Bos taurus
cagttgatattattaaaaaggattaaaaaaaaaccttttaagctctgagatatttcatggtagaaatatccattatagtcagatacaagaacaggcaatagacagactgagtgtgggaatctaagcttgtgagtatattgggggaaaacagaggggaagatttagatgtttactcaggaaaatgtcaagcaaggacaggat

SEQ ID NO: 5443 - DNA, 201 bp, Bos taurus
ctccaggagttggtgatggatggggtggcctggcgtgctgcgattcatggggtcacaaagagtcagacacgactgagcgactgaactgaactgaactgactgaaaaaataaaagggccacctcattccatttccaaccctgctttacttagaaggttgaacctactggatggtagcttcttcaccccctttttctcttccc

SEQ ID NO: 5444 - DNA, 201 bp, Bos taurus
tatgtcaggtagtatttatccttcagagcaagacttgtccaggtgtctcatcatttagagtccatgttcaagtcttcccagttttcaaatgatacgattacacatttatgcttattcactgacttaaaatcatctcaagtacatatctcatatgtctacataccctcttacaatgccttatagagtgccaaacacaggaaa

SEQ ID NO: 5445 - DNA, 201 bp, Bos taurus
ggagaggcagagttgctcatcaaagagcaactagtggatatgcaataaacgttgaatgaatgaatgacagctacgactaggggcaattatatgtgccatatacaaggatggaaaaggtaatcaaagaaatcttcatagtagagatgatacttgaacgagaccttggggttgggtataattttaatagcacaggaagatgct

SEQ ID NO: 5446 - DNA, 201 bp, Bos taurus
ctatttacgtgttcatggttctgcagtgtggtcagagctcgatggagttgagtcatctctgctgtacacagtactaactgaggcagcttcactagggctgagggctccaagatgggtttatttagatgtctggtgttgcaggaggggaggctaaaatggcgacaagtcagctggtttctgtttctgtggcctcgcatcctt

SEQ ID NO: 5447 - DNA, 201 bp, Bos taurus
gagctgggagaatgtgctggcatggccagcccaccagttcctaagcactcttacctcttcatcattctcggtgaagtggggcccatccactttattcacaaccatgattatggccaccacatccttcccattcattatgggagaagccaagatgttcttagtctggtactctgtgagggtgtccacaaagtcacagaaatg

SEQ ID NO: 5448 - DNA, 201 bp, Bos taurus
aggtcaccagggcctgggatctgggctgtagtgaatgcctcttatgagccacaccagcttggaactgggtcacaggttgcagggagggtggctggcttaatggccaaagccaaagcacatggcggggcagtgcgggggtggcagtggggctcagggcccccacccagaaccaagcactacggcaccagaagagccttcttc

SEQ ID NO: 5449 - DNA, 201 bp, Bos taurus
gttccagtccctggagaaaggaaggtccctctggcagaagctggcgggtaggggtctttctcaacaaagtgatgaatctcttttcccgtcatcctatccatagctctcaagatcttgctttgttaacatcctggttcccactgagatcctccaagacacccttgggatggagcccttccttttccagataagaccctggga

SEQ ID NO: 5450 - DNA, 201 bp, Bos taurus
attaactttagcatctggtttccttcttcttcatgcatcttgatggcctgtctcctggttctggatgagtgccaactcttgtcacttcctcctttctactgcctctttcttgaataagtaattggccaaagtcaggagccaaccagaactgggaggaatcatggtacaaatgttgccaggcagaaatgttcacaaaagggt

SEQ ID NO: 5451 - DNA, 201 bp, Bos taurus
ttcaggaagccttccttgatcctcccccttcctcctccagggggattaagtgcccctcagttccctcagataccctccctgctgtcacactcgcctgttttcttggccgccttgggttccctgtgatgctggtacatcgtaaaagactgaactgtagaatatcagaggtggaaaagtccccagacgtcatctggcccaggc

SEQ ID NO: 5452 - DNA, 201 bp, Bos taurus
tccttcagtgtgaggcttgtgttctgtgatgaggacctcacagctcccaccatctgaggtctgtcttcgaggggcgggtgggtccggtccccttgtcctccagcctgaggaagagacaggcaggtttgagaccctgggggagcagaggaaatcccagggacttgacctgtcacgtgttgtaagtctgtcttgtcactgcta

SEQ ID NO: 5453 - DNA, 201 bp, Bos taurus
tccaactgcccacatctgaatacattctactaccatggaaactacaaaggaaggaaaaatatatttattccaggattcatttactaggatttttaagcgccctctcttctgtagagccccagagcggtgatgagtgctaggggctgctgtgcttcccggcatgtgctcccatcctctgagggtcctgagaaggataatgga

SEQ ID NO: 5454 - DNA, 201 bp, Bos taurus
aaagtatcgttgacctagggaaggtttcagctttctttcagccttccaccttattaagtcagacccacccaaggtaatctttctgattataaagccagcaattctggggccttaattacatctgcaaaatccctcacccttgtcatgtgacctaacctaatcacagggtaactccagggaacagattgtgggagccatctt

SEQ ID NO: 5455 - DNA, 201 bp, Bos taurus
aacatgagagcaactgaggatgcagacataggacagttaatctcaggtctggctagagcagccttcaggtacccaggatgaagtggagccagcatggccatggcaggcatttgtgaaatatactaaaaatgtttaaaatggctatagaaagagctacaagcctggccttgtcatggagggcacttctagtatgtcaccagg

SEQ ID NO: 5456 - DNA, 201 bp, Bos taurus
ctttatgcccctgcaggagtcttgcttctggcccaatcactaacttcccctggattccttctgcacttttctgctgggtcactaatcaagataaaagagagccctgggttgagggtcagggcctctgagttctagtcctgggatactgagacccctagatgggttatgggacttgctcaaagtcacatggtgagttagcaa

SEQ ID NO: 5457 - DNA, 201 bp, Bos taurus
ctcagatttgaacctgagctgcctattctgaatgctaaggttaaacccatcagactgtagtaataatagtagtagcgttactgactcaggttaattgaccgccttctatatgtcaggcacttttctaagcaagcccttaatatttaattcttaatccctacaatagcacaaagggacagagaggttaattaattttccctg

SEQ ID NO: 5458 - DNA, 201 bp, Bos taurus
ctggggaaagagtgtagtttcaacaactgggacagcaagtgcaaagaccgtgaggcagggcagacctcagctatttcaggaatacaaaggaggccattatagctctagtagagtgactaggatgtgctgggagacatggctagttgttgttgttcagtcccccagtcatgtgcaactctttgcaaccccacggactgcagc

SEQ ID NO: 5459 - DNA, 201 bp, Bos taurus
ccctgcctaccctccagcctcatctctcaacacttcctataccgttcctccccacccaacacaacacacattctaataaactgacccacagtaactgctgcgggccaccaggatctcttgaacctatggctgcctttgtgtatcctcttctccccaccaagttctctatggacttgaacttctcattcttaccctccatta

SEQ ID NO: 5460 - DNA, 201 bp, Bos taurus
ctcacagcgctggagggcacttgaagctcttagaggttccgggctgctcccccagcctctaaccttccacctctccctctagcccttcctaccatctcagtggcttttctggcctctctaattaccaggaatacagaggaaaccacagcttctgtttagaccagaaggaagaaaagaaaaaaaggagttagatacccgtca

SEQ ID NO: 5461 - DNA, 201 bp, Bos taurus
tgagagaacgaatgtgaaagctgttgaaaatgacaagtggcatctgaaataagaactaccatccgttgtgtgtgtcctttgtgtctgaccctgtgctcagtgcttccatgcctcatctgccagtcctcacacagtcccaggtggatgctcttggtcccctgctctacgaaggaggaggctgacgtaggctaccttgtgcgt

SEQ ID NO: 5462 - DNA, 201 bp, Bos taurus
gcactgtgcatagaagcccctctccccagcatctcagggcattgttcccttccaatgtgctttctgaatgaatttcctggctggcctgatggtgttttcagttgtgggaggctgaacagggagttggttcaggagagacagctggagtttagggctgcgaggccttcatccattcagtcctgtgaacaccatctgtgcctg

SEQ ID NO: 5463 - DNA, 201 bp, Bos taurus
ataactattttgctatctgtccccacgaccctcactagtctgaaagcttcattttttaaaaaaagagctgtggctctttttgcttgattgttgtatcattcagaagtgaatttggctgcaagtagcaggattttaatagttgtggcttaagcctgcaggggcttgtttcccttacaaaatataaaatgtggagataggtgg

SEQ ID NO: 5464 - DNA, 201 bp, Bos taurus
atttgtagggatttgaggggatcagtaggtagtatctaccttttcctctaagtctaagccaattctgagatggatgcaagaatcagaaaaattactgatgcaagtcaggttgggggatttgactgagagataaggaagcaatggatgtcctaatactgtatccaagaacagagcattctcagaccaggagaggatgtccaa

SEQ ID NO: 5465 - DNA, 201 bp, Bos taurus
tatgacactaatatttgtacagtagccagtagatagcttttaaagtctgtctttctctccaatctttaaatgcagcatgggaagaaattagtttcccccccctccttgtccctaacatttctctttcctctggggatttctgtgcatttttcatatgtccattaattttcttattaatttaacatttgtttaggtgactat

SEQ ID NO: 5466 - DNA, 201 bp, Bos taurus
aagttcctcaattataaattatcaacagttgtcacaactcacaggtccttgtgaagtttacatacgatttcttatgtaaaaaaattagcatgttttctagcgtagattttactaatatcatcatcaataaattgggcttaaatctgtctccccactgcgacaaaactctacatttcgtacggttgttttatccattacgtt

SEQ ID NO: 5467 - DNA, 201 bp, Bos taurus
ggggtaggatggctgggcatagaaaccataacctcccacacaagtattccctgcatcgcatcctgtgctgagtcaccccagttgttaaaggggaagaaccgtgtagcttgaggttaatggaatcctagatgaaaggaacatttctggtctttaatgtaaacagtttgggcttaattctgttgctgtcatctcctttttaaa

SEQ ID NO: 5468 - DNA, 201 bp, Bos taurus
tcccaaccataaaattatagtttgggctgcagagcagaatactttatacctttggtcatagaaagagatgtttaaaaaaatttaccagctataataccccgttccttggtcatggtgcttggtccaggatgggtccatgatataagccagaccaaacttttgagaattctccaaattaagtatacagagagggtcatcttt

SEQ ID NO: 5469 - DNA, 201 bp, Bos taurus
ctaagaagaacatagaaaacctggaaatatggaaggaaggtgaatagggaggcttgttggcgggggtggggggagagtagagtgctagtaagcaggcttttacggtttgtttcaaaatgcacattctgcttacctcttgtggggggtagtatcgctttataaagttaagaagacaaaatgtgtaaatactgggaagaagaa

SEQ ID NO: 5470 - DNA, 201 bp, Bos taurus
aagcaggatgatgagggctgagcagcttgtctgtgaccccttgaaagaaccccagagagaaaggaaatctggctttgaagacaaagttttttatcttttgcaagctgcattcctatacacctgcctcctgtgggctcaggtgtcttgcctgacccagtgcctggtttggggtttttttttttactttgtatttggtattgg

SEQ ID NO: 5471 - DNA, 201 bp, Bos taurus
ccgcttcttcctaacagttgggaacactgctttgcctcctgctcagctgtatgaagaaggaagactcaagtgtcctaagtgacaataaatcagccttctaggggcctccttaccagagaagagccactctctgggaaagtttgtccctaagcagaagggaagttaatcaggaagaattccatctgaggggtagttttgcca

SEQ ID NO: 5472 - DNA, 201 bp, Bos taurus
tcatgagggaagaaagcacattcacaacatatcctacatccttcatgctagctagtttcacatgtaagactatgctggtcttcaaattcacagactgacaaacttaagaacaggcagaaggcatgattcctaaagctgtgactgggagatttcaggtcaagatgctagaataatagagtcctagatggaaaagaactcagc

SEQ ID NO: 5473 - DNA, 201 bp, Bos taurus
tggggttgaaactcgccgggccccatggctccagcctgctggagacaggagcttggctttgaggacaggcctttggtgatatttctgctgtctgaccccatgggtacaagtggaatgtgtcgcccagctcgtcaccgggaactttctggatggctttattattcagagcatatggtgctttggctccagtcatcggagaca

SEQ ID NO: 5474 - DNA, 201 bp, Bos taurus
gcataccaaaggtgctcaatagatgaccctcactgactgtatgaaggggatttgcaatgatgtgcagacaatgctgataatacagtgttaaaaaaaaaaaaaaagctgtggaatgtgcagtatagtctcagctatgtaaaaataccggagaaggcaatggcaccccactccagtactcttgcctggaaaatcccatggaca

SEQ ID NO: 5475 - DNA, 201 bp, Bos taurus
gagcctcttttctgttgtagtgagtgcttctgggctgcaggggatttctgaatagcagaggcactttttctgggtctttgttgtggatggttctcgtggacagactggttttggcttatgatctcttggtggagctgtattttggatgagggcctgaatggtggaggcagggttaccctggaaccctcacagaatgtgcct

SEQ ID NO: 5476 - DNA, 201 bp, Bos taurus
gaagagggagagggcccagcagtaccgtatgagatggaggtggtgcatctgggactgagcacaagtaggactagtgagtacaagtaaacttcaacaagtaacccagaagtctatgttatctgtcagtgttgcactaggaccccttcctcagcttatacctctggccacatgggatttcctttttttttgtcctctggccat

SEQ ID NO: 5477 - DNA, 201 bp, Bos taurus
ttctgtatccccaggattaaagttgtacatcacaacacatttatttaccccctccccacttcacacttttcctgacatctcctgtatctgaggaaatgtgcctaactcaagggatgactactggaaagtccttgttctcaacagagtttgctttcatgcctacaggttctgtctcagacgttgggggcgaaatgaattcca

SEQ ID NO: 5478 - DNA, 201 bp, Bos taurus
tgggtgccttatctattactatgggttgttatttccttccaaaaaagaaggaaatttatcctaactcattttcaccatgtgcttgttacacttccctttgcctcactatattcaaatatcttttcactgtgttcaagccccttcctcccttaccccatagtaatgtctcccagaaggaaacgaccatggaatctcattcct

SEQ ID NO: 5479 - DNA, 201 bp, Bos taurus
tgtctatcttttgtggacacaaagaccagatcccacagaggtgcatccacgtgagagttgtttagattcttcatagcagctcatatggccctgtgcagaggcttccattatgctcaagatcctatgctgtggttattactgtgtgttctggtctttctctggtcactctggatggccttcagtgtggcttcatctctttta

SEQ ID NO: 5480 - DNA, 201 bp, Bos taurus
ataactaaaaatgtaagttgtcaaaatagtccagttcaaagatagagactagcctggatttaaaaactaaaatccagctatgtgttgcctacaggaaaaccactttaaagataaatgcaccaaaggacagtccaaaagaaaaaaataagctaaacttcatcatagataagaactctgctttttgaaatccacagttaagaa

SEQ ID NO: 5481 - DNA, 201 bp, Bos taurus
cctccttcccaaggaagagaataaagcatgatgctgtcccaaacctactgttgcttgtcagagaaaaatcatcattgttaatgctacccgttaggaggacgtacgactcagcacaaaaatcacaaaccatgtagactgcttgtttaatgcactatcagtgtgaatgctggaggaaattcagggggaaagtatgaaaaaaaa

SEQ ID NO: 5482 - DNA, 201 bp, Bos taurus
tatctgatggagggaatcttgttttagcacagaagtgatgttgagagtataggaatttacctttacctggactagagaagttctccttcgttgaatccttgtttctggtttgagttacttataaatgtatgtatctttcatagttgaaaatgaaagtacatctaccattgtgccatttcagtaaatgtacgttaattacct

SEQ ID NO: 5483 - DNA, 201 bp, Bos taurus
accaaatcatatcttccctctgtctcaaccctgctcttcctgttagattttaaaaggccaaggctttagtttatgaggctctttctagtcttcaggtctattcccctgccaccacattttacctcattctttctgtcccctctttctgtgactcctttcatttcctctaaacctgtatacccacaactctagactttgcca

SEQ ID NO: 5484 - DNA, 201 bp, Bos taurus
atggagttatttcatatgttcatttatcccctgcatttcatgtaaactacgcttggaactggaggctttatcagttcaggttcaaattggaggcttattttgaaggtggtccacagattgcttattgctctattttagaagatatgtagtgtcagtttgtctgtctttttgttaagattgctcatcaggtttttgattatc

SEQ ID NO: 5485 - DNA, 201 bp, Bos taurus
aagtcttgcctgtacattgaggatgttgcagttctccccttttctctctgttcattttctataagggtgtggttattgcttttggagctcttttagaaggctcagaagcttgtttcccagaagcaccaagcaaaactcaccagctgtctcactggcctgaatggtgtcacatgcccatctctgcgccagtagtggtggcca

SEQ ID NO: 5486 - DNA, 201 bp, Bos taurus
tttcatcatcacgctccagggtcaccctggccagctcttgtgctgggacaggagattacaccgtctctgttcaaagagggggaaatgtgcctgtgccttatgtcaatgcactcagcaaggagaagcacatcctgtttatcttgttgttacctgtagtttattttgggtgattggagggaaagggtaaaataatgaccggta

SEQ ID NO: 5487 - DNA, 201 bp, Bos taurus
tgaataggtaggcctggtgtgctgcagtccatggggttgcaaagagtcggacacgactgagcggctgaactgaacctggaaggaaccaactcagctgggaactggtagatgtggcctcttgctccccagccagcatggcctgagaattaaggtatgtgagtaggaagatcaacagagatgcagtgaggagaggggatggga

SEQ ID NO: 5488 - DNA, 201 bp, Bos taurus
atgcaccttggatgaggaacctaggcaacttccaaactcactgtcagctgaaggctttctgcgggccgcacccccaccaggtggggccatgggtccttcactgaaggaatgcccacctcatgtggatatttcaaatggaaaaccatctttcaaaacataccctccagtctcattttatagattctgtggccaatatagaaa

SEQ ID NO: 5489 - DNA, 201 bp, Bos taurus
acaccatgttgtctaccagaggtccgtcactggggatcttggaagccttcaggcactctccacaggatgaaggagtttctgctgatttaaagaagcaaggagcccagtgtatttttgaaatccaagattaacatgcatagctcaggcacaaagtgaaaagttgaaacgtctagttgtgacattaagcctgcctcacccacg

SEQ ID NO: 5490 - DNA, 201 bp, Bos taurus
tggggtaaactccagacatattgtgaagtaactttggtctccaaggcttccatttctctaatctgaggtcttcttcccctttcaatgcctttctttcctccctcaggagtcttggatttgactgctgtaggtccaccagaccaatgctcacacactgcagcacacatagaaaatgacaagcgagaatgtcattggcaggtc

SEQ ID NO: 5491 - DNA, 201 bp, Bos taurus
tgcagaagacagtatttggaacaacagcgtatattatggggcctaagatagactcagtacaaaaactttaggattaaattagaatgtgctgctgttggaagtgggagctttctggccttgagtattctagcagaggctgtgtgaccatctatagaggagacttctgctttgaatgggtcagactacatgacttcttcagtc

SEQ ID NO: 5492 - DNA, 201 bp, Bos taurus
actgcttaaagagaaaacctcactggcctaaactctctcataaataaccagccaaagaaaatctcagtatttatgaatgaaggcaaaaaataggagggagcgcaattaccatgagctacaacgtgccaggattcaccctctctggaccacacaggagtctatgaaataaatttgcctttgtcagctctcttacttgaaata

SEQ ID NO: 5493 - DNA, 201 bp, Bos taurus
gaacagtgtaagaacatttgaggccacaggagaaagaagaggatatagagggaagacagacagcgcttacaaaacaacaaatataagcgttaacaactatcggggcacagacaacaaaacctatgctaacagccgacagagtccatggcccaagtgctccatcaacgtgcactcccaggctggccaccattgctcttgcct

SEQ ID NO: 5494 - DNA, 201 bp, Bos taurus
ttttattacatattttatgttcaagatggaaatgaagatataatagtgagataattttatacagaggtaccatgaattttctgtgactaggggcaaatcagttttgtgttttgtgctttagttttctaaactatcattactaattatattaatagcaaatttttattgggtaatgactacagtacaaggggctgtatcaaa

SEQ ID NO: 5495 - DNA, 201 bp, Bos taurus
attctaaacattaagaagaatcagcttcattgtgtgaattaaaggcataccttgtagatactgtgcattcagttccagactatcacaataaagtggatactacaacaaagtgaatcacatgaattttggggtttcttggtgcatataaaagttatgttacactacactgtagcctcagagtgcaatagccttatgtctaaa

SEQ ID NO: 5496 - DNA, 201 bp, Bos taurus
attccaggtagaggaaccagtgaatgcaaaggacctgagtcaggtgtgagcacaacatgttcagggaacagaaactacactagtatggctggtggaataaagggaagagtggaatgagaaaaggctgggaaggcaggcaggagcctgttcaaatacaaacttgtaggctgtggaatggagtgaattttattttaagtgcag

SEQ ID NO: 5497 - DNA, 201 bp, Bos taurus
ggtgtgtgtgtgtagctgcagtgccatcacagatggccctcgtaagatctgtaatgcaggcgatgcctttacctgagtgtgtgtggctcataaaaataacggatggctgtcaggccacactgggaaattgctttctcccacatctgcaggatgtttccgcagtcactgtgctccctaaccatgtctgctaataataatact

SEQ ID NO: 5498 - DNA, 201 bp, Bos taurus
gcccatctccactgtctgaaccagctactcaggcctgagattgatcgccctgcgtgaaaatagtggatacaattagcactgacctcacaatgggatgagatgaaatacagaagagcttggccagactgggcattatttttaatatctgtgggccaccttatgtgtactgaaccttcttaaaccaacagctcctttaagagt

SEQ ID NO: 5499 - DNA, 201 bp, Bos taurus
acgttcaggccgagtggtggtaccaggtttgctacaagtggaaagaagggaacctgattgattactgcccagataaggggcgggtgaaatctggcagtcaatggagagtgtcggagatgggccagatggcagatggtcctgtctggggtgtgcagaagctgcttgaggctctgagagtccagcctgactgagcagcagcag

SEQ ID NO: 5500 - DNA, 201 bp, Bos taurus
tctctttaaaagttccaagtttccaaaagtgtcaaattgacattgtatcatacttaaaggttaagttggatgcatacaatatgaaaccaacttacaaatactgggagaaacttgcctctaaaaggccatcagatttttcactaagaataaaaaaatctaaaaatggaaaataagagatcaaatcttagggacagatggacc

SEQ ID NO: 5501 - DNA, 201 bp, Bos taurus
aggtccccagcctctgaactctctgagccatatccctgggggcttatggcagtagagtctagggtcctttgcccctcttctaagtgagcccaggagatgactcagtggccctatcctcaggctggatggagtgtggaggaggaggcaccagcctggtctcgcccctccacctgcggcccaccagctgttcctttccatctg

SEQ ID NO: 5502 - DNA, 201 bp, Bos taurus
gcagcagcagcagcagcctttgttgctttcaaacttttcagagttgtgcctttcccacagctaccaggacccaaagaatcaccctgaaatggaagggccaacgattactgaggaatctgattctccagctccctctgctccccacacaggggaagcttcctggggactcactgcactgcaggccagagcagggcagagctg

SEQ ID NO: 5503 - DNA, 201 bp, Bos taurus
tacagccttgaagtactcctttcccaaattaagcaactttaacaattaaatgagataatgtgcaccaaacattcaacaatatctggcatgtggcacctgagaaatgcctactcccttaatttagagggcagtgggagccttgaaaaattacacagaaactagcaattgccggaaggagcattccaacaacaatcttcacca

SEQ ID NO: 5504 - DNA, 201 bp, Bos taurus
agcaagactgtcttcccaaggtcacacagtgagagaggggcagcactgggatgagagctcagaacttgcccaggcttaagttccttcttcttggccatgtttagctggacagagggcttcaacaagcatagttttcatgggaagaaaaagaagaaccagagaattctaaggggcttttctggtctgaggtttcaggaaagt

SEQ ID NO: 5505 - DNA, 201 bp, Bos taurus
cttaacgagattgcctatcacaatcactgggagcacttctgaaagaaaacttttccctgtaccacctcagaactaatacatcatcattctccagaagtaggacaagagaagcgaaaatacagttgtccaggtgattctgatacacatccaagtacacagacagatttagaggaatgaacacatccccaggccagttcctag

SEQ ID NO: 5506 - DNA, 201 bp, Bos taurus
ttgatttgttcttgaggatttatacctttctactctcttaactcatattctagtgggaatttaggagaaagtggagataaatatgtatatcaatccatctaatttaattggaggttgagctgatattctctttttatgtttcaaaagttaaacaactgtctgttgtcattggttatgtgggtctttcaggctttcattaac

SEQ ID NO: 5507 - DNA, 201 bp, Bos taurus
gtactcaacctggggccctgtgagtatgcagaagggaccttacagacaggattgagtgaagaaccctgagatggtgaagaggagcctgggttatccgggtgggcctgatgatggtgttacaagtgtccttataacaaggaggcacagggggatatgcccacagacaaggagaaggagatgtaaagtaaggcgctttgaaaa

SEQ ID NO: 5508 - DNA, 201 bp, Bos taurus
agagggggacgcctttgtctggtttctcgccttttccctgctgagctcatgggagtgaaatctgtctctttccagttccacaattctgcatccttcaccccactccagaaaaggaaaggaggggaaacaagtagggctcaacattttaaagtgtgctctgtgcttgcttaggtggaaggaactagtttcagctgatgtcac

SEQ ID NO: 5509 - DNA, 201 bp, Bos taurus
ttaaatagggaggggagcaccgtggggcaggctgggacccagcagccacagtgcttcccagcaagtccctgcgatactgaatgactgggcgcagtttccatgtgtaggcagcggaggctcacccttcaggaacaccgagagaagagaggccaggcatccccttctgcttactctctctttgcacactcgaggttctaataa

SEQ ID NO: 5510 - DNA, 201 bp, Bos taurus
cagaccagccccttggttacttaagtttagttgcaaaggggctttgaggaggagaaataagcaaagacttacataggagaaccatttgtgtctaggcctacgattcattaggtaggacaaggtgaaggggttggggaagagtcaggatgcccctgcctcgttcaacccttagggtatgaagaccaacaatggtctggtgtc

SEQ ID NO: 5511 - DNA, 201 bp, Bos taurus
aatcatctccccatctatctgtttcttctctatggatcttgaaataaacctcttgtctattttcagctgaatgatgccatggagatgggcctggtgtccaggaagtacagatcccagcggtctgtcctggagtgccttatgactctggagccagggcaagcacagagctcccactcctgtgggggcccagcctgggtgtgg

SEQ ID NO: 5512 - DNA, 201 bp, Bos taurus
gtttatctatctaataatcatctatgttattgattaatttgactatatatagagaaaaccaacctttaatagttaacatgaacattaacatactgtaaacgttcctcttcactttgcttttcttatttatgatgaaggtatatatcaatacattaaaatttttcagttcttttaacctattgccttgttttatgttgtatt

SEQ ID NO: 5513 - DNA, 201 bp, Bos taurus
ttcaagatgacttccagatagggttcaatagtgactgcctcttcagatagagcttgttcctcaccagttacccatggtccccactgctctctgtggtattacaccaggcctatattatttgcctacaattccattaaggcttgtgtacacatttgagtttccaagacataagatatactgtaagatatgatacaccataag

SEQ ID NO: 5514 - DNA, 201 bp, Bos taurus
ccatgtaaggcactgaagatacactggtaaacaaaactgatataagttctgttctcatggaaattacaaatgctaaattcttcttgttgctagatctttatacataaccatgatgatttcttttggatatattttagacatacatctgctggttgaaaaggtgtgatatatgctaacattttaataactgccaattttttt

SEQ ID NO: 5515 - DNA, 201 bp, Bos taurus
attcacctgacaccgataggttcaggccaccacaaatttacttgtagaaatatcatccagctcgtgttttgcttctaaagtttcaaaaaggatgcattgttgttataagacatttgcattacaagaacagcacagtgaactctttgccattttcccaaattacctaggagtatacaatagatgtatttttccgtcaaagtt

SEQ ID NO: 5516 - DNA, 201 bp, Bos taurus
atgctgattctggttcctctaaaagtgaagcatgtgagtgaataatttgtattattatctattactgttatttgttgaaactgaatccactatttagaaactgaaaaaaaaatccctggaaaatgacaagatggggctcttttgacattataaaactgtttgtttgtttttgcatatgcctttagctttctagaaggaact

SEQ ID NO: 5517 - DNA, 201 bp, Bos taurus
acacgtaagctttggcctacaaaaatatgatagaatgtcttaactgaaaataaatacacagctattaacaacatagacttgttttctaaaaaaaaaaaaaaggataaatataaggagggccaaaattcctcacagtgcagtaaggaataagcaaattgcaaaggaagacactttcatttttttctgtctctaatttaatca

SEQ ID NO: 5518 - DNA, 201 bp, Bos taurus
atggaaaatggattttaaataaacagagttgtgaagcacaatatatggacatctgtgcatctagttcactcatattttcttctttctttcctttcagcttatatataggcagctagaagctttgttgcaagtttcctgcacattactcattagcagtcttgcataaccaattaacactttttctttcatcctctttgatga

SEQ ID NO: 5519 - DNA, 201 bp, Bos taurus
gttccatttatgtcctaaaatttaactctgtaagtcctaattcaaaaaaggattgtttttcaataagtacatataaaaatttccattggcctgaactctaccttttggctctataaaaatgatactgtctttgaaatgctttagattaaaacacccatcccttccttccagggttatccaggggccttttggctctatcat

SEQ ID NO: 5520 - DNA, 201 bp, Bos taurus
ataagccttatctaattcttcgagcctgtaccagaatcactgtgctgaaatcccattcctggaatgatcaatagttttctggccaattccaatcagttgtcaggctgtttgggagaatttggaggattcgttaaggctcagctggaaagagaaacttgatgctgagcattgtgtgctgcaggctctgactggagaatggct

SEQ ID NO: 5521 - DNA, 201 bp, Bos taurus
tttcaggcccccagagcctgcttagttctgaaagaactagcctctgtctctctcctttgcagaaggaaggaaggggacctgcaatcacagcaatatttagctatggtcccacctgggcctctccagatagcctaggtgggagtccgcctgcaatggaggcgacctgggttcaatccctgggtcaggaagatctcctggaga

SEQ ID NO: 5522 - DNA, 201 bp, Bos taurus
taatctctactgcagggaattcattttcaaacacaaagctttcttgtttgattttcatattgaatctgcgggttcagagagatagaactacataagtatgacagtctattgcctttttccatccaataacacacccacagggctttgtgtctccctcagttaactggtttcccacttgtatccaaagcataaaagtaaata

SEQ ID NO: 5523 - DNA, 201 bp, Bos taurus
ggggcctgtgacgagccttgatcacttggagcttttgtgtaataaagttttattaaagtataaaagaaatagagaaagattctgacatagacatcagaagcggccagaaagaataacccccttgctagtctttagccggatgttatatagcagactagcagcctgctaattaaagaaaggaaatgtctcaaaactcaagcg

SEQ ID NO: 5524 - DNA, 201 bp, Bos taurus
catttggactaaaatgtgagtaaaccaatcccagataaatgacacaatatatctatctttcttatttaaaatagtcattgctgggtttctgggtcctgcagtgaaaagaattctgatgtgtaaagtgcaggaattatccatttatatgtcggggttttttttaatcctattttaaaactttcccaatcacctacaataaat

SEQ ID NO: 5525 - DNA, 201 bp, Bos taurus
atgaattctttagaacatagtcaactctttctaattttcatcaatcttcaaaaaatcctgtgttcctttaataaatatctgatctttttctattttctgctctgcattgaggcacttgcaaaagcaccaagaacacatgttatgtctctacaaagggtgcttcactacatttcatttaacctgtgtaataatacagtaaag

SEQ ID NO: 5526 - DNA, 201 bp, Bos taurus
aattgtatcacaaaagttgtgtgtgtgtgttccacatttcactctgcacgctaagataattacatattcctaaaactagcatattttatgattcccaatatagctgctaatacatatccatcactttcttatccatatgtagcaggaaaagagaatattactcctgaattctcagcaaaaccctgaatttcactcctatta

SEQ ID NO: 5527 - DNA, 201 bp, Bos taurus
gtcaattaaaatgtatgttatatctaaatgtgaaacatatcagctaggtttaaactgtgcttcgtttaacattcaataaattgaaattaggctatgaacagatatcttagtaacttcatgcattaaagcagtctcttaattttggacatccattcattctaaaatatatacaaaagtatacaatgaagtattcatacttta

SEQ ID NO: 5528 - DNA, 201 bp, Bos taurus
gtcattgcaatttcacactacatctcaaataacaccacatttttttcatagaatgttcacatctctaatttcctaaaagcctcacaaccactgtgagtatggtaggtggggtggctaatattaaccacagtttagaagagatgaaatggaagcttaaagaaattagagtgtgaaaattctcaaaaactctgtcatgagtcc

SEQ ID NO: 5529 - DNA, 201 bp, Bos taurus
ggcagcgtgaggcctgtcctgttcactgaggatgtttttcattatttattgccttcatccatcagttgcccatagcacagccctaatgacaaccaactgcgtctccagatatggccacatgtccactagggagtaaaatcacacctaactggaaaccattgacctgtgtcatcaacacttaatatgtcatttaatccccca

SEQ ID NO: 5530 - DNA, 201 bp, Bos taurus
taatggcctcctcacttaattacttcagcaaaaccaagcctgcgctctgaagcatcactggaaatgaagctagtgagtcccagaaatatcaggtttacccttcatgcactgaggtccactgggccactgttctgggaccagcttcaaagtagaagagagaggacgcatgactatgcatcccactcccctacatgtcactgt

SEQ ID NO: 5531 - DNA, 201 bp, Bos taurus
agtttttaaaagtactgatatgttatagcaactttaaataattacataaacaacaatgaaaattttgttttatgcctgggaatttttatcttttatgatatttgttatctgtttatttgactatattgcttatcttggttgaaatatatacatttgacctcctcattgggtagccatttaaaattggtagatacatagagc

SEQ ID NO: 5532 - DNA, 201 bp, Bos taurus
aaataaaaatttcttaggtgtggagatggaggtgggcattggcagtactaggattctccaaacgattttttcaacagctttggacgttttaagtaggcaaatgcaacacacaaattatcaggtggtttcttccatttattggtccctcttaaactcagttcttcatcatcctgtgaaattgtaaaattaaaagcaaatgaa

SEQ ID NO: 5533 - DNA, 201 bp, Bos taurus
aggtttcttataaagtagagttaaggaaatttttgtagctgaaatgagggggaatgtaacagaaataaagaaagacgatggtgaagtgcagctctttgacgtgatttgaggctgtgcatgtcactgaatattttggccaagtaatctatgtttttgaaagttaactctgtactggtggatctccaacttcaacatgcacca

SEQ ID NO: 5534 - DNA, 201 bp, Bos taurus
aataggacttttgctcctgctgttctttacattctgtttttattgaggccagtctctttaagagtcagcaacttgtgaacactatcctagctgtagctggtcactgaagattctcagcctcacttttctctgtttagccaggttttgctcatactttaacatttactttacatcccaccttctccctgacaaccccagact

SEQ ID NO: 5535 - DNA, 201 bp, Bos taurus
aaagcccaactcagtgaaagctcccgcagtggaagctgaaggcaaagaaaatccaactaagtggaagtgacaagaagcccagcatactggaaactgggacagcaaaaacaaactcggccaaaagcccatgcgactcaatctcagattccagaagacctctggttggggtaagaagtcctcatccctacggctggaaggaca

SEQ ID NO: 5536 - DNA, 201 bp, Bos taurus
tgtgtaggcttctgcttcattgttaactatagaaagcattgtcaaattggtgtggcttagaacatagcagagggagtgtccttggaaatatcaaaggacacttccttttccttcaggaacctctcattttaccatatctctgatttacttgcaatttcaattcttaagtgtgattgtgtgatgaatcagagtaatagtctc

SEQ ID NO: 5537 - DNA, 201 bp, Bos taurus
taagagctgttttgatatctcatggacttttcatttacatgattagaaatagagactcactacatatgccaacagttaaccactgtgacttttaaaatagccatatttagtgacaggaagcatgagatgaatttttgtcagattttttagaaaaagatctactctacagcatgtttttagtttacatttttgggggtaaca

SEQ ID NO: 5538 - DNA, 201 bp, Bos taurus
tatcaagaggagatagggtgagtccccagcaccatgaatactttatggtacttagtaggtaaatatgaactgaatgattgaatgaaattggggaatgattctcctaaatttattattgtttcaatctgctttaaaaatgctgtgatcaaaatctgcataatgaacaagataattctccttttaaattctaagatgtatgca

SEQ ID NO: 5539 - DNA, 201 bp, Bos taurus
tgttaggtatatagtatatatatatgctatttccttacaaccaaatgatgttacactgagacaagttaaaggaataatttgtattgtgattgagagagacctatattgtatccttaccttgatatagctagagcacagctaagcacattttattccaaaagaacctccgttaacaatgactgagacccctgtcctgtctga

SEQ ID NO: 5540 - DNA, 201 bp, Bos taurus
catattcctccctgaagctgcaatgaagcagagatctcagccacaggctctgcccatctgtagaactgagtccatagctgcatctggctaaggagttcagctgatacaagctttgttggccatgaaacctgttctatgaccccaacgttggcagaggaaaaaaataaataaattgatgtcccacccaactgtttttttttt

SEQ ID NO: 5541 - DNA, 201 bp, Bos taurus
atctgtgaatacagatccattaacctcaataaaaacaaatggaacctcttgtgaactaaaatcagttcagatcatggatttgctttctctaatactcacaacatttagatggtcctgataaaaatgtcaggtcataaagaggtctactaatgtagtaatattcaaggtgattttcagtctttttccattgttattgtccta

SEQ ID NO: 5542 - DNA, 201 bp, Bos taurus
cagcaaaccacatttggttcagcttcttcctctgctctatcctgcttcccttgtatccttatagatttctcctgaaaatgtttctcaatgaatcacccacgtatgaatcctcatcttataaccaatggaaatgtactgtatgactcaggaaactcaaaccagggctttgtaacaacctgtgctgtgcttagtcactcagtc

SEQ ID NO: 5543 - DNA, 201 bp, Bos taurus
actccaaaatcatgagaaaatatttttcagctgtttaagtcacccagtctgttacactattgaagaatccatggcaaattaatacagtgaccttccaagatagatgtctaaagaaaggggacaatttataaggattctaaatagaaatatttctccagattaatttaagtattaggggaatttatatggcttatcaaagtt

SEQ ID NO: 5544 - DNA, 201 bp, Bos taurus
attttaatcttacaggcattgctattgtgatttcacactcaaagataccacgtttctttaatttggatgctccactaatttctatatgtaacaacaaccatatttagcaaaacatattttcctaaatccttgcttactacactgttgcaatcgttagtttatctattctgatagttacaaaccccttaggttcacacactt

SEQ ID NO: 5545 - DNA, 201 bp, Bos taurus
aatgtgagcaagtacagaaaactccgcatcctaacatcctgctcatattgtttgaaattgagcctatctcatgagatgataaggaatggagaaacttgtgtcattggacacaggtcgacttgctctcttgtgtctcggtttctctacagtcctacccattttctaccttctcgataaagttaaatgagttcatatacatgt

SEQ ID NO: 5546 - DNA, 201 bp, Bos taurus
ttgctgcaaaatttttgtatttatacacttaaatcaaaataattcatgaaaaaaatgaatcattttgaaaattgaggggttaagtttgtcaaaagaaagaccgtgagtaacctgtattatacaagtatctgttgtgacacactttgcaggtgactcttcagtgagtggttatgaagtcctcacattttagaaaccattaac

SEQ ID NO: 5547 - DNA, 201 bp, Bos taurus
agtatatttacttctaaacataaaagatcaattctagtgcaatggtaattatttcttacataaagcacattttatgtaacaaaggttaaatatcaacatacggaaattaaaggtggtgcaactagttttagttcagtttgcctgaaataaccattgtttgttcttattatatatgtacaaaaatgtttaaaaaaagagtaa

SEQ ID NO: 5548 - DNA, 201 bp, Bos taurus
tattgggcctgcgtttaggcatagaaagcaaatgatgttggtccaggatttgttattattattgctattattttctctctggtatgaagtcaaccagcgtggtggcctgggaactctttcagcattctctctgcaaaatcagagtgtgacaaggtgtcagaattgacagatcggtggtggagactgagcagacctgaatta

SEQ ID NO: 5549 - DNA, 201 bp, Bos taurus
tggccaacttttcaaagatactttagataaccagaaagaaaacttattttacaaatttgtggggaagttccctaaatttgttgaataattttccatctgcgaaggccaaacaccattttgatgttggcataaccatgtcatattttattacttcttttctttttactgtaaagatggacttttgttgtcactgttatcatt

SEQ ID NO: 5550 - DNA, 201 bp, Bos taurus
catctttatttgaatgagtttcctgccctgtattttcagctgaattagagaaaaattatttgttcatgacaagcaatgacttttgagcaggtgtattaagcattagatttcaccaaagccagattttaacataatttttgcaaagcgttaagcaaaagcttttagaaaaactagctaagaatactcaaattagtattttat

SEQ ID NO: 5551 - DNA, 201 bp, Bos taurus
cctttcttctcaaagaagctaagtgatggaaggagagggagcagtggttctcttcctggaactgctgtgcaaaccctctgatttctttataagaaacattatttatggtgatgaaatcagaacctgtaaaatttctatagggccttctgaaaattgtcagtatgattttattttaaatcatatttagtaaaattctgtctt

SEQ ID NO: 5552 - DNA, 201 bp, Bos taurus
tgaactgaactgaacaactatttggttatcccttatttgattttatgggagaaataataatgacatacagtgttatttcgaggggaacttcccaaatgtttattgacaagtccttctctctggctgactacttacctatatacattccacagtaattatcatatggatagccattgttattcctaaagaagtacaaaagtc

SEQ ID NO: 5553 - DNA, 201 bp, Bos taurus
ctgatgtcaactaacagtttatttctgagatcaaagatgttgagccaatttcatattttcatagtaaacagttaaatggccctctgcaatttgtctcacatagttttcagagtctagaaactgtattgtggggtctaaaattatactgaatgctttgaaatccaagtactggtggccaatggctatgtaaatatggcgagt

SEQ ID NO: 5554 - DNA, 201 bp, Bos taurus
tctatgatatcagaggctatgtagtgcaatggtaaaggctgctgctctctatagttaaattgctgggttcataatccagccagattgcttcttagcacatcttgggccaatgacttcgcctctctgaaccctgtcttctcatctgtgaaatgaggataataacagaattaacctcataggatggctgtaaggatcaaatga

SEQ ID NO: 5555 - DNA, 201 bp, Bos taurus
gaggggtggttaaattatttctacttttaatgtgagagttccaaataattggtccggttgacttatttttcatagtttgaaggtgctccgtgctattccagcctttgaaagaagcaaatttcaaaagtaactcagacaacataaaggagggcctatcttgcccattttctgctttcttctcaatctaaaatggaatctaat

SEQ ID NO: 5556 - DNA, 201 bp, Bos taurus
ttaaatttctctagatctctttccctgggaagatagattccttctttcttattcctattcatctgctaattggttggtctctgccctttaccttggataacgccttctctagtagcatacatttggagggtttgatttctagaaaaaaatctcagtgtctctggaaatctgctcctgaaatgttcacagtctgtcaagtag

SEQ ID NO: 5557 - DNA, 201 bp, Bos taurus
gccccatttctcagtccttacattaaagctgacttacccagaaatgtgcctacatttactagttttttttgtttttttttttttggtagctggttaaatacgtccccaagtggaggcaagatgtttggagagattttgaaaataagtgaaatataagtgattctgactcaagtcactgaaatgcaatcattgtatttagtt

SEQ ID NO: 5558 - DNA, 201 bp, Bos taurus
actttctttaccagtggtagtgttagcctcttctactcaacccttcctgtacatgaaatatattgagatatccaatcatagggttatccccactatctgatagcaccaaatgcagggagcctgtttctttgacccctccctaaaattattcaacatagccctttctaatacccttctactgaagcaccccatggcaccttc

SEQ ID NO: 5559 - DNA, 201 bp, Bos taurus
gggaaccatcaagctttttgtaaccactccaatattattcttgtaactactttgattaacattattatttcctacagagggcaacaataacaacagctaccgtttactaatacctgacatttagtatagcacttagcacaaagttagcattcagtgaaggttaaataatagtgaaacaatacatagcctgcctttcaaaat

SEQ ID NO: 5560 - DNA, 201 bp, Bos taurus
ttgctgctttacaggagggccgggtgagtggagagttgagtatttgtttatcttctcctgttcgtccttctccatccctcaactcccccacccgccccccacgatgatgccctaggccttctcttaaggagaaatggagaatttgacctgtctggaaaactggaaaactcaccctccatcttttggaaacaaaccactcaa

SEQ ID NO: 5561 - DNA, 201 bp, Bos taurus
aatgcagagggtgaatgagggtagtgagcagcttggccagtgaatggaaggatgtgatggaagagccgtggaaaatagtaggagaggtgcagcaggaacaattgatggatggcctagaaatctggcaggaggtttaatttgattaatttggcaacagggaggtgctttaagttcataagctggagtataatacaataaaat

SEQ ID NO: 5562 - DNA, 201 bp, Bos taurus
caggtcatatcacagctcttctcagactttcccagggcatctcctctcccatagaatggtgtccaggtgcaacattggccattcatttgcaaaagcaaatccctgcttccatctgatctcctttcttccttaccctctccttccactggcccagtgtccaccttcttgttctccccatagctcacaaaatacaccccatcc

SEQ ID NO: 5563 - DNA, 201 bp, Bos taurus
gggagcacaagcttggctcccaggtcagctgtgagtacctcccaccaccagtacccccaccaacatgacctcaaggaagaggaaatggccacactgactcctgcatgtattgcctctcgatgcttctcagatctacctgtgttctttcctctccactccttgcgcaaaccaccacccttttcctgctcctgcttgtgcttt

SEQ ID NO: 5564 - DNA, 201 bp, Bos taurus
gatccaagatgagtggaggccaggatctggcttcccactctggaacctgaagcgaagcaggtgatccctctttggaccccttagacctgtgtgtggacatctggccaaggctcagccaatcagaggctctttggtgagactttgggtcttcagggagtgatgataaggctagagacagccataggtcattcatagtggctg

SEQ ID NO: 5565 - DNA, 201 bp, Bos taurus
ttctttctcttcagtgccactaaatgctatcaacatttcatatctttctgctatcactgtcccatcctaataaatcttctcaggtctctgaataatcatttgcttcatactgtaccaggaagtgttttctcattatgtagttttgaaagcaacagagtaagtcattgtagattttagagcagaacaaaccactcagatttt

SEQ ID NO: 5566 - DNA, 201 bp, Bos taurus
actaatgtatgatggggtggtgctagccatctttgcaccgagagttactcctcctttcaaggccccttgttggtgtatcttgcccacaggtatagggctgatgaagggggcctgatcactttcatgatttcatgattcatgactcgacagactgccaaaacaccccaagaaatatgtaactcgtctattctaagtcctgcc

SEQ ID NO: 5567 - DNA, 201 bp, Bos taurus
tttagacttttacttgcacatgaattgttctacagtggtcaccaagttccctagttctggtcttccaggcccaagcccagagtgcatgtgatggtcccatgccgcatcataacatctgtttggcctactgtctcatgtagaggtgtaatcactggcaggaatcagtggcttttccccaagagtaatgaggtggaaaaagtt

SEQ ID NO: 5568 - DNA, 201 bp, Bos taurus
atgaaagcctcatatctgcccctagaattactgcagtggatccatggaataatatatatgaaaatacttcacttttgtccagtagatgaagttgtcctaatgtttagagctcaaggaaacatgacgctgctgttgagtccaagagaaaactgagaaaagggagaatgtgggtcccttctgtctcgttggcttccttttcca

SEQ ID NO: 5569 - DNA, 201 bp, Bos taurus
ccccaccgtgacagccacagaatctgcggcgacgagtgtgcgcgcgtggtgtaaagtggcgtgcagagtcccacgcctgtttattggctcctccccaccgtttgtgttgaaaggatgttgtggccaaagctgaggttttaacactggttagtgcaggggatgctgccctagaagggagcgtgctaatagtcggaaacgatg

SEQ ID NO: 5570 - DNA, 201 bp, Bos taurus
tttgggtttgtcattattcaccacaggacaagtgatataatatatctgatcatcttcacttacgcggtctatgacttcacaggacctaggtaaacagaaccgtgacagaaagtctacacttttctacctggtagaataaggcatgcctttcttttgtttgtttgggtaacttcattattggtgtctgtattcacccttctg

SEQ ID NO: 5571 - DNA, 201 bp, Bos taurus
tacatgtcatattgaaaaaacttactatgaggatgaatcaaaagatgaagtgacaaatggttgtccactgctctgctagcttagggaagacaagatggaaaagcagggtaataagttagagatcttagcatcacattttgcaaagctaggacaaaagatgtcgcagatttaagatccaggtgatgacaaagcctgattaag

SEQ ID NO: 5572 - DNA, 201 bp, Bos taurus
tggtatctatgcaaataatttctctctattttttcttcttgtattattgcagcctctgcatgttttccctagtccttaggcttttgctctttaaatcacttacctcccttccttccatcatcagtccagctaaaagctgtattctcctgtaaccttgtaaattggaaggccaatgcctaccaccatactttacatctaagg

SEQ ID NO: 5573 - DNA, 201 bp, Bos taurus
gcccaaaaatagagtaggaacccattttattagaagtaaagcagaagggttcagccacccaaaggtcacacaccagtgatttaattggaaagatttttccttataaaaaagattagttccaattaatggaaaattcaaattatgtttatcaatataaacactaacaaaatgctatcattccatagcatattacttgcacag

SEQ ID NO: 5574 - DNA, 201 bp, Bos taurus
ggtatcttaactccatccaagcttgttcatcttaacttctcagggctgtgtgagctagatgctggaggaggtgcttgtctgttcctctaggccttcatcccctgactcctccacatttctgcacaccccgctggagtacagcttcctgctggcagagccacgccctcttacatattcctaggactgagtcctggggtgaaa

SEQ ID NO: 5575 - DNA, 201 bp, Bos taurus
ggatatttcaacttgcattctatcaattcagcaacagagaagtcattgcaaaggtaaaactaacatgacagacgatatttgtatactctcagtttttcactgaacttgactactccacagacatttgattgaaagcctgctcatgctggtggttgaaatccaatttgcagtaagtcacttgttcactgtcaaggttaacag

SEQ ID NO: 5576 - DNA, 201 bp, Bos taurus
tggaaacagattccaagtaattctaacagtctgcagtcatgtgaaacttcaagagtttaaagcaacaggagaaatgagactgctatttgttaggcctgcttgaccacatggcttcatttacatcattccattgggctatgatgttgggctggggttaaaagtttagtcttcagacaaaacaggtgattcagttggtgtcac

SEQ ID NO: 5577 - DNA, 201 bp, Bos taurus
tgcttgatgaagcatttcatcaagtaggccacagagctatttgccttctgcgtatgcatgggaggcaggcagtgaatctggttgagaggaagccacgtagcccagggcctgattttctctacaggccaagtctcaaagtccatcttcaggctcctgagggggtgtttccaagctcgagatgtcagctctgctttctcagga

SEQ ID NO: 5578 - DNA, 201 bp, Bos taurus
cacctttgggaagatgtgcaattgggttatgtactgaccttgaaacaacttacctttgtgttattcctgtatgtactatgtgggggaagaaaggactgaacattaaagagtgtgtgagtcactgataacagtagagactagccaagtcagtgttcatgggttggtgaaaatgctacttatttcgcaatatgaacctttctg

SEQ ID NO: 5579 - DNA, 201 bp, Bos taurus
ttttgtaggatcattttggtgtgattatgcaaaaaatatctcagattagagatctacacaaaaaccacagttttcattgctatagctttataagacaattcaatatgtgccaggtcaaaggcccactgattattcttttttcctccctccaaattttattgatgactctttgttgtttattgttcatttggtcaagaactg

SEQ ID NO: 5580 - DNA, 201 bp, Bos taurus
taatataaaaatatcctgtattacaaactataatgaatagggtttgctttttagtgtacacatatcgagacacagctaaactttttaaacatgtcaataaattaaaagcacatactgaaaaacaggaattccatttgtttgcctaggaatcatctcaagatatctttattcctccttttcctttaggtttacatcttggtt

SEQ ID NO: 5581 - DNA, 201 bp, Bos taurus
agagtcaagctaaatttatgaataactggccattacaattgcacccaaatgctatttaaaacaaatcagattctttcttgcatgttgggacttggcatgagtatgtcttgggagttttatggccacatgatgtatacaaaatgaggtgttgagtttctatcattttgcatgaaatgtctttccagattcacgtttcccaca

SEQ ID NO: 5582 - DNA, 201 bp, Bos taurus
gctcggtggccgcgtaaacacgctgtaaccaagttctgggctaatttttacagagtttcgtttgctccccagaagaaccgacggtactcaatggtctcctacgggcctgcccccacaagagcctgggggctcctttcccctaagccagcactggcagcgcggggggcggggaagagggggtggggaagggtgggagggcag

SEQ ID NO: 5583 - DNA, 201 bp, Bos taurus
taacaactccaattggaaaatttgagcagcatacatcttttccacctggtgctgtcaccaaagcaaaaacagatgaagtggtaacgctaacaccaaccacagggtcaaaggtaactttcagtccatggcctaaacaaaaatatgaaacagaaggtaccagtccaaggggatttgtatctccttttagcattggtgttaccc

SEQ ID NO: 5584 - DNA, 201 bp, Bos taurus
acactgcggccacattctacttctgcttctgtgattcacggggtcgaggcaggtgtggtgcctcagcccagcccacagacttctgagcggcccaccatcctttctcctctggaaataagccctgaaacacaggcagctttgatcagaggggaggattccacagtagcggcccccaaacagcaagtaccgacgaggatgctt

SEQ ID NO: 5585 - DNA, 201 bp, Bos taurus
tcccttggcaaccatgtagcttgaccctgcacaaagcagttctcactgtaatgttagcatttcaaaactgaatcccttgtcaatataattgtgtgttgtcaggaatctagattgtccttacagcagccttcaggagacaatatgtctatttgtcgtctaatacttttgtgaccctgatggtaaaaggaacaggccagcaag

SEQ ID NO: 5586 - DNA, 201 bp, Bos taurus
tcacaggtgtgttatggagattgatattatgttgtgctaacaactgcttagtcattgctaaggaaatgatacattggagagattgttttaatttgggatcagaagaatttgactttattctctccgtcaaagatttcatttttaaagtctcattctgctcctttttcaattttgtaaactttatttaggcaattatttttt

SEQ ID NO: 5587 - DNA, 201 bp, Bos taurus
cccttcataatgacatcagatcctcgtgactgactagcagaaaaccttttgtaaaatgagtgcttaatggtatccactcctccttcaccaaaaccttatatattgatggtcccccactgcatctttggaacagttcctcagaactatttgaggtgctgcctcccaggcttcagtcttcctgttgccccaaagaaaacttgc

SEQ ID NO: 5588 - DNA, 201 bp, Bos taurus
ctcaaactggggatcaaattatatgcattttaagtacaaatcaataacttaaataattctttgacggattaattcattctttcattcagcagtacttatcatgagaatgtaaagtgatacagccacagtggaaaacaatacagaggttccttaagaaactaaacacagggttataatatgatcctgtgatcctattcctgg

SEQ ID NO: 5589 - DNA, 201 bp, Bos taurus
cacaaggataacaatcaccaccgcttgagatgaacagaacaaaactgttggttgccagaggcagcagggtggaggagagggtgaaatgtatcaagggagggtcaaaagataaataagtgctggggatgtcatgcagagcatgatggctatagttttaatgctgtattccatatttaaaggttgctaagagtagattagcat

SEQ ID NO: 5590 - DNA, 201 bp, Bos taurus
ggaagtatgcagagaagtatttagaggaaggttttggtttataaagtctttgttttattgtttgttgatttgcttgtttttggccaatggcccaatgaggcagtgcctcaggacttaaagttgttattaccaactccttctttgtgaaagtatgaagagaagtgttaatctctcctggccaaagacttcaggcagcatact

SEQ ID NO: 5591 - DNA, 201 bp, Bos taurus
gcttccaacattctgtgacttagaatagttacaccatacatgtagctcacaaatatgcaggtaggctaggtacttcttttgaccttaattgggcctctcacgggtcctttctcaagaagtctcttacagtcttgactggcttatttacatgttcatcagctggtgtagagtggcctcaaatgggacaactgaggagattca

SEQ ID NO: 5592 - DNA, 201 bp, Bos taurus
tattattcagttctctttgttagtactccacacagaggtttcctatacaattgatacatgtttactcacaagcacactgatatttaagccctctctagctgtgactttaaatttagttaaactgcatttagttcttgattgaaggctctggagataagatcatatctgtcaacttgactgcatcctcaagacctccagaag

SEQ ID NO: 5593 - DNA, 201 bp, Bos taurus
ttctctgtgttcatgcattcctggggacttttcctctttaaggactccagacctattgaattaaggctccaccctcatgacttcctttagccttaattgctttccagaggccctgtatccaaatattgtcacactgtggggtttgagatttaggtatggattttggtggagaacagtacaatccataacatgaactttcca

SEQ ID NO: 5594 - DNA, 201 bp, Bos taurus
tgaaacgttgctataaggagcctcacacagcaagatgcctttccttacacagtaagagactcaccttttgtgaaataccctcctgcacaggcttctaacattgtgatcgttttttttttcaaccttgcagaaagccgctcaatatctacagattctatgaagcagaagtcatgctgatttctgaaaggttcaaaaagttgg

SEQ ID NO: 5595 - DNA, 201 bp, Bos taurus
gaacgtagattggggggcctaaaaaacatgtgtgttttatcttgataaagtaaaagaaattttagggatgtttaactgtttgtactttatcaacagtggaattttacttgaaaaatactttgaggcacttgtacaactgtttattacactcaaaatagaaattacataaatggccaagcactaaaataatgaaagtcaaat

SEQ ID NO: 5596 - DNA, 201 bp, Bos taurus
ccggattgaattcttctcctccgggggccaagaatcccagtgtatttgcgtgattcaacaacctttcatcagcagactatcattttcttcaggacctaccggggccctacaggaagaaaacctgggactcggccctgcacatcagtgggtacttcttagccaggaccagtttcatagaccagtagacaggcatcatctgca

SEQ ID NO: 5597 - DNA, 201 bp, Bos taurus
tcccctaaatagcaatcacattatacaattttaaataaattgtggtttaactaagtttttgcctagctaagaatttagtttagaaaatatcttgctctagtcatggccaaaaatcttgataatatcaattgcatattatctcaagacacttgaaatttttaagatcgatggcttctgttcataaatgtccaaattatttgc

SEQ ID NO: 5598 - DNA, 201 bp, Bos taurus
aaaaagaggccatcagaatttttatagattgcattcactttatagattgtcttgggtagtgttgttgttgttccgttgcccagttgtctcccactacaacgtgccaggccttcctgtccctcaccatcttcctgagtttgcccaagttcatgtccaaggtattggtaatgccttccagtcatctcatcctctgttgccctc

SEQ ID NO: 5599 - DNA, 201 bp, Bos taurus
aggtctaacctgtcaacactgcattaatttcaatgatgaagatagtgatcactcatggatttcctagatatagattacttgagtgttgactccaggagagagaaatcatttaaatccaggaagtcacaaagacatagtatgattaaagatattcatgacataaagcatttttttttgaaagaaatgatttaaagggaattt

SEQ ID NO: 5600 - DNA, 201 bp, Bos taurus
gtagaaatagaactcaaaacatttccccttctcttaaatggagttacttatcccttaaagaagtacaggtttctgagtcaacagataatcaaaactactaaataaacacgggttatctttctgaggagtatcagtattgcttagagtttagaagaagaaagtatctaaattttatgctatcataagatttcatcagtcaca

SEQ ID NO: 5601 - DNA, 201 bp, Bos taurus
tgtgaatcctatgacctttttttagtagaaagtgaatcacctccctggtggattcactaacttgaaaatccaaccctgattggccccgacaaataatacactgtagattttgtttactataggttattttggtttaattatgaagttgttttcactgtaattatatgctttgaaatcactgaaccaagaacatttccataa

SEQ ID NO: 5602 - DNA, 201 bp, Bos taurus
attatatgtacttcctctgagtcttcacgataatttcctcttcctttcaaccatggtaatttccccagaggcctcataagacatctagtgtaatctgatgattgacaaaatacagtaggcaaggctagcattttccctacttgtctatttcaggactagttgaaacctcatcttaaatccacagctagtggatcgatgtat

SEQ ID NO: 5603 - DNA, 201 bp, Bos taurus
cggccctataaacaaaaccgtgataagaaaagggcaatttagtagctagaatagtggatttccaccctcttccctttggcctcactccagagtggatgaacgtaaggagccaactgtttgaaatggctcttcactaagaactctaatgaaagacattagagaacaattgttgtagaactccaccaggttatgaactatggc

SEQ ID NO: 5604 - DNA, 201 bp, Bos taurus
caccacaagacaaaggtgattaatagaataagtcagaacctaaaaaaaaaaaagaaaaattactcaagaactttgaggaactccacatgcctataaaaatctggatgtggcagcagatggcatctcttttgcatgagaggcatgacagcctgaactaggaaatactgagaattgagcttgggcttcaagcccacaatatta

SEQ ID NO: 5605 - DNA, 201 bp, Bos taurus
aagagtgaattctcccacccagcaaaaggccacttcccacacctcccgtgtaacactatcagacagaacctctggctatagaagcctaaacccacaaatacacaggctacatctacatgttcttagcttgggttttggtcaacctcaaatacctcttattttattaggaaagtatctttcctttctgggtgcctggtgtcc

SEQ ID NO: 5606 - DNA, 201 bp, Bos taurus
ttgtgtttttagaaaatatttcttttcacaaactagatttcagccatattataactattaacgagtacatattcatatttggagcattgtctgtctcattctctgagtatttgaaatgcaaagcaagcagaaagaggatggtaagaaggtcttgcaggcccaaatcttcctctacctcatattaatactacagagaggaaa

SEQ ID NO: 5607 - DNA, 201 bp, Bos taurus
aaagaatagtcagaagtattttcatccatgagggacaaatgtgactaaaaattgattgtatcaacaattaaatcctgctctaagttacctttagtagtttagaacatatatattcgtactggcttttaaaattagcactgaagatgttagagtattaattacccatttcatccttaaaaataaacttatgaatctatattc

SEQ ID NO: 5608 - DNA, 201 bp, Bos taurus
gtagaacattctatccttattaacaatgagaaagaccaagactgttggtagaaatattcaatggcatgtgtggcttctgtttacacaccattgaccaaaataaatcacatgaccaaacctgacaaagtgttaggagagtatactcctttggacaagaggcactgcaagtcccatggcaatgggtaggggcacataaccatc

SEQ ID NO: 5609 - DNA, 201 bp, Bos taurus
ataatatattttcatttataggcatttgaaacagactttgaaaatttgtagctcttggactaggaaggttttgaaattgaggaaagagcatccagcaaagcatgtctttaatgttacatccattgttcctgtctccctgtgttggcttacctgttcagactgtagatttggatcagagaagccacagtgaagatgacagga

SEQ ID NO: 5610 - DNA, 201 bp, Bos taurus
acagtattggagcttcggcttcagcatcagtccttccactgagtattcagggttgatttcctatagaattgactggtttgatttccttgcagaccaagggaatttcagtgttatgagggcctacggaaaagaatcttttgtctacagcccaaactcagaggaaatgatttgctgactactttaagagaaggtgagctggtg

SEQ ID NO: 5611 - DNA, 201 bp, Bos taurus
gaccacctaatagctctagtactgaattgtcctgcaagggaaaaggtaagagacagggaggttctgagagggctttggccagaagaaacagatgtgggggatctatagtagacacagtgattatggatgaaatcattcacttcttacagcttgtggtcgtgtatccactcctatatggtcactggcctcaatgttcagggc

SEQ ID NO: 5612 - DNA, 201 bp, Bos taurus
ttgaaggaatcaaaatgaaactaatacgaagattagaaaatagctttaaaaatttgggtaaacatggagatgttacttatgaaataaagtattaaaaatattgatatcctcatgaaaatgaaactatctggtagcaaaggaatgggtttttggacaaaaccatatagaagagtattgtcaagtttcaagcttttgttttgg

SEQ ID NO: 5613 - DNA, 201 bp, Bos taurus
taaaaaattttttgcccaagcatgaccctctgtccaagctccctaacctttaacttctatcccacaatcatatgctgttattctttctccagtatcctttctatttctttcatttttatattattatctgcatccatattgtatagatttatagtgatttgtttacaagtatatctcatccaataaactacgggtccctgg

SEQ ID NO: 5614 - DNA, 201 bp, Bos taurus
gattagagtgaggaggccaaaaagaaggcctaaggccaagtccccatcatctcaggcttctcagtcccctcagctttcttcctcaattggccctttcctcaccctcagcatttgtgttttctgactctatcttgttttttgttttgggtgagccagggtgggggtggcccagcacagcacctggtacataataaggtgctc

SEQ ID NO: 5615 - DNA, 201 bp, Bos taurus
gagcatggtgggctatagtccatggagttgcaaagatatggacacaactcagtgactaacactttaactctttagagggattcagcaatccatactgtcactacaataacagggtggcatccatcatactctcatgcaagggttcccaacctctggggtctaatgcctgatgatctgagatagagctgatgtaataataat

SEQ ID NO: 5616 - DNA, 201 bp, Bos taurus
ttattgagatcagatgtctaaattcaaggcgctgacagtgacatttcttctggagggtttagaggaggagtcctcttacctttctggcttccagaggccgcgcgttctccttcgcttgcaatcccttccttgccttgctcccaactcttgctttccttctcacatctcagactactgacacttgagcttcctgctgctctc

SEQ ID NO: 5617 - DNA, 201 bp, Bos taurus
tgtacaaggcaggaatatttgctctgtatggtctatgcaatctcttgtgtattccttaatttttataataacatgtgttctaaagggctgattcttgctgatgtttgacagaaaacaacaaaattctgtaaagcatgtatccttcacttaaaactaaataaattaaaagttttaaattgatttattttcggctgttcagtt

SEQ ID NO: 5618 - DNA, 201 bp, Bos taurus
aaaactgtaagaggttactgaaaggaaacaaataataaaacaggtttaagtacctataaaactcaggcttaaggagtaggaaactgctgctgaaggaaaggtaatattttattgtgaaatgttcatttatttccattcaacccaatttattaaacacctattattttaagtcattaaaataaatgatcagcatttacagaa

SEQ ID NO: 5619 - DNA, 201 bp, Bos taurus
aagcctggcatgacaatcaataccaaaattacagctccatggtaagaaatgctgtcaacatggtaatgacttgtttaaacatttattaaatcacttcacaacaaatagtaacacatgaagtgttatcctcacatttcacagcgacatcactcctaagcagaaaaaacgctagccaaactgttttaaaatcttcatcaagat

SEQ ID NO: 5620 - DNA, 201 bp, Bos taurus
ctttaaacagctttaggaaaatgccagttgttttaattatttctccagtgggaatctttggcttcactgaaaagtgtatatgagccgtttggtggccaaacggcaaagtaaaaagaaaaaagaaaaatacacagaccaccaccaccaacatccccttctaagttacatgaaacttcaataaaatatggtttgatggcctgt

SEQ ID NO: 5621 - DNA, 201 bp, Bos taurus
gcacttaagttccctgaattaacttatcttgcttttccttatttcattttccatctttactaacggctttattatcaattatccctataaaattctaagcaatatattccttgtatcatgaattttctgacacttacactttctacactcctctcaacgcaatcctctgagtctttcagtcttctttcctgatcactaaat

SEQ ID NO: 5622 - DNA, 201 bp, Bos taurus
aaagctaactcagagtaataatcaacagctagggaagacacaaacattttttaactatgaaggcagtggattataaatccaaatattagagttagagcttaagaagtcatttaaattttctcaagtttcaatcatctctgttttaaaatataactaattatgttgattctcttcaaagagctagtactaaaaatagaaaag

SEQ ID NO: 5623 - DNA, 201 bp, Bos taurus
tttggctcacaaaatgaaattctggattcgacagtggggcctccttctcacgcatttgtccagttacatcactcaccaacaaatgcttaatgagctactacatcatgccaggccctttgcgagcttgggtttaaactgtctgtttttccattatgaaatgctaagatgataaacaaacactccaatttattgacaacttta

SEQ ID NO: 5624 - DNA, 201 bp, Bos taurus
aatagattattcgtgttcttgaagaactgtaatgttctagtgagctacaacttagaaaaaaattacattataagtcttggtttataatttaagtatgttcgattcaagattagtttttccacacaagtagttataacgagacattaagatcccaaaccagctactgaaaccctttaactcttcatccgactattatggatt

SEQ ID NO: 5625 - DNA, 201 bp, Bos taurus
tcctgaacagaacagagttgtggaaataaaattctctttactgaaatatttcataggcattttccaaatgctaaccagggccttgctcctcaagcagagacgccgtctcctgtttataactgatgatatacaaccgagcatatgcacgcagggccagaaagggagaaagcacagtttgttctaggttagttccaaataact

SEQ ID NO: 5626 - DNA, 201 bp, Bos taurus
ccctggggccaactctgggagagaaggtttctgtgttagtcccagaactgtggagggtgttgaaatgctttctaattgcccagttaaagctttgtttatatagcatttttcaagattcatgaaacatgttgaggtgtcagatattcaagaactctgttatacaaatcattgaaagaaaaccttcccggatagggaggtggg

SEQ ID NO: 5627 - DNA, 201 bp, Bos taurus
aatagataaagaatagtgttagatgttccttgctgttgtttttcaatatcacatattcagtcgtattttcagtgtttcttaatcttatatataatgttacgggaataatctaatctaataaagagttgatgtcttgcaatggattatggctagtggtgatattaagggtgttctccattcattctgatgacttgaatcata

SEQ ID NO: 5628 - DNA, 201 bp, Bos taurus
attgcacagagttggaaatgattgagcgacctagcgtgcatgcacccaaccactgcagatccatgatttccacctcaagtgatcctcatgatgtctggagagcctttcttcaattggctctcttgtctatggattatacctactttgaagcttttcttctttcaaacattttagtcaaccacatcaatacttacactcaga

SEQ ID NO: 5629 - DNA, 201 bp, Bos taurus
ccttgaactgtcactagaggggcccctttcatgtacttccccaggtcctcagctccatgaaccattcctgttggtgtgcactctgctccctgcgctgtcccgggcctcttcctcggcacatcctcgaacttgtcacatctctcctaaaataggaagcccacacggagcaccgggttcctgggaagaggagccagggacagc

SEQ ID NO: 5630 - DNA, 201 bp, Bos taurus
tcttagcgaccccatggactgcagcctaccaggctcctccattcatgggatgttccaggcaagagtactggagtgggctgccattgccttctccgttttcaggtaggatcctgtccaaattctgtttcattacagagatgtatgtagtgttgatccttagaaagtgaaagtgaagtcgctcagttggggtctgactctgca

SEQ ID NO: 5631 - DNA, 201 bp, Bos taurus
tcttagctccatgtactcagggacccagggatatctattttaaccctttgttttttagttctgtcttacactgaaaattttattataaacatctttctacataagtatgctgctgctactgctaagtcatgtcagtcgtgtccgactgtgcaaccccatacacggcagcccaccaggctcctctgtccctgagattctcca

SEQ ID NO: 5632 - DNA, 201 bp, Bos taurus
caaggcattaaggaggtctgaagggggtgtacagagggacttccacactccccagaggccaattacacttggaatcctcctgatcggccctgatcagggagcagggctaccccctcacagcctattgtgctagctcggagccacctgatcagcctggtcctacccagtatttaaattagggcatcgccaatcctggaccca

SEQ ID NO: 5633 - DNA, 201 bp, Bos taurus
gcatttcctcctggattttttcatgcgagttggaaacggcaaacaagaaggaagggcgcccaccctctgctcgctcggggccttttggttgcttttgtgctgtttgctgaatcccaccttttgggaaatcatcgtgagtgggtttgtgtatcttctagaacaaaaccacagggtttcggctgggccaccaaagagcgaaag

SEQ ID NO: 5634 - DNA, 201 bp, Bos taurus
gagcctcagcttcctttttgtggtcaggattaattaaataacaatacaatgtatccataacattacccactactctgttcatgctcaataaatggcagtcataattttcacaagattcttaatagcatgagttagcaggccaaacctgtccacccctgttttataaataaagttttattgggccacaatcacaatcattag

SEQ ID NO: 5635 - DNA, 201 bp, Bos taurus
gttggcaaggctcagcggctgggcctccaagtggcaggtggtcatctggctcatcacctttcccaacagagcccccacggcgaaccccacatgggcctgcaggtaccccagggtctttcctcttctgcctcagccccttggcaagctgccccatctctttctctatggccagaggtcttctggcagtgctggcgtccagac

SEQ ID NO: 5636 - DNA, 201 bp, Bos taurus
gtttagacccatttgtgttacaacattcttgatacttttccaaacagcctcaatcttagaagagaggttacttcaacatcatcagttcattcggccctgcgttcaaatgctaaagccatttttgttcctaatcagaggaaggaagaggcagagaaaggagatgtgaaaggctttggccaactatagagtttgatgcaacag

SEQ ID NO: 5637 - DNA, 201 bp, Bos taurus
attctctttgctgtgtttcctatttttgtctaggataccactattgtctgttcatccccaggctcaatgccttagcaatttttaatcccttctctaaattgttagatgtaatgaaataactgggtccttgcccccatctccctttccataatgtatcaaaggttgatttgtccttccattgagtcccttcttctctgttcc

SEQ ID NO: 5638 - DNA, 201 bp, Bos taurus
gcatgtcagtttgagagttatcactctgaagcctgggttggctttgattactgcatcattactaagctgcagttttcccataactataaatcgcaattatttgccatttaatatttttcaaaatcaacctttttaatgactccacagtcgtctatcacacggctaatccataagtgagttgtctaattgcatactgtgaga

SEQ ID NO: 5639 - DNA, 201 bp, Bos taurus
agaagggaattgcatgtgtctgacacggcctgaaaccaattatttgatattttcttcagaatgatgcccaactctgttgggaatgagcaatcatggaatattttacctcctgatttaattttttcctgcacaaattagttgtagactgagctggctacacacagatgcttgtgacatagctctgtcttatcaagatgatac

SEQ ID NO: 5640 - DNA, 201 bp, Bos taurus
gatgaaacagaataaggaaatgtatcaaaagtacacacatgcttatgctaacagcatttggtgtgagaatatttgctgatatgaaaggcctcagattagacagataatgaatgtagaaggtttgccttttgaagaattaggcaatgcttaaaaaaaaaattgtaaggggcctagccacatataaaaactgattttgatgat

SEQ ID NO: 5641 - DNA, 201 bp, Bos taurus
tgtgtgcctagacctgggtttaatagaccaatgattccaatttcccattgtgaaactcccattttgaccgcaagacagataaaaaaaaaaaagtttttaacgtaaatacaggcctaatagtaacatgtcacaatgcatcctttatgggagtcagtgtgatccaatgtttaatatggctgacccgtgttgatgtatggcaca

SEQ ID NO: 5642 - DNA, 201 bp, Bos taurus
ctgacacaacagaagggcccacgcagcccatataggcagtacccccaacacatatagatctggtgagagaggggaatgtgcaaccagactacatctcctacgtaaggccacttctccaggatcaggaaatataaatgacctatttaatacatagagacaagtcagaggataaaccagagaagcaatgaaaatgatgacaga

SEQ ID NO: 5643 - DNA, 201 bp, Bos taurus
gtcagcaggcctggttctgttcaccaggcctggttttgatgccaaggacttttcctttacttactagctcatgaaatgttgagagctgctagtatattcccggagttagacgaactagtggccaaggttgcagccatgatatggaatttagggtaaggacttcacacaggattgagctttttaataataaagagaaatgta

SEQ ID NO: 5644 - DNA, 201 bp, Bos taurus
ctattatccaaatcattaacattcgcttcaccctgttgaaatgcagtgacacccagggatttaaagtgtaccactacatgaatgaaccccacactctagttggcaacagaattaccagagggcttattagattcctaagctccaccctcagagtttctgatttagtaattctggagctggacctgagtatttttatttcta

SEQ ID NO: 5645 - DNA, 201 bp, Bos taurus
gtggaggggtgaccttaggaccaaggtcaacaaagtcctaggcacaagtccaaactatgacatgcaggtgtcccaagtcagactcatcatctggcctcccccctccttctaatcgatattccttaagtttgttcaaaatttcagttcagttcagtcgcttagtcatgtccgactctttgcaaccctatgaaccgcagtacg

SEQ ID NO: 5646 - DNA, 201 bp, Bos taurus
ttagaccatttttagactggtcttaatggaatttaatatgctttgaattaaacaatgatcgattgtggcaggactgctgactagtaacttttgttaaaaatttttttaaagatccaatgctttgtttagcttcaatatacctattttcatatcctcttccaggatttaaatcaattcatgactctctcaactccctccaac

SEQ ID NO: 5647 - DNA, 201 bp, Bos taurus
aagacaaactataaatggacagatttttctaaaacaaatctgagagggttttttgtttggttttattttttttcttctctctctctcaggttgagcaacagaaaccaaaacacagttgaaaatttagaactgtattttttcatcttcaaaatgtagtaataataaataatgaaaggtcaggaaaggaatcagaacatttta

SEQ ID NO: 5648 - DNA, 201 bp, Bos taurus
ttccagaaaagttcttcaacacctgcccacatatccacccaacaggtttgattggcatgttgagttcctacttcacagcaagcttgcaggcctgggcacttcccatccttctctaccattagtgaggggtgagggtagccttcccactcagggaagcaagcgaggacagaacccgcagttccgaattctttgttactgcac

SEQ ID NO: 5649 - DNA, 201 bp, Bos taurus
cgagaggaagaagctggttgtggggcagcataatgttttactaggagggaaagacaaactttagcatcggaataaaatggtcaaggtggttttaaaccatcgagtccaagactctgaaccctggcttttaagaggctgcagttttaacaattcattcctctgccttcagttattctggaaggaaaacgacttcagatgtga

SEQ ID NO: 5650 - DNA, 201 bp, Bos taurus
agctgcaccaggtgaggtctcagagggatcacacaaagttctgctttcactggctctcctttaccccttcagcccgctgcccctcgtcagtgctgcacagatggccagacaagtcacctggggacaggaactacaaatagatccatgtttaaatatcacttatgcttaaagggaccaggccagaattctcttccacaaatt

SEQ ID NO: 5651 - DNA, 201 bp, Bos taurus
tccggttagcatcacactacaggtaaccttggtctgtttgaccagggaggcaggcctagaggaaaaccatcagagccagttagctaccgatgcatcaacacgttcatcgcttcagattaccaggtgtccaccacctgcctatcacaggggtgggagctctattcctgcacagctggctgtaagaaaaacttacatgttagc

SEQ ID NO: 5652 - DNA, 201 bp, Bos taurus
gctctgggccttccttcgaagcatttaaagtgcctggcactagtgggagctcaacagatgttaattcctttctccacttttatctgaacaactgtgtgtgtccgggtgtcctcctggcctctgcgcctgctttatgagatcagttaatcggtgcatgtctccttggcatgggctcggctctttgtcgggatgccctgcggg

SEQ ID NO: 5653 - DNA, 201 bp, Bos taurus
caagatgtcatacttaggtaatagagatgctgtccatcagctggtagctcagctaggactgtcagctgagggtcttgattttcctcaagacttcctgagcgtcttcttatgattgtttaggctctgtgtagcatggtggttggatttcaagaggcagaaggtggaggctgccagtcctcttaaaggctagccctgaagtga

SEQ ID NO: 5654 - DNA, 201 bp, Bos taurus
gaagaaatgggggtgagggaaaatatgttcttttgcctaaatttttttacacatgtatctccggtagaggaattcaaagtaaatgcatatttttaggctctgaacatgcacttgaaaatacatcatgcatttatgaaattgactgttttactaagaaccagttagaatacttctgcttttctgggaattttgaatattttt

SEQ ID NO: 5655 - DNA, 201 bp, Bos taurus
atggggtgtatgcgtgttttcagccaaaaagcctacccaagcactcatcagatacaggaagcaagcatgctcctaaggaaaaagccgtttccaaatcaagtgagcagccaccatcagagaaatcaacaaaaccaaaggtaaataaagcagacagatgaaagaaagaaagaaagaaagtgaagtctctcaatcgtatccaac

SEQ ID NO: 5656 - DNA, 201 bp, Bos taurus
tttttgttaatattttatttgaagctgtcattaaaactaggtataaagctttatttacaacaatacacttgggaatcagagagtaaacttagtgattttgtggggaacataatgttacatgtattgaaggcatcataagacttctagaaatcgggccaagaaccccatctttttaggaaggacctattttctaggaagaaa

SEQ ID NO: 5657 - DNA, 201 bp, Bos taurus
tactacctggctttgttaactttcccttctttatttgggcctctgaagtcaggctttcacttgcccacctctgaagtcgcctcgtaaaaagtcactggtttgcaggttgccagatctagtggcctctctttggcttcatcgtacgtgaccttcctaagacattcaacaccagccacttccttcttcatgaactcttccttt

SEQ ID NO: 5658 - DNA, 201 bp, Bos taurus
ggcctcacacagtactttccaactatcttccaactgttggtgactgtgtttctgtgcctgagagtttttctgcgctaagggaaaaactgttctatgtctaaagctggccagaagttcaggggaattaatacctctggatgcagccattatgtactactaatggagttagtgtacttcagctgcctcactctaatgctctaa

SEQ ID NO: 5659 - DNA, 201 bp, Bos taurus
ttgctatagaaaggagaaaacattctaggaaaaacctcataagcatttcagtcagagaagttgggaggggctttttattggatttgaatttattttggattattttgaggaggatttagggaagtagaggactgttattaaagtgagataagtcagaaagacagatactgtatgatatcactcatatgtggaatctaaaga

SEQ ID NO: 5660 - DNA, 201 bp, Bos taurus
ctttgtttaatgaatgctgtattgttaaagacccaatttcagaagatgaattcaaagactaagtgattttctcccctcatacgtatacaaggtaaagaatttaatctacagttaatcaatgaaaagtatcgtgagagatggaagagtggagacaagaaatgtacagtaagtcaattagaaagtttaaaactgaaaggactc

SEQ ID NO: 5661 - DNA, 201 bp, Bos taurus
ccatgtatctgcagtcagctggcagtttgactacagcaacagggtgactcaactctgtgctgtctttatccagcaggccagcccaggcttgtttgtatggtggcagcaagtttcaaagaaagaacttgaatcatgtacgccccttggggccaaggcttagaattggcacgtttccactgttggtcagagcaaatcacaaga

SEQ ID NO: 5662 - DNA, 201 bp, Bos taurus
gcatggcgatcttgtaggtcttggacaaagattttctggttaactctgccatatctgattctgtgggcttaatcatcatccttttccctcttttcactttgtccctggttcctcagacattttcatgctgagagtggcctctcacatcaggcttatgaatcataaacctctcaaattaaaagtggaaaagacccagtgatt

SEQ ID NO: 5663 - DNA, 201 bp, Bos taurus
cctcaaatttacttctaggatagtgtgctgaaatgctggctgatttggtagctgttctaataatttctgctccccacaccctgcacccaccaggattttgtccatcttaatgctaaaactggcctcctcttctattcgtgtgcattaattatgggaatctaagttgctgcaccttttttttttcctttgcaatctaagcca

SEQ ID NO: 5664 - DNA, 201 bp, Bos taurus
ctataggagagagaggtgagtttatttccctgtatggggtctccaaagaattcaggagagggatgtttcagccgcaggatgtgcagaggaatgttggggtactcacactcctcttgacatccctcctgtaggcgttctcttctctccaggatgaggccggtaacctttcagtctctagttcagtcctgtactatttttaac

SEQ ID NO: 5665 - DNA, 201 bp, Bos taurus
ggataaagctcaaggaaatgaaatctgggtaaaccaacatataatctacacaaaccttccattagttaacctcaaagacagagctcaagagaaattacatgtgtagtctacattttatgcaacttcaaaggttctcattttattaacccactcactctgaaattaacaaacgaatcattcacactcgtttttcacagcttt

SEQ ID NO: 5666 - DNA, 201 bp, Bos taurus
tgctcccttggaccactcagtctgggagaatccagctgcctgttatgagaactccgaagcagctctattggagaggtccatcggtgaggccttttgagtgcgaaatcttggaggtggatcttctagcctgagtcaagccttcagatgactacagcctgggccaatatcttgcctgcaacctcatgagaccctgagctagaa

SEQ ID NO: 5667 - DNA, 201 bp, Bos taurus
gagccagttttcgggcctacatcttgagaaaatagcagcttctcttggaatagacactcttggagtgaagtcaccacagtgtaaagcttaagctacacatgcgtgtcggggcctgccaggtggtatagtggtgaagaatctgcctgctaatgcaggagacctaagagacatgggtgcaatccctcggtggggaagatccca

SEQ ID NO: 5668 - DNA, 201 bp, Bos taurus
gtcattaacttctgtaaacattggtttgttttcctatatagctttgccataccatagggctgttgtgaggattaaataagatgcttatacaaagtcacacggtatcactgatgcaatggacatgaacttgggcaaactttggaagatggtgagataaagagaggcctggcagtccatggggtcgtgaagacttacttggac

SEQ ID NO: 5669 - DNA, 201 bp, Bos taurus
agccttcattaggggccccttgttattacatgcttttagataaactacaagttgttagttcatctacagatctttatgcattgtgattacagcttcagtattgcatacgtgttcctgctgagtttttagatgtctttccacgtggaaactccagtagagatgtttctgtatagcagatgcttttaagcatcatgggggttg

SEQ ID NO: 5670 - DNA, 201 bp, Bos taurus
actttattcgctttctttcctatcccggttcattttaggatcaaagaggtatcaaagacaaagggggcctgaagtcaagcaggacacggtggggccttcctaggcacaaaagtacctctgtggctgctcaaaagcaccctttcttatttgtggacaaaaaggcttaacctcctaggcctttcccaagtcccaaagagcaga

SEQ ID NO: 5671 - DNA, 201 bp, Bos taurus
atgtagaactacagtggagactttagtttttggcaacctgtcatgtagttatcctgcacaacaacaacaaaaagttagagaaatatccagaggccccaaatcacactcaaatagagaagaaattgaacaagtgtagctggtagctgcccatggaaaaaatattaaatctcacctgcctagattttcctgtttaacaggaca

SEQ ID NO: 5672 - DNA, 201 bp, Bos taurus
gccctcacactcaggaaatttccctttacgaagaccatgggcaatcctgggcaaccagttcagtgaccccagttcttccactgtctcaagccccagattccactcttatgctgcaaactggcccacagtgagtgatccagtggaatccagataagccaccctcacactgcaataaaagtagagcctaaatccaggctttct

SEQ ID NO: 5673 - DNA, 201 bp, Bos taurus
tctacctttagttttttgaggaacctccatatcgttttccacagtggttgcaccaatttacattctcaccaacagcataatatcccttttcttcacaccctctccataatttgttatttacagacttaaattgtggccattctgaccattgggatgttgtacttcactgtagtattaattcatgcttttctaataaatagc

SEQ ID NO: 5674 - DNA, 201 bp, Bos taurus
cacgaggcacatcggtggactacatgagaatgcacatgttctcagcagcgggagcagtcctctgaccccctcgggtcagccaggtgggtctggttgtgacgctgctatgaggtttgaggggcagttgggcattcagtggtctgctggcatccatgatcttaaaaatatattatcatttaaaataattcaaaaattgtgaaa

SEQ ID NO: 5675 - DNA, 201 bp, Bos taurus
tatagtgtctccagcaaattccaagttgggttctagctctatcaaagaatggcaagatctgttcacaaaggtttacatatttaatggccttggtggatccagtttcttttatgaggtgcccatcctgtttctcacctttaagacataaactgcattccctcctctgacctgctaatatcaaccaccaaagactatattgca

SEQ ID NO: 5676 - DNA, 201 bp, Bos taurus
gttaacaatagatatacatccataggccaggaataaagaacaaagaagtttgagctagagttgggattcctgattatcatttttcagccttgctaaaaccggaggaaaggctcttctctaggcccaacctgcttttgtaccttttgaagtgagcagtgagatggatgcatacttcagggtgccaagaagcaaaggctattt

SEQ ID NO: 5677 - DNA, 201 bp, Bos taurus
ctgctttggattttactctattatctgtaaaaattgagatgtataaattattaaagatattaagcattatccattcttcttttattcatttctctgatttctatgaagttaaacttgctggaagctgatttggtcatactaaaacaatatgtaatcttttcaagttttcttagaaggatttcttaccttgtgggttctcaa

SEQ ID NO: 5678 - DNA, 201 bp, Bos taurus
atatgctttctactacatcagaaagtgtcactgtcatgtagcaccatgatcaaacaccttggttttcgagacacctctaaacacatctgtactacagctaaactcatggactgcaaggaatggacatatactggcctgtgggaaaagggtaaattttccataatttttaaggtaaagcagctgattcaattaaataccact

SEQ ID NO: 5679 - DNA, 201 bp, Bos taurus
atgactgagcacgtaagcacatcatctatctcaaaacaagaaatggaaaaaaaagttcagaagcaactatgaaactgatcttattgtgttgtacaactataccgctttggtactatggaaaatcctaggacttaaaatagagtcagctatcagagtgtgctctgctcaaattggaatctgctttgtgagattcagctgctc

SEQ ID NO: 5680 - DNA, 201 bp, Bos taurus
ttttcctgcctcagtttgctctaatgatgcaataacatttccttctggtttcttcttttttcccctgacaatcactttaaagttcttaaaaattacttcttgcattaaaactccagttcagatgttagatttttaggacttctttgttgacatgaggaacagattctacacttcagacaatattcccccttatcattgttt

SEQ ID NO: 5681 - DNA, 201 bp, Bos taurus
tctttaccatcagtgccccctggggagccctgaaacattagtgagtgacctgcaacaaacacgtaagttcaagagatctaattcaacctagtgactataggcacaatactgcattacccacttcaaagttgcgaaaatacaagatcttaattattctcaccacaaaaaagaagagataattatgtgctctggttgaggtgt

SEQ ID NO: 5682 - DNA, 201 bp, Bos taurus
gttaaagggtatttttactggttttaccacaccaagtccctggtgcagcagcgatcttaaaggggccgcagcccatggttctagtgtgggttcttagtcttcagttccagagagagaagagcagaccccattcacaagttattgtgtaagtctgttctgattcatctggagggatacctgaacgaatgacgggcagtgttt

SEQ ID NO: 5683 - DNA, 201 bp, Bos taurus
atgcaggttggccataactttccttccaaggagtaagcatctttttatttcatggctgccgtcaccatctgtagtgatcttaaaggtggaataaatgagtggacctgttttaaaatcagtgaaggcctttggatcatgtttgcttagggtcataaagtttgcaaataggtaaagagctgggggaataagcagctagactac

SEQ ID NO: 5684 - DNA, 201 bp, Bos taurus
accagggccacacccactgccaccaccaccaacctctctgactttttctattattgtttcatattctaaagcaagtacatgtgctttattaaaatataatcgaggccagaagaggactatgcttgttttcttggtatgtgtatccccataaattcacattaagaactctccaaaggcaactgctactgttacgtgaaaaat

SEQ ID NO: 5685 - DNA, 201 bp, Bos taurus
atcccacatgccccaattaaagagctcacatgctgcaactaaaaattactgcatgtcacaacaaagattgaatatctcatgtgcagcaactaagatccagcacagctaaataaataaaaataaatactaaaaaaaaaaaacttttaaagtaatgacagcaagaaatgttggcaaggacgtagataaactggatcattcata

SEQ ID NO: 5686 - DNA, 201 bp, Bos taurus
gtcaaaaaaagtctaccctggcctaaaacctaaggaaagagtagaagtagaaactaggattttttaaatgtccaatcattttgagttcagtccctcagtcatgtctgactctttgtgatcccatgaatcgcagcacgccaggcctccctgtccatcaccaactcctggagttcactcagactcacatccatcgagtcggtg

SEQ ID NO: 5687 - DNA, 201 bp, Bos taurus
tatacatagagcatagtccctgccttctgtctgttcaccggaaaggactagcgggcagatgcgtaaacaaaaaagtacaacagagttaggccggagccatggacatgcatacaagtcttggtccatgctcggagagggaaggtctccgaatggacttgatggaggaagtggtgttggagggtcggcgtgccgggcggcggg

SEQ ID NO: 5688 - DNA, 201 bp, Bos taurus
tggagatcagctgtggccaaaagatctaaatctgcacacttcttcatctccatttctgtggtcttattgctgctaagactattgccacagcctcctaatctgttttcctatcttccttgtcaggccatcatctacactaagatcagaatcaatttttaaaatgtgtaattcaacataaaaattctcctgttacatctaaga

SEQ ID NO: 5689 - DNA, 201 bp, Bos taurus
tttgcttcttggccaagaaaggcaatatttcccggctctaaccatgaaaacactgcttatacttttaatcagatgcatctactacgagggagagccccacgagttttggcaagctgaataaaggccccatgtgtttggagcccacggtactgcacacacttgaaacaccatctgtaggcagcttcttctgctccagcttgt

SEQ ID NO: 5690 - DNA, 201 bp, Bos taurus
taacaatagaggctgcccatgtggatgtggaaatagactggagtggaagttgcttcctgacatggtggttactcatcaaactgtatatctaaggtgtgcattaaaaataaagtacactcaaaaataaagcaaagcaaaaaaacatataatgatacataagggctaaaagtttttgagaggtgctacattaggaagctggtt

SEQ ID NO: 5691 - DNA, 201 bp, Bos taurus
gaggaacaagaactaatcagtactttttcctggttccctccctggatgtcttacaaccccatctgtgtatgtctcctttactcttcttgggtgaggtcttcggttgttaaattctcccccatctcatacacaatctgttagcatatcctattgcttctaccttcaaaatatatcaaggtttcaaccatttgttattttagc

SEQ ID NO: 5692 - DNA, 201 bp, Bos taurus
gcacttgttccccagttttaaggccttgcttgtaaacactgttcagtgagcgttaggtgacttgacttgataccactcacccggagatggcagggtcagaagctccttggggccaggcacttagctgtgtgtgactggctggggtgagctggacacagtcagccctgaagaaagcacagccagtcctggttgtcagttgct

SEQ ID NO: 5693 - DNA, 201 bp, Bos taurus
tggtttatttgtttattcattaagcatacgtaaaatcgagtcatctctgagtgcataatcccttagaagagataaaatggccaactagagataaaatacaaaatagagagcgataagtgttgcaagataggtgagcacagaagcccaggaaatggagatgctttgtttgcttaggaccatctgggattgttctctagcaga

SEQ ID NO: 5694 - DNA, 201 bp, Bos taurus
agtaaaccctgggagttggtgatggacggggaggcctggcgtgctgcagtccatggggttgcaaagagtcagacacaactgagcgactgtactgaactgattgttctttctctaggcctggtacagttagagccatctcattgttcagagaggtcacctgtctggagtggtctacctgaatgcctgctctaagctgctaaa

SEQ ID NO: 5695 - DNA, 201 bp, Bos taurus
cccacacttttctaagttggtttccccgataggatacttgacaacataattctgtattgattataaagagttaaatgctgagctacttcatccttttatgcatatttacatataatgtagagtctgaaaacttataattaaaaaaggggtttgtccttttcatttaaaaaatttttactataacagtagcattttaaactc

SEQ ID NO: 5696 - DNA, 201 bp, Bos taurus
agttaactgaagtttattaggtggaagccttaaagattaaatacctttcttattatttatcatcaaacctactgttgtagtggagcaagctattagcacccggggaaaatagaaccactggttgtttgacggagataaattcctataaaggccttgaagttcagtatgaacttcatccctgcttttgattgatttataagc

SEQ ID NO: 5697 - DNA, 201 bp, Bos taurus
cagaagacagagaccatctctgtgattgtagagttagtgaatcaggaaggaatttaggggaagatccccataaggctgagatgtggcctcagatggaggagcatgactgcccacaatacactgtattctactggggtgaaggactcgggggtctcctcacagaaacccgaggccggcctggggatggtcagtgcttcagag

SEQ ID NO: 5698 - DNA, 201 bp, Bos taurus
gatgaggggacacagtgccctcagaagctcgagcccccccaaagggttacagcaaagcatttttaaaaagccagatgaaggagggggcccacagggtatgtgatcagaccgtgcacagttctctgattggctgatgatgagggaagaggatggtgtcacaagagataactacatcagtccttagactccaggaggcctggg

SEQ ID NO: 5699 - DNA, 201 bp, Bos taurus
ctgctgctcggggccgctcaagctctgctgtcactgtgtttccccaaatgttggagtccggtcggaacgccgttctgcgtgggtgtgcacagggtaacggtgccaaagctcggcctccgtattttatgatgaagttgaaggagcagtagagctaaagaaaaatgacacataacgtttattgtatgccgagtactgagaaaa

SEQ ID NO: 5700 - DNA, 201 bp, Bos taurus
ggaagactagacgctggattggttaaacatacacatagtaacgtgaaaccacaacatccatggcaacaaagaaggcagtgttgcaagaatagggaatagcatgggcgaaaccagcaaggaggaaatgaaagtcagtaagggagctgaattgctaagggtgggtatttgtgaagggtagaagatgatctgttagaaagatac

SEQ ID NO: 5701 - DNA, 201 bp, Bos taurus
acagggcagagacacaggaggatctcacatcaacaattaattgccagtgctttccaaaacagctcatccagaattaggttgggaggcctacttgaatacagtatgccagaaagagcaatcagttcagttcagtctctcagtcgtgtccaactctttgtgcccccaagaaccacagcacaccaggcctctctgtccatcacc

SEQ ID NO: 5702 - DNA, 201 bp, Bos taurus
ctttctcattgtgacgtctcctctcattgcagactgcaggccctaggacacctgggctcaggagtcgtggttcatgggctgaagtagttgtagcccacaggcttagttgccccttgacatgtttaatcttccagacgggggattgaacctgtgtctcctatatttacaggcagactattaaccagtggaccatcagggaag

SEQ ID NO: 5703 - DNA, 201 bp, Bos taurus
attttagtacattataatgacaatttcgtgtgtttatatttccactcctttgaacagtttgttggtggagtgtccttttaattttcatttgttaagagcttttacattatttggcaaacaataggtttttaataaatatttgtagttagttggataaacagcatccatgtggtctaagattctcagctttttctcttaaac

SEQ ID NO: 5704 - DNA, 201 bp, Bos taurus
acacacaaagtgacccgggtccctagcccttcctagagaggatgagcgcttatgtacagaagcatgttccagacaggccattggcataatcaaatgcacagaggtgagaaatggcaccttgtgggggctgtaactaaaagcacaagacagagaatgaaggcaaaggatgagagctggagagatacccaagggccagtcact

SEQ ID NO: 5705 - DNA, 201 bp, Bos taurus
gggggttaactagcagtatctgccatgcctaacagtatagattagtaacagtgacattggtaaaaattgggatggtttaaaagaaccaggaacaactgagtggaaatagaccttcccaagccatccggactctctgtctcttgtctcctcttgtgcacatttttcatgttttcttctcaggctttctactccatattgcac

SEQ ID NO: 5706 - DNA, 201 bp, Bos taurus
agtgtcagatgttcaccgattacaatgttagtggctggaggtgagaatttagcactaacctgtagctatgctcttccagttgagccagtgactgtgggccttgtctcagttgttggtttggtgacagggacatcttcaatcagccaaatccaatgacgtaggagcctttactgtggttggttgaaacagtgacttagttga

SEQ ID NO: 5707 - DNA, 201 bp, Bos taurus
ttttttttttttccagaaaacataatttggagccatgtaccctacctttcataaatctttgacttcataggtttcctctcttgatctaagacctccatttctatggtagtactttcattagtataaccaactagtttgaagttgtaatggggttttgtcaagttacttgacatcctcagacagtactttcttctgtgtgta

SEQ ID NO: 5708 - DNA, 201 bp, Bos taurus
ggtagatggtcagcaagctttgatttttctttctcttgggatactgaaaggatttaaaattctaatatactaatccaatttcaaaattagacctggaaatataagcttgtggaaaggcactttaaaatctgtcttggaacacataaaggtctgttcaaaggttgatgtattcaaaatgttctgagggtttttattcatcct

SEQ ID NO: 5709 - DNA, 201 bp, Bos taurus
gttataaaccctgctaagctagcctaaattattttacaacattagttgctaaggaataaaatgtgtgaagctcacatttgtgtatctattaatgactattcttctggacaagtgcccaattttgtctaaaacaaaaaaagtaatctaggttcttttaagacaatttacattttctaattttttaagaacttcaaccaagac

SEQ ID NO: 5710 - DNA, 201 bp, Bos taurus
atttacttataatttgtttagcccattaatactttattaaagtttttgtggaaatgtctcaagaatgattttctttgtagcctctctgaaacagctcttcctcaagctcttcttttatttctaagcagtgttataaaataggaaattatattatgtgatttatttgcatgcttttatcttttatggtctcattctaaactt

SEQ ID NO: 5711 - DNA, 201 bp, Bos taurus
taagtggaagttgacaaatattatacatgaagaaggcaatgactcaaccttcaccggcaatgatattcctccaagtttgaagattgtgtctttaactctcttttttatatttaggatctaaaggattgcttcaaatatcatggaaaataattatttgtttaataaattcataggaagaataattgggaaaaatcaaattta

SEQ ID NO: 5712 - DNA, 201 bp, Bos taurus
tttcctcagcaagtataagatacatataggggttataactggatagctaatactgaagttgattgctttcttttgcttatgctttattttagaatagtctcactctccaacaaacagggaaatactatgcaagagattaataaagaaatatatattagaaccattgtatgtatctagaggaagtgttaaaaaccaaacaaa

SEQ ID NO: 5713 - DNA, 201 bp, Bos taurus
gaagaagtgatagttggaaatcaagcaaggtcatgaggaagagagagattattttctttaatgttttttcacacatttcaaaatcaacttaagtaagatgcctgtggacacataagccgacaaaataacacaatcagaaaacatggcaaaaatatccctcctctagatttttcctgaaaaaatagctttctttttctatca

SEQ ID NO: 5714 - DNA, 201 bp, Bos taurus
aatatatactacatgggtcctaatttgagtataaatagctcctaatgttcaaactgcttttatcactattaagtaatttgttttacatttattggattgagtaacagcttcattggctgtgactttgaagacccatgaaagttaaaccctggcatgtactctgacactgactgtggcaataaagaaattaagaagacctca

SEQ ID NO: 5715 - DNA, 201 bp, Bos taurus
ataccaggtggtgagtgtagacacggaggaccttgtcagcctaaggaccaggtggcaccccaaaaggatgcagcaaggaggtactgaaactcaggcagccaggccctgggggaggactcacgtagacaggaagagacagccctgagggcctggggtgcagctggggtggaccacaaggaccatggtcagggttcttgggag

SEQ ID NO: 5716 - DNA, 201 bp, Bos taurus
tcaatgtgttgttctcctgatgacgaatgacttagtcatcagcaaaagtaacagtggcacatatattgtggttatttaggtcacacgacatgcaaaaaaacgccacttcattaggacagaaattatgttgtgggttttaagtgctcagaaataagagtgagacgaattgatttctctgaagcaaaccctgggaggagaaac

SEQ ID NO: 5717 - DNA, 201 bp, Bos taurus
tcaacttcacctgtaataaatattataaatcagtagcaaggctttctcgttactacagtctacatgccattgatacatacatgtcaaaaatgttaagaaacgtgttacctaacattgcaaaacgacaaaccctattctccaataactttatcctaggcaacacactcaactttaaggcctactaatgttgtcattaacagg

SEQ ID NO: 5718 - DNA, 201 bp, Bos taurus
aggcctggcgtgctgcaattcatggggtcgcaacgagtcagacacgactgagtgactgaactgaactgaactgaggcagttgtatggatacattgacctcacaggtcacctggctatcattaggagttaatctaagatcaaagagaccacgagtgttttaagcccaaaggcagagctgacctgtttggttgtatctggaaa

SEQ ID NO: 5719 - DNA, 201 bp, Bos taurus
ttgatattttcatttaaatgtaataatccctgttatcactctctatttttatatcatcctagaaaataacatctttggaatcaggctcatgggctaattggatttttgaatacatatcagcttgatttgtttttttatgtatcacctaaaattaccttgtatatctagtgctgtattcatgtcacccattttaagaacaat

SEQ ID NO: 5720 - DNA, 201 bp, Bos taurus
atgtataattcttagaatcaaaccggaataacagtcggtagctgtcatttcatgcttcgctttgactttctctgttgggaagatcagagtacactctttcaatgtgtagccccgcgcccagcagagcagggtcaagaacaataagcagtatgcactcttgttggcaacacgcctgtcagtattagcaagaggaatttagcc

SEQ ID NO: 5721 - DNA, 201 bp, Bos taurus
acagtgaaagcctgagaagacttagatgcctaaaatgttcagaatgggattttggaatatatagtataaaatgtatagctaaaattttagttgaaaatattaaaaggaagaaaacagaacaaatcctcccaaactatgaagaatattattcaagtgatcaaatatttcttgaaattacaatacaatttctgcaattacata

SEQ ID NO: 5722 - DNA, 201 bp, Bos taurus
tttacatacccacaaagaaaagtaaattgtaatcccagtaaatgcttagtgtcttccagcagtgtttacgaaaggccgtcagtgaatcgtgttactgttgggctgcctttgctgctattgcaggaactatacttatgatcattgcatggtctgacgttttacctatgtcagaagagaagtggaaaaaggcaaccataattc

SEQ ID NO: 5723 - DNA, 201 bp, Bos taurus
gctgacttaatctagagtcagcaagcctgtgaacaaatgtataccaatgctgtggtgaatcaggggttccagagtagacagtgaggagaatagaccacagcagtctgtcaccgggccgtgcgtatgacgtgtccagcttgctgagtgctggaggcaatagccgtgtctgcttgtgtgctttgcctgatgagctacaatgtg

SEQ ID NO: 5724 - DNA, 201 bp, Bos taurus
agggcctacatctaatgacatgggtgtttgcgagagacacacagggaaggctttctactagcaaggagagaagtttatacggaggtaggtgagaggggactgacgtggccgtaagcgaaggaagccaagggctgctgagagttactaaaagctggaagagggacgaggagataactccccagagcttctagattcagactt

SEQ ID NO: 5725 - DNA, 201 bp, Bos taurus
aacaaaacagagtgtggttattaataaattaggtaatccttggagaagtagatcaaccagttctctactcaccttcaccttactttacaatattttggggaaaaaaagagagacacaaaattaggaaaatatctaagtgatttatttcctgatttcagtttggggaagaacttgttaagctgaaaaggaaatggaaataat

SEQ ID NO: 5726 - DNA, 201 bp, Bos taurus
gtctaacacaggcacttctgccctagtggagaacagtgctggggcaaatggaactgcagtggacacccagggcaggccaggttcatgctggaacagtccctgcaagccagtcagaacccgggctgtttccagtctactgcatctgtgtgctcactgtcaacagctatcctcactttgttcagaggcaggcccagatccaag

SEQ ID NO: 5727 - DNA, 201 bp, Bos taurus
tataccatatggacagaggctttataatagtctctactgagggtttattttgtgaagactcctttccttcaggtagaagagaagtgttcaaattaatcccgtcagtccagggcccaaacaattgttagagctagttgtaatttctagaatcacttcaactgaactgttagaattagaaagtatcttaaaaggcatgtgatt

SEQ ID NO: 5728 - DNA, 201 bp, Bos taurus
tcactataggaaagattaagaatacagaagagaaatgtttcgattgtacatgggcacatttgtatatgtgcataggaggtagggcttcccaggtggtactagtggcaaagaatccacccgtggattcaggagacgtaggaggtgcaggttagatccctgagtccatggaggactcatccctgccatgataattatacccaa

SEQ ID NO: 5729 - DNA, 201 bp, Bos taurus
gcaaacttgagtaatttgtattcatggggtgatcttcagagctctttgatcataccaagcaaaacatggtatgaactttagtaagtgaactctggttattcgtgtgaaaattaaggatgctatcttttatgtaactattgtaattttcataattttcttcagctatattaagtctattattgtttttagtgcaatagcttt

SEQ ID NO: 5730 - DNA, 201 bp, Bos taurus
atggctatcattgaagagcctacagataacaaatgctggagaggatgtagagaaaaaggaaccctcctacgctgttggcagaaatgtaaattagcgcagccgctatagaaaactgtatactcctaagtcgcttcatttgtgtccaactctgtgcgaccccatagaaagcacagcccaacaggctcctctgtccctgggatt

SEQ ID NO: 5731 - DNA, 201 bp, Bos taurus
cacagagtggacttgctggatcactgttgttgttcagtcactcagacgtgtccaactccttgcaaccccatggattgcagtcaggctttcatccttcactgtctccaggagtttgcacaaaccctcaacatgtccattgagtcagtgatgccatccaaccatctcatcctctgtcgtccccttcccctcctgctctcaata

SEQ ID NO: 5732 - DNA, 201 bp, Bos taurus
gcttgaacattttaaactcccctctgcatactcatagtgacacagtcttgaaaacctcagctcaaggcacgacaaactttaaagcgcttcccagtttttacagggtgtcactctctatccaactctaaaagatctaacgacacagaaatgcttccacatcaagatgtttcacaagatactttataaatgaatctggattcc

SEQ ID NO: 5733 - DNA, 201 bp, Bos taurus
tggtcacattcatgtgggggctttaaaagcaatcctgatgcccaggctgtcattgttccgttgctgagctgtgtcctgctctttgtttcctcatggatcgcagtatgccaggatcccctacccttcaccatctcccagagttttctcagattccagttgtccgttgagtctgtgaggccatccaaccatctcatcctctgt

SEQ ID NO: 5734 - DNA, 201 bp, Bos taurus
catggctggcctcacctctgacctcctcgtgtgtatggatgcagtatggacacacgcacaccataaataccctctgtagtgctgtagtgtccagtggagcaccaagggtaatttccaggccaaaatgtatgaactactttgggcatcttctggtttcttcctgaagtactccctctcttgctaagtgttcactgatcccct

SEQ ID NO: 5735 - DNA, 201 bp, Bos taurus
gatgatgtggggaataacgaggaaatcatccaggatagagagaaaaagacaagtgtatgatgagaagtccttggggaataatgcccacattacacactcacattttgagtatgctttcccactgccttgcagcctccattgtttctgctgagaagttagttattaatcttcttggagttctcttgtacatggtgattcatt

SEQ ID NO: 5736 - DNA, 201 bp, Bos taurus
tgacccagggattcaacctgcagctcctgcagctcctgcattgcaggcagattcttaccccgagccagcaaggaagcctcctatgttgctatagattcggtgtatccatgggaggtggtgagtttaggattcatctacattgctgtcttaagctggaactttttgtttccaggaagatggaagaaatgcctaacaaaaata

SEQ ID NO: 5737 - DNA, 201 bp, Bos taurus
aggtggggaccacgcctcaccttagttttgggatcactgctgtagggagtccctatagggctccatcccagaacagcttccaaagactctcttggcccagcgagcagagcctcgtgattcaaagctccagggacactttgcacgtggttttgtggggagcagaaggactcatgagtgggaggcgaggacaccacctggagg

SEQ ID NO: 5738 - DNA, 201 bp, Bos taurus
cagggaggccagctcagagcgctaaggaggcaacacacccagaggcagggctcagaaacgccgccatgctgactttcccaggaaagagagcagtgacccacggccaaggtctgttcctttgcacagcagatcacaaatagtcaggaaaggtaacgaaagtatgtatgcatacatgctgacatcaaaaccaagcttcagggt

SEQ ID NO: 5739 - DNA, 201 bp, Bos taurus
aaaatcagtaggatgggctccctccctatccgcaaggtgtttgatgagagcccaggaaaagtgctgatgaagcctccttagacaccatgtctggcacacatttgtggaaatacaagtataatgattttcattacgctattagtagactgaattttagttatgaggaaaaattcttgctattttattttaaaatgcttcaaa

SEQ ID NO: 5740 - DNA, 201 bp, Bos taurus
gctggttgctggggtggtggtcctggccagtagggcacaagaaaaggtaacagggacgggaggagtgaaaaatgcgttcaataaactcatccgacagactgtgtagggtctactctgtaaggccctggagataacacatttcacccagagtcccgtagcaggaataaaaggttcaagaaagcgatgacatagttaatccct

SEQ ID NO: 5741 - DNA, 201 bp, Bos taurus
gagaagtgctcaggaggtggaagacagcgtctgctaaagagaagggaaaattcgaagacgtggcaaaggcagcccaggccggttacaagagaaaagaaaacgtataccctgctaaagtgggagcggaaaagaagttcaggatcccggtgcacccaagaggcctccttcagccttttttttttttgttccgagcatcatcca

SEQ ID NO: 5742 - DNA, 201 bp, Bos taurus
tgaacatgtatttttctggagatctcagcagagtactgctcagagcatggccaatgagatgttccaggcaacttgcagataatctctaaccagctgaccccaaactggagggtaacccaggccttattttgctgtcccccatagaatcccagggacagaaaaacctggcaagatacagtccatagggttgcaaagagtcag

SEQ ID NO: 5743 - DNA, 201 bp, Bos taurus
gcctctggaggctggccggccactcacgtcctggtgagcaggagacacgtgctggagaggccgtcaccacgtggtgagcggcacagactcactgctgccacggtcccgatggaccagaccggcagcgggtcacacggggctggaataaaggcagtctcgttaccggtctgggctcagggctcgatgtgcccaggaattctg

SEQ ID NO: 5744 - DNA, 201 bp, Bos taurus
tactgactgaaaatctgactacaatacagaacccctttctcgattatttcctaatttctttcaggtccgggctcagtcatttcagacgagtaggttgtttcgtgcacttgtttgttagattttacaacactggatgcacaaaagtaggtcgagggagaattccagaaaattatctcactagactcagatttatggaatctt

SEQ ID NO: 5745 - DNA, 201 bp, Bos taurus
gtgctgcctcttggtgacggagagtatgtggggaggacatgaggactctccccttcgagacgcactgtaaaaggcaggattctacttgcacctaaaagacgcttcctccttggaaggaaagttatgaccaacctagacagcatattcaaaagcagagacattactttgccaacaaaggttcatctagtcaaggctatggtt

SEQ ID NO: 5746 - DNA, 201 bp, Bos taurus
aatggaaaaggcaatggcctagaaaaagaacaagctttcagaaacactcaacaccttggaaactccattccttagctacagttcagtacagcaacacggggttttatgtgggccaagaccagtcatcaagggaggacagtctctcctctgtctagttcccacatataatccaaactgactataaccttagactatatgcta

SEQ ID NO: 5747 - DNA, 201 bp, Bos taurus
gccgacgagaaaagcccattactcatcctggaaagatcgctgacatgagaaaatgtgggtccagtgttgctagatctgcaactttcccaaaagaaggcccaaattcagatttttatgtgaacgacccaattttttaaagttggcaacttactcaattttttaaatattgtatgggccaaacaaaacagctttgtggactgg

SEQ ID NO: 5748 - DNA, 201 bp, Bos taurus
aaaataagcagaaagccatctgcagttaaattattcatcttaaactgtacacattacttagaaacactataacaggatctcactcagaagtaatgtgtatgaatcattacgaaaaataattgaataaagacacacataatattaagcaaacacagacggtcaattttatacttatttctaataaaagcattcgaccataga

SEQ ID NO: 5749 - DNA, 201 bp, Bos taurus
atttcccaaaaactttctaaaatctattcataatatattactagtttcttgggtaactccgaaatctatactagttcataactctacaaagtacaagatgctaaaaataggccaaataaatataacacatatatatcaaatatgctgaccctaagccttaggatagaaaccattttcaaaatcataaaactttaagacatc

SEQ ID NO: 5750 - DNA, 201 bp, Bos taurus
tacattttatattttaaatacattaaataacagtataaccctggaatttgacattcctgaaattttatacagagatttctgatattttctcacttgttccccaccactttcttgtgtataacatgttcctttgtaagttttcagtggagacgtgaaagtttgaaggaaactgttacaaaagagtaaaggattaaaaaataa

SEQ ID NO: 5751 - DNA, 201 bp, Bos taurus
ttgtggcccaatgtgtaacaagccaaaatgctgagatgctaggattttcagcagagggttaattcacaaggcagacaggcaaggaaacagaaaatcaagtattagaaccaccaccccgaaggccagagtcttgggtatttatgggataaagaataaagcagcatgcggtctgaggcctgaggagtgtggggagcgcgggga

SEQ ID NO: 5752 - DNA, 201 bp, Bos taurus
ttgtacactttgtgttgaaattcatgggaaagcttgtcctctgtaaatgactctcagatatgaatgtgtctgaattcacctccaggccttacacatgccttcacttgtccaccggattggtggtgaggaataggaaatgaggagggaatggtttaaggcccgaatggtcgtatttgaaaggtacctcagattatcaccatt

SEQ ID NO: 5753 - DNA, 201 bp, Bos taurus
cagcatctgtgacaagacagctgtgagagagtgagcctggaatgcagacgtccgcgttgaacagctgagacaagcagtgtgatgcagagagagcgtctgattggaaccaggacaccttcaccctggctggctgctgcgacaccctgcaccacagcgacctcacagggaaggacaggagaggctctgagagggaggcttccg

SEQ ID NO: 5754 - DNA, 201 bp, Bos taurus
agccacccctcttaggctgtcacggagccccagcctgggcttctctgtgtcatgcggcaaattctcactggctggctgttttacagatagcagtgtgtatgtgtcatcgttactctctcaaatcggaccaaaatttattcagctattcccctgttgatgaacaattaaatactttctagttttataaacactgtagtacaa

SEQ ID NO: 5755 - DNA, 201 bp, Bos taurus
taaaggtgtaaagtccttgggagggcagaaaggcaggaagtacaagtagagtggtcatccttggtgggagagagacagctccatgtgtccacatggggacaggattagaatgggaggggaaggaatatgtttgtgggcgtgaaaagggatgctgaaggggtttctgccttgtagtttctttctaaagaggcaggggagggt

SEQ ID NO: 5756 - DNA, 201 bp, Bos taurus
cctacataaagaatgctattttggtctcagtataatttctgtttatagtacctcacgcctctctgcatttgtttccctcttactcatgagaatatacgtgtacatcatatgtcagagtagaggacgtggcgaccagggtaatttctctcttattcccagaggcacatgaaactagacagcctgagttagagaaattgactt

SEQ ID NO: 5757 - DNA, 201 bp, Bos taurus
aaatgcttgacctacacttagagagatggatacccatgaaatacgggtttttacccagttttctttgctgatagatgttgacaaacagtgtaatactgccaactatagatatcggctctagtggaactgtacttttagctttggtagaagcactgactgctcccgtttcctcactgctgtaaaagttgctcagtcgtgtcc

SEQ ID NO: 5758 - DNA, 201 bp, Bos taurus
tcagctaggggccgggcaattctgagaggacactcgttcctctcactcaaataaaaattacagttgctaaaggaactgagcccaacctacctaagtcttgttaattacttggtaagtcctgcagtctcattccagactttctgggttcctttagcccctagaagacggggctaaaggacacacttagaagcttccagaagg

SEQ ID NO: 5759 - DNA, 201 bp, Bos taurus
aaagggggttttatataacatacatgtattatttatttataaaattaattgcattatggtcagagaaaatggtctgcaggatactgattcttcgaaatgtgttaatctgtgctttgcagtctatagtacacgttcactttttgtgtgtttttgtattccacagcatgcagtgttcattaaaccatgtttaaatgagttgct

SEQ ID NO: 5760 - DNA, 201 bp, Bos taurus
agataaggatactgcaagattaaattcagtggctcaagattatcaagaaggatccaggctctttccattgtcactctgccattcacagtgaagtggattcgtcctgtcataagctaggaggtggggttttgccagtggctcaacggtaaagaactcgcctgccgacagagtaaacataaaagacgtgagctcaatccctgg

SEQ ID NO: 5761 - DNA, 201 bp, Bos taurus
tgagttaggtctgtcagttaaacacacttacacaagatttagaaaacacaagggaagttgaggtaagactcttgacttaggactgtatttctcttacaattaggttaatggaaacattcttctagagcaatgctccatagctcagtactcacctcccagcctcctggaagacaagaggcggtttacggcagctgtgagggc

SEQ ID NO: 5762 - DNA, 201 bp, Bos taurus
tgaagttcacggtgtatgtctgcactgtggagaaggagggacagacacacttacctagttcctgctgctttcatacgttacacggaaatggacgtgtcttactgccaacagatactcacttcttccccttgtatcactgagacatggtgttctttgatgcttaagaatttagatgtattaggtgtataccttggtggtttt

SEQ ID NO: 5763 - DNA, 201 bp, Bos taurus
gtactgaactcagcaatactcagcacagggactgtgcggccagtcacaggtctgtgactgcacgtggcaggaggcgccctcctctgtccgttctgtgttgcttcctaaagcagccggccatcgcgtggtgactgcacatgcgtgtgttctgtgcacccgtttatctccactgcctccccacatcttatctgaactcttgtt

SEQ ID NO: 5764 - DNA, 201 bp, Bos taurus
ggtataatctttaaccagaatttgcaatctgtgtgatcaaaatgttgtacctttcctagtatgcatttactttttgcatcattttgagagttcgtggaacaaaaagcataaaatgtattgactagtgccgagctcatgacaagttggtcataacaagtaggggtagttatttatctcctgctttatgaatgaaacacagtg

SEQ ID NO: 5765 - DNA, 201 bp, Bos taurus
taatataagatatctaataaaagatcaatcttaccatgtctgtggtcctctagagcagttcttaaatctgattttgtgagcaagatatagtaaatgtttccgtgggtagagtggaggagtaagggcttgttttgtcttctgtcatgagtgaattgctccttcttcagtccatttccgttgggttggccaaaaagttttttc

SEQ ID NO: 5766 - DNA, 201 bp, Bos taurus
aaaactctgggtctaaacaaacacacaaccaacatgtgtcgcaagtttagatgatggaactttaagatactgagctctgcttcaggtggcacaggccgaaataaaaccacagaagatgattctcaaacagcgaccgaaagtccagggtttaattgcacgggtgggaattgggtcaacatgactgctggacgcctggtgaga

SEQ ID NO: 5767 - DNA, 201 bp, Bos taurus
agcacccacagctccctgaccccccagctggcccccaagcccaggggaaaagcggaggaaggaggagtctgcaaacaggcacttagcaggcgtgcgccggacgccagccccaggcccgcggaggggaccgcgcctgtcgtggggggtgggcatcactagaggatccggccctcactccactccacccagttactgctcaag

SEQ ID NO: 5768 - DNA, 201 bp, Bos taurus
gccttggactggcaaccagggtgagagcaacggccttctccactcgtcagaggctggaggtccctgggctagagcgcccccattatgaacgctgcttgtccgagacggggccaccatatggtagagaaacaggccatttttatggagccatacgctttttgtgaacacaacagcagtctgtacaggagccccgatgaacat

SEQ ID NO: 5769 - DNA, 201 bp, Bos taurus
gttgggaggccacactttggctcaaaaatgaatacgatgtctgttgtctgggtggaaggatgagtttgcaaattgagggttgtgcatataccagctgtgttcttactaggtgtgtggccatggacaaattactaaattgattttctcatctgtaaatgagtataatattaatatctactttgcaaagttgaaatgagaatt

SEQ ID NO: 5770 - DNA, 201 bp, Bos taurus
agttcctcggagctgtggtcttgtccagctttctatttgtcactgggacctccacctgacagctgtcacattcagcttcttaagccactccgtcagggtcatctgtgatgggtggttaatgtcatatgacaaagcagagtccatgagagggcggtctggagcccagtccctttaccagccctgaagtcagcctgccaagca

SEQ ID NO: 5771 - DNA, 201 bp, Bos taurus
ccgcgcacaaaaccgaagacccggggcaaccaaacgtaaataagtaaataaatgaataaatgtttgaaatgctaaaaaaaaaaagagagtatctcaactccgtgagcattttccagatgtcactcttatcccactttggccatgttgatatttttccttaatggcctttccttctatgggctagatgatttgcatttttat

SEQ ID NO: 5772 - DNA, 201 bp, Bos taurus
caatttcataatgatgataaaccactgtcaatttacaacatcaacatacatcaagtgaactgattaaatctacacgctcattttatataatagaaatacagtcactgcaataaaacactgtcatgggattaatgtcttctactctgaaaatgtaagtcttgcctttggcttggtattttatgaagcagcaggagaccatta

SEQ ID NO: 5773 - DNA, 201 bp, Bos taurus
ccaccttgtttccaggggagcgctgctgagcatcacagaatctgcacgcccttctcactctgtctcgcttggctgtgctttgccttctgccctcctggattggtcatagacccagaggccagctccctcccagagcagcatgaagacagtgccgcagcctcctcagtggttccctacttgaaagctcaggtcagttttcct

SEQ ID NO: 5774 - DNA, 201 bp, Bos taurus
atagaagtttattttctcatggtgttgaaggctgagatgtctgagatcaaggtgccatctgactgtgtatacggtgagggccttcttcctggctttgggacggcttgctttctcactgtgtccgacccagcggagagtgagctctctggtgtctttcttataaggacactggttctgtcacatcagggccgcagcagcatg

SEQ ID NO: 5775 - DNA, 201 bp, Bos taurus
ccgtgcctcagaaggcagagaggttgaggacgtgagaagcctttttcctgccaacaagaaatgggggacacagacaggctttgtacccaggagggtcccacagcgtcctgtctgggtttagcgtgagggaaaagggaggacacgtaaagcatgtccctttggagctagttaagagattaaagacgtttaatttgtaaaaga

SEQ ID NO: 5776 - DNA, 201 bp, Bos taurus
gtcgtattacgtataacccagtacctaattgtcagatctcccatcaactctttatgtatcagaggcttgattaaaaactgtgtttaatttttttcccaccactctcaagatataatgtatatacagctcttttaagtttaaagtgtataacacaatatattacatatatcatgaaataattaccagaatatgtttagttag

SEQ ID NO: 5777 - DNA, 201 bp, Bos taurus
aagttgtgctttgactcaccaatacttgtgtctccttgtctatgctttccatgcatagtgccccaccgaaggaaaaaaaggccacaatgcgaccccagttcaccccgtcctggaggagttcatacatcatctgttcaaagctctgatatgctgtccccggggtgatgtggagctgggatgtctggtcgctgaatgcctgtt

SEQ ID NO: 5778 - DNA, 201 bp, Bos taurus
ggaaacactgtgtaagacttctagaaagtctccttaaaaaaatagaatgtgatggcctgtggtccagctgctatcttgggccataatgcaagatgaaaacgaagacctgagtagcaagaatgtaggagccagagttcttgatgtccaaagtgaaagtgaaactcactcagtcatgtttgactctttgtgatcccaaggaat

SEQ ID NO: 5779 - DNA, 201 bp, Bos taurus
gaccaccacgggttaacatttgcagacctggatagtggctgaaacattctttgctcttctcttgtttgcacttcctattggccccacagacacccagctctgtgggtctgtgtctggctggaaatgactcacaattggggctctcaacagcatacagccaaggacagccacctcctgcccaagttcaggggtagtatcacc

SEQ ID NO: 5780 - DNA, 201 bp, Bos taurus
aaatattctgaacaaaacgtttttaatattgaaaggtaaaactattggcagaatctaaagaaagttcatgaggagtcagcaagcctgcattcggtgggggtgatggctatgagtctgataccctgtgtcaatgattagctgagattacttctccttttccctttaaaacctttcatggccaagcagaatcttcagagttag

SEQ ID NO: 5781 - DNA, 201 bp, Bos taurus
ataagcagtttcagaatgtatgtttctgggagaatatccagttccctaagctcctaactgcatagaaaggatttcttcactgaaaccctggatagtgtttcgggaatctttgatctcaaagaaattgatatgtatgcatttgtatgcatgcctttgtttgtgtgtattcctttagtatgcatttttcttgggagacagtca

SEQ ID NO: 5782 - DNA, 201 bp, Bos taurus
atcatttgacaaaactcaacatcctttcatgataaaaactctcaacaaagtaggtataatgggaacataataaaggccatatatgacagttctgttcagtcgctcagtcttgtctgactctttgcgaccccatggactgcagcacgccaggcctccttgtccatcaccaactcctggagtttacccaaacttgtgtccatt

SEQ ID NO: 5783 - DNA, 201 bp, Bos taurus
aggatgtagtttcctttattttctaagtaaaactgagctgtaacacagagctgtaacactgtctgagagctctgatgcactgagggccttaatgtccatcgcttcaaatttttgttgtgacgaggagattacattcccctgacaattggatagttgctgattgtttatcaggccctgaacaagacaataccatagtgcttc

SEQ ID NO: 5784 - DNA, 201 bp, Bos taurus
actcaagtggaggccaggaagaatcctagaaagaggaagctagagaaaactggggtgtgtaaagtcatcagtccagagagtaaaccgagtgagaagcctggactaaggccaaggtgaggacaactgagggatccagcaggaatgaagctgaaagggagaagcaaacaagacaggagacagtcaaacggctgagaagccaag

SEQ ID NO: 5785 - DNA, 201 bp, Bos taurus
gccagattgagagagtcatcaagaaaaaaaaggggggcgagcttcatgctgtcttggatcaaacgctattgttctgtctccggactgtggcctgtactcatggtgccttcagcccgttccaggaggctgggaggatgggcaaggatgtgaggactgtgttatctccagggcctctggctgggaaaccccacctattgccct

SEQ ID NO: 5786 - DNA, 201 bp, Bos taurus
gaaaaaagtgccatgctactggcttagagatgggggtgggcacatgacaggtattgaggaacctctacaagctggaaaagacaaggaaacaaatccccccaaaccccctgatgtaacacagccctgctaacaccttgactttagacttctgattttcagaattgcaagaaaacaaatttgtgcattttaatccaataagtt

SEQ ID NO: 5787 - DNA, 201 bp, Bos taurus
gacctggaggccacccgtagccttccagtttggggtccagctgcccacatgcccccctacttctctgggagcatagccccactctccaccagctgcctcccgaatgcccccggggcctcattggtccctgactccactggtctccctcaagttctcaactgtcacacatgtgtttctcttctccttttgatggttttctgg

SEQ ID NO: 5788 - DNA, 201 bp, Bos taurus
tgagttgtgttgtaatccagacatgagccaaaccttcctgctgccaagaggatcacactttaggggcttctggtgccaggcctgtagaggccaacaaccccggaggcatctgacaacccccttgcgttttctttcatgatcacctttgcttctgttctgcacacatgcatgctgctgctttctggcctcgtgggtgtaaaa

SEQ ID NO: 5789 - DNA, 201 bp, Bos taurus
ctcctttgacattccaccttgcttgtgtccagctgcgtggccttttccccgtacctcgaacatgcgggtcagcttcccacctcaaggcctctgtacaagctgttccctcagcctccccagagaatctcagggctcacccctcaccatcgttaactctgcttaaatgtcactttctccacaaggccacctctgaccactcca

SEQ ID NO: 5790 - DNA, 201 bp, Bos taurus
cggtacaactcagcgagaaagaggaaggatttgctgatggagatcatggagtcctgactgttgacggaccttccacacacacgtactgttcactccagaggtagacggcctggagtgtgggctctagagctaacagtttgtgctgttccttctgccctggcctgctctgtctccttggccaggttacctggcctctctgtg

SEQ ID NO: 5791 - DNA, 201 bp, Bos taurus
aggccccacgggtgctgatgaacagtccacattgaaagaccccgggacaaagatgcccgggaggaacctgctgtgagctgtcccacgggaaccgcagcctccccctcaccggggccttctgcagctcctgcttccactgagtcctgtggaagggctgaggctcaggaggctgtggccgggcttccgggatccgacgcaggg

SEQ ID NO: 5792 - DNA, 201 bp, Bos taurus
gcattcataataaaatttgagatgagaaatttgatcatttgagatggccatgggaatggattcaattatagctaaaaatctactaaatatctactacatatctatgtttttaaaaatgtgttataactgaatgtttctttgggtaaagcaactagattgtcctgtccacaggctgtgagcacagtgagaccagggcaaagt

SEQ ID NO: 5793 - DNA, 201 bp, Bos taurus
agagtaacctccaagaagggaggaagatgaaactgtcacctctgaacagatccactctgttaagcctgtgtctgtggatgaagcataaacagaggtccccatgctggtacacaagcctcactgcctaagaagcgacatattcaaatgtccgcgttaactatctctgtcaaaatttgtgtattgctcagtcaatcctaaagg

SEQ ID NO: 5794 - DNA, 201 bp, Bos taurus
tttatctgaaattcaaatttaactggatagcctgtatttctctctctggctaaatctggccttccttgtcacctaggtgggtctcccttagtccttccccttatctatggattctgtgtgccatgctgtcttcaacttggaggctctgacccttgccctcctgacccctttctgaggcccctagctctgtggcctggtgta

SEQ ID NO: 5795 - DNA, 201 bp, Bos taurus
aagggagcctgacctgctgcagtccatgggatcacgaacagctggacatgacttagcaactgaacaactgaggtgatatttttctgagtcgtctacccaatgccccatgtactgtcaggtttttccactccagaaggtggggacgcaaacgcttcctggccatctctttgctccagagattgttctacctgttccattcca

SEQ ID NO: 5796 - DNA, 201 bp, Bos taurus
tctccatgtctcacttattacagaaccccctccaggctctcagcccctctacgtggggcgtcctcagtgtctggccacacgggggcctgggtggaccagacggcacctgggcacactcatacgcactttctgtcacagagaaggaagcgtccagggccagttcgtccacaggaagcacaagctggcctcctgtctcccatt

SEQ ID NO: 5797 - DNA, 201 bp, Bos taurus
aggcctactctggccttgtgctgggtgtgcggcgtgaactaagcgttagctggagggtgctcggagtgaaatggcagcagcctgctgcacgtgcgggtcttagtctagaaggcctagctcgagggggagctctgagaagggagatcacagtcatttctaggaagagtaaaataaaacactgagccctgagccatgcagcac

SEQ ID NO: 5798 - DNA, 201 bp, Bos taurus
aatctaaaaaattgagccaataaaaatttaaaattgaatttaaaaattttaattgtatacaacaaaataaaaggataaaatcatggataacctacaataacaagtaattcaagaatgattttcatcaggtttagggaatgagtgagaggtccacaacgtaagtataaactttttctcagcatttcccgttttccacactat

SEQ ID NO: 5799 - DNA, 201 bp, Bos taurus
tttgtgaagtctcttatctacttttatatcctttagccacacttgacatttttctttagaaagaccccacacaagttcttgttacggttatcatctgttgcattagtcagggtccaatcagagaagcagagccagtggaggtgcatgttaaaaaatctgttgtaaaaaattggctaatggaatttgggaagccggtccaaa

SEQ ID NO: 5800 - DNA, 201 bp, Bos taurus
tgcagaagtgatgtaagcagcacagaggcctccccttagataagacgcattcttgataggtccctattcctcaggtgcggtgggaaatctcaacttcctgtggaatggagagggccggacacggtatgtcgtagatgctaacattgaaaactgacagccttgggacttccctggccgtccagtggtgaagactctgccttc

SEQ ID NO: 5801 - DNA, 201 bp, Bos taurus
gaacccttcattcccgtctccagggtaggaagcatctttgacaaccacacgaggacacgacattgtcatctggtttttcaaacattaaggccttgtcctcactctcaggtcattttgcaatatgatagtcctctttgtcttcagacaggtcttcctttgagaccccacactctccagggccctgcaggactgcgctcggcc

SEQ ID NO: 5802 - DNA, 201 bp, Bos taurus
aaccttttaaaactagctttgttgagatgtaattcatacaacacaaacttccccatttaaagtgtatgatccaagggacttccctggccatccagtggttcaagtgtcccaaataaagtgcagaacccaagggcaggaatcacttactgaagacctgccccccagccaggcgctgaggatgagccctgaggatgcggccac

SEQ ID NO: 5803 - DNA, 201 bp, Bos taurus
ccaatggaaagtgatgttctctgctggcataaccggatctgacgcctgcatcagacataacagcttgcgctcatgcttttccatagcagttttgctcttccgtctgtggccttacaaccagagcactggctttgcacccgtgttcttctcttgaccctgtgaaatctattagctcagcttgtcctttgtggcttcagtgga

SEQ ID NO: 5804 - DNA, 201 bp, Bos taurus
tgttttaaaatgtcccgttctgtctaaattgaaacattgtttccttattcaactgaaagtttccccacccctctttcacctaaggaagctgggcctactgcgttttgataaactcctggttcacattcctgggtgccgcccctcactctggctcctccaggtgggctggggagaggagagacaagggaagatgtggccacg

SEQ ID NO: 5805 - DNA, 201 bp, Bos taurus
tctaggtgggaaccccaaagcactctgcccaggggctctaatagaaggccctaggtccagcctctctctctgtcacaccagccttgacccctctacccccgccccaagcccctgtgcttctgtggcctcctcctcccggaccggtgatcaagaagcttctctatttcggtctccttgcgctcacctcagacaccccagggg

SEQ ID NO: 5806 - DNA, 201 bp, Bos taurus
agcctgaagatgactctgtcagtcccaaaacaggactgtctgctccagcgtggggtcattcctggatgtgactatatttggatgtccctctgcacaacagttcagctggtagagaatccacctgcaatgcaggagatcctggtttgatttctgggttgggaagatctactggagaagggataggctacccactccagtatt

SEQ ID NO: 5807 - DNA, 201 bp, Bos taurus
tggttagtatgtcattagactgggtatttttttatgcactctaaataaacatggggacaagagaaacaaccacagatttggcctgaagggctcctggatgcactgttggctagatttgggagcacagtaccattcaccatcacaaaagccccgcttggaccagagagacaggaggccacagcggggtttccaccgtcagtt

SEQ ID NO: 5808 - DNA, 201 bp, Bos taurus
tataaagaattatgtgctttgaaccagactacatattaatctcagatacaattcaaacatcaacatttattgtacagagggttaataatttcacagccaactggtatttgctgttgtcactgaggcattaaggtaatgctgaattactgtatttcatcactacactgatcttcattttggtatattcctaattcatgccag

SEQ ID NO: 5809 - DNA, 201 bp, Bos taurus
ggaatggtttttaagcctctcacttcagtgtatgccgtgtggagcttcacctcttttggcatttctcatatggtacagacacttgaggaatgctgcatatgagaaactcatggacaggagtgagaagagtctagcctgaggggcagaaaatggagaaagtaaatttcaagaacagctctagtaccagtcacagccaggtta

SEQ ID NO: 5810 - DNA, 201 bp, Bos taurus
gtattttcttccacttagtaatctctgcagaatttttgaagtattgatacgtatcaaaacagaatcaatttcctcaaggttcaatatttgattagtttcattaggtaatgatacattatcattaaaagatcctgttaatatcaatgtgttttattcagtccaatccagtgttctatgcagcacttcaaataaaaagcaata

SEQ ID NO: 5811 - DNA, 201 bp, Bos taurus
acctgttggtgagactggccaggaggtttgactccagagtgcatgctcttttcattattttactctaactcacatggcttgtagggtgttgctccaccctgccctgggccacacagatatctctaagtcctggcatctaatttaagtaacagagatttttaaatcttgcattgtctgaatctttttctggcaataaaaata

SEQ ID NO: 5812 - DNA, 201 bp, Bos taurus
ctgaatgtgctgcctaaaattaatgaaagtctttgtcacagcattgtggcaagaaagataaaaatctaacacatgaagttagtcaaaggttatctttagtgagtggcaggaaagtattaaaaaagtattatttctgtgagaacgccagcctttctttaatactgtgttcatatcagcaatttctgccctcggctgggtggc

SEQ ID NO: 5813 - DNA, 201 bp, Bos taurus
aatgaaaactctttgccttcaaattctcctgctctcttcttctgcattaattgatggaccccgccgctgccatcctgcatggccatgctccctgtggttcggtatcgattttctggaagagatgtattcaggaaactgctcctgaatctaattcttccattcagctttcctttctattagtttaaacagacaacaccgtct

SEQ ID NO: 5814 - DNA, 201 bp, Bos taurus
ttttcaccattagcttgtttttaatctggatacatgtgtttcttcaggacactggggtggctaggctttctcccaggtctgtaggagaacacaggccagtagatgaagggtttctccttcgaataacaggagctccactcttcacagtcattcagagaattcttgttgttgttcatcattgcttatattatgagatttcta

SEQ ID NO: 5815 - DNA, 201 bp, Bos taurus
ttgccttcttcatatattgttgctgttagaaagtctgccttcaacccaagtattgttctttgatgggttgttagactttctctctgaattacagagatccgcacagatatatctaggtatgaatacaggtttttctattcttcttgaattttatattcctgatctaaaaattatatttttatcagtttttgaacacctcat

SEQ ID NO: 5816 - DNA, 201 bp, Bos taurus
tgctatagtgtattggtctgaatacagtttttatttaaaaaacaagcaagcaatgtgtacaatatctcctctaaatgttaaaagaataattttcctcttgagaatatcagttacattcccagagcattgttaggtatgatgttttgatattttgatatattgatatttgatgtttttatatattgatatcctgaatatcaa

SEQ ID NO: 5817 - DNA, 201 bp, Bos taurus
cagaaatcagagatattttaagagcttaaaaagccaggctgacccacctttagacactgggtataattgaagacaatttcagcttccattaagagttctgttatatgcaggccctgtcaaaatctaggataagccttatgtcactgcagaaaaagcagcaattcatctgtatttgtttcaacttaacactggctggtggag

SEQ ID NO: 5818 - DNA, 201 bp, Bos taurus
tttaagagttttattatggtacgtctttaagtgcattcctgctgatttcaaaagtgatgaaaattgcctaattttcacttggctcgcttaatttccatgtcattcatttactcagtcaaaaatcctaatttttcttcttccatcttccttataccccacaatgtaacagtcatagtcctagggaaatggacaaggagaggt

SEQ ID NO: 5819 - DNA, 201 bp, Bos taurus
tctcagaccatagagagagccccaaagaatgcaagtgtctagggctgtcctcaatagaccttcacaccagcacatcacaggaatagtcacactcatttgctcttgtcccagacttagaagagataagattcattaaaacaaagactactccgtgttctaatgactactaaagcaaaatgagtctctccaaaacttattttg

SEQ ID NO: 5820 - DNA, 201 bp, Bos taurus
attggctgacttcccatcaaaaacttctcaacaaacttttgctgaaatggcagcaggcagagaccttagcagatggactgtggatccacatgcccatttgaggacgctcacaagagggaaacccatgtggcttttgccactcatttatcatttccacgcctgtagcagacccacggaaaaaaggtattctcagatgtcccc

SEQ ID NO: 5821 - DNA, 201 bp, Bos taurus
agagaaatgtaagataaaggtgcacctactggaggctgagaacctcagctggcgtatctgtgaggttcccagaactctgatcatcagcccattgtccttccgacaaaagaagtatgagtcattttttgaaaacccggcacatccaggaagggacttaaacacattcgtgtcaccatctcagcccataaacaagtgagacag

SEQ ID NO: 5822 - DNA, 201 bp, Bos taurus
tggtaaacctttcagatattagatagttaagaaagtagtaacataaatatgctttgattcagatttgtcaggggtacttgaactagtagaatatatttccgaaaaattattggatcctaacaccaaaaaactgaatatatagtcttaaatgttcttgaaaagatttattttctccattaattaatggctaattttttcata

SEQ ID NO: 5823 - DNA, 201 bp, Bos taurus
ctccttgaagtaaatccacaataaaaactggctaacaggaaaaagcccacagaagactcttacgtgaagcactgaaatgccagatctcaaacgctatatcgaagaaggaataagacagatgttaaaatcgtggaggacataatgatgaagagttatgtagcaatcaatttactgtgaacatgcaaatgggcactttaagtt

SEQ ID NO: 5824 - DNA, 201 bp, Bos taurus
cttccttcctgcatgaagaattcttggcttccatttcatcgtccggaacaatcacttagccaggcctcccctgaagaggtccaggggtctcaaactccacgccccccacaggacacaactgctggtgacacgggtcattcctgccacagctctcttatttacctgcacaggagaagtgtctctctcaatctaggctggtgg

SEQ ID NO: 5825 - DNA, 201 bp, Bos taurus
cttatatatggaagctaaaaaaaatttttaatgacagaaatgaactattatacagaaatagacctacaagacatagaaaaaatttatggctactgaaggcaaaaggagacagtttgggactgacatatacacattttactatgtataaaatagatcaacaacaaaggtctactgaatagcatggagaactagactcaatat

SEQ ID NO: 5826 - DNA, 201 bp, Bos taurus
ctgctaagccatcagggaagccgataggttcaagcatccgaaagagctgggaggcttacatatccctgtgatatataaaaagggggaacatccagagaaacgaaactgaatttctgtacagcaatctatgcattcacagtgacataaaattccacagtgactcaggatcagttcagttcagtcactcagtcatgtccgact

SEQ ID NO: 5827 - DNA, 201 bp, Bos taurus
gtgtggtcagggtccggtctgcattttcaccagaaaggtaaaccctgaatgtgtaaatactggtagttcaattctctgacatttgatacattaaaataaagaagtctgtttataaaaacacatctaggccttgagagcagatagacaaaagtaaggtgattgcacccagataaaaaaaacacaggctttccggccagaggg

SEQ ID NO: 5828 - DNA, 201 bp, Bos taurus
gtccccatgctctacagagcccccaccccattttgttcctgttccagctctgctgctggtcacaacgaaaaccttttccttctgggccagtgattctagattaggaactatttgtctccagggatacacctgaaaatgtcaggagactgttttagttgttacagttttttggtggggggaaagttacttgcatctagaggg

SEQ ID NO: 5829 - DNA, 201 bp, Bos taurus
actttggatccctccctcgtgaagaagcagaaatttattagcacctcagttgactcttactgtgtttggacttggcttacttctcttctgcaaaccatactatccatagtctgtccatggaccagtactggtccagtgcctattacgatctaggcttcacagcaggaggtgagtggtgggcaaatgaaagaagtttcatct

SEQ ID NO: 5830 - DNA, 201 bp, Bos taurus
gctctgctaacctctggggccacgcttgtctctgtgccagcactccattgaagccacacattccattataaccacacattccaccctgctgctaatggccgatgttgcaacagacctggcaacaaggatacctcatttaggtgtcatttgtttcctttaaaaattactatccaaggcccaatgctcacttcctgttttgaa

SEQ ID NO: 5831 - DNA, 201 bp, Bos taurus
ccaaagtcattcctatttttgtaatctccatttaaactcaagcctgtgctgggatattccacttaatggggatctatttttaatcttatatgaacttggcagtaactctcgtggactactcttgcaccatgtactggaacatgatgctaagcttagactgtgtattaatccagttgcttcctcatagatcttgtgccagca

SEQ ID NO: 5832 - DNA, 201 bp, Bos taurus
gcccttgtgctccctttcctcaggctggctgcaaagagcaccagcacacatggattgagtccagtgtggacctgcatctcaaccccatcaccacctttttattttttggccgaaccacgtggcatgtgggatcttagttccccaccagggattgaaactgtgtccgctacagtggaagcatggagtcttatccactggacc

SEQ ID NO: 5833 - DNA, 201 bp, Bos taurus
ggggtgggaaggaggtggagattggggggataggaaaagtctgcaacattcattctaaatcacggtttttatgaaacactcgggtcagttatattccccccgccccaaggaaatatcataaaataaccccaacattttctaagttaaatgctttcaattcaattctcctttaactatacatactacaaagcatttttagga

SEQ ID NO: 5834 - DNA, 201 bp, Bos taurus
tattactgttaaccaaaaaaggaaaattttgtcactatatgtgttaatgtttgggaaacaaaatcatgtaatagtcactggagatatatttgctgttcttttgttgttaaaatatttcctcactaaaatgattaaaaatgtgagcttctgatgaaaaaataaatgatgcagtttgcaaagggacaccaaattaacatctca

SEQ ID NO: 5835 - DNA, 201 bp, Bos taurus
gcaaacttactttttttttttaatgaaaaaatattgaagggaaaagtgcacctgacattcaggaatatatagaggataccagaccaatagggaagacaaattggggagaaatagctaaaatgaatacaataagtgtgtgtgagctatgaacaaaagagattaaataagcttcagaaatacaaagagttaaacaatgtctca

SEQ ID NO: 5836 - DNA, 201 bp, Bos taurus
gctttcacctttttcttggacttgaaatattataatttgtaagtagatgtcacattaggaaaactaaccagattaccctgaacagtttatataactatatctataataactccagagatgtcatttttgtcttgaagcaacacagaaaatgaaatgctagtttatttttgagaacctctaaagaaggagatgtctacattt

SEQ ID NO: 5837 - DNA, 201 bp, Bos taurus
gattgtgcctaaaaaggttgagtatgttattattttcatacactaaaatatgaaaactactaaactagactaaagaagaaaactaaggcaagatctataatgtgaacgtctgtccattcaaactggtcttcttttacgacagacatagaattcctagtaatgaattggagatgaatggaagactttgaaaaattgtcctgc

SEQ ID NO: 5838 - DNA, 201 bp, Bos taurus
gaaattattaaaatttgatggtttggaaatgaagcaatgaatgaaaatgtttttagggaaaaatccaaagtggagaaatgtttttacactcattgattcataggaattctgtggtctgggatgtcagaaatctaggagattcttacaactgacagtcattaattgaaatcactgtgaaattttactcacttataaacctat

SEQ ID NO: 5839 - DNA, 201 bp, Bos taurus
acggtccttggactctttaatcaatagaaattggtaagaggccagaccaggaattcaggcaaggctttactgggacacgagagaaaacaagtagtagattaccttgctcactctctgaaggggggccaagcttgtcccttaaaaggggtgagcctagggtcagatcagtgggtggtgggtggaaggggaggagtggcttag

SEQ ID NO: 5840 - DNA, 201 bp, Bos taurus
aagtcttgtccagtagaggagctcagctttcaacccagaaagactggccagtctcttaaccgtggacccagagttccaccaggttctgccaacagatggatggcttgaccatcttgccgggggcctgattctcctcccagtagcagacagtgatttttgaacatgagcaattcaaaaatcactttgtgaaagacagtcatg

SEQ ID NO: 5841 - DNA, 201 bp, Bos taurus
ctgtccctggagtgtgggagatgcttagtaagggcagctaatgtgatgatgactaccacatggggccaagcacccaatgtgcagtcctgggaactgtgtaggtgcttggggcccagaacaaactctctggatgatgtgtgtgtgtctgcacacctggcttccctgcttgcagcccatggagccagggctgggcaagcatga

SEQ ID NO: 5842 - DNA, 201 bp, Bos taurus
taggaggagatctctcactggacaccaaacctatgacatcttgatctcagacttcccagcctccagaactaagagaaattgacgtgtgtttctaagtcccccagcttatgttactttgttatagaagccaaatctaagacagagtcctttcctaaattccttatctgcatcccgtttcagtctccagatcaaggctaacac

SEQ ID NO: 5843 - DNA, 201 bp, Bos taurus
ccctgaatcagcctgtgacatttcctgaactttctgggtcaaaagatgagcttcttggaggtcaacagctgaaacaaatctcccagccccactccggcccgaggaccccagacccatatggaggacggagaacctgaccaaggggggtcatctgctaggtgaccagctgtctgtatccaccatgtcaaatggccaaaggct

SEQ ID NO: 5844 - DNA, 201 bp, Bos taurus
taggctggcaaatgtggccaagctgagcagctagccatgtgcctagaaagaggaggatagattctgacaggattaggcaagacaagaatccttgcccccaatggccaattaaacaataatcagctctcatctagttatttactctgcattgcaggcagattctttaccatatgagccaccaaggaagcccatttactctgc

SEQ ID NO: 5845 - DNA, 201 bp, Bos taurus
ttctttttagttgagttgttgtaaaagtgattgtcatttgcatttcttttagggtgtctgttccatttcagaagctagcttaggggtgggtggccagtacgtattttgatcccagtacaactcctttttctgaaatagaagctgccaccctgaatgttctctgcagtgtggaacgggttacactgaggactaagctcagaa

SEQ ID NO: 5846 - DNA, 201 bp, Bos taurus
tcggtggccaatccatgatctcacatgggaaacacaccgccgtgctggcctctgtgttcctgtctgagtcagcatgcatgtgggatgaccgctcggccacggtcgggttcccctctgccttatcccttcttggagccctaagtgatgtctcttgggataatggaaccgccagcttcagttaggccacttagtgatcacttt

SEQ ID NO: 5847 - DNA, 201 bp, Bos taurus
agactgggaggagcagtccttggaggtggtggggacactggaagacatggggacactgaaggacagagtgacagactgcagtgatcctgggggcatagcaatgctggggatatggtgattatgggggacatggtgatgctggggcgcatggccacactagggacatggtggcacagggggacacgatgacactgggaacac

SEQ ID NO: 5848 - DNA, 201 bp, Bos taurus
cgccatgaaagtagcctcacttcaattttctgagtggaatttccttctgggaccttcttgaatttttctgctcaaggttatcttcctaaacacccgggccagaggttttggagccatccctttgcttacccctcagcgggctaaaaggaaattcagaaagtcacagcagggttcatcagatggtcaggccatgggttcaca

SEQ ID NO: 5849 - DNA, 201 bp, Bos taurus
tgaaaggatgcagttcgcattaaaagatttctgctgcaattttaaatggatagtcctggatcctcagctcatgaaacgtgatgaaagccaagtcatgttctcctcaaagacaagtacactcactctgcacaccttagcacacaccttttccctactgaggagtggcacccatgcaaaagcttggaagaatgtttcatatca

SEQ ID NO: 5850 - DNA, 201 bp, Bos taurus
cagggcctgggtgtaggggtgaggggacaggagagaagactggttcccacggtgcctccaaaacaaaagtgcaagtaattttttttctgtaggaaaagatcaaagtacacacatggcccctacctactcacaggaatacagtacaggtggagagcacattctcccagcatgcccacgaggacactaaaaggtcctcttctc

SEQ ID NO: 5851 - DNA, 201 bp, Bos taurus
atgagatttgaggtcctatgggagggagacagacagtggagtggccctctaaagagggtaggagctgggggtaggagagagtcactttcacaggccacatcggcattccagacagccccaaatttgtcattcagtgcccatgtgatactgtccaccatgcattcacacaccacaaacacacagccacatagggggcaccca

SEQ ID NO: 5852 - DNA, 201 bp, Bos taurus
gcttgtcctgcagtttgagggccagtggcaggcgtgaattttctaaggcagacttcagcaggcagaaactgatatgtcccttctttcaaatgggatgacaatgaaaattcatctcttggccttccaggaaacacatatgttaatccagggtcaatagattgactacttttgactgaaattcaaacagcctttgtgattttt

SEQ ID NO: 5853 - DNA, 201 bp, Bos taurus
gtttgtcatatcttttcctgcatttctctaataattagcaaattgagcatcctcagagtttggtatggggggttctctaaccccacatggaccaagggatagctgtactctttcattaaatatgtaggaagagtcagatcttgattttaaaaggttaatggacttttttctcattattatgtaattattaaaagaaagctt

SEQ ID NO: 5854 - DNA, 201 bp, Bos taurus
aagactgtagagaatacataaaaacataagaaaacaaaggtatcggtaatcttcccacacagcaatgaacttcatgtatgtaactgtgtgattaatagccgtcacagtgtacatattgctttgtagcctcccccttttcacatcacattgtacagagttttcatgtgaattcaaggtctatattatgtacagggtgctttg

SEQ ID NO: 5855 - DNA, 201 bp, Bos taurus
gcagctggtattgcgcaagcgcatttgtgttaacgttcacggccggcaggtgggtcactgacgctcattgaagaggtgactttgagtctgacgtaagggcggggcagtggaaggatcgctctggcctctgaccccacagtctctgtggccctctgagcttttctcctccaggcgactgtggctgtcccgtgcccatgcttg

SEQ ID NO: 5856 - DNA, 201 bp, Bos taurus
catgtaataacttagtgacttgccccaaagttgccatagttaaatgtaaagaagttgaaaacaaatctctgaatttcctatccatagttgctatcttggtcagacacatggcctctgatactagatatgaaaaagatattctctttacctagtgcactcaattcaccagcaacataacaagacggaaatgaggtgcaaatt

SEQ ID NO: 5857 - DNA, 201 bp, Bos taurus
gccaaagatacactatatgaacatagaatggtggactctccctccattgtgcatctctatactgttttcttattctgtctacaaatatttattaattttatttttatcttttccctttaaacacaacaaactttactggttgctttatgaacactgtaattaagttaaacaaaacataagtgcaaaaagaagttaatttca

SEQ ID NO: 5858 - DNA, 201 bp, Bos taurus
tcaggcctgattggcaggagagtatttccaggggttgtactgaaaagaggacctttatggttcagaacatccactttttgagacaggtttgaaaccgtgcatggcctgctcctcaccgcagctctctgtcgggaggacgtcacgcctcccgcgcacgcttctgaaagccttggtccttgtgcttcggtccccacggtgacg

SEQ ID NO: 5859 - DNA, 201 bp, Bos taurus
tactgggccgcatagaaggtggactgggccaccatggcccggccggtgctgacgttgtacagtaagttctgggtgtccgacttccgagacaggctgatgatgacgtggttgtggccgtccgtccgccagtgcgggagggacaacagctgcttctccaggtcggcgggccgcagcacggcgggctcctgcatctcccctact

SEQ ID NO: 5860 - DNA, 201 bp, Bos taurus
gcctattgctgcacgtctcaaagatgaaaataaatgatgctttcaaagtgcctacggccccctcccgggtagtgatataagtgaaaaactaagcaactgttagtctcggaaaagctttttaagttaggaaaagtaattttaaaatcatgaaactaagtgacatgaagattatggaaaaacctacacagtttttagttctgg

SEQ ID NO: 5861 - DNA, 201 bp, Bos taurus
ccaaattgtttcaacacagtaaacacacacacacaaaattatgtaaatgtgaagcctgtgaacaccatgataatttacttcaacttactcttttttcctacgaccgtggaaaaaactggcccattcaaagcaagtctttttacttccaacccaaaaaatggaaggaataccaactatgagagccatcaggtatttcatcag

SEQ ID NO: 5862 - DNA, 201 bp, Bos taurus
aaacaccttctttatcaggctctcacactccaggccaccatccatcggcaccaaaacctccaacacaacatagcagaaagtagggacctatgctctgccccagggcctgctgaaatatttatttagccactcctaaaccttgttagatagcatcactgacacaatggacgtgaatctgagcaaactctgagagatagtgaa

SEQ ID NO: 5863 - DNA, 201 bp, Bos taurus
atgatcttagatttcctggagccctctgccccccacaggctcactggactttgtcaatgtctgctgaatctgtgtcatggctgtggggtgggcttggccctcctctgtctcggcaggagtggaaggaggagctgaagaacctgacaactctcctgcacaggacggaggggccgggtggagaagaggaggatgcgtgggaca

SEQ ID NO: 5864 - DNA, 201 bp, Bos taurus
aatggctcaggatgactctgcttgttctttgacacatggcatggggtttggggcctgagccttcacagcgcctgctccttcccttcttccttggcctccaaaacctccttccacagaaacagagtcttctattcctcacctgtcttcagtctccatccttcacctggcccgccacctatttgaaccattcaacttttgctc

SEQ ID NO: 5865 - DNA, 201 bp, Bos taurus
gctaaggggacttcttccagcctaccaacccacacaagcagatcgatgccaggtatattccaacagcacaaggatgggccaagtcagcacagttcttcttttctgaggtccaagaggttaaagcaagggaaggagggtgatgcagctgcccggggtttgtcactgatgagtacaaagtaggagaactccctagaggcccca

SEQ ID NO: 5866 - DNA, 201 bp, Bos taurus
taggcattttaataatggccaccctgaacccgtgtgaaggtggaacctcattgtagctttgattttcatttctctaatagtgctgtccatcatctttccatgtgcctgttggccacttgtattgatttggagaaatgtcggtctgtttaggtcttctgatcatttttctattgggtttgtttttgttattgttgagttgta

SEQ ID NO: 5867 - DNA, 201 bp, Bos taurus
acagactctgtttcccttcgtatatttcacactccagccaaagcaaatatctgctgttttctaccttgtgcctttgcttctattgttccctctgccctcagtgttatactcctgctcagtcatcacatgtctggatccaagctaaggctgagggttgacacagtagttttaatagtaagatctgctactactgctgctgct

SEQ ID NO: 5868 - DNA, 201 bp, Bos taurus
tgttcaggcctcctctgtacctcctcccatcttctctagctcctagcaggtaactctgatttttactaaagcctacctttacaactctaacttctcttatttcactcagggcctccagagatgtaaagtatcttcagttgttttccagtgctgaattaacagagttttaaaaatgcttgcagctcattagggttcattagg

SEQ ID NO: 5869 - DNA, 201 bp, Bos taurus
atcccagagccagtggccatatcccccagcacacggactggcccagagtgaggccatcacaaatggaaatgaattggagggacctgagtctgagtcgctagatccaatcacccctgtggcaatggccacctcggttcttgagccaattttttttgtttgaattatgcttctaacactgtaaccaagagtcctgtctaatat

SEQ ID NO: 5870 - DNA, 201 bp, Bos taurus
cttggaccccaaggccctgcatcatctggctcttacctacctttccagactcaccttggaatgtcctacctctggcatcttttctgctcatctagcaagcgggctttttcgcatctcagggcctttgcacttgttctctctgtccgggatctcttcctctaggtctatgcatggctgtctcctttgtgttcttccttagct

SEQ ID NO: 5871 - DNA, 201 bp, Bos taurus
gcctttaatgaatttggaaacagagttgaaactctaatgtcctttgatttctcttgcgatttgatttgtgatcataaagggcctcaaaaggtcaaacaccggactcagaattaggaaaagcagtgtgctttcaaaatacttacatcaaggtctgtggccaaagtgattcacacagtttagtctctgagggtaaaggaggtt

SEQ ID NO: 5872 - DNA, 201 bp, Bos taurus
agagtggtgcaggatgtaggccagtgactgaagaggctaatgaattgattcttccagaactggacagtaggcagtattctttattttacaattccctcccttccagtcttaattttggccgaggttttggaggcattttgtgactgatttgttccatggtgctaagaaagctcattaccaggtggaacatggatttcttgg

SEQ ID NO: 5873 - DNA, 201 bp, Bos taurus
acaaaaataagccttcagtaaatgtattggctcatcaaaccatttatgttggattttttcctggaatataataagaagttatgaagatgatttattgctcgtgtaattcaaattgttgtcattcaaactttaggttatgaatattgtttcattaattttagtgctaatgttgtctgaatagctgccatgttatgtttttga

SEQ ID NO: 5874 - DNA, 201 bp, Bos taurus
ttcttttcagttagtaaacatttaacagtaagtgcattttatgaaacatgcacaagaatcttgaatgaacttgatgaaatttcttccacatcaaccatttccacagagcttctgaatattctgggaatttataggcattcaacccatgcctgaatttattgtgtgttcaatgcgatttgtgtgaattcattaggggttttg

SEQ ID NO: 5875 - DNA, 201 bp, Bos taurus
cacagccacctccatttattatttgttgtctaagcctgctttcatgatacaaatggcaggattgcatagttgtgacaaagactatagtcctacaaagccagatgttgatatctaaccctttataacaaatagttcgctgattcataatctaagatagcactatctattagagtatagtgtgagtctttaagtgggtttatg

SEQ ID NO: 5876 - DNA, 201 bp, Bos taurus
tcagccagggactcctcggcatcttaaaggatgcccctaacaaatcctcatatagattctatggaaaagatatggttgtaattctaattcttaagtttgaacatgaggcctgttcttcttttcacagcatgtaaggaggttgctcatagttgaataaaataaaaatgaaataaaattatgtgtcatcttagttcgcaacgc

SEQ ID NO: 5877 - DNA, 201 bp, Bos taurus
cagctgtcatctttagttatataagagctcgtcttttgcctttgggtgtgaggcatgggttagttagcttgccactgctacatttgctgctggcgcaagctcatcctggggcaaaggccacaccttgatatttaagcaaattcaagcctttgactgtgtggatcacaataaactgtggaaaattctgaaagagatgggagt

SEQ ID NO: 5878 - DNA, 201 bp, Bos taurus
ttctcgtgattcaacaacaacctttcactctgaggtatgttttgtgactccagattccacaacaccatcatttgaccgctaacaaattataaaaaagacctcttaataggcctaaaaggaacacacaatagaacaacctagaaaggcagaatgtttacatctcaaagacacaaagaaatgtaagtttcccccaggaggtct

SEQ ID NO: 5879 - DNA, 201 bp, Bos taurus
taactttgttctacttgatttgggaagtatgttgatgtttcaagttattggtttaatggaaatacatttgatgttcatcatgactattcataagcacaagcgcaggaaaataaataagatctctggcctgggcagttgttgttgagacattattatcccatggctccaaacccatgtactctgaacttcactgaatgtgac

SEQ ID NO: 5880 - DNA, 201 bp, Bos taurus
ctgattagcccgttttccttagttatgaccagacaaaaaactcactgtaacaggctaccagtgaggtggacactcagctgttggcctggttcagtgtctgatggctttgctcatgctagtcttcttcttcatgcccgcactgggcagcacccattctgcctgcagtgactggccttttgagacaccttggaccattttgct

SEQ ID NO: 5881 - DNA, 201 bp, Bos taurus
agtgggtagcctttctcttctccaggggatgttcccaacccagggattgaacccagccctcctccattgcaggtggattctttaccagctgagccacaagggaagaccttagatctaattattacctgattatcgtgttatgcctagcttaagacacagcagtggtaaggaacagagaatttggagctcaacagactttgg

SEQ ID NO: 5882 - DNA, 201 bp, Bos taurus
atcttatatatcatgcttcttgggggaaaagtgtcagtgaaaagagattctataatgatggtgtctgggattggcacgtaggcttaccgactagtgaggcataaaatgtagtaaatgataagaaatgtgtcccatgatcgtcatcatcatcatcacgcagattcatggctgaaccctcaggcgtaaccataggacaggtta

SEQ ID NO: 5883 - DNA, 201 bp, Bos taurus
gctttgaaaattgctttgagttaatacagttgaccaaattattttgttgggctggacaaagagatgaatcagagtaaatgacagttcaggctagagcatgtttatattcataggactgatggatttgcatcttggaggtgtggtctctgtgagatttagaaatttgaatttttacaaagagttcttaaagcagaggagatt

SEQ ID NO: 5884 - DNA, 201 bp, Bos taurus
gataaatgcagagatgtaatttagaaacttatcagaagtcagctaaagatgaatctgcctttgaaagtaatggcagacaggcccattataaattttagaatagaaaaatgaaatgatgcaaaaagacttagtttttggaaaattaagttttactaaaacatatcatttaatatggtctaactggccttagaaattcaattt

SEQ ID NO: 5885 - DNA, 201 bp, Bos taurus
cctacaaaatttttactgataggatgtgggtttgactctcatgtgagattcagtggtgaaggagtcagttcttggtgaacacacgcacacagaatatttcctcactcaaggaaactcagaatatatctattgggtagaagtttctgtgtaacaaaatgattaacattcactccaagaactcatcagcaaatgcctgctgcc

SEQ ID NO: 5886 - DNA, 201 bp, Bos taurus
tatcaaaaattaaagttatattaaataagaagagtgatgaagattgcacacatatggaacattaaaatacattttttttaatatttgaagaaaaagggtggatctttaaaggaaatttctcaatttattcaattcaaggaagaatattttttccaaaatagatgtatttatttgaaagtaaaagagaaatagatgttataa

SEQ ID NO: 5887 - DNA, 201 bp, Bos taurus
ttatttacttatttggctttgctggatcttggttgtggcatgtgggatctggtttgctgaccaggcatcgaatgttgctcctttgcactggcagcatggactcttagccactggactaccagggaagtgaagtccctcttaactgattttattcattccctcacttgtcaaataagttttgaactcctattatgttttaag

SEQ ID NO: 5888 - DNA, 201 bp, Bos taurus
atattccaacatttttgtttttaaggaatcaaacgaaatttgaagagcattttacctgaagttaatattcatgtatctggtacagagaattttgttttccgcatggaaaaattcacgcctcagtttgtatattctttaagtgttagccttatgagagaggtggtcattgaaatccatccctgaaggtcttataaacaaact

SEQ ID NO: 5889 - DNA, 201 bp, Bos taurus
atggctcaggatcttctactttggctttttgctggtgaacagagaaactttttgttcatgtctacagatggcagcgctctaagcaaaactcagaattatgtaagccaaatagtggtgtatccatttgctactaaatataagcccacgattcaataaccagtcagagctgaccatgaaaagtaacattaaatcagaaccaga

SEQ ID NO: 5890 - DNA, 201 bp, Bos taurus
tcaactcttccaccatcttggacctagctggttctaaccagtttgtcatgtcctatggccatgtcagtcttttacaggttgtgccctgtccccttccctcttgtttaaaaagcatatgcagtccagcaaaagactccaggggccaagtgtagctaggaaagagcaggggctgccagtccaaagagcaacgaggacagatga

SEQ ID NO: 5891 - DNA, 201 bp, Bos taurus
tttctgggggcccggcagcccactgggtaaactataaaatcttcgctgctaactccttacactaactttacggagcccgtttttgagcaaaggggatagaacaagaaggccccgcccctcctctcgccggcctcctgcgtttacgtaatcgtatttcgaaaacgccaagacgtacctacggcgtcccacgaggaaatgcta

SEQ ID NO: 5892 - DNA, 201 bp, Bos taurus
cattttatgaaacgaagtaagctgactcagagagactagacacagctaacgtcagtctttcagacttcaaagcccattctcttgattactatgaaccttgtctctctgtacttcatctttcagataattctggcttctctctgttgcctagaagagcttggaagtgagattcatgagtagccacacccaaattcctcagat

SEQ ID NO: 5893 - DNA, 201 bp, Bos taurus
caccctcctgttcctagggctccatggatattacccatgaaatgattcaactaccaaacacagaagaagcatttgtcatgagaggagtggatagtgggagcatttttttttaatagtaaatcattagattcagcaactactaaaccatggaaattaaagacaactcatccaaaaggcaagcctcgtttcacacttccagga

SEQ ID NO: 5894 - DNA, 201 bp, Bos taurus
tccatagggtcacaaagagtcacacctgagcttaccatacatatcaggcagttacctgttgactttacccacttctcacaggccagcattagagtaattttgttgctaatagcttcaattccttgccccaccccgccctgagagagaaggaacacacacttgattccccagcctggcccccattttcccctgcagcacagt

SEQ ID NO: 5895 - DNA, 201 bp, Bos taurus
caagccagcccaagctgccagaggccatataatcacttagaagacaaagagaggactttataaatgagtggtttggaggattttcagatctctcctctgagcccttctgctggtgggaaatggccgatgctaagctagttcatcaagtcaacccgaaaccttccatagccactctggtggcaaagaccccaaatattctcc

SEQ ID NO: 5896 - DNA, 201 bp, Bos taurus
aggctttttatcctccagttatacgaagaggcaatcatatatcatgttatttagatggtccatctttcccacatgatatttttctggccttcattcttggcctcctagtgaactcaaggtcagaataaaaatgatagctgtcatgacttggtaaaacttgttatcagcagaaaaataggaactttaaaaggtagtgctgta

SEQ ID NO: 5897 - DNA, 201 bp, Bos taurus
atttgtgtcttgcccctagatgtgggcctgttctgtgatgagattctttgaggaccagtcaaatataatcatttctcatcttgaaagctccaatattaagggtggccctgaaaaattcatcaggggaataaagttttacttgtcacttctgcttccctgcaggcttttgggtaaataatggtgaatgtataggagctctga

SEQ ID NO: 5898 - DNA, 201 bp, Bos taurus
ctcctcccctggcatgcgaaggcttgcatggattcagtttttgagccttcctctctcctgccggcctcagcccatcacccaggtgggcgcacggcctccctctctccctcgacctgaatcttgagtggagatatctcatgatgcaaacagcctgcggctcatttgtcctgatagcggagccctgaggacatggcccgtttg

SEQ ID NO: 5899 - DNA, 201 bp, Bos taurus
aaatcctccagcagttattttctgaaggttatgaggagccatttggcacgctcagtgaggaggcggttgacagcaacctgggttgcttcctctaccgtggtgctgtttgcctctcacgttgacccaggcctcatgtctggctgtttgctgtgaccccttctctgttgatcaccccttgaaccttccagtgtcttaagcctg

SEQ ID NO: 5900 - DNA, 201 bp, Bos taurus
gatgggtggtcactgctcccttaacttgaccgtgggagagctcaactgcactgcccggataccataactgctcatgcctaagtgtcatacagccttcagtgcattgtattcaacttttaagtataacatatctcaccattttttaatggattgggaaagtgaggtttggttaatagaaagagaattgatgactgtaattct

SEQ ID NO: 5901 - DNA, 201 bp, Bos taurus
gaatggagaattcagtccttccaaaatagcacttactagagcaaaagattgcaaaatacttgaccatgtgcaagaacatagttcctttacttctctgttcgagtgcaaccaagccttcttcaccttctttgtgttattatctcagcaggatctctaatgagggtctagtttactgacagtcctcactaaactccaaatgtg

SEQ ID NO: 5902 - DNA, 201 bp, Bos taurus
gctgaatatgtacatttgggcatcaatacatagagagtcaaagaaatctcatgggagtaaatatagacagaaaaatattgggccctgaactcctaaatatgtggatatcacctaaagatgctgacgccagaaaagaaaacttagaaggagtagcttgtgggatagaacaaaattcaggagcatgagacttcgtggatgcca

SEQ ID NO: 5903 - DNA, 201 bp, Bos taurus
caactggatagaagaccttatctggagttgagttcattgaatattaagcagtacttatagagggaaaaaaaagtgctacatcaaattctgtagattctgataaacattatttgcttattatacctgtctgtcatgtttttgtttatatactggggtttatcaacaaaaattggactcagatattttgtcaagagggaagac

SEQ ID NO: 5904 - DNA, 201 bp, Bos taurus
gacatcccaagaaggctatatgttattgataaggtatcagctatgagaaaaggagtacattcagctcttatatcagctcctatattagccttgactcctatttacttattcattcaatgcacaatcattgagcccctgttcttggctagacactaaatcttaatttattttcacttaataacatgtgaagttcaagagtag

SEQ ID NO: 5905 - DNA, 201 bp, Bos taurus
ttcaaaagtaacataaaaggtgatgataccagtagaaatcaactttaagatcaaatttatctaaaaaatcatcatactaattctaaacattttaaatagcggtgtatctaaatataagtagaatctagagaaaacagcacagtaacatagattcagttcaaaaacatccaatattgtgtgaagactaggcagtcttaatat

SEQ ID NO: 5906 - DNA, 201 bp, Bos taurus
tgtagtgtttgtcatatgtttatttgtatttaactccttaataaactacttagttgacaattcaatgtatagattttgtttcttcctcaaccaagtttatcgttcttcatatcaagttgtctactaatgaatatcagttttaagaaccaaaggtacgtctgttctgtgttaattatcaacttcaatgcatatgaataaata

SEQ ID NO: 5907 - DNA, 201 bp, Bos taurus
ccactcctcttctactccattctcattactcttttagaaaaccttggttaacaaggatatatctttcattattttatcaaaacctaattggttataagcacacagatacacacacaaacatataaatacatttatacacataattgcttgttattaagaattatacacagttctgcatattgattttcatagttacatatt

SEQ ID NO: 5908 - DNA, 201 bp, Bos taurus
taaatgaagaaagggttcaaaaatggaaaaaaaaaaaaaacatataaataatccattaacaaagccagagaaagcagcttttaaaggagtatggccaatgtctcagtctaattttgcagcagttaagatagcagtaagatagaagcagttaagattgaagagctttagagccacttgggctgtaagcatcatggcctgaat

SEQ ID NO: 5909 - DNA, 201 bp, Bos taurus
tagtcttcccaagatcctgctacagaacgtattccatccctggcttaggaaaagaagcctggtaaatgtataccattcatttttcaacaaaatatgtattatgtatctactagctaccaggtacttataggcaccgtgatagaaaagggaataacagaaaaattcacattctcatggtgcttccattataaaggacagacc

SEQ ID NO: 5910 - DNA, 201 bp, Bos taurus
ctggtgcgaactgcactgccctgggatcaggaggcctgagcatctggcctcattctgttgtgtacaagctctgtgtcctctctagtttcagtgcatgtgagtaccaagcgttgccacatggccgaggctaaggagatgctacctattagtactagtatttctgttattgctgctttacttgtattaatattttcgagatcg

SEQ ID NO: 5911 - DNA, 201 bp, Bos taurus
aaataaaagcccagcaagaggtaagtggaagggggcctgcagatacatacatgtagagcaggcagttgcctgagtcttccacctcggtggaataattcagggagaatctgggaaggccatggttgagtgaggacacgaaactcagcttaggttccaaaggtcgcatttggaaagggggttggagtggagtcggaggccagg

SEQ ID NO: 5912 - DNA, 201 bp, Bos taurus
tgagcttgttcctgatccaaagcccaccagttaaaaaggagggtaggccacttaaggaaagactgcaatgtcactgcaagttgacatagtaatgattgcccatttctttcccaaaggactatggccatttatcagagtaattgtatactatagagaaaaggatatccaaatcacttaggggatgtaggatataatacgtga

SEQ ID NO: 5913 - DNA, 201 bp, Bos taurus
gatggcaagtaagacagtcgtggtttctgccaccaagaagcttacattctgctagcataaacaaacaataaacagggtaaataaattagataattaactagatagtaaactaacaagtgctgtgaagaaaggcaaatgttatagagtattatcaggctacctgatttaggtttagggaatagacaagggatatcaaaatgt

SEQ ID NO: 5914 - DNA, 201 bp, Bos taurus
ttaaaaatcttagtttgtatgaaggcaatttaataaatgccatggaaaaggaaacccatggaatttggggtttcctttggtgtcccatgaaaagggacacatagactctatttctagcattagagatggagggatttgagaagacctcccagctgacatgtcatttaatgtgcacaattatggacagattgtttacacatc

SEQ ID NO: 5915 - DNA, 201 bp, Bos taurus
gtcgaggtagcttttcattcacaaactcatatttaggtggttgaactgtattctcaaactgctttcagcaagtaaatgttagcatagctagtcattaatcgtgcttttactttttattttgttaaatgttagttcattgttccccaatttcctaacccaaattaccctcttttctattaactaatttgggcacaatagacc

SEQ ID NO: 5916 - DNA, 201 bp, Bos taurus
tgattattagctatttttactgctttcgtttatagaacatctataattctattttctgtttccttcttaaatggatgttcatagatcctggattcttttatgtttatctgtgtttatattgccttttttagacaagcaacaattcagtggcatgtcataatggctttgaatgatttctttggtactaagcaacctcttttg

SEQ ID NO: 5917 - DNA, 201 bp, Bos taurus
tgctttgaactagaaacttttcttacagctctaattaaaaggaagtttcaaacctacgaattaacagttttaatatgctattcctggtgattaactgctttgttttagctggcattcactgttaacactgcaactgttaattttaatggcttgatttttaaattctaagaggagtaaaacgagttcaaaatgattcctata

SEQ ID NO: 5918 - DNA, 201 bp, Bos taurus
gctgcgattcatggggtcgcaaagagtcggacacgactgagcgactgatctgatctgaacattaaattatatgcataatgataagctggaattctagtaaagaaaataccaggccttgtagcctcttactctatctgctttttaatctgatattatctgaatccttcagctatacagccactcactcaaaagcactctcat

SEQ ID NO: 5919 - DNA, 201 bp, Bos taurus
actaagtgttttgctaatggcttacctttcttgaaattattgctaaacatgaacttaagcttgaaaaagttgtgaataaattcccagttcaaaactttcttaattttacctatatatcagcttcctaatataaactatactgattctttcttatactactaacaaatcttttgtgacatacagaaagatggcaccaataga

SEQ ID NO: 5920 - DNA, 201 bp, Bos taurus
gtgtttcagacaattcgggtattttattttgtttcagttgtataaaatcttcatggaagagagaaggaatttctcacctgtctagaatcctacattcacaaagggccaggacccaattacgaacacactttggggacatataacaatggattggtcactatcacataagcacagatgtgctgctttatctgaaacgttgcc

SEQ ID NO: 5921 - DNA, 201 bp, Bos taurus
agaccaaagttagagaagatacagaatatattctcttgcctcattcagtatgacatgccaacagataaatgtatgcaatattagttctacggttggcataagcatcagttcagttattttatggtgaaattctcctgtaactcttagattcattttaatccattttttgaggtgtaagacactgtgagccataaaggcttc

SEQ ID NO: 5922 - DNA, 201 bp, Bos taurus
gcacacgtagtaggcaaaaggttgatgaagatcccagctctgaggaagatatgaattgaaagttacttctaatcacttcaaaatctagaaccatttagatatgattcaatcatattagatttcaaagatgagattaaaaattgtatttgagatcacaggtttccaaaaaacatagaaagacaccaaagaacaataatccca

SEQ ID NO: 5923 - DNA, 201 bp, Bos taurus
acagcatagaattggaaacacttcaattattttctgtgtattaccagtctttcctaatccatcctaaaagttgtcgcaatttcaacttctgaaagcctagctctagtaacttttaagctcaaaagctgtcatcctttacatcctttgcttctcttctctaactaaataattgtaaaacttctcatttgtcatccaatgggc

SEQ ID NO: 5924 - DNA, 201 bp, Bos taurus
gtccatgtctgtttccttgctacagccagagggtttcttagttgtaacagagacaggagatggccatcaaagcctataacatttattatccggccttttagaagaaaaaatattatctataatctgataactcagatataatcacagttacatctttacataatgatttctctctttaggcccttacggaaggaaaacaca

SEQ ID NO: 5925 - DNA, 201 bp, Bos taurus
cggcctgggatttccccgtataacggacgaaacgtcggggtcatccggtcgtggaggcaaaaaaaaaaggtactgccggactgaggcgtttctagcgtcagtggggagcgcgcagggtgcggcgaaccgagagccccaggctcgcggagagcagagcaccctgggttcggccgcgtctcccaggtgcctgcatggccctgg

SEQ ID NO: 5926 - DNA, 201 bp, Bos taurus
tgaacaaagaatgaagacaagttggagacagtgaaaatatataactcttcaagaggtcatatttcaatgaaagtcaaagcattaagacaatcagtaaacagaattgtggtcaagaagtatttttttttaatgggagaaagaatagcatatttgtgcactgaggtgcaatgatccagtaatgagagatggtttgatttttag

SEQ ID NO: 5927 - DNA, 201 bp, Bos taurus
agtatgggttcttttctgtcttctgaaaggtaagatatggataaaagtatattactggccaactaacttattgctgtaagaattgggaggcatgaaaaaattctaaccctggggaaaatgctatctctgcaccctcttccttttcactatatatttatttttaggcataattgtgggcccggtgcccagtgttttccagaa

SEQ ID NO: 5928 - DNA, 201 bp, Bos taurus
aatacaattattctggaattagagtctcctcacccatgttccccaagaagaaccaggattctggtggggatattggcccagtctgtggaggaaaataggtgtccaggatgaaaatggtggaaagaaagggcgatgtctgtaatagtcctgacttgatggttccctaaaacacaactacagggcctgaaggaatatgttcca

SEQ ID NO: 5929 - DNA, 201 bp, Bos taurus
tttatgacatggttaggacatgtttgctaagtaaatgtttgttcactaaaagaccgtgtttctcaggaggaggtggccttgacagtctcctattgcacactctgatttcccttctcactgaggcttactacctcatcacgtgcttacatgtcccttgctcacttacaaagagagaagttgcttaacctcattaatgatcaa

SEQ ID NO: 5930 - DNA, 201 bp, Bos taurus
ctcatttttagttgtaaaacatgtagcttgaaaagatactgaaggaagaacatgaacacagatggtgaagagactgccatttgtaacacagaagcaaagcggggaggggggagtcactttcaagttttaaatctttaaaaatactttgtgttctaccactcacacacaagataagtaacagtccattcgtatgcaaagggc

SEQ ID NO: 5931 - DNA, 201 bp, Bos taurus
ttaaggtcaagcctgaatttcagcctctaactgaggccaaaatgagtaaaggcaaccaggtgaaaagacctgtagatctccagtatcaactcactatttgtgtacttggttttcaggcccattctcctagtcagtctttgttttccaagtactgtaagactggagaccactgcctttcagaagcatcagcctagctcttta

SEQ ID NO: 5932 - DNA, 201 bp, Bos taurus
gacagcagacttgcggtttcgtttctggtagtcgctgcttggttatctttacttcacttggccaacacagaacattgagcttcttggtgctagtctgatatatccacctgttgagtagtcctacacgtcatcctgttgatttaatctggcgagaactggcaccaggaattgttacttttattgtttttatttttgcctaat

SEQ ID NO: 5933 - DNA, 201 bp, Bos taurus
atgtcgtatatcacttttcacattctattagtaagagctgttcatacaaccactctactacaaaggaagccaggaaatattgtgaagcacagaacggggaggagcagattttggtggaaatctgggaatctttgccacattctgcatggtattctccagctagtttgtaaattcgctgaagtcagggccttccatgctgtt

SEQ ID NO: 5934 - DNA, 201 bp, Bos taurus
tgtctgatactgatttgtgttgtataagttgaccttatcttattttaaactctttgccaatcttttagaaaaattgtctttggcattttttgatcccagcgaggtggaatagcctctcatatatttactagctgctcttttctttggaggattgccaactagtgtgctttccccatttctctcattaatcatcaagaccac

SEQ ID NO: 5935 - DNA, 201 bp, Bos taurus
attcatgatagattggcaggtggtcagtggatgatgggctgaagccactctgagtccttttgcttttttcattttttattagagaaacttgtaaggtcaggtgagatgcctcattcatcatttacttctgatgtcagtttggggaaattttcccaaagtgggctacaggagatagcctaatgttaaaatcctgtcttcagt

SEQ ID NO: 5936 - DNA, 201 bp, Bos taurus
cattttgatgtatatgtgtgtcatgaaaccagataatggtattttgaaaatgaaatatttaatttttcctcccgtaatataactgcccatttggaaaggggaagagtgtataatcttcattacaaggtttgctgactggtagcattatcttttgtgtgttccttaaagaacatctggccatctaataatcccccaaaatat

SEQ ID NO: 5937 - DNA, 201 bp, Bos taurus
ggaacctacaaccttaggactaaacacatagggtaaaaggacttaagttgtcacaaaagtatggtattggatgagttagttaaatgtcaatagatgcagggcaggatggtgacaaaaagtgttacccatttactcctgatttctgtgtatttccccgtcaattgggaagaatatgacctttggaactgtataaagcctggt

SEQ ID NO: 5938 - DNA, 201 bp, Bos taurus
tgttaaagtttctaacaggccaccaggtttggaggttacaatcctagcaacaatcttctggttgttcagctatcaggattctgtttcccagggatccccagtgctcatcacggacttgttctgggtacagatttctggaatgcttgtctaccccagcctctgggggctgcagctaaaaagctatgggtttaacaagttctc

SEQ ID NO: 5939 - DNA, 201 bp, Bos taurus
ccagggaggtgccagctgcttggaagacccagtgagaatttgttgagtcttctgggtcttttccagaccttcactgtcctttaggcaggcaggcccaccagtgactgattagaagcccagatacccctgtttcactcacagatcatgtgtccaacccttccccaggctcagcttcgattcccctcctcccccaaggtttca

SEQ ID NO: 5940 - DNA, 201 bp, Bos taurus
attattagtagtagtagtatatagtattccatagtatagtattcccttgtatgaatatattcagtttgggtctgtcatgaaaatttatgttcttctggtgagcatatgtacacatttcttttaaccagcttttaagagtctttcaagataacctgcttgtatttcctttatgtgtctgaggtttcatgggctcaaaacaca

SEQ ID NO: 5941 - DNA, 201 bp, Bos taurus
acagctaactgctaccctgtttttttcctgcaggtagagaccacagcccacatcagaaacggaaaatgcagatacttgctttcctacctttcttgatggaggtggtcatttaccaagtggtgaccattgaatatacagaggagtttgttggggaatttctgtgaaatacgtttctctctgataaagatggagagacatatg

SEQ ID NO: 5942 - DNA, 201 bp, Bos taurus
agtctgaaagagaaagccagaaataactgaaaggagtctacatttccaaactcaacagtctgccatcaagaatctaaagactttttttttttttttttttaatgatgcccaggggccctggaaatggcagtcagaacataattcggaactaagtaaagctctcaccagcaaatgttacaaaggagagagaactaaagatta

SEQ ID NO: 5943 - DNA, 201 bp, Bos taurus
gtctgtgtacacacagtgctgaggaggcacagggtgacagtgtgattggtctaaatattactcctctgatgtctaagtcttgtggtgcaaagcagaacacttgcctacctgcctgtgcccaaatgcaaaaagtgatggagctggaagccatagaaggaataggtatctcctgtggtcaccaactccctctgagcttctgtg

SEQ ID NO: 5944 - DNA, 201 bp, Bos taurus
acagttttaatagttactgtgactctggccacgtaagacacaaccggttaaatcagtttcatgagttccattgacttaactggggttgaaaactacatactaagccagccaatggccaagtcacattgaaaaacgtgttcctcatcacacttgccccacatattttctcatagtggccatatagctagaatgcaccagtat

SEQ ID NO: 5945 - DNA, 201 bp, Bos taurus
attgaatgcgtgctgtgggtttgccattatgtgagatgcaggtggtaccctgtggtgtggcagataggcagatattaccaagaactcctgctccctcttccagtgttgacgtgttccctaggaagcggctgcctagttaggagttatacttcccagagccccttgtatcttagatggtgtcatgtgactagttcttataat

SEQ ID NO: 5946 - DNA, 201 bp, Bos taurus
aggtttgaaaaaatttcaaaattacattttaattatgtgtacatagttaccagtcatttataagtgtgttatttggtggtccttgcttttggatatgggacaaggcagtgaacttctcattctttacccttttctttggacagaaggtagtaatcatgtactcaagctcttgcaaaagtcccacgtttgactttatactca

SEQ ID NO: 5947 - DNA, 201 bp, Bos taurus
atcaaccagaaaaactaagaagttttaatttctccatttctcaaataaattcaagtcactattctggagcataaatgattttagaaagcttttaacaaacatatttttagaagtgcatatggcttgaggtttgattaatagaataaatatttgtaggttttccaagttaataagaaatattttctttcttgttagcctctc

SEQ ID NO: 5948 - DNA, 201 bp, Bos taurus
ttatgcctctgtattccacaactgaatacatgaataaacatagcattccctatggcttccaaaatttggctccttcaaattcaaccatttttatataacttgcaaattatttcccagtaaatttatcagtgatagaaatgtttaatttttctgaagttgctagaaatactctaatactttctgagcagcctgaagctgccc

SEQ ID NO: 5949 - DNA, 201 bp, Bos taurus
cacagagggttctcagtgcctccacggactctccccaaactgaagacagggggtccacagcttcccctgagagaggcagctgagtgagggcgtggaaaggtccgcagtgcagaccgccctgcctcacggtgtgtttcgttactaaagttggtaagcttctgttaccacagcattgccccattttcttctctcttgctccca

SEQ ID NO: 5950 - DNA, 201 bp, Bos taurus
gttccatttccttccttactacttctcttcctttctgtgtttacacctccttttggaaaatgcctctttccctaaacacacttgaaaaactcattttctcggtgagttaggggaaattttattgggctggccaaaaagttcccttgggtttttctctaagacgttttgggaaaacccaagcaaactctttgaccaacccaa

SEQ ID NO: 5951 - DNA, 201 bp, Bos taurus
aagagcataaaaacacacatactgaaaaccactgcagtgaatagtggtcttaatagtcttggtactcttaatagtccatcctctcgagacaaacatagaactgtatttattctgtggatcacatttgaaattaataacagaacaattactttataggtaaaactactagcttattgccttgtttacataagacaccagaaa

SEQ ID NO: 5952 - DNA, 201 bp, Bos taurus
cttttctaggtatacatgtatgagaagatacaaggatctgggttcattaaaattatttcttaggaatgcatcttaactatctagggccaggatccaaagcacagaatacttcctgtttttctgtatcttgaattccccacgggacacactgtccttggtggttggctacagtggccaatggcttgatccttgtagaactcg

SEQ ID NO: 5953 - DNA, 201 bp, Bos taurus
aggaaaggtagtctgtccagcaccagctctacagaagtactggtgctgaggccatttttgaggccaaaaatgaggccatttttatccttaccatcttcatctttcaagatctccaccctctcttgagagcagggatgggggaagttgggagggccgtgggttaattgacaaagttgctacctgtaagggtggtctgaatgg

SEQ ID NO: 5954 - DNA, 201 bp, Bos taurus
tacagcagctgaatcatgacactgtctttgtgtcaacatcctggtcaatcacccgagctgagcatacctgccaatcatgctgatggcttatttagtaaacatttatggagtgctgtgtgcaaggcactgggttggaaagttgactcaaagcagcggttcattccaaagaatcgcttgaattgtgtcatctacaaatcataa

SEQ ID NO: 5955 - DNA, 201 bp, Bos taurus
gaaggcagagcagacagtaatggggtcctcaaagaggtagggacacaacaccaggcacagagatagaaagtggcggccagcaacagagtgcagtgggatcattagtagctccctgtggtggtggcagtggtggtgatgatggtggtagactggccttgaaggaaggggaacattttgaaaaagtggaggtggcaggaaaga

SEQ ID NO: 5956 - DNA, 201 bp, Bos taurus
aacagatctgggcaagtcacatggtctccaagggcctgagctggctcatccataaagtgagtaccgttcccttatctcatcatgctactggagaacaggatataaagaaagtacagggcctagccctgggcttcccagatggtgccaatggtaaaaacccgcctgccaatgcaggagacataagggatgtgagttcagatc

SEQ ID NO: 5957 - DNA, 201 bp, Bos taurus
ttagctgcctgtcacttatgtgagttacacatccggagtttattttcatgagttcttagccctaatgagcagaaggcaagagttcagacttgcatattctcccgcctcttctccccgcacagccaaacagctcagaaaaaggcagctgagcttgacgcactgattatacagaagatgtaaatggtctgagagaggtttcca

SEQ ID NO: 5958 - DNA, 201 bp, Bos taurus
cacacctgggtcagacagcaaagagtgtgagggtggcgagggacccactcatctgaagacttcatttacagctatagaaagtgaggctcaaatgagcccacggccactcaaacgacattccttcttgaaagctgtaacagtggcttgaagtgaaatcaatgctgtactatctgaaaaccaaaacagccatttctggagtgg

SEQ ID NO: 5959 - DNA, 201 bp, Bos taurus
agactaggactcagatctcctgtcccaccggcagtctcccaccacacacttctttttcttcaccatgtctcggctgggcctctccagactctattggtacgtgtagtctggcatcacctctagtcagctcttaattattctgaggtgggtgactagtctggcaatgaatcagcccttctcaaatctgttctcggccttggg

SEQ ID NO: 5960 - DNA, 201 bp, Bos taurus
aagtaggacacgaccgagctactgaacaacaacaaatcaaagagcagtcacaacatcctacaagaaaagtggactgatttttaatgggccaaaaaaattcctgagccagactaaaggttagcggctggactgggctggaagaaggctgagtatgatcaattctggccatccttttcaaactctagacttgtgggtttggga

SEQ ID NO: 5961 - DNA, 201 bp, Bos taurus
tgcaccccaaagctgcattttgaaaacaattttaaactgaagagggggtaatgaaatctcaccctgaaaaacagtgccataaattgagtcctcgatgtgaaagtgtttctttggcataggtaatgtatttttgtaaccttagttttacaattcaacacttctgctctatgctaatctttcattataaaaacattctgaagg

SEQ ID NO: 5962 - DNA, 201 bp, Bos taurus
accccattttatatatttgaaaattgaggctcagaaaacttaagtgacttaccttgggctccacccattagaactagcttttgaacagggtcttccgaatcgaaatcacttccatttagtatacatatatgtaaatatataggtgtgcatgcttgctaagttacctcagttgtgtccgactctttgcaaccctatggaccg

SEQ ID NO: 5963 - DNA, 201 bp, Bos taurus
ctattcctataactctcgtggctgattaaaaagcaaaagataaaaccctgcaaagaacatctcactggctttgcctttcactcgacttctaagaagttttagttttcttttgcaggtaattctttaacatttacacaggcactggtattcattatacactgaaaaagaaagacaaaagtaatgtatcctcagctagatcat

SEQ ID NO: 5964 - DNA, 201 bp, Bos taurus
gtgcttcatgtacataattccattgtattcctcacatcttcacaggtgatgaaagagactctggtaatcactaaacccaggccactcatcagtgccagagttgggattttaaattcagttatatcggattcctaaacttatattccttttactctgtccagcagcctcttgatagagtcatgctgagctcaggtactccag

SEQ ID NO: 5965 - DNA, 201 bp, Bos taurus
acaattctagtattcattcattctaaatctcttaaagcaaacagtgtggtagttattctcatagagggctgtagtcagaatcgaggcctctgaatctaaaccagaattgtagacgaaaagtggctctctttagacaaatatttggagcccagataaaaagttcacagttcttcaggaagcctctagagggcgataaagtgc

SEQ ID NO: 5966 - DNA, 201 bp, Bos taurus
tgaggactggtgtgacccagttgtggttatattaagagaagagactgatgaaaggaagagaggaagcaatcagaaagaaggtccatttgactcgcttaacaggagacagcaatgtagcacttttacaagagagagtttgttgtaaacagagctgctaagtcgcttcagtcgtgtccgactctgtgcgaccccgtagacggc

SEQ ID NO: 5967 - DNA, 201 bp, Bos taurus
caagtcaccaggagatagagatcataggggctactttaaaatccaacaactataccaattaatccacttaaaattaaatgcaaagttagagtaatacactcaaagcaagagacacaggggcctttgtaagttaactacaactatttttagcccttccatgttacttagtttctgaatcttgacaatgttttggacagtcca

SEQ ID NO: 5968 - DNA, 201 bp, Bos taurus
tttgagttaggaggggaaaatgcacataaagagaatttaaaatggtaccaaagtaagatttacaatacaggttgagaaatcaagccaaattctgtatttttatttaattccaaactgtaatgtttcaaaatttaacgagtgaggtagaaatccacttttacagcttagaagtataaaaatatgggataaacaaacatccct

SEQ ID NO: 5969 - DNA, 201 bp, Bos taurus
gatgatctaccatctgatgatctcaaagtcaactgattagtaccccaacaggagtgatatcacactatactcacaggaggagacaccaggggactggaattctagggccaccttagaatcctgcctccacagttggattatgaggttatatgagcctggagctcagacattgttcagggctattacagtcatgggattaga

SEQ ID NO: 5970 - DNA, 201 bp, Bos taurus
tttgactacaatgtacaaacaacaagcctacactcaggccacttgaattttagttgcagagataagtcacaccttaccaagtaaatgtagaataaaagttcaaatagtaacaagggccttgaaagaaaataaaacagggaaatggctgagaatgaaaatgttttagacaagatggttggaaaagccacacaaataaggtga

SEQ ID NO: 5971 - DNA, 201 bp, Bos taurus
gggattttgagttctagtaaattctagtattagaattctgcccctgcaagggacatttcacagacaaggctgatgcaatactcagagcatgtattcagagcaatgtcactgcatcccacatctgaaagctaacctgacaccttgtttgccagtacactttcaaggtggaaaagaagccactcatttcactgtcccatttcc

SEQ ID NO: 5972 - DNA, 201 bp, Bos taurus
gaagaaataggaaatataaacaaaccaattaacagtaatggaattcagtcagtaatcaaaaaacttccaacaaataaagtccaggcccagacagattaatcggtaaattttacaaagtatttaaacaattaacacccatgcttctcaaactattcgaaaaaactgctgctgggccgtcgcagccaccgtgctccaatgtcg

SEQ ID NO: 5973 - DNA, 201 bp, Bos taurus
tttggatctgcacgtttatacgatcatgacttttacctgagttttaaaagatatggaaattactaatcagtctggctggccaagtgtggttttttggtttgtttgttttttttttttttggtcacctgttgctctgtattcctcagcaattattactaatgttacacagactgccagactgccaagggcctgtggaagaaa

SEQ ID NO: 5974 - DNA, 201 bp, Bos taurus
ctttttctctgcccttgctgccactgtactggttgagacttctgttaccatttgctccaagtattgtgggagtcttctatcggggttccctgtcagtttttatcctctctgatccatcttgtcaatccactacccccacatccatcattgtatccttcttcaagtaccacaagctccaagattttaataaacagagtcaaa

SEQ ID NO: 5975 - DNA, 201 bp, Bos taurus
tgctgaggttcatgggtcggacacgactgagtgactgaactaaactgactgaaaccctattttctatcaggcacttgaaatctgtgttactaaatagtcccccaaacctatgagatctgtatctgtattccagttttctaaagtgtgaagctgatgttcagcaaacagaaaacattatacaaggacacatatagaataatt

SEQ ID NO: 5976 - DNA, 201 bp, Bos taurus
ctggatttaagtacatggtatttaagtacatgaaagagcatcacacttttcctttgtggagttccttgttttaagaactcagtaaggagttcttgttcacattcttgaaaatgcttttctcaagaatccatgtttcctccttcaacagaaatcagaaattcgttgctttaagtctagattttggtttcattcattcctata

SEQ ID NO: 5977 - DNA, 201 bp, Bos taurus
tccattaaaaaaaacctcaaaaacagctattcattttctttttctaattacttggcagaaatttagaattgaaagagacaaacaagtaacaaccaaacttcgcttgaacaaaagggattcttgggtcctggagaccagagaaatgagcaggaatgctcagggtgagtttgggtggattgcagaatggattgcagaacctgg

SEQ ID NO: 5978 - DNA, 201 bp, Bos taurus
ttaactaaaatattagtaataacttgataatagtttaatgttgaatgttatatttttgtatatttttgaaagcaaaatttagcttttattctttgttccaagggtgagtttctgctgctgaagagtagatctgaaatttcatgtgtactttaagaaaattgttgccttatggggcccattttcaggatcaaatccagtcac

SEQ ID NO: 5979 - DNA, 201 bp, Bos taurus
tcaaataggctatgcaattgatgattatgaaaaaaaaggaacacaaagacaaaagtttgtttgcatgagttttaaattatgaggcccaaaacactgattgaaataaaataaaaattcacatacttattaatgttttcttttaagactttctgcagaaaagaaattgccagacttcacagtgggaaagtgtaccttgggtat

SEQ ID NO: 5980 - DNA, 201 bp, Bos taurus
agtggagacttacacgtctgaagccaggttctgaagcgacacccagagggtgcggcagatgacggcaggacagggcagcagtcttcatgacttctgggggaaggggaggttactagttattgagagaattacttcaggttggctcatcagttaccagggagatcagcagaggggcaggcccctcaccactcctttaataag

SEQ ID NO: 5981 - DNA, 201 bp, Bos taurus
cccttgcaggcacaggccttcattcagggggccttgaaaaagctggtttgttgtattgtatggcaggtcgatgaatcaagaagcagagagggcctgtcccgtttcttgtcttgtgtgacatgatgtgaagagagtctgccagcaatgtttcaaagagctgcattatcagacaacataaaggccctccgtccagcctttctg

SEQ ID NO: 5982 - DNA, 201 bp, Bos taurus
gtggggcactatcagggagcagatgctgagtaagggccggtggctggggctgaacaagggagacccaacaaagcagcagacactgcaccgtcagcatgcagggcttcctgtccaagctggccggcttctctcttccctttctccctcacacagtgaaaaggaaatttattaggcaaattcctccatggcagagagagtgtg

SEQ ID NO: 5983 - DNA, 201 bp, Bos taurus
tttccctgctgactggggcctgaggtttccaataatcacaggcaatggcagaagtcaaaatagacagtgcatgggggaaggaagagaatgaagcaggagggtttatgaggtgggagggcctagggtggcgtggaaagaggatgaaggctgctaaaggtaaggacacggaagagcagggtatgggccatagtggctctaggt

SEQ ID NO: 5984 - DNA, 201 bp, Bos taurus
tggaaaaggaccacaatcctccacgcactcaaagatgtgaaggcctcacgaacacacttagaaaaattgcaggacaaggcaggcaggttgtaggaggtcagagagggcagcatcaggcccggccacaggtgctgggagctagctccaaccccctcccccttgacaaaggccagctcagccccaaactgaaatgagagcagt

SEQ ID NO: 5985 - DNA, 201 bp, Bos taurus
atttattattcttatgttttgacttgttctgtaaattcttttgaatttttttttcttttttctcctttttatccccctctgttatagctgtcgattttaatggcactatgaaatttaattaacttttcagctttttttttaatatcacctggtcatcctcctttttggaacctagaatgactcacagtcatctctgagaac

SEQ ID NO: 5986 - DNA, 201 bp, Bos taurus
tacaaaagttaatttttaacatatctccatgaaatagaaaaattttaatctcacttcactctattaattatagaaaaagagactgagactgaataacacacaggctgctaaaataaagatgaaagttcacttctaaaaacaaccacagcttcagcaacagttagtaaattcaaacaaagtactaggaacaagcagtcagat

SEQ ID NO: 5987 - DNA, 201 bp, Bos taurus
ggtagttatagattacttctgttccctagcttactgcattggatagaattctcagaacaatttgaataaaagaggtggtagtagtcaggtatggatgtgagagttggactgtgaagaaagttgagcgccaaagaattgatgcttttgaattgtggtgttgaagactcttgagagtcccttagacagcaaggagatccaacc

SEQ ID NO: 5988 - DNA, 201 bp, Bos taurus
agtcagtgtaattatactttatttaactttgcatcaagaatattcaatttatttttacaaatgactctttttaggttgataaaatctaaaaagtgaagttttattgtttatttcctagaattataagctaagtttgaggctatcactgagtcagctgttgaaaagtgaaaatcatatagaagtaatgcttagtggtggtct

SEQ ID NO: 5989 - DNA, 201 bp, Bos taurus
gggtcattggtttcccatgctgctaaagggtgaaatgatgacttctgtaaatattgggctaattttgctcatttccatcaggtcactgtcctcgatccctgtgccttggtcctcgtgcatgtattagtcattgaggtttttattgcaaagtattattggactttcaatgcaaattcagcagtgccctttctatctgctgag

SEQ ID NO: 5990 - DNA, 201 bp, Bos taurus
aaacttctggcaactaatactgtgttttaaatgtagcccttaacaaaacaaaacctaagctccagctcttttacacgactggccgccaagagggcacgccagactgtccagaagctttcttacagcctgtgccttccaaggaggacttcaaacaaccgatcaatgaactagagtttgcatggctgcgtctattgttgaaac

SEQ ID NO: 5991 - DNA, 201 bp, Bos taurus
cactcattgtgttttttgttcccccaggacatctttgaagatgctttggaaaccctctctgtgtaagtagtaacgtaataaaaatgtatatagtagagaaaattgatggttttcttttaaaaaaagtaaatatttcattctcatttttttgagtatagtgactattgttggaaaaattcagttctctataatttaacattt

SEQ ID NO: 5992 - DNA, 201 bp, Bos taurus
atttctatatgcttccttataaatatgttttgtccttgtatttcaatttttagtaggctcattactattgatattaaccagtatcttacaattaaaaatcaatctctgttttaaaagtcaaatggagatataaataatttcccatgtgctaactttccttcatagtctgataaagaaatattgaaactgtatcattttttc

SEQ ID NO: 5993 - DNA, 201 bp, Bos taurus
tcaacttggtaggtgttgtggccagagaccgaggagctagagcaagagccaggtgtgagccagggcttctctgctcagttgccaacaccaccaccctactggggtagggccatgtcccaaggtactggagcaatggccgtgagggtggggcccaagccagctctatcccccacaactgggcactctcctcagctatggcag

SEQ ID NO: 5994 - DNA, 201 bp, Bos taurus
gagcctgggagcccacgattgggacgtcagcagttctggctccgctggaggcctttctgcaggtggcccctcgtcgcaatgccctcgtgtggtctcgcctatgggcttcaacatgcatgtgtctctctgtgtttctcagtttcctcctaataagggtacttgtcggattggattagtgcccaccctaagcgtcgcatttaa

SEQ ID NO: 5995 - DNA, 201 bp, Bos taurus
tttcaattcttttagtttttgcaccattttattttaaggttttgttgttagatgagactggacttgtaattgctatatcttcctaactgtaaatataaccgtatcaattactattttattataaattgaataacaactatcaaaaggcacagaaggtcagactggataaaaaaagcaagatccaactatttgctgcctaca

SEQ ID NO: 5996 - DNA, 201 bp, Bos taurus
cagaaagataacataggtgcagatattgtttaatgagctctttctggtcccagcacttgctgtctcccttctcccagcccaggaatgctccacaggccattggttcaaaagaaacattcccccacagcacagctaaatgctaagagtgacaacctgtcaggttcaaggaacatttttaggagtttttaatttggctcgtca

SEQ ID NO: 5997 - DNA, 201 bp, Bos taurus
atgaaacttccttctcattggctagaacctggggacacggcagtcgctgagagttccatttccagtcctgggcagagctaggccagccaggaatccgtttgactctggctcctgaccagtggaggtccctgaagggtcaggaggcattcctggaggtctggcctcaccactgtttgccagaaaaaaggatcctgtttttga

SEQ ID NO: 5998 - DNA, 201 bp, Bos taurus
ctgtgtgaaattatagagattcagagccactggctctttctttattggccattggaaagatgctctttttttgtgtgtgtggcccctgaaagacttggcaagaaccttacaagaaaagtggacaatacttggtgtgtacagtgaattcagcatttctttctcaaaattcatgaggccccatagactaataaaaaccagata

SEQ ID NO: 5999 - DNA, 201 bp, Bos taurus
cctaattaagttcttaatggcagaaacacctcagaatgttccatggtttcatttggcactgaggcactcagactctttttcaaacattaggtcaagatattgggttggacaccaggaaaataaacttccttatgaaggccccaaggcataaaaacacagagaaaaggcgttccccgtggaactctgatataaggatttcct

SEQ ID NO: 6000 - DNA, 201 bp, Bos taurus
ttatttgtatcaataactcttccatttaaatctaatgattttgtcttttgcaatacctgaaatgtattggagaggttcattgaccttactatttcacaccgaattattttatttttaaatatcatttaagtagcaaatgatgctcctccagacctaagtctcagaatatgatttcccaagttgtgacttggactcagcaga

SEQ ID NO: 6001 - DNA, 201 bp, Bos taurus
gcaagtcatttaacttttctgaacctcaatttcagaatcattaaaatgataatatatatgcttagcattgttgttataaagatcagataagatttacagaggaacattcttttaagtattgtaaagtatcacataagtatttggcctgttgttatatgtttaatgagtattcattaaataaatactggacacacaggaaac

SEQ ID NO: 6002 - DNA, 201 bp, Bos taurus
tagaagctagttccagacaccatctcagattttctaatatcctctgcgcccttccaaattccctggtgagagaatctgattgacagccttgactcccatgcccatcagccatggagggaatgggggataaaaaaatacaaggttcatgtggtaaaaataaaggctgtatgtgcttaacactgagagtggaaaagggacaga

SEQ ID NO: 6003 - DNA, 201 bp, Bos taurus
atggtctagccagaaaataccgacatacaagggtacttgtggtggatcccttgaatggaagaatgaagcaaaaagggaggaggttcagaatcgggagaggtgagaggcaagatgagaaggagcaacgcatcttgatgaatgaattagaagctggttctaattctgcttgtgggaaccgtaacctagaatgaaatgttggtg

SEQ ID NO: 6004 - DNA, 201 bp, Bos taurus
aacctggaactctatgcattcttgagaggaaacaggtggggtgggatgatgacttaatcaagcggagcccaaagccaccaggtggaggaggctcacagttctctgaagtgaatctgtgccactggccttgaagagagggctggtgtcatacttttaagggaaaagatatgtttttctctttgtgcaaatacttggctcaaa

SEQ ID NO: 6005 - DNA, 201 bp, Bos taurus
ctgttccaaaaacctacaaaactttgtactaatttctttaaaaaaaaaacaaacaaaaaacaacttactactatttcataaactttttacagcccatctgtagttgtgaaactcagtgtcagactgaaagcaaatgagttcaacagaggtgaatgatgtcagtttccccctgagaattgtttataattcaataaaaagttt

SEQ ID NO: 6006 - DNA, 201 bp, Bos taurus
tctacagtcagctaattgtgcatacacagccatcccatggtaaaatccatcctgagagacccactatcaaagccctaaaaattatttttgaaacaagacactttaggccaatttgggtttcagattaggctgaactttctcagcctccgaggatggcatgattttccattgttccttgggggtctcatctgaaatcgaatt

SEQ ID NO: 6007 - DNA, 201 bp, Bos taurus
tgcgggcccctgcctctaggcacagtctgtgctaaataagcagcaggagaaccttgaagtggcagttctgtaaccacttcttcctgaggtcagcacttcaggcatttgtgtgttctgggcccagcagcacagcatcccacaaaggtgggtgttctgtaagtgctttttaatgatggtggtgctgatgatgtatgaaggcct

SEQ ID NO: 6008 - DNA, 201 bp, Bos taurus
agtctattcagggctccttcctgcctcatgaggggcctcacacagcagcagatattctagcctattctcacaagctctgtctattgctttccttcgtggacattcccttaggcctagtgccaggtacatcccatcctcctgagagaaggacctgaaaaagaggccagcacaggcctgccacagggaatcctggggaagaaa

SEQ ID NO: 6009 - DNA, 201 bp, Bos taurus
attgtttctaacttttccatggatacaaatattgtattcttagctattatattaaactcctgtgtcttagactttttattacagtctccatagggccataccttatgataggaattcaataaatagttgatgatttagtacatggttatttatttaatggatagtcatctcttaaaacaatgttctgattaaaattggcct

SEQ ID NO: 6010 - DNA, 201 bp, Bos taurus
agcaccttgctcaaacatttctgcattattggccatggtacacagcacactctgcttctccacattgtaattcggagctgcagctcatcagagcacaagacttatttttggccgcagcacaacccagatgtgcagcccttggaagaaatcaccccaccagtgtcatctggctatcacctcccttgcctggattctccagtg

SEQ ID NO: 6011 - DNA, 201 bp, Bos taurus
attttaaaaatggaaggcctaagcccagtgtttaccaagagctcagtaaataacccgttctctgtttattgcttcctcttctgtggagatttaatgttctcaggccgtggctctcagtttcctctcatgaccccattacattcttaaacatttctgaggacctcaaagagcttttatttctgtggttttatccatcaatat

SEQ ID NO: 6012 - DNA, 201 bp, Bos taurus
tataatttcataggctgaaggatggtggttagagggagggaactggacagagtggaagaaatttcaaaatccatgtctaagtccttatgtaagtttgatctgcatgaaaacttgtgggttcatcatcatgggtccagtgtctaccaaaataatccttgtcatattctagttcattttttcccactgacaaaaatacacata

SEQ ID NO: 6013 - DNA, 201 bp, Bos taurus
atatattatgtgaaggagtgctttttatttcatttctgttttttaatttaactgagtcaactttaggcattagattttattttggccacacactatagaggcttctttgaaattagccttatctgcctggttttacttagagactctgcttcagaatctaaactatgaagactcaggcctttgccagaaaccaatatagac

SEQ ID NO: 6014 - DNA, 201 bp, Bos taurus
catgatggtggatgaggccttctgtaagtcattttggtagaaagtattgcatgcaaggatgtcaaatctgtgtctagagtatgtgtctattctagtgagagcaaaacattgcatcttccgtaaggaaagtcaagctgtgtgatcagtgtgccaccagctggttgactgatcatcccagtgagtggggccaatgagggactc

SEQ ID NO: 6015 - DNA, 201 bp, Bos taurus
ttttcaatcatcctgagaaagaattatttggtcacattgttagtgttgggtaagtcattctttgtaaaaaaaattacacctaaaatgtatattggctcaagcaaaagagaagtgtatttcttgctcagttacaataaaaggtaaattctaaaaggcaggcaggcaggcaggcagggatgctgttccacgcagttcagcaac

SEQ ID NO: 6016 - DNA, 201 bp, Bos taurus
ttttaatttaaatctcaaacatttgtttctgagaaataactgaaaacttaatttagccaattcagaaataacttgatcaatttatttattaaccaataatatcatgcttaaacataacctgaaattcttgttcccctactatattccagagaagacttcaggtcagaattttcatgtcttttagtggtaatgtttctatcc

SEQ ID NO: 6017 - DNA, 201 bp, Bos taurus
gattaacaactgttggaatctgccctttggaactcagagaaagtcatagatgctggagacttgcctcctaaaaatgggggacaagaaaaaggccaccattcctgggactccacaggacctaactcagtttgactctttagatcagatcagatcagatcagtcactcagtcgtgtccgactctttgtgaccccatgaatcgc

SEQ ID NO: 6018 - DNA, 201 bp, Bos taurus
tcttcaaactatggagtatgggtgtcccagacgcctcaggacctgagtacaggagataggggtaaaggggatgttttggcctggtgaaaattatggcgcctaatcatcaaagacaaaaaacaaatagcttgtgcttgcttcagcaacacatatactaaaattggaacaattcagagaagcttagcatggcccctgcacaag

SEQ ID NO: 6019 - DNA, 201 bp, Bos taurus
tttttcttttggtcaccttgatgtgtgccatttcataagtgtttgatactctcttctctgatatacctacctgatatcgagttcttctcctttgagtgcttctccttttctgtatctattgccatttctccaggcaaacagctacttaagctgttgggagcaacgtttttgttactaggctgcctcctctgagagctctaa

SEQ ID NO: 6020 - DNA, 201 bp, Bos taurus
ttgatgatgagtttgagtaaactccaggagttggtgatggacagggaagcctgtcgcgctgcagtccttggggctacaaagggtctgacatgactgagtgactgaactgaagtgactttccttgaatagctcagtgcataaacaaaatacttcaaaaagattagatagattttggagttgtagtagatagttgagttttca

SEQ ID NO: 6021 - DNA, 201 bp, Bos taurus
atatgagattttattgcagttcaacctccaatatctcattaccttagatatgtcattcagtcattttgttgtaattgtctttgtttccaatacaaacccaattacctttaagagttgcttagtagatcgaatgagaataactttgaaagcatttttaaagtaaataacatatactgatgggcgatcccatgtatattgtta

SEQ ID NO: 6022 - DNA, 201 bp, Bos taurus
tgtactatctagatgcagtgcttcctgaaagagtgtcctgatgaagttaaaactgatggtccatcttggaaggattctgcaacacttaggtgccatcctctaaggcatagtatatgcactgaatcacatatcattattttgtcttcagcaggaaaactgtatgggtccagaaaactgagttcacctcacttactatcactg

SEQ ID NO: 6023 - DNA, 201 bp, Bos taurus
tggaaagaaaactgtccttttccattcatgtggccacagctgagttttccaaatttgcaggcatattgagtgcagcattttcacagcaccatctttcaggatttgaaatagagaaggcctattgagagaagaatttgaggaaatataggagtgagctgaaactgtaagctgtgggaatgctgagaaagttgaataatgtat

SEQ ID NO: 6024 - DNA, 201 bp, Bos taurus
aattttcttaggacttctgaatttatacttataaggtatcattctatagtttacttttattgccatatctggttttgataacaagttaatgctggcctcacaaaatggtctcctcttcctcttttactttttggattagtttgcaaaaaaaattgtgttcatattttaagtattttgtagaattcaagagtgagccatctg

SEQ ID NO: 6025 - DNA, 201 bp, Bos taurus
ttaagtctatattaggactttatgttagcaaacattgtccatacatgaaaaacaaaagaatatttatgctaatagggattctttctttgctattgcatgacaaattgaaatactaagtttatgcctgtagttgtttatgattttggggaagtaactcaacttacatttttttttaaacttctggtgtcaacaggaatagag

SEQ ID NO: 6026 - DNA, 201 bp, Bos taurus
aaacaaaatttaggtaggattttgtgggctagactggttagataatcaggaaataatcctaaatatttgctccttgtggttctgttctaaaagtctctgactgatttcagttttagccactctcaaaggcctgacatcataattggtataaagttctacagctagggaggaaggtggtttttctctaccccctactgagaa

SEQ ID NO: 6027 - DNA, 201 bp, Bos taurus
aaatatagatgcattttctgtgtgttcatggggtaaaatgagttccatgttctcctactgctactcttgaactcttcatgtgtgcttattttctgtgagtacttagaaaataaaatctttgaaaaagaaggaagaataataaacataaacacaccgttataatgtgcaataatggggcattttataaataatagatgtaga

SEQ ID NO: 6028 - DNA, 201 bp, Bos taurus
tccatttaggctgccacagatcagctgtttgactctcagccttaaatgtttctcctttgtcaagcctggctcgacaagctgggtttctgaaagtacaatgcggcgggagaatgagaaacaagacacaagagttcagtcaaaggtgaggatcaggggatcaacaccgctccaaggtgaagatgtggaaactgaaccacgcca

SEQ ID NO: 6029 - DNA, 201 bp, Bos taurus
tactcacaaatcaagccattgaagaaaacagaagaggacactgaatacacctgtgagcccctgggagatttcagatacctattcagaactacaaatgagtaccgctctaatgaacacctccataattaagtttctagggataagatttctcaggacagctcttacgagccaacacagcttggcaggggttatactccaaaa

SEQ ID NO: 6030 - DNA, 201 bp, Bos taurus
aagagaaggaaaagagagttttctttctcttcctgctctggggaaagctcctgtgaggacacagtgagaaggtggctgtctgcaagtcaggaagagagccctcatcagaaatcagtcatgctggccctgtgatcttggacttctggcctccagaagtgaatttccattgtttaagccacttcatctatagtattttgtcat

SEQ ID NO: 6031 - DNA, 201 bp, Bos taurus
tcaaaagggatggctgcttaagggtggctaggaaactaaatctgtgaatattgaccatgtagaacagtacagcagttatgtatgatataaaatgccttgtagaactagtataaagaaactgaagtgtacatcatgaaccaaattgggcagtaaggtctgttataatttatcatcatctccttaaaacggctcattaaaaaa

SEQ ID NO: 6032 - DNA, 201 bp, Bos taurus
ttttcagtacctttgatgcatttgactgttagcatcttaacatctgatttaatctttaattggtttgctgcttagtctcagcctgagttttaacattccccagggagaattcaaattgccctggtttgagtcacctactcatccattaaccaggagaggtgattaggagcttgaacaccagtgatggatccagatgagttc

SEQ ID NO: 6033 - DNA, 201 bp, Bos taurus
ttttcatcttacatgagacccttcatgtgtaagtcaacacttgttgtaagaaatccaaaatacagtttagactcaactgttcttttggtttgtaatttctcttcatcagggacttgaaacttaccagatttagctttagctagaggcttctctctctcaggtagtcctccgtctaccatgagcattgtgtaaggtacaaga

SEQ ID NO: 6034 - DNA, 201 bp, Bos taurus
tccattcacactcacctctcactaagctaccttaacctgttaggaaagaaactgttagtgtcagcagcactattttgaatctcccctctctgctggtggtgttaaccatataagctttgcccatggaaggtgtatttgaaattatttaaaagattggttttaaaagctgaagagcaaaggagtgactattttaaaagacac

SEQ ID NO: 6035 - DNA, 201 bp, Bos taurus
gtttatggcacggctgggggatcccagtctccttttccaatgaaagccctgatgtcctatttactagaaaagtttgtggaaagactggaatgtagcctacgtatggattttgttttatatggaaatccagagatgagatttttgagcatcctttttaatggaactagaatatagagtattgacatttatagatattcaaaa

SEQ ID NO: 6036 - DNA, 201 bp, Bos taurus
cctcatcaagaggacagcatctagtgtggagcatggcatctagaataatattttagtaagtttaatggcaatatttttaaaggtacttaatgtaaacagacgctctcttgctaaggggaactttaagaaaagcaattctaaagggatacattggcgggcactttacacaagacactcatccaagccctgaactaaacaata

SEQ ID NO: 6037 - DNA, 201 bp, Bos taurus
ctaaatatttttaaaatccttgctttgaaattgcctatcgcctagtaaggaagatgagcacatagtcaaattattttagaaatggtgcaaaaaaactgtgatttttgtttgtgtggcaaatctaagtacttttctagaagcagtgttctgcccgtgaaagggaaacatgggagagggcataaggaccgaaaaggtttctca

SEQ ID NO: 6038 - DNA, 201 bp, Bos taurus
ttcatggaaagaacaacattgttggagatttcagtgataaattgctaggagtttttgttgacaaatatgttagtacttctttttttcctttgagatatactagtgttttatttgttcagtatgtaaatgacacaaattgataagaagcaaaaggaagaaatgttaaccttgtgtatgttaacttaagagctcatgtagaca

SEQ ID NO: 6039 - DNA, 201 bp, Bos taurus
taccagcacaccacagtatttgtgatcaagccataggaaggccaggaggtagccctgaccaccagtgtgcccacagtggtcatgatggacctcagagccagcagtctgagggcccaaccttgtatttcattgaacctgcagcaatcatgacaaaacattaaaaagacaaagacaaaaaaaagataaaacctttaaaaaaat

SEQ ID NO: 6040 - DNA, 201 bp, Bos taurus
aggaatccaagggaaaagaaaatagtgttttctttcattttgttaacctgcaaagaagtttctatacatccatatctgccttctttaacaggggtgaaaatataggaagcttccctgtcattctttgtctctggaggtgggacaactgattgccttgctttgtttgcatcatgaaatcccttctttcacatatttactagg

SEQ ID NO: 6041 - DNA, 201 bp, Bos taurus
ttctgggggataagtgttagttctttttgctttgtgtcaagtgctttcacattatcaacggaaatcgtaaggaaagggcccccataatctgttctacaaaccctcttccctttaaaagtgttggcgtgctttgtggtctttgcctccatatttaataaataagaaatatagtgagttgttgtgctacctcagtgcaaattg

SEQ ID NO: 6042 - DNA, 201 bp, Bos taurus
ttctttttgtattgtctcttttccttctattgaaaacagggccaggccttgccttgttcataccatgtaacccatactttggaaagaaacatgagtagattgaatgaaaatattttcttgcttataacctatattcttaagatccagtaaaatatatatggaatttatgtatcatgagaagatgggcaaatcaggagttca

SEQ ID NO: 6043 - DNA, 201 bp, Bos taurus
ttataacataatattaacaacttaatagaatactgttaaatcaggtcttccaaataacactattgggaaatgctgatttatgttattgatatgttaaaatttaatcaaaacctctaatgaatttacagagcaaaaggttaagatgctttccagtatttatttaaggaaccaagttatttgcacctctgttggtggcatctt

SEQ ID NO: 6044 - DNA, 201 bp, Bos taurus
ctttacaaaatcacataactcctctagagttttatttttgacccactcaaagagattttaccagggcatctgcaggtgtccttttcttttatccagctaaccttttaaaatgacaacatatggcccacaattgagatatcaataaatctctttaggatattttatatacattcaatacattataagggagagagagagact

SEQ ID NO: 6045 - DNA, 201 bp, Bos taurus
tctaccatgtgcctgaaaagaagagaagaagaagtaccaataaaaggccaagagactaacacaatgggtataatcttgttttccatttctacctaaatacgtatcaaactgattataagccaatttctcatacatttagcttgttctacaaatatttaacaagtactattgtatactaagtttttacaaaatggtaaggcc

SEQ ID NO: 6046 - DNA, 201 bp, Bos taurus
acctggttacaacatgggtgaagaagagaaatgcattatgtgatgtaatctctctctcccagtcttgctcactctctctccttcatatccttctgtttctggttttactgaatatcaccatcatcatcatctacatgcccaaactacaatccaggaaaccatcttgactaaagctcttttcttctcatttcactaaaatac

SEQ ID NO: 6047 - DNA, 201 bp, Bos taurus
gaataaaatatgagtgaaaggcctatgattgtataacccagtcatcagaccagtactgcaatatcacaatggaatggagtcatttgtcaccttagcagtgtaagagaccaagccagtggccactcaagctacagtagccttcaccttgaggcagtgtcggaatgattggtgtggtgagactgaatttccagctttgtcctt

SEQ ID NO: 6048 - DNA, 201 bp, Bos taurus
cccaataatgcagaaaagatatctccttcagaattttctctaaagatgttattgaggtgcggttctccttagttcctctgttgctttactgctagagtgacacgggcctttatagtaagaaatatacggtttatcttatgtccccatttaggcaaagaactctccaaactcttggaatttcctaagtgatgagggcaaaat

SEQ ID NO: 6049 - DNA, 201 bp, Bos taurus
tccacacagactttggccattttgtatgtttgggtcagtgatggtagagtgtattatggctggtcaggaatgtaaaccctatgagaatggttcttctccccctaaaccttcagacccggccatggctcttaacatcatcccagattcacctcctgtgctttgcatttctcactcacgtctggatctcccttcctgagcttc

SEQ ID NO: 6050 - DNA, 201 bp, Bos taurus
taacatgaatgagtcccttaagaaccactcagtatcagatggatcaggagctcccttccctctgcccttccccctcatcgtgctcatgccctaccccatcccacagacttagaaccaaatctctaacttagaagtgcaggcatggctgaagtgattgaggcactgtaattggtacagttaacgaacactgaaatgctgcct

SEQ ID NO: 6051 - DNA, 201 bp, Bos taurus
gcaatgcattttgagtttaccttcatttttaatttaattgcttaagcaggatttctgagatatccacaattgagttttgccagctccagcataccactaacggatagttgaacaaaactgtagaaattgaatgtgtagaaatctataatttgttattgggcagggcagaaggcaagaacaatgcaagatgatccttccatt

SEQ ID NO: 6052 - DNA, 201 bp, Bos taurus
aaaagaatggagcccacttcttatacagcctcttggacagagtctgagctcttgtggtttgagggacctgacagctaataggtgcccaaggaaagcaagcgatctttaaaagtagtccaagcaagagaccagaaactgatggaaggattcttgggaatttgtgaaatggcagcacagagattactgtgtccaggtccagct

SEQ ID NO: 6053 - DNA, 201 bp, Bos taurus
tcaataaatattcattgaatatccagaacgtgcaatatacacacggctgtggtttcactctcatctgaggaattctcccaattcaacataaatcccaccactcctctacagcaaatcttcacatactgaaaaatgaaatgttcatgacactgagttctccctctactaaaccataggctctttgtgtagaaaataaaggag

SEQ ID NO: 6054 - DNA, 201 bp, Bos taurus
cctaaaaccgtgaaacattttagtagttgtgagtcacattttccctgttttgaatttttataaacttcattcttcaatgggcaaactgagtttagatacttctccccaaaagcccattttcagtgtattattatgtaaaggctttagctttaaacctcaaatcattcttagcttaattaaaagtgtctggttactatctat

SEQ ID NO: 6055 - DNA, 201 bp, Bos taurus
attttcatgttttattctggttgaataaggtactgcaaagagtcaatattggtagattgaagtaatgtgggcatctgcagtgcatactagctgcctttttttaagacatgaacatactttgcacacacacacatggaatcataagctgcggactcagtggtaaattattgtaatcatttttagaatactctaggttaaatc

SEQ ID NO: 6056 - DNA, 201 bp, Bos taurus
actaaaaaccctgcaattaattttacacttgtgccatgcttcctgcatttccacttttgtctggttctgattttctacatcctgttcccaagctaggactcattcaaaatcaaacaccttctttgtaggttctactcagcttcccactttcagccaccttcagaatcctgagaaatccttgttccattattgctggaagtc

SEQ ID NO: 6057 - DNA, 201 bp, Bos taurus
ttccctcaactgatttcataaggagaagagaagatattgcccaataccagaaagcccaagatcccttttatttgatccctcattttcacagaataaaacaaataaacaaaaagaatcttttaagtatcttctttcatgtagctttcagagagaattctctaaatttagctctctatagatagcttcaaaataactgcccct

SEQ ID NO: 6058 - DNA, 201 bp, Bos taurus
aaggccagttccagagaagaaagatttaaaacatgaccagagcctctggttgttgagtcagctgtaacttgttttacaaatttatataaggaaattgccagaagcaagtggccttctggtcacctgttcctttgtgcaatgtggctttctaaggtttgtgtaaaattattttttctctgcattttgcaaagaggaatggag

SEQ ID NO: 6059 - DNA, 201 bp, Bos taurus
aagaaatgacacaaaaggccatgtatgagtgacatagatatttcatctatatgaaagctccagcataggcaactccattgagacaaaaagcagattagcggtggccagggtctgagatgggatgaaggatgaaatggggagtgactgctgatgggtacagggtttcatttagaaagtcttctaaaactgagtgtagtgata

SEQ ID NO: 6060 - DNA, 201 bp, Bos taurus
ccactcaaaaatggggatgtcagacctgagagttacaaattctctaggggtttaggtttttaacaggagctcagtaataggccagttaactgcctccctggtttttttttgaaagtagttcagttcagtcgctcagtcgtgtctgactctttgtgaccccatgaatcacagcacgccaggcctccctgtccatcaccaatt

SEQ ID NO: 6061 - DNA, 201 bp, Bos taurus
catctcctgcattggcaggcaaattctctaccactagcatcactgtgggagaatgtcaaatattttaacatttacgtaattaagtcttataagaagaaagctgagtctcaaaaaaatgtgtctgataaacttaaaatggctgaaattttcccatatttagtgaaaacataagcttatggattcaagaatgccaacaaattc

SEQ ID NO: 6062 - DNA, 201 bp, Bos taurus
tatgcagtcttctactagtctggcccagcagatccagcatcactccagcagactgatcataggactgaccatagttcactaaacaagcaactccctgaagatttcaatcaactggcaattggtgaagagaaaatgtccatgttggagagcccagaaatacaggccacatgttcccctccaccatttaccaggccttgtctc

SEQ ID NO: 6063 - DNA, 201 bp, Bos taurus
taaatactactgggcctcaaacacactgctgcaggaatgcaacagaagcaagaagaaaagcacaccagaactaggaagagaaaccctctctgctactgtgccttgcaggggccctccagcttcttttgttgacaaagcctaatattttaccagctggcaaagaagaaatgtttacagggttcagctttagttttacaaagc

SEQ ID NO: 6064 - DNA, 201 bp, Bos taurus
ttttgaaatacactgggagcatctagacagcatctctctgcctcttcacccgggaatggaatgagagcagggaaaggcactggccactgcaggtgggatcggtgctcatgctgaaagccgatggcaacttctgagcccacatgaaaggctggacttgtcctggccaagctgttcagagccagtggacaaatgtaattgtag

SEQ ID NO: 6065 - DNA, 201 bp, Bos taurus
gtttacttctctgtgagtaaaacttgtcttcattggtaatgtgtaaacttctttctaaagtcagaatgttctgacccattgttcttcctttttgagaattcagcacagttcttcacatgttgtaaagatacgtaagtactggatggagtcatggaagaagagggaaggaggcaagagaagtcgtgattgttttcaaaatgt

SEQ ID NO: 6066 - DNA, 201 bp, Bos taurus
taaaagctcagctctgcacggccacatggaaagcagcagctctctcgtttataattaacaaaagctaccctgagctgcttaagtggtgagggaaaagttattgaaaagacaaagggtacaagataaagagacaccagtgatggaactgaaatgctaacccagcatactcgctctcttatctttcatcgctactcagtttgg

SEQ ID NO: 6067 - DNA, 201 bp, Bos taurus
aatgtcatttgctttgcttacatgctgatgctttttgtatttaaaacaaactacagttaagaaggccactaaaaagtttcttattttaaactgtcacctcgacagaaacctcattttttcctgcttttgactccacacccacaattaacccacgtaaaacaaacgactgacataaaattcagaatcaacagaaagaagtaa

SEQ ID NO: 6068 - DNA, 201 bp, Bos taurus
gacttgagggctatagagcttttatatatatctgtgatgcatttatttgtattgctattgttcactgaggactaattatataaaggaatcatgcccagaagatggcgtgatttaaaccccttggaatgatgctcttataatagaactgcaacttctaccatcatagaacttccagagtcttagtgtgcaatggtaaatatc

SEQ ID NO: 6069 - DNA, 201 bp, Bos taurus
atcagtgaacacacacataaacatacataaatatgtacacaaattagttttttaaaaattcagctgccatagtctcacgttgttataaattgctaatatcttctctactgcaccaactgacagttggtgtcctgactaaagattgattaaaagtgacattgtcatggaaaatttcaacatgtaaattctctactgatttat

SEQ ID NO: 6070 - DNA, 201 bp, Bos taurus
caaagccctgactgcatttattccccaggaaatgattgaagccatccgagaagcagtggtgtacctggcacacacgcacgatggcgccagagtggccatgtactgcctctggcatggcacgcccaaggtaagggtcagtcaggaattgcattttcagtctccttggggtcttgccctgttgtgcacagcattgtctttgca

SEQ ID NO: 6071 - DNA, 201 bp, Bos taurus
acatgtatgtgctgtctcctagtttctgtgggacaggaatgcaggcaagatttaactgggtgcttctggcttacagtctcttatgaggtggccatcaagcggtcaccccagtcctgcagtcatctggggctggtgggtctacttccaagttcattcctgggatggggttgttcataggcctcacttgctgtctggctagtg

SEQ ID NO: 6072 - DNA, 201 bp, Bos taurus
acctgggtggaaagtctgagagagtgtgtatttatcttcttgggctgatcatgtcaatgttatgatcagaggatcatcaggtttccctccttcaaaatgaggatgttaggccatgtgagaacagggagaatgtggttgtcaccaaagagtccaacaccccattattttttttcctgttctgacctttaatcaaagcagttt

SEQ ID NO: 6073 - DNA, 201 bp, Bos taurus
gtctgttacttccaagactttcttggggccacattttggacattttatggagcactttccctcccaacccccacaaaccaaaagctgttattaaatttacgctgctgcttggccattttagagtcaagaaagtgtgggaagtgcatgcatggaggatgcaagttttcgattctgccaaaaggaaagaatgagaacatgata

SEQ ID NO: 6074 - DNA, 201 bp, Bos taurus
actccccttatatgtgcaatctaaaaagaaattacacaaatgaacttatttacaaaactgaaacagactcacagacttagaaaataaacttatggctgccgtggtggaaaagatgaaattcagttccatccactagaacacaggcacaaatttccccaaccagaaaaccttcacaaggccctagttcaaccccacccaaag

SEQ ID NO: 6075 - DNA, 201 bp, Bos taurus
ttgtcaattgccactataacaaattactccaaacttggtggcttaaaacacataaatttgggttagagttctggaggtcagaaatctcaaacgggtcttattgggctaacattaaggtcagggcacagctgcctttcctttgtaggatgtagagaagaatccacttcttgcctttttcagcttctagaggctaacattcct

SEQ ID NO: 6076 - DNA, 201 bp, Bos taurus
taagaggatgagccttgagagggggaggttgtcctgggttatccaggtagaccgaacggaataagggtccttagaagagggaggaggtgggatcaaggaaaggaaagctgaggtgacaatggaaccaaagactgcagagatgcactgtggaggcagggtcgtgagcaaaggaaggcaggcagcttccagaaggtggaacaa

SEQ ID NO: 6077 - DNA, 201 bp, Bos taurus
agaccctcagttagagtgatttcacatataggagcaattgaaaagtgggtgatccagtagcttcagatgaaaaactcatgtccctgtatagaagatgtaagcttttgccttatcaaaatgacaccttgcagtaagccagggacacgggccacctgcaaatgcatcactattaagcagaaattgtgaagcacggtcccctta

SEQ ID NO: 6078 - DNA, 201 bp, Bos taurus
cagtcaactattttcatcatctgtgtgctaaataccactcagtgtgggacaagcactatggtgagacagtaggttatccttactggagcaggatgctctccgcacacagcaggccagaccctgattagctaagacctaatatcaggtaaaaccctgagataagatagtaagaaactccacactcattttgggcagtaacta

SEQ ID NO: 6079 - DNA, 201 bp, Bos taurus
ggggtcacaaagaaaggcctattagcttgcctgttcttttttgtcatccagtcctcttctcccctgcaataagatggaatagctccattctgagtatttcggatgttattatgggccacaccccattagtcagattttacatacccctttcatcacgggattgccctatttgcattcttaagttttcctcagtgaatcaat

SEQ ID NO: 6080 - DNA, 201 bp, Bos taurus
ttagtttggtagctcctgagacaaccacagtttactgccttaacccttcaaaggtggcactgacagtatctaaccgagcagggtgtcacggtgacctgaccttggaagtgggttagtgggagctgagctccagcttgtgaatcctgttttcagtcttcatgtggttttaagatttagcccaatttccagactatcccatac

SEQ ID NO: 6081 - DNA, 201 bp, Bos taurus
atgtgctaggaactgcactgctaactctgatctcagcacaggatatatcctatcgtgggggttgaatggcttgtgaatatctagggtctttatctgaatggcttggtatcttgaagcagtgctctgtgtggaatggttctttctcagcaaatccctagaggcaacatccagccctcatcctgtggttcagaggtggtatgg

SEQ ID NO: 6082 - DNA, 201 bp, Bos taurus
tcaagggactaaaataaaggatcctttctctcctgtttgcagcccatagggactgtgcccaaagaaagaccaatggtttacagccatcaactttctacctgaactgagagaagatgggatgatgtaaaaagcagttaaattttttcattctttttctttttatatatgaaattctccagagctagaggatttccttgaggg

SEQ ID NO: 6083 - DNA, 201 bp, Bos taurus
ctcctggagcttgggagcacttgttctcccatctcacagaattgggggtggcctggggaacatattggatgacgggagggaggccttgatccatctcagacgatgcagttctgaggaccatgcagtaccccagtgcagacacaagggggcagagagccgcaggacacgcagctccccgggcctgggcagagaggatgagtt

SEQ ID NO: 6084 - DNA, 201 bp, Bos taurus
cctcatcatcactccaacactgggttaggagaggcaaaggctccaaggaaaggtatagaaataaaactcaaaatactaaaaggaagtactaatttcttccgttgatagtagaagctaaatagatggaagaggaaaaaaagatgacaagtacctatttactgtgaatgacacagaaagaaattaatttgcctttagaaattc

SEQ ID NO: 6085 - DNA, 201 bp, Bos taurus
caagtcagagttcaagggaggcactttcaaggcgaagccaccgcactgcagtccagagttttggccaattcttcatgattactacaatccgtacacaccagtggagagtaacgaaggacaggtcaggggcaggaggtcaggacaacacaggcagacaggcactgtgagcccaaggagaatatcagagttcggagagtaagc

SEQ ID NO: 6086 - DNA, 201 bp, Bos taurus
ttgaacattgcaatttgatattagaatacattcttcaataaatgtggttatgtcattaaaaaaaaaaagaacttgcttctcctgtgagatagacatgattattattcacaatttacagaaatgaagatggaactttagagaggttcagatatctgcaggaagccaccacagtgctctgttgtgggggcaggactctcaccc

SEQ ID NO: 6087 - DNA, 201 bp, Bos taurus
ctctaaaaatcatgctttttctcttcatgacttttgaaaatgatcaataaatctaatgaatagacagtgccatggctgcatgcttatctcatcttattcccatatattttgataattttgtatggattgctgtttactgccatcctttgggtcacagtaaatattttaatcattatttcctctgtaattttctttaatgaa

SEQ ID NO: 6088 - DNA, 201 bp, Bos taurus
agccttgaggcccccacagccactcccatcagggtttgatttagagattgtcagaaagtgctttgataattgcacacgggcccccatcagtcaaaccatgctgttcagttcccattcagcaaattcctccaaatctagattccaaaagtcttaggtcacctggggtcactttgacctgggagagcttggggttctgagagg

SEQ ID NO: 6089 - DNA, 201 bp, Bos taurus
gacctggcctactctgacctgaataacaggggagtgtacactggagacccatgaggtgacagagttccaggtggtgaacctggagttgtgttgctctgtactccaccatgtggggagtggagcactgggatgcactggaactgtgggatctcttctttttcagcgagctcccatttccacacaggcaacatttcctttctc

SEQ ID NO: 6090 - DNA, 201 bp, Bos taurus
ggccctcctctaatccatcatccatactgcagccagagcaattgaagtggctggaaaggaccctaggtgtgctggctggatccttacctctcacacccaggcaggcccttcaggaagcagacacattttggcccctggggctctccagatctgtagctttagaactcttgcacaagtctgaggacttgctcttccaaacaa

SEQ ID NO: 6091 - DNA, 201 bp, Bos taurus
atccagtggcttggcctgggcccagcatgcccccttggttcattccaaggctgggatggaggtggggagggtaccacagacaggcagacagctgctcttagagctcccatgaactggccacagttagtgaggctcaaaaactccgtcaccctgactgaccctcatactcccacagaccctggcaacgcctgtgttctgacc

SEQ ID NO: 6092 - DNA, 201 bp, Bos taurus
accagatgccccctgaggaacagggacaatagaaaaggatgtcacctacagagctgggagagtggcagggacacggccagctccaaagacatcaccaaagaagaaagaaagaaaaatgtaggaagagacccaagccttctctcttcctcttgcctcatttcctggcagtgtcctcaactggcagaacctggccaaggagcc

SEQ ID NO: 6093 - DNA, 201 bp, Bos taurus
ccactgtgtttgggggacgagctcaagaggtagtaacagtgtgtgttaacttgccgtgtacttggtcgttaaaggagggccctaggcccgcactgggttcacggagccaaacaaactgctaggcagaatttaattcttgagaacatgaagccatcatgtggatgagcttggagatgtctacccggctctgccactggccct

SEQ ID NO: 6094 - DNA, 201 bp, Bos taurus
actcgttgatcccttagagatagtggactacctgctggactacatgtctgaccatactgtagctgaatttgccttctagcacctgcccagcacaggttagagggtcctgggccttctcaacaagccatggtacactcaatacttgcatgtttcaaggccactgccattgctcaaaacactttggccactcctttacaggaa

SEQ ID NO: 6095 - DNA, 201 bp, Bos taurus
ttaataaatgaaaaaaatagggatatcaatccatcttccatctcagtgtgttgttgtgaggattaaatgagacagtataaataaagggcatagcacacttcctagacatggtaaaaaatgataaatgtttaggaagagtaatagtagcagtaggagtaaagcttatagtgtataggtatccttagtataatttcagaacat

SEQ ID NO: 6096 - DNA, 201 bp, Bos taurus
gagctttgtatttgtactgaaatgtgactctgagcttaaggaggtcctttgcctgtatgtttgtgaatactccaagtccacagaacaatgtatgcagttgcgtacaagacaaatacgaaaactgttctaatgagaggattataaatattccaaactgagaggacagcttaatggctcttattcttcctttttcctcttccc

SEQ ID NO: 6097 - DNA, 201 bp, Bos taurus
caactcttaaacaaggcaaaggccaacaaaaaaataacttatttttactggataaagataatccttgttatttcattttaagtgacgctcttgtgaaatacgcacacacacaatttcatattttgattcaactgaaaatctaactttaaataaggaaatttaggtgccatgtggattctactttccttatttttgtctgtt

SEQ ID NO: 6098 - DNA, 201 bp, Bos taurus
aggagtccagcatgtattttcaagtagactggctgctgttatgggcccagtcaacttgaagtttcaattgcttttcaagcactgcttcattgaccatacttagcaatcacagaaccacccaggccagtgtgacaaaggctgggagagaactcgaaattctcttaaagaaaaagcatattttagcagttttctaaatcaagc

SEQ ID NO: 6099 - DNA, 201 bp, Bos taurus
atccttttttccccaactaggccaagactcagttacaacctttcctcctcaggaatgatctgaggggtgaccaatctctattctactgcctgttaccaagcgtataatcctttgtaggccacatgaaattatttcccaggctttatctttgaaatattaaacacaacatcatagaaacacagaacagaatctgttctatgt

SEQ ID NO: 6100 - DNA, 201 bp, Bos taurus
actgggtatactactctataatgattgttgaccactaaaccacttcatcatctgcagcacttttcttacagggagaacttgcatgacttttaattaatgcgtggtttcagaggatccacactatttgtgattcaaccccatattctgaatgaagactaagctgagttggtaactcttatgacctttgcgggaacatgtatc

SEQ ID NO: 6101 - DNA, 201 bp, Bos taurus
ctgttttggcaggtttcagggtatcctggggaggtgctaataatcctgaaaagccatctcaagagcgtcagtaacaaatagatatggctcatgccaatcactatctattttcctcctctggaatttctatgtctacaaagtaatgtaggttatattctagagtagtattttcagatttatgccttttatggcattcttccc

SEQ ID NO: 6102 - DNA, 201 bp, Bos taurus
tgccttcagatagaacactaagctgttcttcattctcaaaaaggggtctagctaatgaatatatcttcttacctcatgttcaaatcatacagtttttcttttggatttgaaagagatttcttcctccagaatccttttcaaatataaattatttaaaagaatttttgccttgggaaagagtagagaggtatattttgaatc

SEQ ID NO: 6103 - DNA, 201 bp, Bos taurus
tgggcctaacaaaatcacagggcccttataaaaggaaggcaggagagtcagagtcagagtcagaggagatgtgatgacataaacagaggttggaataaactgctctgaagatggagaaaagggccaagagcctagaaatgcagtcagcctctagaagctggaaaaaccaaggaaacagattctccgatagtgcctaccaaa

SEQ ID NO: 6104 - DNA, 201 bp, Bos taurus
tttatatttcaaactggttgaaaaataaaaataatatttcatgatatgtgacaattacatgaaattcaaatttcagcgttcgtctcttcaggccactataacaaaataccacagattgggtgggttataaacagtagaaacttattgctcacagttctggaggctggaagctcaagatcaaattaccaccatggtcaagag

SEQ ID NO: 6105 - DNA, 201 bp, Bos taurus
aggcttatcattaatttaaattaatttttggccaagttgatcacagaaaaagaaatgtattgtgaattcactagataacttataaacctccattttcctgtggccatttgtaattattctagtaaattgcttctttataacagaattttgtttttcctattactctgtaacagctctttttatactatgtctattaaccca

SEQ ID NO: 6106 - DNA, 201 bp, Bos taurus
ttcacaattcaaatatcttcagggcattcctaaatcactgaaatattaaatcatgattgtaatttgtgatggtaatatttaactattgctcagtgttccataggaaaacatacaaaaccatgttgatccatgaatttgtctttcaaaaagcatcaaatattttgaagaaaataaacttcactaaaaagtagcatcatttta

SEQ ID NO: 6107 - DNA, 201 bp, Bos taurus
cctagtaacttaagacctgactaggagaatgcactcccctgatcttgggccaagaagactctgaagcactcagcatcttgactcagaacttcttaaaactcactagggaagaagttatgcaactggcccttaggtactaggaagtataagactgaagaatgaagaacaggaacaacttgtaaccactggaaggacattaca

SEQ ID NO: 6108 - DNA, 201 bp, Bos taurus
ctctagtattttggcctggagaattccatggacagttcttgggggacactactgagcaactttcacttcacttcagaagttttaatagttctactttctatatttaaatattccaattacatggcctttatttttcttcatactatgaggtagggatttaactgcatttttttctatgtggaaaatcaacctttctcacat

SEQ ID NO: 6109 - DNA, 201 bp, Bos taurus
gctaagcccaagctcagatgacatggcaaccaggcagctggggaaagttatccaagaactgaccatatattgtgaagtgtggccatatcctaagggcagtatctaaatcagcaggcacttgggaaaacagcaacgaacatccatcgaaagatgtcattaatcatgtagagaagatgattcatctctcatttggccttttct

SEQ ID NO: 6110 - DNA, 201 bp, Bos taurus
atctgttctttttttttcagctcatttctttaatatagtatcatttccattttgggaaataaatctttctcatgcacacatgctcattcaatttctctgcttctcacccgccccctaccccacccccacccgccatttctcttgctcttagtatattttcctttccaatgtgctctttcttttggtagctcttgttagaaa

SEQ ID NO: 6111 - DNA, 201 bp, Bos taurus
aagagaaatgaaggaaataaatctcatttaccagtgcatcaaaaagagtatttaggaatatatctccctaaggaatcaaaagacctgtcctctgaatactataaggtgctgacgaaagaaatcacagaaaaacagagctgaaggaattgggctccctgacttcaaactatgctataaagctacagtaataaaaacagtttg

SEQ ID NO: 6112 - DNA, 201 bp, Bos taurus
caaaacagaaattagaaagtgttttgaactgaattacaataaacatataggatttaaaaaaattttggaaactgctaaaacagtatttaaaggaaaatttgtagcattgtacacctgtattagaaaaaaaggaaaggtctcaagtcagtgatctcagtctctactttaagaaaccaaaaggaacagaagagtaaataaaac

SEQ ID NO: 6113 - DNA, 201 bp, Bos taurus
ttttatcccttttttcttctgaagtgctagaaacttttgcttcaaatatgaagtcaatataacatgacctgtatgcataaaagctgtaattaaatcactaatttaatgtttattgagtgctgacagtgctcttgggttagtatgaagtataggaaaacagacaaaatctgtttgaggtcacagcgagtgaagttttcttcc

SEQ ID NO: 6114 - DNA, 201 bp, Bos taurus
gcaagcttcacagtgaatgagcctcactgatcagtccatagactacagctcaacaaacaagtgtccctttacagagtattaatgttcatttcccccaaagcgggcgcaataatactagggatgttaatgttaatgaatacctcctttggacctaagcctggtaaagtctagggaaatttttcagctacgtagcaataacaa

SEQ ID NO: 6115 - DNA, 201 bp, Bos taurus
ggaaacaaagtggatgcctgtgggtctatcagtattacgtggtaggtgtatgtgtaggtttgtagtcactatagccctcatattccagtcttatgtttttattttattgtcaatcaaaaattgtctttctaaatttttgtcagtctttaatttagaattgtagataattttatgcctccaaatagctaagtcaaattgggc

SEQ ID NO: 6116 - DNA, 201 bp, Bos taurus
gaaggcagaaaactgagaggaagagaggagggccactgagagcatggatcaggccaacttgactgattgcccagagagggcaatgggcttgctgatagctgctgatcctctagagccccctgagataccaggctgagccttttgtcaaaggcctcccctagaaagggtttgaaactctcaaaattacctctcctctgccta

SEQ ID NO: 6117 - DNA, 201 bp, Bos taurus
tcaaggtcacagcacatgaacagggctgcaagatcacagagaagtctttcctgagattaatggcagggctgagccaaagatgatggaaagagcaccctcttgcatgctcatttttcagggatttacttgttggctaatcatagcaataacagtttgtatctgacaaacacaactggatatgtgcagtgagaaactctgtat

SEQ ID NO: 6118 - DNA, 201 bp, Bos taurus
actaattgccaagttgatctagagtgtcaaaaactgaagcaaagtagagcttttgtgagctttacaatgctgaagaggctgtaagatttaattcagaaatggtcaaagagaagaggctatgaaaaacatcctagattttcacttagaagccctgaagagctataatgtaggagtaagacagaaaccagaataactcatttc

SEQ ID NO: 6119 - DNA, 201 bp, Bos taurus
ttaaacaggattcttaaataggactggcatcttagaaaccaacttatgtcttaagctttgtactctagaagttaaaagaaagagttaaggtttgaattaattaattcgtcagctctcattaatgcagttcacatgcctcaaattatggacattataggagatatgctttcttctaggaaacatatttgtgttaagaataaa

SEQ ID NO: 6120 - DNA, 201 bp, Bos taurus
agaaagtctcaagcacaaccctggctttagtgcaatctatatgcactgattcccagattgaaatcaaacactttgatgttttgagcaccagatttatattatttttattatcaaatgctcattttcatgtggatataaatatgcttgttccgtggaggataccacgctcatcttaatattctgttcatagttttcaatgga

SEQ ID NO: 6121 - DNA, 201 bp, Bos taurus
tttattctgcctcagttaaggttgtgttactttcagaagacatcctctgactctcttctccacaggctggattagatgccgctcaaagcggtgatcataacaatctgaattttcctggaaaagtgcttattctttgagttgtgattttgttaatattgtctttctccaccactatgatggaactcttcaagaagagagact

SEQ ID NO: 6122 - DNA, 201 bp, Bos taurus
taataacaacaacagccaccaataaaaaataataataaatctattcagagtagttgaaattcccctcccccttacaggagattatatatcagactgaaaatgactggagcacagataagctttcacaaatggtaatgcggactggaaaaggtcagttttcattccaatcccaaagaaaggcagtgccgaacaatgttcaaa

SEQ ID NO: 6123 - DNA, 201 bp, Bos taurus
aggaagcaaaagagaagcaggggtactggggtggcttggtgcagaggaaaaagtgcaaattctacctcatattcaagtgctaattctacctcatatgggtgctgaggcttctctacagatgcaagctctgtgtttctgtcctctctaagcatgaattttccctatgaatctagacacattctttagatcaggttttaccaa

SEQ ID NO: 6124 - DNA, 201 bp, Bos taurus
gtcagctcccatacacttgatcatttttactattcagtttatctctgtttcaatagggatttactcatactctatacatagctgccaaactattcacttcggggatgactctttttgtctaacaccatagaatcatcagaagaagacataaaagtgatccttatttgtaggtttaagaaaaaagatttgctgatatatttc

SEQ ID NO: 6125 - DNA, 201 bp, Bos taurus
aataagcttttgctatctggctgggaatctaccctaattgctttgggggaaagatcaggttagaataattgacttgtacatacatataatccactcaaaagttggagtctgcctttgatgtactcttgcttatttctgtaaattacacaagatttgtgtgcatgcttatgtatgttcctttgtaaagagggaaaaaaggta

SEQ ID NO: 6126 - DNA, 201 bp, Bos taurus
aaaaaaaataaaaatacaaacaactaattttctccataaaacactgtaggaaatccatgggtactcagagaaaagcaaagcaaagaaaccaacacaaggagatgatacttgtgaaaaaaaaaatgttttcttagtaaacttttgtaaaacctaggttaagtaaatgaagctcaaagaatgtaagacatatagaaaagatag

SEQ ID NO: 6127 - DNA, 201 bp, Bos taurus
atattcccttcaggccaccagagctgtatgctccaagggtgctctctatgtggctctaggagctcttctgttagggtgggctgactactgtgggtatgctggtaggcttggctggcttctggcctggttggttgccaagccctgcctaatgtggctgttggaaagtgtggagggtcttgacacagttgtctgcattgcctg

SEQ ID NO: 6128 - DNA, 201 bp, Bos taurus
caatcaccatctgcagtggttcagaaaaacaatattatgtatatgtgtgtgttatatgtttgtgtgcatgtgagagagtgagaagcggggagggaaaaaggatacaaatgataaagctaatgggacaaaatattaacaaaagttgaatcttggttaaaaacagttttgcttactattcttacaacttctctgaaagtttga

SEQ ID NO: 6129 - DNA, 201 bp, Bos taurus
ctggacctcctgccgcctggtgcaatacatttgcatcttgaactgaacttccttcctttctctgcagctgcaacctgagaagctcaggttgggcccaatcgtcattgctttttgtctgtgtccttctatcctacatcagggaaaggtatgtttcactgaagcatctggcctctttcgtttctttttggacagttgcaggca

SEQ ID NO: 6130 - DNA, 201 bp, Bos taurus
agatgctgcaagtatagcccccaaatgaaagccagaaaatacagagagaattacgggtcactccttagtattctcagattctggccttatcccaagattttacttcctttgccgatggtttatgtgctacaaagaataccttgttaataatttgattcatttaattctcagtgggagtcttttatcatatcagaatcacct

SEQ ID NO: 6131 - DNA, 201 bp, Bos taurus
tgttttagaaaaataattacacgtcttcagaagcaatttagactaatttgaattaggtctaaatctcagcacttacataggtaggtgaaatacaacgaagtttaccttctgtccccttcctacccaccttttcctttcttagaccgagcctggctgatagaaccaaggaaggtccagaagcttcaggaaaaaatttatttt

SEQ ID NO: 6132 - DNA, 201 bp, Bos taurus
ctggctagactttataagccatatggtatctgtcacaactactcaggtctgccacggtagtacaaaagcagccatagataatacgaaaacaaatgtggccgtgttccaagaaaatattatttataaaaacaggtggtggactggacttggcacacaggtccttgcttcccaacctgtgctgtagatgaggccccttctgcc

SEQ ID NO: 6133 - DNA, 201 bp, Bos taurus
tacagatttgacccctgtgtgtctattgggtaagtaggaagtgagtcctttaactctgttctatgtctctagagattctctaatcattttcttaaatatagtgtatatctttgtccctatatcagattttaaggggttctgctttaaataaaagaaaacattttatcatcatgttatggtgctagcttttgtttttataga

SEQ ID NO: 6134 - DNA, 201 bp, Bos taurus
tctgattcactggtatttcttcttttcttataaatgatgctttctgataggctacgagagtctaacattgacactgatcatctgcatttccctgttaactttgactttgtgcttgttctccttaattttgtgttgtaaatacatatgcagcagtaatacacagacaactatacgttgtggagtcaaacttcaaagtgtctg

SEQ ID NO: 6135 - DNA, 201 bp, Bos taurus
aagagtcaaagacacacaaaggcatatatattcctaaccccatattataatatcctctgtattttcctgttctcatgtttcatcaaagaaaccttaatttccccttccttagaatttctaaaatgtcacatttcctcttttaccttccacatttgtgtaacaaggcaggagtgtactctagaaatctcaatgcccccaaga

SEQ ID NO: 6136 - DNA, 201 bp, Bos taurus
taggtagcaagaaccatacagaagtagattcagcaatggagtggttgagtaaatcattgaattacttaatttcaggcctcttgttatttagaaaatataaaacactatttgattaagtcactgtcagtcatatattccatcacttgcagccaaaacaggcctgtttaaattccacacttgaaggtaccaattagaataatt

SEQ ID NO: 6137 - DNA, 201 bp, Bos taurus
attctgtcaacacctcacaccccaggagcaggggttaggacttgatccctggaagctgtgtagttaaatttgcaccatgacacagcgctagaacatgtgagcttggtaggatctggccttgataccacaaaagccattgtcctgaagagctgtcagacacagccagctgcccaacaccctgactgcagatgccacaccaat

SEQ ID NO: 6138 - DNA, 201 bp, Bos taurus
aaggtaaggtaaaaggacacttctagttcctaccagtctcaatgaattatgggaagaaaaagttggaggtagcgaaacaggttgtgagacgtgttggccttagttctatagcagggaggtggtatagataaacccaggggaaatccaagatcagagaggcttttgttcacttctcacttgtgaccatgtaagcaggaggga

SEQ ID NO: 6139 - DNA, 201 bp, Bos taurus
caatataagaaagatggagactccatggagacttggaggaaaaaatggggtcccaatacagggaaaactgaattctcccagaaatgagatagcatgcgaggactgtctggggttcagccattctttcatttactttctccaggtataattttgagagcttatcttgtgcaaaatactgggctagacaccagagctttttcc

SEQ ID NO: 6140 - DNA, 201 bp, Bos taurus
ttaactgcaggacgtcttctctaatttccagtactaatgggagcactgcaatagctggtcacagttctgaccagttgcagtattttttgaccatgaaccccttttttaaggtatagttaagagaatacatcatgggatgattgctgctgaaacatgcttcagaaactgtgacgtttaggggtgaaacgagacaagctcatg

SEQ ID NO: 6141 - DNA, 201 bp, Bos taurus
agcaaaggtttctgtctacacataagaggtgtggttattaacgttaggtattttgcaaatggcaaaaggctagttccttgagaaagtcagaaggcttttccccctcattccctacccttctctggtggtggtatttttatagaagatagttggcaactctagtgaacgggaacagtcaggcaagcattgacagtgtgctag

SEQ ID NO: 6142 - DNA, 201 bp, Bos taurus
caacacacatcatttaggatataattggctgctgctggcactcacacaagctgtaacattttctatcagcagatgagtaatatctggagagtcaagtaaacaatgacatgctgcagaaaataccttgatttgggaaggaaggaaacatataacaaaccagctcttttccatttcaaacaggtattgagaaagctataatac

SEQ ID NO: 6143 - DNA, 201 bp, Bos taurus
tggtatctctttaagaggaaagaatgactaacttgtgcattttcagttttgcctctcattggtaaataatgggtccaataaatgtcttgataaactggatatgagtgtattggcattagtttaatgtagagacaattaagcttttatttttaagtgttagaagtaagagtgaaaaaagaataaaatacagagaatgtagaa

SEQ ID NO: 6144 - DNA, 201 bp, Bos taurus
gcacgagtcccctgtggcctcctttgcctggaaaagcaataaagctgttcttttctgtttcattcaaaactgtctctgagattcgattcaattcgactctggtgcacagaggccaagtttgtggcatcacaatctctttacctttacactctgtgcctaccattagataattaaatatggagggatgggttacttcaaggg

SEQ ID NO: 6145 - DNA, 201 bp, Bos taurus
acaattaaaaagactttctctgggagggggaaaaaaaagggcaatccaagacatgcttcattagaataaagcaactgaataagaaaggctaaggaggcccgaagggaaacatgactcaggagtgtcatggatcctgaatccatgggggagtgacatctttatagacaatgacacacagccctcttaactacacaggggcca

SEQ ID NO: 6146 - DNA, 201 bp, Bos taurus
accacattccactctgtatatggaatgttactcaacagatgtgaaaattgcttttgtagattgacgttactgagtgagtctagtgaaaaggtagaaagagagtgagggagatgaaggaaagggaaagaacaaaagcccctacatttctgccagtgcctcatccagctcatgagttcctctcccagggcagggcagattctc

SEQ ID NO: 6147 - DNA, 201 bp, Bos taurus
caagaactgcagaggcccatgtggaagaagcaatgtgcttgctatagctgggtcagtcttaacttccaagcaggcagagatgcatctttgaggtgggccttctctttctgggtttgaggagaagcagcttctgagaagagttatcgccacggcacccacgcctcagccagccttagacttccgccagatgaggagagggcc

SEQ ID NO: 6148 - DNA, 201 bp, Bos taurus
ctatgggtattttcaggtgagaagttggacatgatgatctcaggtgccatgactcttaaaggagtgggtgactggaaggagggtggtcttgatgttaaactggatgctcctgttcttaatggccgcatctgtggtccttccaggtccgtgggaggcatccgggtctctctgtacaatgctgtcactgtcgaagacgtccag

SEQ ID NO: 6149 - DNA, 201 bp, Bos taurus
tctttctctagctttgttagagccctgtggcttaaacttgggtaatctgatgcactccatttctctccgcttctatccaggcccatccgaagatactttccgtagggatcttgtgagatttaatcaattattattaaagggctgaaagatccttggatgaaaggcatgaagataaaagcaaagtctggccctattattatc

SEQ ID NO: 6150 - DNA, 201 bp, Bos taurus
tcagtcacccagtcatgtccgactttatgccaccccatggccaggcttccctgtccctcactatctcccaaagtttccccaagttcatgtccattgcatcggtggtatttgtatccatggggccatttaattgagaggtaggagagatgagagaagacagttaggcaagagcaagagatagccctgtgtcttagttttctg

SEQ ID NO: 6151 - DNA, 201 bp, Bos taurus
cttctttctgattgaatggggtcatgggtgggctcctggcctgagtgagaccacaggctgtgttcaacagttaagtagggccatatgctgggctccgatgctggctggggttttaggctgtgatccatggctaggtggtactagagagacttggctccaaggttactgagcatcattgttaatgctccctatttttatggg

SEQ ID NO: 6152 - DNA, 201 bp, Bos taurus
aggtacacagaaatcctatgactcagatggggaagagtctactttcaaactcagctgcatagttgttagcaatgttcagctctttaaggactgttggatcgagggccttggtttctcagctggctgtggcctccctcggtttcctgctatgtgggcctctctgttgggcagattacaaggtggcagctcacttcattggag

SEQ ID NO: 6153 - DNA, 201 bp, Bos taurus
ctctccagccctaggataataaaagatttctgctcttgttgcggttttgtcacttgcctcactgtgaggccttcaggcctcctagcttcttaggaacagatcctcagtaccaaaacctctctactcaaattcttattgggaagtgctgtcttcctcagtggcctgttgtaaacacaacatagtaatcttcattcagttcag

SEQ ID NO: 6154 - DNA, 201 bp, Bos taurus
aataagggatgtttagagtataatattttggaaatgtttctacttccctcagtattgacacagtgttggagaaaccccaggaaatgtcttgagtatattgtttgggaagaccagtccaaattttatttcagtcatgttgggaagaggcacagactataaatttaggtgagtatgaagggagagttgacagtgattccgtta

SEQ ID NO: 6155 - DNA, 201 bp, Bos taurus
ttttgacacctcgttaaacagaattttgttcagactaaacgttcttggcaaggcactggttcacccaagtgctttgttaattttaaagagcagtataagcagaagcccttattacaggaaatagtgcagtgcacgtgtagtggagagagaggttggcactgtcggttcggcttcagaatcctcacttttggtaactcactt

SEQ ID NO: 6156 - DNA, 201 bp, Bos taurus
aaacagaggagaattggaggaaagcatctttttatttaaaatgccaaggaggatgtgagacaaacctaggaaagcagaggtgatcataataaaataatgctgctaaattatacatgatagtctgtgcttctctggcccttttcatccatggctatcaaggccacaccacagacctggttaggccctcttgtcatttctttg

SEQ ID NO: 6157 - DNA, 201 bp, Bos taurus
gtaattctgggtagctaccactgttacaaatagaggactcatatcatgtttaaatcctttgagccacatgtcacaatggacagaatgattggaaacatacgaggatggagatttacccaagaccccaagagttctagtgagaccatgtctagggtaatacaaagacatacatgctgcaaattaaccatctcaaaacagagt

SEQ ID NO: 6158 - DNA, 201 bp, Bos taurus
tgctttgattggatgaccacagagacagctttgattggatgaccacagagacagctttgattggatgaccacagagacagcttgatctccctgagtactcccttgaactttcaactttaagtttcaataggcaccagtgggattctaatcaaggcgggggagactattgattgtttggctctatcatgaatgcacaattct

SEQ ID NO: 6159 - DNA, 201 bp, Bos taurus
tctaactttaatatatataccatatcatatatatatgcccatattcttgggagtgaggaatctaaaactatcttttatttttcttaaatttttccttactaaaaaaataacattggcaagattggctgctaatattttgatgtcacaaatatggtgctcatgcatccctggttaaatttgccaggtagagacaggtggagt

SEQ ID NO: 6160 - DNA, 201 bp, Bos taurus
acctcggagtaatttgctgactttaaaaaacgcgttgttgacaactgggattatatggtatctcttatatcccagacgttttcctgatactagttttattgggttttaatcagacatgatcttagtgaaatgctttgaaatctgattaaaaagcaacatgaataaaggtgaaggggaaacaacagcagtgttgcagaccta

SEQ ID NO: 6161 - DNA, 201 bp, Bos taurus
cactgagagagcttgaattttcacattagcgtatatgttcataccagctgtgtttgcttgaagcacttgttgtgttcctgttgggatatagttcggttaccaaatctctcaaggtcactcggcatagaacctacttttcccacctgctatcctgtctcctgttgaaggagagaatgtgtgggtgaggacccataagagagc

SEQ ID NO: 6162 - DNA, 201 bp, Bos taurus
agggcctttaaagaggtacgcaaggttaatgaagtcataaactcagggctctaatccagtatgacttgtatccttgtaagaagaggaagagacactaggcgtatgcatgccacgaaggaaggccaagtgaggacacagtgggaaggcagccctctgcaagccaagggaagacggcttaaggaaacctagcccatttggttt

SEQ ID NO: 6163 - DNA, 201 bp, Bos taurus
gagtaatttgttatgtaaactataggtaattgaggaaccttttcaagtgcagattctctaacaatcctctcctgaaggcctgggattcacggcactttaacaagatccaggtgatgttagcttcctgctagtggtccacgtggtccacaatgaggaggtggatttggccccgccccccgctacagtgagccaatgagctca

SEQ ID NO: 6164 - DNA, 201 bp, Bos taurus
gttttgagaggtgggccaggacagatggtatggaacaggcgagatggttttctgatcaccatggcagcctttgggggctctcagaggagagcagctcagttgtgaggctagagattcaggccctgtgtaatgggtgtccagctcgactcccaaaggtttcctgatgggatctagagagtgaatgtgcatccctccccaacc

SEQ ID NO: 6165 - DNA, 201 bp, Bos taurus
gcaatatgtatctcttttcttctgtatattggccattttgtgtgtgtggggtttctcatcatggagatattacagatatttgtaagggaaatgagaggacaaaagttattttagttataggcaattcaaattactcctgcaaagaattttagcatcacatacaaaagctaaaataccagcagtctcacttcaaatcctgta

SEQ ID NO: 6166 - DNA, 201 bp, Bos taurus
gtgggcctctcaaaaagccagttcatgtgctgcacagcagagccgtcatttgggtatttattgggacagacaaaagacatttactgtctaagaaaccactaaactctctggccagcaccagcagaggagttgggagacaaagcagagtgaaaaagccaggtgtgatagtcaatgtatctcagccttggtggggcacacttg

SEQ ID NO: 6167 - DNA, 201 bp, Bos taurus
gattcttacagtaaactcaagggtaaagagcctttaaaaattaatctaattcctcctgatacacttttctagggagatcatgacatagtgtgcagccaagcggactttgaaaaaaacatcactagcagctatttttcctgatcatttaaaatgccagttgcagatgtcaaaggcataattggcctgaacctgtactggaaa

SEQ ID NO: 6168 - DNA, 201 bp, Bos taurus
tggaggttcctggttgagcttgagggtgagcctttgagagagagactcacccagcccggcctgaagggccgccagcctgaggaggtaggccttgatatgagtttcacctgctcctccaggacgggtctccccaggaaatcacggaggtggaagtctgctcgcgagaaccagggcagacagatccagaagggcccagttcag

SEQ ID NO: 6169 - DNA, 201 bp, Bos taurus
gctgcaagcccacacgtggcaaattacggggcaaagggcggggccccagcgcatgacccctcctgaactctctagcagccgaggcttcccactgtgggtgccaggagtttggcaccagatgggccaccatgcagagactgttcaggactgtgggggcctcctcctccagagctcatcctgtctagcacctcatcatgcagc

SEQ ID NO: 6170 - DNA, 201 bp, Bos taurus
actcaaagattgctagtgcttttaaagcaggcatttcagtagaaggatggtggttgcagttacagaatagggaattagttcgaggagaggagatgatggcaggttggaggctgagggtattgaatactctcaacatgtatattaagagataagaagcaaaaaggatgaacagttcagtaaggatatttgaagggtctttgt

SEQ ID NO: 6171 - DNA, 201 bp, Bos taurus
gacataagcaaaaaggaacacaattcagtttcagagaaaatgtcactttccacatctggaaagaacagaggtaatggtggcctaagaacaaagaaagaatgatctggcaaaacgttcttaaataaaatgaagttcttgttcccaaaatataggaagaggaaaaccacttcagagtgggaagtaggggagaaacatgctatc

SEQ ID NO: 6172 - DNA, 201 bp, Bos taurus
atcctagatcatgttaagtcttttcatgtattagattcccatcacgggctgcccagacatttatttaaagtagatacccccatctccacccaggacatctatctgaatagggcactgtagaaaatgaagcccaggtgcctttatcacttgttcactcgctattctcttttaatttccattctgatcaacatagtagcatag

SEQ ID NO: 6173 - DNA, 201 bp, Bos taurus
ggttatcatgccctcctccagaggatcttccagacccagggatcaaagccaggtctcctacagattctttaccatctgagccaccacatttagaaacatgctttcctatatcttaatgtctcatggcaactatacttcagagtaatttttaatccaataaatattctgcccttacatttacaatttgtaacataagaaaag

SEQ ID NO: 6174 - DNA, 201 bp, Bos taurus
gagagtgtcaggatgggagtaagtatctacaagacatttatctctggaggaaaacaatctctcaaagcgcataccttggcctccaacatggataggtttataggtaaacatggtttaactataacctttagccaccagagctccaggcagattttcatttcccattctttagcggtgagcattgattcctgctctgtggcc

SEQ ID NO: 6175 - DNA, 201 bp, Bos taurus
tcttcccttacacactgcttgaaacctgaaaacagattctctgaatatttttttctcgagccactcaattaaaaaacttccagcctttctcattttagatcgtaaacacatacttgaaaaatgaataagaaacagaagattggtgttctgtacacaagagaagatatgtaaatgtaaatgtactgcatcttacactaaact

SEQ ID NO: 6176 - DNA, 201 bp, Bos taurus
atcacaatcgctgcagggtgtcccacaagggggccactcttcaccttgtaatgtctaaccataggagtgtctgaacagcagagattgatttacaacccaaagtgtctggtccccaagggccacttgcttcactctagccttcaagaatcatatttcacagtcccagataacctgttcgggtaacagtcaaactgagcacca

SEQ ID NO: 6177 - DNA, 201 bp, Bos taurus
gggacaaaatgaaaatacaggccctggctcaaaaattgagcatttaaagatggtggagagcagaggatgaaactaagggtgagacaggttccttttaagagcagggccagcgcagctggctcagaccacacaccatgaagctagtcctacatttctgtatcccctcttatgaataactgcagaagaaagcccaaaatttaa

SEQ ID NO: 6178 - DNA, 201 bp, Bos taurus
tccttggatatctgtctgctgtttgcttttagcattttctttctctatctggaatatttgttccctcttcaatatttggttacagcctaattagcctttataaataatcttgagattttcttctccggtaggacttgagtccacttggttgaactacctgtcccttccctccttcctttccatagcttttgtgtgtaggtg

SEQ ID NO: 6179 - DNA, 201 bp, Bos taurus
tagagagaacggcttgttcggaaaatatataagctcccctaaatggaaccaaaccaaacagcattattttcttttctgaggccttgagtgtttatgttgtgatattacatttacacagatgttattgttgatctgttgtgccaaaggatgactttgaagctctttatcaataattattgctttggccaatatgtatgtacc

SEQ ID NO: 6180 - DNA, 201 bp, Bos taurus
tcacaatttccaaaattagcatatgacatttcatctggagtttctttttaaattcatgttttctaaagattctcccattttaaaaacatctttatgattgtataatttgactccagtttaggaattttgtgtgtctactttgggtgattatttgttatttgtgcagttataagtttcatagacctaaagacaagcaggtga

SEQ ID NO: 6181 - DNA, 201 bp, Bos taurus
cctattcctccaccatcttgttctttcccctaagtcaaaagttttaattgatgagtccacagttatagaaagctcttttttgagatacatttttgttgtgccttcagtattaccaggaaaagattcttttgtgagatataatttcaagcattttttgctttatgtagtaatttttgttttcagaagctcaaaacaaaaatt

SEQ ID NO: 6182 - DNA, 201 bp, Bos taurus
aaggtgtggtctaggaccagagttctggagtggcccaagagtatacagtcaggagggatgagttagggtccagaggaacagtttagaattgaggtgaattggggcccttcagctctgagcaaagctatggaactagcagaatgctaggggtcaggagggctcaggcactaaagggaaagctatagcctgccaggaccaatc

SEQ ID NO: 6183 - DNA, 201 bp, Bos taurus
taatgtctgattcagatagttactgggaggttggaaaaacaactatgcatggagaggtcctagccaaaggcttgtactaaccaatgcccactttctattggggatatatattggcttccttcatctatacatctgtttttttgaccagagacatggcaggaaacaagttgtacaggcaaatttaataattcaaggagagct

SEQ ID NO: 6184 - DNA, 201 bp, Bos taurus
cttctgcatccattctctttgggaaaaatatctccttttttcccagagtcaaatagtttcactcactacaaatccctcatacagcaccccaagaacacaaactcagtaacagacaatgagaattaacacacataaaatcacatgatggacacaggaagagagccccagctttcatagtttacagtgtgtttactcgtaaac

SEQ ID NO: 6185 - DNA, 201 bp, Bos taurus
ctcgcccaggtctttgcaaaagcccatttttacatggaaataattcatttagtataattagaaagccataagttttcacttattcattcagaaatgatttttagttcctataaacactgtgctagaaaataacatggaaaaatgaatgaaatacctctcttgctcctaaggaactcacaggctaaagacaccaaggtgagc

SEQ ID NO: 6186 - DNA, 201 bp, Bos taurus
tctactcggtctaccaactgctacataaatgatggagattatagatagaagtataattagaaagagggacatctgtgaagtaacaaacaggaagggaagcgtgctaatgttggaaatctaacagaagtcggtgagcccagtgatctgtaagtatagcactgtgtatctgtggtaaatgagtgaaaaatacttgagtagctt

SEQ ID NO: 6187 - DNA, 201 bp, Bos taurus
gctattcatgctaaattgctccgtcccagaccaatgagggaggagatatgtttttaagtttactgcacgtgccctcagagcaactgccatcctctgggccggtcacagtgcccagggatacagcataaatgcaggggactgttgactttggtaatactagtctctctcttttttaaatcactgtggttatggaaactggcc

SEQ ID NO: 6188 - DNA, 201 bp, Bos taurus
tcacaaaagtgtaagaatatctatttcatagcacatgagttcaagatgccccaatttaatcagtctacgtaactatcttgagtccttgcagattacctacctataaacgtcaaactggaggctggtgtaaatactagaatgactagcttgattcagcaggttattttctctgcatcatactcctcttcaataaggcatcat

SEQ ID NO: 6189 - DNA, 201 bp, Bos taurus
gccttaataattttcatagtgttttacaatgagtgatattgagaagaggctagagggctgtgaatgaggaagattctcctagcaactaagggactggacattggggaggtaattgcttttatgtgtgattcagagtgggacagagatgattcaaagggctagctcactgatgtttctgttagttatgagccgaatttgtag

SEQ ID NO: 6190 - DNA, 201 bp, Bos taurus
ggctctgccaagccgagatcttctcttcccagtcggcatagtgcctcagggcatagtggctgagggcgggtgctgcatcaccgtctgggccaaagaaccttgtgtaccgcctgggtggacagaaggggaggcatgagaacacgggctccactcagacccccagcaccatgatccgtgtacactcgcattcccgtcacctgt

SEQ ID NO: 6191 - DNA, 201 bp, Bos taurus
gaagatttcctagtgttgaatttatcctgcaccatcaggatagactattttactataacactatcgtttattatttaaacatctgcatctgtactcaagatggaaagtagttgaaaggttttgtttgctgtactgtctatgaggtttgattattaaggagcttcacataatatacttggaaaatttctatctgtggctatg

SEQ ID NO: 6192 - DNA, 201 bp, Bos taurus
gtatttgatgattttgttagcagagcacaagaaataaaaaattaatcttaaacatcgaaacaaacataaggaagacaaagactgcctctggcaatggatctctcataaaaactttctttaaaggcaaaacagcactgctcaagaatgcaaagtccttccaatgtttcccatatagtacctatctatatctttcttgctggc

SEQ ID NO: 6193 - DNA, 201 bp, Bos taurus
tgacttaaacaaggaatcatcctggacaaagggccctaattaatgcatttgctaattagtctttcccttctctcttttgtcaagccttacttccaagacaatactataggcctgccttagaagccgacagagaatgggggtggggagcagaacagctaaaacatttatgtaaaagtacttacaacagtctttattcaaaga

SEQ ID NO: 6194 - DNA, 201 bp, Bos taurus
ttacttggccatgctgtgtggcgtgcgaggtcttaattccccaatcagggattgaactcacagagtcttaaccactgggtggccagggaagtctccagggttcaaacatcacaatgtgaaggcaagttttaggctgtccagtgtgccagaagagaaacttcgtgggttccccttgggacttgattgctttgcgacttaggg

SEQ ID NO: 6195 - DNA, 201 bp, Bos taurus
tacaacagagaccacatggcctgcgaagcctaacatattcactagcaggtcctttacaggaaaagtgtgccaatttctgaccaggaaaatgaaaagtcattgcttcttaggcctgtggaagcttggtgacctagccctgccaacctctgaactttcttccacaccaccaccctcctgctcacactcaggtaccccactcct

SEQ ID NO: 6196 - DNA, 201 bp, Bos taurus
actggggtacacgtgtctctttcaatcctggttcgaggaatgactttcagccttgtcttctgaataaattctattctgtctgcagtggaggagcctggccctgagcacagccctgcagtgcaaagtgagaggagcacagctagttcagagcagagggggacagtcactgccccaacttcggctcaggcctccagagaccat

SEQ ID NO: 6197 - DNA, 201 bp, Bos taurus
gtcttttggattttacaacagcagttaatccatattttttaatagtgttgaggagccagggatctttggttcctagatcccttctaagtgcttagaagctgcttggagaaaatactaagtgaaaggaaggaaacagccctttattgaatacctttattggatagctagatactgacagatacctttatccgattcctctaa

SEQ ID NO: 6198 - DNA, 201 bp, Bos taurus
ttgcatttccatggtttaggagttcatttttttaaggacagtattaagtcagttttgtaattagtgatttttaatggtcattttgagttttaatgatgaaggatgttgagatacaaagggcagctttgaaagttacagcagagcatgctccttagatgaatcctttgaatgaaagaataatagtatggatggtgatgatga

SEQ ID NO: 6199 - DNA, 201 bp, Bos taurus
agccctactcaatgcttccaggagttttgtgaaaaaatacactggagagctaatccctctatattgaaatttacatacacacacacccacctgtctccccgcagactggcacctctcttgtatggactagatctgatttatctctttttcctcagtgacccaactgagaatgtgcttagatgcttattaagtgaattgtca

SEQ ID NO: 6200 - DNA, 201 bp, Bos taurus
cacctgctaaaaggggaagatcttgatctgcctaaacctgtcagggagatggtcagccaagatggtggcccaccagcaggatgctgtctgaaagacgggcgtgcccaagtcagtcagttccaggacagagtctgatagtactgcacttcaacttcaaaataatttacaacaaacttcgtgctttatcctgttcagaacttt

SEQ ID NO: 6201 - DNA, 201 bp, Bos taurus
tgcgggtgtcatcatgaatacgtttagattctgatggttttgacacctcaaggcttaatttccagcagtgattagatcacagcatatgactggcctctgagcagcctctgtcctcatggggaagcaggcaccgtgtgggtcacttccgtcactcgcaccgaggggtggtgtggatggggaaaggccttgagtggtaagtat

SEQ ID NO: 6202 - DNA, 201 bp, Bos taurus
cattgctgcccacctctgcatcctgtgagccagccctgggggagccggtggttgggctagtggggctctggctgccttcaatgacaatgccacaggtccttgggctccaggcctggtccctgctctccaggtcaagggacattaaagagtccgagtcctcggtggggagcacgccaggagaggacctgatgagccctaaga

SEQ ID NO: 6203 - DNA, 201 bp, Bos taurus
gggttcttcccatcttcctcttcgacttcattaacagactcgcacaacctccaggctgaaggcaaccgcagagatccaccttcctggccccgtttcacaagaggggaaaccaaggcacagatgttctccggagcagctaagcctccaagtgccagcagagcgcggggccgcgggcggcctgagggcagccctcccggtgca

SEQ ID NO: 6204 - DNA, 201 bp, Bos taurus
ggcttaagggatgtgggtatccacctcatctcactgcaacaagaccactcagagcgtgagctgtgtctcctgcagttatgggccctggggactgggtctgactcctttccctaatttacaggaaaagagcaggactggctgatgctttggcagcaaatcaaaggaggttgctgctgctcccagattggccaacactcctag

SEQ ID NO: 6205 - DNA, 201 bp, Bos taurus
aggcaaggcctgtctgagccatggagaggcagcgagagagggagccagtcatgcctgaaactgagagaggcagcccagctctggaagaggtggggtaactgtaaagaagtgtgcagactctggggccacaccgcctggagtcctggtcccccgacaactaaatatattccacggtcaggttatatatagtcttctgggttt

SEQ ID NO: 6206 - DNA, 201 bp, Bos taurus
attttaagttctggaactctgtcactcagttctctgcccactgtgacctgtagctccctttagcaccataatatggtgtggagatagaaccatgagatacgtgccagatacttcagtaaatgtgagaggtaccttgatccttcctgcaattatatattgaaaaattagaaaaataagcaaaaatttcaaaaataaaaattc

SEQ ID NO: 6207 - DNA, 201 bp, Bos taurus
agagaacccagggtcactgatttctcccctacaaagccccatgagtgaccctttccctgcatttctacttccctcagggcctgcctatctcctaacacgctgaatacagccaagacactggagagcagaggtccagtttcacttctgaataaggaaggaaagctcttaatcttctggagaggatgccagggcccggctcca

SEQ ID NO: 6208 - DNA, 201 bp, Bos taurus
agagcagggcttctcaacagagggataactgatgtttggggccagaaatcctttgttggggtgggtagcggagggctgtcctatacaatccaagatattccgtggcattcctggcctctatccaccagatactaggagcaatccacctgccccttcaccctgtgtggcaaccaaaccggcctccagacattgccaaatgtc

SEQ ID NO: 6209 - DNA, 201 bp, Bos taurus
ggctgtggccagtggagtgagggtagcactgacttggtggcttggctttggtgggtcatctcaaaaacttaggagacacctgactcacacaatagccagaggggattctcaagcatcatctttggccctgtctctaacccacacaatgactgtgtaacactgggggcagggggtcaagtgatgatgaatgaggatcagcct

SEQ ID NO: 6210 - DNA, 201 bp, Bos taurus
tgttaaagggcatgggtcccttcagttccttagggtctgattccttctccttcaggctgtcctgtccggagtctttggcctctccctctaggctggctccctctcttcaaacagccctccctgacccacgttgggctcccctcccctctacccaccaggcccccttttctaggggtgttttcaccaaggatactatgggtc

SEQ ID NO: 6211 - DNA, 201 bp, Bos taurus
cctggatgaggtcatcaaagtgtaccggtactttgctggctgggctgacaagtggcacggcaagaccatccccatggatggtgagcatttctgcttcacccggcatgagcctgttggtgtgtgttgccagataatcccatggaacttccccttggtcatgcagagctggaagctcgccctggcacttgccatgggcaacac

SEQ ID NO: 6212 - DNA, 201 bp, Bos taurus
taggacagctctctaagggagcttgggagtgccattctctgtaggggagagagtgagctctccagtgcccaggcctcaaccggcctgcctcactcccccatgcacaccaggtagcatctgctctcagtgaccttgccacgcagaaaggagcctcatccaaggggcacagtgggagactgggggccctcaagggtgaagaga

SEQ ID NO: 6213 - DNA, 201 bp, Bos taurus
gggagggggccagttcaggctctaaatttagtaagaaaacattaggaaaaaattagagtgaagtataaagaaaagtctaaccaggacatgtataagactagggttgaaatttgctggtgatggccagagaatagtaagaaagaaaccaaattgtttgtatttttctttaaaacagacaaacctgaccatgaaatgcatgct

SEQ ID NO: 6214 - DNA, 201 bp, Bos taurus
agataaagtggccctgcccagaatgaccacatagagctgtaccggtggtttttcctgtacacctctaaggaaaaccagtctcgtagaccatgaagtgaacaccctcatccccatgtccagagatgtgtactactgcagccctggctctgcaggcgaggaaatcaaggactgacacacacagtgcaataaagatcacttcca

SEQ ID NO: 6215 - DNA, 201 bp, Bos taurus
tggccaagatcttccagcatcgattcccttatatatgaaatgggtattactacacttaccttccatgattattatgagaattaagaatgatgactcttgaagacttccccggccattcagtggttaagactccaccttccaatacaggggtgcagattcaattcctgcttgcggaattatgatctcacatgccaagcagtg

SEQ ID NO: 6216 - DNA, 201 bp, Bos taurus
acagcctgtggatgatgtgtgtgggtaaagtatggggctgcctgcacactctgccaggagggctggctgcctcacgctgtgccaggccctgaggtcaggaggatggatatctgggcacagctctggtccatttgcacgtccccaaggcagaggaaccagagatcaaattgctaacatccgctggatcatggaaaaagcaag

SEQ ID NO: 6217 - DNA, 201 bp, Bos taurus
ctctgttcaatccccgcaccaagtttttcttggtggtggacaggggtttccctagaaaccccccaacacccaagatgggctgtgaggagaaaggagagggtaggtgcaaggcccaggaaacgggtaggtgggagctgggcctggatcaaaaggccaaccagtatttgagagacgctgtcgcccacaaagacgggagctgta

SEQ ID NO: 6218 - DNA, 201 bp, Bos taurus
gtgttgacacaccttctgaccccacaattcagctcgtgggcatttgtcctcaagaaacgccagctgggttcatagggaacatgtccgaggacactcactatgtgtggagccagggagttgaaggtgatctaggtggtgtcatcaggggagtggaggctatgtcctgtgagggccatggcctagatgtatactcggccatgt

SEQ ID NO: 6219 - DNA, 201 bp, Bos taurus
aacagtgctgtgacattagagaccctggaggtggcagagggcagggtctcagaagtctccaccatggacttttgcttggccctgcagggggctgtctggcgtgaacatagatgtcctgagatcagacaaatgacagcttcttcttagagggctagatctacggtcatggatggtagcggagacctatgtttacaccctcaa

SEQ ID NO: 6220 - DNA, 201 bp, Bos taurus
atcatttcttacaaaacctctgagcctcagtgtcttcatccagaaagagggaatgacaacagtacttattacagggctgtggcgtggcctaaaggagccggtacacctgaagtaactaggctgcagcacctggtccacagccaataccatggaagtgctcgcttagtcattatctttcagcaccatataatgagctgcacg

SEQ ID NO: 6221 - DNA, 201 bp, Bos taurus
tatggagtatctgctgacacctacatctgggaataagttgaaagctggaacaactttgcttgatatttactaagttattgaaggccctgcctggcaactacctttccacctctctgtctccatttatgaggttacctgacctctagacaccagggatcagccctgacccaaggaactccagtcttactctccatcagtctg

SEQ ID NO: 6222 - DNA, 201 bp, Bos taurus
aggcaatggggaaggtctgatgatggtgggagcatcggccatgtgaagaggatactgagattcagaaagctcacgctgctgaccacaaggaggagggtcacgtgcagggattgtttccaggggccctggtgttgctggcgctactctcgaaggaagagtggaaattgtgaatggtttcctgtaaaatctgtctctcgcgtc

SEQ ID NO: 6223 - DNA, 201 bp, Bos taurus
ttttaactaagtccttatcacatgacttcaaatctcaataactggacccgttactaattcccgactcagggatccacaaaagccatagtaaggaagaggaatcacttctgttatttcagaaaacctagaagaaatattggtgggatgaggtcaactcaagtgtccagcacctttggcttttgcttggaactccaccaactt

SEQ ID NO: 6224 - DNA, 201 bp, Bos taurus
ctcagccagatggccacagaagccttgccagggagaaaaactgatctcccaccctgaatttcctctttgttctggaccttgctctctctggatgtcattggtttcccacccctttcatgcgccagccacccagactgagtcttgtgttcagggagcttaaggaagctttcccctagattaggatttggggatagggaatcc

SEQ ID NO: 6225 - DNA, 201 bp, Bos taurus
gaggtccgatgaggctgtgcaaggaaaaggtctcggcccagtgcctggcacaagggaagtggctgttgtcgcacttgttcggggctctggctatgagagggaagttggggccctcactcctgtgagatggagagccctcctaggagctcatttctggtcccatgggaaaggcagcggtggtgtgggcctcctccctcctgg

SEQ ID NO: 6226 - DNA, 201 bp, Bos taurus
gccctgcagaagagaaagcacaacccagagagtgaaggacactcgtctacaggcgcacagccagcagtggccgagctgtggccaggacagttgttccgctacagactgacgcaaggctttagacccacccgcctcacccgctgggtcttctcagctctggcctccttttccaaagagggttcgtatttgatacttatcaaa

SEQ ID NO: 6227 - DNA, 201 bp, Bos taurus
gaaagctcgttctattgaggcctcttgtgactgcccttgggcgtagtccccagaggcacagtggctggagggtgatgagaccataaggcctcttccttcacgtgccatgatgttcagacatataagaagaggaagatgggcttaagatatttttctttcctggagacttgggcccaggtcctgcaccagctctgtgcttcc

SEQ ID NO: 6228 - DNA, 201 bp, Bos taurus
ttacttgcgtatgtcatttcactttgtatacatgcgcacatggcctgtttgttctcactcctcccgcacatcctctacatacacagacactgtccggcacacagtaggtgctcagactagcttggccctcacataaccaaaaagcatctgggtgttccctgtgctctccaaaggattgacaaagtctagtctagttggagt

SEQ ID NO: 6229 - DNA, 201 bp, Bos taurus
gtcagaagtcttcatcccctttttccgttttagtggctgatctgtcttctctcttagcaaggaagaaacctctgaatccttccaggggactttttgtcacggatactattcttggagtaataatgctgtgtttggttttgaatgtgttgactttgcactaacaggtaagccaagcagaatatgcccgggcaggcagtttgg

SEQ ID NO: 6230 - DNA, 201 bp, Bos taurus
ctcatcaactctctcagagcagaattgctacaggcatattgtgggacagcccaggcgtcccggagtcagcgagggccctgccagcaggtctcggggcgggacctggattatttctctggctgcgagggtctaccgctcctctgcagttcacttcggctccctgccaccctcctgtcttcaacatggtatgtggccccagtc

SEQ ID NO: 6231 - DNA, 201 bp, Bos taurus
ggtctgtgggtttcatagccaggcccagcagtcctcgagcctggcaggaactggaggttctgaggttgagactgtttctcccttgtccgagggcaggcatcgggcccaggcctccctgcttcatccccagacgacacccctgggagagggatgctgtctgcattgctttcagtgctcttgccccacttgccctagggacag

SEQ ID NO: 6232 - DNA, 201 bp, Bos taurus
aggcaggatgcactggggacatatatgcattggaccaagcaggccagtggggctgctcaagaaccctggtcacattccgttaccgtctcctggctccatgtggggttggaggtgaggatgggccatggaacttccagaagtatatcagagcaagaagtctacccaggtgcacctgcctgcctcatcaaccggcatggtgac

SEQ ID NO: 6233 - DNA, 201 bp, Bos taurus
actgagagcatttgtaagcatcatttatacagtatatcttcatgaaagcttgaataaaggtatgttgacagtaatgtcaagagtgtgtgaataagcatttttagcttatggattatgtcttcagcccatccctatagctccagggtctctttgctatagtcattgaaagctctgctaaccaatttgaaatgactcaaaaaa

SEQ ID NO: 6234 - DNA, 201 bp, Bos taurus
ccttcctgcaggagctgcccagggcaaattaccagtccccaagggtcttcccaggtaatcccgagttctctgtggaaacactgaggttttgttattatggggagcactttagctccaaatctgaaagaaactcaattttctattcctcaaaacaaggaatctccagttgtatttgtcaaatacattaatgaacagagagaa

SEQ ID NO: 6235 - DNA, 201 bp, Bos taurus
ttagagctgtcatcacttctcttcagtaaaatgcacacaccagtcatcctcagctttgacaaacagatgacatggcagggaccagagcctctgcaatctagggcagggccaggtgagagctgaccatcatcttcctcaggacaccctctgaacatctggagtagtaggcttggcctttactggccctatgaacacataaat

SEQ ID NO: 6236 - DNA, 201 bp, Bos taurus
aagtctggtaggggacttgggaccatatctccccgctatctgcatcagccctcttctgcatttcaatcttgtgatgcactgggcaagtgtaactccaatccctctcttctcaatttgatttccaatccttgactaaaaataagtaaatgtacaaccagagattagatatatgcagaaaagatgaaagaggaatacaaaggt

SEQ ID NO: 6237 - DNA, 201 bp, Bos taurus
tggtaagattgaatcacctgccttctttctttcccctgggctttcctcaaaatgggaaaaagcacctatatctcagacctttcctttcatagtgctgaaacgttgatgtcaaattatccacaaaatgacccatcagaatcctttggacagaaagtgtacatgctgcaaatgtctggagaaaaagagctgaaccattagtgc

SEQ ID NO: 6238 - DNA, 201 bp, Bos taurus
ttaggcatacagtggcattgagattccagtgagattacttagagtcatgccaccaatactttttcataatttggatcattttatctgggccatgattagttccagaatgtaaagctttgagtaatgacatttttaaggactcaagaaaaaccaggctgctctccaggccctcagtgagaccgcatttaatattcaatttgc

SEQ ID NO: 6239 - DNA, 201 bp, Bos taurus
acaattagagataacctcctcaccttcctcaaatcagttgtgcaagatttaagtaagcttagttgctgccttatttgaacataagaatgttgaatttgggaaagtgcagataggcctctatgcaaatgtttggtgcaaaggagaaggggccaatttcaagttagacaaatcaaggatgcccctcagcatataatcgatgat

SEQ ID NO: 6240 - DNA, 201 bp, Bos taurus
aagacaacactctgtctggccttggctctcacttggagatgaccagaggatggaaacagaagtggacagtacggtgagagcagaagctctggctctggcacttgccagtggaggggcctcaggcaagtcacttaatatctctgaaccagctttctctgttgtaaaataaagaaaatagagtccactatgatgaactagttt

SEQ ID NO: 6241 - DNA, 201 bp, Bos taurus
gtcagtgctggatctgaatacttcctggcctcatacttcttgtgcggagtgaagaatgctgtagaaaccagcatgttttcatatttacagtacttctgtcatttcctaaataagtactggcctgggagcaccatcagtgccctctgttttggtggcatgtccaggcatgcagtgttccatctccagcagcacctggagaca

SEQ ID NO: 6242 - DNA, 201 bp, Bos taurus
cgcaagaaactttgcaactaccatggacacccagtaacactcaccaaggaccacattgttatcaaggccatggactcaatggcctgagtttaagagccatgatgcctcctgagcctcattgccaccgcacacttctcacttggcaccctgcaaccctaggcctagggggccataggatgcaccagtgtgtccacacttgca

SEQ ID NO: 6243 - DNA, 201 bp, Bos taurus
gctagaagcaggattttggttccctggccagaaactgaagtcaggtcacagctgtaagagtgctgaatcctagccactagaccaccagcgaaagtgatcctgttctgttggccttgtagaaatgaatttccacaaaaagccagaaactagtgaaacaagtaaagtgtttattaggagggaaaaagtataagtggatagact

SEQ ID NO: 6244 - DNA, 201 bp, Bos taurus
gctctgcataaaagattgggctgtgtcacacagtgaaagaaatgcttttcagtaaaaggtcaccatttgtttgatatagaaaccttctctgaattttcatcgataccccaactatctaattttcactcctggggggtttgttgttctatgagggtgagatttaaagtagaaagtatggctctggtatctattaccagaatt

SEQ ID NO: 6245 - DNA, 201 bp, Bos taurus
tctgttgtaataccctggaggaactgcgctacaggaggtggtggtctctgggcgggtaccacttctcgctttttagagagtaattcattatgaaatcatataaacataactttgaaagctaacaatgactggcctgagactctttatgcctatttatagaaggtataaaaagaggcctgaccctgaaacccttttcagcct

SEQ ID NO: 6246 - DNA, 201 bp, Bos taurus
ctcaaagggccaggagagctggtcatcagcagagctttccttggcataagactaaattgaagaaaatctgcattcaaataaatgtctcgctaagtagatattttggccacctgatgtaaaaagccgactcattggaaaagaccctgatgctgggaaagattgaaggcaacaggaaaagagggcggcagaggatgagctggt

SEQ ID NO: 6247 - DNA, 201 bp, Bos taurus
gcccaccaggcttctctgtacattggggttctccaggcaagaatactggagtgaattgccagggaatcttctgacccaggaatcgaacctgcatctcttacgttttctgcattggcaggtgcattctttaccactagtgccaccttggaagcccaataatgatgcggaaagctgggcaaatgttgttgagagataaaaggt

SEQ ID NO: 6248 - DNA, 201 bp, Bos taurus
gtacagaggtggatagttcattccccagagagggtctgtggtgtgatggggatacagatgagatacagtcccctggcagtgctgggtgtggcaggaggactgatgggccaacggaatcacttctcccactcttgtgccttagtgcccccttctgtaaaatggtacatggaaaatggatatatagctccttcttgatttata

SEQ ID NO: 6249 - DNA, 201 bp, Bos taurus
tattcttttctatattatcaaagaagtctgctgagatatgaacattggccttcaaactctatttcacccagatttaagtcaacattgaactttgtgtttcgcaaatggaaggccatatcactattaatccatttggtcatttctttcttcttattttgagctttcttcagttatttatgcttgaaaaagtctaaaatatac

SEQ ID NO: 6250 - DNA, 201 bp, Bos taurus
accctgggtttgatatgtctagggaactcatatcccaccggtgttaatcctgcctgtgaaatctcattgtaattataaacacgtgggcaggcccagtgagtgctttgactagtagagcccttggaggagggctgatttggctgaaccagggtcctgattccactgcctggccctgggcactctgagtctccagaccgcctc

SEQ ID NO: 6251 - DNA, 201 bp, Bos taurus
gtaagagccagtatgcttacaatggcctgcagggaccaacactctgacctcattatctctctgaatttaccttctatgactttcctctcattctgctctaaccccactggcctcttcattgttgtgcctcaaatagtccccacctctggacatttgagggcttcccaggtggcactaatggtaaagaacatgcctgccaat

SEQ ID NO: 6252 - DNA, 201 bp, Bos taurus
cgcagactagcaggatgatgaggtgtcattttatcaaggctctggaatggggtcattagatgtcattccctttctctaagccaatttgtctgtatcagctgttgtaggccatcagaatctctcagactcatggagagacatctgaaccctgcaaatgcttggcatatggcaagcatagcatgtgcttatgagctgtgtctc

SEQ ID NO: 6253 - DNA, 201 bp, Bos taurus
ctggggcctcaacctctctctcccatctcctagttggtttgtttgtttctcccttattcatatttctaatatttgactttaactttgttatcacctgcttctccttcccttatagattcccctgacatgtttcttttaaaatatatatatatattggagtatagcctgcaatgcaggagacttgggtttgatccctggttg

SEQ ID NO: 6254 - DNA, 201 bp, Bos taurus
gactggttagatctacttgcagtcttgccatgtaccttttcttctctcttcctcccagaagcctggaaaagtcctacaggaaggcctactgtctccagttttttgtaggacattggtctataccccctccaatcccatccctgtcatcttctccacaaaaccctgctattccctagtccatgaacctttgctggcctggct

SEQ ID NO: 6255 - DNA, 201 bp, Bos taurus
tggggtagttccctgcagtctgggagtgctaacagtcctgtgcaccttcccatgagaaaacctgtctgccatttctctttcaagaaggcacagacacctgtattcaggaaatcacagattttgttgttttttcagcctcccaagagaagccaggatgaaccactacactggtttccaagctgtttctttgtttgagcagca

SEQ ID NO: 6256 - DNA, 201 bp, Bos taurus
acactgaacatcgctataaaaataagcaagataggacaccggaaagatccaggctcttgccccaaggttataagggccaaggcagtgctcaccccagcaggctgggatcctggaaatgccatgcatccatgctgtgtgctctgaacaaaaagatggcaccctaccactggcctaggagtaccaggagtctcacggggttct

SEQ ID NO: 6257 - DNA, 201 bp, Bos taurus
tgagcgatgcctttgtagtaaacaccactgagattttctaaccattcccaatatggattaggagaagagcacccctcaaaggcccatctagtgaaaacaataggattcaggggagagaatataggaaggacagagtaatgagatctcattcccagactctagtgataggacttgatctaggatagatgtcaggccctttag

SEQ ID NO: 6258 - DNA, 201 bp, Bos taurus
cctggtatccaactaggttaaattgctttctatatttaaattgcctgctagctggttagatgtgggagccacagctgtgaaatggatagttccagccagtcaatagaaaggaataaatcctaatggattaatctgttataattagacaattctgtatgactttgacatggagcccaactcctccgagaaagaggagagggg

SEQ ID NO: 6259 - DNA, 201 bp, Bos taurus
cagaagcgaaagaaacaccccctaaggcccaagtcattctccagaaggagatcacacagagagttgcttgcctggcccaagtacggataaaggattttcccccccagaaaagacttcattgaaaaccttcagagaacaccccgacaaactcaaggagccaggccaaggcctagggagctacccagggccagggctgtcgag

SEQ ID NO: 6260 - DNA, 201 bp, Bos taurus
tgatttcctttaggattgactggtctgatctccctgctgtccaagggactctcaagcatgtagattataccaatatatgaaaattcaaacatgaaataacgttaagggataaaaagcaggaaacgatatacttatgcaccgtaggtagaacaggggaaaatggtcagtgaactgacacaatccagaaataaatttcaaaag

SEQ ID NO: 6261 - DNA, 201 bp, Bos taurus
aagaggtggccaaagtggttcctcctccctgggcatctgtgcatgagtttccagcaggggaaggaggaggcaggggcccccagacctgtctacctgcccagatttcttccctgcacattttccagaaggtaaaagcccacctctcctgctagcacagttccacacctccttccaatggcagcagagagagctggccgctta

SEQ ID NO: 6262 - DNA, 201 bp, Bos taurus
gccaccttctcacttcgtcttcacgtggcccttcctccgtgtgtgagtatccatggtgtcttcatgcatgcaaatttcttcctataggacacccttacaggatttgactaaggcccattttaacaacctcattttaactttattacctctttggagaccttaactccagacacaatcacatacggagagagtggaaggtca

SEQ ID NO: 6263 - DNA, 201 bp, Bos taurus
tttcatgggagaagagaaggacaaggaggaatccaaagtcagactgaaacctacaaattggggaccaaacacagaatgtaggcctggctgccctggttctgcctctgccccaccttgtaagtcaggaggggaagaggagggtgggagagaggaaagacaggatgaagagggaccacatgccgtcctctgcctggccaggtt

SEQ ID NO: 6264 - DNA, 201 bp, Bos taurus
gtgtatccgtgtttcctcaattttctaggtgaacacaaattgcttcggcaataattgaaaatagtaagttatgaactttgaaaatgtctaccattcttccgggcccacgtccaaagccaagagctccatgtgctgcacccccacagctgaacgcatgagccttttctgccctgaaagcccgtgggagtcggacttcactgc

SEQ ID NO: 6265 - DNA, 201 bp, Bos taurus
tttaatgccacagagaagtccaaaactggcagaaagcagcagccattctcctgcatgcctgggccacggctgtcccctgaaaaggtggcccacacagaccgaggaaccagggcgatttgctgacatccttttgtcctctaaatgccagaggttccacttaggccggcgggggtggcaaaagaagaggaagtggagaaggag

SEQ ID NO: 6266 - DNA, 201 bp, Bos taurus
ggccctgagggcagctgtgacccctgtgtttgcacctgtgtgtgcttcctcacatgtgaggagtgagcaaccagcgtctgtttgcgtgtgcacatgtgcacaggtggctgatggccgatgtgtgtgcgtgtggtgtctgtgtgagaggggctggtatgtatcctgtgcacatgtgtgtgtgtgtgtgtgtccctgtgggtg

SEQ ID NO: 6267 - DNA, 201 bp, Bos taurus
ggtgcctctcagtgtgtaccagttagactactaattgctctggtttcttccagtggtggtgggaaggtgtgagccaagaggtcaagctaactgaaaaggaatttgaacaattataggggaaaactctagtagcctttgaggaggaggcatgcctttccgttttagtgtaaaaaataattgtataaaaaagttttgccaaat

SEQ ID NO: 6268 - DNA, 201 bp, Bos taurus
gcccgaagtgggtgctgcattggacatctttgtgcaccggggattaagcaggttgggacacagatataagtgtccagaaggagaggggtgggccagaggctacaggtattcactgtgtaaagttttcaacatatgagcactaaaaatatatactgtacgtgaacaaaataaagtaggtgcccctctcttctctccttccct

SEQ ID NO: 6269 - DNA, 201 bp, Bos taurus
tcccaaacaaagctgtggacccaggcagtaaacttggatgaaacaaacaggccactgaagaggatccttctaattgcctgggtgtctgtaatgggctcactgtgtagctggagatgctaatgtgggccagagcagccacccatctcagaatcctcagtcatggacccctgtacgctgtaatcaaaccaatacccgaaggac

SEQ ID NO: 6270 - DNA, 201 bp, Bos taurus
tgtcctggactcctgagggctggtccagcttgagtgccaagagaccctctggcactgtgcgaatgttagagactgcctggccttgggaaatgcacacaagcagcttctgcttttgcagtcagccctgggctcatccatgccacacacccctaggcccccaatggcctcctgtcctctcattctagtctgtgctgcccacca

SEQ ID NO: 6271 - DNA, 201 bp, Bos taurus
ctggccctgtgctctgggggacacacagatgaaggatgcgggatttgcccatgaggaactcaaaaactagtaagaggacaggagagcaaatctgcctttatatgggccaggtatatgatggaagtgtgtactgggaaccatgggggcaggcggtggagggatggcaggggagcgaagaggttctcaggctctgcatcagag

SEQ ID NO: 6272 - DNA, 201 bp, Bos taurus
atgcatagaaacatcacaaagcattttgtttttcttattcaaaccttacaaaaaccctaccagatgggaattattcaacccattttatagttgagaagctatagcttggggaagtaagtttcaaatccatttctatctccagcctgaacctctccttttgaacatcaaactctttttgtatgaaaactcactcaacatctc

SEQ ID NO: 6273 - DNA, 201 bp, Bos taurus
gtccctggagaagacggccagcagagctgcccaagatgggggtggcatgcacagtgctgtactgggaggaaggggggccttggggttgagctgcactgaacaacccagctgggaccccagggcaatctgcattcattcctttggggaacaggccggcaggctggagtgtatggggctctgattggaaccagagccagggca

SEQ ID NO: 6274 - DNA, 201 bp, Bos taurus
gtttcctgagtatactgagggcctcctctggccttgcagtcctcccaggggtcaggtaatcagactgacacacaatcctttacttctcagcagaactgctggaagggccatggtggtaccatgattcctggggcagtgaggggagatctgaggtcaggggcagtctagtgaggggatgggaaaagcaactgccttatggag

SEQ ID NO: 6275 - DNA, 201 bp, Bos taurus
ctctagttcttgtgtccctaacagtgatcatcacacttcagagctggaaggacctagaggtcagccagactggggcctctcagactgatggcacacaatcccttggggacctgttaacatgcagattcttacgcaatcttacgtcaatctcccaagggccctggatttgacactgactgcagatgctgccagccctcgtgg

SEQ ID NO: 6276 - DNA, 201 bp, Bos taurus
aggtgctttacctgttcttctgaactgtgctggcaaatattctgtcttcatacctctgtcgagcggcattgccaccaaacccaaggaacgtggccacataaacacggtacacatgctccgtttggtgaatgtcacaccccaagttaaattcagccaacaggttcttagctacttcttcctgcagacgtaagggccacaaac

SEQ ID NO: 6277 - DNA, 201 bp, Bos taurus
cggcccctgggtgggagagatcccctggaggagggcatggaaacccactccagtattcttgcctggagaaccccatggacagagcagcctggcagcctacgggccatacagtcacaagaagttggatataactgaagcgactaatataagtgccagggagcctaaattggcaaactggccctcttggtagtctgtggctgt

SEQ ID NO: 6278 - DNA, 201 bp, Bos taurus
gtttatgttgttgtttagtcactaagttctgtccgactcttttgcaaccccatgaactgtagcctgccaggctgctctgaccacgggcttataggctttgccatattccaagtctcttctacttctcaagctttgcaaatccacactcccaagaaaagtgtagcaccttcctttagcatttgtgacatgtgctttggaaga

SEQ ID NO: 6279 - DNA, 201 bp, Bos taurus
agggggtgaggcatctgggacgtacagggggcctgaggactcagagcacaaagcgggctgggaatgcaagaggtaagagcgagcagagagcaggtgtatcggggccaggcaggggctctgtatataagtggtttctcaactctgttgcatgctggaaccactgcagtggctgaaaaatgtccccagaggtagtaggcccta

SEQ ID NO: 6280 - DNA, 201 bp, Bos taurus
tctcagagcccctcaccacaccagtactgactcacctggtctctgtgatcatgccccacatcaaatgttatttgccctccttttggacttttcaagttcaaccactttttgttgttgtttatatcagctcaagtcctcttcctgcaaaataccatctttgttcacccagcccaaatttagtatcctattttataccccctc

SEQ ID NO: 6281 - DNA, 201 bp, Bos taurus
atcattccttgttccctccagatgcattaagtaaacaaccctttcattgttatttccccagctttaatttatagactgatactcaactctctaacaaacagcatcagtatcttgggcagatagtgcagtttataaacttctttcactgaacattcatattttcaaacatctgttatcttcatggtactgtgctcctgaagg

SEQ ID NO: 6282 - DNA, 201 bp, Bos taurus
cccctggccccccgcttatattcccttttagaaaaggtcatccttggagtagagggtcaagaactggttcatcctaaaaggcttcctctgattcagaagcaagatgtttggcacatccatgaggatgacatacaggtatgggctttgatttaataaatgaaatgcattgtttcgcaggtatgcagagagcaaacaagtgcc

SEQ ID NO: 6283 - DNA, 201 bp, Bos taurus
ggtaaaagtcccaaggaaatcaatgtgtaaaaaaatcaaacacataggtcggaattggtgtccgaattgtaccaagttaatggctgggtgcaggagaacggaagaagcacttgatgtggcaaccagtaaggtttgttaagactggaaggagagtgtgtggtggaagtggttggagataacaattataattgttgctcttct

SEQ ID NO: 6284 - DNA, 201 bp, Bos taurus
gcgtggtgacattagaatatgtacctttagtgctactcccaggtggagagtacacgtgaggccacgattgaggcatccttggtgttgtcagtaacaccctaagtcctcagttgaatcactgcagaaatgcttggaaagggcagcaagaagatggttaaaatcctaagctagtcccagactctctggctgtttcttagggga

SEQ ID NO: 6285 - DNA, 201 bp, Bos taurus
ctcaattcaggatttcatactcctgatcccatcattttatacagtaatacttgacttccattttacctaatttgccgtattctgtctgggagacctatgttctttcctatgagtgtctaatgttctgtatctgagctgccccatatggtcgccactagtcacatgtggctgtgcttgtgtactagttgttcaatcatatcc

SEQ ID NO: 6286 - DNA, 201 bp, Bos taurus
atgtcttcgactagagcataatgtattgaatttttctaaacaaggcttcatgtcccctattaatcaggacttctagtcaggagaattgcaaaccaaatacaaaaattccacgataatccacagcttttgagaagagggtaaaactcagaacctatcatatctgatgaatgttctggagattggctttggaataactgtcag

SEQ ID NO: 6287 - DNA, 201 bp, Bos taurus
atttccttctccagagaatctttctgacccagggatgaaagccatgtcccctgcattgcaagtgtattctttaccactgagccacctggggtaccactcattaacgccattaactacctgatgtttttgctccttatctcgctgtcgtttgcatgttgagttttcagtctcatgtttactgctttttggtaatgagatggt

SEQ ID NO: 6288 - DNA, 201 bp, Bos taurus
actggcattggttacagaaaatttcctcatggtgcatttacaattacacatatagccaatgatctctcaccaagctggcatggcctgcctgacacaggccacacacagaacatgtgacctctctgccgatacacgactgatatccaagcccctggcttgtggagggcacaggtgatggtttaggctactcactttccctga

SEQ ID NO: 6289 - DNA, 201 bp, Bos taurus
cttcccaccaaaggactgacctcttccacctcatggaccatcccccctagtcgcctgggtaggtctccacttttgaaacatggagatctctccgtggcttccagggtgacttgcttgcctgccaaattctactcttatcctaaagtgtgtgcatgtgtacacacactgataaaagagaatttcacatattgaggtctgggg

SEQ ID NO: 6290 - DNA, 201 bp, Bos taurus
gggctagtcacaggccggggatgtgatgctaagggttatgggtcttagcccacagggactgtgagcaattccaacatgataagcagaagcgtaaatgatatggccagctttgcacttttgtaaaagtactctgactgcaggaccgaatagactcaggagcagggtcccagtgaattaggcctgtgagagatggtgacaact

SEQ ID NO: 6291 - DNA, 201 bp, Bos taurus
gggggaagaccattactacaacattttccaaagtgacttgctataaaatgctagtctggagagatgctctgtcaacacagtgtcctacagggtcgaagggctatggaatatgtggacagttacaacacacataaacacataagagcctgttttatttggttagtcatttgacactgtaccatttctacacttatttactca

SEQ ID NO: 6292 - DNA, 201 bp, Bos taurus
ccttcctcttcttggtgctctcctttctggggcagtggtctgtaaggcagtacaagggagtggggtccatattctaggggccagaggtggtgccttggaatagaagtgcataacagacaaggaataaaaaatttctgtagcttttctggaaaggtccaggttagtggtttcttgttacctttaaactggtgtagcttaggc

SEQ ID NO: 6293 - DNA, 201 bp, Bos taurus
ttaacttgccaacgtgatattgtgcatgttatccaaggtgaaattattagacatcaactgtttatgatgatacattggtccaccagtgcagatgaaaactgaacactaaagtacaatatttctatagcttgatatgcatagttttattttctttttaatttatttctatcatattttggctttccattaaccatatttttt

SEQ ID NO: 6294 - DNA, 201 bp, Bos taurus
aggtgcccgtggcgttgacgatggcccactcgccgctctcccagtagtccttcaggtccaccgtctgctccatctgcaccaggtcgatcttggccttgtcgtacgaccaggagccaaacttcatcttgcagttctgctggtcgaaggggaagaaggtgacgtcgatgctgcaggagctcttgtagatggcaggcggtgccc

SEQ ID NO: 6295 - DNA, 201 bp, Bos taurus
cacccctcaactcatcgactcccggcccggccacttcgcgaacattcgacaccatgagactcactcggaggactcgatttcgatcgacatagcgttgtctctccgggcgcaggccccactccactctcaggcccagtcgcgcaacgcaccaacgccacctccggcgactcacgtacgtcacttccgctcgacaacgacgcc

SEQ ID NO: 6296 - DNA, 201 bp, Bos taurus
aagttaatccacactcaggagacgatgggtctaccgaagacagagatgtgacctgggaggtctgctcccttccctgctggaggcctcatcatcaattttctaagctaaagagggttactctgagctgcctggtagtccctaagcagagttagcagggcgaaggctgctccgaattagtaggactcaaactcccgaaacttt

SEQ ID NO: 6297 - DNA, 201 bp, Bos taurus
agatagtccaggccccagactcaggagagggaagtgacagtgctctcagttaacaacctccaaagagcgctgaggagaggaagccctgccactgaaatggcgtgatttcagggggccctgtccacaggaatgggggccctgtccataggaatggcacctcctagaactgcataacgtgtcagccctgtctgctccccagca

SEQ ID NO: 6298 - DNA, 201 bp, Bos taurus
gccttgctttctcatgcctcggtgttttgcatatgcctctccctccctctggagtacctgatcctaggtcctgaaaaacgaatactctactttaaggccacgttcagatggcacctcctctgaatactctctgttttggatgtattgcctctgagagacctctaggtgtccagactgctggaaatcagagtctagatctac

SEQ ID NO: 6299 - DNA, 201 bp, Bos taurus
ctgtgtgtcatttattaataatgtaattaaaataacatatttagaattctgtccaaagttaaacatggagtcaagcatagagaaaattgtgttgtaactgctgtgacagcagagaagaatttacagtttaaactctcttaacttgtcatgtgggttattcatacattatgaacaagctcgatactgataatgtacagggtg

SEQ ID NO: 6300 - DNA, 201 bp, Bos taurus
acatgacttagcaactaaacaacaacaaataaagacataatttcttgattttgaaagtctgtggcatatattaatagcatcactgggtatatgtttttcacatactattaatggacaatttaagtttgttctgataattgacagatttttgaaactttcaacaagttaataagaaaatatgtttagattgcttttgctgtc

SEQ ID NO: 6301 - DNA, 201 bp, Bos taurus
aggaggaaaaagtcagacaggcccctgcaaataggaacagggctggctcaacaacaggaagctggcaggtctctgcagcccttccgtttgtttccaggctcctgggatgggtcacaggccagtcctttgagcagcccctactcctaaccccctgaagacgactaacctgaatacgggttattagtgaggctcccatctcga

SEQ ID NO: 6302 - DNA, 201 bp, Bos taurus
ttcttatattttacataaaggttctggagtcagtgtattcttaaagcaaagtaaaaagcctaagttaccaaaattactaccaatatccttaaaaattacccccaatgaattatgaaaatgagtaaggcatggaaattagatgtaaaaatcaacaccttcagcatactctcacatggggaaattctgtttccttttctggaa

SEQ ID NO: 6303 - DNA, 201 bp, Bos taurus
gaccccgggcggcaatacaaaaaaaaaaaaaaaaggcaggcaggcagaagggaaggagggagggaggaccggggcagggaaagggaagggaaagggaaggggagacaggaacccgaagcttgtagacgaccaagtctagaaaggacggcgagcggctggaaccaaaacaccccctccctttcgcccgcgctccgtcaccct

SEQ ID NO: 6304 - DNA, 201 bp, Bos taurus
ccacaagtcaaggcccatttggctgggatgtggccagccaagggcactctgccctctggccctgccttagcacacagtgagtgctcagtgggcctggtgcgtcccctcctccagctgagctgcctgccctcaatgccctcttaaaattcttaacatttgacttcattttttttttttttttcaattggccacaccacatgg

SEQ ID NO: 6305 - DNA, 201 bp, Bos taurus
ctccaaactggcccatccagactgcccttgttgccacctggacagatgtcatctcttctcacaggaaacctaagagtcacccttcttaactcacccagctcaccctgggtggagaagtaaggcccagcttcttgaggagctctctgtgacaaagccactcagttcttcaaggatcactcttttccaaactctttacgaatt

SEQ ID NO: 6306 - DNA, 201 bp, Bos taurus
acccgtctctcccttgggacaagagagttgtgaaggaatgttccttggaaggaggcccagcacccattcccacatctcaggcccctgggattcgacctcctgactcagaaagcactgccccttgctctagttaccattttcatgtgctcaacacctgggtcaacagaacagctggacggagcctggcctggcagagccccc

SEQ ID NO: 6307 - DNA, 201 bp, Bos taurus
ttaggagtgagtcagtcatgctgtggaaactgcttctccttcagggagctccactgttaagacaggtttggtgcaggcctttctgtgccctaaaggcctgaagccagcttgccccacttactctctctcccctccatgctgggggatacatctggtgtgttctgtcacacttctttctcctggttcctcctacttgtggcc

SEQ ID NO: 6308 - DNA, 201 bp, Bos taurus
ccgctgcgagtgcagcctggaggccaggagtaggagacgatataatcaagtcgccgaggtttggggagcactcctaaaccagtgtcctggaagaatctccgggcgctgcgggtttcactctggcctgtgtaactaacaaagtgccctttgcagctgagaggattctcgttccttaaagggtctcatctgggaaaagttcaa

SEQ ID NO: 6309 - DNA, 201 bp, Bos taurus
cttttcaaagtgctcttccacgagagagacacttgtttgcagtgaatgttgtctgggcactagtactcaatggtggggagagcacttgttaatcagatgattgggatccaatcccagctctgccgctgcccatctgtgtgagcttgggaaagtcatgacatctctctgggtcctgataacatcctcattatttaagcaagt

SEQ ID NO: 6310 - DNA, 201 bp, Bos taurus
tgggacctacagattggggtttacaaatttttaaaagtccatcttgtttcctaattattaaagtaatatatgcccactatagaagaataactaaatgaaaaaggaaaggaaaggccaactgcaatgagacagtaaaatgatgtagctcctttggaaaagactctagcagtttctcaaaaatatcaaatatagagttctcat

SEQ ID NO: 6311 - DNA, 201 bp, Bos taurus
gtgcctgcagccagcatgctgtggtggccatgattctggggcgtatttgaaagtgaataggattttgcagatggatctgacaattttgtatttcatgacaccactggccagtgggagaagattaaccagagaagatgggcatttaaaatcagacccatctactcaagatggggccagtgctgggaaaaagtgttttaggga

SEQ ID NO: 6312 - DNA, 201 bp, Bos taurus
actacattccagttataattgttaaatatgctttaactttagtccttggttgtactagtcctatttcaaattctcagccacatatggccaagtgtctaccgtactagatggcacacatacagaacatcaccatcgtcacagaaagttctattagacggcactggccaagagcaaagcttctttaaactttaatctacattt

SEQ ID NO: 6313 - DNA, 201 bp, Bos taurus
ggaactattagatggaaggagagtaagttccacagtctttaaaccacagtttattgagcatttttgttacagccactgttttacccttattaatgaagttaggcgacactgccttctctgggaagttctgaggtgttactcctaaaagatttagccccagttctgcttctgtatcccacatcccccaccccaatgatttta

SEQ ID NO: 6314 - DNA, 201 bp, Bos taurus
attttctgtgattgaaaaatatgaaaatgtacaaactgtatttgttgggcaaatcagtatttagttcttaattccaaactgaagtttatattatataataatatttagagcaaacaaatcttggaagaaaacacacattcacagtatacaaaaggattccttcctccccttctttatcctgagagaagagctagtgaactt

SEQ ID NO: 6315 - DNA, 201 bp, Bos taurus
taagaggcctcttaagaccttctctctcaagaggctgtaagagtgacccagagagtctagggaaatggcaccaagtggaaaatggccttctggttggacacgacttggggaggaagctgtctgtatctctagcctgaagcaaagtaattgaatggcagcacagggagggccctggagtggaacagcctacactaccaccat

SEQ ID NO: 6316 - DNA, 201 bp, Bos taurus
gggctgggcgtgttggcgggatctcccttcttgcaccagtctccctgagtacccctcacacactgtctgccggtcatcccgtgactctgacagactggtgggacaagtataaatgactaatgatataaaaaaaagttgcttggcctcattattagcaaaaaaaaaaagggggggggaattaaaacaattaattagatagat

SEQ ID NO: 6317 - DNA, 201 bp, Bos taurus
ttgtttagaattcagtgtgtcctttggttttcactgtgaggtcactggtaagatttaaaagagatagcctggcaaaagagaagaggggaaggatataatttaagaggttgtagtaaaggttctatgggggcgtaatttcctgagggtggtgaaataaatgatgggggaagcttctagaataactttaatttcttgcattaa

SEQ ID NO: 6318 - DNA, 201 bp, Bos taurus
ttagagtctcaaaaaattatttgctaacgtaacaccccacagattacttcctggttgagtggattaagcttgtctcccttaatcctgaggtcaatcaaagcgtcactaatggtagggaactaagtgttacttgtctccttgtgtggggcaaaatgaagtacactacagctctctgatggatcctagccaggaagtgttcgt

SEQ ID NO: 6319 - DNA, 201 bp, Bos taurus
caccttcttgcctgtctgcttgtaaaactcataaacatcctattctagtaaatcatgcctttcattgaattctttctgcactgagaaagaaaagactggaactccttgctatgctaagtcaccttagtcgtgtctgactctgtgtgaccccatagacggcagcccaccagctcccccgtccctgggattctccaggcaaga

SEQ ID NO: 6320 - DNA, 201 bp, Bos taurus
atttttactgaaatgcatgactctgaccttgaaaactgcattctcattaatctctctttttcatgagtttaaaatgtttccatctgagcattaatcatataaacatgatgttgacactttcccaagaaatggtcaataccaacaatagctcaggaatgcatattttgacaaagctgaatttgatgatctgcatgttttgag

SEQ ID NO: 6321 - DNA, 201 bp, Bos taurus
ttcttgccaggaaaatcctatggacagaggggcctggtaatctacagtccatggggttgcaaagagttggacacaattgaaacttctgagcacagcacatttgggatcttggccccacaggatatccagcccaggtcctggcatatatttcaccatctgtgtgtggtccgtttccaatgcagagatagtagtggggtgtgg

SEQ ID NO: 6322 - DNA, 201 bp, Bos taurus
ctgcaaatgtgtttttccttttacagtaggttttgcagttaaaaaatcataaagatttactcatgaaggtttttacaaagtcgtaagatttactcatgagatataaatgagattagaagatagaaataaataggccctcacattaagctatttagcgtggacttaatagaatggtggacgacattggttcgatactgttgc

SEQ ID NO: 6323 - DNA, 201 bp, Bos taurus
ggggacatagtttaaaaagtgagaattataatggaggacaattggaaagagagcatcctttgaaatgataaagggtgaaaagaaatttgcatttgagttcggatagggtagccaaaggagcatggactcaagtcctgctcagttcttttttggtggcttatcttgtctgagtttcttctctgcctctcttttttaatctgt

SEQ ID NO: 6324 - DNA, 201 bp, Bos taurus
cctaaaatacacactttatgtctttcttgatgaaaagccagcttgttatactgataagcagtgtgtagtgcctgcatgtaaagcatggcttacaccacccctcacctcaaggaaggcaagtcagtctccttcccatatacttgatactcacacataccactgatacactaaagatacaccaccaactcatgaaaaattagt

SEQ ID NO: 6325 - DNA, 201 bp, Bos taurus
agctgtatggggagctgatgttatctttgaggcttttccaaatccacagggctctttcaatgacaagaaacaggtccctctactttccaagataaatgaggtacatacagtaacaaagaaagggcaacccagatgaagttcaccccaggaggcccctccaaccgagtgctgcaaggagatatcattaggctatgaagtcct

SEQ ID NO: 6326 - DNA, 201 bp, Bos taurus
gagcagacctttccaaacaggctggaaaggacaaatggcaaagccaaacactccactttctgtaacccattcttgttttctctaatctaatgcagattttctgcctgtgtgctttttacacactgaggtctaaattatttttttcaatgagtaattccttaaaatatgtgggatgtgattgcatgtgtgcatttgtgtgta

SEQ ID NO: 6327 - DNA, 201 bp, Bos taurus
ccactttattcgcctttaaattcacctttacaaagccagctgggcgcttgctttggatctatagaggggctccagcctgccaccatgcctctgagattcacagaggggagagtaagcatcaccgtggttggagaatgagctgtggggaggacaagaatgatgctttgggagataaaagaattaggcaaaacaaagggcaat

SEQ ID NO: 6328 - DNA, 201 bp, Bos taurus
caatacactaagcagagattccccatgtcaccaaggggcatacagacatgtagggcacagggtgaagtccaagaaagcaggccttgatgaagattccttgatcacattgggcagcagtaggtagtgacagtttctacccaaacccttgttgtgtgggcccgcctgggagcacgcttcctgtcacctcagcgaagccttcct

SEQ ID NO: 6329 - DNA, 201 bp, Bos taurus
ctaaccgcatcatgaaacatatctcattaatacaacagttaatgcaatcttggaaaatgggttaaaggaagccagtattcacttgtaaacaaaagtctgaatttgctggggagccagagatctaattacaatgctattatgaacagcattattattatcctcattattattacagtctgataggaattagcagaagcaggc

SEQ ID NO: 6330 - DNA, 201 bp, Bos taurus
caggaaagagccaatcttcagagtaaaaaccaaacacagtgaaagaggagcaaaagaaagaggctgaaatgggtcaggaagacatgaaagaagatgtaaccgcagaaaacaagagagtccagcctctgaagaaacagaagcaaaagaagccacatctgatgtgatgaacatcctctcctgaattttttccatggtctccat

SEQ ID NO: 6331 - DNA, 201 bp, Bos taurus
cgccttgggctttatttcccacacttcccacaaagaggatgaaggcattcctttctccccaaggatgccagggaaagggtatgtgagaatccactgtgtgcggtgtgtggtctgggccactctaagatggaaaatgtagaaacagaagtatgaaagcaaaagacagactataaggagacagtcttctttgatctcacttgg

SEQ ID NO: 6332 - DNA, 201 bp, Bos taurus
gatcttttgtttaaaaagcatgtctggaaaagtcagctccagtcctatacccctgcactaactgcctgaagaggaaacaaagcccaggcctgtgtgccgttcggctttattctactaatcagaccattacagctgaccttgaacaaggtgtgacacacaggcccccgcagtagtgccggcctactggcagctgttacaccc

SEQ ID NO: 6333 - DNA, 201 bp, Bos taurus
gtccaggtttgtattctctccaactgtctgaattattggcaagttcatcagatagccatctcttactctgatctctgtggttgtcattgatccaagtgggttgactgtaaattgggttcttaaatgcatatggattgctagaaacagcatagggtccttttctgggggtattcccatagttccccggtgttactttttttt

SEQ ID NO: 6334 - DNA, 201 bp, Bos taurus
acatttcagtgatagaaatggggtgacaaaagttctgcaaatattgagaagagagataataagaaatatgtgggaacattgctttgaaacatctgaaacggctctattactttcctttctttaattcactttctagtccttggctctccagggtcatcagaagcagaaaacttcaataattccagcaaatatcagcaaaaa

SEQ ID NO: 6335 - DNA, 201 bp, Bos taurus
gtagttgttttatcagttcaataacagcagcctgtttgagcagcggtttctagtttattccattgctcatctcacaacttttgtgtggatttgaggaatcagaaagtacaagacagggtctctgtctcagtctagtgggtgtgggtaaggatggttatggagagggaccaaatgaacaagttagaagcttgtggaaagtac

SEQ ID NO: 6336 - DNA, 201 bp, Bos taurus
aaataataataataataactgctgaagtgggatgcctgcccaatgcatccacgccattgggaaaatggctaaagagatagcttaagtggctgtgtttatgcctggtgacattcttggccatatcagattagaccaaagtgatgtgtcgctgtatggaaccaggcatcaaatctttataccaagagtctgaattaaaaggtc

SEQ ID NO: 6337 - DNA, 201 bp, Bos taurus
agctgtaaagacagtgagtacccatagaagatttgacatctagtgagaaggtaacttactgaacaaggattccaatgcacggaggcactgccctgatgaggcagacatggagatggggaatagaacagaaacaagagaagtcatgttcaaggaggcaggaaagtccttctggagaaaaatgctttgtgacccttgaggtga

SEQ ID NO: 6338 - DNA, 201 bp, Bos taurus
ctttctgccataagggtggtgtcatctgcatatctgaagttattgatatacttgagttaaaaatttgttctgactgtatagggcacaccatggcccaccttgaagtgtactcctgaagcagcactttttaaagtagttccctttgaaaactatttggaataatgtcttggccttcaggactcctaagtgttcattgattgt

SEQ ID NO: 6339 - DNA, 201 bp, Bos taurus
acttctcctctttccctcagtgttctgaaataacatttgaagttctgtttggtctctttggagaactgccaatgacttcaaggcatgtagtgaagttatatatcaagacacaattacatgcagtacttttgaaaagtgattctcacttaggagtaatatacgatatgaatttaataatctgccatactactcctttttttt

SEQ ID NO: 6340 - DNA, 201 bp, Bos taurus
ttcttttgtgccatgcaaagtgctcaaaacgttgtagtgctcaagactgaaatgacaaaacccagagtgatccagaaagaactataaggatgccagttccataggaagatttatacacttatttttctccaggcttctctctggtcctggtgcattttcagaaggtcggcaccttgcagcaccaggggccttacaggcaag

SEQ ID NO: 6341 - DNA, 201 bp, Bos taurus
atttagtatgaactaagaacatcactgggagcttgtgcttaggggaagcttattatatactggagatttactgaatgaataagaaggaaacctctcaaaagtcacatttcgtggatatgtttaaggttaaggtttaagagtatgtggttgaaatacttggtttaactagaattaagtcactttattcctgtggcttttagc

SEQ ID NO: 6342 - DNA, 201 bp, Bos taurus
agaggaaggtggaggcctggcctctaccttgtcctccccgaggccactttgcaggaaggaagggctgacatctccttcggcagtgtggcttctccgaggtcggtgtttagctttgtgaggccgtggttttctaatcctctttggtttctagtcatttgttcagggcatgttccctggcagccccatatgtaccaagcagcc

SEQ ID NO: 6343 - DNA, 201 bp, Bos taurus
gcttcttggggagagaagtgtttcatttgagtcctgaggttctgctgagcccctgtaggacttagccaacaggcctatcacccatcttttctaagcagtcatctatgggggttgggggaggatgactgaaatgaaagaccactatggagcggggaggacattccaggcctgccccccaccctcttctttccagggctgcag

SEQ ID NO: 6344 - DNA, 201 bp, Bos taurus
cgtgtttattcctcgctggttgtttccacctggcaaagagaagcatgccacgtgaaacgcttcagcaaatgcaggcagggccccttgtacctttcagtcccggtgggcacagtgaaataatcacacaaagactgacctcgttttcggcttgcttccgtgaagcaggccccgaactgcgttttccagagcatctgcttggta

SEQ ID NO: 6345 - DNA, 201 bp, Bos taurus
tgaacattggggcatgaatggctacataaagatggccaaagaccggaacaaccactgtggaatcgccaccatggccagttatcctactgtctaaatctcaaaggctggattaagaacaatatccaaaggaaggattttctcttaaaactgaccagactttattgtgtgggaatgaaagacttgaatcattgaagatccaag

SEQ ID NO: 6346 - DNA, 201 bp, Bos taurus
ttggagagttagcaagagaaactatgagttagcaatagaaacaaacaactttaaaatctttgtgctttgaaaatacaaagacatgtttcttgctcatgctgatgtccatcacagttcaactcaaggctcttagcacagtcattcagagatagaacagctaatatatcatattttgtttgccttaagagagggaagagaaca

SEQ ID NO: 6347 - DNA, 201 bp, Bos taurus
atttaaatagtctccaaatggcccattctatatgaagtcatacaggatgccccctttgggctgtcattctcctttaaatggatcgctttgtgtgcacagtgttttaatgccattcaaccttaaaccccatctgtgggcctcatcaggccacgggcttcagtgcacatgtggcagccataccttcgacattcttagtctctg

SEQ ID NO: 6348 - DNA, 201 bp, Bos taurus
gtgggaaatagctttttctcatgtattatttacatttgggacaggcccacctcccaaattgtgatggcttttactctccctagtgtgtgtgttcctacttcttaataaaagcaggatggtttaggcccattcctgtcatttgcaaattgtgatttcattgggttcctttgggaggccagatgataggcaccccagtgtgag

SEQ ID NO: 6349 - DNA, 201 bp, Bos taurus
cactaaagtttgagaaacactgctctactctttaaaagtctccagaattagttatcaatctctaaaaatcaactgaatactttaagaaaatataattgcacataaggtttacattattattaatttcttataaattattagtttagctgtattatttacttgataacagcaaaattctcatagagacaattttttgtctaa

SEQ ID NO: 6350 - DNA, 201 bp, Bos taurus
atttagggcctgtgtatataaccttctcatctcaaaataatttaactgcatatgcaaatattcttttttccaataaatccagatgttccagagattgacatggatgtatttttttaggggccagttttcaacctaccacacgcattaaatgtaataaaaaagctcacatatagtcacattgaaatgaaagtgcagaaaaac

SEQ ID NO: 6351 - DNA, 201 bp, Bos taurus
caaagaacaaagttcccaggccatattctattttgtttttacttagaaagtctatggctgcaaaacctggaattattggataccatatggcattactgggcgtcccaggtgatgctactggtaaagaacccacctggcaatgcaggagacacaagagacatgggttcgatccctgggttgggaagatcccctggagaaggt

SEQ ID NO: 6352 - DNA, 201 bp, Bos taurus
ccgccaaattaggtttaccttctccctttggggaaaaaaagaattaaattatgttttggctgtattgatggaaaacatgaaaagcaaactccggggcctcatgcctcaagggcacttgatctcccgttagctgcaaacaagaaagtccgcgagcccctctgtgagcagcaagcattgggttgccgatctccaccgggccct

SEQ ID NO: 6353 - DNA, 201 bp, Bos taurus
agagggggagggtatgacttttctttcagcttgggatgctaccagctcgggatggccccttcaaagaattccaaagcacggaaaactgttcttcagttaccaccacagctgtggtcttcagtttcctagctcggtggtcagactccacctggctttctctttgccttctacccattgcttgcaaacagtcttacacagctc

SEQ ID NO: 6354 - DNA, 201 bp, Bos taurus
agtggaacagaatagagaactgagaattgaactgacatttacatgggcaataaatctataacaaaggagacaataatatacaagagtagaaagacaccctcttcaataaaagggattgggaaaactggacagctacatgcaaaagaatcatactggactattttctcccaccatgcacaaaattaaattcaatgtggatta

SEQ ID NO: 6355 - DNA, 201 bp, Bos taurus
cgggaggaggcgcggccgaaacaggaagggccgcgaaggggaccccacacgccctgcgccccaaagctgccgcacgtaggagcgggttcggctcaagttcgtcgtcaaaggccccaccctctgactcttggctgggtttaggagagtttttaaaaaccctatcttcctctaaactgccaccttagagaaaaacgttaagac

SEQ ID NO: 6356 - DNA, 201 bp, Bos taurus
ctgtaatagctaacttccaagacagccccaaaaatattcatctcctgatattttcatccttaaggaacaggtcaccactctgtaaacagtggccagcttctgtggtggctcagatggatttaatggtagaatgtgacttctgaggctagatcataaaaatgttgtggcctttaccgtgctttctttaggactcctcattcg

SEQ ID NO: 6357 - DNA, 201 bp, Bos taurus
gtttttggtatacctcaccaatttattgagcatatttctcagatgcaatggtttctccaggactcagaaagctgtcatggatcagacaccatcaaacagtacccaagaccttttttagtgcaagtttggctttgaaaagagctttgaagcttcttcttggtccaccactgagttggtcgtcaacagttgtataaaatccac

SEQ ID NO: 6358 - DNA, 201 bp, Bos taurus
gttgtacatatataccagatatgagtactaatgttactctctttactaaacacatgaacaagatgattcaggcgatggattctcctaaagcctcagtcacttcacttgggaaacagtaactagctccccatggtggaaaactgtcttataatcataataatcataattgttctgtttttactgtttgctccctgcatctgt

SEQ ID NO: 6359 - DNA, 201 bp, Bos taurus
cccttgacacagccctgcctacatgagcaacaagacccagctcctccaccagcaggcaggtaccagatcctcctgccaggaagcatgcaaaggttccagacaaacctcacctaccaggagacagacataagaagcaaaaaaattacaatcatgcagtctgaagaactgagtcctcaaacaggtcggaacctatcctaggac

SEQ ID NO: 6360 - DNA, 201 bp, Bos taurus
aaacactatgaatgttaagtccatcatccctgtgggttcattcagtcccaaggccctccttctatctactttaattaaacctacttcctatttcatctccgctgaaactagcctccagtccacttccccagtctgctcccttctccttccatgaagcctcggtttctagaacgtggtccagtccttctccctaaacccaca

SEQ ID NO: 6361 - DNA, 201 bp, Bos taurus
aagcaaataaaactctggagtgaggtactgactctctgctggggacagtactatcaccttccttggggagctagttggacagccacaaggcagaggtgggcaacgctgggtgttctctcaggacctcccagaaatgccaggctgaaaatccagagatgtatgttgcctttagcacaaggtcataggggacagcctgatgac

SEQ ID NO: 6362 - DNA, 201 bp, Bos taurus
attcaatttagtggacaagagagtcacaacacagtgaaccgattctcagacaaagggaaatatggcttgcagcagagatatcagttctgtgggagccagtggcttaaccctgcaagaatgagacagggaaatctttgtagacatcatttggccaagatttagggagattagcaggaatggataatagaacataaagtactg

SEQ ID NO: 6363 - DNA, 201 bp, Bos taurus
tcttccctaagagactctcccagggtgccgcttggcctgaggtagaggaaggaaggaagccagccacacacaaccacaggcgggggtctgggcccagaatcccccctgagggctataggagagatggtcggcacgtgtctgctctatggctgctaaggaggaagcagagacccagcaaagggagggtggagagaggactgg

SEQ ID NO: 6364 - DNA, 201 bp, Bos taurus
gtgaagactttgaggtttcaaacccactgtgtcctcccaggcccctcaccaaggggacttcagtgggcatttgtaggcctgcagacattgaattatgaagatgttaatgagatcctggacaggggagtgaaggacactcaggtccggtgggaagctgagacaccacttctcaaggtgttggcgaactgggccaggaaagat

SEQ ID NO: 6365 - DNA, 201 bp, Bos taurus
cagggaagggaaggattgtggagacaaaggaggaccagtcaaaaaccaatgatcttggttccccctcaatggatatacacaatatgtttgagctgctttgtagatactgaaacccccaccaagtgggagacgttaactctatactacccaaaagcacatagacttgtggttaaaccagttagcatcagaaggttaataatg

SEQ ID NO: 6366 - DNA, 201 bp, Bos taurus
aagtcaccccatggaaggctgaggtccacagcccctcttgctcacggctgggattggaacacaggctttgacctgacaggaggctggggcggagtagcacagtgatctggccctgcagggtggtggcagggagcccagagaggtgctaagtgtgccgcacttcagcttctcagcctgacagcagctggaggttcatggatg

SEQ ID NO: 6367 - DNA, 201 bp, Bos taurus
gccatgttcagaaagtggttgtgtcctgttagtcagaagctgtggtcagacccatcgatcctccctgcccgcccccccccccccgctcccgctcttcatcagaacagagacgggcgagggccaagcctttctttgtgcacacgaacagtgaggtctgctgtgcttttctcacatgtccatcagcagcaggccggatgtcgt

SEQ ID NO: 6368 - DNA, 201 bp, Bos taurus
tccacagggcctcctctagctgatgtttctaccaccttgatcaggccagaggcaccatgtgaaacaccgagtgtgtcagtggacacttttcaaaggcccagtgcattccaggagtacaaatcctcatccttttctcccactgtgtgatttatttgctcagaaaagaagacctttttaactttgcacaggattggcgagctt

SEQ ID NO: 6369 - DNA, 201 bp, Bos taurus
ctgggcctgccccctccgacctcagcttggaggacactccagcctggtgctcccacgatgtgcccccagcctgcttggctctccttgcccagctcccggggaggctgttgcctggaactggccatttgcaattctttgcaatctcacctcctgctatacctcagcacagcccttccagtgctcccagttacatgactttct

SEQ ID NO: 6370 - DNA, 201 bp, Bos taurus
aaccaaccaacaactaaataaactgttagaaaaaaaagaacggaattgtggttaccagaggtgggggggggggcgggaattgaataaaggcaatcaaaaggtttacattttcagttacaagataaaaactagggatgcaatgtataacatgttgaatataattaacactaatgtacgttatacatgaaagttgttaagaga

SEQ ID NO: 6371 - DNA, 201 bp, Bos taurus
aagggcatgctgaccacccacccagccactgtgaccagtatgaagccactgaccagcataggctgaggtcgctttctccagccctggggcaggaacatggaggcccaagaggagttaggtgggatccccacccgctatggtggccacaaaccaacaaacgtgtcccacgtcatggcgtcagagatgatgccggctgaggaa

SEQ ID NO: 6372 - DNA, 201 bp, Bos taurus
ccacaggaggaagctggggaatgggctttcccagactcctactctagcgtgacagtagtggaacttgatgaaaggtcccaatctcccatggaacaagaagtcatagagggggactctggttggaaaagtacttttgaaccttgtttgctgatcaaatcacaaagtaataatatggatttgaggagatcacagtctcaaaaa

SEQ ID NO: 6373 - DNA, 201 bp, Bos taurus
aatttctaaccacatatcagactggtacttctctctggctttcattttactaaaagaggcagagaaaagggaagacaccattaaatgcaaagtgcaggagactgacctataagtggatctcacttaactggaatgtagggctaatgcaattagagacttcagtcaagctgaatttattacttataacattccagataaaat

SEQ ID NO: 6374 - DNA, 201 bp, Bos taurus
ttcccttgaacacttctgagtctctgggctagtttatcactgtctgtttagactttcttttacaggacctttcccacattatattgtaataatccacttacaggcctgtttccacagttgcactgtaaactttctgaggatatggcacatccctcattcatccccgtctccacagatttcagcccagtgtttggtgtgtag

SEQ ID NO: 6375 - DNA, 201 bp, Bos taurus
gcctcctggaccagggaggaggcctgcatcagcctccagggaaggggatgcagtaagcagggaaggaggttggctttgtcacttactcagctgatgctcactgcgctctgcatgtgctggccctgggcacccagcacccctgccctgatgcagctggcagttctaaggtcctgtccacctcttagcctgagtcctgtccac

SEQ ID NO: 6376 - DNA, 201 bp, Bos taurus
ggggttaaattatgcagttttctgtgtgagagtcacctgtgctgctggtgtgcagagttccaggagccacttcattgatgccttggcctgacatctgcatttttgccagtctttaccctccaggagggagagtttccagaccttactcccattgacttttacgtggtgttagatttggcatctgttttggtgcatatttta

SEQ ID NO: 6377 - DNA, 201 bp, Bos taurus
ggagattgtcaccatggctcctctccactgtctctatggccaatgtaccagctgtgtatgggagatgtaccatctctttgctggtgttcacttggagtcaggtagggacagtcactagggcccccttccacagtttctaccatacctactggtgaaggggacgggtgctattactgcctgtgttagtgcaggggtggggat

SEQ ID NO: 6378 - DNA, 201 bp, Bos taurus
gccagaaattttgcctaaaactggattaagcaagaaaagaaatggctcagaggaggatatgcagattccattgcttatgtgacaaggcctcagtgtctgcttgtcagctctacctccaccccccccaaccacacccccaactccatccgcaggtgtttctctcactcaagcagcgagcaacgtgcagcatagtatgtgaga

SEQ ID NO: 6379 - DNA, 201 bp, Bos taurus
cagggcaaactacagcaaggatggctggcagattcctgaagcttctctttcagtcatgtcatgattgtgttcctcttttattgaagtgagtaggaggtgagcaatctatccagactacctgttttgagaagcttggttgtgagagtaggagagattaaggaaaccggatgaagagaaagtatagggttaagggaggattaa

SEQ ID NO: 6380 - DNA, 201 bp, Bos taurus
gcagcagcagcatatctacttctccatctactgagagagagagattgagatttattatgaggaattggctcatgtaaatatggggcctgagaggcccacaatctgcttctgtaagctgcagagccaggaaagccaagccagttgtataaccatctgagtgcaaaggcctgagaaccaggagagcagatggtgcaaatctca

SEQ ID NO: 6381 - DNA, 201 bp, Bos taurus
gaggcatccttggagttctttgttgtgagacagagcccaggtctgctgtggcacacctgtcccctgcaagctgtcagttggggcctctcatttgagttggtttctaaagccacactgcccagtgttggtgctatttcagtccttctcaattaagttacgagctgtaagctctttcagggtggggcccttatatatgttcat

SEQ ID NO: 6382 - DNA, 201 bp, Bos taurus
gcctccttgctagtcagtcaccttagcacactgtatgcagcgaggaagggaactcatttataaatggggacaaagcacactgtccccacaaaatccacatcgggaggagggcatgacagggccagtaggtctcagaagtccatgtttgacctcattccctgacagtagattaagccccttagtaatctcctcaccaggttc

SEQ ID NO: 6383 - DNA, 201 bp, Bos taurus
ctagaataagtcaagaaaagctaagaatgtccaccatcactctttgcatccagtattttatctgaattacacactgttataagatactaaagagaaacaataagtgcagaatttctaagggggaagcaaagttgacattacctattaatgataagattgcctacatagaaaaatccaggggaatctacagacagatgatta

SEQ ID NO: 6384 - DNA, 201 bp, Bos taurus
ctggagtggggtgctgtgccctcctccaagggatcttcctgaccctgggatcaaacctgggtctcccacattgcaggcaaactctttgctatctgggccacgagtcagctggatcacagattctctgagtgagaatattcctctaaggtcagcatttctgagcccatgggccttgcagggacacaggagcagacacacggg

SEQ ID NO: 6385 - DNA, 201 bp, Bos taurus
tgcaccacctgggagccctgctcagtagtgtgcttgccagcatcatgccgagagcatccttggactcaggagaggtaccagccctaatgatccacagaacagaaaagaaaatgcaacttctgggtgcttctgtcttgcacttgagcaaaatttaggcacgtgagacttccactcatgcagtgaaagcaaaatcagtatgga

SEQ ID NO: 6386 - DNA, 201 bp, Bos taurus
agaaaagggagaaatgatgatatgaaagagacaaatgcttaggaagaaaataatcctgagcacagtatagaaactggcctgttcaggaggaggagtggctggaaaaggggatgtttgaaaccaatatctcactgtcctgtaatgtatcatgatcgcagagagcaggctgtggccatcagtggagatgactgggatggggtg

SEQ ID NO: 6387 - DNA, 201 bp, Bos taurus
tagccaggcactgtacaagcactgggaaatgatgccctgacccttcaggatataccctggatgcagagccctctgatcaggatcctggcctctccatcagggagtgccctcaccataatgtcccactgccaagcagagacctaatgggaagagacaattatcaaaattcagctgaaggcctgaatataacaataaagatat

SEQ ID NO: 6388 - DNA, 201 bp, Bos taurus
gtatcatagaatttgagttctggagggactgtgtgaggccatttttggtatttgggtagagtataagctttcagagaaattggcatagacattccagtgagaaggaatcaaatgaaactttggggacctctgatgtaccatatctcctggtagtcccacttcctctagaatctgatctttcccagagacttgctttaatca

SEQ ID NO: 6389 - DNA, 201 bp, Bos taurus
ctgtgctgtgccttttcttggtaccccaaagcagttctctttctttttccatcactcagagttcacatgtagtggcctcttgcattatttccagagctcacagtagtaattagtggggaggagaaaaaaaaaggagtgtatagtcttatctacatggaaagtgagtgcccccaactaattattaacacaggtgcaaaaaca

SEQ ID NO: 6390 - DNA, 201 bp, Bos taurus
cgtttagtaaatgcttataatatgcctgacatagtgttgtatattcagtacatagagcagaggagaacatgacttctgctttctaggaggttaaaatcccatagtggagatagacatggaaacaggaagtagagtagtgagggccatactgtatggatgtatggaccaaattgtgcagtagcacagatctgaggagtttag

SEQ ID NO: 6391 - DNA, 201 bp, Bos taurus
cacccatatatcatttaaatgtgtttgagtctcacattaatccagggaagcaaacattacttgttatttctagttaacaaaggacaaaacaggttcagaatgattaagcactatatatatattcactcactggatttaacctacattgccttctcacatcaacaatggctagttctctcaagtagtcagtctgtttaaaac

SEQ ID NO: 6392 - DNA, 201 bp, Bos taurus
ctttttcagcccatcttgctccagtgctgctcttccactagggtggaggctgaagtagtcattgccagcaggaatgtccctttgcagagttgggaaggggcagggccagcttagcatgcagtactgacccagactttaaccaaggcatgcacaaagggggaataaataaaactaaaacagaagtgcaggccctagccctca

SEQ ID NO: 6393 - DNA, 201 bp, Bos taurus
caaacaggtataatgatggcttcagtagataccactaatacatataaaacacgtgtatcaatttgtccacagtgttaccaaaccaaacttggttctattaacctgtacacagtgaagccaatctactgacatttggttgtggtgaaagaaagtgtaactatgactgtaagcaccaagaaaggaattgttgttcagatgtat

SEQ ID NO: 6394 - DNA, 201 bp, Bos taurus
cctcctgactgatcctggtgcttctctcttggccctgcatggcaggtacccacctcttgagaactgtaagtaagaaactatctttttaacagcagttgtcgccttctcctgatttgttggcctcagcatacctgagtaataataaagcttacattttaaagaacaacccaagctagctttagcaatagtggaaaccaacag

SEQ ID NO: 6395 - DNA, 201 bp, Bos taurus
agattccttattgattttggctcaggactcacaaagaatatggaaagacaggcacccataacaagaggagaaatgagtaaaaatctaaggttcaatgcctggcatatgagaaaatgattcctaaatgatgaacccaatataaagagttattgtaattatcactagtaatccactaaccacatggagaggtattcttgctca

SEQ ID NO: 6396 - DNA, 201 bp, Bos taurus
acacacacacacacacacacactttctgctctagcatcctgaacctggtaatacctacatctccttctgatctcgtgcctttgatccagggccctcccctactcccttcccattttccgtctgagttcctcaccagctgactctcacaaattcttcttagaaatggcaaaagtcagatatcatctcctctatgaggccaga

SEQ ID NO: 6397 - DNA, 201 bp, Bos taurus
tttgcagaaactaatttgccagtattgggcttagaacaggaggttgtctcttcagggctcattttatagataatatttctggattttaatttgaataaaacaaatacaggggatgtctctcccataacaatgctgttttgaggatattaataactcttaggctttgtttgctggctcaggatggcccattcttccaagccc

SEQ ID NO: 6398 - DNA, 201 bp, Bos taurus
ttctctgttgagctgctgagtttctggcccttgtgctcgagagtccagcccggctgctgcctcctggcatccctaagcaaactattcaggtctaaggtcgctgcaggcctcggcccagtgtggagaaattctggctggcatgggctggggtgggggtgcttcttcttaccacttgtccccttgtcatgtgggatttcatac

SEQ ID NO: 6399 - DNA, 201 bp, Bos taurus
aacaagttaaacaatgtgttgctaacttagctaaaaggctggctgtgaatccaaaccgtccatcatcggtaggtgactgatgccctgtgtccttaggccctccttgtgtttccatctgctcttagaagacagatgatggacaagtcaggaaagaattgcaaaggactgacttctggctggggaacccctttctcatctttg

SEQ ID NO: 6400 - DNA, 201 bp, Bos taurus
gagcagcaatgtgcagacctccttactgcaggaatggccaggggcggagagcaggggaactggaggacagaggataaggaactgagggtacggaggggatggagagagaaacaggccactgctaaaccccaaaggagcagggagagggtggggaaaatgcatttctggcctctgcctcttctcagtttgtacactgtatgc

SEQ ID NO: 6401 - DNA, 201 bp, Bos taurus
gccaagcaaactcaggcggctctggcctgctcctctgccggcctcagcttgcaggcttgtttccaggagctttgcatgtacttgtctctctgcatcctcatgccacctaatgaggcgggccctgcctttcagatggaataacctgactcaagttacatggccaataagcatggggattctccccagaccctcgaggctcac

SEQ ID NO: 6402 - DNA, 201 bp, Bos taurus
tgacgcagctgcaagccaagggccaccaagggctgccaggatcaccagaggctgaaagagattctgcactgaaccccggagaaggaagcagcccagccgacaccctggagtcagactgcgggccctggaaccaggagagaacagattcctgttgtttaagccacccagtctgtggtacttcattacagcagcctcccagaa

SEQ ID NO: 6403 - DNA, 201 bp, Bos taurus
acgaggcctgtggtctagggcaagggtcgccgctttctggagcgcatatgctatgcaaagttgttcagcttttgatttgaaaaccaccacttatgttaagcacatccaggacttggggactgtggccaagtggctggcccccccattctgagtctattcagatccactaggcgccaccgagcggaagtttcctttccaagg

SEQ ID NO: 6404 - DNA, 201 bp, Bos taurus
gcgctggtgcccctctgtcctgctgaggatggggctccgaagagccaggaccgggctagccagagggctgtgtccaggacctccctccgtggccatcacccgactctgatcttgttgggtccctttatagtgagtggaagcttctacacctgcagccacacctggacccgctctgtccagcaccgtggccgacaccattca

SEQ ID NO: 6405 - DNA, 201 bp, Bos taurus
gggcagccaggccagtgaccacagccccccagcccccacatgctgctgccgcagacctgccaagcctggcgccatctgtcaaggtgcaagtgggccgcacggtcctatcatcaccgacatcacactccacctcctgctttccagacgcccacaagaggaggctttctttccgtggcaaagagcaataaactctgagcgtgt

SEQ ID NO: 6406 - DNA, 201 bp, Bos taurus
atttataaacattcaacaaaattagcctcatgtggtatttaatattgttggtaattgctgtgagtgttttttccttagaattctagcattaagtcataaggggatgatgaaaaggaaggctaatgtaattcaaagggcgtaaaacctcagagttgatcctaggaagtttttatacttcttcctcccatggggaagccctct

SEQ ID NO: 6407 - DNA, 201 bp, Bos taurus
gtccacggcgttcagagactcaagcccaatgcacttgggggtttggcacgtaaaacaatagcagaaatgaaatctggtttagaagcaactgtgattgtttcaagaatgcacagtcccttcaaatgctgcaagacatacacaacaggaaaatcaccttctgttggcactacatttgcttcaccagtgcatttatatcctaca

SEQ ID NO: 6408 - DNA, 201 bp, Bos taurus
gacaagcagatcaagtccaaactcaaggcccccgggtccagtgtccacatggtgaacctaagactcaggcttgttcactaacatggtcacctgtggttccggtagtgctggagttacccttggggcccagggacctagttctttccccgctccccagtctcccctcccctctccacattgcagagcttgatcattcttttg

SEQ ID NO: 6409 - DNA, 201 bp, Bos taurus
aggtaattttgttttcctggtgctaactaaattccataaggaaatgatcgaattaatttttttttttaacaaggaatgctgtacagtataaaagaatcttcaacagtagttttcagcagatgtcataaatgtcatagttctcttgtggtcatgtcttacatccccctgtcttagatggggaagggtagaaagcagggtgga

SEQ ID NO: 6410 - DNA, 201 bp, Bos taurus
gatagcccgaaattctaaccactaggtcactagggaactccctactcttttcattttttaaaaaatatccctctgtccaggaagtggtgtccaatttctcgagttgggtcagaggtcaatcccaggtttgcattggtgctgagccataagtcattccagtgtttttgaactgaactcaagtactatgattctctcctacca

SEQ ID NO: 6411 - DNA, 201 bp, Bos taurus
ggaggtacagttcagacaaaaggtatcagggcttgagaagggagagaattgttaggaattgctgacagaagctgaaaagttgtatctctgtgtgtgtgcatgcgcacacacttgtgtgatacgttgtgtggccgtgccaggaagtgtgggtggcttcatgtaggtaatatgagtcattgaaatgttttaagcagaaacaga

SEQ ID NO: 6412 - DNA, 201 bp, Bos taurus
acatgaacctaagatgtgaagcagaagctttgctagataaggctgtgtgatttgaaagaatcaggttcaataacaaagggtcgtgtggccttatggagctagagaaaccaaaatcgttttgatgaaaatcaccaggaagattcagttgggtgaataggtaagacctggacaggctgattgaggttttgatgactggcagca

SEQ ID NO: 6413 - DNA, 201 bp, Bos taurus
agtgtgaaagggtgatctcagagttaaaagacaaggctgtgggctgaagtcatagtttgctgctcagatagctatgtgaccctttctgggcctctttttactcctgtgcaaagagtcatgttgtaaagatcacaatattaagggaaccttaatgtgagggtgatatataaactgtgaaggacagtacagaaagtgtgaagg

SEQ ID NO: 6414 - DNA, 201 bp, Bos taurus
ttattttctcttgaatgaaggacaccagactcctcacttcttttagttttgtcacttgatactaggcttgcagtaaacgtggcctgaatccacatgcctttgcacttaattttactggactggtccttccccggggaccacaggaactaccaccaggaacttcctctctgacttagttttctccttgtcccagcatcctat

SEQ ID NO: 6415 - DNA, 201 bp, Bos taurus
tcatcctttgacttgcctgatgggtgtcggattcttttaggccacaaagtggcagcaagctcaggttaccatagtgatccatgtcatcaaaacagggaccgcagacctcaccaacgatgccagtctctgtcctaaagccaggctgcttctacctcctggtcctctgagcattctaatgcccctcacccctgatggattcac

SEQ ID NO: 6416 - DNA, 201 bp, Bos taurus
cccagcacttctttctcctaataaatcccaggaaaatattccttgagtcaagaaacatctctccaatagtcacattaggctggatcttgacttttgcaggcaagtgtgcattttgcctccaaagtaaaagtgaaagtgttagtcgatcagttgtgtccaaatctttgcgagttcctctgtccatgagattatccaggcaag

SEQ ID NO: 6417 - DNA, 201 bp, Bos taurus
tattcctgtttgaagccttaatgaaatttgtgtccaggatgagtcagtccacctgctgttcactagctgagtactctattaaggtcagctggcttccttgttacagttatttaaattttggatgttctactcatcagtgtctttaaatttcttgaggccagaataatttcaaatactatagccccctttcatcttataatg

SEQ ID NO: 6418 - DNA, 201 bp, Bos taurus
atatcctgtaatcctttcaaatgaggacacagaggtcatggcaagcagcctgtcaaactccacataaacatacattaaactttagatctgtccaacacgaggactttgctctttgtttcacagtacattgtcccttactgggaggttttccttcaattcattttacagaatctagtatgagaatgtttgtatggtcttatc

SEQ ID NO: 6419 - DNA, 201 bp, Bos taurus
agcggcagatcgcccaggccggcctcgatggccatcactacttccaaagacaggttgtagggcagcagtccttctactcggttcagattgtccacggcgaagaggagggcgtcccgaggccaaagggtctcggccctggcgccctcccccggcttccgtgcgcccggcggcccccggccatgcagggcgctccccaaccag

SEQ ID NO: 6420 - DNA, 201 bp, Bos taurus
aatttatttcattattatttaaatttggacgtgagctcaaaatgtgttgttttaaaaacttagtaaagagttaactgcaaacacaggggccttcatatccttagctgtaaaggataagaaaagtgaattataatttcagtcagtaacctacatcccacctcacccaacactctgtcaagttgcagataatatggaaagatt

SEQ ID NO: 6421 - DNA, 201 bp, Bos taurus
ctgaagggaagtgtgaaagatattttccaaaaactgagagagaataaactatatagaatctttcttatgtttattgtttctctctaagcagtccatgttacctccccaaagcgattttcctttcattgcagatatgcttggctgaccaactggacacaagctgtaaaaatcagagggggagaaattgctttagtagattca

SEQ ID NO: 6422 - DNA, 201 bp, Bos taurus
tatgtgcgtggatttatctctgggcttttctatcttttttgtgctttctattgatattgtaaatggcaatgtaattatcttccttgtgggaaaagaggagggcaaggctccagagaattaagagagtctttaagagaaactctcatagatactggagttgtccctgatagaagtggcaactggtatataactcagttgacc

SEQ ID NO: 6423 - DNA, 201 bp, Bos taurus
attgttatctacttcttgtgatatatttaggaaagagtatctgtattgttaaatcatttgccaaaatgaaacagcaattatgaagattccagtcctcagactaggaaagggaaaagaataacactgtttctctaccttctctttctactagattaagcattacctaattgatttgaaataacagggtttctaaaaattata

SEQ ID NO: 6424 - DNA, 201 bp, Bos taurus
acaagcatttaactaggttatccgcttgtgaaatgtgttcagaggatggcttattgctacagggcagaattgttcaaagaaggaagctatgggtcttctagaagtcttaacaaaattatgtcatttgaaatatttccttctggattaggtacactgacctagaaccagtctatttgttcttttttgattatccccagcttt

SEQ ID NO: 6425 - DNA, 201 bp, Bos taurus
aatttccccccaaactttaagtagaaaaacaagtaaatttaataaagctatcttttaaccaagaaacaaagttgtgctaatttcagaattttctctgcaacagcaaactcagaaagaccatggagccctattggcagcattttgaggaaaaactgtacacatgacacactttataccaaacataaatgcctatgatatatg

SEQ ID NO: 6426 - DNA, 201 bp, Bos taurus
acgtaatcaactttcccaaaatgatagtttaattttcaaccaaatataatatttattctggtagatgaaagaacatgggcactttcccacctggagtaaaattatttaaaagaaacctgtttaaattttacatgttctaaaataatattcaattgtatggaagaatgatatatttataaatgcttaatagcagataacaga

SEQ ID NO: 6427 - DNA, 201 bp, Bos taurus
tttgtaaacatccaagggctcgcatttcaaagcagcatatatttattgctacataaaaagtaagttaggacatgatacatgttgggtaaagcaaaaggccatgccaaaattcatattgttaaaaagaaacttgaggggaattccctggtgatcaagtggttaggactttgcagtttcactgacaagggccagggtacaatc

SEQ ID NO: 6428 - DNA, 201 bp, Bos taurus
caaggatgactttgctaccattcaagctcaatgggaggtgttagaattcctataagaaaggtcattataaagataagtagctttaaatccaatgtcattattttcatcattcataattgctgtttgcacttgctttagtacacatttgctttgttgatttatgttgttattcctcccatatgagcgaattaaattgctaca

SEQ ID NO: 6429 - DNA, 201 bp, Bos taurus
ggactttcagtctccccatcatcacttccatctcctggagtggagaagggctggaggttgaatcaatcaccaatggcctgtgatttaatccgaaatgtcagtgtaacacaactctccatcagatcagatcagatcagtcgctcagtcgtttctgactctctgtgaccccatgaatagcagcacgccaggcctccctgccca

SEQ ID NO: 6430 - DNA, 201 bp, Bos taurus
cttgcataaatcattgtgaagataagtaatttgtttaaaattatagagttgaaatcaactcctcatcttgtgttattcatgatatactgttctacgtggcagtgttaatgatggtttaagagaataccagatattttttattataactctcacagactagattttcattttcaattaatgactcactctactgaatgacaa

SEQ ID NO: 6431 - DNA, 201 bp, Bos taurus
ttttttatctggcaaacagttccaggaaaaaggcttatgacctctaagcttttaccttttgtctttatcgagagtgtaggttatatgaaatacttgtactagcctattagcttaatgatgagtgataaataaaagggagaaatgaagtgataactaaggaaaaaatccaagtctttaaattttgtgtgtgcatgtgtgtga

SEQ ID NO: 6432 - DNA, 201 bp, Bos taurus
gtaggaagaaagaacctcaccatcccaccataacaaatctgatagaagcacttgaaaatgtcactaagggcagtatttttaaggggagttcatctctcccattacagaaaggaaagatcattccccagattatgaagtataatgaaacagagtccaaatgctaatttctacctcttacctccctaagtgtaaggataagat

SEQ ID NO: 6433 - DNA, 201 bp, Bos taurus
taaaatacatagtttatcaaatatttattgtatacttataccaggcactaaagatgcaagaatgagcaacatgccacagaatgtgttcatggagctcacaaatgggcaggaaaaaaagatagactagaaatgaccatattactttggagtctggtggtgtgattgtactcatggaattaataaggatgattgacaaggatt

SEQ ID NO: 6434 - DNA, 201 bp, Bos taurus
catcttagttctttatgtgggcaaggttgcattaagccatggcccaccagaatacaggttcatcctgtatccacccactcagccacattgagatatgtattagaaaaagagtaaggcctatctgaaaggagaaatattaagcctgactaatttcagcctttggggcatcagagttctctactccctagtctatctcattgc

SEQ ID NO: 6435 - DNA, 201 bp, Bos taurus
ttgttttgcattacttatatttcccactttcttatttctgctggctgattaaattgtcattcaccaattgtttgccttaacttgaacactttgttccttttttccgttccataagtggtgagttaccttctttctttactttcacaatctgacatacagagcaaacatttgtttgtaaaaagtaactattgcgttggccaa

SEQ ID NO: 6436 - DNA, 201 bp, Bos taurus
gacatcagtctcatgaggaccccagagtggtggcagctggtaagctatttcactaggcacaagttattcttacaacaaatcagatttagtcaataactttgtatgccttcttatgaatttctttttcagttcgagaaagtgtcaattgcctagtgtctcagcagaatatgcttctgattcctatgtcatactcaccactga

SEQ ID NO: 6437 - DNA, 201 bp, Bos taurus
ccaatggatgcctaaaactacagataataccaacccctatgtatactattttttcctatcacctgtcattttctttgaaggtcaatagggccactatcacataaaataaaagttacttggaaataagttctgtaatactgtgacagtccatctgatcaccaaaagggccagggcaaggagcacttacggtgtgtggatgtg

SEQ ID NO: 6438 - DNA, 201 bp, Bos taurus
aagaactgacagcctgtgacctgctggagcatccaagtcaaactccctatttaaaagcaggggaagcatctatctgcctacaaactaaaattcatggagtcccttcaacatggcccctcatcaccctctgagactcagaaggagagaagtccaacaagtaggaatgtagatcccaaggagatgaccaagacgcctgagacc

SEQ ID NO: 6439 - DNA, 201 bp, Bos taurus
tcacagcgtgtcttagatgactgtgagtacacaccaaggaaatgccatagacacccagctcccaagtgaggaggacaacccctagtgttctatgtgtgtgtagagaaaccagtatcccatggagtaaaacaaggcagccaaggcaggcagagagcatcgcccgtgaaactgacaagttcccactgtctggacatatgcaca

SEQ ID NO: 6440 - DNA, 201 bp, Bos taurus
gaggaatactgatccacttgtagcaccatgaaactggccccacagagaaagaatctcatatcaggaggtgggaaggaggcactgcaaatagaattcctggggctttcaatcaggccagagagaggacattgtggggagccagggagagccaggcagacaggtgtgtcatcagccaagtgagcaagcagtcagcagtaaaag

SEQ ID NO: 6441 - DNA, 201 bp, Bos taurus
gcacactagcacatatccagtggccacccccgacttctactccaattctggaaaatggcaagacttgttttgtaaaaaggattaaaaagtaatagtagcaattctggcctatcaagaagcctttgtttatattcatgagataggaaggggcagggtacagactttaaaagaatcacagccattgaggacccaacatagact

SEQ ID NO: 6442 - DNA, 201 bp, Bos taurus
attgcgggcagacactttaccgtctgagccacaagagaagtccttagtaaatgttatggaaaaccccaaacaaactttctggccaagtcaatattttgctatctccttcctccccaaccccttcctgtagaaaggagaattatttcagtttcataactttgactcagatttttgggactctcaggactattagagataaac

SEQ ID NO: 6443 - DNA, 201 bp, Bos taurus
ccatcgtttggctgtgaaacagttgatattattttttgtcagagatgaggaagaaacagtctaaaaaggtaaatggatcaaggttatataggtggtaaatggtagagtgagggtttgaatccagatctttttggatcctctttctattactctatgatgcctctcgttaaagaactgtattggaaaggttcgccattaacc

SEQ ID NO: 6444 - DNA, 201 bp, Bos taurus
gtgtggtgatgaagcatcagagtaggtggttcttgacagtgagcaaatggctatttcttttatttttacagcatgaatgcgtttggcaatctctttcttcccaaatagtccaaatcaacacttcatagcaaatcgtattaaacataccacatgttctatgggaagtaaaatacaaagagaaagctctcagagatgttggtt

SEQ ID NO: 6445 - DNA, 201 bp, Bos taurus
tgggcctttgagtgtttcactgacctccagttcacatagcatttgaataggtttgaatgctagaagtttgatatgacttggaggctggtataaaaatatcattttagaataaaacaagaagttcataagttattgacaggtcaaactcctaagaatatgattgtattagatttaaaaagcaaaacaaaactaagtcaaagt

SEQ ID NO: 6446 - DNA, 201 bp, Bos taurus
gggaccaagtttgttttattcataactgtatccctagcattgtgtctggtgcctatagtagatttttaatatatatttgttgactgactgataaatggccgaaatgttctttcataggtctctctgtatttaattcagttcagttcagtcactcagtcgtgtccaactctctgcgaccccatgaatcgcagcacaccaggc

SEQ ID NO: 6447 - DNA, 201 bp, Bos taurus
acaaaatgtataaatgatatgtagagtttctcctttaacatatgaactcgggggaagatgctgaattaaagggaagatgccttggtgcaaaataaagtgaattaggctgccagcagaagtgctaacagggagacattttataatttatcacgttttaagtggttgtctctgtctcaccaataaacagcagagttattcatt

SEQ ID NO: 6448 - DNA, 201 bp, Bos taurus
agcttgtgttttgtgagtttcgtttttagataacagcccaactgccgctctgatttgtgcagtttttgcacatgctattgtttgcacacacgttttggccgggacctcatctgatgagccatttgttagttctgattgagtaggtcacttgtgggctcaattaaccacttgcccttcatctgatggtgcaagtggccaatt

SEQ ID NO: 6449 - DNA, 201 bp, Bos taurus
actaggctccacctgtgacgtccaacagtgttgtataagggttcccttttcttcacaccctctccagcatttgttagttgtagactttttaatgatggccattcttatcagtgtaaggtttgatttgcacttctctgataattagtgatggtgagcatgctttcatgtttctattggccatctatatttcttcttcttatc

SEQ ID NO: 6450 - DNA, 201 bp, Bos taurus
tctaaccatctcatcttctgccatcctcgtccccttttgccttcaatctttcccagcatcaaggtcttttccatcccaacttaaaaagtatgaaaataagaataaaatcattgggtggtgaagatatagcaagaaaatataaaataaaaaaagcagagctagtgataatttccaacaatatagaattcaagtttcttagag

SEQ ID NO: 6451 - DNA, 201 bp, Bos taurus
ttgtttcaataaagaataattaagtgaatgaataagaaaatgagcaaatgaatagatgcagaacagaacaaatggatgtttctcttcccctggtttggcctctctagcttttggaaatgcccatggtcacataccagcacacagagccagagcctggcagaccgatgtttgactctcggccttggtactggcccagcctgc

SEQ ID NO: 6452 - DNA, 201 bp, Bos taurus
ttttttcaaagtctgttgccatggttgttaagaccagcatgcattccttcagattacaacaatctcacagctgacgatgctagaaattgcattgtgaggtgtcattacacggggagcgaaaccaaaaaaaagaaaaagaaaatttagtttacagcaataagctttagcacccaaggccactgttccattcggaattgcatt

SEQ ID NO: 6453 - DNA, 201 bp, Bos taurus
agaagattctagcatgatctggttagtgcaggccactcatcctggagcagtgtagtacgactgtgatcttgagaagacatgacagtgagacatcagaaactacagggccacactcagaggaccctagatccctggtgggccatcacccatgggtcagccttgtccatatttggagaagtctcggaagtcgaaggaccacag

SEQ ID NO: 6454 - DNA, 201 bp, Bos taurus
gactgttcccccaagtagtagccctcctagcaaaaggattgtgttacttattcaccttggggactcataatggccatgcatcttgctttggccaatgaaatgtgagcagaattgacatgtcacttccaagctacgcttttaagagccagtgtatactctgcctcatgcttttcttctgtcacagtggccagcaatgttcag

SEQ ID NO: 6455 - DNA, 201 bp, Bos taurus
ggctctgtgttgattattaacgtctgcttgcaattggggacagaaaaaaaggaatccaaccagctgaaagccgggaaatcacacacaggggcctgagatccgtgtaaatgaaatttaataataaatggtacgtgctcccagattaagaagtaaataagagacagagaaagaggccattcagattatagaggccggaagagg

SEQ ID NO: 6456 - DNA, 201 bp, Bos taurus
gcaggactaaccaggagcccttccacatcgacagccatgccagtagctaagcgtggagcccaggtcgcccctcatggacaagtggcccatggagcttctggtgctcaaggagcacagcgcagagcccagggtgccacatgtctgtgatgagagaaggggaagcaggaaggttgagcttctggtggtggcctgcccatatat

SEQ ID NO: 6457 - DNA, 201 bp, Bos taurus
cggagctggtcccatcatgggcctggatggcctcctcggtgcaggtctcccttgggctcccagcccaggcagaggccatcccagcatcaggcatcatcacggtctgccttcctgactcttcgctgcatacaggctctcaccctcctccaaccccaggcccaggctagcacctggccggcagtgtttcctggctgttggact

SEQ ID NO: 6458 - DNA, 201 bp, Bos taurus
gatgctgacaggggaatgtacatgggtgctgaggccttcggtgcctcccatgtcggtgtctgttgtctcctgcttctagtgattagcagtcacattgtcagcattccaagggcctgtggatctgttttaagggacaacaagaaactgaggaatggggtgagtctatccaatttttagccttctccaagaagatgacgagct

SEQ ID NO: 6459 - DNA, 201 bp, Bos taurus
atcgagcaaatccaatctggatcaccctaaatcctggctttgtgaggccccgatgccttccacatttcaacaattattcttttggaataaatacagttcaatccagattggttctgggcctccccatgccaaaggctagctgcatggtcctataaaccctccctctatgatccatttcattatctgtaaaacaaaggtaat

SEQ ID NO: 6460 - DNA, 201 bp, Bos taurus
aattaccacccagaggaaaaagtgcagaagaccaccaaagacgttctgcaatgttcaacagcaccattattaataagggccccaaaccagaagcaatcaaatgtctaccaatagaataatggctacatagatggcaatgttttcatagaatagaatactggccagcaatgaatacgtgaacaaaataatgacactcgccag

SEQ ID NO: 6461 - DNA, 201 bp, Bos taurus
aggtgctggatattactgaacgggcaatttctctggccaggaattgacacttaccatttctatacaccatgcattggccagaactaatcagatcagatcaatcagatcagtcgctcagtcgtgtccgactctttgtgaccccatgaatctcagcacgccaggcctccctatctatcaccaactcccggagttcactcagac

SEQ ID NO: 6462 - DNA, 201 bp, Bos taurus
gagggatgaggcagcagagcggggctagagaggtattcatcagtgccttgaaagtcaggacaaggcgttgttcctaaagacacgaaaggggtatggccacgttcaactgggaagaaacataatcagggtggtgctgtagataagttagttgctgctgcccagaagactgatgagaggaggccaagggaaagaaggaagaga

SEQ ID NO: 6463 - DNA, 201 bp, Bos taurus
catcctggcctagtgctcattcttacttggaaagattaccaggactgaatatcagctcttgccatgatttctgggaatggcaatcatcacttttttcaaatagataatacttagcactcctcttgggctaagacttttatccactacttcagtgatcggctctaatcaacagtcaagggggcttttgaactcatcaggata

SEQ ID NO: 6464 - DNA, 201 bp, Bos taurus
accagttaattccccctgcagaagtctggagaagacaagagctagggagaggaacaggggtgacaggggttgaagaggtactggcaagggtgagaatgactatctccctaacgcttttagctcaggctgtagaagagtcactcatggccaaggatcttgatttcaaagaaagcatgggaggaaaaataagtttttgttaaa

SEQ ID NO: 6465 - DNA, 201 bp, Bos taurus
tacccctactgctgagtgagacatcatgaagtgtccatgacaaatctgtggtcggcatcttcaatgcaacctgtgtcattcgatggggaatccacttcatcagctatttgaatattggtttcacaatctgaagaatagacctgtggttgccaagtttaaatcttaggcatcatctggttatgaaatcagtttggaaacatt

SEQ ID NO: 6466 - DNA, 201 bp, Bos taurus
ctctgacttttctaaagtaaaccttcagaatattatttttggatgattatattttggatcaactctctcatccagaagcctgataaaacctgtttttactttgaacctggaaattacttttttttcctagtttcagaagtttaagacttcatggtttagatttcattccaagttcagactgctcagaggcccggtgggatc

SEQ ID NO: 6467 - DNA, 201 bp, Bos taurus
tctgtaaatggtctggaacttgggcctctgtggaatccagtcagaaggtagaaaccagaggtacatgggctgagactcgggcctggttgcaggttttctgaggctcactgagaggctgaaggtagagactgagctgaccttgctcagaggaatgatgggaagcccaggactctgaggccgcatcatctcccataggctccc

SEQ ID NO: 6468 - DNA, 201 bp, Bos taurus
tatgtcttcatgttttcagttgaatcaccatattctctttctaggatctagtgatatcaaattttagttatcttctttcactcatccttattacacgaaaaacaatgaagcattataaaagcatcatttagttatgcaagtgtgcctgctagtaacaacactttctcatgaaaggccaaaactctagaaggaaggaatccc

SEQ ID NO: 6469 - DNA, 201 bp, Bos taurus
tgccacgccgcgtggagccttctgatggccgcgggtgcagcaggtggcaactcggcagacagagaactcaaggctcgaggtggtcacgccgcacttcactctggggcctgcagcaggcagcggcagagtgcttggggaatctcttcatcgggacaccctctggaggacagggcccgtttctgtggcccccaccctccccac

SEQ ID NO: 6470 - DNA, 201 bp, Bos taurus
catctctgggaacatttacaggccgtttaaatctgcaggtgacccgattgttctcaaaaactccttcttcatctctggcagggtttctctgaatctccttcgcccactggcctacattatagaagtgctgtatgcggaccctgccattgtcgtcgtggacgcaggccatgacatcgtcaccaccctaacacaaaagatgac

SEQ ID NO: 6471 - DNA, 201 bp, Bos taurus
tgttctagaaacctgcttttgtttctgcacagactgttgaacaccttcccaggtctgttcatcctcagacctgaatcagccactgctcacaccctcctgtccatatggctgaagccacctcaggtagtgacaatcagccagcccctgagactgcactttgagctatccctagggcaccacacagcccgcccagaagatcct

SEQ ID NO: 6472 - DNA, 201 bp, Bos taurus
attctgatttttagactaatcagactaataagactttaaaagttagccaaagctaggagcatgcttcctatgggatcacagaggccctgacagattgctactgtgtgtgcagaggggagaggtgtaatcagatagaacatctctgcaaggaaattttattaggcaatatccaaattaaatgcgcacattccttttggccca

SEQ ID NO: 6473 - DNA, 201 bp, Bos taurus
ccaggcaagaacactggagtgagttgccatttccttctcctaactgtcaccaaataccttgatgttggcatgtgacaggccatagagcagtggttaaaatataagacaaaggaccctgactgcctggggttgaggctcagcactagcactgactgacggtggccctgggcggactatctacaccccggcactagttccctt

SEQ ID NO: 6474 - DNA, 201 bp, Bos taurus
agcctttctacacacaagcattcttagaaagtctttgaatgtctattcttacttatactggtggcaaaatgtccccaaataaaatcatcatgaggttctgcctgcttcctgctttagatgtactggaaatcttcccaggaaactcagggactttgtaaattctcctttgcctttcccattgccattaagtagttgaaagct

SEQ ID NO: 6475 - DNA, 201 bp, Bos taurus
cgcttctggctgtggcagtagaaaccatgtcccgagggaagtggcccagggactcaagagtagtgggatgccatccgccaggagtgactcaggcctctgcgttttgtcacactcctgacttcctctggcacccgggaccctcagggtcccctcaccctttgtctccagtagaagccgtttatctttgaagcctctagtcaa

SEQ ID NO: 6476 - DNA, 201 bp, Bos taurus
gaagaggcagatacacatggatagcatcacgtgtagccagacggggaagtgggggcccttccttgacctcagtgaggccttggccccttgtagccccacgttggatcccagatctggagctggacttgatttactggatgatgcaatcacaaggacactggccatgtgggtgttggaaaggagcttcactggcaatgtcag

SEQ ID NO: 6477 - DNA, 201 bp, Bos taurus
cttcccgtagaaaataaggaccagtgggcagagaagaggccttaaggagtagcaagagcacattacatagtctgctttgctgctgtgtcttcgccccaacatacatctcagcttttgggcctattagttggtacatttacttaggagacgacaataaataattgagctataggaaacagaggtacagatatccattgacta

SEQ ID NO: 6478 - DNA, 201 bp, Bos taurus
taaaatggactcaaatgtcagggagatggtgttgccatgcaaaaacaccaggataacaatgatcatcaaatcaatcctcagttattcacattaaagaggaaccacgtctaaacttgccttaaattttgttgacatgatttacctttgctctggatgataccattattgaattcatttttattctgaaaatacctaacagct

SEQ ID NO: 6479 - DNA, 201 bp, Bos taurus
ttctcaggcctctttgcaggatgctcttcctgtgagagtccggaaatgttggtgcacccccaagtcctttgcttagccctttcctactggtgctaactctccctaggccatcttattcatagcaatggatcccacaaacacttgcaggctgatggtgcttaaatgtgcatcgcaagtccagaacataatctcccacactcc

SEQ ID NO: 6480 - DNA, 201 bp, Bos taurus
aatctctagttaaggctcatttggttatgtcataatctggaagaacctcagaagaaaagcaatagaaatcttgtaaaaaacttagactggacccaacttcacacacactggggggaaaatgaagctcaaaccaaacatacacagctggtatatgaatttatttttagggcttgttcataaaccaaaatctctattagatca

SEQ ID NO: 6481 - DNA, 201 bp, Bos taurus
agttcctggtagaataacagtagccaaccgtggccctggcagtgggcactttatcttactacatatttttttctctttactcttcactgtctattcttaactatgttgagggaaaggcacacatcttcctcagtgaacagcataagaatggcccttagcagtagttttggagaaggcaatggcaccccactccagtactct

SEQ ID NO: 6482 - DNA, 201 bp, Bos taurus
acctgggaaatgtttaaacatttttttttttttttttgggacaaagaaacaaagctaactcaagtgatcaatgcctagtcatctaattttgattctttgatgagatttgtttaaaaaaacttgagtctggaaaggtcaggggtaaaggggttggagggagggaaggaggaggaggggctgtcacactgaataaataatcta

SEQ ID NO: 6483 - DNA, 201 bp, Bos taurus
tccagctctctcctctgaccaccctccctcctgaccccttgaccctccctgcaggagctgctttgagcaactgtgcccagcacctgggagagaactctgcggaggccagcaagtcagcattccaccaggagcaccgtggctagagctcaacaaattcagctgtgatccttccacgccctccatccaggcctgcaccaagcc

SEQ ID NO: 6484 - DNA, 201 bp, Bos taurus
ttgttttgggccacgtggcatgtgggatcttggttcccagaacagggatcaaacccgcatcccctgcagtggcagcacagtgtcttaaccactggacctccggggaagtcccaagggaaggccgtttttcttaagtcctgttctgaatgtgttatgtctaacatatcttgaaatgacatccaagtgacaatgtcaagcagg

SEQ ID NO: 6485 - DNA, 201 bp, Bos taurus
ttaacctcctcctaccatttcctccaggtcaacactcaatggagaaacagtgtgtccatttgaagaaaaacatctcctgttttatttagaaacagtctaagatgaaattctaggctggccaatatactgataacatctactaaacattatgaaagaaaacttactgcaagtcagaaaatagtccaagacaatactcactgt

SEQ ID NO: 6486 - DNA, 201 bp, Bos taurus
acatgccttgcactgaatttcatcccattccaaacagttacattaccctaaatataaagaaagaaaactacagactgtgatcttaagtaatttacaaactcgatttcagaactgcctttaacagtcagaaataatcgttctctatttcagcatcttcccccaaaatctattatgtcctattcaatgaacatcagaatcttg

SEQ ID NO: 6487 - DNA, 201 bp, Bos taurus
tttccaacatttgctcgttatgccatctggaacatacagcctccaaggtctcagaggtaaggaaagcaagacctggaacattatacaaagttttcaaacactggcctgaaaagagcttagaaccatgggtcccagtttggtgccaaggtgtccccagagcactgtaaggaatgcataagagctgcctgaaagtaaaagtgt

SEQ ID NO: 6488 - DNA, 201 bp, Bos taurus
atatcacacatgctccctggctctttcacacactgaaaattcacaaaagctgtgtttctggccaaggtgaaaactttatccatgcttatacttgactccataccctccaaaggagacacaggcgggtgtaaacagttatgctgttgtccttttccttggggaaaatgaaaaagctaactctatactttaacataagcctgg

SEQ ID NO: 6489 - DNA, 201 bp, Bos taurus
gtttcctgagaccataacttctagtgaactgcaggccaaaggaggccagtgtcaagatcattgccttgtaaccaggaggtaagccaagacacccagtgaacagtatatgatgaaatctgccctatccttaatatcatctctgatccactgttatgagaccaggttctgaattagggacacagaagcctgagtgaagttaat

SEQ ID NO: 6490 - DNA, 201 bp, Bos taurus
aaggagtattcgggaacattcttccggactttatggatgctttggcttgatgaatcttaatcgcctctctgcacaagacttgtgaactgatgggatggccgtgcttttcctcgttgattttcattccctaacatctcagtctctaaaattgttactgtcctttccatcattttagcttactgttttatcctttgaatcttt

SEQ ID NO: 6491 - DNA, 201 bp, Bos taurus
tgtgtcatcttccaacacctgaccaataccaggccagtggaaggaacacaggcaggaggttagagaattccgcagaccattgatgggctgctgtggagcgcggaggcttcccaggtggcccagtggtaaagaatccgcctgacagggcaagggacacagggtcgatcctgggtcgggaagctctcctagagtaggaaatgg

SEQ ID NO: 6492 - DNA, 201 bp, Bos taurus
gaaaaggaaaaaaaaatgacacgtgaagatcccagccaggactgggattctctctcctgccgacaggccatcccagggacagtgaagtaagagtgagcccggggctgcactagccagacgtctgggaaagacagcctgccatcagctgctgctgctgctaagtcgcttcagtcgtgtccgactctgtgccaccccatagac

SEQ ID NO: 6493 - DNA, 201 bp, Bos taurus
gttttgtccctgggagaaggggcaatgacagtgtgtttctgtgccagagatacttgttcttccaacctggaaggaaatccatccaacttgtctgtgtaggactccaaacagaagacttcagaaataaattttggcctgacacttttgtttgtccatttttctattttcctgtaaaaaaccacagttttgacaatcttcctc

SEQ ID NO: 6494 - DNA, 201 bp, Bos taurus
aagcaaatatagagaaggtaagtactaatctatagcaaaaggtattagccaggcctggggaagaagaaggaatagaaacagctggcatggagggttgaacgcttaacactcagctagcctgacggagcagaagggaacacttaggaggccctggaacattggaggattatccctcccaacgcagtaaaggaaagggtggta

SEQ ID NO: 6495 - DNA, 201 bp, Bos taurus
ttttggcacaaattaaataaaacacgtggaaagcacttaacacagtgcctgcttgatctttggtcctcaatacttgttagccaatatgtgaatgggcctcacctctctactgactcagctctccctagagcacaagccactcctaacccacacctgaccctgaccatgaacaatgagcatgctggcaggggagtggccaca

SEQ ID NO: 6496 - DNA, 201 bp, Bos taurus
caatcctaccccacaaaagtatgaaaaagagaaaacatagtgggaatcactttttcatttcacttaaaaattaacagaacctttgttgcactaacatcaggactccaacatgtaagttagtgtgacccctttctagggaatctccttagggtcaatacaggattttcctgattctccccattgggtcatttaatgtattcc

SEQ ID NO: 6497 - DNA, 201 bp, Bos taurus
ggaaccattccctagcttagtgagtggttctgtccatccattttcccagtccagaaattgagttatctgtgacttctcccttattctcagtcctattttccgtatagaatcaaggtcctaaagcagtcagttcctgctccccaagatttctcagttctgctgtttgccccagacaaatcacatactaccctgtcacctttg

SEQ ID NO: 6498 - DNA, 201 bp, Bos taurus
gccccgtacaggactataaggagtatgcccagcggcggcctcctgccatgcgctatgaggatgcccctttctacttgtccatcaagccagttgtgaacttggcggctctgcattggtacaactgccaggccctcggcaagaacaagctggccaagatggtaaagaccatgtgcgagaaggggaacatcccgggcaggaaga

SEQ ID NO: 6499 - DNA, 201 bp, Bos taurus
cacctcctcttcattcagtccaactccaagtcctggggctaacacgtgagcagaaagcagagagggcctatcagtggcatcatgcgttttgagaaaaacacgggaacagtagataagcaagtagcagaatatgcaaatattgtgatttttcacatacagtgtaggatcatagagagatccagaaaaccaagcagtaaaaag

SEQ ID NO: 6500 - DNA, 201 bp, Bos taurus
aagcatgtgggatcttcttggacccagggattgaacccgatcccatgaattggcaggtggaatcttatccacttgaccgccagggtagttccatggcccactttctgatgatatctgatagccattgccagagcatatcattcaggttatagcactgggtatataaggccaatggggctcatagaggagacatttggcaga

SEQ ID NO: 6501 - DNA, 201 bp, Bos taurus
tacctttcgtgctcaaattttctgtaatgattacctgcctcaaatatcactagtttatgtccaaaaactacaaataataagcttgcacctatcgaagtccgtattctctgcctgcctgacttgggattatcatcctgagaacctttttcttaaaccttttatacagtttttcttcagtgaattgttagtaattttactagg

SEQ ID NO: 6502 - DNA, 201 bp, Bos taurus
tgcacagggaggtcaccggctagttcaggttcagccgggactgtgccctcacttgccccctcacctgggacctctcactggatacctggaagccctgacggtagacggccctgagaccctcccaggatgtgtcccccgccccttggcctgagagtgagtgtgtgcatccctgtcttccctcccctgtgttctgggagggta

SEQ ID NO: 6503 - DNA, 201 bp, Bos taurus
cctggtgctctcccctgtagaccccagcgccttcagggagagacatgtgtcttgccaccgttgggctccagtgccctgcacaggccctggcacgtgtctgacactgggtaggtatttgctgagtaactctaggggtgggggtgaggtgggtgagcctgggacacagtcctgatgagccaaagcagagcctgcccagggcca

SEQ ID NO: 6504 - DNA, 201 bp, Bos taurus
acaccctggctgagcccctcctcctgtggccgcagccacttgctggggctccttgcgtatgtggcttgagcttgagcaggtgccccaatgatcctctgctgccaccttgtggccatttcccagatagcagcacttaggaggccctggtttttcccaggttcccgtccatctgttcagttcagttcagttgctcagtcatga

SEQ ID NO: 6505 - DNA, 201 bp, Bos taurus
tctcaaccccatgatatcctggtcctttctattcagtcatcctatgaacctaaccttacaacccacagcattatgacttatgtgtgtgtagacacacaaacgtgcttgttcatattcaccccaccaccacacacacccatgcactagcaatcttggtagagttaatggttgagagctgggactctgaagtcaggctatcta

SEQ ID NO: 6506 - DNA, 201 bp, Bos taurus
ttgaaaagagtggggcgcaacttagcgattgaacaccaccaccacaacactgatgcagtttccaggagacagcatcctggccctcctccatagcaagttccttaggtgtccgttaagtcccacacaaggctagacatatagacttctagaaccttccaattcctatggccacatgcttcctctgattattaagtgattgtt

SEQ ID NO: 6507 - DNA, 201 bp, Bos taurus
ttgtgcagcaggaaatgggcctcatcttaatgttttccattcactgcgagccttagcagtgatcactatgagggaaggatgcaaccatgccaagaatgaaagtccaggagagcggaggccctggtggagtatcagtgatctaaggtcctttgccttcccagctccctctttcttatccaagatggctagataacccttttc

SEQ ID NO: 6508 - DNA, 201 bp, Bos taurus
gcacaggtcaggataaggctgtcatgagacgtcaccttgcagttagggtagttagggtcctggctcttccctccataccctggggacaatgagaataacttcaggcctctcaggacagatttatctgtgtttgtccctgcagcctcatgagtggtcgggtcctggtcagagccttggtttttaccgttgagaaaagccagc

SEQ ID NO: 6509 - DNA, 201 bp, Bos taurus
gtcatgtcagcactggggatccggtgttcactccaggaccctgcaccaaaatggcttgtcgacagtccacgctgacccctggcctttgcagaagcggatggtcccactctgagctactttctgtgctgcttagaactgttggcatgagtggaaggggcccctcgcccatccctttcattgtctggtgagccctgaaaatgt

SEQ ID NO: 6510 - DNA, 201 bp, Bos taurus
ttggggtacactgggggaacaggaaaggcaaacacagtgtcagcacactgtaaagtcctgtgcattcagcagagcccacagattgcatgcatgtatatagcaacaagcatagattccaaacagttgtaagaattaaataaagtagaaccatgcctgacacacagctttgaataatgcttttgcatgtgccacttagaggaa

SEQ ID NO: 6511 - DNA, 201 bp, Bos taurus
ggaaagctttgtatgcccggcatccccttgaccagtggttctcctcaggatcttcatgggctaatacacgctgtctctgtggtttacctggcccggggtgtcatggacttctccctgatgtgaagaacctgaggtcttgcccctgaggtccctgcctccccgtctcagccctgctcgggcccttgcaggctctcacctgac

SEQ ID NO: 6512 - DNA, 201 bp, Bos taurus
cctgtgacaggcagaggagacagcagttttagagaccagggccagtgccaagggctgagcagagagggggcttgcagtcttccaagtgcatgagtgtacatttagctgtatgctggccagttgacttattttgtcttttggaatctcagtttcccatctgataagctataagtatcatcggagtctctgcggcactaagca

SEQ ID NO: 6513 - DNA, 201 bp, Bos taurus
gccaatagaatggagcaagaagcgatgggcatgtcttccaggtctacaatcctttttttgagtgatcctttctctcttgtctcatattttggccaacagacagaattctgaggacccagaggagggtgacccacaagaccaaaggaagcaagagttctggattatggcctgaagcatatcacctctttctcagccaaacca

SEQ ID NO: 6514 - DNA, 201 bp, Bos taurus
agtttcccataaagaactgcattaacagtaactcacatattttgatatgttgtttttattactttatttttttccaatttaagttttaattttctatttgccctatggtcacttagaaatgagttatttatttcccaaagtttttgggttttctggagataattctaatttaattctaccttggtcaaggcaatgctttgt

SEQ ID NO: 6515 - DNA, 201 bp, Bos taurus
gagctccacagccacctcctcaccccagctgcccaagactccttcagaaagtctctccctgttaggccttttcaagaattaaccaaagtcctgtctccatattcaccaaagtcaggggtatttacataattttcaggagtctcctccatctgaataaatctcctagcatctcctctgtacccacacctggaggattagccc

SEQ ID NO: 6516 - DNA, 201 bp, Bos taurus
ttttctgttccggggtgaggtaggggggttgttagccagaagcggaagagaaggtgagcagagaggtgggatgtggggagggcagggatggggacggggggcaaggtcagaggggcagggggtgaagtccagaagcctgttctctcatacttcccatagctatcagtgcaagacataggggagctcattccaaatgtggag

SEQ ID NO: 6517 - DNA, 201 bp, Bos taurus
cagggttcttccccaagggactatcagcttagtcgagggagggagagcattggggccaccagagcttctgtcattctagggatggccctgctgtccccagcgtcccctttccaattatcctgctccatgtgcacctgccttcttccaagactcccgtttcccagagacacgcccgtgcttcctaccgccccgccccacggc

SEQ ID NO: 6518 - DNA, 201 bp, Bos taurus
gtgtgaaaaagcaccgaatccagagtcaggggaaacacggcagccctgcctctttgagacaccctgtgcagatcaggtcctctctttctgcagacgcaaatggccacgatggaaagaaagggcatcaagcttcctcccaatctgtagctgatctgatcttgcagctaatgtcaacatcgcgacccctctgttttcctctaa

SEQ ID NO: 6519 - DNA, 201 bp, Bos taurus
actcttcccactgatggaaattagaggggcagcagggtaagggtgcatgaaggcagggagaccagctaggaaaatgctacgaaacccgagagaacagtgacggggtgaggggccccggcccaggggcaggcggctcagagaggagagtaagaaaatcagtttactattgggaaatggaggctccaaagtgcaagtcctggt

SEQ ID NO: 6520 - DNA, 201 bp, Bos taurus
ttctatgggaaccttaccttgactttaggcctggaagcaggtttctcttccagacaccacagcgtgctgcgtcacagctaaccaacacattcatttgcccgtctcacccaacagattctgatctcaccaagaacacaggccacgccttatccacatgagtcttctcatgagactgagaacacttattcggtcaagatttat

SEQ ID NO: 6521 - DNA, 201 bp, Bos taurus
gtggagactctaaaaagaggataggtctacaaaactgccaaatcctaagacaactgatgttctaacttgcagcttcttccctaaatgcacaatatgctcaactgcagaagggcagctatagcacagtgacttgcttgggtttaaattcaagctcttccatttccagctggatcaccttggacaagtcacttagcctccccg

SEQ ID NO: 6522 - DNA, 201 bp, Bos taurus
tccctcgcctaaactcctgggtacaattgctaaactcttgcaactctacagaacatgatctgaaaaccactgaacacagcatcacttagcttccagttcatgttattggccatgtggctatgggcaagtcacttaacccttcctcttacggaaactgatctttgcctctatgatgggtgtaagatgtaaaacaatgttaaa

SEQ ID NO: 6523 - DNA, 201 bp, Bos taurus
cctgaatttgtatctgggttccacccccagtcccttgtgtggctctggttgcacagaatgatgaatttttttctgggccactgtttgcttatcagaaaaataggagtatcatttttataagcaaaaaggaaatcaatcctggatattcactggaaggactgatgctaaagctgaagttccaattattcggccacctgatgt

SEQ ID NO: 6524 - DNA, 201 bp, Bos taurus
gatggagtggccttttaaaaatgtgagtggtattatagcccacttctgctcagaccatgtgtgggcttctttctcttctcgctcagagtaaaatccaaggcactgggcccatgtggctcagggccctctacaaaccgccacaccgcccctcttgacatccattacctttttatttctagccctttcccctaccactcgcct

SEQ ID NO: 6525 - DNA, 201 bp, Bos taurus
agtgaattatttaagttctccctgtctcagtttttctacctacatataaaagggacataaagagaccacgtcagaggccgcagaacacagcgaactctcaagtacctggagctctcatcattaccaccaccaccatcctcttcatctcttcatgaaatatcagataataataataataatggcaatgatgcttccggccta

SEQ ID NO: 6526 - DNA, 201 bp, Bos taurus
tgtctcttttccttgaaaatggttggatgcatatgaatcctccccccagtagaaaacagtgcaagtgacgctctgtgacttgcagggctcggccataaaacgccatcctgtgtaccttcctctcttggaactggactgccacagtgtgtgtgcgggagccccgtcagcccatggagaggcccggctgaaaagttcctgggg

SEQ ID NO: 6527 - DNA, 201 bp, Bos taurus
tataatagtgattatatgctaaatgataactgtaatgagtgaaatgtgctatctagattctaaccactttttttccatttccatggctatcaccctggcccagttaccagcatctctgacctagatcatcccatcagtcttcctgttagcttccctgctaccactcttgtctctggccccatataattttctcaatagagt

SEQ ID NO: 6528 - DNA, 201 bp, Bos taurus
gagttcctggcatgggaaaaggggcacacaatcagtgggaggtaaggccacaataagaacaggcatggagtattagctactatgtcaggggaattgtacagcatttttttctcaaatctggccaaaaattagaattgaaagaaaattttataccagatcccttggccagatattcccatataatgtgtctgaaataactag

SEQ ID NO: 6529 - DNA, 201 bp, Bos taurus
ggactgggtgtgtggagatggttgaacccctggtcagaggtgctgggacctcagcaaggtcccagatccaaggtggcccagaatctctctgctttctttcagattcctgttggaaccacagtggagtgcagacagaatggagctcccgggccaagttacaggatgctcactagcaaggctgcgtggcccagggtaaggggc

SEQ ID NO: 6530 - DNA, 201 bp, Bos taurus
gcatccaacctgatttcaaggcttggccccattggcagccctgtgtgtgaccatgaacggtgcccttccctctccagccttgctcttcccgcctgtaaaagaaaaggctatcccaggccatcgtgtatacctttctgcactgagaagtctatgctccaggatgacctagcagttctcaggattcactttttacttctcatg

SEQ ID NO: 6531 - DNA, 201 bp, Bos taurus
ccacccttgagcaaagggatatttgaaatggtgtgcagtaagtcggcctgatctgggaagtgagctgcagctccatcttgctctgcatcccatgctaggtaactgcagtatttgaaccatagtttcctcacctgctaaaaaaaaaaaaaaatgtgtggggtgacttcctgaaaaagatacccaaaaggaagggggcatcag

SEQ ID NO: 6532 - DNA, 201 bp, Bos taurus
acctggggtgtgagccaactataaaggagaggaggagagggtctcagcctcttggaccactgcccaggacacagaagcctggtctccgggagtcaggcctgcgggtccctcccttctggggaaagacacatttctctgatgcccacaaaactctggtccttctctgccagaatcccagggcccctttactgaatctgtacc

SEQ ID NO: 6533 - DNA, 201 bp, Bos taurus
gagagtgcttaggacctctcctgaccagggtgttacaaggccaggacagggcgtcaggcttttgtagcagtgcagagagcagacttctcctgcctcgctgaacaggctgggatcacctggcctggccaaggagctacagaagcaaaacacagagggagaacacatctatttaaggtggtaagaaagtgcagagaagggcca

SEQ ID NO: 6534 - DNA, 201 bp, Bos taurus
ttcatggggtcgcaaagagtcggacacgactgagtgactgatctgatctgatctgatgaacctgatggaaacggtgacctaattcttttgtgtgcaagtgcgcttgtatataggggtacaagtagacagttctagattaatgggttagaaactaacccatttggctatgaggggtcaccacataaatgccatatatcatac

SEQ ID NO: 6535 - DNA, 201 bp, Bos taurus
ggggcaggcatggagaagaacagctctatacttgggttctgctaagttttgttttctcagtgcaaaaaggatccacagggcctttatcccaaagagtcctcccttggattcggatggcagccaataacatcagctcatgcaagcccatcaatggcccaagggctggaggattattaagagtctgggaattaaaatctgagc

SEQ ID NO: 6536 - DNA, 201 bp, Bos taurus
gattaacatcagcagtaatggttcaaactgaaattgtgggccagtcaatagaatgcagttaaaagcacattactctgtcatatttctgtacccacctcacaaaaggcttaactcaagtgtaattatgagaaaagatcagacaaatccaaattgaaggacactgtataaaacaattggctttaatctttaaaagtatcaaga

SEQ ID NO: 6537 - DNA, 201 bp, Bos taurus
gttgcttaacctgagaactagctgggcagttatcactgaaggcaaagcaactgatgccaagtggaggtggaccagggcctgtagttgtgggtgtgggcagtggttaaatcagaggcgactgagagcaaggaggctttttcaaaactgtgtttttacataggctgtttcctcttcctgaaatctctgctttctctctgattc

SEQ ID NO: 6538 - DNA, 201 bp, Bos taurus
gcagacttctgtctggcatgtaatgaaagatttcaagataaaaacctaggagacaaatcgagggaaatgaaaggggagagtacgtgatgagtaaaacaaattgctgatattaatatgaaaatgatattccatagtcctagttcaaggaggaaaaagacaaaattacagatgacagttcattgacttgactttttaagtcaa

SEQ ID NO: 6539 - DNA, 201 bp, Bos taurus
ctcattatgaaaccgtccccagtggtggcctgcccagtgagaggtggcaaactggtgtgattaagctcctccctgcaggtggcataaatagtaagtatattggaaaataaggagtcctttaaggccagacttcatgcccaaacaatgagctgctattctgcttcccacaaaatttattacaattagatgtggacccaggat

SEQ ID NO: 6540 - DNA, 201 bp, Bos taurus
acacatgtataagccaagatccaagtccactcaatcagagcagaattatagccaacccatagaactgaaaagcaaacttgttgtaaggaactgaaatttggagttgtttattatatagcataattatactatgcaatgctcttttttcttttcatatctaattgaatgcataccacaatcatgcacattgcattattaata

SEQ ID NO: 6541 - DNA, 201 bp, Bos taurus
gcgtcagctgttgtggaactttctcttcccttggtcttgcattgatttacctccacatagtctcccaatacactcccaactctacccttaaccgaagtttgggagaagggaaaaaatgaggacagtggcttttgggagttctcatatctctgggaaccctattcctggggccaaataacacaccacttctgtttatataca

SEQ ID NO: 6542 - DNA, 201 bp, Bos taurus
catataaacttttttaccagagagtttttggtttctatcaaatatgtatgtcttgaatgacatgaaagatacttgtgcatactcagaaaataccagaaacctaagcacactaaagcttacattctctctctctctctttgcctctatccctgcccagttctctctccttagattctagtatggaaataggcacttggaaga

SEQ ID NO: 6543 - DNA, 201 bp, Bos taurus
gaacccacgaggatttagcattgacatttgtaaggtatgattgatggttgtagtggtcccatcccactctaacatgctgcaatctttatgactccctccggtggctcgatgcatacacaaaacaccaatgtgcagcagagttgttaccagctttgctgcttttaaagtagagacattccacattctggggaaaatacttct

SEQ ID NO: 6544 - DNA, 201 bp, Bos taurus
ggccaaagagaaaaaagaaaggtattcccaacacatggttttcagtgggaaagggaataatacaagtgaaaaatgaaatacctccccgaaagagttaaaatggagggggaggcctttcatgctttgccttctaagtaccattaaccattttctcccatcaactccctaagacccaaccactctacctgttttccagggaaa

SEQ ID NO: 6545 - DNA, 201 bp, Bos taurus
agtaccattacagatctcagatggccttgtgggttaaatgagataaagtacttaggattatgcttggcacgtggtagaattcaacaaacggaaatttatatgatttattgttattgttaggccccctgtgttcaaattcagcatccgcctttaatattaatattactttacattttaaataatgactttgtctggaaacaa

SEQ ID NO: 6546 - DNA, 201 bp, Bos taurus
tagtatcctcaacacctactcccaatgggatggcctttccacacacttttttctctctaatgctctcataggcatctgcatgattcactcattatcttacctcctaaaggcctctgatcacaggtcatgttttgaatgaaacacttgctctgaccactctgttataaatggtaagggcccactgaagtgaagtgaagtcat

SEQ ID NO: 6547 - DNA, 201 bp, Bos taurus
ttcacaaagggagcagcttattcaaagtcatggatctttgaaagggactgcattaatttcctagggttgctgtaaaacaacaaaaatcattgtgtcataggtcaggaagctagaaatccaaaattaaggttttgtcagagctctattctttccaaaaacttgagagagattcttccttcacctcttccagcttctgaaagt

SEQ ID NO: 6548 - DNA, 201 bp, Bos taurus
atcatacaacctcataaccaaaaccgcacaaaaggatatataataagaactctagtaagaaaagaataagtatataatagaccactgctattcatgagcatgtaaaagttctaaataaaattttagtaaacagccttcaacaatgaataaaaataccaatgcatcatggttaatatgagattgttctaggtatgattaatg

SEQ ID NO: 6549 - DNA, 201 bp, Bos taurus
acattttccttacactgtggagaagttccatggaggtttcacttcagacgctaacaatatgaggctatagcagaagacacacaacacattacaaggcatatggtatacatgaagtttaaaactagcttttatccctctgtactttcaaaaggcaaaatgttaaccttggacagaaattgtcccaagggatgtataatttta

SEQ ID NO: 6550 - DNA, 201 bp, Bos taurus
atgatttgaataaagtcatactcatctttcatctttccccatcatatccatctttttcatctacttctgtgtctattctacattcattttttccaaccccattcatttttataaatgataatataattattatgcctaaaagaaattgaatgactttcctgagttcatgctgtgaaatgacatatccttgcaagtatttaa

SEQ ID NO: 6551 - DNA, 201 bp, Bos taurus
tattattattatccccatcctaatgtgaaattgaggctcatggaaaagtaagcaggctgcctagggcatagttgctttattgagtggatgaataaatacagctcatgcatattttagtaacagggcgagaaccccaactaatacctacatgcctgcgtggattaatcttttaaccaccatgtaatactttatatttaatat

SEQ ID NO: 6552 - DNA, 201 bp, Bos taurus
ttatactgttctccccaaaataaatgctccttcatccattgtttgaactcctctgcagggggggaggttattatcttacaaggccctctcttttagggtgaaacttcactgtgagacaatcttccttcaagctgaaatcttcatttctccttccaggcaatggccctggctttgccctctggaactccctagaacaaagct

SEQ ID NO: 6553 - DNA, 201 bp, Bos taurus
tctttaccgcctgagccaccagggaaggccccactgcatacaggagtgtacaaaagcccagcggttaaagctgctgtcccaaatctttctgactgcttttgattaagtgtctgatggagatctggctcttgccctgcttttagagctatcgaagagtctgttgcagccctctgtatcctgccccacagtttctgatactct

SEQ ID NO: 6554 - DNA, 201 bp, Bos taurus
ggacagaaagcacacaggctttaccccattgtcaccgttcactggcagttgcatccagctccagggcccgggagcatcgctgtctcgcggaaggacttccatatgcccaccttagtggttctgccctatttcagagctcacctcctttcccctgttctcctgcagtaaaccagtgcagcagagggaacttaagacagaaac

SEQ ID NO: 6555 - DNA, 201 bp, Bos taurus
ggccttttccctgtcaaacttcaaaaggtggaaagacatttgagtggttgaggtcccacctgaccatagggctgcagtgtgtcaaacattatgtggatcttagtgtgaggggccagcatctcagacagatggccatggtggcatccagtccccagaaatgttctgtttgatctttccaccattgaaacaattgtcaaattg

SEQ ID NO: 6556 - DNA, 201 bp, Bos taurus
gaatccatcttttacagctctgtaaacagatgtccaaagagacaagtcattttctcttcctgcctggaatgcacttcacccagaaatccacatggcctcattcattcacttccttccatctctattcaaatgacacattatagtctacatcattcctgacctcacagcaaaatatcaaccaccactttccctgctcacacc

SEQ ID NO: 6557 - DNA, 201 bp, Bos taurus
atggaaaaatttgaacccaggacttgaaaatcttcctgtgacctagctcctattttcatccccagcctctgccctctcctgcaacccaatgggtatctcatgtcatacagagatacttccttgttcttttcttttccactatggcttattacagaacactgagttaatttctcaggtcatatagagatatctccttgttct

SEQ ID NO: 6558 - DNA, 201 bp, Bos taurus
tctagcaaacactcagtaaatgtttgtcaaataaatgattcagggaatgatcattccagagctggtggcttcatatgatttgagttattgcatttttttttccgctatctagaaagaaaagctcccagacgacccctcggcagtgttcagatattgtaaataattgatcataaagatgaaacacacaagctggacggggac

SEQ ID NO: 6559 - DNA, 201 bp, Bos taurus
ctctcaggcacccagtgtatgccacccaaagggtcagggacggaccacgacctccactcacggactttccagaaagctcccacaggctgagcaccatccacgtgccaggccacgtactcagaactagcgatgacgcaggcgctgactgttgccctgtgtttctatctgaatccgaggctagcccaagtcctgaccactgta

SEQ ID NO: 6560 - DNA, 201 bp, Bos taurus
ctgcagcccagatcccagggccaggcctggagtgcgggcatcacaaaacatcaagtgcatcctcccagaaacgacccaaacttgcggaaacctacaggcagacctgttgacctaagaaggcctccaaagcccgtccacagcaaaggtaatttccacagagacccccagaacagatgcagccttgacacgtgtgcggggctg

SEQ ID NO: 6561 - DNA, 201 bp, Bos taurus
gtgacccaccacagcacaggaacagcagcaattcagctcagagaagtatctcctttcattccaaagatacctaaaacctaggagtggccttcctccaatactgggctatgggttggttttctgttcagagaacaagccacctggtactacccaacggtgaaacaagaacactgcattttggggggtgggtaatgccttaac

SEQ ID NO: 6562 - DNA, 201 bp, Bos taurus
actgtgggtgccgggggagggagcagggagagggctgcatcgggagttaggggttagcagatgcaaactgttaccagggtgggccaacgacaaggtcctattgcacagcacagggaactgtctccaatctcctgggataaaccgtaatagaaagaacacttaaaaagaaagtgtatacatatgtgtatgtataactgagtc

SEQ ID NO: 6563 - DNA, 201 bp, Bos taurus
gtagtacccccccccaccccccgtccccgacaactccgtgtataaaagctctcaccccctgcttgttgagggcaaggggagtaggcccttggacagattccgccttcctccccagttgctggcatctgaaacaaagccaactttcctttccaccaacctggcctgatttttggcttttgagtagcgagcagctagacccca

SEQ ID NO: 6564 - DNA, 201 bp, Bos taurus
ttattaataatttcaagacaggaacaacagagccccaaacttagcgtggggccctgcagagtgccaggccctgctccgctgcataggcttcaggcccacaaagccggttctggagcagctaagccaggaaggaactcacatgtgaccccaagggcaagtctcagcacatcacacagaggcctcctcgaacaacacagggca

SEQ ID NO: 6565 - DNA, 201 bp, Bos taurus
ctgtactgacagcaatttaacctttggtgaaggaagcattaccatatagtcacataagctcaatattaaaccaaactaacaggaagaattaaaagaaaaacacgtatatttcaacttactcttacatatggataaacagcaagagaaaaactacgatttatttcatgtatcttacacaattctgaatttttatcaattttt

SEQ ID NO: 6566 - DNA, 201 bp, Bos taurus
gttccaaactgtaattccacagtctgatagtctagcttggtggaggagtccactcctaacgctgtcaacgtgtttggagtggactcggagttaaaatgaagtcacgggtgccacccctgtgggtggggaaaggcagtttcagaagagggaacaggtaccccatgttgtctactgcatggcctgggtgtggcttttgtctcc

SEQ ID NO: 6567 - DNA, 201 bp, Bos taurus
tcctgggaactgggcctcagccctgggctgggtgaagctgggctggattccctggagcctcccagcgccccctgtcggccagttcccccctccctagagcgccttctacagacctgtccagctctacgttttctggagtctcctctggggccctggtaccagcagaaggagagaagttaggaagacaggccctggacgggg

SEQ ID NO: 6568 - DNA, 201 bp, Bos taurus
acagtaggtcaaaatgaaaggtcttggcattttttgagtttttcttaaaagcatatttattcagcatacaggtgttctttttcggcctcactggagattcaaagtcaaggtgtggcaacttttcctgtaaacagccagagaataaacacaaggctttattggccataaagtctgttacaaccagtgaatactacgcgaaag

SEQ ID NO: 6569 - DNA, 201 bp, Bos taurus
ataattcaaatatttggtttatctttatattgatatcagttgattgccttttctcattcaggttgtgacttttctggttcttggtatgatgagtgattttcttgtatcctggacatttcgagaattaagttgtgagactctgcaccccatttaagtctttctttcagcaggcagtcaccctgtttatgcttagggcagagt

SEQ ID NO: 6570 - DNA, 201 bp, Bos taurus
ttgaggcctctgtctggacacgtcggtgtcatcggggacggcaggtcacgtagccatacctgacgtaaagtgaggggacaagtgaccctactgacgctagtgctgagccccgagggcccgacagctcctgccagctgatcccggaccggcagcccttggcttctgctcctgtgcaggagcccggccttgaggtcagcccct

SEQ ID NO: 6571 - DNA, 201 bp, Bos taurus
gtccatggggttgcaaagagtcggacccacctgaacagctgaaaaactactgaggacactgatttttttttttttggcccacgggtgtatctgcagggctcggaaagttgcctgccacacgggtgtatctgcagggcttggaacattgccggccacatacaagatgcctgacaaatacttgctggattaatgaatgagtga

SEQ ID NO: 6572 - DNA, 201 bp, Bos taurus
ccagtcagcaccttctcagcccagaaggctctcacgcggccccgcagttctgagtcagaacatgccgcggagagtaaccaggcgaggtgcgggcagctccgtcagcgtgactctggggccggttcacaagaagcctgcagaatccagcatcacaaagctcgccgcacatagctgctgcagcttctgtttgccagttatcct

SEQ ID NO: 6573 - DNA, 201 bp, Bos taurus
gagcggggcagatggcccagcgggccgggctctggggtctgggcgtggccgtggtccccagagccctcctctcccgggggtctggctgtgcgcttggcctgggggtcttgctccctccatctgctgagcagcaactagcatttcacccggaccaactttttcctgcttgtcagccctcggggcccgagcttggatggcagg

SEQ ID NO: 6574 - DNA, 201 bp, Bos taurus
ctgaatgctgtgtcccccccaaacacgcacatgggagccacccctgacgtgacagcggcagagggggccctctggaaggcactggggccgtgaggatggagcctcgtaagggtaatctcctggctggtggaagggttgagatgttatgagaatccccagaaagtgacagagataagaagtgagcaggcgctgctgcagaag

SEQ ID NO: 6575 - DNA, 201 bp, Bos taurus
gctggtacctgccgggaggacggtcgggcgccggccagccctgaagcactccagtgctttctgcctcacaagtgcacgtctacccagccatcctgtgcgtaaactgacctgtcgccttgggccgaaggcttgtgctgtcaccttctggggaccccgtggacgcccctgcgcgggtcacgctgtgtcccaagcccttggagg

SEQ ID NO: 6576 - DNA, 201 bp, Bos taurus
cgcagtcatggggtgtccccggggacacctcggttacctctggtgagagctggatgccttcacagctctatgcgggagtaaattaatttatcacttaggaccctaagtgtgtatggccatcaatggtcatcttagtaggaacacatgcaggtcagtccattttaaaatattctaaaattgcaaaagatcagaaatcatatg

SEQ ID NO: 6577 - DNA, 201 bp, Bos taurus
tgggaaacgagctgagtgcgtccaaggcagcattgaaaccggcgtcactttaggctcgaggcagccaagcccccgaggggaggtcctggctgggccagacggcgtcagcggcaagtctgtgtgagaattcggattcccttcttcccaccccggggctcctcctcacgacagatgtgaggccgacttggtctagaaccctca

SEQ ID NO: 6578 - DNA, 201 bp, Bos taurus
tcatgctgtgggagggtggcccgtagcctgatccctggtgtccttagagcaaaagggaggtttggacacggacatgtagagagggtgtactgcgttgaacgtggggaggagggcctgtgacgatggaggcagagcctgatgtgctgaaccaaaaccagggagccgatgtggggagctgatacggggagcggatatagggct

SEQ ID NO: 6579 - DNA, 201 bp, Bos taurus
tgcacgtgaccacggagcccagtaacaacagggcctagggcggcctccgagcacaacaggcaggaaggagtgttctcaggagctgctcttctgcccatccgagtttcttctctggttataagtggccacatggacaccagtcattgactcattaagggccagtactcagggacgcccatggaacctgtccaagcagccctg

SEQ ID NO: 6580 - DNA, 201 bp, Bos taurus
tagtgaccgtgcctgcctgtatttgacggtgaatgcagcttgctgacagcgtgcctttggcttccccccttcaaagaaggctgaagttaggcttagcaggcggtcggtttccccttagatcagatttatcctctcgtgggcttgtttgtggtaggcagagcacctttgctctggtctaatttcaccaacctggaggagaga

SEQ ID NO: 6581 - DNA, 201 bp, Bos taurus
ttattttcagagatattagttctttcttctgacttaacgaaaaatagatgttgtatgtcccctccagtacccatgtgttctttggaaatttctaatttccgtattgtctttgtttatgtttgtgtggatttcctcattaggaaataatttccatgtccaggaaggatactagaagggttttaaagttcctcccagatatct

SEQ ID NO: 6582 - DNA, 201 bp, Bos taurus
acatgtagatagaaatcacgtaccatgagtctgtcctgggctccccatcctgtgaaatctgattatttacattgtggagaagtgcagcttcccttctcggagctccattgcctctggcagcctggccgtctgtggaggagctctaggtgttctccctctgtctgagctttgggagctggagtagaggggagactctgggga

SEQ ID NO: 6583 - DNA, 201 bp, Bos taurus
aatcttagtaatttttctattattttgaatctattaatttctattaattttaatgattaacattgtaacatttataatcaatgtaatatttaatattgtaatatctcagatttaatggtagcccacaatacatttgttaaacactactagacttgacctatttttagaaaggtggaatgattttttcttgtggttctgtag

SEQ ID NO: 6584 - DNA, 201 bp, Bos taurus
aagaatagccaaaccacttggcaggtacagatatgccttctggtgtgacttaaaagttagttagacactctccaggtccatccacatccctagagagaatcatacagagtaaagtaagtcagaaagagaaaaacaaatatcacattttaatgcatatataactgcttagcaggtggcactagtggtaaagaacacccctgc

SEQ ID NO: 6585 - DNA, 201 bp, Bos taurus
cttacctaatctcctttggtaagattttcatgatgccgtctaattgattttctctcacttgtcatatactcaacctttacatgcttgcttatactcggttgattcatttcactggtcattttgggggccatttacttacttactaaatacttactgtattcctagaattttttatagtactttaagtgtgacaaagggaat

SEQ ID NO: 6586 - DNA, 201 bp, Bos taurus
aaaacataaatgatgaaaccatgtgaaacttggccatataatggttcaccagcatcctattatccaaaaaataacttctattctgcacttgaagaaaatgtgcatggatttgtaggcttgtgaaaggagccatactagaaactctgcatgtagaagttctttgtatacataacaacacatcgataggcagtaccatgcaag

SEQ ID NO: 6587 - DNA, 201 bp, Bos taurus
cttacctttaaagtaccattttcaacaaataattgaataaaataatccatctactgaatctgagtcttgcttgaggtagagtaggagtccatatgcattgggggcctgaaattccagggagatgttattttgtggatttaaaaacacattctggaattctagataggaatctccataataacaaacacaactgatatctgt

SEQ ID NO: 6588 - DNA, 201 bp, Bos taurus
tttttttttttttgctactttcttaatgtcttttcaatatctccccattaactagaataaacctgaattaatcttggtgtttttttttggaacttgaaaatgtctaatactccactattcatgcttgaggatcaagacttaataattttgacaggttctggtcctattaaggccatgggatctactctattgatgactgac

SEQ ID NO: 6589 - DNA, 201 bp, Bos taurus
ttcctgactattctatacattacttacaaatataccttaaatgctaagtatcattaaaccaaaacacttacgcttcataaatcatactgtatcatctttacatcattgttgattttcaatttaaattttctaaatctaaaccactgacctgaagagttaaatttactattttttgacccctgtaaatgtctcttttcttat

SEQ ID NO: 6590 - DNA, 201 bp, Bos taurus
atagggggtggagacatcaccatagcctctctctgcccacatgcctgcatcagcagctgaataacagagagactggcccctcaaacgactgatgcactgagcagcagagtagtaacccacccaaggtgtccgtttaagtgactgatgtgccaaactacagagaaggcccacaagcaaggaagccctataagttcgtgaata

SEQ ID NO: 6591 - DNA, 201 bp, Bos taurus
agcataactaaaatcaaattgggaattctatatatatgaagcagttagaatgtgagaaaaatgaagctactatatgaaaataggttttggcgcatctttctaaataaaatcctgtcattgctattaccaacatggcctagctgttgttcagtcagtcagttgtgtctgactctgtggcactccaggcttccctgtccttca

SEQ ID NO: 6592 - DNA, 201 bp, Bos taurus
gatccccatgtgaagggaacatggtgttagctgcaccaattgaaacactggcagaaaaagaaaactgctctcagcatcaattccaggcaaggctggcactattccagacccgtgtccacatctgatcaattacaattcccaaagacataaggtttgctatgtgtctcagcttggattctttcaaaataagaattgaagtaa

SEQ ID NO: 6593 - DNA, 201 bp, Bos taurus
ttgttgagtatggcagaatagaaggatgtgcgctcatcttctcctgtgagaacagaaaatttgcaaccagctgctgaagaatcatctataggaggatgtcgcaaaccaccaaaaattgatactccatgtccaaggacaaagaagaagccccaataagccagtaggaaaggtgccagagactcttggaggacacacaaataa

SEQ ID NO: 6594 - DNA, 201 bp, Bos taurus
gtattcatatgggattggttctaggacttacatggatactaagatctataaatgctgaagtcccttacataaaaggatgtagtattgcatatagtttattgcatacaatatttgcataaaaggcaaatttaagttttgctctctggaaatgtctggatttttcttttgcaaagtattttttttaacagttttcttttttta

SEQ ID NO: 6595 - DNA, 201 bp, Bos taurus
ttttatttgtaaattcaacatattcatacaaatgtttgaaagtatagcccttactatttcaatatcctattttttgagtgactaagcacatacacactccccacacattatttcccctcctgtgtccgtgctctacaattcctatagcagaaacatctatgcaagtaaacctctaaggaactagcttgctttctggtatga

SEQ ID NO: 6596 - DNA, 201 bp, Bos taurus
tgggttaaagaaagtctacaatttcactccaggtcctgctctaagcactctgagtctaagtgcacctaacacttgtacacagtctttccaggccccagaattgactgtgatttttcggcttccctcgtggctcagctggtgaagaatccacctgcaatgcgggaggcctgagttcaacccctgggttgggaagaccccctg

SEQ ID NO: 6597 - DNA, 201 bp, Bos taurus
tgggcaggaggttatgtcccaagggagggagccctgaaacaggagttcctgttcacagggaaactccctcacagtcaggcccaaaagggagctgcaaagtgttggaaaaccaggcacaacagggacttgaagggcagtaaacagagaaagccgcacttctcagcccgttaacagctcgtggactttggccccaaacagaca

SEQ ID NO: 6598 - DNA, 201 bp, Bos taurus
ttaactatatgcacataacacaggctctacaaggcaggtgtcccaaatgagatgtgattgaaaagacaataacttgagaagccaactgaatgagggtacgggatctccagaaaagtaccaagcagacatgtgtgtttgtgtcacttgtcacaagcactgacagaacttaaggcatatgggcctgattattttctacaggtt

SEQ ID NO: 6599 - DNA, 201 bp, Bos taurus
agaatacgaatctaacatagcccaagcaaggttgtctaaagcagcacttaatcagattatgtccacaggtgtcttggcatggaaatctctggccccttccaatggaaaattatctactcagtaatatcaaacagggaccagatgagaaatatgaagattttgtggccagattgaaaactgttgtaaagagaacaattaaga

SEQ ID NO: 6600 - DNA, 201 bp, Bos taurus
gctaattggtcaatgagctctatttaattggcctaaagagaattaggcacttgcaaaccaaataattccaattcaagaaaattaaactgaaatgaatttcgggcctgtgtgaactgtgggatattcactagtgaattgatacctggtattgatgtttgttgattgatctaattaacatagacattgcaaagttgcttttat

SEQ ID NO: 6601 - DNA, 201 bp, Bos taurus
cctggcagctccctgacagcctgggagccccctgctgaggttccctggacaagaggggaatttaccagcaggggccatgtctggcccacccagatgaggatgactactttttttttttaacttataaatctcaatatttacaagaataattccattcttggttctaagactactggccacataaggaactgtttacttctg

SEQ ID NO: 6602 - DNA, 201 bp, Bos taurus
taatgggaaaagggcaagcacatttttaaatttatgtgactacttataagaattgatttttattttttgccaaataatattgtgtgcataacagaaattgtctaaactcagattatctgactatggatttcttcagattcatgtgtctctagctgtaccttcacatggactaatatctttcaaatattaaaatattgtatg

SEQ ID NO: 6603 - DNA, 201 bp, Bos taurus
gcaagaaaaggacagccttcaataaaatttcctatcagataatcaaatgaaaatccagatgaaaactcatctgttttccctgattttcttgcttccttctcgggatatcttccctgagtgtgcaggtgtgtccatcccctaggctcactatctcatttctgattttcatttttccactatcccccagagccctgggtgggg

SEQ ID NO: 6604 - DNA, 201 bp, Bos taurus
ctgtaaatttcaatcaatgttcatttgataaaattttttctcacattgtgctgtttaacatattctctggtttcctctctgggaagatgctatgcaggcccggaatgcaagaagtttggattctgcactaagacaacttttgagttcagttcagtcattcagtcatgtccgactctttgcgaccccatgaattgcagcacg

SEQ ID NO: 6605 - DNA, 201 bp, Bos taurus
tttataggcctcaggctagaattattgttcagctatggattcgtttgtagttagagtttgctacgcagaaaagtatggtggatgtaagacagtggacgattattaaggttgtagggcctatgtaccttcaaggtgtttggataagaatggctatgatacaagtgccatgtggctgacagaggagaatgcaatgagtgattt

SEQ ID NO: 6606 - DNA, 201 bp, Bos taurus
attcctgcaggcattcactgggctctcaggcagtccagcaacccagctccagcactggcttgtggacacattactcccaggttctgcagctctattagctgcttttgtaggcttggtaaggattttcattaaatgcagccttagtgctagaaacttgaaatatttgttaatttggaggctccctccattagtactactatt

SEQ ID NO: 6607 - DNA, 201 bp, Bos taurus
tatcttagttatttttacttttgtaaaccttatgaatggaaagcttcttatttgttattctaaagtctagaaaatctatagtttttacttttaaacttctgaagtgttagttataacaagattatgtattcacagtcagcagttatcagtcacagtctttggacaaacatcgtgtatcaccttaacagaatatactcattc

SEQ ID NO: 6608 - DNA, 201 bp, Bos taurus
aacctctttcaagagcacttatgccaacatgctgcacctcccaagattgctgttgctagtgctcctgatccagtgaaggctactgtcaatccacagttctgccagagactcccaaacacttataggcaagattggcacattattttgtggggtcactgttccttttccctgggtcctggtgctcacaaatgtttgtttgtg

SEQ ID NO: 6609 - DNA, 201 bp, Bos taurus
tgtttccaactgagttttaccagtgggaggttttaacaagtgattcaaagctgaattataaaagtcctactgttctacttcaagtgacattgtttcctgttatggcagatcagtactttccactgatggaagcctgtactataattagccagccattatggagctggcctttctaactgtctactgtgttttatttttttc

SEQ ID NO: 6610 - DNA, 201 bp, Bos taurus
ctaggaagaggacaggggttgactgctgtgaagatactctgaaggagctagtatgacacaacagagggggcccagggaaaaccctaggcatcccagagagccaagagtttgttgcctcagggaacctctggccccatgcacttgtagaccacaggaatttgcatttatggttgctgtaagtgtgatgggtaaatggtaggg

SEQ ID NO: 6611 - DNA, 201 bp, Bos taurus
gagtcttaactgtacaattgatatgttacactaaggcagcagtgaacatgaaaatgttaaaaaatatactcagttataaattgaataatttgtccagaaagaggttactcaatttctgagaagctcagagggaataccccatgtggggtacaattttttgattgtacccattgtaaatatgatagccctccaaaatggaaa

SEQ ID NO: 6612 - DNA, 201 bp, Bos taurus
caaaaactcataaactgaaattttgcagcagaaagtatgtgatgtcatctgtagctattttttttaccaaggagaacagtaaccccatgaaagaagtcagccttcacttgtgattttatgttcaaatctcaagtagttatgtttatcttgcaagaatgcaaggagaaagaggagatatatcgtttctgagactttgatcag

SEQ ID NO: 6613 - DNA, 201 bp, Bos taurus
ttaaatctcagcttgtctttcctaactaccaccattaaaacagaacatgacacagaattatgtgacacatagattttttggaagtagtcctggtgagcagaagctaagatgaaaacaatggtcatagtgcttctttaggtagttacataaaaatttttaaattgacttattttttaattgaaggataaacactttatagaa

SEQ ID NO: 6614 - DNA, 201 bp, Bos taurus
taggagtttcttgaaagcaaatgcagctccatttctgttttccaggattgagtctcccaacctgtggagccattagggccacacccatgattgttcctgctccacattaaccaagattgacactagatgtgattccaatacaaatgtgcctgcagttggccatcctaacctacagtttttagttaagttgtgtcaaagaaa

SEQ ID NO: 6615 - DNA, 201 bp, Bos taurus
gtgtgaatttgtgagaatttgcaaacccattcatgccttgttttcctggtatacctaatgagataacactaacttacaatatcattggtagaattatacccactactatacactcctttggtttcagtgattctagtgatgatttttagattctgattctagcagggatagaaaatcaatattctctcatatgctaagcaa

SEQ ID NO: 6616 - DNA, 201 bp, Bos taurus
gtgctcatccagaaagtacaactcaggtgcagattttgaaagagtcacctgggagtttttagatgtttacactgcagccctggaagtacgtgcctgagagaaagcatagctggtgttgaactgtctcacaagtgacactgagctctgatttgaatgaggccactgtaggcatgtcaagcttgcatccatgaacccaccaca

SEQ ID NO: 6617 - DNA, 201 bp, Bos taurus
gagaaaggactaaggtcccgggctacttctaagtggaaatttagatgcctacacaggtggtacataattcctctgtgactgcaggcctcacttgctttgaccatcacctccattagggcagagcacacacgcaagggcaatggagcctgatcaaacctcaaccttagggcttctactccaataatggaagagaccctgggc

SEQ ID NO: 6618 - DNA, 201 bp, Bos taurus
gggtctgtacaccaacaagttcagaggcatccatctagaagatttattccaggatttcagaacccaggtttttcatactagatcagtggcctctccatttcttgaatatttcaacatctcttcaactttacaaatctattgtatttttaccttgctggtcaggcctcaagtcttctcacaaaagataaagtgtgctttgta

SEQ ID NO: 6619 - DNA, 201 bp, Bos taurus
aagctgaagctccagtattttggccacctgatgcaaagagccagctcgctgggaaagaccctgatgctgggaaagattgagagcaggaaaagaagggggcaacagaagatgagatgattgagtggcctcactaactcagttgacatgaatataagcaaatttcaggagataatgaatgacaaggaagcctggcctgctgca

SEQ ID NO: 6620 - DNA, 201 bp, Bos taurus
aggaaaatgaccccacaagacactgagccatgcttgcctgtaagtgtccaggagtctctggcagagctgttgatcaacagtggcctgccttgagttgaggggcagtgactacaacaaacttgggagcaatgggatgccagcataagtcttttaaaggaggtcaccattactgccattagccctaccatagtttggcctcag

SEQ ID NO: 6621 - DNA, 201 bp, Bos taurus
aagactatggatagcctggcctccatttagaagaaaaatgcatattctcactggctcccaactcaggaaagagagagcagactgaattaccacgtggctgaccagtttcctatggccacactggcatatgtaccagcatgagctgagtgaacactccagcctcatgtgctttatatcacagttccacactggagaaagagg

SEQ ID NO: 6622 - DNA, 201 bp, Bos taurus
caccgccaggacggaagagagccctggctcctggtggcacctctgctgaggaggagcgcagctcctgggaacgtgaactctacgaccagaagcacacatctaggccctgttcaaagagtccatcatgtagctgtgcactgcacggcccgagaggccatgacattcctcagggaatactttgagaggttggagaagaaggag

SEQ ID NO: 6623 - DNA, 201 bp, Bos taurus
gtcttcccatctgtgatgagggctcagggatttccctcctatgtgtctacccacctctgtctcctctccagatgagggatgctgggctggcctgcgggctctatgctgtctgagagctgcaggagcagggactcactctacctcttccttggacctggaccagtttttacttctccaatttgctgctcatcttcctagatt

SEQ ID NO: 6624 - DNA, 201 bp, Bos taurus
ccctcatggagatggccgagtggagcagacgcaaaggcagtgaggaaatgtattcctgtggtcatctggagcagagcgtttcagccaggggggccctgggataaaaggtattaagtatgaatgcagcaggcttgcccaagcagagcaaggagccccgggcggcaggagtgcacctcggggagaccaaccggaggcggggtt

SEQ ID NO: 6625 - DNA, 201 bp, Bos taurus
cagtaaacactccccagcatcaaagtgcagtcaggacccagagcgtgtgttggagggaaggaggggagccaggtttacatgatccctgtgtcgtggtacatatgtaggggagaagtgaactcgagagaaaccaagctcgctgcagtatgtggcaggaacttgagtcaagagagagcagagacgggtaaggaaagggtggcc

SEQ ID NO: 6626 - DNA, 201 bp, Bos taurus
agctcgtctcacccatgtttgactagtcccctgtattgaattacttctatttgcaacacctagaaagttttctgttttcctgactgtactatcattgatatagctcattgaaaagctttttaaaaagtatagattgcagtgatctttcctgtgcacagttggtcattctgtgcatgcatctgaactaaagagaacaggccc

SEQ ID NO: 6627 - DNA, 201 bp, Bos taurus
atcaagattaagaataaagtttcttaccttcaagagttcattcagtctaaactcttgactgggttacaaaagtaaacaccagtattccctgtggcccagaggaacaaatgttctgatttcttgtgtgtaagacatgaaaagagtccattggacaggaaaatatgtggctgaggagaaacagaataggaacaggaaaacagg

SEQ ID NO: 6628 - DNA, 201 bp, Bos taurus
actgtcggatctgctaaccagagggggcctgctccaggaaagtggatggatgtcaagatgggctggacacggcagtgagaggacagtaggtcggaggaggcgttactgggggtgggcctactcttggggaggacctgatgcaggctgttgttactgtttagtctctaagtcatgtccgactccttgcgaccccatgcactg

SEQ ID NO: 6629 - DNA, 201 bp, Bos taurus
accatgaaagataaaagattatgtaatatagaagaagatttgtgttctagtatgagtttatcactaaagggagattgcctatagccttaaaatggcccatctctgcaaacccttcctcctcggtaataagcatgagctagaataccttgttaagttcacaggaaacatcctgaccaggcccacctgtcaatggctgctgga

SEQ ID NO: 6630 - DNA, 201 bp, Bos taurus
atctccattttaaaagtaattttgggcgcttccctcatggtccaatgggtaagcctctgtgctcccaattcagggggcccagatctgttccttgatcaggtaactaagatcccacatgccacatctaagcccacacactgcaactgctgagaccactgcaactagcaaagcctacacaacaaagggcccgagctctgcaac

SEQ ID NO: 6631 - DNA, 201 bp, Bos taurus
aaaataagaatggagggaaaaatttttaacaatgtaggtctctttgtgatggagttattagtggtttctacataaattttttatgctctttcatattctgacaaatttctacaatgaatatatgtattacacaggtatatgttatgcacacaccatacacacatacaaattctattcaatatagacatttctaaaacttga

SEQ ID NO: 6632 - DNA, 201 bp, Bos taurus
tttccatctatttgggccctttgccctaaagtgggtcacatgtaggcagcacattgtaagctcttgttttttatatccaatctgccactctctgacttttgattgtaacatttaggccattgacattaaggtaattattgatacataacctcttttattttttgccattttacattgtttgccatttgatttgtatttctt

SEQ ID NO: 6633 - DNA, 201 bp, Bos taurus
gggcagaataggccctcagggagttaggcattttcagaagacaactgtatgagcctgattcttgcatctcttcagatctagcactaaaatcattaatgccgacttctgctcctcatgactggccaataaccttctgccaacatgtgtgcctgactgcatgcaccccttcactaaaatcatatacaatactgactttccctc

SEQ ID NO: 6634 - DNA, 201 bp, Bos taurus
ggaaactcaactgtggttcccattagatctgggggctccaggaacagcaagaaacttttgaagtaaaatcattttgggaaaatttggcccctgaaataacgtaacctaagtaggtccccaaactatatgtgaggatttacgttgactagatgggaaaggtatctcctgactgccacagtgggtggcctttggagaataagg

SEQ ID NO: 6635 - DNA, 201 bp, Bos taurus
atggactgcagcctaccaggctcctccgtccatgggattctccaggcaagagtactggagtgggttgccattgccttctccggaggtcaggttagtgatatataaaatcaaaatcagatttacttctggcttcctcttttattggttttcatgttaggattctggcatttcacttcagatatttatttcagctatttcact

SEQ ID NO: 6636 - DNA, 201 bp, Bos taurus
ggggcgggccgggacgacgcgacccgcgaacacctcagggcaggcagttgcggacgccgcgggagcggacgccatggctgcgttaggactcgcttcgttgctgggccgcgtcccggctacagcgtggagagcggcaagtaaggcgccccggcctggggccgaggtcgcgggcagggtcgcgaaggcccaagcaccgagaga

SEQ ID NO: 6637 - DNA, 201 bp, Bos taurus
cacagctgggttgggagttttgaaaaggggccttcacctcatctgtgtaaacctggggaccttcaggataggcatggccaaagggcacactgggaaaaaggagaccacctatctgtattcctagaaagcacggtcacttccatcctatatgcgtgcccaagagaggtaagctcatggcttacctgacctgcctggcttcct

SEQ ID NO: 6638 - DNA, 201 bp, Bos taurus
cttatggaaagccagcaagctgtattggtccccagcctgcagtgctgacaagtccggatgctggtcgtgctgagaaccaagctgacagggctcaccacagagaagaaggcaggccacctgagcatttccccactcgagcaactagattctcttttttgttcctctaagttcaaagtgggacgttgtcttaggtcccccatt

SEQ ID NO: 6639 - DNA, 201 bp, Bos taurus
gcgctgactccccacgcaggactgccttctgagtaggctcccttgtcactagagtattcacccctggttttagttattctttaatagaggaaaggttgcatatgcagagcatttacagatagcatcattacaaaatggagttcaggttcaagctggttcaagcaggttcaatctgagtttcaagctcaggaaaaataagta

SEQ ID NO: 6640 - DNA, 201 bp, Bos taurus
tggccaatacctcttctaagctcttaaatcttgtcactcatcaacctacatctttccaaactgctttcactacacaagatacattttccatctggtaggaatggccctttcactagctgagggaattgactcaccacttgttcaacagagagacacttgctgttgacttgaggagacagggcggccggtcaatgaagaaaa

SEQ ID NO: 6641 - DNA, 201 bp, Bos taurus
gatatagcctttcctcagaagctacactgagaattaattattttgtttcaaatttctccccagtgaatccatccatcttttctgaggccaactgacttttataaaatacaagtctgatcatgtcatcaatgaatcagctctgggaccaagttaccatcaggagagagtctgccccatggcctctgagcctgcggtcatgac

SEQ ID NO: 6642 - DNA, 201 bp, Bos taurus
aaagaagcctgaattctaacctaggtaagatgactctttgaggcatgagcccactgtgttcttaggtctactggctttttaaataaagtctctattccttgtctgatcaactcatttcttgacttattggcatgttgtgtggccagcagtgcgagcttggactctgtaacattagctcttcttgtttacaaatctcatcct

SEQ ID NO: 6643 - DNA, 201 bp, Bos taurus
ggctatagtgtcgtcttaggcctaatggtgacctcctccaagaggacttatgccaacatgcctcacctcccaggaatgcggcttcccatgcccctgaccctatggcaggcctctgtggaaccacgcctccatgagagactcccaaacactcacaggcaagtctggctcagtctcttatggggtctctgcccctttctatca

SEQ ID NO: 6644 - DNA, 201 bp, Bos taurus
aatattgtgtacatgttaaaataaagaaaaaactgacacatatgggagacaaatgatttggagaacagagagttagagatgcatatggatattctttaataatcatctctaaaagatgatgctgttaaaatgctgcacttaatatgccagaagatttggaaaactcagcagcgtccacaggaatgcaaaagatcagtttca

SEQ ID NO: 6645 - DNA, 201 bp, Bos taurus
tttctaattgtgtaatgaatgtagtttccttaaaaggaggcctttggggcatcaacaagctggttaaggggagattgggggagttagaaagttccttctcaggtggcaccaggccttctgtagctgatggtaaagattacctgatttaggacttgctgttggtgtgggggaggctcctcatacagccccccagtcccgtga

SEQ ID NO: 6646 - DNA, 201 bp, Bos taurus
agcagacgtgagcaaatcacaggtaccacgtaatgacgtttttagtagttggtcccatgcaggtttactctaagctcctatcttgggacaaagtcttagaggtcatggttttggctattttgttctgtttgaatcaccacaaagagatgctctgaggtcacagtatacaattactactcaaatttgttcctttctcccatc

SEQ ID NO: 6647 - DNA, 201 bp, Bos taurus
tgtagagtaataccaaaaaagggactgtgaaattaggagtgagagctttctctggggagagtaactggagttcccagtgtctcctttggggataagaaaacagggctggggagggagagctccttgcgctgctccccggggaagcccttcttgggggaagtgcctgtccgccccaggctgttcataagaagcagaaatctg

SEQ ID NO: 6648 - DNA, 201 bp, Bos taurus
catggtgtccccctttgcctggcaaagcaataaagttattcttttctacttcaccaaaaactctgtctctgagattcgattcagtatcagtgtacagagacagagttttcagcatcagctagggaatgaaagatttcagcttagataccagttttaagttcttttcacactacaccacacacagtgccctgaatagatctt

SEQ ID NO: 6649 - DNA, 201 bp, Bos taurus
ctttcagatctaatcctttgaatctatttgtcacttccaccatataaccatgagggatttgatttaggtcatatctgaatggcttagttgttcccctactcatttacaggatatctagaagcaagcataaaatcactggtgatactggtactgctaaaaagctccaggaactggagaccagtgacagaatgaagagagaca

SEQ ID NO: 6650 - DNA, 201 bp, Bos taurus
cagattttgattcctggctccctcttgagctgcagacctgttaactcactggatgattccactgggctatctcagcaggcaggccatattccatgtgaagttgaagtcaccgtcatccccctccccagatggctgtaccagatggtctttccaagttcagtaaataacaccagtagtcatccagacactcaggcctgaaaa

SEQ ID NO: 6651 - DNA, 201 bp, Bos taurus
taaatagtattataaattctgtagctgagaattattttgtgtttctgtgtatggaaggaaaaaagagtgttatggactgggtttttgttacactcaataagctctgggttatatactatacatcagtattaagactgttaaattatgttaaattccttccacattagatgttatagaataatttaaaacattacaattaaa

SEQ ID NO: 6652 - DNA, 201 bp, Bos taurus
aaatcctatgtactccttgtagacttaacaaccagttctactaaaacaaaattggaaagacatgtgtgactgttctgcattgtctccagaaatgacagaactcacagttttcttgagatccttacacgcttagaggtagaatcttctttccttttaatctaaatcttcctagaattataatagctttcaatttctcttaaa

SEQ ID NO: 6653 - DNA, 201 bp, Bos taurus
agttacttctaacaccttccacatcatgacaccagtgaagaaggaggcttttcttttcctaagtgattagtacatacagtgaaccatgacaagtaattattgtgacctttgaaattttaatatatgggaacgttgtcacagtattatttttagacaagtctcctaaattgctttctacgtaatcttttcaataacacatat

SEQ ID NO: 6654 - DNA, 201 bp, Bos taurus
agctttctcaacatagctgatgaatagaatttttgagttctgttccaaagtttaggaatgttttcctcataggtacataaaggcaaatcaataaattagagtagggtaatactaactctacaaatgtatggatgtgagagttggactatgaagaaagctgagcaccaaagaattgatgcttctgaactgtggtgttggaga

SEQ ID NO: 6655 - DNA, 201 bp, Bos taurus
aataagtatctcaactggaagaagttcattttatttcttcttatatagattagagataattgtatttttctttccaaaacacttcctctggcttggggccgcctccacctttcgcactcataaccggatctttctttctgatagtgtggatcaaattcttggaaaaggacaaatcacatcagacaagaagagcagagagaa

SEQ ID NO: 6656 - DNA, 201 bp, Bos taurus
ctcccacagtccccaactgcagagtctgtttctgttgtgcacacctctgcggttatggtaatgcagagagataaatggcctgaattgtaaggggatggctcgtgttcaccaagatcttaaggggcttcatttccaaactaaatatgatggagggattgagtggtggcctatgaagctggaatcatctcttttcttctggat

SEQ ID NO: 6657 - DNA, 201 bp, Bos taurus
aagtcactcagttatatatgtatacacattcttcttcttttactatttatttatttgactatgctgggtctttgttgttgcatggccttctatctagtttgggggagcagggactaccctctaatttctgtgcaaggcttctcattgcagtgatttcttgttgccaggagcgtgggctctggggccacaggcttcggtagt

SEQ ID NO: 6658 - DNA, 201 bp, Bos taurus
ctgtctagtcaatacaggaattttccttcaatttagaccctcgttgatgacataagttggcaaatccaagcatactgggaaatttgtggccaaacttgaatatttctttaaatcatttgttttaatcagaactcatatttctaagtcaaataatacattgattctgctcttcttcccagctgcaggccattgttttccttt

SEQ ID NO: 6659 - DNA, 201 bp, Bos taurus
actgctgatgggcagggtcagtttctgacttggctagctgcagtgtccggcatatttcagagctggtattgatctgatggtgagtgaggctggattctggatggccaggtgaggagcccaggatgtcagtcttcttgtggtgggccaagttctgacacagctggctgagggactatgtcagtccttgtgttggtattcaca

SEQ ID NO: 6660 - DNA, 201 bp, Bos taurus
tcctttcccttcttggctggaattaaggccacctaattgtcttctgctgagacacttaagcataaacttgactcaacatggggctgtgcacagagagccagagccatgggccctcaggcccaaaggaaatggaaaatgcagtaaggccgatgtagaatgtcaggaaagagacactaatgatgtgtatttcttccttcatct

SEQ ID NO: 6661 - DNA, 201 bp, Bos taurus
tattaagaagtttcagatgaaccaaaggagatctttgattctttatgtatttgatttatgttggaatcagaaatcaaatcaaagagacttttttcataattaatattttattgtggcctatgagaaaccacttttattttaaggtccaaatttacttagtaaaggtaaaaaatgtgagctagattggggatgtaaagtgta

SEQ ID NO: 6662 - DNA, 201 bp, Bos taurus
caggggaaatcttacttgatctttgttttcttaacaccaagaggtttgagaaaactccccctctgttttacacatattcagttttgacttttgacttcctcctatgtgcagcttcaaaattcacttcatatctaacagtatatactggctgtgtgcttgagacctctagtttcgttgcatccatctccatgactcacaaat

SEQ ID NO: 6663 - DNA, 201 bp, Bos taurus
attaactcctgtctctaactttgtaagacaactgaacgttcaatatttaattttcttctgactcatttcacttttctcttgatctcctcagtctatgtttgttcctcttctgttttccccttttaacctcctctataatttttctttttttttagtaagttaccttgatgtctagccataggtttaacattaaatcttcat

SEQ ID NO: 6664 - DNA, 201 bp, Bos taurus
tcagatatgctaaaatgttaaaaatgtatattgttaaaaatgtaggaaaatgccatttttctgcaagaggatatttaataatggggttaaattgaattgaccaaacttctgaatattgactctcatttttaacagatatctgatagtctcagaattagcaaaaatcccaaatgaagtatgtgttaataattatcctctttt

SEQ ID NO: 6665 - DNA, 201 bp, Bos taurus
tatgcctgagcaaagcttacctaacacatgttctctccttaaggcatattacaataatcttttgcttagaaactgacaatactttctgacaatacttcagcaacatacttggaggccattgtaaacagcaaaatcaccaaaaaaagcaaaaaaatacaaaaactgtgacattaaattgactgaaaaggacatatttattta

SEQ ID NO: 6666 - DNA, 201 bp, Bos taurus
cagggtaggaggtctttagtttgctctttgaggtatgaataatttctctgccatctatttcactccactcaagttaccatgtggaatgccatttgggatagcttggaaatggttctatgttgtatcataaaaaagactctgacaagttttgtgtattttgtgatggcacagaaaataaggagaggattcagggtttgacct

SEQ ID NO: 6667 - DNA, 201 bp, Bos taurus
gaaacaaactctcacttcaaaatgttgaattgggtttataaaccagcagacagaaagggttatgttcaacagccaagccttctggtgaaccatagttagcgctgggcctggcttcacatttaatgcaaggaagaaatgcctcacttcccagcatggaaggttctgaggatcatctgccaagtgtagattaaatgctacaca

SEQ ID NO: 6668 - DNA, 201 bp, Bos taurus
tgattgtttggtggtgaggtaacagggattctgtgctcagcctgaagttaccatcttccacctcaatgggggccttattcctacagaagaattcaaagttactattaagtatattccttgaggaagaacaagaactctgtccccagaactaaactattgtttcttgactgctcctacttagtttctgcattcctttaattc

SEQ ID NO: 6669 - DNA, 201 bp, Bos taurus
aaagcttaagccctatttgcttagactcatattcccaaacgggagctggctgagacccctaatggctggctctggggccctggagggtagtaggagtgatagaattcctacaaatttggatggatagaccaccattaaaaagaatgaggagcactagaagtgtaatgatgggccaaagggctgtgctgctgctgctgctaa

SEQ ID NO: 6670 - DNA, 201 bp, Bos taurus
cttcatatactttgaaagtttgacatgccaatgattcccagatttctaacctcaaggtgtgagaaactgattgccaaaaatatcgagcttgatttaataaacatcactcagtccagcttcaagaaaaattcaggacttgatttctcagcacttctatgacctttgggagcattctattaaagaaaaatgaagcagatttgc

SEQ ID NO: 6671 - DNA, 201 bp, Bos taurus
aactccaaggagcttcagagggaaggcatccccctatagtgtttagcagactactgatcagcatgtgcatataaagaaattaccctagcccaaaggaagagctgtctaaggattaaaggaaaacaagaccagtgctcacacaaaacatgaataatgcctgcagatagaataaccacacaattcatggagatttgggtagag

SEQ ID NO: 6672 - DNA, 201 bp, Bos taurus
gcttactcccttatgacgaagtacacctctatggttctcatgtgaaaccagaatagaaaatgctgtattcggagcgatccaggcttcacttagacagcccccagcacccctcactccccacccgcaccacccccaggcctcccaccctgagtcacaagagaacccggtggagaaaggattttcgcctcacatgtgcggccc

SEQ ID NO: 6673 - DNA, 201 bp, Bos taurus
cccggagcttgagtccaggtaattttaaagctatccgtagtctcgtctgtcacctttaggtttcgaggtgctcctttcactaaaatttaaaaaataacaaattgactgattatatgtgaagaataaaaagctagttttttgatcactaagttacagcatttctctaagcaaatccatgagcattttttgacaaacatcctg

SEQ ID NO: 6674 - DNA, 201 bp, Bos taurus
cacattctgtatggatggctgagtcccttcactgttcatcacaacattgttactcagctctacccccacgcaaattaaaaagctcaaaaaaaaaaaaaaatgtcatgaaaaaattttctgcttctagagaagcttaacattgaaatcagctctatccatttatccgttcattcaacaagaatgtattcagtgaaacttgcg

SEQ ID NO: 6675 - DNA, 201 bp, Bos taurus
cagccaaagtcgtggctcatgggggctgcagtgaaggtatgcgtggaaaaaaaaggcgtgaaccaggagaggatctgtgaggagctggggccttgctttgagaaccagcaaagcaagaggcagagggaggatctggggaacttctgcagtgtcctgttggaaccagccgaggcatcaataggtagtcaggctatctcaggg

SEQ ID NO: 6676 - DNA, 201 bp, Bos taurus
caattagaactctgagatagtaatgtttaatataaacacaatagagtccagaaacaggcccacatacaaatgggaatttattataccaggtactcattaacaataaagaccttatactggcacaaaaacagacttgtaggtcaatggaacaaaataaagagcccagaaataaacccacccccctacactcagttaagctga

SEQ ID NO: 6677 - DNA, 201 bp, Bos taurus
gaaccttcaagaaacataaacaaggccacagcaggacagaacataggagagaggagtctggaaagctacattgagtccagtcatgtagaacagaggtctcgggcctggatctggttcacagctgtgtgtgtgtgtgtgtgtgtctgtgtgtctgtgtgtctgtgcgtgcgtgtgtgtttatgagctgccagaagttgaaaa

SEQ ID NO: 6678 - DNA, 201 bp, Bos taurus
caacattcaaatcatcttgcatgtggaggatcattcttaaaagagaatttttcatttctttataagtcatttgagatgttcctggccccaggttttctacagctttgcctgactgagtgagggaccagggtggaaactgacatctctgtggtcggcagcagggccagcttcacaagctggtgacctgtgcgatcagacagg

SEQ ID NO: 6679 - DNA, 201 bp, Bos taurus
atcaatatagaagaaaggtagggccctaagacatgcaagttaaggttttccttcattaaaaaaccaaagagcaagcatacctcttgcttcacaatctgggtactttagtttcctcacagaacaaaacttttgctatgcctaagagatttttctttttttagtgtaacccacacctaagctaacttacatccttccagaagt

SEQ ID NO: 6680 - DNA, 201 bp, Bos taurus
tattaacccctctttgagaaaggcaaggtagcattgttgtcccatttacagagaaagactgagaaaacttagaagtcctactcaaaatttacttgggctcttccctaaaattcagttttcctaacttatccattttacttccaccaagacccccctaccccaaagttgttgcttctctgccagggcttctttcactcattc

SEQ ID NO: 6681 - DNA, 201 bp, Bos taurus
actggagtgggttgccatgccctcccccgggggatcttccgaccccagggatcaagcctgcgtctcattcatctacctgctttggcaggtggcttctttattactagcgccacctgggaagagagttggtgatgctatattatttatttacttaatctctgcctctcctactggattcctagcaccttaaaagcccaattt

SEQ ID NO: 6682 - DNA, 201 bp, Bos taurus
cagttcttctgttacttcttcctcttgtctctgtcctttctctggacctccaattccatcaggtcttcatcagtaagccccttgtgatgcacagcaaggaattcaataatgtattcttgtaaatttagctcagcttctcactgagggtcacttagttgctgaagacctctttagattctttccccaccatctcaaattcac

SEQ ID NO: 6683 - DNA, 201 bp, Bos taurus
aattagacatggtccctggactaatataaatcattaacatgatcttgaaacacttgcaagacaacatatggaaaaatgcaatatgcaatattctcatgacgtagtgtacactgagtagaagtaaaatttattataactagaaaaaaaagcatataaaataagctcatcccagtgcaccagccccaagcatcctgtatcctg

SEQ ID NO: 6684 - DNA, 201 bp, Bos taurus
aagagttttctaaagtttctactagcatcgttgtttctagatagaaatgttaaatagaaaaagctgcttttagaaaattctagttggtaactgatttcttcgaagtggtgtttatttgaatcagtagctatttcatatgggtaggttttctctctgcaatgagggtttaagctcctgtgtcacacactcttttggaatctt

SEQ ID NO: 6685 - DNA, 201 bp, Bos taurus
tgctgcctcccaggcctaagtcctaaaaatttccaccaaataaaacataattaaatctttaaaacaaaacaaaacaaaacaaacactttaatttcagttgatctctcactgaaggccttgctgtcttctttccctaaccttcactttcatgggacaagtgctcactcggccttcaccctctgtttcttatcccacctagac

SEQ ID NO: 6686 - DNA, 201 bp, Bos taurus
tcttctgttattagaataatcatccaatcatactttttccttttagggttaattacaagcttaagacttgccatcagcctctctccctagtaccattactgtatcctagaaagtttcattgtgattctgacaaagcagaatcttggcgctacatctatcttttctgttctgtttttggaagggaaacgagttaaagtgact

SEQ ID NO: 6687 - DNA, 201 bp, Bos taurus
caatctggcacctgcttcatggtcagcctcatcgttcaccctttcccaacatggaacttctatgtcaaacacatggatttatttctcgtgtataaaccctctctattccttcctctggcatttcatcttcctgctcggagtgtcttcctttccaccttttcaagatatctatttttaaagactcaatttcaagacactttc

SEQ ID NO: 6688 - DNA, 201 bp, Bos taurus
gactggaattatttcttttttacatagataatataaggcaaatgtggtgactgagctgatgaagatcaaagctttgattgaggctttgttgtctcaaatagcgtttaacaaaatctgctgtatttgccctggatacatatattcttccattatttttttcacgtgtgtgtgtgtgtagaaaagttagcaatactcgttaaa

SEQ ID NO: 6689 - DNA, 201 bp, Bos taurus
aggaaatggcgagggacagggaggcctggtgtgcagtggtccacccgtcacaaagagtcagacatgcctgggtgactgaacaacaacagcattctgtattctttacactgaaatggaaaggccccttgctccatattcattgttcaagtgttttaattctcatacctgtattttttttttcatgttggtacctcaagttgt

SEQ ID NO: 6690 - DNA, 201 bp, Bos taurus
agatgttaaaaatatcaacagtattcagacaaataagtattaagcttcaattatgttgaagaaattattctaggctcttgaagcatataacaatgatcatcttacagattctattttcgaagaacttaatctattagaagaaagttgccataaaatttccataagaaaggtacagacctcaagcttcattagctaaattaa

SEQ ID NO: 6691 - DNA, 201 bp, Bos taurus
aggcactgggagatacaaggggatttagtgaaaatttacagagtgacaatttctgcagtttactccttagaagccagtgtgcaggcccatgcccattatggagaagagtggatagttcccctctgatccatcctacataataaatgtctagacacttaggcttgtgagtcaccgatgaaaaagtggccacaaccctataag

SEQ ID NO: 6692 - DNA, 201 bp, Bos taurus
tgagaaactggaatttttgttggagaacttccatactttagttataaaatcacggtactattatggaacattttcacctttttttcccccaagtgttcaataataagaaagtagcagggtcttttacttcagaacaaatatgaatatatgtaagatcatgttattgaatagtcaaaggactgctatggagactaaagaata

SEQ ID NO: 6693 - DNA, 201 bp, Bos taurus
aaaaataaaacagaaaaataattagtttctagtgactgtcattttcatgcaaaaaatatagctaccctactatatgttttattgttatatttattgttgtcgttctggtatggctgaatcctatattggctctctaaagtgttgtttatcctacacaggctagggagttgctgtccatggtatttctattccccggaagtg

SEQ ID NO: 6694 - DNA, 201 bp, Bos taurus
tttttactccagtgtttcagacctgggtggtatcaagttcataataacctaaaactcaacatcattggaatctgaaagcaatgattacaaagaactatgtatattgtcaggaatcagttaacaacctacactttctgttgagcatcttcatccttgttaaaaggcaacattttagtgagaaatcactacctattttccccc

SEQ ID NO: 6695 - DNA, 201 bp, Bos taurus
caaatttagctgggcttctctccaaagctagtgtttgacttttcgaatgatctgcctctggacgccaaccagagcagagatgctgcttcagccagtcctgaataatgtcctcagcccagtcctagcacagacggactgcggtaaatattcaaaactacactgtagttacacatgtcacattcaaatggcagaagaccatgt

SEQ ID NO: 6696 - DNA, 201 bp, Bos taurus
gatagattttccttggactacaaatactcatatttttgagcagcagtactcttaccatggataataacatggcagaatgatcaaataacctctcataaatgtctttcattctgtatcctcttttgtttacatatttatttctttaaggttaatacagtatgttggactgcaatatgtttttaattaattgaatgagatcac

SEQ ID NO: 6697 - DNA, 201 bp, Bos taurus
acggctttgcacaggtaagaaaaaagcagagaagtggaaaatgagacgctgagagaagacatgaatgtggtgagggcctttggatactagaaaacaattggaaatctctagacaagaaagaggaaagagggtttaaaaatcaatgagaggatgctacaggaaatgaaatattttgcaatttcctcttggccaggagagcca

SEQ ID NO: 6698 - DNA, 201 bp, Bos taurus
tcacaatatctgctaattggaggccatgtactaattagtcatgtgtttgtatcatcacccttgtccattttccccacagtccttttccttcttctctgcaatgacatccatcatcagcttattgcttatgctttatttctagcttagtcttaatatttcaaaatatttcataaccagaaacatcactagaagacatcagga

SEQ ID NO: 6699 - DNA, 201 bp, Bos taurus
gtgcagcacacgactttaacatttatttttattttgaaatgtcttaaatcccgcacctgcattcgaatcccttgggagctgtgaaaaattctgaggcctgcgttgcactccagatgagcaatgtcagaatctccgggggttgaactgaggtatccatattctttgactgtccctccgttattctgaagtagggccaggatt

SEQ ID NO: 6700 - DNA, 201 bp, Bos taurus
tctaaggagtgagcgtcttttaaagttgctaattagttttctataaagcagggagattagcctgggttatccagatgggcatgtaatcacaggagctcttaaaggcagagaagggaggcagaacatgcaagggaaaaaagagatgcaacatttagaactgagagcacaagccttgcatctggaggaagggggctgttagga

SEQ ID NO: 6701 - DNA, 201 bp, Bos taurus
ttgcacggacaaattttgagaagcagaggccttgacattgtctttctcagtacactgactcaacaagtatctctttccagctcacaatacgctaggcatcgctaatacattggccaactagaaagatagtttcctgcctccatgaagctgatagagtagaagagaataactgtttaattaattataattgtgataagtgtg

SEQ ID NO: 6702 - DNA, 201 bp, Bos taurus
gagttgtccagaattgaggaagggtctggcctttatatcctgcaacattcatccgatgtggattgccctttggggagaagctgctctctgttgctgaggatagttgctgaggaggccctcagcagtgagctgttaatgcaatctggcaatttggaaaataagcgcttcatcctaaaaggaggtatgagtacctccttaaca

SEQ ID NO: 6703 - DNA, 201 bp, Bos taurus
tgcaattcattttctcactagggcaaaaactaccatgaccaaggagagtgcacccttaagggattcaagccagctcacctgcagcattgcatctgaaccatccaggggcctgtcattgctggcatttgtggagatggtaggtcaggagccatctggaactctagttttgagttttgaaaaacttaggacaccatgaagtct

SEQ ID NO: 6704 - DNA, 201 bp, Bos taurus
gccagaggagccgtgagtccagacccaaaaggtctagataacttctttacaccagacactgatgtgggtgccactgtcatcccatgtctcctcccagagtcccgcagagggagcaaagcaaaggccttctgcttctaagggtctttagcatctttaaagcaccttcccttctggagcagcttctgcctgcaaagtgatggt

SEQ ID NO: 6705 - DNA, 201 bp, Bos taurus
cactgtactaacatgtccttgttttctcaatttacagcaagacggaccttttccccctaaactcagtattggtgtttcaatgggacaggaaatggtgatgtttttgtagtctgtaatcccaccggcttccgaggctctgcgtcagcaccgcgggccatactgtcagtggaagatattatattgctggaccctggtgctcaa

SEQ ID NO: 6706 - DNA, 201 bp, Bos taurus
aagaataaatcctttcaacaagaaaaaaaacgttgctgaacaggaaaaaaggaagaaaggtgaacaccaaagccatagtctaaatattgaaaataaggcccgactttaagcaattaaggtgagaaaaaaatttcatgtgtcctcgatgttaagatcactattataactgatttaggagtcatgaccttgaaaggaaggata

SEQ ID NO: 6707 - DNA, 201 bp, Bos taurus
ttagcgtccctgccctcgtggggttatgggattggacccagggcctgggcagctcattgttttgggacctaaatcaggcaagagtgtgtgtgctgaatattctggtcaggtgaggccagcagttttgccctgcagacagggagagacatgggctatactctctgttcaggtgccatgtgaactgtcatgtcagcagggctg

SEQ ID NO: 6708 - DNA, 201 bp, Bos taurus
gctttccttccaagaagcacatgtcttttaatctatcaaatgtaactttatcaaactcctaaaaagcaatgcatcctattattaggccagcatgagcccagagtcatagaaataatgaaggtagagaaaatgtgggctttgttatggagtgttttcaaagagtaaagataggactctgtgcaggtgatggccaccctctat

SEQ ID NO: 6709 - DNA, 201 bp, Bos taurus
caactgtactttaattaaaaaaaaaaaaagaatatgtcctaaatgttggtttcaagcctaattccttgctttgtgatttacctccagttcctaaacatgagggctgaaactttcatccaattcagggattgctcagtatgactctgttaattaagattttattttattaagaataggcagaatgggcctgatgaagccaca

SEQ ID NO: 6710 - DNA, 201 bp, Bos taurus
caccgagctgagctccctgtgttatacagcagcttcccactcgctatctgtcacacatgctagtgcgtatatatcaatgctgcttcccaatttgtctcactctctctctctcccactgtgtgcacagctctgttctgtgcatcctgtctctattcctgccccacgagtaggttcatcagtaccatttttgtagattctctg

SEQ ID NO: 6711 - DNA, 201 bp, Bos taurus
atgacatatacacctcttccgatctgagcctatggacccttccaactttatttcttactaaggactgtcatgcatcctttggcccattccaagggacttgctgttacactctgctttgcctttgctcaagctactgttttcctacagcgaatgttctttccctatattcacggccctgctccagtgacacttccctccttg

SEQ ID NO: 6712 - DNA, 201 bp, Bos taurus
agtgaggtgaaaaatttgcatgcagtgtatcaaatgatttctttgttgacctatgttttacagtagtacttgcttgggtggcatcagtgtgtttgtttttctgtttttttttattttgcttacagaatactgagggcaaatataataactaataggacagaaacattgctatagattgtcacaatattattaataatatta

SEQ ID NO: 6713 - DNA, 201 bp, Bos taurus
gaatggataaagtaaatgtgtgtatatatatataaaggtcttgaggagctaatgtataaaatggtgactatagttcataatattgtattgtataatggaaatttgctaagagggcagatgtgttaatagactatatgaaaataatcctttcacaaatatcaaatcattactatgtatacatcaaatatcttacaattttgt

SEQ ID NO: 6714 - DNA, 201 bp, Bos taurus
gtaattttatcaattagtcaatcctaaagattttctgtcataagtatgtatcacacatgtatcccttcctagctgttcctgatctactattctattggcccacttttgaccaaagttttaatacatagacacttaattatgcgcttctttcctctgttatacacttatgatttcccaaatactaactctgaagtataagta

SEQ ID NO: 6715 - DNA, 201 bp, Bos taurus
taacttctgtcctgctagtatttctatgccacattagactgattggctttagaaccagtttatttctagccaaagaagtgatgaccagaaaattaataacgtgggagatgcctttcctttgtggacttccaggttggaagtctgaatatttacagtatatttcaagctctcccttgctttcatcccattctttttacacgt

SEQ ID NO: 6716 - DNA, 201 bp, Bos taurus
ctggtagaatcttcttatcatttttgtaactgttggacacattgttgtgtacagtttatgcctccgtttgcagtatctgacagagtttatttaacacaatgctgctggaataaacgtcacagacttttattaatggtacctgactctttgagagtcttagtgtatcaagtagttgacagcttcatatccaagtacacactg

SEQ ID NO: 6717 - DNA, 201 bp, Bos taurus
ctatatggacctttttcagcaaagtgatgtctctgctttttaatatattgtctaggtttgtcaaggattttcttcaaggagcaagcatcttttaatttcacggatgcggtcagcatcttcagtgatgttaatatttagccaatagaaatttgctgtatgactcagggtactcaaactagggctctgtgataacctagagga

SEQ ID NO: 6718 - DNA, 201 bp, Bos taurus
aaaactaagcattttcatttattgaagctatatgatctgctttctacaagaagtttgaaggagcttatagtggagagaagatagcataaacagggcaatgaaaaagaaatggaaaagaaaacttgaataccaaagtaaaagatatgaagattacaccaggagagtaagcagattattgtatttgtttctgattttctgaca

SEQ ID NO: 6719 - DNA, 201 bp, Bos taurus
ggaggggccaggagacttgtggtgctctcctgggcatcaggccctgggaggttcagatgatgctcccagtctctggcttcagggaattctctctcaggacatctaccttgaggcccagttaaatgtatctgattccaactgtctcctggactcctaaacaggtatatccatcctccagctggttgctggtgaggggtgacc

SEQ ID NO: 6720 - DNA, 201 bp, Bos taurus
agaatccagtccagaggcgcagtggtctgagacccgcactgcctgtgctgagagcagaggtacgttatcaattctagagaaattggggcagtcttcctacgagaggacatgatcaggtccaatattaatcatagcttttagaatacgctattgagacaggcagaaaacaaaatttaaattagcctcaaataggtatgattt

SEQ ID NO: 6721 - DNA, 201 bp, Bos taurus
ttattggttaattcataaaacatatggcacgcttcctctgccagaagtgtttgggcaaaggaaaacaaatgaaaacaagaagaaataaatgatacaacatgaaaacaatgcttttgaagcagagcagaaaggtcacctaattagggtttaattgatctagtaaagaggaaatcccatttctgtcctaggtatatctgtgca

SEQ ID NO: 6722 - DNA, 201 bp, Bos taurus
ttggtcctgagcttcctacttctgaactctgaaacatacttaggagaactccccagcacaggagctataactggggatgtttctgctgtatttaaatgagtgctgttcaccccacctctcatcactcatcctgcttctcatgattgtttttgtcagctgtataatcagtcctggtgagtcataccttaactacggtgggaa

SEQ ID NO: 6723 - DNA, 201 bp, Bos taurus
caaacaaaatccacgttttgagattctaaaaaaaaataaaaaagtgtcactcatactattctgtaaacattatacctgggaaaaaagtccaagtaattaaaatactacaaaacacttcaaaagagagttaagatgattagtttctaaatgttgaaattgtaaatatgataaacagtaataacatcaaaatatttctatctc

SEQ ID NO: 6724 - DNA, 201 bp, Bos taurus
ttttttgacacaagagaagccatttggggcctaagcttctgtgatctaagcctgcacagtgctcatccttcaacagggctcagtgattattttaaggaacgaaagaatgcaggcctaaatgactaatatcaggcaagagaagtgaaaatagcagagataataaatcacttataaagactaccagttaatggtaatgactag

SEQ ID NO: 6725 - DNA, 201 bp, Bos taurus
aacagtgtgcctggaagagaaaacaatacttggggattcagggaagatggcaaagacaaggtatggttctaggagagctgaaaatagagtctggttgttgatcaattaatttaggccacattaatagcactgactggattgtattaccttctttcttcacagatgccaggtcattacttttggagctgggtttttccctcc

SEQ ID NO: 6726 - DNA, 201 bp, Bos taurus
ggtagagtgggtgctttcatttggattgggtttagttgtgagtggcagaaaactcagaagtaaatttctctctcttacaagttcttagatttcaagtccagcagtgatagtccagccttgctctatgaaaccctcaggatactcctagctcattgctcctctgtccccggtaggcagccctgatcctcttggtctaaattg

SEQ ID NO: 6727 - DNA, 201 bp, Bos taurus
cctgagtatcagccccacccaacccacctggcctgctcctccaaagcagctcttgcctaccctagccagcagatggctccagctggcaccagtgcccctctaaagccactcccactcctggcgaccagccctgcacaccaacatacccaccatagccacagctagtcctcttagctgggttaggaccaactctgccaacca

SEQ ID NO: 6728 - DNA, 201 bp, Bos taurus
ttgcctcagacataggcagctcctctacattccatttacttcatttggaggaagttctcctaacattcatttactcagtcattcattcaacaaatccttactgagtttcctctctgtagctgttagacactgaaataagtggtgggtatactatgatagtttctgcttttaaagagattatagtcatgggcaggggcagtg

SEQ ID NO: 6729 - DNA, 201 bp, Bos taurus
aaggagtttctactgtatatgaaaatgagatttgtacatctgcagtctgagtttggacttctggcttaactacattattataactcgagacttctgtattgctgttgttgttattgaactttttctgggacattcagatatacaattaaaatatatgtgacggaagaatcaaatctataagcagttattggagaatgatga

SEQ ID NO: 6730 - DNA, 201 bp, Bos taurus
tggcaaccctctccagtattcttgcctggagaatcccacggacagaggagtctagcgggcaacacccccatggggttgcaaagaggcagacacaactgagggactagcactaacacaccccgggtttactcgggggtaatttttttctgctttcctcagtagttgacctgtttcagattcttccagagagcttgttaaaat

SEQ ID NO: 6731 - DNA, 201 bp, Bos taurus
tttaagactgcaaaatttttcctgcggcagcttcggctcttctgctgggttatgtacagagcgatttgggcacattaatcttacaaacattatccttttcatggccctcttctcagcagggaagagagaagtcaaaaactttaacaagtacagatgccataagtgaaaagtgcccacagaccttgtatcaggtaatactgt

SEQ ID NO: 6732 - DNA, 201 bp, Bos taurus
gttggaattttttttccctatcccttttcctgttttacttttcctaaagccttgtgtgtttatatttgtgtgttttcggcccacctcttgccaccattagactataagctcattgagagcaaatactttcatctttgctgtattttcatctagctgtatacctagcacctagaatcttagtttgggccctagaacaggaac

SEQ ID NO: 6733 - DNA, 201 bp, Bos taurus
tgcagtaacttccaaggagatgccatttataggtagatttacatacatcaacatcagatagcaggctcaccagcaagtctcatcaaggtggccccaaatccaactgtgcttgaagccccatttagcatcagatagctggatgttacctcagctggtataaagcagcatcagcattctctaatggtctgctaccgaacccct

SEQ ID NO: 6734 - DNA, 201 bp, Bos taurus
tccctgcctcgtggcctttgctcttgctagtcctcctctggagcacttgtcccctacatatctacatggtttcctcagtcccttcaagtctttgctcaagtgtcatttgtcatctgaggccttcactaaccatgccatggaatacagcaattactattcttcctttacacatcttccttactctctataggtcctccttac

SEQ ID NO: 6735 - DNA, 201 bp, Bos taurus
gttttaaaaactatttctatttatttgttgggttttcagttgcagcctgcaggatttctgttgcagcacctgggctctttcattgtgttgcgtggcctctttgttggggcaaacaggcttctctctagttgtggcatggacccaggagttgtaacacacaggtttagttggcccatgtcatgtgggatcttagttccccaa

SEQ ID NO: 6736 - DNA, 201 bp, Bos taurus
aaatgcacatatttctgagttgcaagtaccttcctagtttgtctgatggaaactgagcaggtctgttgtgctcaaaactaggaatgaataaccctattgacggccatgatagtatgccagtcctgttaaaagtttttacatctaatttgggtgctgtcatctgaaaagttttaagagttgcacctttaagcagcatttaag

SEQ ID NO: 6737 - DNA, 201 bp, Bos taurus
tttattgtctctcacagtcttacagtcttgggggtctgctgagctcagctggacagttctctctcagggttccttgcatggctatattcatacagtggctctggggttgggatcatccagactcattcattcacatctccgtctcctatgctgggaggacttaaaagccatgggctggagcagctgggggtagtagatgag

SEQ ID NO: 6738 - DNA, 201 bp, Bos taurus
ttaccacacttatctgatatattcaactctaggaactgaaactttaagcaacctcagttggaaattccttttctaaaaatgataataaaagcaattcttatgattctcccttaaataccacacagtaagttacagttactgtccactgtgaattcaggttagcgtggagaaacagaacacagatgagatacctatatgcct

SEQ ID NO: 6739 - DNA, 201 bp, Bos taurus
cctttttttttcccttctgatagtccatggtccttcagatcttctgaattttctggaattgagttcggtattttgcttttcaagtttctggcttacctaaatttcactgtgctaattatggaaagggggttccaatctaacaacatttaagcactaataacaagcagtatgctaggaagggagcagaagagatctaaagtg

SEQ ID NO: 6740 - DNA, 201 bp, Bos taurus
ggcccccatccttgaccccaataagagcagttctccaggtccattctctctctttctcttcctctatccttcaaaggacttcaccatgaggcccaggggtaccatgtgctctccaggaaccatggataataaatctcccctccccccaaactttcctgatggttattgctgaagggcctcttacagtagtaagaagaacca

SEQ ID NO: 6741 - DNA, 201 bp, Bos taurus
ggggacaggaagatacgcaaagttatgattcgtccttttcttcccctccatgcagctgcattaaagaagtcatggactggcccttcttttaaggatgctcctcaccccacccttctacgtctttggaccttatttgatgtttcaaataattactaatttctatttttggttatctatgaaacaatgatggccaccatacaa

SEQ ID NO: 6742 - DNA, 201 bp, Bos taurus
aagttcatctctaaaaatattgtcagtgaaaatcattccaaagttccataaaaactactgaccctaaacaaaatgttattttcatggaaatcatccaaaaattcagtgtttgacattgttctcttgatgacggtccaacattttacagctgtgatcccaaccataaaaaatatattgtttctttcttggtcatggattgat

SEQ ID NO: 6743 - DNA, 201 bp, Bos taurus
tcaccgaaattctccaagccagttggcatcctacaattttgagctaatgaagccttctatttggattttgaaaacggttccaaaaattttggctaaatgtcttgttttgaatctgaatgaatttttaatatgaatccttcctgtagaaaactcaactcttcatcactggggtggttgttacaaatattttaagaagtaaac

SEQ ID NO: 6744 - DNA, 201 bp, Bos taurus
gggagcgggcgccgtgggcaccgcggccatggccaaggggcggcggagagaccccgagctgcttctgccgttcgcaagcaggagcggctccactggtggagggagggaagaagggaggccgcgagggagggacagggcgagggagggggagggggacggccgcggggggcggggggagcttgggggcggggaaggaaactg

SEQ ID NO: 6745 - DNA, 201 bp, Bos taurus
tatttactgacatttcatctgttttatttccctaaaacattccttgcctctggagagtaaatttttccttaattggtcttatttttaaatcctgtttcattctctattctctattctccagattcaggattagattaaaaaacagaagaaccatctaatgtctttatctatcttgatataaaacaagatagaaaacccata

SEQ ID NO: 6746 - DNA, 201 bp, Bos taurus
tgtgaccctcccccagctccttctctggccctatctccttcagtcctcctcctctgctcactctactccaatttggcctctgggcttttttctagaatcccgcctcaggagtcctcactgttgcttcctcctgaaatcttgactcccagatattcccagggctttctctctcactctgcctagagatagagggaggccttt

SEQ ID NO: 6747 - DNA, 201 bp, Bos taurus
ctgaaatgggttgccatttgccctccccagggaccttcctgacccagggactgaaccctatgtctcctccatttagcaggagatcctttaccactgagacactggggagcccataaagcaattatactcaagttttttaaaagtttttaaactgaataaagttaactgtaatatatatgttactactataataattttgta

SEQ ID NO: 6748 - DNA, 201 bp, Bos taurus
aaaacaaatccccacctcccaatccaaattgtttccacattaacacttgtggttgccagtttagagactctcataatagatataaataacaaattaagttacagaaaatttggctttcattttcaaactcagaattgtcatcacttgtatgtttttcctccaatttgaatgtgaacagcaatcttgcattttgtttattga

SEQ ID NO: 6749 - DNA, 201 bp, Bos taurus
gctagaataacaaaataaaattttatgaccaacacccactgcaaaagttgatgaaagagcatctctgcagctcccagacttggatctgccatcaggccctcgtggtattagcaactgcatgcaagagagtggagggaagaaaaataggacttctgatgaatatgaaatccaggaacaaattcctaagaggggttcacccca

SEQ ID NO: 6750 - DNA, 201 bp, Bos taurus
cagattccaaattcacaccctaacatgtctgggggcttttagtgggctccttgaggtttaaccaacacagactctaggcctgtctgaaatgaggacattcttttgttttctgtgacttatactcatctgggtttggggtactggttgcttaaagaagaactgaatgtttgtggcctgttgcctcaccttaaagcccacagt

SEQ ID NO: 6751 - DNA, 201 bp, Bos taurus
gaatttgttttaatgggattttatctagagtatcttataccttagacaggagccattaaaacaaagtcaatgacaaagaatttatatgattatatcacacgtttcacgaaacaaacatgaagaaacaatttaaggctacccagtaatagcttctcataaaacccagtgaaccttacaattgtaattagacttcaaagagat

SEQ ID NO: 6752 - DNA, 201 bp, Bos taurus
ttgccgtatgcccttaggacaatatccagagactaagtgattattgtttttataattcccatcagtaatggctgtttcactggggattggttctgtagaattcctcatgcctgccagtctgcatatataatgcttttatattagaattgtatatggttcatttccagataaatgtacagatgttgtgctatcatgttccca

SEQ ID NO: 6753 - DNA, 201 bp, Bos taurus
ggcaaggagtcagatacgactaaaacgacttagcacagcgcagaagaaacctgcctcagaaacggtgtggatggaggcagggtttttacatcctgttccccccctcactactttagtgaagctgacttcctcaaacttgacctactgtgaagaaactcaacagtatctcatgcatcatttgtcttgaccactgacagcccg

SEQ ID NO: 6754 - DNA, 201 bp, Bos taurus
attgttttcattttcctgatgaggaaatttaggcactacgaagttaaaaatattaagaaattcatcccaaggcacacagatagtaaatggccatttcaagttgcaaacttagatctgacttcaacacacttattaagggttacaaatgatgttcatattgcctctgacttcacttttctattatctatcaaactggcaggc

SEQ ID NO: 6755 - DNA, 201 bp, Bos taurus
ttgaaattgacatgcatttggggactctcatccacaagatagaaaacctttggcctcacttctgttatttctgtaatcgtctctcataccctcattgtccttgattgtgtctagtgtgctgcaggccacaacataagtactcctgaataaatacatataaataaagacacttacttatttaacatacacaactgctctcct

SEQ ID NO: 6756 - DNA, 201 bp, Bos taurus
tcctgcagagcctgtgagtgccgtgtcacctcctgcaggttcagagatgatcatgcttgagtcggagaacaggtggtcgtcgagcaccaccatgggcagtgagctgaaggtcacgaatagctcctggccctcattgtccaggctcaggctaacgagggccgtgagcgtcagccagtggttgtagctggcctccttgaggca

SEQ ID NO: 6757 - DNA, 201 bp, Bos taurus
tctgaccggtgtgaggtcatatttcattgtagttttgatttgtatttctctaataattagtgatggtgagcatcttttcatgtgctttctggccatctgtattccatccaatgcaacaggcatgaacttgggcaaacttcagaagctggtgaagaacagagaggcctggcatgctgcggtccatggggttgcaaagagtca

SEQ ID NO: 6758 - DNA, 201 bp, Bos taurus
cagaaataaggggataattctaagtacaggcaacaaactgaacaaaggcaccaaagtagctactgttaggaattgcgggataaagcagtactttactagatcacaggataggagtaggaaatgaagcatgcaggagtttaaggaaaggaatactgattacagacagtcttgaatactctgataagaactacgagcaaaatg

SEQ ID NO: 6759 - DNA, 201 bp, Bos taurus
agcaattcctaactacagaagtgagggtcagcagaaacaaaggaaaaactattaaatgagaaaactaatgacaataattaagctatgaaacagagtcctaatttctcctcaaaggataacaacatgatggatatccttgagctgttcttcttgaactaagaccaactcccttccatccagatggaggatggaaactatatg

SEQ ID NO: 6760 - DNA, 201 bp, Bos taurus
gaagtaaaaaaatctgctggaatgtagtgtttagagttttctcttgtgagagtgcagatggaagatgcatctgctttacttcaaatcaatttcctcccatcggtccactgttatcctttttcccagagaaatttcttgttttccaagagtgtattttcccacacaatataagttatttttgtacaattaattcttgagttt

SEQ ID NO: 6761 - DNA, 201 bp, Bos taurus
ggaggccttctgtttgtccattgaagaaactgttcactctcactctcataacgttaatttaacctttatgcagatgatgtgaaaatctccatctctcttcgaaggccatatattttcccattgtctactcagtgttttcacttgaagttactctattatctcaaacgcaatatctatttgtgttatgaacttcaattaaat

SEQ ID NO: 6762 - DNA, 201 bp, Bos taurus
atgaaagataaaaaattgtttcttcctattcttattcaataatgaaaagggattatgtattttatgtgtactcctgtatagataaatgcagtgaaatacagtgaaggcaaaggatgcagtgtactttgattaggggttaggggaccatttgaattagaaaaagttttgtggcaagaaacttgcaaaggacatctgcagcta

SEQ ID NO: 6763 - DNA, 201 bp, Bos taurus
ctgtgtggctcggtaaaggtcccgtgtgcagaggttatgagcatttcactaaggagggtgatgcttcttcaggtccaacagcattctccatgtaagatgacgtatgagaactattctcatggtgcttttagcaaaaactgcctcatcaatatgtgttttcatacacaagttccttgctacctttgaattccatgatcagtg

SEQ ID NO: 6764 - DNA, 201 bp, Bos taurus
ttattaaaaaaaggaaagatgggagaaaaggagggaaggagggacaaggaaggagatgggaaatttgaggggcggtgggggtaggaggagaagccggaatcgggaattgctctacttaccatgatcattttgccgtccttaatctctcttacaaaatttgtttctttgccatcccatttctgtacatgaacaagtttgtct

SEQ ID NO: 6765 - DNA, 201 bp, Bos taurus
gagggtcttattccagtgttctgagatttaatattatatctggctccagaagccccatgatagaagtacttattctcattttttaataaacaaaaaaatatatgaatgtaactacatgagttaaaggttatccttaattacacacacacacacactatacatagtgatttcaagaacagtattttcttctgagacatatta

SEQ ID NO: 6766 - DNA, 201 bp, Bos taurus
tcaatttgtcacccgtcacatttctcctctccatcctaaaatggtgcacctgcccactgagttttaccccttcatcctgaattttgcacagaaattattttccccctaactatgctcttttctgttgctttccagtcaatgcatcttgagtaaatgattgtcttccccatttaaaatgagaagaaaccactccatttttcc

SEQ ID NO: 6767 - DNA, 201 bp, Bos taurus
gttttttattcttcttccatgggggaagctacttgctgaaagaatctgtgtatgtgtttagtgatgtgtctctacatgtctgaagacaatgatgtgacaaagttctgtgatctcgggtgatacactatcatagtatgtggccatgtttaaataaaactaaaaattgatccttattaaaatcatcaaaaggatgaaaaccac

SEQ ID NO: 6768 - DNA, 201 bp, Bos taurus
cactgcaaagtaatgattgtcaagtgaccaaggaaaaatcacaaatctactgtatgtctagctgtcacttgattattctaaacctccaggttcatgtactcaaatcacagcaaagttatttgctactccagagaagtattatgaaattttaaacctctgggactttacacaaactgctccttctattgataatgccctgtc

SEQ ID NO: 6769 - DNA, 201 bp, Bos taurus
ttcaaaactgagcagtaaattctaatgtttttctttaatttttgtaagaccccctctcccctgtggtgaatgactttgagtgggctcagttgtgaccattcctcttatagttacaacagctagatgtgctttgggtagtattcacacccacattcaattaacataacccatgttcaatctgtcagcaaatgctataggttt

SEQ ID NO: 6770 - DNA, 201 bp, Bos taurus
gtcttcattcatgcattcattttctactcatgtatttaggtatttattggactgagtgctttgccgagttctatggatgcctacataccttagagaacttactatatagtataaaatacaaataaataaatacaatatggcaatatagtatgctaaatttatgatacaaatcatagagggttcgtacaggctaacttgggg

SEQ ID NO: 6771 - DNA, 201 bp, Bos taurus
ataatcaaaagatgttaaagtaggttttgcttacttttgcccaggaagaattattagcgctatttttcaaatgcagtcattccctattgtaattcacatataatgaacaataagcattcttttaaaaatcatgaatatgcacaaagacaatttttctggcattaagtttttttttcttctggttagaataacacattactg

SEQ ID NO: 6772 - DNA, 201 bp, Bos taurus
atgcagagccatcaaggtgatagatgggcaatatctttataattatttctatcataactcttacagtgatagcacacagtgacttcagcagaagatatatgtatttaagtcttcttgggaatgccaaacacagtatgttagaggtgcagagtgtattgctgcacattcataataccaacaaacggaaaacttgatgacgaa

SEQ ID NO: 6773 - DNA, 201 bp, Bos taurus
taaaccaaatatttgtataaaagcttatttgatgactgcaaataattggagacctttatctgggttcgttcattcattgctttacataaaaaatgtttactgatggcctacaatacacagaacactggaaaaatacagaggttgaaaatgtaagacttgtttctttgtatactaggttaacaaattgagaaaataattaaa

SEQ ID NO: 6774 - DNA, 201 bp, Bos taurus
tgctagcaacaaagaatttagagcagactcagagggaactcataatcataaagtcatccttagacaagaataataaaaacacagttactgtaaacagacttagtcttcaataacatgggataaatcacaaggtgaaaaatggaaaaagcaaactacagacatcatttgagcacggtagagagaaattatcaaacaatgagg

SEQ ID NO: 6775 - DNA, 201 bp, Bos taurus
aataggtgcaaagtttatgcccagggcttataatttgagagagaaggaagataggatgaaaactaatatgtaggaaaatcataatgataaccttttataagggtgctaaaaatgtagaggttacagatgcagttgcttaaatgcaacacatcctccaaaaaacgctgagctgagtctttcaaaaaatgagaaggacactga

SEQ ID NO: 6776 - DNA, 201 bp, Bos taurus
aataagataattgaagccactgtcttagtgacagtagtaaagtaacaatattagattggaaatctcaatgcccgtactctaggcctgtttctgcaactaacagctaacgtaaacctgtaagagagccataccctgcttggattaaaatatgatgatgcttgaggccctgtctatccccaaattctgtaataataggaattt

SEQ ID NO: 6777 - DNA, 201 bp, Bos taurus
taattcattcttgtcactgaatcagggcatcaagctagggttctgctacacaatatgccaaagaaaaataaaagactgctaggagagttttctttcccagagagcagtttgcctaaggtgttcacacatccacccactgaaatttaatcattaatgtagcacattgccagagagatgaaaggcagtaaagtgacataggtt

SEQ ID NO: 6778 - DNA, 201 bp, Bos taurus
aagatctactggaagcccttctctaaggccccagtgttggggaaaactatgctacttttgaacagtgtaggatgacacaggagaccttcagcagactgtgatatcttctttgcttggccagtaaaaaactcagaatgaaatttgcaatccagttctgcaatgttccataaacttattgtatgatttatttttatctattta

SEQ ID NO: 6779 - DNA, 201 bp, Bos taurus
gaatgactaaaacataacatgtaagaaaatatttagctaatataaaaatttaaaattaagtgccaggcataggtacctatgattcagaatgttactaattcatttgcaatcttgctaaagttattattttactgagcatgtgtgtggcatgatttccacattgtgaatttgattgctgttgttatattgggtgggtccaag

SEQ ID NO: 6780 - DNA, 201 bp, Bos taurus
gaggacttacagattacttgtaagataatatatctttttacaacttcccccttctctgtaccctagtaaataagtgaaaccagaacaggaccagaacttgggattttcaggccaagacttaaccggcagcagcagttctcccctgggcatgcacattggaatcacttgacatcacaggtggtgctttaagaagttctgatc

SEQ ID NO: 6781 - DNA, 201 bp, Bos taurus
aagtgtctgtgcccctgctcacttcccgctcgctcctcacccggtccggactggctcctcttgttactagtccacagactcggcctcagcctccagtgaccttctggttgctggacttgggggatcttgtcttcctgtggtactgacttgtgtctgattcacaagcatctcttcggttctctcacactttcctcctgtctc

SEQ ID NO: 6782 - DNA, 201 bp, Bos taurus
ctctgtctgcatgtcatctgctgccactgtctcccttctttttttacagccatactggactccttggagtggagtttctggaccacacgcaccaagcttaatccatctcagggcctctgcatcttccagtgcttatggaattcaccttccccagatctacatggcttgttcctcaatttgttcaattctctgctcaaatct

SEQ ID NO: 6783 - DNA, 201 bp, Bos taurus
agagcctaagactatttattatagagctatatgcagagataggtctagatttcagtggccagaaaaccagaaggttatccttttaaaaatgagtacaggaactttgtcaaaaccctcaaaatgagatatttgcctgttcttagaaattactgacccaatacttgatatatacaggttacccaagcaaatcagagaagctct

SEQ ID NO: 6784 - DNA, 201 bp, Bos taurus
ttagtatggatcactgtaggaggcctctgggaatcccacaactttttttcattgtcaccatagcattccaactgccttaaccttcatgcctgtaaaaacaagtactttttcaaatttgggccatatctcccatgtggcagtgttctgggttctttgtcctcaatgtggttatgaccactctggaaattcaagaaagacata

SEQ ID NO: 6785 - DNA, 201 bp, Bos taurus
atgaaagcttggtgtgtttgctgatgtaacacctgattccagttagtgtagttttcttgcctgaatttatgtctttctgaagttctcatgatttctgcttcgtgagagctgttcattgattttttaccatctctgttctttggaaactttcctgagttttctaatttgtgatctttgtttttccttgttggatttgcttca

SEQ ID NO: 6786 - DNA, 201 bp, Bos taurus
tttcagtttcctcaactatatgatgtagttagtattccttaagtttcagaagaatttaagatgtattatgtgactataaattatatcattacattgatctgtttttatatactattcccaagtttcctgctttgtgaatatgtaagagcttttgggatttaaaaatgaggcaaacgtttttcacttggaaatgaaaatctt

SEQ ID NO: 6787 - DNA, 201 bp, Bos taurus
aaatcacttttggagcccgcaagacagagctgcactcatgagacggtggcatacacagcaaggaaggcttgccccccttcccttctcaactccctgccacaacaccttgatatttttagcctgtggggttgggatgatgaatacccaagtggaaatagtgttggaaggagatttttcttggcaaaatggcagcaaaggctg

SEQ ID NO: 6788 - DNA, 201 bp, Bos taurus
gccacaataatcatatcctctctagttcttattcatcttttaaagagatacagatataatcaaacctttctacattaaaaaaaattttttaattggatttttaaaaaacttggtttttttgggccacaccatgaggcatgtggaattttagttccctgaccagggattgaacccacatcccctgcacaggaagcatggagc

SEQ ID NO: 6789 - DNA, 201 bp, Bos taurus
cttgcctccaatttgtctatcatttttgactgtgtgagaaggaaagtgctgggtaaaaagaggaaacaggagaagagataggaaacacacaggaaaaccattgggagagaaaaggtgggaagtgattctatcctgagatttcacaggcatattcaaagctctagaataaaatatgcactcatttctggggcaagcatctgc

SEQ ID NO: 6790 - DNA, 201 bp, Bos taurus
ctttgggcaagagctgaggaactttaaaaagcagtgtaaagtaatgataaggccccttgacttctttgcatgttttaaaaaattgatcttatatcaagctgccattaactattctacaaaaagggcctactacagtgcagtccctcgcttattaggatgatcttagaaaacaaaattaaaaggaaatttaactccgagcac

SEQ ID NO: 6791 - DNA, 201 bp, Bos taurus
cctttcctcattgataaaccttcaatttcccaatagattaattcagctacaattcaacagtttcttgtctgtaaggttgacgtaacatgatagaatattaataaatggtgagacatcattttctagttaatatcctttgtcagcaaagtggggaaggtaagaagatggtaaacatttttttttttcacttggcaaatcaga

SEQ ID NO: 6792 - DNA, 201 bp, Bos taurus
tgagtcacttttgaagaaaatactggtaacctctgctcccatctgctgattttgtgaaaggaacagctggtctctataaaggtattcaaggcatttgatctagtcattgaagaccaaacgattgaggaatccaggtaaacagaactactggggattttcagatcaagagggggaaaaaaagacaacatgaggctatttatt

SEQ ID NO: 6793 - DNA, 201 bp, Bos taurus
ctgattttgcaaacttaatattctgcatatttatatacagatgaacttcactattttcatgtatacatacatctcatgaacactcaaatataagcaggtttgtatctctataattatccctcagaaaagtcctgtgtccaggccaagcaaagtctcttcacaaggagcactctcaattatttatttgaattccaggtagta

SEQ ID NO: 6794 - DNA, 201 bp, Bos taurus
tttatcttgatagccttataatgttataagtatcatctgccttctatggcataaacaaaagtatgttttttcgcccaaattctttttaaaatggggacacgaagaaaccaatgctctcaaactctttttgttaagaatcattactctactttaactctgcaacaacataattaaaattttaaaaaactaaaacaaaatatt

SEQ ID NO: 6795 - DNA, 201 bp, Bos taurus
ttccccaagttcttggtgttttattttttggttgacggggatggaatcttccatggaaggagttaagagaaaaaaaagttttggatgaagagggcgtgcaaatatggaaggcagcaacgcagggcactggctttgcttaggtttgctaggctatatctgggtcctagttgttctgcaagtcgcagcgtcatgtctccatag

SEQ ID NO: 6796 - DNA, 201 bp, Bos taurus
ataatttagaaaacaatagtggaaatattagtatttccttctttttaaaagaattagatgcactactggacatgcttatgtgtttactaacttttcttatacctttccttttatcctgtagtccttaggtgattttctgggaatttgtcctcaaatacaccttttctgtatattgtctgtcctttactgtgtgcgtactga

SEQ ID NO: 6797 - DNA, 201 bp, Bos taurus
actccaaggggctggacagcatggtgttcacggcctcagtgagccgggcggcaatgtgctcgtgggagctggcggccctcagctggagctcggccacctccgctctagagaagtacagcattgggtggctgtcatagttggcattggtgaaggggatcatgacttctggattctcgtcagtgacgcaggctgacacgaagc

SEQ ID NO: 6798 - DNA, 201 bp, Bos taurus
tctttttaaaggaagaaaaacagtctgcatagctggtttaaacttctgaactctatttcatccatgagaatgatagcggaccagcagtcccatgaacacaactcagtgtcatccaacttgggctcatctgtttatatgtacatgcatgtgtcctctccatgtacaaaggatctgaattacttgcacaaaacgcttaggaaa

SEQ ID NO: 6799 - DNA, 201 bp, Bos taurus
gaaaaatcaccaggggagcaggtagaagagggagcaaagatgcagcaggaaagaggaccctgggcctcaggggcagctggtggcttggtgaacctgatcatagtgtgtctgtgcaggagcaaaggaccgtgaggtccaagaaattaccagaatcttgtgtgccctgctaaagacattagattctattccaaacatgttttg

SEQ ID NO: 6800 - DNA, 201 bp, Bos taurus
tagaaacagtggagagaatgccaaaactacccatagtgagagtttcacactagtacctctgatctgaaattccacaggcatggttcgtaaataccagactagattagaatctaagactgggcccctctccattgggtatatgtttccatttgcccaagacaatcagttgataaccattgtcctagaatcctgttgtttctt

SEQ ID NO: 6801 - DNA, 201 bp, Bos taurus
gctaatatgttaactcttttgtagtaggatagagtatctgagtctcagtttccatccacataaggaccaagaccatcttggttgggatttgtgtctgaggagtatacacttgacactgtcttaatggctgaaaattaaggcaaagcatttgacctttaggtagctgaagtcaaaagaaaaagagtgtgagctaaagttctt

SEQ ID NO: 6802 - DNA, 201 bp, Bos taurus
actgaggttctgtgggaaatgatttaggtcaagggtaccagagctggtggcattctgagcagtgacacacctgctgttcacaaatgatgtaaattgaacaaacacttctttccctgtccttgttagcctaactctctggaggaaatccaggagcaggggacgatggagttcatgttacctagcaattcatcacataaatct

SEQ ID NO: 6803 - DNA, 201 bp, Bos taurus
tcattcctctgatcttccattgctgtcactttataggtcagatgtatggctagcagacaggcattgcagagttaatacacgatgcagatagagagtgtcaattcagaactgtgtgtcgattcagtggtctctccagaattcagggtcatagacaaaaaagctcagtcttatattttctgccagccaagaaaacatgcttga

SEQ ID NO: 6804 - DNA, 201 bp, Bos taurus
gatagtaccacaaaagcccaaatcaaattgaattttgggagctacagagtaataaaaaatagtcactcttttatgtaattaatatttatagagtacttattctatggtaatagtaattactgggtgacaatggtccatgccttcattgatctaacagtctagttttatggaagcaacaacaaagataaatatcagactaaa

SEQ ID NO: 6805 - DNA, 201 bp, Bos taurus
ggccttaaaggtctccatgaagtccccttcccatttcccttctgcattttctggctgcctaccccagctcacttccctcacctacactgctatcctgtttatccaacaggccgggcatctgccatgccagggccttgcaccctttgtgcctctgcctgattctcttctcccaaggatgttgcctatccttcaggtctgtac

SEQ ID NO: 6806 - DNA, 201 bp, Bos taurus
agagaccaagaagacttactctttgtcactacttcaggacataacacactgaatgggaaaagttatacggtcttctcttgctatgttaaaagcattttataaaccagaaaaaaaaaataaaaaaggctgctgcctcttcttccaagaattgtccttctaggatataacacagataaaataaaaggagaaatgaatgaatat

SEQ ID NO: 6807 - DNA, 201 bp, Bos taurus
atgaacacatttatttctgcaaatgtagaaggatcctacattttcaaaggtgaattgtaaaattataggtttatggtgatccccaagcttctttgccttacgtgtctggcataattgaggatctcacagaacatgattaataactgttatctatggtaatatttcttgaaaggggaaataaactgaggaaaggaaacagag

SEQ ID NO: 6808 - DNA, 201 bp, Bos taurus
gttttctttagatggcatatcatatatgtttggatcttgcttttttagtcaatattgaaatctctgtattttaactgttgtgcttagtctagtcatataacgtgattactgatgtgattggacagaggagcctggcagacttcttggtgtccaggagttcacaaagagtcagacaggactgagcacacatgcatagagaca

SEQ ID NO: 6809 - DNA, 201 bp, Bos taurus
gttgattacttttactattggtatagatcttaaatgtaggagccaaaaggtataatgtctctgctaacgaattacaggcagagcccatataaactatcaactttattttgcaattccattccctcagggtcttcagttggaggaaattcctcacagtttattacaatatgttgacagccatcccttaatgttagtgtgttt

SEQ ID NO: 6810 - DNA, 201 bp, Bos taurus
aaataaccacaaagtattaaaaggtgaaagtcttacaaagagacaattctgagatttgtactatgccacactgtcatttttttctggctttaaggttcaaactctgttcatttttgacataccacattaacatgagataaaatattaattaatttacattccaaatgtacttctggcagaagaaactaactatatttcaag

SEQ ID NO: 6811 - DNA, 201 bp, Bos taurus
ctaatagcctaagagaacagggatgctggggtgcagcattgttagagaagtgttaggtttattttggtgttctccaattataaagtcaattctctggataccagcttcttttacatattaatggcctaacccttggcatatggcaggaatgtatattcaactccgagactgcttgaaaaatggaatggtgagttcaaagat

SEQ ID NO: 6812 - DNA, 201 bp, Bos taurus
actgaacaacaattctgctcaatgttgtttatgctcaccaagactgatctatccagtatacataacaggaaaaaatataatatgaaataagggatagaaaggccagtatgaaatatatcaattttcaagggcactggggaaattgaattctgactagaaaacaaaatgcttaacaccaagaagtgtcttaaattaatttta

SEQ ID NO: 6813 - DNA, 201 bp, Bos taurus
gggcatggctcagtcagaacaaagtgtatacttgccttctcagaccttcaacagtacctaaaggtcatctgccttgaagacaggttaagtctggtcataatactgaaaacccacaactcgaggagtaaaagagttctcctggcacagagagaaggccctgtgagtgttaatgtcagcattaattccctctatgacctgagg

SEQ ID NO: 6814 - DNA, 201 bp, Bos taurus
gaaggtggttctcacattttagggagtatcagaatcaatggaagccttgttagaacacagatttttggcttttacacctgagtgtcagagttaatgggagtggggcctaagaatttacatttctaagttgtcagatgatgctggggaaagtgcagggaaaaacactttgacaaccactaatctattaaccaacctcttcat

SEQ ID NO: 6815 - DNA, 201 bp, Bos taurus
gttatttctgctcttatcttttttatacacacgatttgctttcccaattagtctgaagaacaagacacattttacagttgtatatctctttaagttcttacatagttaccctggtaatctacacagaggagatactcaacacagtggtcactgctaataataattacagatttcctctttgagatgctgatacttcccatc

SEQ ID NO: 6816 - DNA, 201 bp, Bos taurus
agagaaatttccctactggatctgtgaaaaagtgtgtacagtggcatggtgtggtgcgttctcaataccatgctaaaataagtgcaatatcatggctcttataagtattttgggtactattcctcagctcaaaacaagacagactgagattcagagtgcttccaatgaccacagagctcctctaaaaaaaggaaagtagcc

SEQ ID NO: 6817 - DNA, 201 bp, Bos taurus
aggacggctcacactgactggagttaggtattcccttttctcatggtcaattaggctttgattgtattctagtagatttggatctggttaattagtttcttctgcttactccttgaaagaaaagttatgaccaaccaagacagcatactaaaaagcagagacattactttgccaacaaaggtccgtctaatcaagactatg

SEQ ID NO: 6818 - DNA, 201 bp, Bos taurus
aacaagctatcttgcaataggctttagagcaaacctagagtcagttacttccctgaagacgtggaggtggtccttatgaaaaaattaacctgagataagaatctatctctgccaggagaaagggaaagaagaaagacaaatattgggcttataaaaaatttactgaagaaacaaatataaggactgaaggtgggatggaga

SEQ ID NO: 6819 - DNA, 201 bp, Bos taurus
gcattattgattttcctgttgaggctatcagagtgcatagacagtcactggatcaacccaagaggaaaatgttttaatgcccatcccttttaagctgtacgtaagctccccctcccacatgttcatgaatgactcagctttcgtctttttatgtatgatctggattacccacctgctgtttttgtcctgtttgcagaaaaa

SEQ ID NO: 6820 - DNA, 201 bp, Bos taurus
ttcctgagtgttcaggagtctccagcagagatatgggtcgacagtggcctgccacagggtcagggacactgaatgcagtaatcctgggaggcatgtcacgctggcataagttcttttggaagaggccaccattattcctaccatagaccaaactacagggagggaaacagtgcacccatcagcagaaaattggattaaata

SEQ ID NO: 6821 - DNA, 201 bp, Bos taurus
gctttctcaaatgttctaccttgaataacctgcacctatcacttaaacataaaaaaaaattacacattttaatgttaagaatcatttgaaaaaactacaaggatttcttacaaagactgaactgttgctgtacttttaggtcatttgctgcaagttacacatttccccaacccatcatgattttctcactcattggagaaa

SEQ ID NO: 6822 - DNA, 201 bp, Bos taurus
tggcctcaaagccagtttacatttttagaaacctgtggagaaggaaagagtggagaaagaggagggtggggcaatgactgtaggaataaaattccagagaattccaagtggcccgagggtcattgatttaggtcactgacttaggttagtggccgagaggacttggacttgagagggagcaagccatcctctgagatagga

SEQ ID NO: 6823 - DNA, 201 bp, Bos taurus
ccttgaatttttcccaccctcacgtctcgtcaaccacaggatctggcccattttacctttggagtatttttaactatcttccatcttttcccttcctctatgacttctccagtgtgggcctttgttatttctcaactaaaatagcctcctccactcccctccattcttggttctgtattgtgatcatctgctagtggatgt

SEQ ID NO: 6824 - DNA, 201 bp, Bos taurus
ctccagacctgctcagagcttccagtgtgtttgacatggaaaatgacattttctacttacctactgaaaaatgtatcaaactttccaaaagagatacaaaaatatgcaattacaaaatcatgccatggttacaaaatttaggtttctgttcttgagaactaatagtatttctctccacagatgagtctttcaatattggat

SEQ ID NO: 6825 - DNA, 201 bp, Bos taurus
acctcctgactgcaacaccatcgggcctggtgaccagccagctggggttcgtgccttggagcacgcttcttcctgtctggttttaggtgacagagtcaagctgaagaggcccaaggggctgctcttgccccagagagtcttggggaggccttttaaggtctatttgtttgatacacacctcgaccagtaacagtgggtggg

SEQ ID NO: 6826 - DNA, 201 bp, Bos taurus
ctttccctatatatggtctgattttttttctttttagtttattaaacagctttatattgagatataattcacataccacacaattcatccatttagggtatgattcagtggtttctagtcactgcagtcaattttagaacattatcatcaccccaagaaagaaaggcctgtactcagtagtggtcactcccaatttcctct

SEQ ID NO: 6827 - DNA, 201 bp, Bos taurus
tcgggaagagccttgaaaggcaggagcctacaattctagtctcctctgatctggctgagatgtggattcacttgggaggccaagaccaccaaaattcagtattcctctaaaagacatgaggaaagcaagcaggagcaaagtaactgcatcagtgtctggcttctatcctgcttcaggagtaatccaaggccacgtcttcat

SEQ ID NO: 6828 - DNA, 201 bp, Bos taurus
cggagtgggttgccatttccttctccaggggatcttccccatccagggatcgaatcctcgtcaactgaacaaatgaatgcaaatactgggctttcatttttccattccccaacaatgaaaaaggtcactgatgtaactgatgaaggaaaatggcattgctttctttaataaataaaactgagatctaaggttgacaatgaa

SEQ ID NO: 6829 - DNA, 201 bp, Bos taurus
ctcaggactccataggccttactccactgtcttccagcactgagagaaactctaataaagccagaggcagccagcctttttctccttctatgggacttgcgtgttcagcctgatcgccataggccgccttcttgcatttacgcactcaatcagcaatttctaatggggtgtgttctacgtactgggcacggtactagtgct

SEQ ID NO: 6830 - DNA, 201 bp, Bos taurus
tctccaccaacacagaacttatcccaaaggcaaactttaaaatctttcttacctacttgacctcaatggagtccatcaagttgcttaggactttgaaccccaaagctgaatgatttttatgacgtttattaataggaaaatccacaacatgggctactgagaatagttttacagcagggtggagttcccctgaacatagcc

SEQ ID NO: 6831 - DNA, 201 bp, Bos taurus
ccccgaatacaggagccactgcaggcctgatgtgcttcgatactgagggctttgtgggtctctttccacagtctgcctctacatcaacaagcaagccaatgcagggccgtacctggagaggaggaaggtgcagcagctccctgagcacttcgggcctgagcggccgtcagcagtcctgcagcaggctgtgcaagcatgcat

SEQ ID NO: 6832 - DNA, 201 bp, Bos taurus
gtcttgtagaaataagtttaggacgattatataaccattgaataagaacaggattggttttactgccaggactgttttctggagctacctgtaattcttatatgtttgtcaaaatatgtacctgttgatgaaaatgtttgagtttactaattttttcaagaaatgcttttaggggaaataactcttaactaacaaggtgat

SEQ ID NO: 6833 - DNA, 201 bp, Bos taurus
ctgtctttgtgggggaccatgattagccaaccataggaagatttgtcattcatctgtgataggaaatgcaaatatttgattggccaaaaaagttgttcggattttcctgttaagctgttatcagatcagatcagtcgctcagtcgtgtccgactctttgcgaccccatgaatcgcagcacgccaggcctccctgtccatca

SEQ ID NO: 6834 - DNA, 201 bp, Bos taurus
cgagccagggatggcgccagggcggtggcctgtggttttccttctagagaggacagggcaagctgggagctgcaggtgtcaagagaaacgctatcagtgccggccagggaggactgtcaaatgaaaacccagtgaccaatttgtcataatggagggtaatctagtgattaagaaaaacacatgctttgtcttcttgcaact

SEQ ID NO: 6835 - DNA, 201 bp, Bos taurus
gctttcacagggcccatctggaacaggtcaaggcaagttgcaactaataattggatcttggaaagaaaaaaggattttgtttctcctctcttaaaagatgacgtggccacttgataacaaagtgacctttagcaagttgctcaactgtgtaagtcctgttttgttgttttttcaagaggaaatcaggtaaagcttggacaa

SEQ ID NO: 6836 - DNA, 201 bp, Bos taurus
tattctggggcagagtgaaggtttacctgactccgggagcccacctttgtgggttattacctggtttagttcatattccttccagtgtaccttgtcctcctctccttttttccctttaattcatgcaaactaacctgacccaaatttgttatttttcatttaagtgctgtttgcaaagtgagcatctgtaagccagctacc

SEQ ID NO: 6837 - DNA, 201 bp, Bos taurus
aagtgaaatcagtcagatagagaaaggcatatactgtatgatatcacattatgtggagcctgaaaaataaaacaagctaataactgtaacaaaaaagaaactcacagacatagaaaatatactagtggttaccagtggggagaggaaaggcaggaggaacaagataggggtagaggattaagaggtacaaactaccatgta

SEQ ID NO: 6838 - DNA, 201 bp, Bos taurus
gactaagtcacagtttgtgtgcccaagcatctcacaggccagaaaacacatgattagatgaacagactataataaggtcagtgcaacgagagctggacctgcagagctctgggccctttatctgccttgagggatgacgagctagagaaggatctctggagaaggtagtgtgtgagttgaatcttaaaggacaagcagtac

SEQ ID NO: 6839 - DNA, 201 bp, Bos taurus
atcatttctttttagatcccacatataacggatgtcatataatatttctcctctttggtcttacttattacactcaatatgacaatctcttgttgttgttgttcagtcactaagtcatgttcgacttggtgacaccatgaattgcaacacgtcaggcttccctgtccttcactgtcttccagagtttggtcaaactcacat

SEQ ID NO: 6840 - DNA, 201 bp, Bos taurus
actcagtcgtgtctgactcttagcgaccccgtggactgcagcctaccagactcctccatccatggattttccaggcaggagtactggagtggggtgccatcgccttctccaagtaagttgctattggttatcaaaggagtataataattctgtccatttaactcccaaaggtttcttgccaataaccaaaagggtttacaa

SEQ ID NO: 6841 - DNA, 201 bp, Bos taurus
acacactctccgatgatggcacagtggcactccgaggtgagggctccgtagccaggcctgcgggagtcctggggcccgcgctgacagctctgatgtgggtacagtcgtcccacccttgagagaccagacagagtgtgaaccatattgtgaaacagaagcacatgcaatgtcgggaaagctgatttcggcacagtatattta

SEQ ID NO: 6842 - DNA, 201 bp, Bos taurus
tcaagtgtttggcatggagtataacctcattctcaatttgactacttataggtatctacagactcagtttcctctactgtcattgtaagactgctccacgtgcttgtctgttttgaaaacacacacacaggaaaagcgtcttgccattccattgtgaccagtcccttactcatctctgtggctttgtccatgcttttttct

SEQ ID NO: 6843 - DNA, 201 bp, Bos taurus
aaaatagttgggcaggtgccaaaaagctacacaggcagcacgtgtgcaggaccataactagtgtggttctttcatgaagaacatcttgctctcatgacctgaaggaaatcccaaagacagattcagactccacttatttgattgagatgattcggtattgcttgtggagaatccttgcacttagaattttgtcctggcaaa

SEQ ID NO: 6844 - DNA, 201 bp, Bos taurus
aattattgtattgtctgtggatattgatttcaaatagaaaattgtttgagaatttgattattcatctggcttactatatagtctggcaacttttttcttcgtctatccttatctatctcctaaggtatattctgtctactgattacataattaaagaaagtgttgtgagcactttggaagacacttaagagtaatgatact

SEQ ID NO: 6845 - DNA, 201 bp, Bos taurus
tggaatggtggtcgtggggtgaagaatgaggtaagaggcagattccggccttcccctaccccgcccccacactccagcccaccggatcttgggccagtgggtgagttggggggctcaaggaacaaactgtgggctgtctcctgcatggctccagagtcctctccagggccacccactggctgaattgaggccttgagacag

SEQ ID NO: 6846 - DNA, 201 bp, Bos taurus
catggatggatgtcagtgtcatgccggccagagagttcacattgggagtacctaagtttactctccggtttatctatttatgtcagatttgttcagccttcatcagctggccactggctttcctcctggccacctgaataaccctcagagctttgctttacctgtttctgagatgcccatctccctgacagcatcattgct

SEQ ID NO: 6847 - DNA, 201 bp, Bos taurus
tactggtgttgactattgagtcactctctgcaaagatcagtgggtcataggcaatgagaaaactgaaactttactctgagaaggctgctcatgaatgatacctcagtcaaagcagaacacaaatgaatgcatccaggagtgtgtggatgagcaatgtctgtggggacacggatcctcagaatctaccctaagtcatgacag

SEQ ID NO: 6848 - DNA, 201 bp, Bos taurus
tagattaagaaacattaatttgaagatattccagggtacttaaatatgatccaaatcatcacagactttcaatatttttattttatagccctatttggcataatacatattttttccatgttgtccagttgtcaggatttaaccatgaaaataaaagtatcatattgtattggcttggagtgtttccaagaaagttgacat

SEQ ID NO: 6849 - DNA, 201 bp, Bos taurus
ctgtatactcttcgagctatttcacatcaaaatgtagctacacatcaaggagcaaagctatagggtagtcattgtagctagaatttatatattacggtcatttttgctctttgctcttttctagcagaagttccagattttctttaatttataactttccctaattaactcaggactttctctaattattatatttagtct

SEQ ID NO: 6850 - DNA, 201 bp, Bos taurus
tagcttttaatagggaggcctgggcaacttctgcagattcagggcttacagttatatctaaggattcaacatttgaacttaaccctgtcaagttagggtccagtatttccccaacattggccctaaatttgccttggcaaacctgttttggttttaaccttatctggaccttagccattcagactattaaattcttggcct

SEQ ID NO: 6851 - DNA, 201 bp, Bos taurus
atcttaaatatttactctgtaagtaattgtaatttcgtgtgcccataagaggaggtgagttcagggtcttgtattccaccattttggccaaaacaaacacgttgatatgttattgaaattgccttaccttttgatttgtttatatatacttagtatattttggtagaggcatattaaatatattaattaaaattatggatt

SEQ ID NO: 6852 - DNA, 201 bp, Bos taurus
ttcattggaaggactggtgctgaagctgaagcttcaatactttggccacctgatgcaaagagctgacacactggaaaagaccctgaggctgggaaatattgaaggcaagcagagaaagggccaacagaatatgagatgattggatggcatcactgactcaatggacatgagtttgagcaaagtcagggagatagagaagga

SEQ ID NO: 6853 - DNA, 201 bp, Bos taurus
caatttaaatgtcaactatatttactatctctaacaagctgatctccttgctctcacttcctgttttgtcataatactttttacgtgacatttttagcacttaacatactgccttgtaatttactttcaataccagattttaaatatttgaagaataggaaatgttttactcacatttgattcttctttggccaataaagg

SEQ ID NO: 6854 - DNA, 201 bp, Bos taurus
ccttgaactgtctttgtcgccatcaagtttaaaacagacacatgttctacagaagaggattagaataaattttgaggtcttcctactctcttcatgccataatcctatagtagacaagacttccaccaccattaccagagcagtaccaccaccacacattaatcatctaacttaaatgattctaaaagaagaaactgaggt

SEQ ID NO: 6855 - DNA, 201 bp, Bos taurus
actttattagtttcacagccaatgggagggagaaaaatccatcattttcttaaacattttcctttagttgaaggaaatccttccattaagagctgtcaacacggagccacacagtgtcgttaagccacacagagggttaaaacaaaagcacagtgcaggttcctaatatctacagctgcttcacccctgccctcccactgt

SEQ ID NO: 6856 - DNA, 201 bp, Bos taurus
tcactttgggagttagggctttagtttatgaaacttcggaatacataattgcatccataatgtggaaataactgctccagatattggtgtacaggtttttgtgcgaatgtaagttttcatttctctgggataaatatccaagaatgcaattactcagtcatattataattacttgtttagttttctaagaaactacagtaa

SEQ ID NO: 6857 - DNA, 201 bp, Bos taurus
cattattctatacctaccattaatttcaaacttctccccataaatgtatgctttatcaagataaattgctattttataatattcatttggcttttcagtggttccatggagcagtcacactttttcttacattatttcctcaattcagattatcccttctgcattctttcctaatatcagagatgcagtattcttttgaat

SEQ ID NO: 6858 - DNA, 201 bp, Bos taurus
cacagctattatttttagactgctccagcgtcctctaacgggtgatgggaaaggctggcatgatgttgggagaggtgtgctctttgggaggcagaaatgaaatttgagtctatcaggtccacttaggtagccttgtgttttattgtggtggttatttttttaatagctcctgtgaaagagtttagtgaaagaaatcattac

SEQ ID NO: 6859 - DNA, 201 bp, Bos taurus
ctgctgctgggcctgctccaaatagttttgtctcttcacagaaagtgttcagtcctgcttatggcatggcagaagagttgctgacattgtcctcaaaagtgcaacttactagcttggcctgggggcaagattggatcaccgagctcctgggggtcatgttaaaagcatttgcaaaaggagattccacttagacatttttaa

SEQ ID NO: 6860 - DNA, 201 bp, Bos taurus
ctggtcctaatgcgaacctcccctgtatctcctgggcttaccagccctctgtgacctctgccaggcctcagtgcctgtggccttttgcctcaaatcccaccgatgccctctgtttcacctcattgcttttagttcccttgtgctgccggcacttccaggccttggcccagttggtctccatgcttgaaaggctttcggggc

SEQ ID NO: 6861 - DNA, 201 bp, Bos taurus
agggccccaagtaccttaggactgttaggacatccctgggggataagcttataggggaggtcagactcccctctggttaggtgatgggagggagtggaggcgatgggaggagctgggcccctggagagagctgtgtgtgtgtgcgtacatgtgagtgtgcatgtgcgtgcatgtgtgtgtgtgtatgtatggaatcatgac

SEQ ID NO: 6862 - DNA, 201 bp, Bos taurus
gagccaaaacaaaaggtatgactttatcatgattgccattaaatattgttttggttcgtggaaaaatttccttcctctttggataaagaccaaccaaaaatccactccatcaagaacctatgtgtatcagtattatctgtattatttaagggcctgctttcaaggatactcttcagggagagcttagagggctattgcaac

SEQ ID NO: 6863 - DNA, 201 bp, Bos taurus
tgcagtaacaaatgtccattttatggccactgtcagactatatattgtacaatgccccaagattatcagcaatctagacgtaaattatcacaaccctaagaccatgaaacacaagacacatatataatctcccttagtccatgtattgaaatgtttgaattgaaagcttgggctatcaattcaggcagaaaatgtcgtttc

SEQ ID NO: 6864 - DNA, 201 bp, Bos taurus
gcatagtattactatatttccatcattgattatattctctctgagcacatggatattgtcagggatcaagagaagaaaggcctcctcctgggaaagacctttccccagcatccacaccctgtgatcattgtccccagagcagccctcaggggtgtggcccaggaaagggttgttactcagagtcaagaaattaagagaact

SEQ ID NO: 6865 - DNA, 201 bp, Bos taurus
gctaattaggtgtgtgaaaggctacttggcatctgctattgactggacccagcaaaagtgatcactaggctggatgatcaataagggatcgataacaagcatgtgattggattagccatttgatcaatgctgtgtgctaatatattaacaagcaaattacccacagcacttaagagcagaatgctgactctgattgcatta

SEQ ID NO: 6866 - DNA, 201 bp, Bos taurus
gataacagtacatgccccgggcaggtcagcaggaagctctgctccttgtagttagttaggaaccttgacctcagttttctctggcaaatgagagggagaccgtgggtttagcacagcagttcttaaatgcctcagcatgcaagtctcacagtgtacttcgttcagatttaatgggtgcaactagtcagctggcctcaccta

SEQ ID NO: 6867 - DNA, 201 bp, Bos taurus
attatgaaaactagattcagatagtgtctttgagttctatacaatacataaagtcacaggtattttctagatggcaaagaaagataacaaaaactacaaaggatgttgataggctgaatccaggtgatggtattatacccacctatattttaaaagaaaatatcaggaaattgggagttatgcaggtatctataattatac

SEQ ID NO: 6868 - DNA, 201 bp, Bos taurus
tcatgtaaacacagaccttttatcacaaaggagctcttaggactaagttgctacagaagcatacttcggcaaatgatgctctgaggccttcttcaaggaaaatcagctccatgatgtaggagaaagatgctcacacagaaaaaatggaagtcaaccaagagacatgccaagtaaaagaagctcaaaaaacatgatcaggcc

SEQ ID NO: 6869 - DNA, 201 bp, Bos taurus
actaacgctaccttcccaagatcttgcaggccttcaagatcatccataacaccaccatgaaaccctcctttaccaagaagcagctcccttttccccatgacggccttcgccccccagtcaaggtctgcccctcctgctctttgttgtgtagatctgcatagggtcaccctggatgtgtgggaggaaattcctagaagacag

SEQ ID NO: 6870 - DNA, 201 bp, Bos taurus
aagcctttctcaaagagctatgttttattttcatgatatcccatctaggaacaatatctcatctactaatatctgggttcttaaaaatatgttttttcctgtgaaaatccaatccttttttaaaatttttagatggagtcagttatcctattaagactaaaattaaaaaaaatttctactgaggttaccttgtagccagag

SEQ ID NO: 6871 - DNA, 201 bp, Bos taurus
aggatcccccgtccctgggattctccaggcaagaacactggagtggattgccatttccttctcctccatcagagtctagtcagtaaataaactttccctagagtagggccttaggaagttgcagctcctgctgtatgctccgtataggcaggacctcatctcttgtgcattcttctgctaaaattcatggctcacctcaag

SEQ ID NO: 6872 - DNA, 201 bp, Bos taurus
aacatgcaaaataaatattaaattcatatttatgtttaaagactggttctggagtcttttcaatgcacattattgacagaatattttgtgtatcaacactgtatcagcttacttagctatatttaaaatatccttcatatttcagaagtttattatttcaaaataaaatatctcaggggcctctttcattttgactgcagt

SEQ ID NO: 6873 - DNA, 201 bp, Bos taurus
ctgacctcagtagaagcagtaagttataaagggccgaacagaaaagccaagatgtcccttctgagagcttccatatccgcctatgtgataaaaaaggaggtgatggagggctggcctgctaggaaaagaataatctttcatgttcatggagtgtcaaggtcaacctttctattcctgtccagcagattgtacaaaaagaat

SEQ ID NO: 6874 - DNA, 201 bp, Bos taurus
catagatacttattttttctcattaaaattatcttttaaaaaaagttagattttccttgaggtgtcggagcatatatgctttctgaccccgataagaaaaggaacctccccaattctcctatggacctaaaacctgaattcctgaggctaagattctaagcccttctctaactcacctgttgaagcctctaccccaaatcc

SEQ ID NO: 6875 - DNA, 201 bp, Bos taurus
cattggccttatagaggtcccctgtaatgagaaagggaagaaaaatagactgggaaagaaaagccccagactacagttagctgagagtcttttccaggctgatggggagccccatagcaaaggtttcctgtcaagggagaccctggacttatttctattgctgtactctgtcatcagctgggagcagcccaggaagaatat

SEQ ID NO: 6876 - DNA, 201 bp, Bos taurus
tcccttctccaggggatcttcccaaccctggaatcgaacccaggtctcctgcattgcatgaagattctttaccagctgagccacaaggaaagcccaatgacgagtaagagtggataattaagattcatagaagaaactaatcatgttataaacctattattttgaagagccttatcctatcatatcctttaccttaaagca

SEQ ID NO: 6877 - DNA, 201 bp, Bos taurus
tattaagtcctctgcccctctgtatattctagaaactgcaatagctataaggggtgtaggaaagggtcagagaaaggcagaaacaaagcatgcaggataggttggttctatgatctctccaaggcttaggggcagatcttcctgatatgactatggtaaaatttctggttcacatatgcccttcagaactttgccattctt

SEQ ID NO: 6878 - DNA, 201 bp, Bos taurus
aaaactttatgaggaacattaaggaaggaaatgagttgtgttcagctaattaattgattctgctatttctgccttcttgtagtggaaatatgaaaaagccggtggtgtagatctcataagttaaggaagagttgactatggggatattgactaaataataaaaatataggatatagaaaaagggagagagtcataaaggtg

SEQ ID NO: 6879 - DNA, 201 bp, Bos taurus
aggaggttgcttgctttccgagtggaatttatgtaacacagataactgccaggaactaaactgagcccacaaaagttactgaaggtgtgagattagatccaggcctggtggaagggggtggcagacgagaccccagaggggattccgagggagcggagcagtgctgaggcggcgcgcagggtccgctccccggcgggcaag

SEQ ID NO: 6880 - DNA, 201 bp, Bos taurus
tatactaattctcaatggcatcatcagcaagatggctgatagctctgtggttcttgtagcatctattgccggaattctaacaaatcttcaggttttaatatatgttcatatgtttatgtatttcttcaaatggcaattttagaacattaacttgaaatatttaaatataaaagctgataaaggcaacttgactatttcaga

SEQ ID NO: 6881 - DNA, 201 bp, Bos taurus
tcttgcctggagaatcccagggacgggagagcctggtgggctgccatccatggggtcacacagagttggacatgactgaagtgacttagcgtagcatagggaaggaaatctttaaagaaatatattctcaaaagtataatggagactctttggatgaaaaagaagaaagactcaaggatatattcctgtaacagtaaaatg

SEQ ID NO: 6882 - DNA, 201 bp, Bos taurus
gtagcttgcaggatgttagttctctgaacctgagtccttggcaatgagagcatggagtcttaaccactggcccaccaaggaattcccaaaatttctttggcggtctactcactctgacctcatttccagctgcctcagaagtgtcctttattctgttcaagatgtttaccttagttataatatccttcccactaaccccag

SEQ ID NO: 6883 - DNA, 201 bp, Bos taurus
atcatcattacgctatcctattctacataccgtggcctttaatagtggatgtcattcaactttccacacaaggtctagggtatgggcctgtgatcacatagagctgtgggctgaacctataggaagaaaggcagtaactgctgctgtgtcattgcttccggccacatttaaactcagttaaaatttgtttcttcacttcga

SEQ ID NO: 6884 - DNA, 201 bp, Bos taurus
tatacaaacaggaacctcttacactgggatattttttaaaaaatctaaattgtgttaaagtacactttaaggttattcacatattttccaataaaaactacgatggagctgcttcaagcacaataacaataaatagcaaaaagaaacttttaaaaatcctattcgtcctgcagcctcctgccagagtctcacacaatagca

SEQ ID NO: 6885 - DNA, 201 bp, Bos taurus
ggtggagaagaaaaggcctggctttctagggaaatcttgtgcttaccaaatcctgaaggcatgcaataagaagggcttgtaccctcatgaatagagggcagttttgactgttacaaggcctgtgcttcttcaggaaaagggggtggggttaagcaagcataagatcattacaactggctaagaaaggggatattctaaaaa

SEQ ID NO: 6886 - DNA, 201 bp, Bos taurus
gtagaaggtagcaattggagttgagtcatcctgctgttttctctcagctggtagcatatgtctagcttcctcaggagcaagcctctacttcttttgctcaactacttctacatacaaataaaaaaaccattttggttgtaattagtgcttgccaagttttgccccagtcatttttggcacttctgataaccattgtttcaa

SEQ ID NO: 6887 - DNA, 201 bp, Bos taurus
agtatataaatataaatgtatattttctcttgaagtgcttatttatttcacgtctagtgaaactaagcatatgttgtttattgaacatttgtagttcttcatgtattactaatcaaattctcttaatcatatgagtagtcaatggacaattttattcctacttgtactattaaagcttagtagatacaattacagtgtaat

SEQ ID NO: 6888 - DNA, 201 bp, Bos taurus
agaacccaaggtccagagagagtattgccaagggtgcaaggttccatatgtctatccaaaagatcatttgttctgcaaaataactttggtatttgttcctgtaagtataaattacaagcttgaatctctagttttttttaagagatttcttttaatatcctataaatgctgggaaagattgagggcagaaagagaaggggg

SEQ ID NO: 6889 - DNA, 201 bp, Bos taurus
agattttagaaacgtttagtatcaccagtcacagagttgctgagcatgagtgttgcagagcagcagaaagaagtagaatacttcttagcttccgtggtggttacttatgtcaatagttgtgtggagcgcttgccccacggtggccctctgatgccaaaacagttcacgtaataaaaattcttaaaaacttcctaagttaaa

SEQ ID NO: 6890 - DNA, 201 bp, Bos taurus
gcttctaccattgttaaggtaagccagtctcttgtggtcaaatctggaatgtgttctcatttcccttgtgctttggcacctgtgtgacatcgcattctcttttttcttctcatcccttcctcagcgataactgcttcttcctacatacacattttcccttcttctccccactggtaagatctggcccttcacctgctctgt

SEQ ID NO: 6891 - DNA, 201 bp, Bos taurus
gtttaactttgtccagtaatatttttgctttggtagttcaaatattttggataggtcacaactatcaactccatggccagaagtcaaatcaaccaaacactagagaattagtgcatcagcttaacgaaagtggaataatcaatcaatactaatggacatataaaggagaggaaaccagtccaggccaaccattactgtctc

SEQ ID NO: 6892 - DNA, 201 bp, Bos taurus
gaggaaacagctgtgcaaagaaaggccctgaggtgagcatatgccaggcatatctgagaaacaacagaggtcaatgtgatggggatggaagggcaagagttatgggaaagaggcctgagggtgtagaaccaggtaaactaaaagacactggctttcactctgaatgaaagtggaaatcatcagagaatgctgagcagaagc

SEQ ID NO: 6893 - DNA, 201 bp, Bos taurus
ctgctgcatctaccactgcaatgttcatttggtgtatgtgtgtttgtgtgttcatgctggagtatccaccttctctggggggaggggacggtgtgatgggataagatggggagggaaaaggccaagacattatgtcttcattgcagcttacgaaaaagataggaacatccacccagttggtctctatggacttacctgtag

SEQ ID NO: 6894 - DNA, 201 bp, Bos taurus
aagtccaaatcaaggggaaaactgaagaaaagagggaaacaatcatataaaaatgaattaatttgcttcctctgtctaaaatgtggtaaaacttgaattggtatgcaaaatagacttatgaatagtatttgatggatagaaaatgtgcatctgaattctttcccagatttttctctgataatatagaaggaaactaataat

SEQ ID NO: 6895 - DNA, 201 bp, Bos taurus
gactgaagtgacttagcagtagcagcagcatgggacaatataaagtgtgccaatctatgcataacaggatctcagaagagaaaaggggactgaaaacaacggaagaaattatggctgaaaatctcccaaatctaaggaaacagatatccaggtaaaggaagcacagaagctcccctccaaaaaagatgaacccaaacaaac

SEQ ID NO: 6896 - DNA, 201 bp, Bos taurus
ttttcataatttcaaaattatttaaaagttatttaaaaatgttctttactgagcatgaaagaaaatatacatatatatatatatccaattaaatattaaacttcagcatcttaagtcaagattaattatattaattgccactaattaatataatttaatgtagacttattaaatattaattggtgttgttagtttgcttcc

SEQ ID NO: 6897 - DNA, 201 bp, Bos taurus
tatatgtcagtgcccatcttccaatttattcctcccctccctttacccctgttaccataagtttgttttctacacctgtggttctacttctgttttgtaaataagttcatctgtacttaaaaaaaaatgattccaggggtaagcaatagcacacactgctaaatatataaaatagatagctaataaggacttactgcatag

SEQ ID NO: 6898 - DNA, 201 bp, Bos taurus
cacagagagctgagaaaaactgactgcgagaagtgttagcagagagtagccacagcaggaggactgggtgtcacgctgagtggaggcagtcagggaaggggggcctcctggaggaggtcatgtttgaactgaagataaggagaggggacactaggtgcaaagggccaggacagaaacaagcatcgcatattcaaggagcac

SEQ ID NO: 6899 - DNA, 201 bp, Bos taurus
acatttatacatttctcacagcaaaatatgtttatactgaataactgaaattcagtacaaaatggtagcttcagaaaatcctgtattttgctaataaactgaataacgaatttcattattcaggtagaaaaacatatggtccttttatgaaaaaagtgtagcaaagacattaaaaagtaactatgttaataccatgttgat

SEQ ID NO: 6900 - DNA, 201 bp, Bos taurus
atcaccaaggaagtccttcataactgcttaatgctgacagatcatcctctgactcctcataatgattagcaggaaattcatttgggtaacactgactttttatggttcactgatggttcatatttaaaatgtgacaatggcaaatattatgctggatatgctattacaactccttttgatgttattggagcagcaccttta

SEQ ID NO: 6901 - DNA, 201 bp, Bos taurus
ctaattgaagggtgagtttggtgttattaagcttatacatttatatgttttgttgtttttaaagtttgagccttcaaccaattgactagggtaggctttcaaaagacttaagaggcctttgtttgttgaacaaatactttatattcaccactggaaaataggttaagcctgctgtgtcaattagcttaattgatgagaact

SEQ ID NO: 6902 - DNA, 201 bp, Bos taurus
ggactgagtggagccagagcattggcttggtctgggctggggcacatggtgagatgctcttaggacacctggcattcaccagagcagacttttctccactcggccttggggccaagtcgcctttgtctctcatggttcttcactgacctcagcctctcctgctttccctctgtgttaaactgccctgcaggggagtatgag

SEQ ID NO: 6903 - DNA, 201 bp, Bos taurus
ttgcctgtgattcaaaggtaaatgattttagggatagaattgggaaaatgcctgaaagaataaaggagagaaagagaactccaaaaatggcactggaagtgtcagggagaaaagaattgccactgaggagccctctaggtaagctgtcgttccacatacttttgtgaagatgggcatatctatagggatcggctacctcta

SEQ ID NO: 6904 - DNA, 201 bp, Bos taurus
aagatgacttttaaatttcaggcccaggtaaccacatggaagctaaatattgtcagtctgaatcatagctgtttccaaggccaaataacagagagaacacgggtttattggggcattcaaaatatgctactgtgtatgtgaggactattggccaaccactgtgtttatctcaatgcaaatcaggtatctcatagaagtgat

SEQ ID NO: 6905 - DNA, 201 bp, Bos taurus
tggataaaatgcttttcagacaccttagaaactgtttttacctacaaattataccaaatacaaatgataccagacttataaacaggcttttcttaaagtataccttaaatagaaacaaagtaattgtttccatattcctagatatttcatcaaaattctcttttacctcaaatttttaaaaaaagttactttgataaatta

SEQ ID NO: 6906 - DNA, 201 bp, Bos taurus
tacagagagtcaattgtttagagctctttgtaatctgaatctattcctatctgtatcattataaatttttttatttgaaatagagttagtgaatagatatactttgcttgtatggcctctattatctatcaaattaagggccttaaggcacaaaattacaaagtaaaaatgattatttgcagactagcttctccctagaat

SEQ ID NO: 6907 - DNA, 201 bp, Bos taurus
catgcttaagcagatctcatgttttcttaacaacagaacaagcaaaatcaaactatacagcatatacattattccatatcaatttgtatactcagttattcgggggctagaaaataaaatttacttggtagtagcaatgcccttgtattctaaaccaagtcaatggtagatatgtagtaacttaacaaatgtatacatgta

SEQ ID NO: 6908 - DNA, 201 bp, Bos taurus
aaatgggtaaaatataaaagtctgattattctttgtcttgtcaaggatgggaaacaacttgagctctcatactaccgaagagaatgaatttagtcccacctctttagaaaacaattttggattttcttaaattgtcatacattcatcaactagataaaccagtcattctattcctaggaacatattcaagataaatgaaag

SEQ ID NO: 6909 - DNA, 201 bp, Bos taurus
ttgtttcgatgttaatacatctgactgtgattccattttaaaacaatgatagtacacatttaaggactatatcattggtgaagaaggtgaaggagagttcaaagtcaaaccatatataatccttcttccagacttctcatcatgtaagataaacatttatatcatataaatatttgaaattatttgaaatttctgtaattc

SEQ ID NO: 6910 - DNA, 201 bp, Bos taurus
ttggcaggcactcgtggaagatgatgaagcctgcaagaacagagcatctttccagatttttggaacaactgtccggagatgtcaatggccatcctttccttattcctgttttggacaggggcgccacagagatacactgaccagtctccccgagtctgtggatgcctcgtgcctcctcttcgtgttcctccaagtctcatg

SEQ ID NO: 6911 - DNA, 201 bp, Bos taurus
gtcggatacgagtgagcaactgaactgactgactgaggttattttgagttaggaaatatctcaagagaagtataaaaaatatgctttgagcaaaattgagttatgagctgggccaaatattggtaataagttgagtgatacaagggcttgagtaacagctggattgtgaaggcttttatgttcttaaaaagaatagtttca

SEQ ID NO: 6912 - DNA, 201 bp, Bos taurus
ctatatgttatccctcaggaaaatttctgattagaattcagtcctatgcacattaatatcaggttgggatgccaagaatggtgactgtcagtgttccagtttctcaaaaaagcaaaatggcataatccactttaaagtagtgacttgcctgttgacttaaatctaagtctcccatgtgtttgcaattgggaatcagttcac

SEQ ID NO: 6913 - DNA, 201 bp, Bos taurus
attcaaaaaggccatttttgtttgtggatttcagattccttgaattcttggaaagcaaaacagaagaatcctgactaaaggctttctggtaagtacctacgaaaagctatgattcctatacctaacaggatgaagagagactaggataagcctctctggtgttgctgagtagataaaaggtagaggccatctgtcatcaaa

SEQ ID NO: 6914 - DNA, 201 bp, Bos taurus
aatactaagatcacattttttctgtaatgcacttctaaactctaaatcctcttagttctcatagacccttatctctgtgcaagataatttacattgagaatgttggccgtaatccatagtagtaaagggagtctctgccatggtttatgcagtacctttgaccttgaagaaatctcaaggatattcctaaaactggaattt

SEQ ID NO: 6915 - DNA, 201 bp, Bos taurus
gaaataatgaacacacatctaggattatggcactggctcttgaactatctgtatcagcatttctacttaagaacaaagaagatggccagaaaagtcaaaatgcaatattgtacactcctggagtcagagagttgggcacctatgctttgtccctgataaagtctaataataaaggttgttgttcactgaatttctatgcaa

SEQ ID NO: 6916 - DNA, 201 bp, Bos taurus
gcactatttaccaaactttgctctaaatgttcagataaggagatatatttgtttatacacagtcagaggaaggtccctaacagattccaggcatctgcatgtaaatacagggttatgcacacaaatagggactggttgatgaaatgtgagtgaaccaggacaaagccttggaactattatggaagcaatgaaagcaacgtt

SEQ ID NO: 6917 - DNA, 201 bp, Bos taurus
tatattgtaattttctacctagatggccatctctttttgaagacttttctaatcttcttccactctcctctcttcctccttcttcacaagtgcatagacacactggccaggcaggcattcaacgtacatcagctttgctgtatgcacctcatgggattataggttactacaaagtaatggcttttccttatgttcttcaca

SEQ ID NO: 6918 - DNA, 201 bp, Bos taurus
aacacatttgtgtactctttagaacatggcaattctagattatctaaaacaagaatattcttggttttgattttgaatagatcatatatttaaagaaaagcgttattctttaagaatatgaaggggactattttctttagagtttggtcttggaaaattgccctacattgaaagttttgtcatgatttataatttagtact

SEQ ID NO: 6919 - DNA, 201 bp, Bos taurus
attacagaccctcagggtacctctatatttcccttcaaaacacgtaatttgagcaagtatccacaatttaggacttacatataacaacccctccatcttataatgcctattaagtctttataccttttcttagtggatcctgtgatttaatcagaaatttttccagtgttcttttcctttgagtgcagtgaaggctgtctt

SEQ ID NO: 6920 - DNA, 201 bp, Bos taurus
ccattatgatttatcacaggatattgaatatagttccctgtgctacacactaggactttgttgcttatccatttggagtttgtagttattggccaacctttacacattagatttttattagcatatctgtttatttgttactataacatcaattaaaatatgtaattttatttcatatatccttatttttctgggggccaa

SEQ ID NO: 6921 - DNA, 201 bp, Bos taurus
ctctgaatcaggcaggggaacagttgacctttcatggagggcaacaagccctggtctctttattcttgacaaaattacgcagcaggccatgttcatgttcctgttccgtgttcagaaatccctggagaaagttctgcttcgacaccctgataagagcagctaacagctcagtcttcactgaggggacagggagccggaccc

SEQ ID NO: 6922 - DNA, 201 bp, Bos taurus
aatacctataaaaagagatgggaccaagtatttatcaaacaaattcagttttatgtgaaaatactttataaaggagtttttattgaattttataaaatactcaacagtgacataaacctgaactcaaatactgaaagataccacagatttacaataccttaattcagaatttgtaattaattatacctaagctagataaaa

SEQ ID NO: 6923 - DNA, 201 bp, Bos taurus
ggtttatactttgtttatctgataaggcctgactttccattgagagaacaaaaactaacagtatattctgtgtcttttttgtagcctccattatcaacttacttctatgaatggatggcacattgactttttcactaataaaacattacatgtggaaaggcagttcttcaataataacatatgttgtcttgttgtgttgga

SEQ ID NO: 6924 - DNA, 201 bp, Bos taurus
gccaaacccctacctactccagtgaagttacaagcaatgagggaaatacttgtcatgtttcgtctatagacatattttttattgttatggctgaacatggctatctttatacaaatggctttcatatcatttataagtaaaaggagaagcatatgttttttatcatctattagttttagctatttacaaaaactcccactg

SEQ ID NO: 6925 - DNA, 201 bp, Bos taurus
atttcagtgagtttttgctttcactaacaggacaactgcatgcatccatctggtgataacaatattagagaacacatagagagttctgaaggccaaatattccaagtcccaagagaagttccacccagctcaaagcaggcaagagagtctgagtatagtctgtggtgcctggactaagatgcagagatgggcccctagggg

SEQ ID NO: 6926 - DNA, 201 bp, Bos taurus
gtttttctaatttgatacaataatctaaactagtaacactgtgtgtacttggatgatcaacctgagtctgtctccatctgtttgtctgtctcttttgttttcctcttaattttaaactacataatattttgaaattgttatatattcatagcttcaaagtaaagtattacagattagattagttgaccagagaaccacttt

SEQ ID NO: 6927 - DNA, 201 bp, Bos taurus
tctggaaggaggattaagacctacagtaaataatttaaattgatcatctacaacttgatgtcaaagtatagattttaaagaactagtctgtacttcagcaatttttttttttagaggcactgaggtttgttgaagttttttttagtctttttcttagcaacagtccctccctcttcctgtggatgctaagaaccaaaaaat

SEQ ID NO: 6928 - DNA, 201 bp, Bos taurus
tacttggaccctggttatttggatggtttggattaacagtttgtgagagtatttggtgagtcattcgactttgttcaccataggagaatattttacaatctatttgcattcccttccctccatagaaccaaaatgttcttggcatgcaccattcctgggaacccaccagggcacagtacaccagtttccttgtgggaaact

SEQ ID NO: 6929 - DNA, 201 bp, Bos taurus
gttgctattccttctgttttactacttttgtggctgtgttatattatttagctttaattcctcccactgtaatttaaaccttttttttttttcttgttcattccttgatgaagatggaaaacagctggctgccaacaatcctttattttccctcaaatctttcctcgaaacaatacaaagctcactttattttcattgttc

SEQ ID NO: 6930 - DNA, 201 bp, Bos taurus
gagagggaactggccataaattgtcagcaaccaacactctctggagcttgaagaataaggaccacagtcttgaaggctggtcagatcggcacatcacaacatcttttctagttagtctgagattcggactattttcaatgaggtccctttctttttctgagagtgtcttcctggtctggttttgactcaatctcaactttg

SEQ ID NO: 6931 - DNA, 201 bp, Bos taurus
gcaaaaagtttatacctttactgttttcattttcttaatatatctcaactaatagaagaagtgcattacaatctttctgtaatttcttctcaaactactgttgaaggcatatctatacatctgtatttgtcaacctctctatccacaatgttaaatgcacacattgcacgatggttattctccctgttgagttgaaactta

SEQ ID NO: 6932 - DNA, 201 bp, Bos taurus
gaaatgatattttatttggggaactgcgacaaggcctttccagaaaggtgatatttgggcattaagagaggagggggtgtttctgacctgaaagaagagtggttaaacctcaagactgaaggaaagtaagtgactccttctcatacttctgatacatccagagaattccaggattctttacacactgtcccaaatagaaat

SEQ ID NO: 6933 - DNA, 201 bp, Bos taurus
ttctatctaaagctgcttaaaggcatttatggcgctaagtgccctaatggcgttgatgatctctgtggtgtggagtgctctgagataacaggcaggtcactttcggcaggcctgccagccaacttgggggataatctcctcaaagctcaggataagctcctgggcatcattcagttctctgcttttaggatcttcaagagt

SEQ ID NO: 6934 - DNA, 201 bp, Bos taurus
ctgctaactggctcacagctcacagctgatccttcactgggagttgccctttgcagtcagacaagttccatgtgcagggtcatgagccctcccttggggtgcttgttgacctgtgactgttatatgctgaaagacaaaggtgcatcccttttgcctaaatttttaagatcactcaagttccagagtttcttcaagaatatt

SEQ ID NO: 6935 - DNA, 201 bp, Bos taurus
tgtaaatatagaacagaaagctccagtctcgagagaaaaaaatgcaacaaaactgccactaaaattgcaggcaaatcttgtctggcatatatacacggtgactctacaatctgaatgccagatattgtaaaatgattctaagaagtataaaccaggctgtctttctttgaactttcaaatcaatgttgtttggcattagat

SEQ ID NO: 6936 - DNA, 201 bp, Bos taurus
gagcgaagcagaactacaataaatatcaaaggatatccttcaagcagaaagaaagtgatatcatatagaaacatggatcttcacaaagaaataaaaagcaatggaaatgataaatgcatgggcaaatataaaggcttttattctcattaaatatccacaaaagataattccttaaagtaaaaatagtaacagtatgttgtg

SEQ ID NO: 6937 - DNA, 201 bp, Bos taurus
tgcttttctactcggttccatttttaaataattgataggtaaaaaaagaaaagaaaggaaaatgtaataggagactagtctatgccaagttgtatgccaggtgcttttatttacatttcatctcatactcataacaaccctatgaagtagtatgattatttccaatttacaaatgggtaaactgagatttccagtggctca

SEQ ID NO: 6938 - DNA, 201 bp, Bos taurus
ggagagtctggaggcagcgaaaccaccgaggacgtaaatgggaagagattagagtgttagggataagcgtctgaattagagagaggaagaggcgaatgaaagagacccttcagaaaatggtggaaggataatgaggaagaaaaaagaaatgagcccaaaatgtctaccagattctgcccctaagagatcaatcaagaaacc

SEQ ID NO: 6939 - DNA, 201 bp, Bos taurus
aagcttctgatgctttctttctccatctttgtccccttcatcttcactggtgctcaaggggtagtcttttggcaaatcctctagttcattctgttggttcgaagccagaagattgttctccgcaacctggttcgcgctcatctcagcagcctgtctctcacatggaccaggagcagaagtttaaaggcaagacataatccg

SEQ ID NO: 6940 - DNA, 201 bp, Bos taurus
aatacatattttcttctttagcttctgtttgagtctctaggtctcaaacaggcctctaacagggcatgttgcataaagaaacctagaagtactttgatgcagattgaagtgcccaatgagccatgtcagaggtagccatgtccaacccaaccatgaggtctggacccaaactttaccctcaaagaagccagaagaagataa

SEQ ID NO: 6941 - DNA, 201 bp, Bos taurus
ccaagaaatccttgattcagaacaaaataaatgatattctgataactagcaactgcactatgaagatggaccatgaaaacatccaaaacagggggcacttgtgaggttgtaattctttgtctttgatttagttgggatttaatgtattttcacttattttgtcaaagatacatttgtgttgaagtcaaggaaaaacagtgc

SEQ ID NO: 6942 - DNA, 201 bp, Bos taurus
ggggagcaagggaaaaatagaatcaactaaaaatatgccttcagtgattgtgctgctcattagaccagcactgaaccagcactggtatggactgaataactgagactctttataagtaactgaagagctataaaaagcatagcatttaagaaaacaacaaacagctgtgtcgaatgagcaagaaaactctaaagaaagagc

SEQ ID NO: 6943 - DNA, 201 bp, Bos taurus
ctgacaggcgggtaattcgagccagagaaagggcagcgctccaggtcctttccacaaagcaattcttctcctccctcctgggagggctccagacttggcctgcttcaggcagatggatttgttgagtcatgtgagatcatttacacaaaaacacagtgaggcaatggaaattgaaaaaaaaaaaaaaaagggtgggggtag

SEQ ID NO: 6944 - DNA, 201 bp, Bos taurus
ttatgggaagttcattcaagtgttttaaagttcctagtgtaaatcatggcacatgatccatgttcaataagtgttttttgcttgactgattataaaacccctggataaaaagattagctacttttatttgggttgtttgttgtcaagatagattgtttccgatttttctcttgtcatgcgtgtcatcagttgttattgaga

SEQ ID NO: 6945 - DNA, 201 bp, Bos taurus
aaggtgagtgtagaaagccttgtaacatcccttggctcaccaggcctaagcagcaggagggtactgtactatttaggtggagagggccagctggcttatcatcaaagctcctaccttctgcagtcactgcctacagtggatattagcctccagcaacagggttacacagactccttgcttgcagcccttggtcctgtcctg

SEQ ID NO: 6946 - DNA, 201 bp, Bos taurus
cacgataacccccttcccaacagaggggacagtgcccagaagcagggcggtgggctgaaacagccacccaggccctggaggccaggcctgtggccacaatgaacggtcttcttccctttgaggacaggagggcatgaaagacaatccaaagccaaccacagcacccaggccagatctgtacctgcatttgaacagtcttgg

SEQ ID NO: 6947 - DNA, 201 bp, Bos taurus
ctctggttaattggtattttttttaaagacttctaaaacacatgcatgcaaattactgtttttccaattcttagagactcaagcaaagctttcaaaattacagcctccaagctatgtttgaagagactgggcctcccctatacagacagaatacaccctcggagccttgccaacaaaaccgggggcaaagcgtgacagaga

SEQ ID NO: 6948 - DNA, 201 bp, Bos taurus
ttgtatccagctcatttcatgtacaacaaagttaaaaaaagttaggctttttttgtttagacttctcactgtatatagtctaggttcttagtctgtgatacaggctttctaaaacatgattttgcattcaaccatggtagcatactgtccttatggataaactaatgtattaaaaataaattttctcccttaaacttcatc

SEQ ID NO: 6949 - DNA, 201 bp, Bos taurus
catggtacattttaagggaggatagaccagaatagctgtcactagaggcaagctagcaccatctgttggagaattagttcacagcataagatgagaccagctgacttcattactgtggaatttatttctccaaagtacttttcatcttccaaatttcaacacattcatgcatatccaagtacaatttaattttcatttacg

SEQ ID NO: 6950 - DNA, 201 bp, Bos taurus
ctttgtagatagatttgaactctaatgtatttttcttttccttttattttcagggtgctatttttttggagggtgtaactgttaaaggtgtaactcaagtgacaactcagccaaagttaggagaggtacagcagaagtgtcatcaattctgtggctgggaagggtaataagcattttaaattttaattaaagttttaaata

SEQ ID NO: 6951 - DNA, 201 bp, Bos taurus
caaaaggccaataataaatgaattccaggaaggcatgggcatatgtgataaagcagaaaaaaaaatcaggagtgccaatttcaacatggactcccttgatatgtatacttaggccactgagctacattttttcatatgtattgtatacacacaatcacctgttcctgcatacatctccagtctcatctcccactgctcatt

SEQ ID NO: 6952 - DNA, 201 bp, Bos taurus
actcactccaaacttctggctttgactatttgcagacacgggaagagccagcaagtggctctagaatcctcaatgctttgtcacgactcttcctggcctccgaagaatgtgttggaaactacgtgcaggattttcacagctgcatgcagtcgcttcatttccccagcatttgctagctgtcaactctcttcaaacactgca

SEQ ID NO: 6953 - DNA, 201 bp, Bos taurus
tggtgagttacctaattttagaagaaatattgttggatggcagataatgcttcagctttttatttatttttttttttttgagatcatttccacttttgaagaaagtagctgtctcctactcgtccacttgcatttcacgtgctaaaacttctttagaggaacactcaagccatgaaagtaatgttataaaatttataaagg

SEQ ID NO: 6954 - DNA, 201 bp, Bos taurus
atgggggaaagaaatagtagattctaaagtgcaaaatattttgcctctgggcaaaattctacttttggatgagcatggtgttttcatctgtcaagtcttgcactacctacagacatactatcagcactgaaagtgagaagtcattcttaaagaatcttatactactgagctgtcccatgcttcctagctgcaaaaattatt

SEQ ID NO: 6955 - DNA, 201 bp, Bos taurus
ttaacgtagactcctaagaggcacaagtccacacagtgtacacgtgcaaaatgtagctgcagaagaggcctctgtgcaactagaaaagctgattaaaaaacaaaccctctgtgcaaggactttgattctgtcattattgtaagctgcccgtcatgccctcagtcaaaggagattgaacattattgatctctggaaacttgt

SEQ ID NO: 6956 - DNA, 201 bp, Bos taurus
gaggccctttctccagtacagtcacgtgagggttagggctttgacatacggattttagtgggacagtttggtccattgcagtggcacacaaagccagtcttgttgtcaacaacagtgacataggaaacatatagagttttctagcttcctttcactacagttttttaacactttgtttcctttttcactttttcaattgca

SEQ ID NO: 6957 - DNA, 201 bp, Bos taurus
acatactatggaccaagagcctcaccagcatcactgagaggaagtccatctgttcagttacatattaccaaagccattcaggaagcaaactatatactttgatctaattcttagcaagttcacatgaagaatattaatttaaaacagcattttgaattttctctgttaaagaatgaaatgaacataaagtctcctcctatg

SEQ ID NO: 6958 - DNA, 201 bp, Bos taurus
tgaacactgaacctcaggagactgtgtctggggtttgcacgtgcatggaacatcactggtccctgacttaaattctctgaatatctcacacgcttcagagcgggacaaactgaacatcaggattttgtgatttaacattagggatttaggcctaattctcatttatcaactgctgaaatccagtctaacctagattttcaa

SEQ ID NO: 6959 - DNA, 201 bp, Bos taurus
cttctgatagcagatgacctccatgtatagctttgtgttagtgttagcccatttattatgtccatttggaaatgagactttagcactgcagtcagcaccccgatctcccttactctgctttatttggaacttaagtatggtttataaaatttgagcactggcaccgctgtaccttaagtatctagacacctggcacttggt

SEQ ID NO: 6960 - DNA, 201 bp, Bos taurus
atgacatcagctgtagtaacaaatgtggggatggagacatgaaagctgaggcagtcagaaatgttccaaataagaaaagaggcttaaatccaggtagaaggaaaacaacggaaagacgaattaagagcagcacaggatgcatgatgcagaagaaaagaatttcagttttaatccgcagaaatcgattgtaacaacatcaaa

SEQ ID NO: 6961 - DNA, 201 bp, Bos taurus
tcctgcattgcaggtggattctttacctgatgagccattggggaagacctaatttgttgcaaaataagtctggtctcaaaaaaccatggcctgataatttatgtaactataatttatcatataggctttttgctttgcagaaacttctggaaggagttgcagactgaacttaaaaaaacaaacaaacaacacctttgaggg

SEQ ID NO: 6962 - DNA, 201 bp, Bos taurus
tcacccttaaatgcctaaattatctcctatgttgacaacagctgttgggtttattttgccagaaatggggcataatttcactggaatccagaaagcattctggagagactggttttgtgtgttgctcagttgtgtccaagtctttgcaaccctctggactgtagcccagcaggctcctcagtccatgggatttcccaggca

SEQ ID NO: 6963 - DNA, 201 bp, Bos taurus
atgaatgtgccatctttggagggggcaaaccttgggaaaaatcagtttcttcccaaattcccaaccttagtggaggcagaatcaggcctaatgagcaataaagcaatgttggtggagagaaaacatccaaagaacgacttgaattagaaggtgtgttttggtggtggtggcagctggattttatggagcacatgagtgctt

SEQ ID NO: 6964 - DNA, 201 bp, Bos taurus
tagcaaaggccctaagatactagttttcattagttcaggtgtttgcctcctccagctgtttatttttgaagataaagacaatctgctgtatattttcttggctgcttcaaggtcactggctttcaagggttcagggcccccccttttttcggtatctgtccaatattaagtcctctgaggtggcctggtccctctccaacc

SEQ ID NO: 6965 - DNA, 201 bp, Bos taurus
taactggcctgaaggtgaacagcaaccaaccttcatatgtgggtacatgaggactttctgcagcaacaaggagaggtgcacaggaagtaacattccacacttttgggcctgccagtcaaaggacggaccttgagaaggaatagctaaagtgcattagctcattcttactctgtgtgtgggtgaagccaggcaagaaaaacg

SEQ ID NO: 6966 - DNA, 201 bp, Bos taurus
attcctgcaaatcgaaacctctcccctccctgaaccttgtccctttgtctgagtctttttcaaaacagatagattctaggccttcatggtgttaaatagcgctgtaaggaatttcagggggttatctccagcaatctgtcttttaggggttgcagtgcaaaggccaaaacccattactataaagtccttcttggaagacta

SEQ ID NO: 6967 - DNA, 201 bp, Bos taurus
cctgttttattaagtgtggcataaaatgataggattttatgctaataaacttaaaacaaccatctttgccatcagcatataagctttgtaatgggccacaacaaaaatggcatcagaagtttacacagagatacaaggagatacttacacaataattttaattatataccaaatttttaacaatgaatactgatggccaat

SEQ ID NO: 6968 - DNA, 201 bp, Bos taurus
aaaaaaagaaagaaaagaaatgttgctataaaaactgaattttaaccaactcttttagggccaagtatgccaatttaaaactccaagaggcccagacacatggggactctgcacccactcaattcttttttcatgatcctgtacctcatgagatgatcatgaaaaagtgtgaacagggaggatttgagaaaggcccatagg

SEQ ID NO: 6969 - DNA, 201 bp, Bos taurus
gattctccaatgtgtatctctagccaaataattctcctgcactccaaatatctacttaagctctccacttggatgtctaaaagatgtctcaaaattaacacgtttaaactgaaattctgatcttcccaacccaaacctaatctatctgttgctcattcttctgagaaaactcctctcatgctttaggcagggtgaggagaa

SEQ ID NO: 6970 - DNA, 201 bp, Bos taurus
ttacataaaatggtagtgacatataaatacagtaacttaaaaaaaaaaagttggtgttaattccctgtcctttttttctctccactcatttggaattttgaaaattcaagttaaagagtaaaaatgaaagaaatttgtatctggacatcagttttatttttaatagatttcatgttgtctacttttgtcacggagaatagg

SEQ ID NO: 6971 - DNA, 201 bp, Bos taurus
tttaaagactaaaatagtaaaagccactttctcagggaggaagggagtcctacagcagtgaacaagatcaattttcagacctcaaagcttgtttgttggattcatacttgttcatcttggattggactgagttcaaattgaggacaagaaacaactttaggggaaaaaaagcaggggggtggggagccttgaaagtatttc

SEQ ID NO: 6972 - DNA, 201 bp, Bos taurus
atctctattttacacacttatcaatgttaacacatttccctgcaacaatagcatttgattacagttcttctacatatgacctatagaagaatgtgatatatggtgtgtgtatgacttcactgttttaaaattctgaaacttcttaactttgatacatagcttgctccatgaatttcaggaaagacattgtagatgtgaatt

SEQ ID NO: 6973 - DNA, 201 bp, Bos taurus
tggcatgtggaaactttgttgtgtcgtgtggaatcttttgttgaggcaacagggactctctggttgtgctgcttagacttagttgctcagggacatgtggttcctcaacccgtatcccctgcattgcaaggtggatttcaaaccactggaccaccagggaagtccctatagtactggttttgattgttgttttttcgcaat

SEQ ID NO: 6974 - DNA, 201 bp, Bos taurus
aaaaatttgaatcattctatatctacttaaaacataaaatatgtaacaaaatattccaaaaaaatccccaaactgtgggcccagatgatttcactagtatgctcaataaaacactaagggaagaaattgtataaattctatgcaaacacattcaggaaggaccataatccaactaattatataaggccagcattactctga

SEQ ID NO: 6975 - DNA, 201 bp, Bos taurus
atacacactgccaggggtctgatttgctggcctcccggtttgtccccatgtcatatgttttttattaaggcaaaaaaaggaatcctgccaccatgggacaatgaggagagttcatcattatcctactaagtataatatcttggtattgattggacactttttagagttgtttgcttgcatgcatgctaagtcacttcagtc

SEQ ID NO: 6976 - DNA, 201 bp, Bos taurus
aatgtatttctcattcattcatgtcagttgtgggttggccagtagctctttcacatcattcttatatgagaacctggagtgattgacgttttttatctagaaggttgtcaatcatcatggccaaggggggaagagatcatagcaaatcacacactgattcttaaaggtttttgccagaaaaaggcatatatctctccactt

SEQ ID NO: 6977 - DNA, 201 bp, Bos taurus
tttatatataatcaccactgtttgtaccctgcatttcattaccaggatgtataaatacaaataatgaaggcctgtggataaataaaacttacagtctatattcacctaccaactgactgtgagatgaatattagatgttgggaggtactgcaaaggtcacactgtgaccaagcattctgggcatcctcaaaaccatcacag

SEQ ID NO: 6978 - DNA, 201 bp, Bos taurus
atactctgagaagctggatccttgttaatgtagcttgccttctgagagcatataatgctttgttaggtactagtctccactaatttggagaccaaaactccataaacagaaagttggcagtaggctttatagtaaaatatggatattgattatccagtctcaaacccagggattgtgttctgtgatgagttgaaggtgtac

SEQ ID NO: 6979 - DNA, 201 bp, Bos taurus
cacatagccattataaacatacacacacctgacaacagagacctgaagtgtatgaaacaaaaattggaagaattaaagggagaaatagttctacagtaatggttgagtgttttccatgccctgctttctataatggactgaacaactaaacagaagacaataaagaaattaaggatttggccagcactgtaaataaactaa

SEQ ID NO: 6980 - DNA, 201 bp, Bos taurus
cttccgactctcttcaatgcctcagttttctcaccagccaaccattttttattctctaggtttggtttttttttttttttttttgctgcactgaagttgcttcctcaaaagtcaatccttctcccctgtccttctccctgctaagtttccataacaacagtacacagatactgtggagtaatttctcactttgaattctct

SEQ ID NO: 6981 - DNA, 201 bp, Bos taurus
taacacgggtgataagagacctagctgtaggccagtccactcttgttccatgaccaggagtcaatagaaacagaacaccataccttaatgttctcctccaggtcagcttcgcaaggcctgaccatgcagaggcggctctgcttctccagcctgcagaatgcgttgtcattggtaacccgggtggagatgcccattccgcag

SEQ ID NO: 6982 - DNA, 201 bp, Bos taurus
cctgtgtgggagggagacactttgctactgtgtcaaccgggtcagtcacttcagctttgttgcagaattttatgggacggtacattttactgaaaacttcggattaaaaaaatgctcttttatgtgacattaggggaaggcaatctatgactctcagtggaaatatttcagaagaaataagaaacctgtgaaaatatttgt

SEQ ID NO: 6983 - DNA, 201 bp, Bos taurus
agagttatttcaggcaaagtgtgaagatgtcactgttcagaaaacattgactaagacattcactttatagcaaaggaggtgcaaccatgggcccacagtcatgaaatcatctggtcttgtcatgtaccacagcattcaaaacaactggcattgaagagcaatagaatagcttacagatagcatagaaaaggcccaagttca

SEQ ID NO: 6984 - DNA, 201 bp, Bos taurus
tgacttatttcactttaaattcttgactgcagagcactcttgccccatctccccagctcctgaaagattaagtcacactttctcctctaacttcccatgcatcctcactcactgtcattctccaccaggggccctatttctagatcactgagacaacaggaacaatcagaagacacttccacaatctcctctgaccctacc

SEQ ID NO: 6985 - DNA, 201 bp, Bos taurus
catctattttatgtctttacaggcttgccagttctgtacatttcatattaaaggaaacatacaatgtgttctttttgtgactgatttctttttctcagcaggttttcaaggccaattcatgttgcagcatgtatcgattcttccctcctgttcactgctgctgctgccgctaagttgcttcaattgtgtcagattctgtgc

SEQ ID NO: 6986 - DNA, 201 bp, Bos taurus
aatagcatgtacagtcattgatggtatttcctcataggttgcaaggatgacacatcaaaaataaggaagcaaaacagaaaaaccaggcccttcttttaaaattgttttctcttgatactatatactgaaaaaaaaaaaaaaaaaaaaaaaccacaatatagttgaggcctttaagcccttgcatttttatcagtataattt

SEQ ID NO: 6987 - DNA, 201 bp, Bos taurus
ccatcttggggagaaggaagagttgttaaagcatcatctagactcgtagctctctgggcatggtttcattgctgtgtctgaaattgtatattatttgtttcttttcattttttttttacaagtttcttatatcactgtctcttgagatatcagtttttgatacttatttccttttatttcctcacatatgtactacctctt

SEQ ID NO: 6988 - DNA, 201 bp, Bos taurus
acacatcttcactcctgacttttgtcactccaaggggcatgaccgtgtttgacctagagtgttatcaaggtcaccctcgttcctttcttcacatttcccagcgtgggtccttcaggtagcctacgtatctcttccctgtgttcatctattgctttgtttttcaagtcttttttagaggaggaaggtcttctcttaaaatgt

SEQ ID NO: 6989 - DNA, 201 bp, Bos taurus
aaggctacccactccagtattctggcctggagaattccgtggactgtatagtccatggggtcgcaaagagttgtacatgactgagcaactttcacttttattttcttacatattgtggcccataggcattagtttctgcaaaacagtcaataacatgttaaaacttagttcagaaatcacatcctttgttaccatcctctc

SEQ ID NO: 6990 - DNA, 201 bp, Bos taurus
cctaacagagctgagaatccttgaaacccaggccaatactttggtttcaaaatagagaataagtttctgttgttttaaaccaccaagtttgtggtactttgttatagcaggcctagaaaatgaattggagaaggcaatggcaccccactccagtattcttgcctggaaaatcccatggatggaggagcctggtgggctgca

SEQ ID NO: 6991 - DNA, 201 bp, Bos taurus
ttgagctgtctgaggaagcctgagaaggccaagcctgactcaattcaagaaggactggtttaggctcattctgagggcccaaggctcacagtaggagcactataaatatgccccaacctcaaaaacatgacctgcataaccagagcagtgatggacctgaggtttgctaatgtgatcctgaccccagagctggctcagggc

SEQ ID NO: 6992 - DNA, 201 bp, Bos taurus
ttagtctccttcaaaagtctgttgtgttgtatttgcctccacttcatcttccttcaatccatttgtcatagtgtagcttcagtggccttcccatataaacgaatcatgtcaagtctgtctgcctcatgcctaagagattccaacggcttcagattgccttcaggataaagcccaaactccttaatgtggccctcaagactt

SEQ ID NO: 6993 - DNA, 201 bp, Bos taurus
ttaccttcgcttttagaggtggttggtcctatttaagacacaaggtacttagaaagccttgctcagacacacatgtcccacccactgagtcattcaacatgcttctcaggtcttggtcttgatttccagttctggtaattgggcttatggctattttagacatcaagctgtcccattcctccaggaagcaagactgatttg

SEQ ID NO: 6994 - DNA, 201 bp, Bos taurus
tgcctggagaatccatggacggtccatggagtcacaaagagtcggacacaactgagggactttaacacaggctcctctgtccaggggattctgggcaaaaatagtggagagtgttgtcatggcctctttcacaggatctttccaacccagggatcaaacccacatctcttcagtctcctgcattggcaggcaggttcttta

SEQ ID NO: 6995 - DNA, 201 bp, Bos taurus
ctctgcactgaggtgcgcaggcctcccattatggtggcccctcggggcaaggagcatgggcttagggctcgtggacttcagtagctgtggctcccaggcaccgttgttttggcacacaggcccagatgctctgaggcacacgggatcctctcagacccaggatggaaaccccatcctctgcactggcaggcggactttcta

SEQ ID NO: 6996 - DNA, 201 bp, Bos taurus
tgtgacctggaaacagtgagggccaccttgaagggctggaggggtggaggaggagcctggctttccacagagcagtggatcaggctcccctaataagaaagtgtgaagctttgctctcaagcaggccaagttcaagggctggttcatggtttggaagtcacttcgtttctacaatctcggcttcttcacgtgtgatatggg

SEQ ID NO: 6997 - DNA, 201 bp, Bos taurus
gccttttcctgtagcccaggcagcatgaattcccatcacccctactcccctactccttttcattgtcaccagcagcctgcatgtagccgaatccagaggttactgcctaagcctcgttttactttgcttactggcagtcttcaacagaattgacacccccacgctcttgaaccacctgcctctcctcactctagggtacca

SEQ ID NO: 6998 - DNA, 201 bp, Bos taurus
gtctttctccagtgaaggtgctagaaaaccctttgtctcctgttttggtgtagatcttggggacctagggagtcttcgaggaaggctgaggcctgtccccatcttccacaccctgggggctgcgactctggaaatggggacacaatagctcgcgggctccaagacacccgcgcaagcaaaggcgacctcccgggccccaca

SEQ ID NO: 6999 - DNA, 201 bp, Bos taurus
gtcacaaagagtcggaccaactgagtgactgaaatgaaggaaagagctgacttattggaagagaccctgatgcttgtaagaattgaggtcaagaggagaacgggcccacagaagaggagatggttggatggtatcaccgactcaatggactgaatttgagtaaacttcaggagatagtgaaggtcagggaagcctggtgtg

SEQ ID NO: 7000 - DNA, 201 bp, Bos taurus
ttggatatccctgttttctacttcaggtcctaatgatcctccaatcttcttgttcagtggccctctaactctagagtatattgtaattactcattgaactatattctgtgggccttacctccagagttttggattctataagtctgagacgaggcctgagaatttacagttctaacaggtttcaagtgatgttgctgctgc

SEQ ID NO: 7001 - DNA, 201 bp, Bos taurus
gaaatacaaacatagtgaaatgatagtttcagtccacaggcagttttcgtaatttgtggccaagaaggagctccctgtgcttgaccaggcctctcttcctgcgtgcactatgctctgcccatttcttaagtctatgagacatcaaagtgccttcctgcagggcagggccttattttcagtggacatagcatgaggcagtag

SEQ ID NO: 7002 - DNA, 201 bp, Bos taurus
tacaaacttccagttatgagattaataagtcacagtgttctatcgtttagcatagtgagtatggttaataaagctactatatatacttgaaatttcctaaaacaggagatcttgtattcttaccacaaaacaaaaatggtaactttgtcaggtgatggatgtgctaattaatgtcactgtagtaaccatttcacacagact

SEQ ID NO: 7003 - DNA, 201 bp, Bos taurus
atttctgcactgaaggattcccagaaaacagatgcattatataagatggtagagcttgaggatgcattaattcaataaagcacagctggaacatgaaacaaagccttttcccattcatctgattagcttttggtccttataggaagtgacataccaaggtttatgaatccccctgatacatacttcagcactgggctcttt

SEQ ID NO: 7004 - DNA, 201 bp, Bos taurus
tatttgaatgaattctttaaagcatgttagtattacaacattaagctaacatttattggttattaacagtggcccaggtattatactagacacagtacttaggttcaaatataaataggaaagttcctgctctgttgatggtctttatcaaatacagttgaaatggctacttggggcttccccggtggctcagtgggtaaa

SEQ ID NO: 7005 - DNA, 201 bp, Bos taurus
aaggattcaggtaaggcttggcaaggtcacacagctgggctatgatgtgtctaggatgccaatccacggactccttttccagagggcctgccattattgccagggggctgagcaccctcccgagtgtccttgacttgctggcacaccatctctttgcttcaggccaccttgcacggacccctgcatgagccaacttactgc

SEQ ID NO: 7006 - DNA, 201 bp, Bos taurus
cacgaggccaaggttctcctccgtcacccactgggctccccacccaagataacctggagcaggcaaaagcccggagcgcacccgactataggatggccccaaaaaaagtctctcttgcgaatactcgggtcttctcagccagcgccaggaggcacgcgccacgttccccgtaaccacggcgccctcctccggccggtgccg

SEQ ID NO: 7007 - DNA, 201 bp, Bos taurus
gcccagcaggaaaatgggggagagctgaaagggtagaaaagggctaatccccctttgcctgtcactggcccctctgtgtcacatattgggcattgactcaccctagccagcacaagatttagaacctggtatttttgtcttatgtgtgttggatgagctgatttttattcacagtttcaatcaagaaaggaactgatatta

SEQ ID NO: 7008 - DNA, 201 bp, Bos taurus
tttacttaaggaaatttaagttctaggccactttttcctatcacttagtacaattgtgagctaatgttctgaatttcctgaaaagggaacataaactaacctcaatagaaaagtggtatgatgtaatgaaacaacatctaaacattaaacaatatatatgatgtgttagaaacctcaaaggtaaagaatccgcctgcaatg

SEQ ID NO: 7009 - DNA, 201 bp, Bos taurus
gaggtgggcaaagcagatttgccgactgaggccgtgtgctttcctggccttgagaagctgcagatgttagaacagggccacatagctgctatctgggtttagcacatgaaatccctgacctgaagcattctgggtagttaaataaacccagtatagttaggtaggcccagcagatttttctcccatcctcatctcctagtc

SEQ ID NO: 7010 - DNA, 201 bp, Bos taurus
taaaccagcaagagagtcctcatcagacaccaaatctgccagcaccttaagcttggacgtccctgtctccgggactatgagaaataaatttctgttgtttataagccaccattctttggcatttttgttatcacatccctagcaggctaagacagtacatttgatcaaaaatgaagacctgataacaatgtaaagctgcca

SEQ ID NO: 7011 - DNA, 201 bp, Bos taurus
aggcaaaaggaaaatccaacatattgcattaagtggatgacagaatttacatctgcttgggtaccatttagggagatttagtgtggccttaaaaagcaaatgactatttttaagcactttttaattggatatatgagcttattatatggtaagatgtatgaaactggataaagaactcatttataattatgcctcatccaa

SEQ ID NO: 7012 - DNA, 201 bp, Bos taurus
atcctatttcctgactgacatcctctcactgatccagagaatgtgaagaatggggtagagagtgaaagaggaggggccttcagggagagtaaaattgtccggggatagttcttgtcctgtctctaagaccctccctgctcaatgtgttttctgctgagagtgaattacaggaaatgaagcagatgatccaagtggcccttg

SEQ ID NO: 7013 - DNA, 201 bp, Bos taurus
tgtttatcatttctgaaaactgcatcactggcagcaccctgctcgcagagtttggtgtctcaaacacgcacatggtcactgcacacacatggaggcatctaattgctttgttacctcttctagtacagtttcacctgagcaatgactatgaaattactttccttttagttctccttacattatagccagggcagtatactg

SEQ ID NO: 7014 - DNA, 201 bp, Bos taurus
tcgcaaagagtaggacatgacagcgcgtgaacaacaacaaaggaagagagacaaaatgcatagggttgtgcatggtctccaccgactgactttgggaatcgtggaaagttaaactgaataaggaagtggggggtttcagatggtagtgaaccatgaggtttagtcaaagaacttcgaacgtggtatcaaagagccaaggta

SEQ ID NO: 7015 - DNA, 201 bp, Bos taurus
ttagcattgcctgtaagtggacgtgaatgccacagtgacaggaggtatgaggtaactgggtagtcaaaggtaccaatgaggtaacaatggtctcctgagaggaggccaaaaatttagggaaatttgaggaattcttgcaaagtcatgactacttcaaaagacagagtaatctcgccaggtcaatcctagaatccaggataa

SEQ ID NO: 7016 - DNA, 201 bp, Bos taurus
tttggatgacaagcagtatattaacatacttgtgggcaacttctcagatagttttcagcgatgcccatatcctggtattcatgtcttatatgatcttctcctcctgactgtaggctgagcttagtgagtttcttctaaggaacagagtgcagcaaaggtgatggatattacttctgagattaggttgcaagtgactggctt

SEQ ID NO: 7017 - DNA, 201 bp, Bos taurus
acaatttttacaatgacactgaagagtgaagaatgtggctccctggggagaactgtatattgttgggtgtggatctaagtatctctctgtggccatcaacatttgtgaagcatggttgatttgattctttggatttttatcaacatgctatgtctacatgattgtccactcagcaattcacatcaaatggtgaaggtggtt

SEQ ID NO: 7018 - DNA, 201 bp, Bos taurus
ttagactcattgaccttagaatcttcctcttaaaataaggtgcctgaatcaggtgagctctgaagctcttccagtttgaatagtctacgcctctctgactatccctctaactgggttgtaacctggatttctttgtaatttctgggtcaaaggaaagggcactaggcagacataagatctattctaattctgcctttaaaa

SEQ ID NO: 7019 - DNA, 201 bp, Bos taurus
tttcaatggaatgctttgagaattgattagatagtgtgcataaagcaagttgacctcctcaagtaggaatacaatgtatgattttattcctgttctccgaactcttaggccaggcctctccagtacaacgtggtcattatctgtgcttttggactgcctggagaggaaattcacaccattcagggcaaaacaatccactcc

SEQ ID NO: 7020 - DNA, 201 bp, Bos taurus
ctactcttgctgttccccacagttcagtcctaggccctcttctttgcctctttcagtatgtggagagagagcttcatttcacagattcaaaaactgtctgttcatgactccacaatccatttttacctatgcatgcctcttcatctgtattatgtaattgcacctccgtcagcttattgaatccttctccttaaactcttc

SEQ ID NO: 7021 - DNA, 201 bp, Bos taurus
ctccaacaccacagttcaaaagcatcaattcttcagcactcagctttcttcaccgtccaactctcacatccatacatgactactggacaattggactatccgtatttaagcttgtctcctttttgaggtagtcatttcttaagttggcaagtgtctttatgatagtctgtttttatgctactttagctaagctctttcctg

SEQ ID NO: 7022 - DNA, 201 bp, Bos taurus
cttggatgacacctaaaatgtcaaccaggcagagacgcaagaaaagtgagaacatttcaggcaaaaaaaaaaaaaagacactgtgagcagaggaggaaaagaaccaagtagtattaggaagactaaaagaatgtctgactgcagtgtaactatatatgggagacaaacggaaaataaggataaaaacattgctgccatgtc

SEQ ID NO: 7023 - DNA, 201 bp, Bos taurus
ttttataatataaatatgtcccaaatatttcatgagacatattgacacttctaatttaaagctgtatgttgtttatctgaagtccaaatataagtgtcttgtatttttatttgttaaatctggcaactctatgcaacaggccaggaggctcctgtttagtgaagggtaatttgagaaggaagcagctgtaaggcattagct

SEQ ID NO: 7024 - DNA, 201 bp, Bos taurus
ccgctgaggctcatggcctgctggacggctggcgtgggaacagcatcaggtatgcagtgggtgcagcctaaggctttgggaaccaatcatcaagaccccaacctcgaagccctgcccccggccagctatctgccccgtggccatgtaataaatgaggttactctcagacctcaaagctgtaagaaatttgagctttatagt

SEQ ID NO: 7025 - DNA, 201 bp, Bos taurus
aaaattcagggagagaagtctgctgttagctcagttgaccagaaatgggatcataacacatatatttaaatttagcctgaagaaagtacagaatttgaactaggagtatgaaaaggaaaagggcaaactaagacatttttggaaaatgcaaaggatccagatgtagaaaaaaataaggcatgtgcgaggtacaggagacag

SEQ ID NO: 7026 - DNA, 201 bp, Bos taurus
accactatgcatctatatttctctgtgaaaactgtgaagccacctcccattcatgtctctctgagagcagagacatagttttaaagcattcttctggcctccctgtctctcatactgttaatggcgaatgaatgtttattgaatgaacatgtaaaggtctataataaaatcttcttgtcagctaacatcacagaccagagg

SEQ ID NO: 7027 - DNA, 201 bp, Bos taurus
ttaatctatagcaaattctaagtaacttttaggttttattacactctctagttctctactattttccttaactcatttctctcctggtgaggcctttttcatcttggacttgctctgtccagcctgcattttgttctggtctgccagtgcattcattctccaaatgggaacaggcccatctctttccatcccccaccccac

SEQ ID NO: 7028 - DNA, 201 bp, Bos taurus
cttctctgccgtcccacagaccgatgccctgtgtcccaaggttagtgcttaatcagatctagtgtcaaattgatgcctgctgctctgtttggggtgctgtagtctcaccaattacatgggcattttcctcaagtctgtgtacctgtagctagttcttggagtcttacctggtcttctgtctcctccctaaaacactaaaat

SEQ ID NO: 7029 - DNA, 201 bp, Bos taurus
gaattattccataagaatagaaaggcaagatgctggtattttttttcaagtagcaggccaaaagacaagcaaagatatgttgagtgatattttcaaacccttgtgttagatctttacttctggataaggtgaagtagcttgcaccaaaccaattgttctggtaagaacaaatcgaaaaatcagctgaaatgtaaaaaccca

SEQ ID NO: 7030 - DNA, 201 bp, Bos taurus
aggaaaggcacagaaacagcctcccgtgtagacctccacagaggtctcttcaggataacagctgggtgggattggcagccgggcagcccagctctgtagacgaataaaggcctacagtacccagggttgtcaatctgggatcttttgcttagaaaaacagtatcttagaaaaaaactttacctcaggaaattaatcattac

SEQ ID NO: 7031 - DNA, 201 bp, Bos taurus
tcactctgagaactttctctggaccagtgaaggcaaatttccttcatggtatcatttggatagtttcaaagtataaagcgtatgaacaatattagcagacaagatggttggatggcatgacaatggacctgagtttgagcaagctccaggagatggtgaaggacagggaagaacggcgtgctgcagtccaggggtcgcaga

SEQ ID NO: 7032 - DNA, 201 bp, Bos taurus
cggatttctggccggggttccccctgagcaggtgactccgtgggaggggtggaaattagtctctggaattccgggccaaatacattcactgtggttcagcttttaaggcaggtatttcaccgacaactgcggactgttttgcgtctcaagtttcagatttcgcggaaagggaccaaatgtcaaggcatatcaaatattccc

SEQ ID NO: 7033 - DNA, 201 bp, Bos taurus
aaagggaaaaaaccctcagaaagtgtatgctgccatagtttaccatcctggttggcataaatagagaggaaatggagtcctgacatctttttcaggttacatggtatccctttctacatttccatatttttcctctagtcaaatgtttttcttgaaatactttattatttttttttaacgtagagatagaaggaatctttt

SEQ ID NO: 7034 - DNA, 201 bp, Bos taurus
tggcctgctgtccccccgagggtcttgttgattgtacatatattgttcttcctgcctgaaatagccagaattgatgtctgaagaacacatcatgggtcttcggaacatttaagagcaataggccagataaataatagcttggatcaaatgtattgaaaagctcttcaatatattgatgattttatctgggtactggttatt

SEQ ID NO: 7035 - DNA, 201 bp, Bos taurus
gtgacagtacttattagagtttgaaaatcataacatacagtttcctgccttttcctagaacatgcaaactatacagcaagagcagaacaaagcctctttcgtgaccattaaggagtatcctcaatagaattcaaagttgctggtggttcagttatcagttccaccgtcttcttactcttggaaaactctccagtgaaggaa

SEQ ID NO: 7036 - DNA, 201 bp, Bos taurus
taatttttattacccatgcaataaagtaatttgtatcctaattagtcttcagaattaaaacaacggttgagaaagtaatgaacccaagactgttttggaaaatagcgctcagcagttgtgtcaggactaaaccaacgaagcagatattcttactaaacttttaaaaacaatggaaattaatgacatattcccagtgagcct

SEQ ID NO: 7037 - DNA, 201 bp, Bos taurus
acagcagatttcataacctccgctgggagtggtgggcattccccaccgctggagggcttggtcccttttatccagaaaaatgacaggcgagggggcctgagacaagggcatggacgtggggagaactgggctggagctctgccaggcccctgctaacctgaacagagtgcctttgtgtcctccaccgtgtgggaatagaag

SEQ ID NO: 7038 - DNA, 201 bp, Bos taurus
cagaaggaaatgcttcttcctttaatggacaagaagagagtaggggtgaggagtggggaaaggtttcacttgaatgtattttaataattgggcccttagcgaaaaatattcacctgccttgtaaccatcctccagtaggcaggggatagaaggtgctctttctggagtgtctgtctgttccaggcccggtgctggatacat

SEQ ID NO: 7039 - DNA, 201 bp, Bos taurus
aatatattatttatgtgtatatatgtgtattatgcatacatatatatgtagtaacatttctatcttgaagaacttaacatacctgaagtatttaagcaagaaagatgtgagacacttaaagctgtaaaggtatggctctcaaggtaaaatctaaagagcaattttttgtgcaccacttttcacatgttgttgctgttgttt

SEQ ID NO: 7040 - DNA, 201 bp, Bos taurus
tactgtgcattcttcatgctgtaacagcactgaaaacaaactatgttttattgattgtttttcattcttagtgccaggtatggggcctggtatgtagtagatgcttactaaatatttataggcttaatacatgtattccctgaaagtcaggttattgttagtgtgtttttgttttctttctttcctttttttttttttaaa

SEQ ID NO: 7041 - DNA, 201 bp, Bos taurus
gactgaagcgacttagcagcagcagcagcaggatggctctagcagtgcagtggtggtgtggaaaggtggcagctatagcagaggccagttgggtggctgtcccaagagtgtgattggaaattgatgtgggtggtgccatgggggtgggattgaggggtggcctgggtacagatcagtagagcatgataagtggatagggca

SEQ ID NO: 7042 - DNA, 201 bp, Bos taurus
aaggaattgatgagatgagccatgtggggtttgaaaaatctcatccggtaaggccagaggccaccaggcagggattggcctcaggtgagaagcagcagggactagagcagagagagccaggggagggagtgtttaggagaggatcaggttggggggaaggccatcctgcgttgggcggcatcatagagaccatgccaagga

SEQ ID NO: 7043 - DNA, 201 bp, Bos taurus
agttcttactttcccctctcctgcaattccctgcctgactgagatcactgtgaattcctcgtagaagggcatactcggcctctctgatcttttaaagttggtctttgatggtaaatcactcaatgagcctgcctttaaaaagaaataataataatactgttttttattttttaatttttttggccatgccctgtaacatat

SEQ ID NO: 7044 - DNA, 201 bp, Bos taurus
tttccatgagatattggcatttcataaccacaaactgtatttttgcctcctggtcatctcatgaaatgtaaaactcatttaggtttagaaaatgcaagggagcttttaaaaggttgatttggtaattatcagtcagagtatacttgttaagtgtgggtaatgtggaaggaagtattggggaacccaggcatatttagcttt

SEQ ID NO: 7045 - DNA, 201 bp, Bos taurus
tgtgaggtgactgaggctcttgcagaggcaagtcctcaagcaaattggcactgcaaaatcctttagtatctgttttgaggggcaggcctgccagtggggcatatgaggtagaaccagcgctgtacttgtgattctggaggggtgccgggggagagctgggggtggccatggggtggaggggagccaggagctctgacagca

SEQ ID NO: 7046 - DNA, 201 bp, Bos taurus
aaagttatctttaaggcctttatcttaaactctgaattgcttaaaaaaccaaaggagaaaacataagtctaccagggattagaaagtgagaggctgatgctgctagacttcttgaggcccaggacagccctgcttccgagcctggacatgcccccctagaccagcccactgggacagagtgggatgttggttcccagaaga

SEQ ID NO: 7047 - DNA, 201 bp, Bos taurus
cctttagagagataatgatggctaaatgaggtcctgtagtgtgactctaagtcaacagatctgatactcttataggaagaggaagaaacactgaagatctcgcccacacccacagagaagaggccatgtgaagacagagagagaaggcaactgtctatgagccaagaaaaggggtctcgtcagacactgaccctgatgaca

SEQ ID NO: 7048 - DNA, 201 bp, Bos taurus
atatttcatgtgggtttgtctagcctcctcatttccactgtggtttccctgagtgcagagaattgccagagttaagggctcttgtaggtctctcagcctcctctgagttctaactattctgtgacttttgctgactatgaaaccatctgtcagagtaagtttgctggttactccttctgagtttgtggataccagacacta

SEQ ID NO: 7049 - DNA, 201 bp, Bos taurus
gaggcccgagatctatctataggtcccaaatagggtgggaatatttatatctctgatttctgtgctaaaactcccattacttcagagtacatttagcccaattctctactcgggcctagaagaagcaaagcagtaaaaggacatcaaagtatgctatagactcaattttttatgtcccccaaacccataagttgaaatcta

SEQ ID NO: 7050 - DNA, 201 bp, Bos taurus
ggtgagagaaattctattcagaatgcttaagttataaacagaagagaaatttgtgaatttaaagaaagctgaatgaactgcattattaaatcaagtcattctttatactcattttataaaaatatttattataatgcatttctatttgtactgcttagttctctaacttgtcctgataatttcagtgatttactcttatct

SEQ ID NO: 7051 - DNA, 201 bp, Bos taurus
aatgaacagtgaagagtagacttaactttgctctgacaaaaacatgtaaaccactggcacttcattctgaagccatgtacttcagttactgtgattgaggggtttctgtcagtgtcatttggcaggatgttattaaggagaaatatccaacatggtgaagtgtatttgggaacaaaacaagtgagtagctaaattaaaagt

SEQ ID NO: 7052 - DNA, 201 bp, Bos taurus
ttgtagatgagcgtttgggttgtttccacccttcggctattgtgactaatacttctggtttcttttgctgctggctggtctcagctctttgtgcttcatatgagctggcttcctctccgctctagtgttgcttgtctgtaaatgtgacatcagtggctgaagtacccatccctccagctggctggggcagccattatttct

SEQ ID NO: 7053 - DNA, 201 bp, Bos taurus
aattatggaccttgggtagaaacagcccaaatttctaaattaaagtaaggatgcctttcttctgaagagtccaactttattaccttgattatttctatattcctttaaagtgttttaaattatgaagtattacaaacttcttgaagagtacagatgatattactaacacctataaatacatccctcagatatagctaatgt

SEQ ID NO: 7054 - DNA, 201 bp, Bos taurus
gattttcagcaataattctaataaatactttgttcaatgttttaacagcccatcataggccaacttgttaaatcataatcataagtcaaagtgccttgatggtaaagtgtttggcttggcacctggtccacagtaaatggtggctggtctcatctcccataactgctgagaatctgtcttgatagttttgattatatttat

SEQ ID NO: 7055 - DNA, 201 bp, Bos taurus
cgttagaaataaaactggtttttatttaaaattatataaacctgagaatattttctagcattttatttttcatctttaaggcctttaaaatacaaagatattgattttaaaagccgaatcttatagtataagatcaccactgaagaaagcttgaaagatatgagttctgtaattattctcaaactgaatctgaggaaactc

SEQ ID NO: 7056 - DNA, 201 bp, Bos taurus
ccaaagccatctagcatgtatctttggaccattagacaaacctcttgagagtagttggaacactggaggatgtaacaatttggctcagggggacatgctcacactccaactcccagaaagttctagaatatcatcagtttatcatagaggaatacttggatttcgtcctccatccttatctttttgtgccttagactactc

SEQ ID NO: 7057 - DNA, 201 bp, Bos taurus
agcataggcaagagttggagactctgaacagaagtaatagaggagattctcaaaatttggggactttcagggttggaaaatctagtttctggactcaaaatgccaagtaatgtgaatgaaaagaagtttgaacaaagatgtgttaggatttttgtggctaaatagaaaccatactctggctacaaagaatttattaagaat

SEQ ID NO: 7058 - DNA, 201 bp, Bos taurus
gtaatggaaaggatcttatcttggagtcagacaggcctggcttcaaatcctggcttctgcatgtgaccttgagcaactcagacaatgagtctgaagctcttctaatggggagaactgggaggccctcaggaggtccctggggattcaacccgggttcgatccctgggtcagtaaggtaccttggagaagggaatggctgtg

SEQ ID NO: 7059 - DNA, 201 bp, Bos taurus
gttactagaatgagttcagggttctctaagatcagtgtagagacagcagtgggaagtgatgactgctttttaagatcagtgggccttaggatatcagtggaactccatagtccaatgaccaacatccatgtagaggtccttcttcaggttctaacctttcattatagaatgaactatagctgcttaggccaggtggagacc

SEQ ID NO: 7060 - DNA, 201 bp, Bos taurus
tttaaaggctttccttgcatcatcttaacttagtttgttgtccttctgcctcttcctggggaaattaatcttctggccaaattctttttgaaacagtgggaaaaaaaaagagtggttgtgttgagctgataccattagacgtgtctgctatagccaggccaccttcatttgggggtgtcctttttttggggaatattttac

SEQ ID NO: 7061 - DNA, 201 bp, Bos taurus
tgctccccagtgcagctattctgagcttgaagataaggtttaatcattaaactcaatttgctgttaaggtgactggttgggaggccaggataattgcaactgatctcaagtctcagtgtataatagtctcttaagtggcattatccagagtatctgtggatacatggagacttgtggaggccaaactgttcccatttagtt

SEQ ID NO: 7062 - DNA, 201 bp, Bos taurus
tgattactatggcacagcaggccttctaggtgtcatgtccataattattttcctggctccctagtcccaaataggcagctgaggtagatgttatacccacagtgtggccttgtatcccaggtaatgaactggagctgaggaaatattcttttaatgggactgtcagcaaacaacattcaacctttgctccagagagagatc

SEQ ID NO: 7063 - DNA, 201 bp, Bos taurus
ggtgtaatcctacaagagtcatggacgaatttcctaatggggtgtgcagaagggtgtggaaatctgtggcttgggaacagcttgtgagctgcagaaagaaaggcaacattccttctggctctcaacattccttcctcgaccacctgtcactttcatgtcgaggggattgtctcatgcccagaatacagagtacctttatga

SEQ ID NO: 7064 - DNA, 201 bp, Bos taurus
tgcttgaaatgccctttcatgcttttcggcctatcaatatcctaatctcccacaaaatgttccacgaccaggtatgctgagttaagggcctctccttcttgattccaactgctgcagtgttctcagctgtttgactctgaactactcgaaagctgggcaggaacagtaccctattcagcactgtactcccaatgccgggtc

SEQ ID NO: 7065 - DNA, 201 bp, Bos taurus
aaggcaggatgctgtggtcagaagtgacaggcagagaagccggaggaaatgtcactgctgtgtggaataagatggggcctatgcagtgcactgcaaaggaaggacagttttattcctttcttcctaagccactcccacttctagaccttacctcttgcatagacatccccactggaaggaagagttgctattccaggcccc

SEQ ID NO: 7066 - DNA, 201 bp, Bos taurus
ggccacagtctctgttgttctggttcagccttatttttaggcagcactttgttcctgcatctcaaggtagggaccatctcagtgactcttgtcctctttcgaatggtctgggcccagtgtctgtttctgctcctactcccataattagagaatattatttgttcacttctcctaactacatggattgttccctgtgcctta

SEQ ID NO: 7067 - DNA, 201 bp, Bos taurus
gttgagaactactagcatgcatgatttcataagaaggcaaataaaagtaatgagaaaacagactatatatgggaaaaatttttaaaaatgcaaactatgagtgacaggcattctcatgagagaggctaagaccattcaaatagaaatagtaatatacaacataattttaaaagggcttcagtttcaaagaaaggacccatt

SEQ ID NO: 7068 - DNA, 201 bp, Bos taurus
cctgaggtggtgctcagtaggagtctcttcacaaaggagcattaagtaaagagaaaggaaggcatttctccccaatggagacttcacctatctgtgctttcaccttctcaatggtaaaatggtgataatatacctaaattcatacagttttaaggattgaaaaatgataacatatgtaaaggactttgctaagtaccaata

SEQ ID NO: 7069 - DNA, 201 bp, Bos taurus
gaaaaaatcttataggctcattaattagaactctttgacttcaagttacagaagccaaactaagctggcctaagcaaatttattttccctttgcataaatgaatggaaaaatctatacagagtatagtgcagtgcttaacacacaataaaacctcaataactgttagctagtgacactaaagttatgaaaatgggggagga

SEQ ID NO: 7070 - DNA, 201 bp, Bos taurus
cctccaacgcagactccaggtcatggtgggcctggctaggccctcagtacttgaaaaggtcgatgaagtgctgcggggacacaggcgtgaagcagctgccatgcaggggtggcccgagtcctcgagtaataaagcaaggcggcagtccttccagaagaggatgctgcagtgccggcagaagtgcagggtgtctccatactg

SEQ ID NO: 7071 - DNA, 201 bp, Bos taurus
attggtggttgccacagaggaggctgggggatatataaaataagtaaatgtggtcaaaagacacaaatttccagttacaagataaataacccccagggatgtaatgtacagcatatatgtttcttaagttcaaaatccagcacaggtggattttcagtatctgaacacagtagtataatttaagaactagaataatgtaaa

SEQ ID NO: 7072 - DNA, 201 bp, Bos taurus
ccctacttaacaaattcagtcttttggtctctatttagtcttcctcacaataggtaataaacatatctgttttttgctaagacatgacttggattattttgttgttatctactttactttggccacttgatgcaatgaactgactcattggaaatgaccctgatgctgggaaagattgaagacaggagaaggggatgacag

SEQ ID NO: 7073 - DNA, 201 bp, Bos taurus
tttctctcatcgttccccaccccccaccccctccattcctttcactcagtagaactcattgcctcggggaagagatcatatagcagagaagcagagaaaaatttttggtgttaaaagcataactatgaagtatataacttctaagccataaaacattatctttgggaagccagagacagagccgggcgagcctgtcctcag

SEQ ID NO: 7074 - DNA, 201 bp, Bos taurus
gaatgatagtaaaataaggtcataagtgtggggacttgataagacaggaatcatgttctttataagaagggacacaagagatcgcccctggctctgtgcaaacacagagaaaaggccatgtaaacacagtgagctggtgaccgcctacaagccaaaagaagaatgaaaccttccctgctagcactttggtcttggacttct

SEQ ID NO: 7075 - DNA, 201 bp, Bos taurus
tgtgagaagaggcttaattgcagtttgccagatgggtgcaaaacctgtcactggtcccattcccagttcacccaggtagctcttctccactctctggggagtgactggccagtgatgcttttcactacacaggtaagactgggcatatattggagagaaagggctatcctttcaagtatttaagtcatctgtcccaatcca

SEQ ID NO: 7076 - DNA, 201 bp, Bos taurus
attaactgtaaagctcctagtgtttttctttttttaagggaaactgctgtaccctctttcattttcttgtatttctaagacctggaatgagattcttatctaccatgctcatgaatgttgacggtgataatgatctcctggacattacttgtacttttttctcataggaaagaaaataaatcttcccccaaaaatatattt

SEQ ID NO: 7077 - DNA, 201 bp, Bos taurus
ttgtatgggccctccttcaattgcatgttcccaaatgaattgccatggtgtggaatatatgtgtgcacttagcttcctctgcgcaattacctctcagcgcttcttccttcatgctttcctgggcctattactcaatcctcctacctctgtcctgccagccgccctgagagctctactttcccccttttcaggtcatttcag

SEQ ID NO: 7078 - DNA, 201 bp, Bos taurus
atgatggaaacagtgtatgtcaagattccttgtgtaagcttgactgctctgtgcagaatgaacaatgtgtatttttgcctgcatattccactatacatacggctttgtaaaaaaaaaaaaaaaaaaaaggtctttaagaatactttttaaaggaaaattgtattgagctttatagtatagctatcactcttcctttgaaca

SEQ ID NO: 7079 - DNA, 201 bp, Bos taurus
tcaaaactctttatgttaccactatatggaaatcatgtgccccctcacagcttccaggggtttagaaaaggatactccgtgtctcctaaggcatttgttcaggctggggcagggcttggactgatggtgggaggtgaacctacacaaagagttttgcttgatactgcagagcatttgaggacaatgtttacatgcagctgt

SEQ ID NO: 7080 - DNA, 201 bp, Bos taurus
aaacagaggttaatcctcttcaggacagcccacgcctgctcctgctgccagggaggaagaggggtgagtgtagggaagggcaaggatgtgcaaaaatgaacgtaataacagaaagagggacagtttacatttttaaaaagaaaccatgtatttaaatcaagtggaggattttaaatcaactatgtgctgtgctaaatcact

SEQ ID NO: 7081 - DNA, 201 bp, Bos taurus
gtgtatgtatatataatgatcataatatataccataatcagaagagcatggtaaaggagcatactagtgtctaaagctaatttttataattaatgaactgggcatattcagaccttctattgccttttatgtcactgagaactactgagttgacttcaaatgaattggtcaagttctgaaagcctcacagaatgacacagg

SEQ ID NO: 7082 - DNA, 201 bp, Bos taurus
cccttcagttctgacccacagatcttttggaaaatacttgtggccgcctagtcttggtataatttcttgtgtgtttttgtttgtttttaccttcagaggtattctacctagtttacttgcctccgtaccttgacagatcagatccacttctctgtgaatggatggctcacccctgtgagtttaaatcagataaaatggagg

SEQ ID NO: 7083 - DNA, 201 bp, Bos taurus
ccttcaaaatattttgcagcaacaatgagaaaagagcttctgcaggaaaaataaaaagcaaaaccctgactctaattccaaggccaatgacaccacgctgtatataatacagtttcttttgtgcaaaagtaagagcatgagtacaaagggaacatttatgagagccagcatgatcaatttgaagaaaacagtggccagaaa

SEQ ID NO: 7084 - DNA, 201 bp, Bos taurus
aaaaagaatcaagcacaccaactagtagatcccttcatctgtctccagaaaggacgtttttacctgtattcatgttttgaatctgtgataaatgccagggctgtaattaagaaaagacttaaggcaaagcagaggaagggccattgtgttcaaaatgtttagaaacgaacgtggacaaagacaactgatttttcctttggg

SEQ ID NO: 7085 - DNA, 201 bp, Bos taurus
gaccaagtgccaaaggccccacagcacccagtggacacccaggcaccacagcgggatccctgcgggtcctccctgactcctctctcaccgttactctccacggcactcgacggccccaccctacaacttgacccttgaaaggtttcttaatcttcgttctcccacccattccacacctcaatccccgctcaactcatccgc

SEQ ID NO: 7086 - DNA, 201 bp, Bos taurus
cagttctggagtctgagaagtccaagatcaaggttctgcagatttggttcctagttagagccctccttctgccttgcagacagccacgcccttactgtgttgtcacatggcagaaagtaggagagagacagtgagggagtgcattctggtgtctcttcctcttaagggcagtattcccataatgggggccccacccgcctg

SEQ ID NO: 7087 - DNA, 201 bp, Bos taurus
ctatagataaatgaacagataaaatatcactgtacaaatccagcatcacttttgctcaagagtaatggcatgtatgtccctagcagtgctagtttgctagagctgtaacagttgactacaacagactggggtagctaaagcaatagaaattatttttccacaattctggaggctgtctgtaggactgattcttccttaagg

SEQ ID NO: 7088 - DNA, 201 bp, Bos taurus
aggatgggaggacaccatgaagatatcatcaaataatttcagaatgtggaatattctacaaagcaactggcctgaactcttcaatctcattttaaaaaaatgtggttggggtggaaggatagcaggaaactcttttagaccaagagaataaaatgacaataacaagccctacatgaagcatggttgagcctgggtttaaaa

SEQ ID NO: 7089 - DNA, 201 bp, Bos taurus
aaatttaaaagttagctgtacctttaaagtctggtaaaaatattacttctgcaagttgtgctttgatggttcttatgctacttaactgactttaaaaacgttcatcagaattgactaatttcacaattcactaatggaatgcatcccacaggttgaaaaataaagcttcagaagacaaatggctcaatttacatacaacct

SEQ ID NO: 7090 - DNA, 201 bp, Bos taurus
ttgcctctatctcagcccaatcagagaataatcatcttcttacaaacttaggaagaagggctagaggcacgaagaagcagcatataaaatccaaggggttaagcaaacttagttgctgacagtgtgtagaaacatatgtagacatagaaatagaggaaatggggatgtctctggtggtccagtggttaagaatcttcctgt

SEQ ID NO: 7091 - DNA, 201 bp, Bos taurus
aacacccacgtcatcatcacccaggtatggcctccctctccagctgctcctgctgtaaaccagttgactcagagcagaaatcaggtgcaggaagggtcagcgttgaggcctgcttccaggaatgtaggaccagtgatcagccagaattgtgcacccttaactgttttgtgtgtgtgataaaatacatatagcagaatctac

SEQ ID NO: 7092 - DNA, 201 bp, Bos taurus
ttttatttcctttcagaagagcagacacaaagctcccctcagctgtaattacttgaacgagtttctatatcctgtttcctctacttgatttcattaaaccgtgacataaatgcatactttgcacccaaagcgtgtctaatcactgaacccaaatgactgctttgagagaggagtcagggaacttcgggcgaggctgtatag

SEQ ID NO: 7093 - DNA, 201 bp, Bos taurus
ggggccatcctgcttttagcatcgctctgttattccttgttttactgcagagcagtggtaattgatgttgatgatctattaaacagatggcgggatgagcaggaagcatcttagttaaaagacagttcaattctatcattcttgttgaaacactttaacctctgatttaattttattccactgggattgagggttatggtt

SEQ ID NO: 7094 - DNA, 201 bp, Bos taurus
ctggagctgcccgagaaaattaagaatggtgatgctgatgttgagtggagaataaagctgccaactggtgagagagcccttgtgaggccaagcagcagagtgctcaccagggtttataagtgcaaaggatttccttccattctctgaggacgtttgacagacgaatgattgcagcttattgatgggcatatcagcaagcat

SEQ ID NO: 7095 - DNA, 201 bp, Bos taurus
cagatccactcccacaacatacatcttaagataacagggttagaactaacaatagaaagatcttaccagatccactgccacagtatacaagttttaatataacaagattagtcagaatgttcttgttaaggggaaacatatcctcgagcaagatacattgttatactaagacaaagcaatatagaaaaaaaaaaaaaaatg

SEQ ID NO: 7096 - DNA, 201 bp, Bos taurus
tgagagccaggtctttgcatgttttgctctttgctatatactctagaaaaagccagacatcagggaaggccaaatatttgctgaaagattgaatgagttaatttccttctttagaaaagtcatgtttccccctcttgagaactagggccccagatctctggtttgaggtaacaactgtggtgatcagatgctggaagggcc

SEQ ID NO: 7097 - DNA, 201 bp, Bos taurus
gcactgatgatcaagccccagagaagagctccgtctgggggcattagtggcccttcatagagctgatcacttgctttcagcatcactgtgttatctccaccacctcaccctgaggatgaggccaggcagcttctgctcatcctgatggttttctgggatccctaccagcctgcactccctgcccacccagcctcctacggc

SEQ ID NO: 7098 - DNA, 201 bp, Bos taurus
tggtttggggttaaagtatcacatttaaaagacttagttatgatcagtgggggaacacgttgtggccctatggctttgatctgttttctggagtggcctgcgaaactttggactccctaacgatctatttctcaatgaggtcagaaagcaagcagcttttaaaatctagttcctctaccaggggctctggggttttgaaac

SEQ ID NO: 7099 - DNA, 201 bp, Bos taurus
agcatcatctctctgcctcactgaataacttcgtcgatagcaagcgtgcctgccaacagtggcttttttgttgctgttttttctattcagtttgtaccatgtgactcacagtgtcctagcagataagaacagagagacctggttgtccagtgttggcttttgtgcagagcgctgtttcttgtgaggtcaccaacagtgttt

SEQ ID NO: 7100 - DNA, 201 bp, Bos taurus
tgtttattttcagttcaaagaccaaatagaaaactccatcatggaaaatgttacctgttcattcacactcttttaatccctcagcccccataaaataaacgttctaaagtgtaagcagtgggaaatcatgtaaactctacagaaatagaaaataaattagcttctttcaagacttgggggaggtccttttcctgaatgcta

SEQ ID NO: 7101 - DNA, 201 bp, Bos taurus
ggtcctggaatccttaggaaattttgaaaccttaccttcttgatgtgatcagagcagggtagtttagggaatggggcctctctgtaaggactgtacaggtccagctggggcggaaggcaagtggagttgggtttgtccagccttgtgcagaaagcacagaggtaccatctgggtccgcaggggccctgcccaatctggaag

SEQ ID NO: 7102 - DNA, 201 bp, Bos taurus
gttggagggcagctgggagagctgggaggcctcgggcccctgctcctggctcatccgggttgcctgcggccgtggctctcggccaagtttctcaggcgccgaggtgatcttggtggcttgtcttagctggtgatctgcgatctgaatgccgtacaaggatgacgccagtgggaaaacttggtcgggatgagaaaaggcccc

SEQ ID NO: 7103 - DNA, 201 bp, Bos taurus
ctgcctcacctctttcttcctgtggaaaacatgttttcaccctggctccctctgtctcctgcccagccctggtgctccctgggtggccctacatggcatggtgtgcccccttctctcaggagctgagaacagcaaactctttcagtctctcctgatttgttggcctcactgtacctgaatgataatataacctatattttt

SEQ ID NO: 7104 - DNA, 201 bp, Bos taurus
gagaggattctaaaattttcctgtaaagatattcagacccagtgcttttcttaggagaaagactttgaccaactttctaatttattctatggttactggtgtagttaagttcatttactcttgtaccaatattgataattcatattgtttttagaagatcagacatattatgtagatttcatttttcttactacccatttt

SEQ ID NO: 7105 - DNA, 201 bp, Bos taurus
ggccagcatcctgggtggtaacaacaaaaaaaaaggaaattggtagaaaatgcatcatccaagttggattcagtcagctctgtggcctgggcaggttcccaggatattccagccagacggcagggcttctgagagacaccaggctagaatgtgtgtgtgatgacataagggcagggagaggcagggccgtggggctcagca

SEQ ID NO: 7106 - DNA, 201 bp, Bos taurus
gtttctccaaggaccgcggtctacagaatttccatgtcgctgagcctcactcttctacatgtgaactagactcttctgctgaatgactgtccagtgtggatggtttagaaggattgtctttattgctcttaatctatgttttaactgtcttttaatgttgtgttttacattttcattgactcactcatggtaatccataaa

SEQ ID NO: 7107 - DNA, 201 bp, Bos taurus
ccgctccgccgggagccaatagtcatcatgagttcatcatacatgtcctaagaaacagataaaactcatgttcaatttaaactcactctacacggggtacatctgacacctgtcctcacagaatgtcaataattgatggaggtttaaaatgctgaaaagctgttcttgcagctaagggacatgtcatggagaatgcagttc

SEQ ID NO: 7108 - DNA, 201 bp, Bos taurus
acaagtatattcttactgatcttaaaattgaaccataaggacaataaatttaaaaaaaaactgaaaatagctcagcattaaagataaaaataattgtaacttttagaatatgatatgatagcatatgatcagagcagtagcctttgacaaagagcccataaatttaaaaaccctaacaatattgcctagtctattgagagt

SEQ ID NO: 7109 - DNA, 201 bp, Bos taurus
ttccttcggtaaaaatcttcaaactattgattataaaactgatcatttatacagctgagtttctactgctggtctagggcaagaattaaaatccatttgttgggttcacttgagtcaagtgtattcacagatattattttattcataccaataggtcttctattgcttactcatcctaagaaagcaatgacaagcattaac

SEQ ID NO: 7110 - DNA, 201 bp, Bos taurus
gcgataatatatttgaaaaatgaattcaaagacaagatgacagtcaaataagaaaaggagatactcagttcagtgaggtgagtgttacttgggggcaaggtgctgtgctgggctaggactcccgggagcggggctatggtgcctcacctcagtgggctggggtaggatggctacagtcatggtgctggtgtggatgcggcc

SEQ ID NO: 7111 - DNA, 201 bp, Bos taurus
ctagtttcacgatgcttttaaaattgtgtttttaaaaatttacgcttggtcttttgcttgtttccatcttatgtagtattcagttattattctaatactatactatttaattgctataatttatgtagccttttctctattgctgctgctgctgctaagttgcttcagtcgtgtccgactctgtgcgaccccatagatggc

SEQ ID NO: 7112 - DNA, 201 bp, Bos taurus
cactttaaagagggagatttgggagttggggcgggtccacaaagacggctgagcctcaggtcttctatggtttggacttggtggctggtaaatcatccaccgagctccagcgaaccacttcctattttcccttccccttatctgagcctctgcttacagctttctttaggagcagagatttctacacttggaagtcaatga

SEQ ID NO: 7113 - DNA, 201 bp, Bos taurus
cataatagtggtcggtatatagtaactcaaattatattgataaagaccattgtgtgaatgaggaaaactttgaaaaaaaggttagcactagtagaatagatacatgtcttctaacactatagattatataagtaaaataaaactttttaaaaagctcacgtggtaaaaaaatagctataacattgaacaagctaacagaag

SEQ ID NO: 7114 - DNA, 201 bp, Bos taurus
ctaaatatttgaaaggagctcagtgagaattcggaaagagagttgtctaaggatagcaagaaagtggatattgttaaggcccatgtgatgctggactctatggatctcttcttccataaattgtaaaatgctccacctttcctttattttataccctggatttagagagataatgaagtcaaatctggcctctgtatcctg

SEQ ID NO: 7115 - DNA, 201 bp, Bos taurus
aaaaaggtaagctgagctagtttagtgtgtctaccattaggaagtgtttttctacgcatcttgattttattacttttttctaatgtctgtcactgagttataaaagagaactcagcacctcattacccctgtacataaatatatttttatttcattatgtctcccagatactgctctatctacaatagaagttcttcaatt

SEQ ID NO: 7116 - DNA, 201 bp, Bos taurus
cactagaggatgaccctcttcccagtatatctaactttttatttttttcttgagaatctcaggtttcttatgcatacagaatccctatatcacccacatgtttgcacattaacttgcacacacacaccacatcacatgcatgggcacatacatgtataggcacatatacacactcctgatagacattctaagaacttttca

SEQ ID NO: 7117 - DNA, 201 bp, Bos taurus
ctaccaaacccacagatagtggccattcattataaaaatggactgaaggtgttggtggtgataatcaggatggtactgaagaggctggggctctaacagggggagagaaaaggcctcagaaggaagccgaccacttgcagagaatgctgtgggtgacccagccacgcggccacgtcctgatcacccggggcacgctggcca

SEQ ID NO: 7118 - DNA, 201 bp, Bos taurus
gacagtgggtacaatgtctgagagctgaatctggttgtacgagttcatgtcagagcactaaccccttcctgaacttcctaccatgatactgggagagaacggtgtgaactagggcccagaggagggaggaggaagtcatgcagtgagtgccttcagcggtgtctactgtttgtcaggacacggcatggagcatagtgacca

SEQ ID NO: 7119 - DNA, 201 bp, Bos taurus
taagggccaacagaaagccctttgctgctcgagcttgtgatgcctgggtcctggaaaatccttggtgtttgtaggaaagaaacaaaggaaggacccgcatcacaccagagaggcctcacctctgtcctgctccaaagaatgtccactgtggacgccagctaggtggagcaagagataagaacaggagaaatacgatgctgg

SEQ ID NO: 7120 - DNA, 201 bp, Bos taurus
aatctcctttgtttcggccggtgggatctagttccctgaccagggatcacacctgggcctcctgcattaggaatgtggagtcttagccactggaccaccctggaaatccccagctacaagtgatcttacaacagctgcagaagtttttgggtgcttttgtgctgattaatgttccaagtttgattgttattagctagagtc

SEQ ID NO: 7121 - DNA, 201 bp, Bos taurus
ccctcttaaccaagttttatgtgtacaatacaatcttgttgaccagaggtacaatgttctttagaagttgttcatcttgcttaactgaaaagttgtgccaatttattagtaactccccattgcctcctctctcatcagtccttgataaccaccattccattgtttgattctataaatatgactgttttagttaactcatgt

SEQ ID NO: 7122 - DNA, 201 bp, Bos taurus
catcccaagacaaaacttaaaacaaagcttcccacccgtcatcagaatgatctgtatctccacctgagtcacagatcaatgtggtcgtattttataaacacggccatctcatggacatgccctgcatgcaggaactggaactgtgacttccctctctgagcaccacttcactttaaaactcaagtgatgggaggcaggatg

SEQ ID NO: 7123 - DNA, 201 bp, Bos taurus
agacccggaacagccaaaagtaaataaataactctaaaaaaaaagaataaactgtatatgtgtgggaatatgtatatacaacatctatttccaaattttctaatcccttctagtgaaatattgatatatagatttataccacactaccacattgccttgaagctgtagctttataataatatttatttatttattttggcc

SEQ ID NO: 7124 - DNA, 201 bp, Bos taurus
gtgaagtagtcatctctttcttccccagcactttctccttgccctggttggcccagcagtgaaagttttataaacactgggcactgtgcacttaggccagagcttgaccacagacttctcgattgatgaatgctgtagccattctttagatgtgggcccctccctttttttttttttttttaactgatacagctgaaggtt

SEQ ID NO: 7125 - DNA, 201 bp, Bos taurus
tgtggcctggtttgtgtttccatgggactaggatggcttggatttccccagtcaggggtctctagagagggcatctcttagcaataggttgtacagtcacgtagggaggtccactggcctccgtatgaaatttaatagaaacaaatttcagctgtaggaagggaacttttgaatctggatgttctgagatcctgggcccct

SEQ ID NO: 7126 - DNA, 201 bp, Bos taurus
tttcaaatgtgaccaaaattctgctcatgagtgctttgtattattctatacacaaggcttaaaatcatacaaaattaagctccaggccatggttaagaaggaatcattattctttctttatctcatgttttatgttaaatgttgcaaagacccaatcaaaatgtgtttatcagatatcacctgggcctccctgacctttaa

SEQ ID NO: 7127 - DNA, 201 bp, Bos taurus
aaatgcagatcataatgtatgtttctgccgtccctggccaaactcagcagttcctgagagcagaggttatttggcatatacctttgtagccacacggcctcaaccatggtacatgctccataaatatttgctcaaagaaggacttacctatggaaagtagacagagtgaaaacacagcaaacagaagtcctggcagggata

SEQ ID NO: 7128 - DNA, 201 bp, Bos taurus
aagcgtgcaagtgtcaggccacctccatatgtcaaaagctggagacatgagggattgagccaaccttgcagtttcagaaaagcaagaccctaatgaagcaacaggaccaggacaggcccttgtctgattctgggaaccatgactccagagaaatcccacccctcagcccccagacactcacccagatctgcgagtcacttc

SEQ ID NO: 7129 - DNA, 201 bp, Bos taurus
gaaaccttcaggccaagaaattaagatgaaaatgtttccaaaatgctaatatctttaaggtgtctggcagaagaagactcaaaactaccctgaaggagcgtatcccaaactcaggccacagagaaatgcacagataaccccaccaaggacacgcatgtgacctagaatttagagacatgcgcctgataagcccctctgcgg

SEQ ID NO: 7130 - DNA, 201 bp, Bos taurus
tccatatatgaccactggaaaaactatagccttgactagatggacctttgaagggagcattaaggtgagtgaactaataaaagtgatcagggtaggcctcgttaacaaggtgaaatctgcacaaaaatgtgaaagatgtaaacaaacagcccaatcaaaaaatgggcagaaggcctaaatagacatttctccaaataagac

SEQ ID NO: 7131 - DNA, 201 bp, Bos taurus
ccttcctagcagcgctctgaacgacagccagcgagggcagttttgctgagctgtcggttcccaggttccaatttccagaaactccatttccaggacaagatgcacacgagcgcttgccaaggccaacacgtttggctgcgtgtttaccgctgtgacacctgctgctcagacgggccctgtgctgttttgtacataatggtt

SEQ ID NO: 7132 - DNA, 201 bp, Bos taurus
tgtttggacttgttgagcttgggatgctcttgtctaacctgtgagtcacctgtgtctctcaggtagtgatgtatctagggagaaagtttaaaatgagggcaaggccctctaggatttgagaggtcgagctggggaggatgtcacagttactgagaagtggcagagagggaggcggaggatgggaggggctggcgtgggaca

SEQ ID NO: 7133 - DNA, 201 bp, Bos taurus
tatctaccatcttttgaggcctattggaagccatgctttgtaagtataattttacagatgaaaattcatcagtgttagtatttcttctctaattcaccttagggccatagtcctcggggtgtctgagatggacactgacatggtctgacagcatgggtggaagtccaccaagctcagtggccggagcagggcccaggggtg

SEQ ID NO: 7134 - DNA, 201 bp, Bos taurus
aagaccaacagcagatgggcagggcagtggagggtctgggcagttaaaagccagaggctacacaaaaaaatacagagacagagaagcagacagcgcacagaggatgtgtggtttccgggccacgcgggcacagccggtgctcagacgcactgatgatggaatgacgctgggaatgcggcgagcgataagatctgggtttga

SEQ ID NO: 7135 - DNA, 201 bp, Bos taurus
gaaaagggccccggtgtcttccttccctgtctctcgtggcgggaggagttttgcagtgacatctgcctgcctgcttcttgcacgcacatccagagtcaggttgtacaggcctccagggatcctggctctcggctgtcttccccccggtgactcagtccttggggagtctgtgcacttcctctgcccccgtcctgaccttta

SEQ ID NO: 7136 - DNA, 201 bp, Bos taurus
tctggcaatgaaacccaaaggcctgtatcatctgagctgccattggcccagtgtctacgtgagaggctcggtttccaggccagttccacatgggtgtccacgtgtccttcattccttcactcaacagggactccaggatgccagatgctgggtgtccagtgataactgtacagacatggccctgaaatgtacagtgggcgg

SEQ ID NO: 7137 - DNA, 201 bp, Bos taurus
catgactactggaaaaaccatagctttgactagacggacctttgtcagcaaagtaatgtctctgctttttaatatgcagtctaggttggtcataacttttattttgtgggggctgcatggctccaaaactttcctttaacctttaattgtgaaaattttcaaatgtacacaaaagtgaaaggaaaaatgaatctcctgtac

SEQ ID NO: 7138 - DNA, 201 bp, Bos taurus
gcctcccaagtggacaggccctctttttttaaaaaaaaaagtttatttatttgcctgtattgggtcttcattgtatcgcgtgggatcttttcagtgttgcactcggactctgtactcatggcatgtgggcttagttgctctgtggcatgtgggatcttggttccacaaccagacattgatgctgcatgccctgcattgcac

SEQ ID NO: 7139 - DNA, 201 bp, Bos taurus
ttagtcagtggaaaaaaataactattcatttaattttgaaatgtaaggtagcctggtaggctacagtccatgggatcgcaaagagtcgggtacaactgagcgactttctctctttctttctaaggttatgaagtaccagcatacaagtcaagtagatttgcccactccttcaaagtattccaagtaataaatgattctata

SEQ ID NO: 7140 - DNA, 201 bp, Bos taurus
agggacccctgggtgcccgatcaggaaaggacgccaggaggcacagagcccgagatgctgggtggcttcacggggcggtggcctgtgcagtcccgtgacttctcgccctgtgtttttcccgtctgtggtggcgtcttgggagttctctggactggcgtcagaagtgcgggccagcagtgccagcttgaaagctctgggtgc

SEQ ID NO: 7141 - DNA, 201 bp, Bos taurus
ttacagttagggtgtgtcaacgccgagggtggtggttcccagtgccgccagcagggggcagcagaaagccgtgtgtgtgggcccagcctcccggggctcaggaagggtatttaggaatgtgatggggagaccaagctgaggtttaggagggaggtacaggcctggggtagaaaggcaattagcgaggggagtgagtggaga

SEQ ID NO: 7142 - DNA, 201 bp, Bos taurus
gtctccagggacgcatctggtcaagccgtggtctagggcttggctgttttccaatgatgctggccgggtgacgacgtacatggattttattgggtataacgggaaacggggacagacttggtcacatagggaggcacgagtgtttcttttctactcagaggctagagtgttcctgtgatgcaatctatccctgtgtatatt

SEQ ID NO: 7143 - DNA, 201 bp, Bos taurus
tcttgtgggctctttctcagcactggtaggttcaactggagtgtgggttatcagttcttatcctgccttaatcctggggcccttgtatctgctgagatcacgagtgtaggaaaagcttgaagctatcataaatgtgagttgctattttcgtcctgagtggtaatgttgtagacggctgttcaggcctagcctgtgcagaca

SEQ ID NO: 7144 - DNA, 201 bp, Bos taurus
tgggaaacacatgggccagcaaccagctgcaagctggtggaaatgaatggaataagtagagcagatgggtgtgtaatgggcaagtagggaccgacagcagtgaaggagctcctcaatggccagagagaagtggggtgggcctgggaatagcgccaagaacgcttgagaccaaaggatttctaccttgacacatgggctctc

SEQ ID NO: 7145 - DNA, 201 bp, Bos taurus
agcccagatgcgtcgcagcagctccagaggctctggaggccagagacagatccagggactgtctgtgcctccagaggggtgtgggaagacagcatcttgacgtttccatgggcccaaatgcagcatgggaattggggggtgagggggattgggggggaagcaggaggaggggagcgggaagcaaatggcaagcgcactggt

SEQ ID NO: 7146 - DNA, 201 bp, Bos taurus
gagcacaagcaggggtcagagggagccctctgggccagacatcacccaactcacctgattactttcaccaactagcccctacactcgctgggtaatgcgcgggctctgcaaaccaggccttcccttgtggctcagctggtaaagaatctgcctgcaatgcgggaaacctggattgggaagatcccttggagaagggaaggg

SEQ ID NO: 7147 - DNA, 201 bp, Bos taurus
tctgggtagtcatagttgaagtgggtttgctaatcatgaaacccaaggaacacgggaaatagatcatgtctggaaagacgttccgagtgcctttctggccgtgaaacccaccgtagccttttcaaggtcattgtattgtggttgtggtcccgcttcgcacacactggtggttcattcggccaggaattgtgggctctgact

SEQ ID NO: 7148 - DNA, 201 bp, Bos taurus
ttcagagtgacttcattaaacctgcaagagttgccggtcgctgtcacagagagggggaccaggtcaggcttggagaaggggccgcgatgtgtgatggaccgcacgatgccgcagagaagctgtcttgtctcccagtagagagcctgctgtccctccgtcgctgtgagcactcagcactcacctcgatgtctgcttgcctct

SEQ ID NO: 7149 - DNA, 201 bp, Bos taurus
agggctccccaggacccaggtggctgctggggcacacccattgtacccacacccactgctggggatggagccaggccccactgcaagggacagggcacatcggggaggacacttcctggaagaatgaggacttcagataaaaactaagtctgagaaacacaagattgcatttctcacacatttgaatttcgtggcctgaga

SEQ ID NO: 7150 - DNA, 201 bp, Bos taurus
gatactgaatctagttccctgcactatatggtaggtccctgttgtttatccattcacagacaagacttagatgatgtttctggttttgttgactggaagcgttcaatgtctgcaatggaaaatatgtggataatgaggccaagtttccccgatgcattttgcatgcaatattgtgaaggctgctaaactaactcatgctaa

SEQ ID NO: 7151 - DNA, 201 bp, Bos taurus
tgagatttttgggccatatcctcttttctctgtgggctgattgagaacttagccattgaataagatgtggtccacagtgcacgtaagacctgcccgcccctcgcccccgccctggcccccaaccatcatcctagagattcttggaaggtataaggagaaaggctgacaactgtccaaacggcacgtgagcacccctaatag

SEQ ID NO: 7152 - DNA, 201 bp, Bos taurus
tcatgtttactaaatcacctgtttgaggagcagagcttcctgacagcccaggggaccgtgaagaaaggagaagaagctggctaagctgagaaggccctgtcttccctttccaggagggagtcactcctcagtggactgacccaggaaatgcatgacgtgtttctgcccggacccagagagcccccctcagacccttgactg

SEQ ID NO: 7153 - DNA, 201 bp, Bos taurus
aattcacaaatatgtatatataatataatgaacttttgaatgtgatacagctaactggcctttaattgtatctaaaatttttcatcttggccactcttcttaccaacatttagtcaataagtgtatcttacatagtcaagctccaccgaatgagcttctgaacaccagcgcatttgaatgaatagacatgtacttaatttt

SEQ ID NO: 7154 - DNA, 201 bp, Bos taurus
gtggctagcgtgccctggatacaagggtggtgttcgtaaggctgaggcccagaactggcccagagtcacttccgctacattctgatgactaaaaagatcacggggtcagcccacattcaagttgtcgttgttgagtttgctaagtcatgtccagctctttgtgaccccatggactgcagcacgccaggcttccctgtcctt

SEQ ID NO: 7155 - DNA, 201 bp, Bos taurus
tgaaaatacaaaaacacagacaagacatgggcattgccccaaggggctcagtcttaggaaagaaaggactgtaaacagttaagatacaatgtaacaaggacttccctcctggcttagactgtaaagtgtctgcctacaacgcaggagacctgggttcgatccctgatccctgtgtcaggaagatccgctggagaattccat

SEQ ID NO: 7156 - DNA, 201 bp, Bos taurus
ttcttccatgctcagctttctttatggtccaactctcacatccgtccatgaccactggaaaaaccatagctagtgcttatattcatctatgatcctggagagtcgatgtccacagccccacaggcctgcacatgtccaccagcgccatcctcaccctgagcagacagggcagagggagatggaaaccaaactctgatccca

SEQ ID NO: 7157 - DNA, 201 bp, Bos taurus
ccctgaagggccattctggggcaccacgtgacggcccaggttgcacactggtatttctcttagctctcctgctctgcccttgaccttcggaagctgctgccgtgtactctgtgatggcctggaatgcctgctaaagacgtctcttattctccggcttggatcctagtctctggcaaagttatccctgatgggttcagattc

SEQ ID NO: 7158 - DNA, 201 bp, Bos taurus
ttcttccaagatgccttacttaaaagcactaaaggagaaaaaaaatatatagcatttcttggaggggttctaactccttgttgtgagcaatgagatatgcttgggagtcagtttatcaggagttttacatgtttggagaggccagattctgtctcaaatttaggttactggagacaaagtcagagaggcaatatatttaac

SEQ ID NO: 7159 - DNA, 201 bp, Bos taurus
ggtaggcggccaactgggaagccccacaaaacaatctatagggttgacaaaaagcatcagtggttgctacgagaagggaggaactcttaggccgaagagattacagacgggaatgagtaagcatgtggaggtgaaggaaatgttcattatcttgactgtgatggtggtttcataggtgtgcacgtatgttacaacttaaca

SEQ ID NO: 7160 - DNA, 201 bp, Bos taurus
gaagtccctttcaaatgggccctaattagcttgaaaggtaaatagatgctttacaatgcatactcaattgatgtttaatttttccaaaacgatctaaagggttgtatgatacagtggctgatcaaaagtttttatgaaacaagcaaatgttaaagcagaagttacacaacatctcaaagtcttaagttttctcatccacaa

SEQ ID NO: 7161 - DNA, 201 bp, Bos taurus
ttaattttttctttatcttctttctaaccaaatcacacacacacacacaacgaatccagctgcctgcctgcatttctggcacagtctggattaattagaatgctccagtgagtcccaagacagacttcaccagctgaaaactcgctgcctcggctccctctctcttgtcaagtgcaaatctgaccatcctggcacggggca

SEQ ID NO: 7162 - DNA, 201 bp, Bos taurus
aatctcattaaagctcagtttccttatctataaaacaaatgtgtttctctgaagataaaattagataatgcttagcaaaattttcggcccacagtaaactctgattactgttactatttttatgaaaagtaataatcacaaaaatattaagttaatgctgtcgtataggcctcctttttgttcatcactggcattttcact

SEQ ID NO: 7163 - DNA, 201 bp, Bos taurus
tgggtggcggcctggtggatgggtgctcacaagcaaggagtgcaaagattttttagaaatctaaccattataaatggccctccttctgaaggtgataatcaattcaattgttgctgttgcttaatagctcactcgtgtccgactctttgcgatcccatgaatcgcagcacaccaggcctccctgtccatcaccaattcccg

SEQ ID NO: 7164 - DNA, 201 bp, Bos taurus
ggccactcggccactcgtgaggccgggggtcagtgtgtctggaggagatcacaagccccactcggagaggcggtctcctccctgggccgaggtcagcccccggctggttccactgacagactcctcgtctgggaacctgtgtgtcttttgcttgtgaggacctagctctcacccagacgtgttcggggatttccctgataa

SEQ ID NO: 7165 - DNA, 201 bp, Bos taurus
gaaatactaacttcccccggcagcatcaccgctgacggccaccgaagagcaaatgcaggctggcataaggtgcggaaataatgaaaacctatggtctagaccattcgggccacaggaaacttaccccaggggcacatcatcaccggaatggagggtgggggacgtctcatgttacagacacgtgcacaagccgtcgcggtc

SEQ ID NO: 7166 - DNA, 201 bp, Bos taurus
ctccaggcccttgaacagagtagcacatacctgtgtgctttccccagaggctgcagggggagtgttttaatgatggctgaaggacatcgtgagctttggtggggaagggtggcccatgggctgcttcatctgtcagcccgctctgagcagctgagaccccagggtgctggtggctcttgctcatcgtcccctgagtgtccc

SEQ ID NO: 7167 - DNA, 201 bp, Bos taurus
cattcctccttaagtttttatttgtcttgagtttttatttcttgaggacaaccctcttccaaagctaggatgaacctaatcagtccaagctggccacatgctgtctgggtgctgtgatgaaatgccaaaagcattcttaggtggttgttactgtttggttgctgagtcgtgtctgcttcttctgcgacccacggactgaat

SEQ ID NO: 7168 - DNA, 201 bp, Bos taurus
tttctttttcccataggaatctgaagaactctttcaggatacacagtttttaaaaaagcattcttgccgagggtctttatatcaaaaatacatagctcctctcttcaccagaaacaatggaagctttccaggaagttattgtcagtgaccactggaggtggaaaacctccaaagaaccatccatagtctttacgaaatgac

SEQ ID NO: 7169 - DNA, 201 bp, Bos taurus
ccctctgtgaaatacagttctattttgcatacacagtggtatgcaatggcattttatataaatggtatttcatcaataccaattacttgtcagatagcccgtttctttatgggccttataagatgatagtgataaaaataacaattggctggagttttcatgatgctgccaaaagtataaatcttgataacctaatgaatg

SEQ ID NO: 7170 - DNA, 201 bp, Bos taurus
agggctgatctccttcagaatggactggttggatctccttgcagtccaagtcttcccaggaatccttttaagcaggtaaggcacataaggtatggaaatagaactgatttcaagtcaatatctttcacttgaaaaagtcccttaacttgtctgagcctcacttttgtctgctgctgctgctgctaagtcgctttagtcgtg

SEQ ID NO: 7171 - DNA, 201 bp, Bos taurus
ggtcagtcctatggcctgtgccatgacactttgattacccaaacactattgatcacatagaggcaagtcattcaatggactacatgagttccgagtacattcccacaggccttaataaagaccagtgatgcagaacagcaggagaaggaaggtacagcagagatcagagaggccccagccctccacctcagggccctttct

SEQ ID NO: 7172 - DNA, 201 bp, Bos taurus
atgaaacaactggccatatttcatcacacattttcctgtacccccctttttctagagttccaatttattcagtatatattcagtatattcagttccagtatatatttggcctcctgatgcttcatatcttactgagtctctgtacatttttttctcacattaggttttttctgagtttgtttgtttatttgtttgttttta

SEQ ID NO: 7173 - DNA, 201 bp, Bos taurus
gccggaatatctgctaaaatgcagattttcaatgtgatgtcaatagcattaaatgatgtcagtaatgaagtcagtgtggccccctaaataaacctaaaacaaaaaacacggtccacacaggtatggacaggaagccttgtgctctgtatgcagtagcatgaaatagggctacaggggcgagggcaatgccaggcccagcgg

SEQ ID NO: 7174 - DNA, 201 bp, Bos taurus
tctctcccctagtttgtctccttccactgaagaaatttgctccaaagatgtaaacaatgtgaaggaaagaatacggagagcaggccacacgaataaccttgtttataggtttctgagcacagtttccaactaatgatatatatatatatatatatatatatatttatctataggatagatcatgaaatacatcacccgaca

SEQ ID NO: 7175 - DNA, 201 bp, Bos taurus
gttgccctgcaatgtgccaaagatggtggcgggaggaggggagctcggggggcaagaaggacagggatacagagggtggtgtccaggtggaaccttcacatgtgggccagaaagggagtcccatgtgtctgaggagactcgcccatcccttgttcctgtgtctgtagcctcagaagattgaaccagatgacctggggggtc

SEQ ID NO: 7176 - DNA, 201 bp, Bos taurus
gtttgtgtctctccaaatccacccattgaaaccctgacctccacgatgatggtattaggagatggcgcctttggcagtgatgagcacgagtggtccccttgtgagtggggttagtggccttataaaagtgaccccaaagagctccctcgccccttccagctatgtgagagcaatgagaacttagcagtctgtgaccccccc

SEQ ID NO: 7177 - DNA, 201 bp, Bos taurus
ccattcggggttgtcagcgtgccagacttcggctgtttctctttttattggctgttgttaataggtgtgtagtgatttctcatcatggtcttcatttgcagttccttgaaggcatatgaaatggagcatgttttcacatgcttatttgctacttgtatatctcctttggtgaggagtctatcgtggtctttagcccatttt

SEQ ID NO: 7178 - DNA, 201 bp, Bos taurus
cttgggggccgcgggaggcgcgtcccggtctctgccccgagctcacagcaccttcccatcccccacacccgtgtccagggtccccttttcttaggacaccgtttctcctggcctaggccccccaccaggacggcccaccctgactactcacgtgctcccaggccctgtttccggtccctgcgggaggccttcagcaccttt

SEQ ID NO: 7179 - DNA, 201 bp, Bos taurus
ttaaaaagcaaactctaacctcaggtcccggggtttctgctccaagggctctgacatgggctggggaactttaacaaaacctctgatgggggccacggtcgggaggggcagatactgttgcctatcggtcgtcattcctgaggaggggcggctcatgcactcagtgaatagaggccagaggtgctcctcgacgtcccccag

SEQ ID NO: 7180 - DNA, 201 bp, Bos taurus
ggatgtgtctaaggcgaagccccgaccgtggcctcggctggagacaggacccacccaggactggatgagtcctctgtgctcagcagcccggcctcgtgctaattccgcgcagatccctcgacgcaggagtcctccccacgcctcccgggagcccctcccgtcccggctcggtcaccaaggcccggaaggccaccctcccga

SEQ ID NO: 7181 - DNA, 201 bp, Bos taurus
ctcgtggtgggcattcctgcctctctgcttcgtctctgactcgactctcaactcgctgacaagagagatgcggaagacggcccctcggcttccacacctgtgtggggctccctgagacacacgtcaggtccttaccacctgccccgactgggcccccacggagacggagcagcaggtgtgtgcgcaggatgcaggaccagc

SEQ ID NO: 7182 - DNA, 201 bp, Bos taurus
ggagctgggcctctgggaggcaacgggtcaggagggtggggccccactgggatgaacgcccccacaaaaggggcccagagcccctgccgccacatgaggatgcggggagaagacaccttctaccaactgggtcctcaccgcagaggaccggccagcatcgtgaccctggatgtccacctccagagcctccagaagtacatc

SEQ ID NO: 7183 - DNA, 201 bp, Bos taurus
gtaacacgggacactctgcaacccgcatgctggccaagcttctccagcggaaaatcagaaatgctccagcctcggggcactttcctcctgtccctaattatgggaggctcgtctgggccgactcagcagttctggaaccaggagtgttctcccctgtcggttacttgtctcctctgtctcttcttacctgtcgctgctcta

SEQ ID NO: 7184 - DNA, 201 bp, Bos taurus
tctaacctggtgtgtatttcgctctcgcgatttgtcacagcttgcatgagccgctttcacctgacaagtggccggcccactggacagctgagtctcagcataaaaggggaaagctcggtgccaccgcgcattggaagttcagcagcaccgacccggtggcttggacggggtcggggtggggcctccagcatctggagctgt

SEQ ID NO: 7185 - DNA, 201 bp, Bos taurus
ttgctgttgagagatactggctacaacctagctgaagggtgactgaagtttcattgctctgattcactcgggctgtggtgtggcccacttcctcctggtcagtgtctagttctgagcgttggagtctgatattccaggtaacctggttggtagctgtgttgctgatgtgggctctgtcttctggcacttgtctgtgcttcc

SEQ ID NO: 7186 - DNA, 201 bp, Bos taurus
cggggcggggccgtagagagcagattgacgggtggcggcgcgggaggcgtgagcgtcggtcctccagcccctcagggccctggcctgctcgcttttccccgggacatggggctgcttttatagagtgcttcagtagacagtacaggcaagcgcatcaccggggcccacacgcaacgggaggcaggcatcactcccgctcgg

SEQ ID NO: 7187 - DNA, 201 bp, Bos taurus
ctgtgggcagcgcccaagtgttacagcatcggtccaagcgccggctcacacttccgcaacaacgctggctgggtgctgatgttaggcctgctttacagacatgaagcctggggtccagaggaggtgagccgtgaaccatctgtgtccactcccacccactaccttgaatatgaggaatccaacgccccctgcccctggggc

SEQ ID NO: 7188 - DNA, 201 bp, Bos taurus
gatgcaaagagacgcctgggtagatatttaacctgaactcaggccggagctgccgctggaccctgaaccgctgcatctccaagagaaagcccgttccctggtgctgagagccaggcccctgtgcccctcggctgggagggagatgcctgccccagaccccacctaggcgcccgcctgctccctgactcagggtctgcatcg

SEQ ID NO: 7189 - DNA, 201 bp, Bos taurus
catcccggggcaaactcattcctgtgggctatttcaaaagctacatggcattacgggatcacaagagaaaacggttataagacaatgacttccatattccgccggcctggaatcctttaaaacatgcaaatgtgaaatgagtgctcgttgacagctgcgattgttttatacggagctttgctttgggttagcatcaatcat

SEQ ID NO: 7190 - DNA, 201 bp, Bos taurus
ggaccctcttagctgaaagtctcttgcacgtgttcagtgggtaacggcagagctgagggccggcagcccatctccaggcccccgcaggggacgctatgcctcttccgtcctgtgtgtttggagagtttggagcgggtcgggctgcggtctctctccgccttctgcccctcggccaggtggcacatggagagaccagggcgt

SEQ ID NO: 7191 - DNA, 201 bp, Bos taurus
aggctgtgcttcgtacctacagcaggttgggaggcaggccctccaggggacactcttggcgtggtccccggaaacccaggggctcctacacaggccaacacgtacacggtgctgaaaacaaaaggagacgcagggtccctcctgcggatgcaggctcccacccggcgcccctccaccttcagtcacgtgaacgcaccacac

SEQ ID NO: 7192 - DNA, 201 bp, Bos taurus
gcccagtccccgcatctgaactctgccgacgggacagggggaggaagaggcacccgccactgctacgtgctgtccatccacgagttaaacatgtttccacgtggcccttcatgttctttctcccatgtcttctcaagcaatgacttcatccagggtcacgttgggttttctaccaaggtgtctgttgcttttcgccttctt

SEQ ID NO: 7193 - DNA, 201 bp, Bos taurus
ggtggcctcacactccagccttggggcacatggtaaggctctgcccttgcagttgctgatgagggcaggagtgtgtggcccaacttcagccaatgagtcacgagggagcagtccagctgagaggcttcaggagagaaacacaaatagaaagaaaccattttttcttctcggtgttctcaggcccgtgtcttctcacggctg

SEQ ID NO: 7194 - DNA, 201 bp, Bos taurus
cattcacagcagggtggctcacagcagctgaagtgtggaagcaacccccatgtccatagatggatggacaaacaaaaagaatgtggcccatccatgcaacagaatagtagcattcagccctaaacggacgaaagtcctggcacctgctacagcacggtgggcctcgagctcattatgctcagtagaacaagccagttacag

SEQ ID NO: 7195 - DNA, 201 bp, Bos taurus
gtgacgtgtattcaacctgtgatgcacgaacagctcaaatcatggttgaatttacaacagaagacgcgagaagaagagtcagaggccaactagacaagtgcctaaagagaagcaaccagagcaaaagatttcaagagataagaaaagggagaggaaaggaggcctggggtaagcgggctgatgttaggagtctcagtgcga

SEQ ID NO: 7196 - DNA, 201 bp, Bos taurus
aggaagcagtcatcttgtccccgccagcccctgtctcctaggacactcatgacaggaggtctgtttccttaggatgtagtcggggccatggttttcagaccaactggctgctggagaggcagcgtctccctgactccccgctcacctgtgaccgccttcgggcccatggcatccttgggtcccagtggagagagcaggtca

SEQ ID NO: 7197 - DNA, 201 bp, Bos taurus
ctccggtggctgcgtcactggccggccggccgtgccccaggagccatcctggcaatgtcctgccacctgcagcaacgcctcctcttgattccagtcagttaacttgggggaaggccgtttgtccaacaggggcaagaggtgtcctcttagttgaaaaagttagtttaaggtttaagaaaactctgacacacatcatgtaac

SEQ ID NO: 7198 - DNA, 201 bp, Bos taurus
gcgggggcgtggggttccggtaacgctgcaagagcctggcagccacacagcgtctccccgctgagctctgtgctgctaccgtttgggattctgtggaacgcggccttcacccacagttcatgcgtaacagcaggtgcgaacctgagcagtaagcactcagagcggtggcccagctcccggggaacgtctgcggccactcac

SEQ ID NO: 7199 - DNA, 201 bp, Bos taurus
atggggacctggaggagaagaagggcccacagctctgcagccctcggcccaggctggatgcactccccaagttcagctcgtgtcctggaacctcagcctgcagcctcacctgggcgtgggccgtcctgggggccgctctggagaaggctgtcccgaagaaggctgggaccaatcccgggactggcttcctcacaagagggg

SEQ ID NO: 7200 - DNA, 201 bp, Bos taurus
gggcttccctggctcttcccaccactccgggaacaccaggcgtttccatgagtttctgcggtccttgcaaactggagggcctgccgcagcccctcgggatgggggtagagacttaagactgtgggtaagagacagagaatcctcatgctaagatagccttttcttgtcagggtgccccaagcccctccccaccagtgaggc

SEQ ID NO: 7201 - DNA, 201 bp, Bos taurus
gcgaactcctgaacctcttgctgcacgtcagagttgggtgctcgggcccaggaggcccacgtgtgggacaggttttgtttaaggcctgtggtcgcccacacgtcaggtgtgtgcttaaagctgccgtccagtggctcctagtagggacaggaaactgtgactgctctctggtgaagtgtccgtacagatggcagcctgggg

SEQ ID NO: 7202 - DNA, 201 bp, Bos taurus
cacttgtcgagttgtatttggaacctgtggctttttccagaggatgcaactggtgtgtcagtgacccttcgtgtgtgatttcatcttaggggttacattcgaagtggtgcccaggcatccggccttaccttgagtgaacggggaaattagtgtatttcggaatgcggcatgacccatgaggcttcctctcgagtttcaatg

SEQ ID NO: 7203 - DNA, 201 bp, Bos taurus
ggtctttgaagatttcacaggccacagggcgaagaagcccatttgccacaatgactgagtttgtgcaccaaactacctgagtcactcaggctctagaccccgtgctccgcaacaagggagtggcctctgttggccgcaactagagaaaggcttcacgtagcaaagaagacccagcgcagcaaaaaaaaaaaaagcgctcat

SEQ ID NO: 7204 - DNA, 201 bp, Bos taurus
gtaaggacgtttctttgcctcctctgatttctgggggccgctgccagtcctcggttctcctcatagacgcatcactaaaacctctgccttcactgtcacgcggccttctcacctgtatctccggctgtgtccaaatttccctcttcttataaggacactggatttaggactcacccgaattcagtatacctcatcatagct

SEQ ID NO: 7205 - DNA, 201 bp, Bos taurus
ctgtgttctggcccctttatgcccagtcagtgcaaaaagccaccctgtcttctttcccctaataacaaagtggttctttttattctatgttaacttaatggaagtaaaaaaatcccattctaggccaggatttagtaatatgtttcctaaggttgtttgtcacatatgtttgttacagttcttttctctgtcaaaatttaa

SEQ ID NO: 7206 - DNA, 201 bp, Bos taurus
cagtgtacatatgtcaatcccagtacgtcccagtccatcacaccctgccccttccccccactggtgttcatacatttgttttctctttcactgcagcactacttacagtagccaggacatggaagcaacttaaatgtccatcaacagaggaatggataaagaagatgtgagacatatacacatgaaatattactcagccat

SEQ ID NO: 7207 - DNA, 201 bp, Bos taurus
attctcctccagaggggtcctctacaccagcatctttctcttagtggcactcacattcccatttccctaaaaatgatcacatcacctgactcttctttaccttcatttccaatattcattctactttatctaagaggttcccactatggactgctttcctgctgtctctcctctcccacagtccccagtccaataacctgg

SEQ ID NO: 7208 - DNA, 201 bp, Bos taurus
gggataaatgcacataagtcaacttctgggttacagcctttaaaaaatggattccctcttctttatcttttccttcttcctattcactggattgtagatgcgttactggccagcttcaatcaggtggatgaaaaccataccctgatgcagaggttggcagactttttctctaaccaggattctaatctctgttgaaactac

SEQ ID NO: 7209 - DNA, 201 bp, Bos taurus
tcagctatctgtgaagaggagccttccatcgggcatgtactcaatgttggttgattttaagtaatccctagctaaatatcaccttttgtaaggagcctagacaccttggatttaagctgagtaaccatactttgttgaggtatcagactggcccctagtgaaggaaacagtgaggtcaaaggccccagagaggagcattcc

SEQ ID NO: 7210 - DNA, 201 bp, Bos taurus
aaggatttaaccacatagggatcgaataagggcccctcggtgagggtgtagctgaagaccggagacaacgaggagaaacacagctgtcgagctggagactggggtgcagcgcccccaggcctgggcggcctgcgcgctgaggtcacgggcgccggctccggtgacgtcatcacggccgcgctgttcgccgggctggagctt

SEQ ID NO: 7211 - DNA, 201 bp, Bos taurus
aaatctctatggtttatacagttaaaatagagaggaaaatatcaagaagaacatttgaaagtataaatagatcaggggccagaagtggactttgcttgttctaaattagttgagaaccagcctttgtgggtttttaaagaaaagtactgggggcaatgacactggcccatgtcctcagcccctctccatgcagctctggtc

SEQ ID NO: 7212 - DNA, 201 bp, Bos taurus
cctgagcctggtttggcacgtcagtgagccccagtctcactttctctcagggggagtgcttgcagctctctaccttatgtgatgggttgaccagatatccagaggcactgtggcacttacacctgtggaatcatctcaggaccttgtggtagcagggctcatatgaatgcgccctgatccggaagggtagcctggggggat

SEQ ID NO: 7213 - DNA, 201 bp, Bos taurus
gtatttgatatattgtctgaagagctctggtagtgcagagctagatgcagtctcagaactgcttggcaagtctgggttcatcagttagagcatctgcaatgttaaccttgccatttaacaaacaagcaaaaatagacttgttacgtaaatgggaggaactggagagggaatctattgtgaccttggtgaagaaaattccag

SEQ ID NO: 7214 - DNA, 201 bp, Bos taurus
gaccctcctctagtgccttctgtaacaggccttgccagatgctgtcacggctgataaatgcaattcaagaaggaccaaggacccaccttgagggctcaccggttaggaggagagcaggacaatgggctccatcacctggctatccaaattggaaagagacacacgcccaagagagggacagaaaactcgatgatagtgtga

SEQ ID NO: 7215 - DNA, 201 bp, Bos taurus
ccacctgattcgttaagtttcttccaaagtcagaagagatattacaaaaaaaaaattctttcagctgttaagaaagagctctctgaagataatatggaagggccaagatcttccaggatgctaataaataaattgcaagcaaggagaattacagaaaaaaaaatctttgaaaagccaaacttttcaaccttgaaaaatgtt

SEQ ID NO: 7216 - DNA, 201 bp, Bos taurus
acattttcaccatattctgagttatagtgacataaattacttattttggaaatagactcagaggtaaggaaaatggcctattttattgactattctgagacattaccatactatgtgctgcgtatgctgtgctctttgtgatcccaggaactgtagatggccagactcctctgtccatggtattctccaggaaaggatact

SEQ ID NO: 7217 - DNA, 201 bp, Bos taurus
tttgtcatgtcctgagcccgccggcacacacaggcccggctggctttagcaaagtgcatgaatgcagcagggctcctgggaagcggccagcgtctggtcttactgcctgagcatcacccagagaccaaggagaaatgggaattctcagcccgaacccagacctcctgagtcagaatctctgtgatcagggccaaggtatct

SEQ ID NO: 7218 - DNA, 201 bp, Bos taurus
taattctacccaaaataccagggaagactttcagaggagatgccttttgaagagagcattcccaggaaagccagtggcctctcccagaggtccaggctgttcaaatacaacagaaatactggacctggaaaggctgatgtttaaagcttcaacagccacagggcctctgaaataaagtcaacaagaaatggtgttacaggg

SEQ ID NO: 7219 - DNA, 201 bp, Bos taurus
tatgacgacggagcagctgcctaggggagctggaggcgatatgaatcttgtcacaagcataagggagccagcccttcaaggtgtgggagggtgcctacgtgggggagagggctggccatgggctgtgatccctgaggaggccaagatttctagatttcagcacctgtttcaagatgcttgatagggtgacgttggtgggta

SEQ ID NO: 7220 - DNA, 201 bp, Bos taurus
tccaagctccttctctacaccactccccctccaaaacatgctctcagctaccctttggacctgggagcataaacactgtggcctgatttgacctcacagcttggggcacggaatatccagataatgatctagaaaagaggatatgggatccaggtggacagaggtgaagccagagcaataaaagtgagtcctcttgcctcg

SEQ ID NO: 7221 - DNA, 201 bp, Bos taurus
aaagccttttgataactcctggggcctacagaaaaacccaaacctgtcatcaacagcacactactccctagcacttcctcaaggaagtctcagcacctttgagaccctttctcactgtgttccaaaaacaccagaatgccagaattctctgaacaagtctctgcactaacagtgacaggtaacacagggtctgtttgctaa

SEQ ID NO: 7222 - DNA, 201 bp, Bos taurus
agatttcagtgtttcattttgccttatcagtgaggatgctgtttatgatgcaagggcatcaagacttacgggctagaggaacaccactcatactctcctcttctccctcacttctcagtggtctgagtctgcagcaagctgctgtgcatcttgggtgatcataggaggactgggaagtcccatctgagaaccaaagtgaga

SEQ ID NO: 7223 - DNA, 201 bp, Bos taurus
tatatataaaatatcctctggcttcctggatatttaaaaatccacaaagcaattattcaaaagttagcagtggctatcactacttagtgggagttcaaataacttttatattcttcttcatacttttctaaattttctgaattttttaaagcatgtactattattagaataagagggaaaatttttaacttatttttattt

SEQ ID NO: 7224 - DNA, 201 bp, Bos taurus
attgagtgggagtgatccctttaacctgtggcatttgatactaactctaggtagatagtgtcaaaattgagttaaattgttgttgctggagtattggaccgtgtaaggggaaaaaaatccacacgtttggaggccagaagtgaagtcttaagagtagtgtgtgtggagagaaggaaaacaatatctttttcctttcaaagc

SEQ ID NO: 7225 - DNA, 201 bp, Bos taurus
ggcgatgtgcacggcccctcgcagatcataaagggctgcgaagtgaggataactgtcctctaatccactaatcaatctcagagatcctgctctgccagcacctggcctccagccgaggggaggaggggggtgtgtggggcgcagtgagcagatgaccgtgtgaacaaacaaaatgcgatagagtcctttccttaaaaatga

SEQ ID NO: 7226 - DNA, 201 bp, Bos taurus
ctctgctggccagtcctatgttctttgtaagttttacaccgagaacaaaaacaccactgtggaaacagatttgggtttttcccctgcaaagtttattgggatttttccgtttaatgcttccaaatctatgacagtctttcaattttgtaaccacatttttattctggtgctttcttttccttcaaagttataattgaaaac

SEQ ID NO: 7227 - DNA, 201 bp, Bos taurus
ttatagatgagctccacaattagttaactttaaataaaggagttgaaagaactttaaggctgtacagggttgacacgactgaaacagctttgcacacacacgtgtgacttccctgagagaacaattctgcctttggaaattaccttcagccagtgcctgagagttccagcctacccagtctgacagcctgctcaggatttc

SEQ ID NO: 7228 - DNA, 201 bp, Bos taurus
gccttggccaagttctctaacctgtgtgagcctgtttccttatctgtaaatgtgatcctacccgatttcaaggtggctttaagaatgcagtcagacattgtgtgtaagcacttagcacagtgcctgtggtcagcgttcagtaggtggtttttattgtttttattaataccaatgaggctgctgtagaagcacaagggagag

SEQ ID NO: 7229 - DNA, 201 bp, Bos taurus
tgagttgagccatataaatcctgaagctcttacattggcctacaaggccctacattctctgcatccctgctgaaccccctttcttatcattctcccctcactcaccttcgccacactggccttggcgtttcttgaacatcaaaggtatactcctgcctcagggcctttgcacttgctgctgctcccttgaactagaatgca

SEQ ID NO: 7230 - DNA, 201 bp, Bos taurus
agaccactacaggtaatggaaaccccatggagtgttctcaaccagaaagctcctttaagatgtccttcaaaagagagactaaagttctgaagactctgtcagtgatcatgggggtgttcgtgtgctgctggctccctttcttcatcttgaactgcatggtgcccttctgtgggtctggagagaccaagcccttctgcatcg

SEQ ID NO: 7231 - DNA, 201 bp, Bos taurus
cgtgcacgtagtgttcatcagctatgaatctcagagttttacaggcatccctgccataatcctcctctgaaatgaaaagtactttgttcaatgtaggaagctgctcagataattaagagctgcatgaacatgaaatattgataattatattgtgcccatctgagaaagtattacatgttaccattaagaacccataccaag

SEQ ID NO: 7232 - DNA, 201 bp, Bos taurus
tgcatgcttttaaagtgctaattcctgggcatcctctggacgtttcactctctgaatgttttaaatcttggatcctgggggccagaaccagaatttgcatgtttacaagtgctacaagtcgatttttatatgaatcttcttcagaacatgaactgagaaatatcgaggaaatgccagaacttttctgaaccacatttaagg

SEQ ID NO: 7233 - DNA, 201 bp, Bos taurus
ccttgcccttcccttttctgctgcttcagaggatttccatcttcctctgtgaggtgccccagcaaagacacgtgtgagggtagaggccagagtgtccaaggtaagcaccgccagccagcctgtaacacacccaccctgaagttcactttaatctctgctaagctgctctggcctccacttttagtgctaacaaggcgtgtt

SEQ ID NO: 7234 - DNA, 201 bp, Bos taurus
atttccttagtgactgaaatggctttattactctccatgggccctgataatttatgctaacaacatgacctacggttgacccctagtttaataatgggatgactcaggttgtgaggctggccatttcacaaagaccaaggaagtgactagaagtttggggcttagagccaggtgggcttattagcttccctggtggctcag

SEQ ID NO: 7235 - DNA, 201 bp, Bos taurus
attaactgttgactaccttttcatatgctcattacccatttggatatgttctttatgaagtaccagatcaagtctcttggccttttttttttttcatttgcactgtgtaaacttttctcattaatttgtaagaccctccctgtctttatgacataaaatgttgtcaagttatttctcctcaactggccacatggttaataa

SEQ ID NO: 7236 - DNA, 201 bp, Bos taurus
tgtgacacctttgaagccaaatctgaaatagtatcaaatctctataactttaaggtacttactaaatatgcaccctggtttcctcatctcttatgaaaatgaaatagggtaatgagtgttaaatactgtaagatcaaaacacttttacagttattgcatttaaaaagatttaacaagctgttaccattaattttattactt

SEQ ID NO: 7237 - DNA, 201 bp, Bos taurus
ttcagatttcccccaatacctcatatgtctagttttatatcatttggtcaaatgcttcctccatgccttcatagctgcaggtcatgctgcttttaagcttcatttttgatgcctctggttgtaagatgactgcctctactacagtatatatatgtgtgtgtgtgcatgctcagtcatgtctgactcttttgaccccatgga

SEQ ID NO: 7238 - DNA, 201 bp, Bos taurus
ggacacaactgagcgactgaactgaactgaactgaatgtgttaaagtatttcctagatcataccaaatattgtgctttttgataaacaccatgtagaacatcaacaagaaacagaaagtccatggagatcttaagctaagggctctatataaagcacatgagtagggtaccactcccaccttttggtaacatggtttaatt

SEQ ID NO: 7239 - DNA, 201 bp, Bos taurus
aataagagttcagatcttgctcctaactccttttgcctgccagattgatgtttcaggtgcctcattagtcggatgtgtgcttggcctttcttggggaatgaatgagtgaccttcatatcctctcttctgcttgggagtgaagtgaagtaaaagtcgctcagttgtccaactctttgcgcccccatggagtatacagtccat

SEQ ID NO: 7240 - DNA, 201 bp, Bos taurus
ttactgcaactggagaaggcccacacacagccacaaatagaatgatccttaagataaagaaaagtcatttagaaaacataaaatattttttaaaccattatggccatcccattgtctgtctcataccctttgcttttgctttctagtctcagaatatagactgtgttgattcattcatcagtccttctaagacaatctcta

SEQ ID NO: 7241 - DNA, 201 bp, Bos taurus
tgggcctgtttttccttggaggagtgtggcagaccaaggacactcggcccacacctgaacctgggcagacgctcctgactcagagaccaagcacttcctccaggtaaagaggttctgggccccacatcctgtgcggtaaagataaggagaagtgcgggggtctgagaacacggaactgtgtcacggcatagctcctggggt

SEQ ID NO: 7242 - DNA, 201 bp, Bos taurus
aaggaagtttcggtcctttcaaagttaccaaagaatggccatggctccaaatgctctaggttcacggggccggtggcctcttttccaaaggcggtcagaggaaaacccccgcctgcgcggatcccacaaaacgccaccagcagaggaggccgccggagaggatcatgagcatgttctggttctgcttctcaagaccctgca

SEQ ID NO: 7243 - DNA, 201 bp, Bos taurus
aaagttcaataagagaaaactctcgctgtcagcagttctttgctggtcatcactgttgttcgttccaattcatgattattcaagacaggaatttcagtgcagtaggggagcgtcagctgcagccctggtgagctggggcctgggcagagccagccctgggcagtggtcagctcacaccccaccccgccaagcagacagagt

SEQ ID NO: 7244 - DNA, 201 bp, Bos taurus
gctttgtagatggacataaagttcctaaggaaacattctgtttctctttaagctgccttttccctggttattgaggaataaatcagacttatcagacttaaacttcaaaggagggaatttcaaatcaccttcttttctagcttcttttgtatgataatcagagaacggaggaatgatgataatggtaataatgtcaaaagg

SEQ ID NO: 7245 - DNA, 201 bp, Bos taurus
ctctgctcttcttgctccactccatcctgcacaggcttccggttcctcagggcctgggcggagagagtgagaggtaaaacctgggacacggggcctttttaggtttttaacttccttggtttaagtaccttctcttatggagtactttggttccctgctgcaaggtcctctgtagatgagcctccatggtatggggactct

SEQ ID NO: 7246 - DNA, 201 bp, Bos taurus
gtctggcagctaatagttattgagtaatttgcattttagacactctgctaaagactttgtagattagccatttaatcctcaaagtcacccaaggggtactgtggcttccaacttggagatgaagaaacggcacgttcaggagattagacagttgcccagggccccctggcaggtaggtgtccagccgcatgcagtcccagg

SEQ ID NO: 7247 - DNA, 201 bp, Bos taurus
gcgcccccccacctactcttccttccacctggggactcttgcttgcctgacccaggtcaggcttccccctgtgctgtttgcctggccaccctctccccctttctcctactgagtgcacttagctcttctgaaaaccccctggaggaaggaaatggccacccactctgccagtctatcctgtagattggcaggctacagtcc

SEQ ID NO: 7248 - DNA, 201 bp, Bos taurus
gtgcggggaaggatgctacttattattcaggcacaacttggccatggtcttgttaacagatagagccaccacttccaaacacaaccatcaacacttgttcgagagatgggataaggaccccggcctctcaaggaatggctgtgttcctctgcacagggcaagtgacctacattctcatccaagtttttaaattatcaaaat

SEQ ID NO: 7249 - DNA, 201 bp, Bos taurus
aaggccataatcacaggcatctgaaactggatctccagctacagggtagaacaccacataattccaaaaggctcctggcccaaccatatttggtttcttgtctctcttgctttctttaaaattgcgctgagccttcaatttgcagaaagcgtgattagcatgggaagaaggcggcccgtaccatcctcaccacacaggccc

SEQ ID NO: 7250 - DNA, 201 bp, Bos taurus
aagcagcaagagtgtcatcagagttcttgttctctcgcagcgtccattgtcttcctccgcacgaatggaggaaaatgaggccaaaggcagctctaacctacagctccctatgggaaaaaacgtctccttttcccatagggcaaaactgaggtcttgcctactgctttaatatatcaggaaaacctctgattggcccagctt

SEQ ID NO: 7251 - DNA, 201 bp, Bos taurus
cagagccatgagcagcaactctgcagctctttggtaccgggcatttggccacacttgctgtctgcaggcttttgcccctgggctccagctctgacagccacgtcctggcaacctgtctgtgaggcctggggcctgccttgctcccccctcagcaggcctgtgggcctggccctgaaccccatcccactgatgtacacctta

SEQ ID NO: 7252 - DNA, 201 bp, Bos taurus
aattgtatgtccggcgaatctaaacttctcttgatcaggggaagggacctctgtgttgggtcaggtgagtgggaagggccatgagttggatgaggttatagagagtttggggagttattttcagagaaacagtttactaaaaaggaagaataaagtctctttaaagaccatgatctctgctgtcatttggcctgggctgca

SEQ ID NO: 7253 - DNA, 201 bp, Bos taurus
ctattcttgggccttgatagaaagtcaccacagcagccctgttgggccatgacttgggtctgagaacagaagatcaggagtaaagcagaaagagggcagggtgctgtgtggtgacacgggcccggctgtgccacgtctctgggcaaggagatagttgcctggccacgggccccagagggctggggatggagcaggtggtac

SEQ ID NO: 7254 - DNA, 201 bp, Bos taurus
ggaatccatcttggaaatcaagaatccttctgagcgccaagagggaaggatctgttccaggcctctctcctcagcctactgatggccagcttccctctccacatacctgtatccaaatttcccctttttataaggacaccagttatattggattagggcccactcttacaacttcattttaacttgattacctctgtaaag

SEQ ID NO: 7255 - DNA, 201 bp, Bos taurus
gggaagggccagctcgaaagtcagagttggatgctagaccctagcaggaagaaaacacaacaaaaccagctaccgacagcaccccagctcttgacctgcccgtcctcgtgatctttgtaaagccagtctcgcttacccagagcctgtcactgaaccagccactgcagtggcccctgccaggtctgctgtgacacacgccac

SEQ ID NO: 7256 - DNA, 201 bp, Bos taurus
ccactgctctgcaagatcagctactctactgggctgagctaacagattacacagcggaacccgaacactgctgcctttatggtgttcttacaggccaccttccttcacagttcactcatccacagtctctgtctttgatttactgatccctttccactcatatgccccaatttttcttttctctccctcgcagctccctct

SEQ ID NO: 7257 - DNA, 201 bp, Bos taurus
gtcatggatttgtgagacggtccttaaagtcacgtggtgaatgaatgacagtgggtgctccaaaaggaagatttttactttcctgagtgaggaacacagccgctgccagagcaggtaggcaggctctcgatcctcaaattgtggcatctaattgctttgacagataagcaacaggggtgaaggaggggccctaattttgtc

SEQ ID NO: 7258 - DNA, 201 bp, Bos taurus
actgaactgaaggctacatatgaagagggagaaagatcccttaccgatcattctctggaaacagacctgccagtggtcacttgatcttagtcaaattaagggaaatgtacagtgaggaagtcagagggctcagatgccaatcacgacaagcaaaacctcaggaaagatgtaagagtctgggccatctgcacttaccgtgtg

SEQ ID NO: 7259 - DNA, 201 bp, Bos taurus
acgtggtcggggagatgaagataaagtcatccagtggccctcgggcccacaccttagagcctggcctctgactgctcactgggagaaggcccaccaggcaagtggtccgtctgtgtctggaaacacagcgttcctgatgcagtgagattcttccagcccaaagggaggccaatgcgctgtgctgcccccagctaatcttca

SEQ ID NO: 7260 - DNA, 201 bp, Bos taurus
ttaaatactattacttgttaacatttgtattaaatcactgatactttactaattcatactagtttcaccagccatctgcccaaaattatgaatatatagtaacagcatattttattacatgtaatacattttatgccatagtttctgaactcattatgttctcatggttcatcctgaatatacagtacaatattctgatgt

SEQ ID NO: 7261 - DNA, 201 bp, Bos taurus
gagagctctgaggcccccaccagctcttgcaaggtttgataagatgctgacaatgactacaacagaaaggagagaacagaagaaatgacagctccaaagattctcaccagaggttaggccagaagccagaaaagtcacttgaccaccaagactggataaggagagcaaggtagacaggagaggaaggcgcgcgggaggtaa

SEQ ID NO: 7262 - DNA, 201 bp, Bos taurus
caaggccctggagagacacctcaccagcagtccttacttctgggaaaggaagtaggttaccagttacagacagaattgacatcagatcagtttgtcggtcgccagagaaacctgcagaggcccacgccttgcactgcccctttaataaatcaccttggtggagcagttctgatgggaatattacaacaagcgccagctggg

SEQ ID NO: 7263 - DNA, 201 bp, Bos taurus
ctgtcacggtgagcctggccccgtggctgacccggacactggcgatgtttgaggccacacagtggaagacaccgctgtcctcagctcgaaggcctgtgatttgcaggactcccttgggcagcagcgtgtacctgtggtggggggcacggtcaaccaccagcacagcaccactggcccaaggacactcagcatcacggacac

SEQ ID NO: 7264 - DNA, 201 bp, Bos taurus
aacgactcaatattacaatcagaaaaacgaagtccagagagggtgactgacttgcccagttatgcaggacaccggtgtccaggcaagggcctttgcaccatgcctcacagcttctcaagagcatcagaagaggtcaggctgtggagtactgatttccacctacttctgcaccctggcatacttacagatgacctgcctggt

SEQ ID NO: 7265 - DNA, 201 bp, Bos taurus
tggcagtgtggccatgtttttgtctgtgcttgcacagaattatgaaatggctttatctcattttatcaaggtattctgttcttgtgtaatagcagagtaacgtgtcctagctgtgaatgccaggccagcttttgaatgtcaggggctgctcctttttaaaaacttcccaattaattgctccacgcatggcctgtggaactg

SEQ ID NO: 7266 - DNA, 201 bp, Bos taurus
aaatgatagaaacagctgagagtctcaccatcctccttccacatcttgcctattgccccgcttcctcagagcgccgtctcggacacgctttgcaggccccaaggggcgctctcaggtacactcctattctcttgggtcgcctctgtctctgggatgctggtgcagaactggagccaggcaggaggcccatcagagaaagct

SEQ ID NO: 7267 - DNA, 201 bp, Bos taurus
tggaaaaaaattttcaggatgctttaagtagtaatcagttgtcgagaggtcaggcgaatatggcagatgaggctaaagttccgtggcccaatttgttcaacttctgcagcgtttggttgtgcgatatgcggttgtgctttgtcatggagaagaattgggcccatcctgttgactgatgctggcttcaggcattgcagtttt

SEQ ID NO: 7268 - DNA, 201 bp, Bos taurus
tcaagggacagaaaacacagagccagcggagcactagcccggctactgaatacctttttgtttaaaattagaattctgtggtgaagagcagcccctctcacgcacagaccttgaaaaagcatttgctgccacgtccgcagctcccttctgtccccgtcacggtgactgcgccccagcgtgcgctgacacggagcccaccgg

SEQ ID NO: 7269 - DNA, 201 bp, Bos taurus
ccagctgaggaaggagagagagggacgagccagggccagagtcgggggcttaagaaacagctgggccggggggaaggctagaaggccaagaactcaagacggtcaggactcttagccgcgctgagcagtgctgggtaaggaaacagacccagagagaagagggcagggactcgccttgctgaggtctactccagaggcaag

SEQ ID NO: 7270 - DNA, 201 bp, Bos taurus
tccgaggggcctgtgggcgctggggcgtccggcccccaggctcgcggtggcgaaacgaggaggtcccgagccgtgggccccgcagtgcgagtcggggcgctggagcaaacgttgctgctgcttctcgttgtactttgctctgctccccaccacttttctgacctaccagcaccgaggcctcagacatttacccagtggaga

SEQ ID NO: 7271 - DNA, 201 bp, Bos taurus
ttagcagccatattcctcagcttctataattctcactgggtgattgagatggtattgggtatgttcagggtggtatggccgtggactcattggagggattcagggggaaaaaaaatttcttgaaaaatatttggagcctttcaaaggtgtgatgtgagtttgagtgaactccgggagttggtgatgtacagggaggcctgc

SEQ ID NO: 7272 - DNA, 201 bp, Bos taurus
aggagaacttgccgagggattggacaggtggccttggcaggtggggatcttggcttgtgagtcatggacgggtgatgcacagatctgagctctgaatgacgtgatgtcaccaatactggcctcctgtcacgagagcaggggctgctgctgcttcctgtttgtgggtcctgtaagacccagctaaatgcgcagtccatagtg

SEQ ID NO: 7273 - DNA, 201 bp, Bos taurus
aagccaggaaaccaggaccataaaggaaaagacagattagaacatatcaggtatttaaatgtctccatggtcagaggccctgcaaacaagtctagagacaatcatagatgagaagtgtttgttacatacagatagataagagcttcacttttctcataccttcaagacccctcatgcagaattcctacaaactaattggga

SEQ ID NO: 7274 - DNA, 201 bp, Bos taurus
aagacctcccaaagacttgacccaaagaggggctcacacttctatcctcttcttcacgcctgaactcacccgaaccacttgaataaacctgaacacagctatagcctctcctgccctctgctcacccagctcccatcatttttcttcatcatttaaccttttcctgaggctaaagcgaacaggtgaagttagaagcaccac

SEQ ID NO: 7275 - DNA, 201 bp, Bos taurus
tgtgtcatcctagaccccagcatagagtggggttttgtgatattgaaagaggtgacttggaatgccatttgagaggctctaggaagagatcccaggccctccactccaccatccccctaactccctgggagtcacagtctagaattccaccgagagaggcacatgccttgacattctcttcatgagagtaaatcacaggat

SEQ ID NO: 7276 - DNA, 201 bp, Bos taurus
acagagtctccacccccaacacaaaggcccctgccagggactaggagctcccctgctgtctagactaaccagaaactcatgctcactaacggacagagaaagaaacttggtggatgatgtggcccatacagttcaagtacataaatacctatgtggtgaaaaggccagacttaacctagaggatgattctctctaagcctt

SEQ ID NO: 7277 - DNA, 201 bp, Bos taurus
tcaaatatctgctgtaccccaccccccagctcctagggcctggcccctatcagaggagcccatttggtgtctgtggctgctctgaggcctcctctacacttggggtccagaaacctctcagttctttgttttcctaaatgaagctcaacctgaatctacatgcctcctaaacctgtttataaaggccaattttgtgtattt

SEQ ID NO: 7278 - DNA, 201 bp, Bos taurus
attaagtcttgcacagcttttgtcaaatttatccctaagtatttcttatttttgataacacgccatttttaaagaattatatcagcaaaaatactgccagctcaggctgaaagggacagagacagtaaaaaaatgaaaagaagtttttgcactcctagaattctgctggtagggagcaggctgataaaacggctcagcaca

SEQ ID NO: 7279 - DNA, 201 bp, Bos taurus
cacctgcttgccttcctgtcgctgtgtcttcgcaaagcatcccgtctgaagcaaggtacctcccttggctatactaaaggccccccaaatgttggataaccagatttttttttttaaaccctgacccaacctcactcagttaaaggttcagtaagtctgtcttttcgtcagcatgggtggaagccaggctcctggccccga

SEQ ID NO: 7280 - DNA, 201 bp, Bos taurus
tggcatgtacataggtcacttcggatagtctgaaatttctattgcactattggctcatgatcacacttcttaaaagggcctttagtagttactactgtatcctttaatctcacatgtcacccaggaggggccaatacctagatagctgagaccctgaaagcatggtattatacacatgaagggtagatttaaaacagtgag

SEQ ID NO: 7281 - DNA, 201 bp, Bos taurus
acaccagtgtctttcatggcacacactactctggggacccacagttgcttccctttcgagatgacagtaccactgacctgaaaaggccaggaaaaggagatggcacagacccagggtcagagggacctgtacctgaacgccagccctgggtgagaacgacagattaacctctctgtgagtcagggcctcacctgcaatggg

SEQ ID NO: 7282 - DNA, 201 bp, Bos taurus
aagggtggccattgaagggtggccttagaagggccctttctgtgcactaagcagagatgagaaaggcagatcgtcccatctgtaggaaacagagacatgtttagtgactggggccgagtttactgaagattcacccagagaaataactttctaaaatgaaggtctcccagagccacctccagagattctgatactggaagt

SEQ ID NO: 7283 - DNA, 201 bp, Bos taurus
caggtatagtcagaccgaatgtctgtgttagttcaccctccagtaggaaaaacatctgtgcctgagtgggagactccaggggcgggatggatgcttgggcccctctagcttatcttttctagacaagagccctaagcctagtgaaaggagggagcttctgaagccatgagaatcagacaggaattccaggaatctttctga

SEQ ID NO: 7284 - DNA, 201 bp, Bos taurus
gcacacacacacacacccactcctttcccttcacagtggcccactacaatttccctgtgccctctcctccaccacactgctctggtcctggggctgccctgtcagcataggccctagaatgactggcggagcctctgaaaacaccttgccctctcgatgggccatttcctggccaattaccctgtgtaggaacacttagat

SEQ ID NO: 7285 - DNA, 201 bp, Bos taurus
ccaggaacccagagtgtgcggcttccagccagtcccgcccccacaaggcggaagcttcagtcttgctgtccccacacggagccaggtggacacttctgagcaccttcgcgaaggctctgtggccccctcgcctcccacacgacctcacctctgtatgctgatgcggccagcaggccccacccgcccagccaccttcatttg

SEQ ID NO: 7286 - DNA, 201 bp, Bos taurus
acgccgctgcactccaggcatttcttttttgctcctgcctccagagtcctccgttgccgatgtcagtcggaagactcgagtgagctggagggggcccaaacaccagtttcgagcctctggacctccagcgtttgcctggggaccgtgacccttccctttctgcggccctctggccctcttctctactccagacaagttgaa

SEQ ID NO: 7287 - DNA, 201 bp, Bos taurus
ggctgtgaccgctagaaacacctggggccaggtcaaaggcgaaaagcgattctatattataggggcacgggcatcttaaggaatctaggtaccagggtgcgtctgggccttggggaacagacgagaccaggacctggactcagagaatcccggaagccacctccctccaactctgcttctgttccatccctttctctctct

SEQ ID NO: 7288 - DNA, 201 bp, Bos taurus
gatgctgctggtctgggggcccccactttgagaacacagacacgtcataggggcgacacattaacatacactaggactccttatttttctgatctttgcccgttggatactgaggccaggtgggctctcagtgttccctgtctgtgtctccaaggctggagctgtgcctgggtgtctggagtttctgggtggaggaattgg

SEQ ID NO: 7289 - DNA, 201 bp, Bos taurus
gaaaattttccagacataaggctaaacccagagttcttaatcttgacaccaaaggcatcatctataaaaggattaattgaccttcatcaaagtgaaaaacctgtgctctaccaaagtccgcatatatgacaaaaggctagtaactagtatgcataaagagctctcaaaattcaacaggaaaaaggaaaaggaaataagaaa

SEQ ID NO: 7290 - DNA, 201 bp, Bos taurus
tccagccccacctcaacaaaaaactggggcttggtcccttgcctggggcccctcctgcccttgcccactgcctgagcagctccaagtaaggcctccttctgaggcaggcaaagatagcactcccaagtactcccaccacacataagctcagacaccaagcaaggggggctggccccccctcgttccaacacctcaatcaag

SEQ ID NO: 7291 - DNA, 201 bp, Bos taurus
ttatcaggagggtttagtcagcattaaatttatccttatcctcatgattttaggaaaccaggtgaaaaaaagacaaggcttggccaacaagctcaagggctgatatacttaggtagctatggcccactcatccatccagccatttattttatacctcatcttcttccccaaattctttgaggcagatataacaaaactaaa

SEQ ID NO: 7292 - DNA, 201 bp, Bos taurus
acttgatttagtcattcattacagggaatggaactcagagaggggaggagttgtggggaccccaggggtctcgggggcctcactatgggcccctgatgtaggagcagaagaaactcaggatctgggtgagaagacctgagctctgtcagcttccctgagcctttaagcctcactttccccatatgtgagcagaggttcaat

SEQ ID NO: 7293 - DNA, 201 bp, Bos taurus
ggacctggcctgcagtgagtcgctggagccttcaagtaaggtgaggactggggcacagccactggatttagagaccagtgacttggtcattctggggtcgtggaggaagggccaggagggaacagggacagctggcaaacagcctttccaaacgtgtcatcagaaggtgaggagagagagtagaaaccagaaggaaagtgc

SEQ ID NO: 7294 - DNA, 201 bp, Bos taurus
ctctctctggaggttgagatctagagagccagactacaaggcctaaaccagtgcttctcaaacttgaatgtgcacacctgaaccttgttagaaaggaatctgtgggtctagggcagggcctgcatttctaaccatctcctgggtgatggtgatgctgttggtctgggggctgcactttcaacagtggatccaaggcagcgc

SEQ ID NO: 7295 - DNA, 201 bp, Bos taurus
atggctctgtcctggagctgctgctcctttcactggacgtgacctacctaggtgactccctgatcatccagtcactgtggtcaccacccttccttgctcatggcccccaaacctctctctctttagtcctgggtcccaccctgggtgtcatactcacgcctccactctccagtctagtgcgtttctccccacatggtccac

SEQ ID NO: 7296 - DNA, 201 bp, Bos taurus
aaagtggggagggcagcagcaggagcatcaccagtgtgttttaggaggaaaaagaaagtgagttcccgtctctctggttcatgatggccacggacctagttggaggcagacacagagccagtgacttccccgtctgccttacttaaagtcatctctcatctgcctctgaggttccctggaggagctcaagggagcagttgc

SEQ ID NO: 7297 - DNA, 201 bp, Bos taurus
ggggaagacatcagtctggggattatgagggatgggaacccagagacaggcagagccagcctttggaaaacagtcctgactctgtcccagttttcagctccgggcccctccacggctcagctgagtctccggctcttcttagagtcagctctctcctcagccctcctgtcccaggatgcttttacaggtctcattcctgag

SEQ ID NO: 7298 - DNA, 201 bp, Bos taurus
ggccctcagatgggggcatggtgccatgatgggaaaactccatgggctcattgatgaacccatcattgaagctttctttttttttggtccctacagaaactgtgatggccttggtcacggcactgggccgttttgtaggcagcaaaggctgttacagcccttgacgtttctgttcctgtctggttctgttgggtgcttttt

SEQ ID NO: 7299 - DNA, 201 bp, Bos taurus
aaaaatgaggccagacccagggcacacagagggtcaatgacctgcccaggacatgtcagcagtaggcaggtccgcaccaggaaaatgggaatgactctgggacgctggagccttaaagggcccgagcctcaacatgtaggagagggatgcaggggcagctgctgcaggttgggtgcagcttctggggctgggagggaatga

SEQ ID NO: 7300 - DNA, 201 bp, Bos taurus
aagtcacctgagtcaggagaatcattttattctttgattggaaagagccacctggacccacacaatagacaggtgagggcccagaaacctcagctaacacctgcttgtgatgatcatgaatgcggagctagccggtctcaccacaccgaggtgggacccatgctgatggtacagcaccctagggacccctgtctgggccct

SEQ ID NO: 7301 - DNA, 201 bp, Bos taurus
agcctcagtgggccagctgttccatctcagccaacagagaaatgcggggagaaagaagtggcagtggtttgagcccaggccgaggcgtttgtgcagccgctcacagcagagtcccagccatgggttttagtaaagggtgcatgatgagatgatatgaagcaaattactgaggcagggccacaaaacaaatccccctctgtt

SEQ ID NO: 7302 - DNA, 201 bp, Bos taurus
gggatattaaacgacttaagaggccaagcccaattctgacttctcatgacttcccaaagcagtgcgcttgtttcctactctgtaattcatgcttttgaaactggccctggttacctatcgcccaagacctttagcggcagtggaattctgtacacatttaagaacactcacccctctcccctcagcatcagttgcttaaaa

SEQ ID NO: 7303 - DNA, 201 bp, Bos taurus
gcaattaacagcgtctaatcagtcagttctcaatgccaaattcaccttccccatcttgagaaggggctgtgcaactcagaataagcacgtgtctcttccacatttaggtcgttaaaactgaaaacacagtggacatttctgcgtatttattgtgcttaaaactaatctatttgtgtcatttatttcctcttctgggttttg

SEQ ID NO: 7304 - DNA, 201 bp, Bos taurus
ttctttgcccatgcagaaatatgaacatttgagcactgtttgccaatatagagcgaccagcacctgaggcacagcatttctggggcctcagccatttagcttgggtgcccccgtggtctctgtttggttggaactccagtgtctccgagctctctacgctaataggtacactttcacctcatggcccctcagtggttataa

SEQ ID NO: 7305 - DNA, 201 bp, Bos taurus
cgtgattttggaggctggcaagtcccaaggttagtagttgggaagctggagactcgggagagctgttggtgtagttctagtctgaaaggcaataggcttgaggcccaagaaaagctgttatttctgtttgtctctaaaggcagggaaaacctgatgtcccagctcaaggcagttaaacaggaggacttccttcttaccaca

SEQ ID NO: 7306 - DNA, 201 bp, Bos taurus
tctctgatatcactctccagcaggagtctctgcatctgaaatagctccacagagcctctgccagccacagagaggtgaaggcaaacccccggcctgcaacaaaagttaatgagaagtgacaagcactaaatgagaatgtgagctaaacccacacaagagtagctgggggagaagggcgtgctcccaacaccaagccacaga

SEQ ID NO: 7307 - DNA, 201 bp, Bos taurus
atgggcttcgggaactgacctgtggtctccactgtgcctcagtggatggagggccatggagcatggagcagtttagtgttaccgaccacgagtgagcaatgcattgaatgatgataccataccattactttgcctgggaaacagtgggtgcccagtgactgttttctgaattttgatatgagtaacagctgtgaacttgag

SEQ ID NO: 7308 - DNA, 201 bp, Bos taurus
aatggtaggagaggaacctactgcaaattcatctttaaaatgttttgaggtcattaacagaaaattgagctcaccattgactctggagcatttgatggtagcaaactagccaggcagaggagtcctgaataaagtggaatttgtattcaaaactggagatcccagattccttctcccaccttctgtgaaggggcaaccaca

SEQ ID NO: 7309 - DNA, 201 bp, Bos taurus
aatttcttgacaagggaagaaaagcaaaggcctcattaaggtttagatgttctaagccagcttccgaggtgcttgggacacaagtgtgacaatggcagatggaagtcactctggccacataaaggactcagtcctcctctttcccaagggcactagagtggaaacaaagcaaagaccccaaaaggctcctcaagcaccttt

SEQ ID NO: 7310 - DNA, 201 bp, Bos taurus
gagacctaggaagggctgtatcagaggatagagtcaccagggttagccatggttctcagagacattcactttcagcttagaccttggaggactggtaagcgttgatctcctttcaggccaggggagcaagaacaaaaatcaagggcagagggacttcccaggatgtccagtggttaagaatccaagcttccactacggggg

SEQ ID NO: 7311 - DNA, 201 bp, Bos taurus
taaaaaaacaaaacagaagctgctccttctcttggtcatcctcatcacccttttagagcaagtaagaacagagtgcagggccagacctactccttaggaaacccaaaataatgttcagttcagttcagttcagtcgcttagtcatgtctgactctttgcaaacccatggactgcagctcaacaggcctccctgtccatcac

SEQ ID NO: 7312 - DNA, 201 bp, Bos taurus
gctgggtgatggggtcactgaaatgctctgtactctttttatagctttttgtgagtcttaaatgaaaagttaaaacaataagaaggtaatgtgataggaaaatgggccagaatatttattcacttactgtgtgtacagtgttaaaatagtctgtgtgtgagagatacatgatgtgtttgatactccataatgttgaaagag

SEQ ID NO: 7313 - DNA, 201 bp, Bos taurus
aaccataccaagcccatagtgaaatcaaagttttcagcacatgcttttataactgacagtaaattagatcttaagggctgtttggagtgtatccaggccatgtgatgtctcctcttggagctcattgacttgaggcattaccaccatgttcacagatgcagtcagaagttgatcaacacttatatttaaagtctgagcagg

SEQ ID NO: 7314 - DNA, 201 bp, Bos taurus
atactaatgcctggaccccatctcctgtgattctactgaattgatgctaggccagtgacaaagtactatttataagttccccaggtaattcttacgaacatgcaagattgataaaatgttggcctaaatgaatgctctgatttttaacttcagtttgttaaataaaacgcagagtctggtcaagaagtctgggacagaagt

SEQ ID NO: 7315 - DNA, 201 bp, Bos taurus
caagagaaggtggcccaagaggcagaaagaaaaccaggtgcataggttgtcgtggaagccaaaggagtgcttcaaaaaggaggaatgggaaagcaggaagtttgctgggaggccaaactgcaggaaggctgaaaggcagtccacaaccaggagaggatccatgcggcagtggcgagtctgaatccacagctgaagctctgc

SEQ ID NO: 7316 - DNA, 201 bp, Bos taurus
acaggaattatagattttctccaagattcctcccttaaatgcaggactttagaaggtgctaaagcctgaggattaggccatacgaagctcagggcaagtagaggagggaatgtggaggctaaagagattctcctgccttgggctctgtgcacagaccatgtgaggcctgcccctctggctcctggacttcctctgggtgag

SEQ ID NO: 7317 - DNA, 201 bp, Bos taurus
gaagcagaggaggcagcatacgttttagaaaaacgtggtgtgggcttgccattgaccatctccttgaaaccactcctttatttctctggtcctttcccatcaggcccttacatggcagtgcccacccctgccatttgccttcccttcttgttctcttcctgggtgatgctgtctagcctctggcctcaacctaggtgcagg

SEQ ID NO: 7318 - DNA, 201 bp, Bos taurus
tggccaacccagtgtttactcatcgtcctcttttcctccccagcgcttttatcccacccagtcctgtctgttctaatgtgttagccagtaactaccacctgtgtgtctaggacagggccctgccgtgttctgattagtcggaatgttctcatgtgaggtgcctgttgcagaccctgagctgacgggtcacatgcaagagat

SEQ ID NO: 7319 - DNA, 201 bp, Bos taurus
ctttctttctgcctagattgtgatgattagagctgcagcagccattttgtgaccatgaggagaagcagagactgcagacctgacatctgtgaatcactaacacgatgccactacctacctctctggttgtgtgggggaaaaataacaacagactctgcatgtttaagttccatctctgtttctcttaactgaacataagtc

SEQ ID NO: 7320 - DNA, 201 bp, Bos taurus
tattttccatgggtgcaacctgtacgattttcagtattctcagcagccgtgtaaggataaactgctttctcctaagtttgggtggcctggttctacctcacgattactaagtggtttacaatcacaacctccagctcccggttcaccagcgaagagatgtgatttcctggtacgaaaacgcgaggtggcccgcaaacgcag

SEQ ID NO: 7321 - DNA, 201 bp, Bos taurus
gaatgttagcatgaggcctgccccgtgggtgtcagtggaaggaaaaggatatggcagtttagggtgaggcctcataggagggtaaatgggctttcaacacggaaagttctgttaaatcctgctttgctttttagaaaatattaatcctgtcatgtaaacacatctatgtaattgtatagcacatgtttttaatatgttggg

SEQ ID NO: 7322 - DNA, 201 bp, Bos taurus
ttagtttcccaggccttgaggaggggagagggtggccctgctccagggtccctggctggctgtgccacctgcttgcttgaacgtggtgaggagaatgctgcagaacaaaggccctctattgtattgcctgggattttcctcacctaagtaatgttgagtgccccccccctgctgccaaagatcagggagactcttggtgac

SEQ ID NO: 7323 - DNA, 201 bp, Bos taurus
cctggcagatcccacagctgtttgcagccccccgctgctctgcacacatggggcggtgcgcccagcttggtgcatgcctcagccgtgacgaggagagaaggcatcaggccagacactgggagaagcagcctgcaggcagtggggccccagagggatgccatctgggatccgcatggatgccgagtacctcccatggggcgt

SEQ ID NO: 7324 - DNA, 201 bp, Bos taurus
gagccctgggtgtgctctgcctttttacagttctccccaccccctctgcatcttaaccagaggttaagacactccctccacccaggaactccaggtcttcggagggctacctcctggtccttgtgcagtttctgtatcccaggacctctccccttataggcttctaattccagcagcaaaacccctggcattgctcaggtg

SEQ ID NO: 7325 - DNA, 201 bp, Bos taurus
taccaggggcctggatgagggggagcacggggtgggggcaagctggctgggcccagggagtcagagaagcagggtcacaggcccaggcacaaggtctactgtgccttgtctccttgaaagtcagacaaaaacaaccctcggagggagtcacagcggagactagaattcgttttcaaaacactgaggccaaaagaggttaag

SEQ ID NO: 7326 - DNA, 201 bp, Bos taurus
tgtgagaggcagatccggcccccactgactgagctgcccccgtctgggcctgagactcccggcttggaagaactgacagatttgatgcagaagtgctggagccatgagccccagaagaggccttccttccaaggtgtgctggccatccagctggcagtcgagataggcctgaatttgtcagcaggggcttttcccccggaa

SEQ ID NO: 7327 - DNA, 201 bp, Bos taurus
tgtcccctgctctctgtcaggccacctccccagtcctgactcccaggctgtccctgcctccacctccactcttctcacctggcctctccttggtccggccccattccctatatgtatataccgcagggcaaaagtgagtggaggggagtaaggtctagtgggcagatctacttacccagctgggcgggtgcagggttgggg

SEQ ID NO: 7328 - DNA, 201 bp, Bos taurus
aactagaagcccttagaatctgaagatcctctgccccttgagtcttctcctccagtttgacattcccgtgtcctctttctggtcatggcctgttctcaccgtcttgatttctccctccggaccttgctgattgtccctgtccctcttaaaatggaccacacactcccaacagggtctgaccatcacagatctggggcctct

SEQ ID NO: 7329 - DNA, 201 bp, Bos taurus
agtacaattcaccaaaatttatgtcagaagaaacagaaaactatggataactccataacaataaaaaaattgaatcccacaaagaaaactccaggcccttgaattttgccagacatttacagaagaaataatgccaatcttacacagattcttccagaacatagagaacactttccaatccacttcataaggccagcataa

SEQ ID NO: 7330 - DNA, 201 bp, Bos taurus
ccaaagaaatagtgatttgtgacacttgttatgacccttcttctacacacacacatagaaatagcttggaaatcccatccacattttggaggccttactgcagggattccaatattgaaaactcccacatgccgcagatgggtgtggggctttccactactcggatccaggcatggctccgtacatggtggccaaatgcct

SEQ ID NO: 7331 - DNA, 201 bp, Bos taurus
tctgtggagaaacgatgctggccttggaaattaactcacaggaacactcctgggaaataagctcctcttagggggtcaggagacattcccctcctgaagatgcagtttctcagccgtttcactggcctggctctataatggccatgccaccatccttgtctactctccagccacagaggatggcagctccaggtttctggc

SEQ ID NO: 7332 - DNA, 201 bp, Bos taurus
gtcatgcagctgccatggggccagagcaggctgataggtgaagaacaggtatagacacatgagagatccaggcatggatgtaagggaagggcctagaagaaggacagtggtaggaaacgtgagtgggtcacccagagcagctccagagaacagcctaaatgctgacacccggccaaggcagtccacacccacccggctatt

SEQ ID NO: 7333 - DNA, 201 bp, Bos taurus
ccctggacgcggagacgcgcagccgcaacgaggccctgcgggtgaagaagaagatggagggtgacctcaacgagatggaaatccagctcagccatgccaaccgcttggccgccgaggcccagaagcaagtcaagagcctccagagcttactgaaggtacacggtgacttttggaagcaggaagttgcctcatccagagagg

SEQ ID NO: 7334 - DNA, 201 bp, Bos taurus
caggtgacagcgactctgatccacaggtcaacctgctgttccccatcatctacttgctgttctgggctttcctgctggtcttcagcctgtggtcagagcccgtggtgtgtggcatcggcctggccatcatggtgacaggggtgccagtctacttcctgggtatttactggcagcacaagcccaggtgtttcaataagttca

SEQ ID NO: 7335 - DNA, 201 bp, Bos taurus
gcttaaatgtaatctgaagtgaaaatgaggaatgtcctgaaatagatgtaggtttaaaaatcaaataaagatttagaatgaagaaggtggccagtctgttcagtgctttgagtcatcagtaggactatgcctgtagctataattgatgaggggaaagagagggtaggtgaaaggaaagaggtgaaaaattagaaatgaatg

SEQ ID NO: 7336 - DNA, 201 bp, Bos taurus
accacagaaacctcaggatccaactcttcagcagaacgtgcaacacccaagttggctcttcccatgtccgccttcccagtgggagtatcttctagggccatctatctgaagtgtaggaaaactgatagtattttcttgccaaaaagtagatctcagctagaaagcttttcataaaaatatttattaaatgtattactgcat

SEQ ID NO: 7337 - DNA, 201 bp, Bos taurus
tcccaggttcacggccccgagagagagaaggagagagagaaaagagacaaggttaactcactgctgctccagatcatcggccatagtaaacaagccctgctgggtcgagctgagccagcccatccctccacctgacgccagcaccagctgaccgagaaaagcgtcggataacaaagtggggcgtggccagcgccgcggccg

SEQ ID NO: 7338 - DNA, 201 bp, Bos taurus
cacaggactcctggcagcgcagtgtcttggggcagcccggggcctcgaggctgctgcttccccagggctcctgaagccaaagaatggaggtggagagttgggttatggggaagtgatgggccccttggagaagcccggtgggaggcacaagtgccgcttctgcgccaaagtatttggtagtgacagtgccctgcagatcca

SEQ ID NO: 7339 - DNA, 201 bp, Bos taurus
gcgggagctccggggcactcctcccccatcgcatctcgggtcggctccggcatcgttacgccccctggcactgtgggccccctccccactctgtccactattctgaggcaacatctctttctccacgggaatttccctttttgacgaggtccctggccccaacccagccgcaactgtggccggtcccccagggccggatgg

SEQ ID NO: 7340 - DNA, 201 bp, Bos taurus
ccctactccaggtggaatgtaactcaaaactggaccccacccagacttctttcctcaaggtcagtaaccctattccacattcagcctgactcttggcccccggtccagagccatagatcttctccagattcagctgctaggctggcttccagggtcctacatgggagcaagtgggtgggtggagtaaaagaaacagaaaac

SEQ ID NO: 7341 - DNA, 201 bp, Bos taurus
cataattacagcctttttcatttgttgcctgtgagaaaaatcaaagccttcatattgaggtattatttgcccctgggcattaacatttcttaatataggaaaagcctgtattggcctcagagattcaagattgcaaagccagcaactcagagagcctccgtcgtgaaggagaatgagtagatagttttttctcataaatac

SEQ ID NO: 7342 - DNA, 201 bp, Bos taurus
agggaaacccatacgtgccagtccactttgatggggcggtgctcttacctgccacacccgtaccctcactgccacctccacacaggcttctctgacttgagggcaataactcaagttaggtttcttattcaacacacacacacacacacacacacacacacacacacacacacacacacaaccacatgattccctgacctg

SEQ ID NO: 7343 - DNA, 201 bp, Bos taurus
aaattcatgtccactgagttggtggtactatgtaatcatctcgtcctctgctgcccccttctccttttgccttcaatctctctcagtatcagatagagcacaggctcaattgccaggaagcatgtgggatcttccagatgaggaattgaactggtgtcccctgcattgcaaggtggatacttatcagctcctttttctatg

SEQ ID NO: 7344 - DNA, 201 bp, Bos taurus
tgggggtgaggagtactttctgctttaagcaagcttgctaaattcaaggtattcactctttctctgccagtcatccctgcttccaaggcagacacacgtggtcttactactcccttcctcccttcctgatcctggaatctccctccctggtggaactcagatctctccagtttatctttaggatccctatgaaccgtcttg

SEQ ID NO: 7345 - DNA, 201 bp, Bos taurus
taatgaaccctactacactctagagcaaacatttgagcatctgtatgcccagaaacaagagaaagaacagcagactggcctgttccactgtggagctacaaccccctctccattttgtattcagaggttctttagttctgaattgtctgtgggacctacctggcctgggaaagctgtgtctaaaaatcagaattcaggtga

SEQ ID NO: 7346 - DNA, 201 bp, Bos taurus
ctctgcagtatgaaggtggatgattcttcaaattaaaggtggacactgacttttctcaccagaaatggtttataagaaatcaacttgcaaaaatttagagacaataaaagaaagagtaaaatattttcttctatcattgtttgattctttgctagattgtaagctccatgaaagcaggataacttgcttatctgcaatgcc

SEQ ID NO: 7347 - DNA, 201 bp, Bos taurus
ggcagagaacctgaggggaagaattcaatcatagcaagaactcaagtagagaacactactgagtttacgagtgaggatgtataaggccagaacaatgtctaaaaatgtccctgtcccaacagtgttaacatcaatcgagagcctgttaaaatacaaattctcaggtcccacccctgcctagtgaatcagaaactctcagtg

SEQ ID NO: 7348 - DNA, 201 bp, Bos taurus
ttccaaggaaatagtttcagttcacttttctgatgccatttacccatgtgaaaaggtacatgtttctattttgtgtttgaactgcccttttatctgtagagtttcacaggcttttgtatataatctggttgtattatgacttagaaatagcttaatttaggaaggctatcaaaggttaaaatagttacattattggcagat

SEQ ID NO: 7349 - DNA, 201 bp, Bos taurus
cagctgccttaagtggagcacctcacagagccctccattctctagcgcgcggaagttccgcaacactcgcatctcgctagtggattggccgagactcctgagctgcggtttgagcccacagtgggcgcccgaacccggcgcgcggagatgacgacatcagcgcgccgctgcagcgactgcgagagacggggagggtttccg

SEQ ID NO: 7350 - DNA, 201 bp, Bos taurus
tgtccttggcattgtagagtagttaccagcatccctggcctctatgtactaacatgtcagtagtactctccaccccaccatggtcatgataacccaaaatatctccagagatggcccgatgtccctgaagggagaagtccccccactcgagagctaactttgcaggcaaggaccacatggtacttccatgaagaagctgcc

SEQ ID NO: 7351 - DNA, 201 bp, Bos taurus
cacaaacttagaaaataaacttacagttaccaaagaggaaagaggggaagggaaaattaggagattgggattaacatacacccactgctcctgctgctgccgccaagttgcttcagttgtgtccgactctgtgcgaccccatagacggcagcccaccaggctcccctgtccctaggattctccaggcaagaatactggagt

SEQ ID NO: 7352 - DNA, 201 bp, Bos taurus
tggcctttatgacaccatgctggactcacccgtttagacgtgggcatcctcaccagactctaactccttgcaggtaggctctgtgtctacctgatgcatcttccttcatgagtggccaccagcagactcctagtatatattcattaaatgagtaacgctcccacacaggtggctacccaacatcagggaatctgcactacg

SEQ ID NO: 7353 - DNA, 201 bp, Bos taurus
tcactcagctagaaagtggcaggactcagagttaaacccagatctgaccggctgccactgttgtccctcatcagcctctctcattcctggcccttctgtccttggtggcagggaagggagtgggaaactgcaaccagcgcagtagggcaagctcctgagtgggccatgtggtgggggaggggggtcctttaagaggctgca

SEQ ID NO: 7354 - DNA, 201 bp, Bos taurus
gttcttacatgaaattgtgtatagaggaggtaattcacataataaacattcaatgttaattttagttaaaatgcaacatttatttaaatgatattgcctgaacacgtcctacatgccaggacttgtttgaggcattaaaatacatcagtgaatcaagggaaaaaagttcagccttctaggagcttgcttctaagggaaaag

SEQ ID NO: 7355 - DNA, 201 bp, Bos taurus
actgtgttgtacacctataacatagaatattgtacgtcaactctagctcaatttttaaaaatgtagtcattttgatgatgcctccattctaggattgttcaatatgatatatacctgaatatgaacacatgttcagtaaataccatttctcattccttttgctctgctcaagtctccttgtaattaggcagcttgagttta

SEQ ID NO: 7356 - DNA, 201 bp, Bos taurus
caggccctgggctgcagacgaccagggctgctggactagtaactttccctgtgccataactcaacagagaggtaggatcaatgacaggtttataggagagcgggcctttaaatagctgaggtcagtgtctggaggcttcccgttaataccactaacagcatcccaccagccgagacgattggccactttgttacccactct

SEQ ID NO: 7357 - DNA, 201 bp, Bos taurus
caaatccttacctttgagagtagctatggagaatagagatgatcatatagacagcatctggcacataataggtttcctctatgttttagtttccttctcaccatctctctttaaatgacagttcatattatcagtgctctttgaaataaagcatgtcttccattcaaacacagaaaaaggttatccctcttgactgctgct

SEQ ID NO: 7358 - DNA, 201 bp, Bos taurus
aaaaggacgagaagccagtggccatcactagttaaagtgacactttctcccatttccacagataatttaatgaaaatgagcacttccaattagagtagaaaagtcacattcctgtggcctagatgcacagcacagaaatgggaacggaaggcaattctctcccctttcacagttctcattttctctgtaacccacatctct

SEQ ID NO: 7359 - DNA, 201 bp, Bos taurus
cagtcatgatgtgggcttatcgtcttcatttaatatttatttggtatctacttcatatatgacactgagttataccctgtgttcttcttccccacccctacccctaattactctctctctgtctctgtcatagtatgttcatccaggctggcaaaaggtaatagtagcactaaacagaaaaacactcctaaattcccttag

SEQ ID NO: 7360 - DNA, 201 bp, Bos taurus
caaatgaatttacttatgaaacagaaatagactcacagacttcaaaggcaaacttacagttaccaaagggaaaaggtatggggggaggtataaattgggaatttggaattgacaacaacaaagaactactctgtagcacagggagctctgctcaatactctgtaataacctaaatgggaaaagaacttgaaaaagattaga

SEQ ID NO: 7361 - DNA, 201 bp, Bos taurus
ctcgatcagttggtagggcaagatttccgtttctttccctctgtcaaaatcaactgtctaatgactgtttgggtagaatatttctgaatttatgaagcaatttcatatatattatcttgtctgacccttctcacaactaacctgtaatgaaattgacagtttatagtgttgctgtttttagattataataatatgatgagt

SEQ ID NO: 7362 - DNA, 201 bp, Bos taurus
attttcaagtcttcttttaaaattcatgtgagaaaataaaatatagcatttcttacattctcttgcattaatgacagttaagttcttatttttgaatacccatgtggaatttttgaagatatcgaggcttcatgattttttctattcacttgttatgttttttaaagtaggtctctggatcagatattgtcccccacattt

SEQ ID NO: 7363 - DNA, 201 bp, Bos taurus
ttctaggactttttcaaggccacctagctgcaggtgtgacagaattatttattaatattttaatttgtgatttgttctcattttttccaacctcatcttgaaatggccttttttccctcaagccctttgtgatgggtcaaaatcaaagtaaccagctttgttttctaacctgacctctttgaggcggttatttcagggaaa

SEQ ID NO: 7364 - DNA, 201 bp, Bos taurus
taatgacaagagaatatgaaagaggatatagggataaatgagttttttattggtctggcttttctctagagagcaactataaactactttgattatcgtcatcatcataaccactaccatctattgaacacttgttcagcactgagcattgtactagatatctgacaagtatttgaatctttaactctcacaataattcca

SEQ ID NO: 7365 - DNA, 201 bp, Bos taurus
atccatatttcatgtggatagagagccactgatgagccacagagaaataagcagtcttatgagactgggtagataaaattggaaacttgagggcttaagaccacagtgagaaggaagagatagaactgggcctgatatacagctcgttttccccccaggatatttgctgagttctgaagctacaaagaacaggagaacatg

SEQ ID NO: 7366 - DNA, 201 bp, Bos taurus
gaaacttatgtctcacatcctgtgtttgtggcatttatgaggcaaaataggcgttccccccccttcatggaatcctcaaagccttaattaactgatggcataggaggagcagtctaaagccatttcacgtccaacaataggctgtttatatggtaccaaaaaatctgagtttttaatgaaaagcattgtggtgttattaat

SEQ ID NO: 7367 - DNA, 201 bp, Bos taurus
tcaaaatcatttcactaggccagcattttcttgatacaacaaccagacaaggatcacacacacacacacacacacacacacacaaacacacacaccagatcgcaggccaatatccccaatggaaatagagacaaaaatcctcaaaatgaatatgataaagtattagaaaatcatacactatgatcaagtaggattcatttc

SEQ ID NO: 7368 - DNA, 201 bp, Bos taurus
tgaaatacctctatcaaataatatttgatatttgataggattttttaatgctaatccctggaattcactaggatgtgagcagcagctactctcatattctatttagagtgtaaattgttataaactctatggaggttataatgatcttaaattctaactgcatatctgacaatattatgatactactctcaagttaatcca

SEQ ID NO: 7369 - DNA, 201 bp, Bos taurus
gaaagtcccaaagcccaatcagagatccttcagttagaatagatctgatggttgagcaaaacaaatttttccaaacaatgtcttttcacaccatgatgcataaagtgaaggcagagccaaaggaaataattccagtaagccatctatggaggaaacaggtagaggtaatgccaaataaagtaggatcgagttgaaagcagc

SEQ ID NO: 7370 - DNA, 201 bp, Bos taurus
attctaactttggcttccccagtgttaacaaggctggaaaagtattaaacagagtttgaatttgaaatccacagaacagtgcagggcctttcgttctacacgtgtcacagagcatgagacccaggggcaaatgcagaaaggacagagctgcaaccttccagactgagagctcagcaaaagtttgttttaacagaacataaa

SEQ ID NO: 7371 - DNA, 201 bp, Bos taurus
agggagggttcactcccatttcttaaattcttttaccaactcattttatcttgtaatgacaaaacagcatttgcttggtctatctatatattatggaaatataaaagtatttttttctgccatcatcactcataattatacctcaggaattcttttagccaatactctttcaaaagcaacaggagttgggtttggtggtaa

SEQ ID NO: 7372 - DNA, 201 bp, Bos taurus
agtcaaaggcaagttcctctggtccctcatccacaatgtttatcccagtgggatatgatacagtctgtgcaattgctatgttccacaataattataaaaggaataacatgtggtacgaacagaacttgtaacaaagaacagcagtagatggtaaaataaaccactggttatgtcaaaactaataacttatttactcatgca

SEQ ID NO: 7373 - DNA, 201 bp, Bos taurus
tatacataattataaaatatatctattaaataggtccctactctaaattcactggcttttttaaacagaaaagcaaacttttatacagcatgtcaaagtcgtttctaaactggaaagccttcaggaataaatatttctcatcaatgttattaaagggtgacattaggtacaacaaagtattccattcatagcattctaatc

SEQ ID NO: 7374 - DNA, 201 bp, Bos taurus
aaaggaggccctgatggaggcattatgaactacaccatagccattttcttctctacctcccactccatcctggaagactcaccaagatgctctggctttccacgggcacctggactctctgatgagagcacctagaaccactgacgagccatctgatgtttgtgtgcctgtgtgctaagtcgcttcagtcattactgactc

SEQ ID NO: 7375 - DNA, 201 bp, Bos taurus
cctggaagaagcaactttactgaaagagataatgagtaatagaggtgcctatatttggaagagcatcctatagccttggttcaccctttttctaaatctctgactttattctcctttagggggcaactgtactactctgtctgcactttggaggctcacttctgacatactccttgaccctctattctcattcctcagccc

SEQ ID NO: 7376 - DNA, 201 bp, Bos taurus
aaagtacctatttgcttgatggaatgcttgtagcaatgttctctcgtttagtggagctattcctgggagtaagtacaaggcccaggaccaacctatgcgttgttgagaagtgtgtgctcactgtgatctctattgttgttcagtaaggcaatggcaccccactccagtactcttgcctggaaaatcccatggatggaggag

SEQ ID NO: 7377 - DNA, 201 bp, Bos taurus
ctctggagccattctggtttctattatttcagaagaaagtatcttcagcttttgctgtggacctctaagctattctacacatccttatattaaattcctccgttttacttaagttaccaggatcagctggggctccccaggtggcagtagtggtaaagaactcggctgccaatgcaggagatgtaacagacacaggtttga

SEQ ID NO: 7378 - DNA, 201 bp, Bos taurus
atgtgaaagagagagggctcaagatgacttgcagttttcttggtttgaacaactgagtggtggttggcgacaattctcagataggaaagaagaattaggataagttagggctgtgcatcagagtctagttttacccctgttaacttgaaagttaactaaaaagcctctagatgaaggtgaaagaggagagtgaaaaaactg

SEQ ID NO: 7379 - DNA, 201 bp, Bos taurus
cttcctagtgtcttggcccatcgttaaatgttaagagctgttgggactctttctgcagcactcaatgcttcagaaacacagatgtattattcttaaagcctaggtagaacacaggcctgttgtgaatacctgatgactttccgcagttggaggactatggggattggggaagacgaggaaacaaaggagaggaaacctcta

SEQ ID NO: 7380 - DNA, 201 bp, Bos taurus
cataccatcatctttggggttacgattgcaacataagaatgtggggtgcacattcagaccatagcataggccaaatcatacagttccctgaaaggtacagcaaataattatgatgttctgatcctgcaggtggcttgactatattttattcactggaaaaataaaggattcagagaaattggggtttctattttagatttt

SEQ ID NO: 7381 - DNA, 201 bp, Bos taurus
tgaacttaaccatatcaactttctctaccaaagcccaagtctttcagacactggaaattttttccaatcgtgtgttggcctaaccgcacttcccatcctttggattggacttctctgaagcagaaaccaattgctttctgaaggctacagtccactgaccagaacacaaacaacaaatgtcatcctgtctcagacaccacc

SEQ ID NO: 7382 - DNA, 201 bp, Bos taurus
ttggaatttaggaaatctgacttgctattaaaacacagtgttactaactgccatgtggttgcttcagattgatgattactatgtaggaaattataacttatagtttttaaagttgccgatacaaaaggagtctttcaagacctttgtctttttaatgtgattccttaatttccgtatctgtaaaatgaagaaataacccat

SEQ ID NO: 7383 - DNA, 201 bp, Bos taurus
attttggtgaggataaaataaaatgctggatgtgaacatgctttggaaatgtctatgcattttgcatgacgtgctgcccacattgaagagtgaaatgctgcgttcagtagcttgctatttccttaacagaattagtgattaattcatactagtcatagcccacaaagagaaatagctggaagcaggttctattgaaagatg

SEQ ID NO: 7384 - DNA, 201 bp, Bos taurus
cttggatcttagaagatgtgagctagagaaacaaaggagggaaagattccagaaaagcaggagcatatgcaggaaatttggcctcttcagggcacctgttcaaggctggcaggtggatgaagtaacaagacttatgaaacagaagcagcaggcccaaaggggagaaccactggagtggcatgcttacattttgcatttata

SEQ ID NO: 7385 - DNA, 201 bp, Bos taurus
actgaagggccatttgcaggtgtgagaagtaaaactttttccaaaggttcattaaatcacacagttttccttagagaggatctccatggcaaaccttgctttcatttttccaggccaataacagaagaaggagctgcagaggccctggctggggccacccaggctgaaatggaagcacgcaacttccagctgaggccccgt

SEQ ID NO: 7386 - DNA, 201 bp, Bos taurus
attgagcaagaagacctacatactcaagagtgtttggagtttctccagaagaatccatgtttcttgttggctggatgaggactggcctttttggtcctacctcagtgaggttttcaaccttgggggattgatttctatcattttgatctgggatcagagtagcagggactttggggacggccatagcatgcaagcatgtct

SEQ ID NO: 7387 - DNA, 201 bp, Bos taurus
acattctttccgtggctccgtgaaggccctgccatccttccttgcaaactcctgctccctttccccctttcaggcattctgcaggggatgggatttctctgaaaaatggtttgatggcccgaccacctgcatgccaaacagtaagcaactgctatttggcttggctgtttgcttgacaccaaccttctgctagtggatgcc

SEQ ID NO: 7388 - DNA, 201 bp, Bos taurus
tccgatgtttaaccctgggccaggcacagttggtcagtcactgaacatttcataaataaagccatgaaatggtgagatggaggggtgtgcttggggaaaagcagtatctgccattgttctggcccagtactgatggtagggggccaatattaagtatttagtttatattctatgtgcaagtgatggcatccatgcgggctc

SEQ ID NO: 7389 - DNA, 201 bp, Bos taurus
catgtatcatattacagttgctacagaaagctcagaatacatttatgcatcactaatttgaaattaaccacagctgctaaacccactatcatataatgcactaatgaagaagcacatatattgctatattacattttttaactatatttcaataaaaaagtattctcctttgcaatcctacatactttaaggttttttttt

SEQ ID NO: 7390 - DNA, 201 bp, Bos taurus
cagaaactttgcagaccacaagagaatagcatgacatagtcaaagtgctgaaagaaaaactctgtaacctaggacactcctcagacaagcaaaatctaacgtcgtcactttctcaaaactaaacttgctcttaaagaaatgttgaagggtctcctctaagtggcaaagaaggcagaagctataagaaagggaaaatcctac

SEQ ID NO: 7391 - DNA, 201 bp, Bos taurus
cagccaggaggcgggagagggaggaagacaggaaggaggccccagccctctcttcccactccaggcccgctctcgggggctctttcaagaggaggccgtaaagccataggttgagggaacagctataggaaacagctgctcagggctagagggaaggcacccggatgccaaccaggtgttgctctccagcccatgggctgc

SEQ ID NO: 7392 - DNA, 201 bp, Bos taurus
agaccacaaacccgccgccctggctacaaaaccctggcctttccgccgcgccctttgaaggcgccccagcctgtctggacctcaactcactcttactaccgctagctactgtggcgaaggccgcggcttctctgtcaatgaccgtgacgtcatcaaacggtgccaactagcagcctcgcgcgcctataagaaggcgggggt

SEQ ID NO: 7393 - DNA, 201 bp, Bos taurus
ttccccaagttcatatagggagtgtgaaccacgtggcctaacaaaaaagctaactcacttggacagctcccttgggcctgcaatgtacaatcagaaaacaatatcatctgggggaattccctggttgcttagtggttagtgttctggcctttcactaccatggcccagattcaacccctggttggagaactgagatcctat

SEQ ID NO: 7394 - DNA, 201 bp, Bos taurus
aaaggagtccagccaagttcttctgggagcttggtcaggacagcacaacaggaggaggtgacgggaggcagggaaccctgggcagctgccttctgtggcagggcagggccagacagccaatcctggtactcacatcagaccctgctctatatgaatgagtgtaagggtgtggagaaggcaatggcaacccactccagtact

SEQ ID NO: 7395 - DNA, 201 bp, Bos taurus
tcacactgagaatactagggcaggagcaaaggccgtttcttcttcccacgaatgtgaaactatgtcaaacacgagggccacaactgggatcttcttcaaaagaacgacaggagaatactgtgtgtagataccattccagaagaaaagaagtgaggaatggccaggccagtacgtgctgcttttgtataggacttcattttc

SEQ ID NO: 7396 - DNA, 201 bp, Bos taurus
aatcataaagcagtatgataggccccacagagacatacttcgtgccacagtgtagcagagaacacactgttatctgtattttcccctcagataaagatgtgcccatttaacaaggggccatattttgttttccatgtcctattcagaattaaaaagagtacttacgctaaagttaggtcattacttagaaattaattttcc

SEQ ID NO: 7397 - DNA, 201 bp, Bos taurus
gcatttcccagggctttggccaacctctatgaggatccagagtggtctcagaaggacctggcagggcccatcgagtcactgaagacccaggtggccaagagcaagctgggtgtgctagcccccaggcagctactgcggtaccagcaggagctggctgagcgcgcccgcctgggccacccggcctgcttcaccaacctgtgg

SEQ ID NO: 7398 - DNA, 201 bp, Bos taurus
ccaaatgcatgtgataaacccccactgctgaacatggcagggagtacagagatgaacagggtagtgctcacttcccttctttgagtcacagggcaaagaacagtgtttctcaaagcagcagcccctaattcgcagtgtcagaatcacttggacttattaaaaatgcccagtcctgagccaagctcccagagattctgatgc

SEQ ID NO: 7399 - DNA, 201 bp, Bos taurus
gcagtcgtcacggcttagaggctttagacctactgcgcatgtgtcgttctgtcatgctagtcaccttggattgtcaggatgatcgccaaaagctaccactgagactgtcggcccttctctctcctaacccttaaaagggtttggggaccagggaagaacccagtgtggcgtttggctttctcctccttccgttcgccccag

SEQ ID NO: 7400 - DNA, 201 bp, Bos taurus
catccaccatcttcaaaactagagtggtttagtcaagcatcttcaaaactctctgacctgtgcctccatcatcacatctctttatttccctctgacaaaatatatatgcctcctttttgaaggccccttgtgagtacaataagcccaagtggataatgaagaataatcttcccatctcagagctttaatttaatgacacct

SEQ ID NO: 7401 - DNA, 201 bp, Bos taurus
cactgatgacactgatgctgcctttcctttacttggaaaccttggaaggtttcccattgtcttagaattcagctttggttggccttcagagcccttcacaatctaaccccaatctatcccaggctcatctgttctacccctgactataccttaactgctgtgggcaatttcccagccccagcacagccctcaggctccctt

SEQ ID NO: 7402 - DNA, 201 bp, Bos taurus
tttgggctatttttaaattaatttttagcagtttttttttttttttactgtttttggatacttggtatatgtgtacttgcatctttatttgtcatttttaccatatctttagaaacaagaacttttcaaattttattataatgtccaaattattatcatcattttatttcttttatggatagtgctttctgtgtactaaga

SEQ ID NO: 7403 - DNA, 201 bp, Bos taurus
tatgcagaatcttaaaaaaatgatacaaatgaacttatttacaaaacagaaatagactcacagaaaaccaacctatagttatgagggggaaagggttgcagggagggatagattaggagtttgggatttacatgtacacacttctgtatttaaaataggtaaccaacaaggacctattgtacagcacaggaaacactgatc

SEQ ID NO: 7404 - DNA, 201 bp, Bos taurus
actttggggaggttcttaagtcataaattttgaaaattttctctgcataaatatacatatatatatttcccaaattcttaatgttgaaccttgacccttacactttcagagaagggcatgatctacttatagtcatagctcttattttttattaaagtttcaggttttgtttcatagatttgtatgaattttctgtatacc

SEQ ID NO: 7405 - DNA, 201 bp, Bos taurus
attattagccagattagtgtaaatctttacattagaggcctatttacctcacttcttattgcccaataagatgcctggcattcaacaaaaaatcacagggtaccctaaaaggccagagagaatgaattagaagacctaaaacaatcatcagaaatcatactcagacataacacagatgttggaagtaatagacaggaaatt

SEQ ID NO: 7406 - DNA, 201 bp, Bos taurus
ctatggttagtgcagaaagtgaaatggaatagacccaaaatcaaattaaaccagtaaattctccccgccctatgcataatcagcatggatatctatagcaaatgggaaggccgaggaggaggctcaggtttgtagcacaagaattttctgtttgaaatattgttgctttattgtaaaatatcaaagttcacaaatttatta

SEQ ID NO: 7407 - DNA, 201 bp, Bos taurus
atgtaacaaatagccagccacaggcattagtttctgtgaaaatctcccagtaaataatgtgttaatctgctattatcattattccatcttgtgaaaatgtatttttcttatagataagagagaagactttgcccaaatccttatgataattaagtagagaagaggggtgcatgcatgaatatgagtgtacagaattattta

SEQ ID NO: 7408 - DNA, 201 bp, Bos taurus
tgcatatttacatttctgaagaatattctatatatatgtgtgtatatataacctccgtggcaatttttcttcttttgttcatcctaataacttgcagtctcatctttttgtgctttatttctctcttgcagttatgtacataaaaacatggtactaaaatgtagtttatgacagtgctgtgaggaaaagacattgaaatag

SEQ ID NO: 7409 - DNA, 201 bp, Bos taurus
gaattagcattgtatagtattaaaaatacaatcaaattcccagtatcctctgccttcatgcaaagcctagaaaagaacagttctgtgtatgtgttcagtgcagtatttcctttccttctttgatttcacagttcaaacatttcacaaacagctaaacctgattttgttctccaagaagaataggtactggagtctaatgta

SEQ ID NO: 7410 - DNA, 201 bp, Bos taurus
aagtacaaagagctatagacaaggaaccagaagtctcttcctactactgaagctgagagtctaggtgactgggagcaagtcacatacttttgatcaggtttgattttctagtctattttgtgaattttaggtacagactcaattctgtctttgtcaatgagttcgcatgaagattgaatgaaatagatgtgaaagtggtta

SEQ ID NO: 7411 - DNA, 201 bp, Bos taurus
gatgaaaaatacaatctcagataaaacctaattatcattactcctttcattctccagctcaaataaaactcttgaatgttctgtaaaatttaaaacctggaaacttgaaatatgattgaagtataaattgcagaatcagaggccaaaattttattatttcagcaagtaacaaaaaatagctgcaatgtagtctatttattt

SEQ ID NO: 7412 - DNA, 201 bp, Bos taurus
ctcacaaattcatctggccaacatagaccttaggcctgctctctgggcctctgtatccagttggctactcaacgtttgtcttgaatatctttatattccaatatatccaaaatttaatctaggcctcaacactctctcaaaaaaaacatggaaaacaaaacaaaagtctatttcaggatctcctatgtcactgaaagggca

SEQ ID NO: 7413 - DNA, 201 bp, Bos taurus
aatctgtgacagatcaatttaggggtgttatataagaaccaggaaaagttgcaggtgctggaagaaacacagactggattttcttctatggttttaggcatatttgttcctcaacctgattaaagttattatttagtgttaaaatgtgatcctttctgttccaaactggtatttgtaatagtatgtcttccaaaatatatt

SEQ ID NO: 7414 - DNA, 201 bp, Bos taurus
cttttcagcttcattagcaaagaatttctactcctgtgggtaaatattcttcaccttttcatctctttagctatttggcaccattatttaactcccttccaaatatagttttttccctcttgacctgctttttctcccttaacataaaatcattcttgaactttttctcaggttaaaaacaacatctgttctctcagcact

SEQ ID NO: 7415 - DNA, 201 bp, Bos taurus
actatgaccactatctggagacccttacttcctattggtacataagttccttctatcacatttaactaaaccatgaaactatggccactctagatataaacttggatggttactgaaataaagaataaagtcaaattctgtgttctttttgctgttaaggcctttatttgttttacaaaataactctctcataatcagaag

SEQ ID NO: 7416 - DNA, 201 bp, Bos taurus
gggtggaagtgtagtgtatcatttccagacacggcagcaagtcctttgtcctatctggctactctcctgacactgcaaacttggaggccatgttttgagatggcaagaacaaaagatggaggaagcttggattccagagtcaccagattgtggggaatttgccccatttcctcctgccagcccatattaaattgtgtatga

SEQ ID NO: 7417 - DNA, 201 bp, Bos taurus
gagtgatggttgctataagctcctgtccaacagtggtctaggccaaaggattcccttaatgatctccactaggcaggtcctaattgggcctcctgagaattctccctcactgatgggagagctggatgttcactttgggctcttcttcactactagataaagtttagatgtagagaagagctatagattcatgtctgtact

SEQ ID NO: 7418 - DNA, 201 bp, Bos taurus
ctaccacagctatctaaaagtatagagatggaaaccaaaacaagaatgccaacaataaccagtatctccaaatgtacagtgaacagctaaaatcaaatgaggaagttattcattttgttttgctacttgttcaagacttgattttcatttttcccacttttaggtcataatgttgcccataaagtttttcattaaattttc

SEQ ID NO: 7419 - DNA, 201 bp, Bos taurus
cctatttgaggttattgtactaaagagtaggtgtttctggattttaagttactgtttttctcttcacagacctggaatcaggcctaatgaagttgagtacatttattcttagtaatttctttctaagattatctctggcttccagatttatcctagatgcaaatctcatctttcctacttgcaggccaaactcggtataaa

SEQ ID NO: 7420 - DNA, 201 bp, Bos taurus
ttgagcatcagtagtgtaaaggtgtttacacagcacctgggaatcaaagtgtggccaagcaggtgagatcttcttcagcgtacaccttgctaatgattttgctctcagttttattttaaggttatcacaatgagttaaagaattccacctaggtctagactgtgtgaaaggtagatttctgtagacttgaaaaccaaggag

SEQ ID NO: 7421 - DNA, 201 bp, Bos taurus
tgggagccgctgctgaggcgctaatgggccccacacaggtcttgagagtggcttcctcacagggcatctgtaataactgggcttagggtttttaccagatgaagtaaatgcagggcccagagcccaggagaacaatagcttctctgcaccagaggagatgtgcaggcttccgcctggggcttagacttgtttccactcccg

SEQ ID NO: 7422 - DNA, 201 bp, Bos taurus
tggcggaaacactggcggcacatattgaggccgtatttccggatcagaccgtgccggttggagcagacccggctgcaaaaagaaacggcgttatagctagtcacagaaagtgaattatcggcactccgtggggccaccactcgccctgcaggtctccacggacccatcggaggcctgcaaatggcggcagccacctctccg

SEQ ID NO: 7423 - DNA, 201 bp, Bos taurus
ggccaggcaggctgcctccctgcaccctctaagttgcaggagaaaacgagcctacactgctctgatattgcgatactgaccagcgagtgccctgctttctagttgggaacgcgcttccctatctcaggtgctttcttggaacccactttgcgctctcatcgctcccctccaccttccgtgactcccgtcgggctcatccgg

SEQ ID NO: 7424 - DNA, 201 bp, Bos taurus
ggtttttaattaagttacatacataattgtaacttagcagcaagtattttgcatactgagcataggaatgtaacttacagatgttttaagcctttgtgctatgttttctgatctctgcttgcagggtggcattccaccacagccacgagccgcgcatacgtgtgcagttcttggaaataagggctatatctttggcggacg

SEQ ID NO: 7425 - DNA, 201 bp, Bos taurus
gcaggggcacaggttcagttccaggtcaaggaactaagctcctgcatgtcccacagcacagccagaaacaaacaaacataaagcttaacacagatgaagcgatattaggagtagaagcccttgaatgtaatattaatattctgaatcttagaattaactttttgattcagattcacttttagacttagaatgagttaaaac

SEQ ID NO: 7426 - DNA, 201 bp, Bos taurus
catgtgtaccctgagaggtaagaggtgagagataaagtgaaagtgttgttctaaatgtgggtgcctggcaagcctctgtccctgagctggaattgctatcataatctaaaatcaacagaagaagcaatccagggccaagtacggggcaggaaccagggtcatgggttacaaattgatctgggagtgaaattacaagcctat

SEQ ID NO: 7427 - DNA, 201 bp, Bos taurus
gtgaagaaacatggggattgtttcagctcgatgagttcccagtggctaatttggttttcttatatttcagatgttatttgtgttgtgtatgcagtatgatcctaattttctttaaaaaaattgaattaagaccaaaaagagataagttataaaatattaactgtgactgactgggttacaggacttcagtgattcttttta

SEQ ID NO: 7428 - DNA, 201 bp, Bos taurus
atgtatatataaaattatgactggttcatgttgctgtatggcaaaaaccaacacaaaattgtaaagcaattttccaccaatcaaaaaaaacaaacacataggggatagagctagtttttcataggtttggtttagaggttatcatctccccatttccactgattatatggcttgtattaaatacccagagtctagaaaaaa

SEQ ID NO: 7429 - DNA, 201 bp, Bos taurus
gtaggcactcaagtcctcccagtccaactctcataactctctctattcaaagaacttaccccctttgttaaaaggaagcctgtactaacacactcaaatctaaacccatgagaagagcccaacacccactcttgtagctgtaatgaatcatcttaaattagatctgatataagcaaagacagggcttccctggtagctccg

SEQ ID NO: 7430 - DNA, 201 bp, Bos taurus
ccccagggactataagcccccaaaattatttgcaaaattgtgtgtgtgtgtgtgagtgtgcacgcatgaggatttggaacaattttctggggcctgtaaatgtcatctgattcacaaaagggtcagtgttgcctctttgcctcttttccccaaccccaggttgagaacagtcctagattagagtccctggagggcaggccc

SEQ ID NO: 7431 - DNA, 201 bp, Bos taurus
ctctcaaaaacgctcattcattttcagtctccctgaaacatcacacatgttcttgccttcccttcattctgcccaggccccaacaccctgcctcagggctgcacactttctagaactttcctgagacgtggcacctctatcaaaatgcctgtggcctgagttctggtaaacaaggaaaggcatgtaaggacctgtgggcgt

SEQ ID NO: 7432 - DNA, 201 bp, Bos taurus
atgtaaatgtaagatggagaaagaccatgtgcttaaatccatagggaatgtctactactgtaattgtcaatggggtggattgagaagcatattctcaagactacaagatgcatggctcacaaactgaaccagagaagcccagctggtgctgaaggagaacagaaagcaagtatccctggctcccatcatttgctcccaact

SEQ ID NO: 7433 - DNA, 201 bp, Bos taurus
ctaatctcccccaaccccagagggtcttaccttcaaggccagatctagttaagagtgctacctaccaaccagcaccttattctcctggcctgtcaaaactgaacttcagagtctgaggtcctttgggaacaatctaaaatctgtgattcctaattccaactccagtctaactaccagtgttccttcttcaaagaactcgag

SEQ ID NO: 7434 - DNA, 201 bp, Bos taurus
ttttccactgtctgccaccaaactgcatttgtctttggagagaattagtctcactgtctagtgtattggcttcccctgctgccagactgccagttcttccgcatgatgacttatcagtataacaagtgcattgacgctgacatgaagattaggaatttaaatgggcagaagcaccaggaaagcttgtgagaataggtgact

SEQ ID NO: 7435 - DNA, 201 bp, Bos taurus
gagaagctggcccctcaccatcccagtacaggagaggttcttcctgagttccaccaccagaagagtcgtggacctgttcaaggtcccaattaatttaacaagatgtcagtttggcctgtgttgccagagggatggcccatgtgtgaccatttttcacagagcacacgtatttgccagaattgaagtcaggaaaaataaatt

SEQ ID NO: 7436 - DNA, 201 bp, Bos taurus
tcctcccttggccagactttctggtgttgtgggtgtggcctctgaggactgtgctgcttttggcgtttctccagctctggagagtttgcctaaagtgtgcgagttccaaggtctttgaatagcaccaaagaaatgtgagatttttattttatgctgttatgtctgcctgtcacattatgctatatttattaggctctaatc

SEQ ID NO: 7437 - DNA, 201 bp, Bos taurus
tgtggtgggggcagggcagggtgccttgggccacagtcaagttggtgtaggtatcccggggtgccatgcgatgaaccggggatgtcaggtagtgaattgtgtcaagcttccaggcccatctgccagcttgaaagctgcttcctatctgctgctgctaagtctcttcacttgcgtctgactctgtgtgaccccaaggacagt

SEQ ID NO: 7438 - DNA, 201 bp, Bos taurus
accgccagcatagcacaagccaggaaactggtagaacagctgaagatggaagccaacatcgataggataaaggtgagcatggcgtcacacacaggctcagctggccttgtcaggagtataacttgtagccaagtgtcatttgactactcttctatggagagtgatgaaaccaaagatggtgggagagggcttccctggtgg

SEQ ID NO: 7439 - DNA, 201 bp, Bos taurus
ctcagagttgttataaaagcttacataacatttaaaggtattttataatgtaaactattctatattagaagtgtttgagcactccttcagtcaatgaatgcattttaagcagtattcatttgtgggccatttgctatcactgggggaaaaaaaaaaaagatggttctctatggggcaaatttatacagataaggtcactgt

SEQ ID NO: 7440 - DNA, 201 bp, Bos taurus
atcctactaatacttgacccttcctctgtagctgtcaccccactattagggctgatggttgcatacatccaactggcttggaagaaattccgttcactctatatgtatcttccccaatggagctgaagttccttgaaaacaaaggccacccccagccctattccttcatagttactttgcatagaattcactgcaaaatat

SEQ ID NO: 7441 - DNA, 201 bp, Bos taurus
ccatgaactgaaagagagaaagagtcttagggggcccatttcagccccctcatcatacagataaggctcatcagagagatgggacttggccaaggtggccggaagtaaccccatggctcagcctcacatcccctctcactgaaccccacgccacaggtcccttcccacctcaggcaggagctccaagctcctacattagaa

SEQ ID NO: 7442 - DNA, 201 bp, Bos taurus
ttactcagacaccagtcatcctgtctctctggctcagacgctatgaatggggtgaggagatcaggggccatagctgggctggtggtggtggggtcagcttcttgggcacaagtgaatacaggctgaggtggctccagccctgtctctccctgccccagggcatgtccctggattgtgtggagatgtctctgggccgtgtgt

SEQ ID NO: 7443 - DNA, 201 bp, Bos taurus
ccttcactctcagttatcactaccaaagcagcttatagacctttaggtcataggtccttctcatatagtcctcttaaaagctcccgttacattctttcccctccaatgctagtgattaaactggctgggcactccctcccttaactgaaaagaagctaagcaatggctcactgctcctaactaatccattataacaacagg

SEQ ID NO: 7444 - DNA, 201 bp, Bos taurus
tcctgcctgaagaatcccatggacagaggagcctggtggcctacagtccacagggtcaccaagagtcggacacaaccgaagtgactgagcacatgtgcaatgcttggtatgatgatgaaaatggccctttacttccgcggttatcttctcaaaaacccgtaacctttattttatcgtaagaaaaacttcagacaaattcct

SEQ ID NO: 7445 - DNA, 201 bp, Bos taurus
ggaaatcccatggacagaggaacctggcaagctacagtccatggggtcgcaaagaataggacatgactgagcgactaacacacacacacacacgtatgctgggcattctgcagcttgtgtctttgcaggcctagccagaaggactgttttaacagcctcagctactccatctgctgctcacttttcacaatggtaaccaaa

SEQ ID NO: 7446 - DNA, 201 bp, Bos taurus
accaaggggtacctttggcctatttatttaccagacatgtgtctgtgtaatctgacattgtcgtggtcgatactttcctgtgagatgtcagtcacacgattctaactgcagagggcctatcgtgtgctcctctactctatgtttggaactctagggggtcccaaggccttccccaaagagcttaggtgcaatctgcctgga

SEQ ID NO: 7447 - DNA, 201 bp, Bos taurus
caggtgaggggcccaagatcagagagatgagtctattgctaaggtcacacagctagcctggggcagaagtggagttcaaactcaattctaagacagggccttctcaagtgttggttccccaaacactgggtactctgattttgacatccttgcagaacttgctttagaaaaccagttctggagcctcactcccagtgagtt

SEQ ID NO: 7448 - DNA, 201 bp, Bos taurus
tttcaaaacccaatcccgtttcccagagttggctggtatcccagtcagcttaactagtcctcaacaaagaggagacccacaaaatcctattagatcaagccaactactgttggctactgtgcaccaaactagtaggcatttattgaatattttctataaactaatccaataggcatttatggagcacctattgtatgtcaa

SEQ ID NO: 7449 - DNA, 201 bp, Bos taurus
tggccattacccatataataagctagatttattgtacaaactttctgaatagcttacattagggattggcaaaccacacctggcccagctcctgttaaatttaaatagccacaagcgttcattcaggtatatcagtgactgctttcacacaatgatgtcagggttgaaaagttgcagcagagactatgtggccttcaagtc

SEQ ID NO: 7450 - DNA, 201 bp, Bos taurus
acagtcctgtgggacctgtgagcatgatccctgctggccaccagagtcaggtgatataaaggtgtcccctgaaagcacctacaaaaacctgagggccagacaagggtgtaagcctcttgctggaagatactggtgagctagggcaaggctgaaggtgagcacaaaggttgtatccactggcctccattccctgagagcaac

SEQ ID NO: 7451 - DNA, 201 bp, Bos taurus
tgcctttctccctccctcccgtctcgctattccctgagatacaatgatattcaaattaggatacataacaacccttaatggcctctaagtgtttaactgacagaagagtcacaagtctctcattttaaatcaaaagctaaaaggattaagcttagtgaggaagatatgtcaaaagtcaagagaggccaaaagctaggcctc

SEQ ID NO: 7452 - DNA, 201 bp, Bos taurus
ctcataaaggctctttttattaggcctaattacacttcagggtgatgtcagggcaaggaagccatgcagtgtatttctcacactgttacacatggccacaggagggtcactggatctcataaacacagtctggtcttctttcactcacgttatgaaatgtcctcagagttactctgccccagcaatctgtcccgtatgccg

SEQ ID NO: 7453 - DNA, 201 bp, Bos taurus
agaagaaaataaaaaccacacgggcagacagagagcccccactttacacactgtggctcagactcagagaggttaaaggcctggcccccggtggcccagcaggctgcatgggtcccagaacagtactggtttagtggtctgctccctgcggcaggtaccatactgactaagttctagttctggactaggttctagacatgt

SEQ ID NO: 7454 - DNA, 201 bp, Bos taurus
cccctcctggttgccctggcaatggaacatcaccttacaggaatgaaataagattgagaagaaacccacaagcacaggggcgtttccgggtctacagacttgctgtttctctctctactttggcctagggaaggcgggaaacagggaaggtagctgtgtatgtcttttactcattggcacctgcctgggaggaaacttcgg

SEQ ID NO: 7455 - DNA, 201 bp, Bos taurus
tgctatctggccttttgtaggaaatgttagcccacctctgatgcagaatggtgtctggcatgtagaaagtactcattaaatggtcacttaaaaaggaaaagacctcactaggccttggggtttaacagaatttgactgaggtcctggggcaacacaaagagcctcaaagaaaaacctaaaacaggtgtgtctgtcatcagt

SEQ ID NO: 7456 - DNA, 201 bp, Bos taurus
caggcctggaggagggatttaaactcgggcctctctggtgccataggctgtgctttgttcccagagctcacctaacagcccacacaaatgagtaattatccgtggccagcatggtctttacaaagaagagacaggggtgccttaggccaggtgaggtaaggcatcccagggtggaaggaaggacctttagggaagttgagg

SEQ ID NO: 7457 - DNA, 201 bp, Bos taurus
aggtggagttgggtttcaagttgcttaccaacaatccagagcctggctagaaggctcctgtgctgctagtggcctgcgaattctcatagggcactgagatacgaagggaaaatggagctttaagactcaacactgctgagagcaacaaaatccccaaggcaaatccaggaacacacaggattcccgagagcctgggggaat

SEQ ID NO: 7458 - DNA, 201 bp, Bos taurus
ctgcaggaaaaaaaagagagagagaataaaagagggaggcactgggccttgccctggatgagtttaccacacggagaaaggaagctaaggagaggtcaagcgagtccaccctcaggagctggcctttaacgttttaactctgcccactagccaaacagagcctgatgctgggcctcactagaagagctacttctgcccact

SEQ ID NO: 7459 - DNA, 201 bp, Bos taurus
atgagcttctcctcgctggcgtgtccctgcactgaggcgttggctgcctcgcagagactgctggtcgcggctgccaccatccgggcctggcgacagtcaacagagaagtgacccccagcccaaacctccctcaggggatctaaaaagccaatggggaagaaggagagagcgactcacggcagaaatcaggccctgcgacca

SEQ ID NO: 7460 - DNA, 201 bp, Bos taurus
gctgacgggcacacctgtcatcagtgtgcactctatcacacaggccagggtactgagctgctcactcctacacatggccagtccctctccttctccagactgactgcaacagctcagccacgacagagcaccaccctacccaccccaatcaacgccaaggcctttaccttgcaggccgtcaacatgtctgacacggccttc

SEQ ID NO: 7461 - DNA, 201 bp, Bos taurus
ctcctcccacaagccctccagggatggttgtgtgctcatcaaccttcctctacattcctacagccctgagaggaaactcaggagtcaaagagtcatcagaaggcaatggcctcaaagtaaagaactgggggacaagtgatgatgcctgatttctggtaatggaaaatgatacagcttctgcctggctctctctgaggatgc

SEQ ID NO: 7462 - DNA, 201 bp, Bos taurus
tcagagtgtggctcctggaccacatggccagacctgggaactggtcagaaatgcacaatcttgcccattttgggatgtactgaatcagaaacttaggggtatgggtgtggcctagcaatctgtgttcaacaagacccccaggtgattgcaatgcatggctaggtttgagaaacacctgggcaaaggcaccacaagcctttt

SEQ ID NO: 7463 - DNA, 201 bp, Bos taurus
aaagagtattcttcatagtttgtaattcctaaaattatcaatgagtttatcagttagattagtgaccgcattgccatcagtccctttcgtcctggggcccataatactccaaggagtccctggggatgaaggacagaaagaagccttgccaagggggaaggtcagggtcactccagggagcatgcatcaagtaactggcca

SEQ ID NO: 7464 - DNA, 201 bp, Bos taurus
atcaaggggctggaagactatgtgacatggcaaactgtgaaaaattcatccagctggattaatgtcagattcaccggcctttagttctaactcgtgagcagagcctggtcatcaatgaagggtattcctgtgagcactgaccaggactagacactgaaaccagggcaccaggaggaggcctttaactcacagccttttaca

SEQ ID NO: 7465 - DNA, 201 bp, Bos taurus
aggagcaggcactgaatatatgtttattaaataaatttctctaccattatttagataaattaactccttcagctgaatgtggcccacagatacccaatttgcaaccaataaatgactagggcactgagaggaataaaactaaactaaggagggccaaatctataaaaactaatttctgtccttttgcaacatctgcatatg

SEQ ID NO: 7466 - DNA, 201 bp, Bos taurus
accagtaccaggccacggcccaggggttggggacccctgctctaaagaacataaactgggtgtagacgagataagctgtgtgatatccattccatagttcatgaacctctttctcctttggccaaccaatcacaacctacaatatactatagaagcatacattagtatggagttgtgaactgttggggtttaaaaatatta

SEQ ID NO: 7467 - DNA, 201 bp, Bos taurus
cggaaagacaaatccaagggccagaagtcaaaggaatcacggtgacagaggggtagttagagtcaggggagaggaatttgggtggggaaaggcctgttcagtggctttagtgtgaggggtttggcttctctgagggatttgttggaatcacacagcaccagtgaattgggaggcctctcacggaagtgcaaattaacaata

SEQ ID NO: 7468 - DNA, 201 bp, Bos taurus
gcacacataccgatttaatatttcttatgttctctacgtttacttcctgactagcagtatcttctcctcaacttttacaaatttctacaaatttaagcatgcgaaatatgcttaaaatatcaagtgagtattttgcagccactctactttgagaatctgccaggcctactcagagcatgattctgaaatatttttgctttg

SEQ ID NO: 7469 - DNA, 201 bp, Bos taurus
atgggtaccagcctctgtggccacaacatgagctccaatatcatctccattttgcacatgtggcaaggtgtgcaaggccaaggtgactgacccgactaatatctgctcagcaccagctcctatgtatggcagtgccttccttgtcaggatggcataggacaggccctctagtctttgctgagtaactgtggttatgagcac

SEQ ID NO: 7470 - DNA, 201 bp, Bos taurus
taggctttcaagttcatgatcaatgtgccccacaagactgtgtctctgcttcctccttaccagctcatacctgacccccacacatacaatatgtatacattcatacgtatatcctccaccttgaagtgatcagggagattttaggaaaacctaccatatctacatacacacgtatacacacgtgggcttccctggtgactc

SEQ ID NO: 7471 - DNA, 201 bp, Bos taurus
tttaatttgaaagttttatcctctgggtctggttaattcaaatacacggcaaggagcattactgtggggcctgaaagaacgtgggcatggtgaattgtgtgaacaaagacagccccatccagtgttgctgccgctcggctggtaaaaggtgatccccctcccatgctgcccacactcctttggtaaaaggtagtagggaga

SEQ ID NO: 7472 - DNA, 201 bp, Bos taurus
taaagagtttaacataagcaagtgtaaggaaagtaccacaggaaccacccaggcatggcgttggtgcccttcatgtggggtatttctacacttggtcattagcaaaagacattccacattgcctttgagacctagttttaccttaaccctcatgtgctgtggaatgaaatgaaataatagatacagaggggtgctgaattg

SEQ ID NO: 7473 - DNA, 201 bp, Bos taurus
aaccacagaggagcaaagggaggtgataccctaggtgggcagggcctcgagtccaggaggtcagacagtgacaggagtagtaaaaatgagctacgaactctgattcttcagaaggccgctttcttctggtgtcgtcagcctcttgcatgtgggttcaggtcccttcaaggttaatcagaatcagaagttcagagaactgca

SEQ ID NO: 7474 - DNA, 201 bp, Bos taurus
aggcaaagccaaagacggatcagatgacagattaaagtgaagatcagcaaactacagcccacaaaaccaatccagcctgttttagggtagcccacaagctgaggcctggcagctccagcttttgcttcttgagagccggctgctgttactatcccggtgtagaggaggacctggcagatgacagtccaagggacagagaaa

SEQ ID NO: 7475 - DNA, 201 bp, Bos taurus
tgcctcccaggtaatatccttacttggagttccctgagagtactggtctgttttgtttctatgtcctggacgctaagcacagtgttgggtaccaggcctgctgcatgatttgcaggactcagtgcaaaacgacagtgcagggttccttgttcaaaaatgaagaaatggaagacagtggccacaggaccttaacccctgtgt

SEQ ID NO: 7476 - DNA, 201 bp, Bos taurus
tggagtcccaggccaagatggaagggttagcctaagccggaggagtaatcctcttctctgttgatagggaggtctgaagaatggctctggaaagttaataagagtcaaggccccaggataattagctgcatgctgtgtgtcctgtacgtaagtaagccattgtaatcccagtactacagatggggagagggaggctgaaga

SEQ ID NO: 7477 - DNA, 201 bp, Bos taurus
gcatttaagataggtatccgatgatgctcattaaatacttactgaagccatgtgcccttccttcttggcccatcacaacacgggcctgtcactggagacactttatgacatactacctcttcccccttcccccaaacaagtcctgagagataccagagtaactgaaattaagccattctagaaaaatggggatgcatggtc

SEQ ID NO: 7478 - DNA, 201 bp, Bos taurus
tgaaactatttaatcaggtttggttgctcatctcatcatcttgctgcatcacaccccttctgacgagttcattaactggaagaaaaattgatgacctcgttagttctgcacattggttcacttaggacaaattggagctttagaatgtcgctcaactctgacccatggcgggacaaggtgtcatgctcaggaatgtttgga

SEQ ID NO: 7479 - DNA, 201 bp, Bos taurus
aaagcagcctgaggccagtctccccagagtagctgcaagtgaaaacctctaagtcttcccaggacctctctctctcttttcatttctttctttctctcgctcattcactcactcactcctagcaaaaaggaatctgagacattctgatcagagccaccaacatcttctactgccatggagttctgcttaatactttggttt

SEQ ID NO: 7480 - DNA, 201 bp, Bos taurus
atcaagaacctgagcttcattaggtcctgaagccaggtactgtgggttttggctcggttgagtccaaggccaatggatgttcaagtaccaaatagggtttgggcagggtttgagtcccagcacatgggttcaagtcccaaagtcccaagcaggattttggccgggtttgagtcccccctacaagggttcaagtcccaagca

SEQ ID NO: 7481 - DNA, 201 bp, Bos taurus
aggagcctggcgggctacagtccacagaggcacaaagagctgaacatgactgaagcgacttagccggcacacacacaacctagaaataagcgtccaaatactgttcaatgatcaaggcaacccactgctgctattcaatcacaagcatgatctttaatgaagataactaattctaataactttcacaattcaaaatgtcca

SEQ ID NO: 7482 - DNA, 201 bp, Bos taurus
gtaaattagaattttgaattcataattttaggaaaattaacatttatacataaacttctcatccaagaacatattgtgtactttcatatatcttgaacttcgatgaattttattagatttttttttttaacatattactgatcccaagttttttctcaggacttgattccttcagtttatcagtgaaaacttctttccaga

SEQ ID NO: 7483 - DNA, 201 bp, Bos taurus
aaaggatatgggttaaaggaatacttctcttgagtatatctttttgaacagttttacccattggaagcatgataatgttgtatgtgttcaaaaaataaaactaagcagctgagggtagagggaataaaactaaagacaaatagaaataaataaaccccactgtatttcaaatgagtgacataacccccctgaagatggcga

SEQ ID NO: 7484 - DNA, 201 bp, Bos taurus
gtcataggatattagcccttttgtgactggcttattgcgcttagcatagtgtccttgtggtagcatgtgtcagaactgtctcccttcttatggctgaagagtatttcattgtatgcatacaccaggttttacttctccattcaactgtcagtggacacttgggctgatacaatctatacacaaacaagtctcaaatgccaa

SEQ ID NO: 7485 - DNA, 201 bp, Bos taurus
agagctttactccatggcaccacaatttaggtgaccccataaatttttaagttctacctctgccacctccctctcctctacctctccaaggtggggcactcgcccaacctggggccaggagagatggatgagtcatcaaggacaagacacctactgcccctccgggtgcataggccaccctcacctgcctccatccctctc

SEQ ID NO: 7486 - DNA, 201 bp, Bos taurus
tttattagaggcccaggtcactcagtccagtgaggaaccatagcggtcttagtatattttaaaaatttattttattattattatttttagagacagagtaatctttgtggtttcaatggccaccctgttcagaggataatagaaacgtaagaaactctggatattaaaaaggaaggaggaggacggtacagaatgagggaa

SEQ ID NO: 7487 - DNA, 201 bp, Bos taurus
acatgtttgaagcttaggagagaggtctgggctgaagacagagatatggactcattcacgtatagtgtgacagccagaagaatagttctgatgaggccacacagagaagtgagacgagacagatacctagggaaatctgatattttaagagttgaagaatgaaaaagagtcctacaaggctatgtgtgggccagaaaaaaa

SEQ ID NO: 7488 - DNA, 201 bp, Bos taurus
ttgttagagttttaggcaaatagaagtgagtgcagccacaaaataaaagattgccaatattgacgggaaattaaggaaaaaggattatagtgttcaaaaatggtgacattattatgaagctaatggataaaacccaactgttgacccctattcacttgaaaaatgatttgatttttttctttaaaatcgtctttattgaag

SEQ ID NO: 7489 - DNA, 201 bp, Bos taurus
tgggatatcaggatacttcactctaagccctttagcctatattttttacataagtgaaatacacaaatcaactctaccatttgatgagctttgacaaatacgtctgtgtaacctaagcacctgtcaagatgtacaacatttctgtcacctgaaaaggttctctcatatcctttccccaccaatctctgcacctgtcccata

SEQ ID NO: 7490 - DNA, 201 bp, Bos taurus
caggattagagtagatccagtgaaatgtgattatctgagaggcttaatcactccaggctgcactgccatttgaaagacgagctggttaactgaaatgagtgtctaattggcagtctggagtgggggatctccctgaagcaggaggccttccaaattccctcacctgctccgggggtctcaggctcctccacccctccagga

SEQ ID NO: 7491 - DNA, 201 bp, Bos taurus
actgttccctcatttaattagacaaaggcaaatcccacatgcaaaaagaattttattcccacaagagaaaaagtgtcaccatagaaaggaagcaaattgcagaggatgttcttaatgctctaaatttaagccttaaggccctatctaaggtgtcttggaactatgtttcctggattgaagcaaacaactctaggggtgtgg

SEQ ID NO: 7492 - DNA, 201 bp, Bos taurus
gtgagcttgcccaggggaatctttgattccttgtctgtcatgtcctctatgatctcagtttattgatcttctgagtacaaagataaagaacatctatttatccaaatgtttgctcagagagcgtttaagggaaagtgtgttgactaaatgaaggaaggtcacttttgtttttgctatttctgtgatatcaaaggatttgac

SEQ ID NO: 7493 - DNA, 201 bp, Bos taurus
caagaaacataaaacttctaccaaatcaagtttcatctcaaatgccaccaaaagcttttccataactcttctaaacttttagtgctttatttttgccactgttatgtcccgtactttatgctaaaactatttatgtattcactctcttcccaaccaaacttagtcgttgaggacaggtactatatcttatcatccgtatca

SEQ ID NO: 7494 - DNA, 201 bp, Bos taurus
atggcccttcacaattgaggctggacaatgaactctctgggtgttgtccaatttgtaacatgatttacatggaagccagcccttcctttcctggggttatccctttttcatctggtgtttaggacgggttatatataatccatagataggaacatttgctgtcaaatacttttgctgatttagagctgggccgcaaaatgg

SEQ ID NO: 7495 - DNA, 201 bp, Bos taurus
actgctgaacacattttccagtgttctagtggaattatttttatatttaagggacacgaaagtgtgtaaaacttaagtaaaatattaggttttcttctatacccattttccataaatcatctttctaattctcagattatattactcttacctaaattcaggccaagttaatttccatctacagaactatccagtgtttta

SEQ ID NO: 7496 - DNA, 201 bp, Bos taurus
ctcccctagatcaggtcccatccccaccaacttgtcccctacacatttctgcaaactttgcccactattcccttcctataccccccagtccattttgcctataaacagtccagcagattcctagctgcccagccttccagtacagtgccttcccattgccccagctcactctgcagaagtccaacctttcttattcctcat

SEQ ID NO: 7497 - DNA, 201 bp, Bos taurus
gaaaaatgctgttatttctgactgccaacttcaaagagccttgacatattgtctcctatatcttactcctatagtaacagaaactgtcaaaaatcagctatcactatgttattactggtgtttcttcctccctagactgtcagcttcttgagagtaaaggccttgatcagcttcatattctcagacattgaatgaatgaat

SEQ ID NO: 7498 - DNA, 201 bp, Bos taurus
tcctgcagaaagataagaggctcacagtcgagttgagcattttctgcatgtggaatggtgagctggggagccacggggccagttggcttgtgacttgcctagattttagagatcatgatggtaactgcaatgaaaaatgcataatactctcctccaagcctggtgtgattgtagatgatgtagccacttgggccaacagct

SEQ ID NO: 7499 - DNA, 201 bp, Bos taurus
tgagctggtgggtcgcccagcgcagcaagaaaaggccagtggtccagaccccttctcttcaagcaacaagatacggcaaagtgggaaacaggcctcatgcgaaagtggaggtaagactctaagacagaaaatcccactttttcaaagccaaattcagggtgtgaagtttgctgaagtgggctccaaaggccccattccatc

SEQ ID NO: 7500 - DNA, 201 bp, Bos taurus
tcaagttgcagaacgatgtgctggttctctcctgacggctgccattgaaggcagtaagcctttcatgatctcctacgggcatgggcctcaaccacagcactcgtaacttcatcgtcctcttatttgcacattttctccccacaagactctataagatctttgaagcgagaaaccatggttggcctgacttgtgttctcagt

SEQ ID NO: 7501 - DNA, 201 bp, Bos taurus
agaattttataaaacatcctttgaggtgcacaaataatttttaaattctgcttaccagtctacacgtcactggttttacaattttgcaagggtaagaggggaaaaaggcagattcaccagcccctatgaagatctgaaggttgcggagaattaaacggacagaaagaatctggctccatgggctcaggagcctgggtgggg

SEQ ID NO: 7502 - DNA, 201 bp, Bos taurus
accatgtcttctgagcatcttagctccccgggatctttttgggcctcagtttcctcatctgtaaaatgaggttgctgccacctccctctcaggaacatacgggttttagagacagaacccaggggcccagctggctacctgacatgtgaaaggcagacagtcaacaaatgtgactcctcttcaaccctgaggttattagcc

SEQ ID NO: 7503 - DNA, 201 bp, Bos taurus
gtcccagggctccctgtgccggttcctgacacctacctcagagctccacagggcacaggacctgagcagtctgttcagttatcttcccgaacaggagccacggcctcgacccagcacaggcctaactccttagaagacaggggacttgctcacaagggtgacgtcactggcaaaccatatacagtgacatagataaaaatg

SEQ ID NO: 7504 - DNA, 201 bp, Bos taurus
agaacctcatacaagtgtacttccaaaatcctccctcccatcttttgggtaattgttgttatacctctagcttttatgtattttatatatcccacatacagtattactatttttgcttagacatatagttattttatagtgtgattaaaaatgagggaacacatgccttttgtatttatttttaccatttttggagtcctg

SEQ ID NO: 7505 - DNA, 201 bp, Bos taurus
caacaaacaattttttttaggacttttggcttcatgaagtcatatgtactgtacaattacgtcactttctatagcaggtcaaatcactacacatattttaaaaaatcaaatattctagtaaaatcaatatgggatcaagagtaccctctacatagtgatctcctgtccacgttctctgttaagtgaaaaggttaagttgca

SEQ ID NO: 7506 - DNA, 201 bp, Bos taurus
gacttgaccttggcctcttattcagaaggcaagaattctagaaagctcagaggaggagagagaatagagccaatcaagtcaagtggtaggttgctatctaaatggaatgactggcctgctaacattttccccttagaaccaagggtgatgaccagtagactcccttgtagctgcctgcgctatagaagagcagccaggagt

SEQ ID NO: 7507 - DNA, 201 bp, Bos taurus
atttttagatgacaggaaattggagactgttgacaacatattttgttatttcagaaataacttttgagtgatgagaaatatttatgacatactcactaatgaaatatatagtcctgaatagtttatttttcctgctttaggatactcaaaaatacttgatttttcagtcaaattgttttaaagatatatataatgacttga

SEQ ID NO: 7508 - DNA, 201 bp, Bos taurus
cttctcaatgtattatctgtttgaattttgtagatgattgattgtgtaaatggaagtagtgatgtatctggcagatcataacttcagggaaaccattcttctgagtttatatgttgcttcagtttgtatatatatacacacacatatatactttttaaattaatgagagcataaaggtaaagattgtaattgatattgtgt

SEQ ID NO: 7509 - DNA, 201 bp, Bos taurus
ttaataaatgagaaaggggacatttcaaaggccactggcagcaaagaaaatttaggctgagagaacttgagttgctcagagctatatttaatagcagacaggtataaaaaagatagcaccatccttactccaaatagcagccagtacccagtggagctaaaatttgtgaaaattacctacatcaacttttaagtagatgag

SEQ ID NO: 7510 - DNA, 201 bp, Bos taurus
aatttcctggcagtctggtggttaggactctgtgtttccactgccatgggcctacatttaatccttgatcagggaagtaagatcccacaaacagcttggcatggccaaggaaaaaaaaaaaaagaggacagagcaatgggtaagagacataattatttaagatatagcggttaggggaaggcttccaaatgagggaatgat

SEQ ID NO: 7511 - DNA, 201 bp, Bos taurus
tgcaacatttcatcctttcaaggggcccaattcacagagaaggaggtgcaagaatgagcccatgaccatgggatccattaatcatatcatctaccacaccgtctagaagcaggcactggaatggcccactgaaagcacaacccaagcaccaacatggagataatactctgtaaagatggcatgccagtttaatatttaagc

SEQ ID NO: 7512 - DNA, 201 bp, Bos taurus
ttgatttacttgctcttaaataataatttcagtctgactccattcagaacctccatacttattctagaaggtttggttagccacctagaggttgactcttcgtttatgtcagtattttttcctaaaaggaaatatattgagagaaacatgtttcacgtcatctctctgcaccactagcaaccccctcctgtccttctctag

SEQ ID NO: 7513 - DNA, 201 bp, Bos taurus
atgaggcagcaatcaaagctaaatctgatcatgtattaatatcacagataggtcaagacaaagggtgtgatagagcaacagcattctctgctgattagaacgtatctggaatatgagggtggttccttggcatcaccattttatgagaaatataaaatggaaatagcctcaaggtagatgaccagaactttgtaagctcta

SEQ ID NO: 7514 - DNA, 201 bp, Bos taurus
atattcaagaactcaagcaaagttggggtgtcaaagtgatggtgaatgtggtggcctcaaggtccttcttgttcccaaacatcattttcactgcctggcatagcagttcccttctcatagcattggccccagttccaacatgatagatgagtcagacaaaatctggtattataatttccagaaatgtgcattaaagatatt

SEQ ID NO: 7515 - DNA, 201 bp, Bos taurus
acacagcaacagtgcacaagtttgtggaagacttctgcacaaatgaccaaggcgttactaaaaaaaaaaaaaaaaatagaagaaatttagaaaaggcttctttccaattgaattttccacttaaatctaagctcaaccaattatcgggaatacaacaattgagcttaagaactcgtaaatagtaatgctgggtatacatca

SEQ ID NO: 7516 - DNA, 201 bp, Bos taurus
tgcaggtgatacatatcctcagagaaagaaccttaaccaatgtcagagttcttctgtaccaaggaaacacatgtgcgcctcaggcagttgtgtcagggccaaagtccttcccagcaatgcaggtcagagctctgctgccatcctcagacattctactcaggatgaaaacactgcatttggaagtctcactgcctgctgtgg

SEQ ID NO: 7517 - DNA, 201 bp, Bos taurus
aactaaattccttgagagaaaaagcagggatttagtcagttttgtattctcagcagagagtacagtgtctagcacacggcaaggcaactgttagagaaatggtggttgaaggaaaaattatccgtatgttcttatgtcattcagttcagttgttcagttgtgtccagctctttgagaccccatggactgcagcacgccaga

SEQ ID NO: 7518 - DNA, 201 bp, Bos taurus
aaagaagtttctgccctcatagaacctggagaaatgctaccacaaaaagaatgaaagtgactacaggacgatgagagatttattttttgtgtgtttttgtacatacttttcatgtgtagtcaactaaagtaaataatatttgtctcacattttccattatataatagctatctttttctattttcatttagaaaatgtgtg

SEQ ID NO: 7519 - DNA, 201 bp, Bos taurus
atataggcaatggagttggatggtgaatttaaatcatgtccccagcttccagcgctaacctgtctagcctgtcagaagaattgccacagcctctctgttttgcatgcactctgcaaagaaggagaaggagagaagataaccgcggggtaagcaagagaaccactttgggaaatatattcctgcagcacccgagaaagagta

SEQ ID NO: 7520 - DNA, 201 bp, Bos taurus
gggatctgggaggccacgtctgaaggagccagcaaggccctggtgctgcctctgccagagtcgtgcagccactgaagcagcctgatcctgatagttattttggggggaaaaacacctggaacccaggtttgagctaaagaaagtaagggcaagtgacagatgatcaagcatttctttgaaatgaggaagaactgagaacta

SEQ ID NO: 7521 - DNA, 201 bp, Bos taurus
aaagaattgatgcatgctatgacatggacggatttcaaaaatgctacgctaagtgaaagaaaacagacataaaaggccaaatactgtacaatcccatttatacgaaatgtccagaatagacaagtccacagaaggaaaaagtggatcagtggttgccagggcctgagggaaggagaaatgtgaaatgactgatgatggctg

SEQ ID NO: 7522 - DNA, 201 bp, Bos taurus
gggacctaaatattgaaatgggactaagatatatcaagtctaaaaattttctatgtatttttggaagattatataaccttttctagatttttttttttttgatatttctttagtctttcacctgagagaatttgtgaaaataattgaggtaaactataagaaagtactcctgactcagaaaaattataatgtaaataaaat

SEQ ID NO: 7523 - DNA, 201 bp, Bos taurus
gtgatgtgttttaagtactattcatttaagttattgaaaatgagaatgaaatgttgagcttctttaagattaacgcactatgcaagcatgtgtactttttatatctcccaggtttagtttttacaacacctcgtcccgattgctgtctcacacagtagtcctgtaacatgctgtcttggcagtgcaatgcggactaagctg

SEQ ID NO: 7524 - DNA, 201 bp, Bos taurus
caagtgtgtggaaagggggcctgaattactttgctggggctgccataggaaagtgccatggactgtggcttaaacaaaagaagtttattttctcacaatcctagaggcctggaacaaaaaaggacactaggtaaaaactaaggaaacctgaataaaatacaggtgtttgtggtttccaggtgtcgtaacctatttaagctg

SEQ ID NO: 7525 - DNA, 201 bp, Bos taurus
acttctgcacagaaatcagattttgctgttggctttcattaccagagaaagcctgcgttttagagaagggagatctgaggcccagagtctggaggggaaaggggtaaggggaagaggagacctgtgcttcaagaagcacactgtaaggttttcactgccttccacttgtgtggagtgatggaaggcctgagaaagggccct

SEQ ID NO: 7526 - DNA, 201 bp, Bos taurus
cctgtagtgagtggccagtgtagtcccctttcatccaattgcagcgtctgtgtttgtaagcactgtcttatccctgacctctggccaagcctttggaatggggtgtgtgatcaagggaaagtaaggatataggcatctgcctgtgttcagtgtcagatacaaatagacatattgtctcatttatcctcaccaacactctgc

SEQ ID NO: 7527 - DNA, 201 bp, Bos taurus
gggaacctaacttacagcaaaaaatacatgagagtggaccggtgacaatggtatcagctggtcatattgcttactgaaacactgtgaagctcctggcctggcagagcatcggcgtgccatgctgaaggcacagctgaagtattagctgaaatgcaacactctgtgagggccatcccccctggaagcattaaacacattgaa

SEQ ID NO: 7528 - DNA, 201 bp, Bos taurus
gagttggtgatggacagggaggcctggcgtgctgcgattcatggggtcgcaaagagtcaaacatgactgagtgactgaactgaactgaactgaactgaaaatacctgacaagctttggccagattcctgggagcagtgtgcattgtgggaggtttccttatgagttacactgattgctgtttaccttgaacaagaattata

SEQ ID NO: 7529 - DNA, 201 bp, Bos taurus
aataatcgttgggtcaaaataactttaatcacagaattagaagtgttttaaactacactacattttctgaaacagttaaaagactcctgggtcgtttgccgtttttacaggctactgtaaatacgcttaatagcatcggcttcttctttatcaaggatgcctttctccacataagcatcagcttgttggttgatgaagtcc

SEQ ID NO: 7530 - DNA, 201 bp, Bos taurus
aaattatccagaaatcccacctttcctgattatcctttcctaaatatttccatgactagtacacttcttttgaaaaaaatcaatgagaaccattttccccaaggccgtaatatatgtcattgacggttgaatttagaaactgaaaacaggaagaaaaaaaaacccacccacacatttcctggaattactgtttctgtttca

SEQ ID NO: 7531 - DNA, 201 bp, Bos taurus
ttgtttttgtctgataaccctagaatctgttcccatgcatgccctctggagttctgctgatataaattggaaagatcctacaattgcagtgtatattgctactttcccatagctaaccttgtacttacaccctgggctaagctgggatcttactactctgagtgttctgaaggcagtaagagtggaggtagtactgaggag

SEQ ID NO: 7532 - DNA, 201 bp, Bos taurus
tcttggcctcctgggaaacactactaataccaatgtctctctgaaaaggtcctttctgtttcacagaacactctaaacctgagtgtccaagcagatactgcaaaagggcccaagccccggggggccaatcagttgtaaaagctgcttgttggccgtccctcccattcctgtttgccactgcctgcttcatgctgagtttgg

SEQ ID NO: 7533 - DNA, 201 bp, Bos taurus
tactgaaaaccatcattaacacgagttggactgggaaaaaatagggagagagttatactcctgcaaaggactgtttaccccccttcaaaaatgtgcattagtcattagctaagtgacagtgggtagatggaaaggtgactttattcagtgatatttttctacctggctggcagctaaagagagaagaactgggagaaagta

SEQ ID NO: 7534 - DNA, 201 bp, Bos taurus
cagaccttataagtcactcgtagttgaaggcctggcgccacagcacgactaggcaaaggcagctgcagaagggatttgcacaccaggtccaagtgtgcaatgcctgaaaggctgtggtgcttgacactcagcaaaggctgcaaatgggctggagtctggattggacccatggagagatgttatgtttggcatcacatctga

SEQ ID NO: 7535 - DNA, 201 bp, Bos taurus
tgggctgtagggaagggagattgtaggcctctttaccctgaagagaactgcagcttgactgggctgctgaactgggcctttgtaaggaaagggtccccctgcctctcctcccccaccttgtaaatgtccagggagaaaaggcccacaggggagtgggtcaccctcacagttgtggccagccaattcctcgcttgcctgtga

SEQ ID NO: 7536 - DNA, 201 bp, Bos taurus
tcatcagttgtaataaatgcatgactctgatgggaattccctggtggttcaatggtttggactccaggtttggactccaggcccaggttccatccctggttgtcatgcaagctctgcaatgtagccaaagtggaaaaaaaagtatgactctggtgagggatgttcataacaggagaggccaatcatgtgtggaagcatggg

SEQ ID NO: 7537 - DNA, 201 bp, Bos taurus
cccccctcctgtgtttctgcttcttcttagtgttcatttgatttcattctggggttttttggtaatataataattcaaaataattttttaagaaatacactggagtaattcttttagtggttttcagttctctgcctagtttaaaggcaaggagagccagttaagaaataacaacaaatatgtgtcctcaagtttgttttc

SEQ ID NO: 7538 - DNA, 201 bp, Bos taurus
cccctggagaagggcatggcaacccactctggtattcttgcctggaaaatcccaaagacagaggagcctgacaggctacagcctatggggctacagcccacgagttctcaaagagacacaactgaatgactgacactcacttttcgcataccctcaccttccctccacaatgcaaatcaccttgaggtcagaaagacgttt

SEQ ID NO: 7539 - DNA, 201 bp, Bos taurus
tgcccccttctggctctggctgcctgtcagcggaggggcatggtctgcagctggctcactctggtctgtgagcgggcctgatggtgtcttcggtttagttcagttcagttgctcagtcgtgtcctactccttgagaccacatgaatctcagcacgccaggcctccctgtccaacaccaactcccggagttcactcaaactc

SEQ ID NO: 7540 - DNA, 201 bp, Bos taurus
gatttagagttacaaaccattatgtacaaaataagctacaaggatatagcttgtatatagttgtatatactgtacaatacagggaatatagccaatattttataataattaccagtggagtataacctttgaaattgtgaatcactgttatataaacctgaaccatttataacattgtaaatcaagcatttctcaataaaa

SEQ ID NO: 7541 - DNA, 201 bp, Bos taurus
atgcaagtaaaatagggctttgtaccattgctcttagaaacaccagtactgcggttgcataggagcctcctgagaaagcttagcgtgggcctcagagtgcatctggctaagaagggattgagtctctatccttttttagtggggcagtcaatcacaagggctccatcatccatcatctttgggccttgaggttctccctgg

SEQ ID NO: 7542 - DNA, 201 bp, Bos taurus
gttaaatcagtccttagttagatttttttgactgtcagaggcatgtaaaacaagtttcaacattttaaaactatccaagtattccttcccttgaatgatagaacttttaaaattaaatattcccatagtatgttcaaatgacagattcctgtgagcaataaatttgcttttcttctgtagagttggaagcaagtttttcct

SEQ ID NO: 7543 - DNA, 201 bp, Bos taurus
tgtgtctcctgcattgcaggtagattctttaccactaagccactgggaaagcacatgtactccctaggaagtctgaaatcaacaaactattaatggtatggtatgtagattcctgttaggtatacctaccaaaccacaaagtgaagattcttatgagtatagccagtaaacagttccttgccccttggagaattctgctgg

SEQ ID NO: 7544 - DNA, 201 bp, Bos taurus
attgttgtgaaagctgaggatggcgacgtgatacaggattctaagatggcaagatgatcagatcttggccactctggccgaggtgtaaaaggtatatgatgtagcgagtaaggagactagaggcagggggacttggaaggctaatataggagtcctggtgagagtgcatgatggtcagagcacagtggccggggagatgtg

SEQ ID NO: 7545 - DNA, 201 bp, Bos taurus
gacaaagaagctagaaatgggagtttatggttgtgcagtgatatcgtgtatataaatgtgctctgtcacactggaaagagagagcttggcaatgtgaattcatagactgttaggacagtggaatagttggtggttaaccctcttaaattttgatttgttgtctggcttagtgagcatgtagtcaatataattactaaggga

SEQ ID NO: 7546 - DNA, 201 bp, Bos taurus
attttaaattcttccaaatacaggtaaatatcttttaagaatgttttccaagtaattttgttcagctcattattgttcttcgcctacgctattcccaccccgcttaccccacctttgctcaatcactgcagatgaatttgctacactctgtggaagtcaacggccaggctttgtcatcgacatctataccggtttacctgt

SEQ ID NO: 7547 - DNA, 201 bp, Bos taurus
gatcttgtcagaaatcattttggggactctgaaatgaagacatttcagaggcatgaaaacaagactagcagtgcaatgagatgctatcttttccctgaccccttatatgatagaaacaacagctgatatacagtattactatggagagaaagaaaagatcttggaaagtttaatcctggatatccttggcctggggttgaa

SEQ ID NO: 7548 - DNA, 201 bp, Bos taurus
cctgaggtacaaactcacctgtaagaaggctggtgtggcctaaacagagtgatgggaggatagacattgtagaagataaggttacagaggcagggactgaaggttgcagttgtagggccttagaagcttttgtaaggacagtggcttttccagtgagtgaaatgggaaaccattggaatattttggtaagaggagtgacat

SEQ ID NO: 7549 - DNA, 201 bp, Bos taurus
caaattcactagcaaggaggaaatgaattgaagaaggcccagactgttaatgtctgaaggacagcacagaagtggaacacatggaacaggtgttcacaagatcagcaacaccagaatggcccttgctgtgtgaatgtacccattgtagatttgctgattatattcagattctgcttccaatttggttatgtgcatagttct

SEQ ID NO: 7550 - DNA, 201 bp, Bos taurus
tctctctctctccttctccctttgctgccatacgaggacacagcaagaagctagctgtttgcaagccaggaagcaagatcataacaggaaccaaattggccagaaccttggtctgttgtttaaacccccagtttatcatatgttgttatagcaacccaagcaggtaggcacacttcctttccatatatttgtatcttcttt

SEQ ID NO: 7551 - DNA, 201 bp, Bos taurus
cctctgagggtgggtctccggagaagagggcagctatgagtcattaacacagcaagtgggatcagggcatcagctggttaaagggggctggcccagcccccatagcatctaccacaagagcagagggtgagtgcatgaaagagaagaaagttacaaagtgggcagagagaaaaaaagcaggtctgttgtcattatccggga

SEQ ID NO: 7552 - DNA, 201 bp, Bos taurus
accctctgccaacaaacccagttctcactctctcttagctctacattttgaagagtttccatgtgttttaaaaatctgcttaaggccgtgatatttctgtgagcgattctcgtttcctgctgtccttgcccctcaccatgaccactcattattctagcctggtccccaagctgcataaacatttgggaagggataaaggag

SEQ ID NO: 7553 - DNA, 201 bp, Bos taurus
cttaaccactgtatagtactaactgttctaagtatactaatattcaaatattctcccaaataatgacatccattttaaagaggatactcttaatggcccaaatacattgtattcataaacatcttctttgtttataacacattctgcaagaccatgatggtaaaggccagtgttactcatcttagtatctccctcaaactg

SEQ ID NO: 7554 - DNA, 201 bp, Bos taurus
gatggactatacttattttctcatctaacttgcattcatacctgttcttgttctcttccaggctaaatatctgcagtcttcggactctttgctcatgactgtgtaaggaagctggagagaatgatggttatgaatatgggctcctggggagaagcccatgatggtggagtagaaggatgtgtgctcttcttctttgagtac

SEQ ID NO: 7555 - DNA, 201 bp, Bos taurus
taagtaccagactctgagaatgggccactgttcacctgtgccttctactgatgtgtcaccaccccattacagaacgccgagcatgagggggtggaaacctttcagggagacttggacctccatggccgtttccagagtctgattgtggtggttgattcttcagttcagttcagttcagtcgctcagtcgtgtctgactctt

SEQ ID NO: 7556 - DNA, 201 bp, Bos taurus
agccttgacttatataaacagataaattttaaatggtattagaagaaccctaattcaagttcatcacaggagtggtgattcacagccccttactcagttttcagacccacagttacttgattaaggaagaaacttgtccctttgtgatgcaggcacaaatgtatggtataactcttctcccaagcttgcatgatctgcggt

SEQ ID NO: 7557 - DNA, 201 bp, Bos taurus
gaccttgggaatgtgctacccagaatactgctaaggagagtataggagaccagtgtccctccctgaatccaacatgggccagattcatccatcctgtccctggttcatgactgagcacttgaagataaccagtggtgttcattcctacagcagggggccctcctctaatggtcagcattgacttaatacctcctatcagcc

SEQ ID NO: 7558 - DNA, 201 bp, Bos taurus
gagaaatgcaaagagatccatagacagacacatcagaattaaaatgttgaaaggcaaagggaatattttaagaggagtaagagaaaaaggactggccacatacaagaaaaccacaataagataacacattattaaccaggggatttttgcaggaattcatgcctgtggccagtgatttgtatgtaagtgaatactgaaaca

SEQ ID NO: 7559 - DNA, 201 bp, Bos taurus
attcacccaaagatctggatttccttctgccagtcctggactacccgttgaatcaacaaagtgatacatatttaagctaaaactttacttgatggccaatatattggtcaaatttctcagggtcttttacctccctgctttgcttaccacaaaggttaaatctcctaagggccctggaggtagagatctagagcatattta

SEQ ID NO: 7560 - DNA, 201 bp, Bos taurus
gctttgtcttgtccggttttaactcacccctaagctagcagacaagccttgcacggaacatgcaggcggctgcagaatcacgggaataataattaaatcataatctgtgtgccagacgctgtacaagaatcttttcgacattttcgcaagttttttaggctcagagatgctctagtcatataggcagtaagtggtggagat

SEQ ID NO: 7561 - DNA, 201 bp, Bos taurus
tacagaaatccactgcttcttgccttcgatccactcctccactccagagagacgcttgtttttgtactgagacagttgctgataggccacaaactcgttcgtgaagaatttcatccccaccatctcagccaccattggacagtctgcccactcgacacccatcatgaaaaccatgggccttaagacataggagcagatgac

SEQ ID NO: 7562 - DNA, 201 bp, Bos taurus
atagaagaattccttattcttagggaatggctgctaaagtatttagagctgaagcatcatgacaactgaaacttgcatcaaatcgttaagggggggaaaaagctgaagggatagaacaaatgtggcaaaatgttaaaaagtggtgaatctaggtgaagggtatacagatttcccctgtactttcttacttgtacttacttg

SEQ ID NO: 7563 - DNA, 201 bp, Bos taurus
acttggaccatttccctgagtagtaagagataatgcttggccagtgaagctgagattataattagatctcaagaaataatggtctcaaattattttaagtgcctgtaatttttagtaatatgcaggcccaggcacagacatcaaaagagaaactcaactaggtgagtgtgtgtgtgtgtgtgtgtgtgtgtgtgtgtgctg

SEQ ID NO: 7564 - DNA, 201 bp, Bos taurus
tcaatggacatgagtttgagcaagctctgggagatggtgatggacaaggaagcctggcatgctgcagtccatggggttgcaaagagtcagacacaactgagtgactgaacaacaaaagtcatatatgaccaaatcctgtgcgggttggggagagaaaaataatctgtagaaaagaaagatttatcttgttcaagggacact

SEQ ID NO: 7565 - DNA, 201 bp, Bos taurus
atgactaaacacaacacaatagattcatctgttacataatacccccattaattgagttctgctcatacgccacgcttctgaagtgacttacagcgttatacattcacgtgggtcttacactatcccattttatgcatgcagagggtgttgttcagagacattaaacaatctgttcagcatcacacaactggcaataggcag

SEQ ID NO: 7566 - DNA, 201 bp, Bos taurus
ccagcagatgtcatcctgccccaagctgtctattgtgagggcaaagttccaagagaatgtatccaagaataggggccccctccttcttctgcccagtcttcacttatgagatggagattttaccttggggatgacaccactgagaatatgggggccctgaatatccttgctgttgtttgtgggggcaaggatcccatgtca

SEQ ID NO: 7567 - DNA, 201 bp, Bos taurus
gcaatgcaagttaaagtggtgggtggtccctgcctttgtacataactgtaccactttgttaccataatagcaaataacccataaagactatttctagtcgaaacttcaacagtctttgaaccagatacccatttgatgcagaggtcaatccactgtgatgctagtctgactttctagtgcagaaaacacctcacaattaac

SEQ ID NO: 7568 - DNA, 201 bp, Bos taurus
attttgaacagtaaatcaccagcgaaaaacaccgaagttagaaacacgtggcactgaacaaccttgaaaaggaccctggtttacagtatgagagctgacacgggaaggcggggcctgttcgaccccagccggagcacgtgtgccagggacttattttttgccactcagcgcatgtccgtgaatgatgacgatgaaaatgtc

SEQ ID NO: 7569 - DNA, 201 bp, Bos taurus
cctaatgcctggctttatctttagagaatagctgtcatcttgcagtgtacatggttgaggcagagtggggggccagtcaagaagcccatcacctgtggtgccatcgcttcctcctgcgttacatacaggtccacatgctccccaaatctgggacactgtcagcttgattcatgaaaacttctctggcatcctggacaagac

SEQ ID NO: 7570 - DNA, 201 bp, Bos taurus
tacaagagaaactcatcttttgtgtatttacaatcattgctatttaggggtttggattgtatgaagttaaacctaaacacaatgaataatagcagacaacttttggccatagtcctcttcactccaactcgagctcccatctccctccaaacattgtcgttctcctgcaacttccactcttctcaaggttagctctgtttg

SEQ ID NO: 7571 - DNA, 201 bp, Bos taurus
caaggaggcacatcctcttaacaacttgtccaagcctgacagtgagtgccttacctagtgaggccctaatggtcatacccatttatctcttagacacagtccctggaagcagagatggcaaccgggtaccctgaggttcacaagacctcctccctcccagctgctgctattatttaattataaagtaaggaatacagaaca

SEQ ID NO: 7572 - DNA, 201 bp, Bos taurus
ctgggcctacaaagctcaaagtgctgctactcacttcccagtttcccttgcaccttggatatggcatgtgatcaagactcacccatcacgtgcactctccggtggccactgcagcaagatcaaatttcaggagttccagggtcagtactgctagtgatagactcgtgtccagtggtgccagggctgttgggggtcacaaac

SEQ ID NO: 7573 - DNA, 201 bp, Bos taurus
gcagagaaagtgctctctaaattgctcattaaaaaaattatttatttacttctttttggctgtgctgggtcttcgttactgtgcagcttttctctagttgcagtgagtcagggctactcttcattgtagcgtgcaacttctcactgtggtggcttctcttggcccactctaggcctgccagcttcaatagttgtggctccc

SEQ ID NO: 7574 - DNA, 201 bp, Bos taurus
acacacacacacacacgggagggctgggagagggtttgatggcattaagccatcatattgggagtttgggattagaagctatggactgatgtgtatggaatggataaacaacaaggtcctactgcatagtgcaggaagctatgttcagtatcttctgatagcccatatggaatctaagaatatgaaagagaatgtgtatat

SEQ ID NO: 7575 - DNA, 201 bp, Bos taurus
gagggtctttgttattaatcacacaggtgagtgtgagtgtcaggcgcccaaggaagttacatggaactctacagctttaagagccccgaggaaactgcatttgtttcaaatgtctagtaataaactgtccagtactaggactcgctgtcctagtaaacagagtgccccatctagggacaagaattggaggtgactctctcc

SEQ ID NO: 7576 - DNA, 201 bp, Bos taurus
taggacttgtggtcttgaatgatggccatggcccaagtctgaaacaagaagctaagcagtgcttcctgaagatttgggccagaccctcagtgccaggtttctcaagaagcagcagaatggggcttgccatcccccagtgccctctcagtggcccctcccaaggctatctgggatgaggactaggaggcaagaggaggagtg

SEQ ID NO: 7577 - DNA, 201 bp, Bos taurus
acttgtgtcttgctgtctctgagactgtcatgccctaagacccagcctccttttttgtccaccctgcttctttgtagcaagtagcccaagccaggctgcatattccccgaagcggaactaccgccttcatctgagactttacttgggctccagtcaaggagaggagtaagagggccaggatcagtctcatgctcaagctgg

SEQ ID NO: 7578 - DNA, 201 bp, Bos taurus
agatccacgaaggaagagggttttttggctttaatatggagggtgaagatggaagcaaagagaacttatgaggctactgtaataggttagaccggagctgcagtggcttagactcaagtgatggttaattttacgtgttaagttgactgagctactgggcctagatatgtggtcaaacattattcttgatgtttatttgag

SEQ ID NO: 7579 - DNA, 201 bp, Bos taurus
agaagggaggaggcagatgccaaggcctggctctgccaaaaagaaacaaacacaagacaacagctccctactctgccggaacaactttccaactgtcctctctggcaggccttcttctgtacagatcccagatttcatttctactgctccaatctatctgtccacacaatcctcattgattttctcttcaggaaatttatt

SEQ ID NO: 7580 - DNA, 201 bp, Bos taurus
gactggtcctcttcctgagaagcacggcctatagctggatcattcctctggtcctgacccctatcaattccaacttatttttactaccccaaccattgcaaggcaccactgggggcctgggattacttgcagctgacccacatggacttgcaaagaaattagaacagggatagaacttggaaaatgtgctcctgtgcagtc

SEQ ID NO: 7581 - DNA, 201 bp, Bos taurus
ttcaaccctgaggagtggattaaacttacgagaaatatctacaactggactgaaagctatggaaggtatggagggcagttgtttgccatcagtgtgtagcggttttgtgtgcctaaaaaactcactgaattttgaaatgccttttaattttttagatttttttttgttttttattagtagttaatattgctatttgctgcc

SEQ ID NO: 7582 - DNA, 201 bp, Bos taurus
gactcgggggagtcctttacatgtgcatccttggtcttcacaactatctcaaaattcattttaggtgattttgtcagtcagtcgtcaaaacgtaccatagtgccctagcacgagtggccactccactcaccagctggcaaggccgtaagttggaaccggaagccgctgccagccggctgcccaagctctcggggctcgggt

SEQ ID NO: 7583 - DNA, 201 bp, Bos taurus
cagcccgaggctcaggcaattaggggaggtggcacctctccatcagtatcactctctccctcaaagtggggcaaggggcggccgcaggctaacaggcgcactcagaccaggaggtctcttcccttcaccaaaggattagttgggggggcggcgaggggggccgagctccttcagggaattcggaaggcttctcgcattggc

SEQ ID NO: 7584 - DNA, 201 bp, Bos taurus
taggagaagttcagtgctcttgctgggaaggtgaacagacagtcctatctaatacaaaccaccagggcatccccattggtagatagaatcctgtccaggtgtgttgtctctaacagagagatgcaaagagataaccctctggataatcacgatggtgtgatcactcacatagagcaaaacatcctggaatgtgacatcaag

SEQ ID NO: 7585 - DNA, 201 bp, Bos taurus
aaattgtcctgactaatgtagaagactccggccacttcctttatttcttttactatgagttttatttccttcttttcctcacttacaatagccttcccccatggcctacccccacacaactattccaaggcacttacgaatctaaagcagttgattttggatcactagagtctaaaatttgtttctatctagcgtagaaca

SEQ ID NO: 7586 - DNA, 201 bp, Bos taurus
taccattatgttgattgcaaagagatgaggtagcaaaaacgttaagccatgagaaatttgaaggagacaattgtaaattgtgaaacattattcattacccgttttgtttttctggaaatggagaagtaggactattcaactgtagcaacaaaacaaatctcactctgttcctgaaatccccatgctctggtcctcttgagc

SEQ ID NO: 7587 - DNA, 201 bp, Bos taurus
gcatttctagcaagggccccagtaatgcgatgttgcaggtctctggaccacactttcagagaatagacttcattttgtgtagcaaagcataatgtgtggttcaaatcctggtaccaacaattgtcaccacaagtactagtgacttaacctaactaagcttccgttttttcttctggaaaatggcactgtttgagtattaac

SEQ ID NO: 7588 - DNA, 201 bp, Bos taurus
atcaaagaattgatgcaaagttaaaaaactcacaagggaaacacatatatagaatattatacaaacaaggaatgagaaaatgcaccccaggttcatgttgcagttgcttcaaatagaggggaaggagggtgggactgagaagtgtacaggggagactccacttttatttgtaaggtcccattcatttaatttttaaaagga

SEQ ID NO: 7589 - DNA, 201 bp, Bos taurus
actggttactctatctgggccctgagttgctcacttcctagagaattgcctttaagaacaagagtattgactattttcaaatagctgtgccagtccatggtgaaggcccactctctgggagctagattctgccctgactgtcatggtgatcgtaaataaattaccctctgtcatgtgacccctgctcccctaattttccta

SEQ ID NO: 7590 - DNA, 201 bp, Bos taurus
tttatagttaaaaattttttaaaatttccacttgatatttaaaattttataagtgatgtattatgtcaccatattaagccaattcaattaactacactcagtaggaatcacttcagaaatgccttgaaaaagataatgacagacactatatatttaaaaactactagtccttacaaagttcatctctggactagaatataa

SEQ ID NO: 7591 - DNA, 201 bp, Bos taurus
ctccttgatttgtcctccccaaaacccctagttcagatgatactcagcttattggcccatactacctcatataaccccaaatcaaattgttttgaagtgttttaaagtgatattgcattcttgaccaaatcctttcctccgaggaagttcagaagatgccagtaaaagttaccacaattttaaaacggcagcttctctatg

SEQ ID NO: 7592 - DNA, 201 bp, Bos taurus
agcagaacagtctgacacagcatgcagaacaaaacaagtattagcactgggatctggatcaaatttaagttgctttttcaaggtttcctccttgttagatagtagccttctgaattctggccagctacttgcaacactgggcactgaggctaacccatgctcaggcttaaaaagttccactcttcttgttcactacctgtg

SEQ ID NO: 7593 - DNA, 201 bp, Bos taurus
cagacctggttgagccccagaatagaccccaaagcaccgagtgatttgatgacattcccccgcgctttgctctcattaacatcctgcctgggctggtgagcggccctaccccatccacatgtgtcctgggggctggaactccacagggagagccccaggctgaattgctgccgctcctcctggggacctggaggcagtccc

SEQ ID NO: 7594 - DNA, 201 bp, Bos taurus
tgttgatctactgaagtaggttttgcatgcttttaacagatgcttcaagaaaatgatccagaacttccacagcaaaccttactgattgcttcacaatcagcaaattacacagcctgaaacatgaagggagcagagatgggtgtgtagggatctaagagacccagaaggaattagccacagtttaatttcctgcagaagcca

SEQ ID NO: 7595 - DNA, 201 bp, Bos taurus
tgcatgtacaggtcaaaagtgaaacacaaacgggatgacaatttcctcacatcacagcctcgacacaagtgagtgtgatgagacccagaacttgaagcaggctattcccagagttctaagttatccagttctacccaggcttgttttcctcattgagcacaatatcatgcaggcttcatctaagtgaagttattcattaat

SEQ ID NO: 7596 - DNA, 201 bp, Bos taurus
gatagaattacaaacagggcaatgggaattttatagaaaaaaactaagaatcttatctcatgctggacatgttcatgaaagtgtcatttattcatttaatgcatattaaaatcagccacatggcagatcctgtgccaaacacagaggacacaatagtgagcaagacagaaatagtctctacctgtaatggtgccttcccat

SEQ ID NO: 7597 - DNA, 201 bp, Bos taurus
aagttgtaaagccaagaactttagagcttaaattcttaaactttagagggtaaatgcttattgcactgggcagtgttagacatcatgctatttagggacctgctaaaaagactcattcttcctcagtgagaaattttggagtgtttcatgcccttggataaaaatgtgagatccctaatggtttagcccacatttgcaata

SEQ ID NO: 7598 - DNA, 201 bp, Bos taurus
tagccttattttaaggtcagttagagtcaaatgccctgaagggaacatgttttaattcatttttgctccttttttgctatgccctaagcagaaagctacagacctgaatagacctcaatcactctgggttttcataatggcattttgccccaccacattcttcttcatccttgtctgtagtgatgtttactccccaccaca

SEQ ID NO: 7599 - DNA, 201 bp, Bos taurus
atgacaggaaaaagagaatccagatcatgatttcaaaccctctatcccttgctagatgccgctgtttaggtgaatatgattcatagtcagagctatgtaccgggcctcactttctccccacactgtcaaggtcaccccagttttcccagagtaggtaaggccactgtgagaatgacctgtccagaggtccaagaacctaac

SEQ ID NO: 7600 - DNA, 201 bp, Bos taurus
ttggggcctctccttatcttttattcttcacctttgtcagtttttaagctcaatggaaattctgcagttgaatcaatgttagagagcagaggtaggagagtgcaatgggcaggccaaggctgctgagctcttactaaaagtcaatattttaggctcttgcaggccatacaatctctgtcacaactactcgactctgctgat

SEQ ID NO: 7601 - DNA, 201 bp, Bos taurus
tattcaaagagtgtatattattcttagccaattccaactacccacttcaatatgttcatttttaaaggtgtctatgggttttagcacttgctttggaataccattcatattgtaaaataggatgtgatcatctataaataaaacaacccacttaaaagtagaaatgaataagatggtcaattaaagtaaaattgttttaaa

SEQ ID NO: 7602 - DNA, 201 bp, Bos taurus
tgaacctgtgtcccctgcattgacaggcgaattcttaaccactggaccaccagggaagcccacttgtactctttcttcatcagactttcactgagcttctccacatctcaaatgccatcttttctgaggaactttccctggtctcccaaccaaatggaatgtgttaatattttgagcctcagaagacactggactttgttg

SEQ ID NO: 7603 - DNA, 201 bp, Bos taurus
agtctctcgtttcggcctgacaatattattaatataagggaagcaggcaatgcaagcccttgggaaggcttgctttctaacatttgcttgtcaccgtggtgtaaatgctcacaccatggccagttccaaactaccaatgacttaacaatctgaatttctagatatttaacttgggagtcactttgggagtcaggacataga

SEQ ID NO: 7604 - DNA, 201 bp, Bos taurus
ataatatcagggcccagttgcttgtgtcttataactttgtattccttggcatgttaacttactttagggtcccaactcactgtttgagctccggccattgtatcaacatttctaagaaaaaagaaaagaagagcatgctccctctctttaaattgcgtacagcccttttacttatgtcatattggccagaacttagtcaca

SEQ ID NO: 7605 - DNA, 201 bp, Bos taurus
tgttgctgatagagagcaggtttggccagcagtggccgggcaatttcagaatatttgctgaacacggtccacaaaccccaagagtcccgaggggagctcaaaaaactgaaagaaggggccccactctgtgtcttctgaggaaaggtcatcatatgatttacaaaggaggcttttaccaatgtttctagttactgtttttct

SEQ ID NO: 7606 - DNA, 201 bp, Bos taurus
caaaattgcacttttgggactttttgatgccaaatgatgggttgtgaatagtttaatgtgttcatgtagcatcatgagactccatctatattgtcagtctcatttctctctatccctggaggtttaaaaatcagaatcgactgcagtttctttttcatgtgttcaactacatactattttattgaactagagtttttttcc

SEQ ID NO: 7607 - DNA, 201 bp, Bos taurus
gcagctgaatttcaatttataatacattccgtgagaagcatgtccttgggcaactctgtccccagtggaattgtctgatgaagtgggctctggtaaccacgcaggaggctgcatatgctttgattactgctcatgaggtttatatttctttaaggagcttaatgagatttttctggggggcaaaaataataattttccatt

SEQ ID NO: 7608 - DNA, 201 bp, Bos taurus
atggaaagcatttatttgggacttttttgtggattgtcaggtggttgaaaattttaaaacatctttggcctctaagtcctgtaagatatatgctatctttctggttatacatttatttcaaattttattgatgctgtggctatgaatgataatacaattctaagattaatatcaactgacttacctattatgtagtcacca

SEQ ID NO: 7609 - DNA, 201 bp, Bos taurus
tttacaggtataaaagagttgatgctagggtgaagtattttatagcaacaggcaaagtggggggttgctggacctctggccctagagacctagcacatttaacttgagtaagtggaagcttcttttcactgcctttttgcctcctttttagccctgggcctgccgtcttcaccacactctctctattgagcttctccaagt

SEQ ID NO: 7610 - DNA, 201 bp, Bos taurus
tcacacaagagctgagtcaaggtttgttgaatcgatatttggaaaagaagtgatgactggatgctagtcaactggcttgggccactggaaggcctgcccctgcctgtagtttctgtcagctgcagcctctcagggttgttactggcctgcaccaggcaatggtgtttgcatttgccgtatctgagctcaggataacaagac

SEQ ID NO: 7611 - DNA, 201 bp, Bos taurus
gactgttgtcagcctacagacctcagtttcataacattccttgataaaatcttaatgtggtcctggaaaggccatctcttgccttatacattcatacagtcaccatgttttcatttggttctataagcagtgtgattccattttttattgatcaataaggaggaccccagccatttcaccttttaaaagtggaacctcaga

SEQ ID NO: 7612 - DNA, 201 bp, Bos taurus
agaaaagggcccgatgcttggccctcttcagagaaccttgcctccttcaaaatgggttgcccattctcagaaaggagcccacggtggccatccttaccaccaagaacagactgttttccttggaccatctcttgggtatagccttttcaaatcagacttgtcaccagcaagcctgaccacatccatttctcaggccaaggg

SEQ ID NO: 7613 - DNA, 201 bp, Bos taurus
cacggtgtgtgttgagttgagtgactgacttcaatataccattctctttaatggatcaaatatgcaaaaaaacagagataatgtgactaatgcaactgatgaggcaattaccaatacattttctacaaaataaatctttgttgtagggactattgtgtgcatcgtaggatatttagcagtggctctggcctctgccttccc

SEQ ID NO: 7614 - DNA, 201 bp, Bos taurus
gtacctctctgactttatgcttaagttatgaatactctactacatataataatctcacaggcatcctcctttcgaatcaagatcacactattttagatgtcgtgtctataaaggaacttttttttttaaacaaacatacccaaacttccaaatgtaggagaacatgtcaatcttcttggagagccttatgctcattccaag

SEQ ID NO: 7615 - DNA, 201 bp, Bos taurus
taaaatcttatattgtctttgaccctagaataagaacaattctaaatcctactttgagcccagaacctccctctgctccccaaagtttgggccatgctgggaattccctctttatcctttttactactaggtcttaaatttgtatcattagtaacattgtttagctatttataagttaattgggatttttttgaatggttg

SEQ ID NO: 7616 - DNA, 201 bp, Bos taurus
cactcatcaacagtcaaactatcatttgagataaagcaaagaagtctatgaatgtgttaactgcttgatcattatcacacatatatgaaagcatgcacacacatatcccactaaatcgaaaccgaagtcttcaggaaatgaacacccagagccaagggaacatattcctctgacgaaagcctcagccagtgatcagtagga

SEQ ID NO: 7617 - DNA, 201 bp, Bos taurus
tttaactactagacggctggggaagtcccagaacagtggtgaaactgtttttgagttatgtaaacataaatctgatcctgcagctcttgccttccttctcttcactgattttgagtggtgtgtggctcaaaactgccctcagaaactttgacttagtagaagttaagtcttgaggaggcccaggcatcagcgttttataac

SEQ ID NO: 7618 - DNA, 201 bp, Bos taurus
ccttacacagggccataatctatctcctgctcagtttctgttgtgacatggaggagcctgagcaacccttctagtatgcaatgctttgattcacaatcttcttgaataatacacagcatattcagcgttgtgagtcactatgttcacacttcatatttctattatcaaaactggagacatatattaggcccaaagttgacc

SEQ ID NO: 7619 - DNA, 201 bp, Bos taurus
cttataatgtgtacactaattctagcttaagagattaactttttatcttcttaagacaaaatttaagttatgagcttggtcaactataatgatcagtttttctgccgtgaaaatgttgcatttctaccaaaacaggttaaattacggttgattgggagtcagccagcaacctgctgtatccaacatagtaacagcatggaa

SEQ ID NO: 7620 - DNA, 201 bp, Bos taurus
aagtactacctagcaccttacatcaaactatgacacagcatccctgggaagcccccagaaatttctgtttgctttctattgaagccatcacctaagtgactggatatgtgggtctctagagaccaggctgatgggattaattttctcttcctctttcctcacagtgcagcatgtacattggtgactactttttgtagaagg

SEQ ID NO: 7621 - DNA, 201 bp, Bos taurus
cttactaactcgttgagccagggaatgaacccagaaagtctgcctacaaatccaggttcctaactactctgtggtccacacgggcaatctgctgagtgcatgaaccacaaccttttctttccttgccttaatctcagtttggcactggagcaaatcccccacttggagcttctgaccccagaaacttctcctgcaacaaga

SEQ ID NO: 7622 - DNA, 201 bp, Bos taurus
tgggcctgcaatacccgagaaggtgtgggtccttcctccagggtccggatcgcgactctttgaggtgacaactccacacagccaccttttcggtccggcgccctgggaactctcagactcgtaggcctcaagcctcccctattgtttgactgtctgactcacacagctagaggagagaaacctcgaagaaacgaaccccgg

SEQ ID NO: 7623 - DNA, 201 bp, Bos taurus
ttattcaaaactttttgagtatagttttattgattatattctgctgtaaaaatgaatgttatttaatgtatatgaattttttagaatacatctaaaattagtatattgagttgtttgaaatgcctgtggtactaaatttctatgtctgtagtcatcttaatgagatcttttaattggagagtattttatgccattgaatgt

SEQ ID NO: 7624 - DNA, 201 bp, Bos taurus
tgagaagtaatgctaactttgggttttgtttacataatataaaggagccctgttaataaaacagaataataattgtaagttttgtccctttaatgtgcttaataatttcaattggatcttttctaatctgttttggagagcaatttaaaatgtaactcattttgcattttgcttttgttttataatagcatgagtccacag

SEQ ID NO: 7625 - DNA, 201 bp, Bos taurus
tattgaaagtcaatcagtaatgattataccatgataatatttacatttcacagggaagcaaaatacttgcagactcgccgtgtctctgtctagagatctgtggtttatttgcattcagataaattatttgttttcattcatccccagaatagttaaccagactaaataagttgcattcatgcattttaatgtcaatgtaca

SEQ ID NO: 7626 - DNA, 201 bp, Bos taurus
ggccctcactcagcttggaagacagggaaataaaccagtggtaaccgtggagcagaacacctgccaagaaagggtgaaataccacgtgattgaaggcccccgagcacgcattgcccgcctccatcgtatgactcctggtcctgtatgctcttcgcctcactcttttctgttgcagggcctctgtccttgctcaccagcctt

SEQ ID NO: 7627 - DNA, 201 bp, Bos taurus
acatctagcaggaaagaggttaattgaaagggtttgggttgttatttacatgccatgtaaatacctaactggtcctggcctttgcatttggccatatctcaacagggattataggatgaacctggcacttgtgggactcccaggagaagtcttgggatttgggaatatatgcttttgaagtttgccatccacttcaatctg

SEQ ID NO: 7628 - DNA, 201 bp, Bos taurus
gggtacttcctcttaaaaaaacccccaaagacttgaaccgatttttagcattgcaagtcttttatagcccaaagataagagaattctgttctatttatgccaagtcccagaacatctgagttgccttatttttgtttaacaaaatctttcattttaaagtcaacttttgttcagcatgtctatttctcttgctcaagtaaa

SEQ ID NO: 7629 - DNA, 201 bp, Bos taurus
gcacaaggtcctacattcttggaattggcctaaggaagatttttttacagtatttataaaaatgctagtcaaagtgctctattgtcatatctcattttaaaatcaggccagagattggtgaacaccattgttccaactttgcttctgggtgacaaagaggcctggggctctcactcaggcaagaccagggttccaggagct

SEQ ID NO: 7630 - DNA, 201 bp, Bos taurus
ctaaatataaaattaaaaggagaggtaaaggaattgagctctagaaaatgaagaaagaatgcattgattttttttttttggcctgggatagttttatttgttgacttaggaggagtgcctaggtccctgtcagccttactatgccaagtagggttgtggacccacagcatggacttcactgggagcttaggaggcctgtgg

SEQ ID NO: 7631 - DNA, 201 bp, Bos taurus
gtgggtccccttgtttcacaacacaaggatgtctcacatcccctcatgtgagaaaggtgatgggatgcccatgtaggacaagaccagcctttggtcttgagtggctactccttacatgcctttccttcctttcctgttcttcccccgacaagctgaatgcagatttgatttggatgtcctaagttttgctgcttagtgata

SEQ ID NO: 7632 - DNA, 201 bp, Bos taurus
caatttgtcctttcccctctgtggtcacatattccacattaagggaccatttaattgcatcttgcaaactgtggaaaaatgagcaaatatcaccctccttcataattcttccacacagctatcctccagaatctcacttcactctctgcagacttccctccttcaactcttacttttcaagtccattcccttcaactcccc

SEQ ID NO: 7633 - DNA, 201 bp, Bos taurus
ctggctacccaccccagccacaggccttgtgaatgctaagacaccccctgccctctccctgtcacccctcaccctgtccctctcacagactaactgcacatattcaatattttcatagggcccgaaacgtcataaaagactataccctgctgcccatttctaaatccttctgataccatcacttgtctagatacttgagaa

SEQ ID NO: 7634 - DNA, 201 bp, Bos taurus
aatatatgtataattaatatatatatataagtacatataattatataatagtacatataatagtggataattaagtaaagtttagcaatagatacttaaaaattttttataatgaatgtgcaatcaagtttggtgattgttggatctggtgagtaataagtacttcacggacagaatgctctttaatcaaactctccaggc

SEQ ID NO: 7635 - DNA, 201 bp, Bos taurus
ccacttagtctagttttccaaagaatcctgctgaattggtttagtgaaagtcctccacctttggtatctgatcaccttgtatcagatcaaattcctcatcctgcattcttgatattttagggccagtcttcagcaggaatctcccttatccctaatgtgttctatccactgacctctatcttgctccttgaatgtaaatcc

SEQ ID NO: 7636 - DNA, 201 bp, Bos taurus
ctagagggacatcaggagttgtctctttcgtctctgggtcacctctacacttggtccctctgctgttacccccgtggccgctgcgttagagcagaccctcgtctcacagatgcctgtgtttgttagatgtctgagtaggctccctgcctgcactgtcacccttgctggtgcagcttgcccatggccacctcgtatctatcc

SEQ ID NO: 7637 - DNA, 201 bp, Bos taurus
ccactttgcagacattggctcttgagttgaaaaaactttacttagctatgagtgacaagaagaatgacctttcaaaagccatgacttggcctggcaagaacgccagccagttccttgactgttttgataacctccaagtctacctggagcacacccaggctacagctgcctctagaagcaaggctctgaaagctggcctcg

SEQ ID NO: 7638 - DNA, 201 bp, Bos taurus
tccgtgtgcatcctaacccttgaaccacggttactgatctgtcttcattctcgtcctattttccctagtgtctacagaagtatgacaacacagagatctgtttttttttttcactttaaatatataattcatttgtcaattatttccctttttaatttgtaaatttataatatcatttttaaagattactttccatgtaca

SEQ ID NO: 7639 - DNA, 201 bp, Bos taurus
ctgtgtaggcaggccacaagagcccacagcaggatggagcccaggtttggggtcagtgggtcctgggtcaggttttcagcctaaccacttacagtcgtttacccttgaacactttcctggcctctttggttgtcctctgtaaaatgggaagaacatgttaagaatctatgccacaggtttgttgaatgcatgaaaacaaag

SEQ ID NO: 7640 - DNA, 201 bp, Bos taurus
ttaggccctgccacagctcctccacgtatgcctgcctctgctcaatgtcctccttcagctcagggtgtgacgccatcaactgctgtgactcccgctccagcgtgcccagacgggcctggatggcagccacgtcacgctccagccccgacaacttgcgctggatggcaatgacccccgccaggtcccgacccaggtcctttg

SEQ ID NO: 7641 - DNA, 201 bp, Bos taurus
aattttaaaatgctgtcccttaattgcactagtcacattttaagtgttcagtagtcgtatgtggctagtggctaccaaggaattatagaacatggccatcattgtgcaaattctactgggcatgctgtgactggcacagtagagactgctgtgaggggcacaatagaggctgggtagggtaatgtaggtaaaacaggccag

SEQ ID NO: 7642 - DNA, 201 bp, Bos taurus
ccaccccatccaccacctgtgcggtcttctcagagctgtgtaactctaaccatcctctttccagaatcactgcagtggcccccaggccaagcctccccactcatctctctgcagggagaaacagcagtgtgagatttggatcagtcccccaaccccactacccgccctgtttgaaagcctgggggccttcctgctgcactg

SEQ ID NO: 7643 - DNA, 201 bp, Bos taurus
agtccatgaattgtacagtctggaatgaaggtgtataatcagctttcatgcagccatgtaagaccactccagcacacctctgggtggaccaccctgagcctgggccttctgggaagcatcttgcctggggaatggagggcatcactgcagtgcaaacatgagagattcgagtgatgagtgtgtctgaagaacccaggagaa

SEQ ID NO: 7644 - DNA, 201 bp, Bos taurus
ggcctagtagttttccctactttcttcaatttaagcctgaattttgcagtaaggagctcgtgatctgagttgatgttttctgtatacctcccatgttaccctgatgatatattgtcacggcccatactatcttgtcatatttttatttttccatattcccctttctcacatatactgttacatgtgaattccttgaggaaa

SEQ ID NO: 7645 - DNA, 201 bp, Bos taurus
tcaatatggtttgaaattttcttctaaaaaatactctggaaagtggccctaaagtgttctctgtggtactccagatctcttattcaacccaacacatttttaaaaatttagttgagggccaatgcatattctgtttcccctggagtataccacatgtgaaagttaggacttttccaggagaaagaagcttatagagtccca

SEQ ID NO: 7646 - DNA, 201 bp, Bos taurus
agcccgctgctgtggggaggacggcctgggagaggagcctgaaggcaagagttgggcgaggacgccccaggaagagatggtggcactgctgccccttcccggggcccccagagggagaaagacctcaagttttctcactcaccgtagagaggacagcacctctgggctccttacctgccccaggcttcagggctacctgag

SEQ ID NO: 7647 - DNA, 201 bp, Bos taurus
gataagggtctgttcacaataaatgtttttttttcatccattccctcctcaccaataaaggaatgaaatgatggtttattgtacctctctcagcaggcccccacccacaccctatccacacccgatttcctgacttgtccctccgcgtgcttctatcgcaggtagagtacggggacttggagaggcccatccttccaggac

SEQ ID NO: 7648 - DNA, 201 bp, Bos taurus
ttttgattctgactcaaatgattcttttaagatgactcgagctggatagaatcccttgtttctattactgtaacactaattttattctgtgatatatttgccttgacctgcatttgcacctggcatgtaagatgaacagttatggtgtctttcctactaagctcattgaaggtaggaaccttgtcttagagactggggtat

SEQ ID NO: 7649 - DNA, 201 bp, Bos taurus
agagctctattgttctaaattctgggccccagactgactgtgtcaaatctggcaaggctttcaagtttcagctcagacataatgaatcagaatctccagaataaggcccaggtattttaaaaagttctttgcgttaaaataacacctctggaaaaacagatgtatacgaaaaaagcctatagggagagataatgatgttat

SEQ ID NO: 7650 - DNA, 201 bp, Bos taurus
taccatggttccccatgtccatgccttagccctctattgaatttaaattctttctcgtttgttcggctctttcacattactgttctgctgcctctttcatgatccctctttcctgcttagccttctgttctcaacctaaattttacttcctcagagaggccttcctgcagtttggtgccctgtggtctgtcccatatcact

SEQ ID NO: 7651 - DNA, 201 bp, Bos taurus
ccgaaaatgcagatcagatcctgtcagtcttttgtttaaaacctccaacaacttctttagcttccaggattaggtttagtttagtaccagagccatccgcgccaagtcccctgtgtctttctcatttaccgcctgcatttctactggcagcttcatcatgtggctgcatgttccacctcctcccacacgctccttcattct

SEQ ID NO: 7652 - DNA, 201 bp, Bos taurus
aaagcatccatattttctcctggttttgaatagttttaattatatttaattctagtgtgtccagatcttaccttgacgtgtggtgtgagctggggcttgtatatttcagtcagtcagcgtccccagtgtgagggcatttctttaagaatttggaaaggacttgccttttccaagaagcctttgtagttagtgccacttcat

SEQ ID NO: 7653 - DNA, 201 bp, Bos taurus
cctgcacttcccagctcccagccaccccgctcaccccttgctgccttctcccctcccttccctctacgaccactcactccccacaggccccaggagagccatctcttgactcaagacacccattaaacaagactgagacactaacaatcatcgggcactttgtgaggagggccaattagaggccggcctgaccagggcgag

SEQ ID NO: 7654 - DNA, 201 bp, Bos taurus
agttgagtgaggttaaataacttgccacgccagggcacgtagtgtctttctggaaaccccttgccctgggttattgctgtacatcagaacagaggaagccgagtgtagggcctgagtgacgcacagagttcagatgagttgataagatgctcacaacatacttccatcagtgtcttcccagagataagcctctgggctctt

SEQ ID NO: 7655 - DNA, 201 bp, Bos taurus
gcgagggctacatgaacctgggctatggccttggtgctcaccactgcctgtctgccttgaagcacatctccaaagctgccttttgcagacttgggccacatgaatggtttggatggtccacgagtgcctttgttccccgtctaccggaaagcctttggttttcccttttcctccctctgaaggcccttgacgccctgcaag

SEQ ID NO: 7656 - DNA, 201 bp, Bos taurus
cactggccctatagggcttggggtcacttgccttgagtctggttcccagagcaaagaaagcctggagactgcaggtgctccgccaaaggctggtctgtgtcgaaggcccctagggctcagaacccttgatctcctcccaagactgcggtgcagagctggattcctcctctgggctcctaccacgggtgtggacagatctac

SEQ ID NO: 7657 - DNA, 201 bp, Bos taurus
tgcaccttttgtgtcttccccttgatcaaaagaacatgtaaggcccctctgaggcatctaacatgaccagtctattcactctccagggttgacattttcccagagtttcactcgacccttgcccaaatacaatgtgccttttctcagcccaccttggaacgcagcgccaaagcctccagggccttgctcctgggcccgtcc

SEQ ID NO: 7658 - DNA, 201 bp, Bos taurus
ggaaagttctagaagcaaggcctgaaacctggccagccctctccccagagctccagcagtgccagtagtggagtggggatgtaatcaaaggaaaaaggcacttacttgctctgtccaggggccatttacctccacccttctccctacccccacaggcttcttcttcttcagtcctgggcaccaaagagtggctggtcatgt

SEQ ID NO: 7659 - DNA, 201 bp, Bos taurus
tggagtccgagatggaggcgaagctcctccaaacagatgggggtgcagattcccaagaggagggacggggagggaagtgtgttgggggcccaggaactgtctcctgtgaccggcagttaagcttaccctgagggtctgtgtatgtgaaccctgaccggctgagccacaaccgctgcagggtggaaggccagcccagctgca

SEQ ID NO: 7660 - DNA, 201 bp, Bos taurus
aatgagaatgtcaaaggattttagaacaaccacagcagcactggaggcccacaccagtgcagaagcacttggagttgggggcccttcgccaagtcagggcgtatgttcttgctgctcaggctactcagcggtgataagtaatcaaggagaagcaatattcagtgtctctgacattcctgcagagaggaatataggccaggc

SEQ ID NO: 7661 - DNA, 201 bp, Bos taurus
ttcattcacttaacatgtattccattccttctgctggttttgtctcatatgctccatatatacagtctccttgatttttaaaccacatttctgtaagcgtccataggtggatattctcccattttagagagggaaaactgaggctcagagaccttaactgaggacatccaacttgtaagaggcagaggcaagattcaagtc

SEQ ID NO: 7662 - DNA, 201 bp, Bos taurus
ttccatggagacactgaagtaaagggtcaagtcttggggacaggaagcttccccaggccatagggaacctcccctcacctttacagccagagcctacactccaggatctctgggaatcaatgcttccatctttggtatcacccagggactgactccggtggaggaaattctgggctggccaatgggtgtgctcagccccca

SEQ ID NO: 7663 - DNA, 201 bp, Bos taurus
gcaaccaccccccaaccgcccccactgggcatagtcattctgaccctttggaggtttcatctgaaacctccatctcccctcctctgcagacgaaattttatggttaggggttctggtcagcacctgtggcagcctccccagagctgacgttttacaagtttaggcctctgaagctggggtggttgagccaaagcctcaagc

SEQ ID NO: 7664 - DNA, 201 bp, Bos taurus
tcacagtcctaacccagctccaaggggaggggaactgaagccatctgggccctgggataggaaggaagatagcctgagtgtggcagaaggcaatcatgatgagtagacagatacacatcctagggcccaggagaagggtgaccctgcagatggcaaaggttgaagagggagaaagatgggaccttgaacccacttgatgaa

SEQ ID NO: 7665 - DNA, 201 bp, Bos taurus
cctggccctcctctgctcccatgaaaccagcaggagggaagtaccccctcaagccagaggtgatggaggggttggagggcccctccctgggctctgactccaggatgactccagttatggtttccccaggaggaaacgagcctgggcaccctttttccccttctaggacggcacaagggaatgacttggcccatccctgca

SEQ ID NO: 7666 - DNA, 201 bp, Bos taurus
gactggctcagcctttgatcaatgaggaaggacacacctccaccccaggattctgtttgcctgtgcttatctgggctctagtcttaagcagtttccaagaaaagggccacatcaggctttttatgaaagctatccttcttgattatttttctcttctgttctcccactcattcgcaatgaaccaggatccctgaccttttc

SEQ ID NO: 7667 - DNA, 201 bp, Bos taurus
tgctgtttgaaggccatcaggaaggaagaattctcatgcagaggaggtcaggtttttctactctatttggccttcaattgactggatgaggcccactcacgttaaagagggcaagctgcttcacttcgtcaggtcatttagatgttaatctcatctgaaaaacactttcacggacatctccagaataattcttgacaaatg

SEQ ID NO: 7668 - DNA, 201 bp, Bos taurus
agggactgcagcacgccaggtttccctgtccttcactatcaaagtccatcgagccagaagggccagaggtaaaagtgcacgtttgagggaaatggccagcgggcagggttaaggtaggtgaactcacccagttccctgtgaaaccagaagctcaaagaggaagaagttactggcaaccatgtgagcatgccctccccctct

SEQ ID NO: 7669 - DNA, 201 bp, Bos taurus
tgaatgcttctggtgaaagtcacaaaatgtgctgattcgttctactaaaaatacgttaacctccccacacctcccatagctgttacattttcctgccatcctcagtgcccttgtatctactcttccctttctccaagatggtaaccaattttacctatttaatggattgagatcatctaacacaaactctctgcatcttct

SEQ ID NO: 7670 - DNA, 201 bp, Bos taurus
tttatatttaggtgtataatccatcaggaattaattttcatttatatgatgtgaggtaccacccaagtaattcttgaaggcaattagctctttccgttttaggtacatccctttcctctcatcttcccttaatttgcaaagctgaggcatctttcatttccatttcccagagtagagcatagtcaaaacgctgacaggaca

SEQ ID NO: 7671 - DNA, 201 bp, Bos taurus
cataaccacagccagtcccagctgtaggggtctgtaagtgacagaagcacgtgcaaggtgacctgttacctgggcttcatggtgatgcgcttttctaacagaagattcacccattcagccagtgcttactcattacatacaaatcatctatgccgagtcgtggtgtctttgttttttcacctgcaagatgcagagatgcct

SEQ ID NO: 7672 - DNA, 201 bp, Bos taurus
ttgctggccagtggtaagggccctggctgtcttaaaggatgagagtcatatctaagaggaagttgtatgcctatgcttccctttctccaggtttctcctcatggggccttgtgttgagggatgccttggtgttcacttcctccgtatccccagcaggtggcagcatgctctgagctgggctgcaaaaccggtgggaaagtg

SEQ ID NO: 7673 - DNA, 201 bp, Bos taurus
ggctggattaagcctctggagcagacgttgcctgtggctcgccagcattccgagagctagacgggcggcgggcatggatggggattcagctagctcacaaaactgttgagtaaagacctggagagtctgttctgaaaggagaggccaaggaagggtcaggtgtcaggggactccaggcgagccccgctcagtgccttcaga

SEQ ID NO: 7674 - DNA, 201 bp, Bos taurus
tgacaagaatgacttatttcagccagtctggtgcactgcacggggtcccacatcaggaattccatggggaagtttcctcaggcttgagaagggaagggagaagaggggaggagcggctggccatgggcatgcaagtgtatccaagactggtcagctggtatccggccagtgcctggagctgttggggtgaggactctcctg

SEQ ID NO: 7675 - DNA, 201 bp, Bos taurus
ctgcagcctttctgccctgtgcctcatctggcctttgtcctgtttctttgaaaaatatgtatatcttggctgcttctctagctctgatggtgccttgggttctgcttgtggtgtgctggccttccggtgccctgcgacgtccttcctgtgagtgttggaggatggaagaggaccattttggtctattgtggtaacctcctc

SEQ ID NO: 7676 - DNA, 201 bp, Bos taurus
tgttgtgtcctgtgaaaggctcagacctggttcttattacaaatgtcatagctgcctggcagttggagaattgagtgagtttgtcatccatcttccccccggctcataaatatggacagtcccctttccccacatcagatagaatggcattgactctaaactttaacccctcttattttcacctgtgtcagagagcagttc

SEQ ID NO: 7677 - DNA, 201 bp, Bos taurus
ctactctggttctgtcactcagatcttctcaagatgttacagacgatgtcacccaagaaaaagaaaatcttctgttgcacctttcctccatgggttctttatttaccattttttctagtgaaaagaacccaggtgatctttgtactgaaaattcacgtatgcgggagaatatcaaacctcttgcagctgcatttggggctg

SEQ ID NO: 7678 - DNA, 201 bp, Bos taurus
ttgaccccctctgcatcctctctgtgagccccaatctcctgtgttaccccagatcccacattagatttgagaccccaggagcactgatctgtctcaggacgttgttgtcggccctgtccacaccccactgccctgtctgcagcataggtggtgcttggttgagtcagcctgaaaagctgcctttaattcccagctgctcct

SEQ ID NO: 7679 - DNA, 201 bp, Bos taurus
acctcctctacttcaggcctcctcactcacccggcttcagccatactggcatccttgctgttctgacacaccagacacattcccaccttaagagtctctgaaatggccttaacaaatctaaataaaaagtgaaagtcgctcagtcgtgtccgactctttgcgaccccatggactatacagtccatggaattctcccggcca

SEQ ID NO: 7680 - DNA, 201 bp, Bos taurus
caacctcagggtgctgttggcgctccagctgcgatgtctgcaagaggaggggaaggaaaaactgcagaggggctttctggaatctcctctctgacttgtacttggaattccttggccaccactgtcttcaaggaggctccagtgtggtgtttaagtgggcacattgccaggccaaataaaaccagctttctatgactaaag

SEQ ID NO: 7681 - DNA, 201 bp, Bos taurus
attaaaatttaatgtctttaataaaatattcttgcctctgatttttgttgattagaaagttttgtttgcatgaaaattttgcacgttgttatctgtccctggatgtgttccactgtctcctagtttgcagtctgtggcaactagaatagaatttgtatcctattgtgtggaaaaaaaaaaacttgttttttaattgtgtga

SEQ ID NO: 7682 - DNA, 201 bp, Bos taurus
agaataaagagggagtctctttaaagacaagctgggctctggcctatcctggttaacttttgtttttaatgcttttagggagagagttttggtgtcgggtatatttctctatgtaggcctgtgacttgtttttgtttgatttgtttaagtgaaggagccttgaaagtaagcttattatatggaacagtaggagaacactgt

SEQ ID NO: 7683 - DNA, 201 bp, Bos taurus
agtcgttgcgtcacatgggctcagtagttcaggctcccaggctctagagtacaggtttaggagtggtcatgcatgtgcttaattgcttctcaggatgtgggatcttcccggaccaggggattgaacctgtgtctcctaccttgacaggcaggttgtttacccctgagccaacagggaagccccatttgttagtacatgatg

SEQ ID NO: 7684 - DNA, 201 bp, Bos taurus
tggcgggcggtcacatcgaaggccccctccagctcttctttcggaagtggcaatgggaagtctatcgctatttatttctgcctttaaactgtgcatgcggatggccaaattcacaggatgacgtaacctggtggcactgacattccctagacatgttggttagacacctgctgtttccattcgcacctcctccttaggtgg

SEQ ID NO: 7685 - DNA, 201 bp, Bos taurus
tccctctcctttacaaaccgtggagtgactcagggaacaaacccagggtgctatgaagccgaggttctacagttactctgttccatctgagctcgtcggacgggcccgatacatagtgggtcttagaaagtggtagttgcggtcttgcttggtgtcattttgtgggtgctcttctaaacacagctgcctggggttgaaagg

SEQ ID NO: 7686 - DNA, 201 bp, Bos taurus
aggcaggcttggggagtcagggaggccacgatggctttctcccagcgctcttcagtgagggattaaacttgtatctaggggtaactgagatcagtaagtgaaaaatcatagagaagacgtttggccccttgtaaggaggatattccagagctgtcagcctgccctggggaactgtagacggactcatgagggagaaggttc

SEQ ID NO: 7687 - DNA, 201 bp, Bos taurus
tatcagtaaacaaaagatatgaggccatcaagccatcagccactgcagccaccctcagtcatgcagcgtgaggatactcagatggaagagcataggctactggccccagatagttaaggtgcattcaagggaatcatttcaataaatccagactcttgctgggtttatttcccatataaagacattgagttcattaatgtg

SEQ ID NO: 7688 - DNA, 201 bp, Bos taurus
gggtgtcccttggattgtagctgcatcaatccaatttagtttccatcttcatgtggccttctgcttctgtgtcttcacatggcctacttatgaggacccaccctaatccagtccaattcagatctcatattcacttaactaattacacctgcaaaggccccattcccaaataaggtctcatacacaggcaccagggcttaa

SEQ ID NO: 7689 - DNA, 201 bp, Bos taurus
catgggcatctggctgccatcttatttttacccctcaacacatgaaatgttagcaaaaaaaaaaaagtaccaactgagagtataattgcttattatacctgtaatgtctggtagaacatgtaggtacagccctttatcagaaagagggtaaggaaataagcaggtaaaagtagaaaaaaaaaaaacatcttgccatgaggc

SEQ ID NO: 7690 - DNA, 201 bp, Bos taurus
tccccttcccccaaattgaactccccccctagaaacaaccacagatgtgatttctatcatcatgatcagtttttctttctttcttttgaatttaaatgcttttatttaggaaatgtgctgtaatacataaactaaatagagaggttagaatgccataatttgacagtataagagcaattgcttaaatgttgactctatgaa

SEQ ID NO: 7691 - DNA, 201 bp, Bos taurus
aaggtattagagatggagtggcctcaacagcataaacttattgtctcaaagctccgtgtctagaagtttgggatccgaaagtccacagggctggttccttccgagggccgtgagggaaggatgtgttccaggcactctcctgagcttgcagatgactgtcatctctctgaatctccacatggacttcctgttccctgtctc

SEQ ID NO: 7692 - DNA, 201 bp, Bos taurus
aatgaaaatattcaatcttcatacaggctgaagaccaacttccagtaatcaggataggccagaaaaatctaaattcttgattttggtgaaaagtgattccggatcattagtagccatgggcacttggatgcagcagatacaaatactttctagaagaagttaactttattctagtcctcaaattatttccaccaatgactt

SEQ ID NO: 7693 - DNA, 201 bp, Bos taurus
gtatctgaagaaatttacatcatcagtttccctcgccacctccctttctcagtcaaatgctatggctcaaattcaaattccaattaatgtggccaaggttagagaacaaactttatgttcaagctttattatcactggatgagcacccaccaacaccacagtgtttggttctttaaatccagatgacatgtgttcaagcta

SEQ ID NO: 7694 - DNA, 201 bp, Bos taurus
atctgtccagtgagaaggcagagggtgaaggtgaccgacggcagggcgcttggcaggatgagcagcagggagggcaggcctgagtgggggacgggatgcctgtttctgcccaggacagaatctgccttggacctgccaggggagatgtggcatcacacaaggggcaggagagaaacctccgggcgctggccaggctttgga

SEQ ID NO: 7695 - DNA, 201 bp, Bos taurus
agaacccacctaccaactcaggagatgtaagagatgcgggtagaagagactagaaggcattttggaataatgggcatacactgtgaaaatggcctcctctcttgtgaccacacctgaagaagtgacacccagtttgcctcttatctgtgggtctagaggtccaaatggacccttggcaattggaggtcattggaacatctc

SEQ ID NO: 7696 - DNA, 201 bp, Bos taurus
gaaatcatattatgtaaaatatgtaggatcaattccaacctgaaatagcaccaaaaacaagtctccataagtattcattagaaaatactttggctcaaatttctagcagttctctatattcatacacacatacaagttctaatatttacatattgcaaaaatacataagaagcttcagctatagagaattcatgcacagtg

SEQ ID NO: 7697 - DNA, 201 bp, Bos taurus
tcccattcctgattttcatttgctgtggatcaggccccaccacaatgcggatgctacttatattactaagtcttctcactacagcccaggacctcccccatgcccttgaggctcatctttatgggcttcaaacctagtgtcactggcacctctgaacttttgttctggcattccccactattgccgtcagctgccgccttc

SEQ ID NO: 7698 - DNA, 201 bp, Bos taurus
gctctcctacatttgaagagctagaagcgaccccccaacagcatccagagtccaatcacttcatgagaaatgtggggcccagaaagacatagagaccttcccagggtcacagagaaatttttcaaagtatttaatcggctcatagatgttctgctttcagaaaccctgaagtcaatccctggccctgccatgttttagcca

SEQ ID NO: 7699 - DNA, 201 bp, Bos taurus
agaaaaaacaagaaccagactacatggcctcacccctgagattctgactttgaaggtccaggaggcagcccaggaatccacctttcaccactcacacccaggtcccttgtgtacagggtcctcaggccatatgttgagttgctcaaaggatagttggagggagcagcaggcagagcagagggaaggagacagctccagact

SEQ ID NO: 7700 - DNA, 201 bp, Bos taurus
gagaaggagatacaggcctcacaaatagccagaggggtcaatgaaagaggaagctcaccacaaaagccatccaaaataaaggcagttcccagcaggctctgcgagctgaaggagtctgaagtcctgtgggtgtttaaaaaacaagaacaagctcaccgtcaatccctcctttcatccccagaacaatcagtcatggccttg

SEQ ID NO: 7701 - DNA, 201 bp, Bos taurus
cacactgcttgttaagagtgtcccgaagactaagtctgtcatacactctggaggcatttttcacttgcaggtctgttagggccttttgccctgatcctccgggtgccaatgaaaggtctagaatgaacagagggtggcatcagcaccaggctccgataaaccctttgctgtttccttgctcgtggccttcttaacggatga

SEQ ID NO: 7702 - DNA, 201 bp, Bos taurus
atgaagatgaagggcatgctttttaaagaaatgtctgataaaggagtaaaaagatactcaaatctcattaatgagtagggaaattcaaggagaaacgagttttttttttttacttatcagattggaatgatggtgcggatagaaggaaggggcatacctagatactcttggtgggaatattaatttgtacagtaggtttgg

SEQ ID NO: 7703 - DNA, 201 bp, Bos taurus
ggtggggtgaccacgcttagttcggactgaacagaattaaccaccagagtcatgggtgagaggtggaaacccaaataaatcacaactctgccctcaggaaataaggggagaaatggctgttgtggaagcaaccagcgggcactgaaataacccttgatttgttgtttaagggccagccaactcaccagttacgacgacagg

SEQ ID NO: 7704 - DNA, 201 bp, Bos taurus
gacgtcccaggaattcagctctttgtctctggatggcccttgggttagtggaagggtcggggaaccagtaattctgtccctgctctgaggatacaactccattccaaggccaggctgtgtatgacagcccctgtcagccacagtaagcgttgtccatctcacatctcactcccacggaccagggtggggtgggcttggggg

SEQ ID NO: 7705 - DNA, 201 bp, Bos taurus
gaatgccctagcaatttcctaggcctctttttttttaaggtttaaagagatctataaagaactgctacattttagaccccttcaaatggtacaaaatgaatagcttttaatcaaatcatttcaggtaattaaatattcatttactcccctacagcagttcagtctcctttttttaccctcttctttaccccaccgtatcca

SEQ ID NO: 7706 - DNA, 201 bp, Bos taurus
acagtgcagtaagtcacttctggcctgagtgaacagttgttcctctcgctagagactgggaagtctggagtggaagctttcttaagacagacggatcaagttgttgagtgtctctgtgcagaaggccaaactggtcagacagttgtcctccacccctgccgccacgcaaggagcaagtccgtctttcagagtagttaggta

SEQ ID NO: 7707 - DNA, 201 bp, Bos taurus
cttaacaaccaaacaacaaaaacagcatgaaggagggtctcttgctatccaccggagatcttctgaactatcagttaattttaccatttcataaaaagcagctggccaatgaaaaagtaaaaaaaaaaaaaaaacttatcctcattaggaatgaaggaaatgcaaaataagactacacacgacattaaacattctcaaaat

SEQ ID NO: 7708 - DNA, 201 bp, Bos taurus
cacctgtgtagtgataagttgccagcgggtggttatggggacgcaggggcttcttcagtagcagcttattcagcgtttcctgaaagggaagtgaggaaaaggtcagggccctgacaggttctcagtggccaaaatccaggactctgagtagggtgattacttaactcttaactgcgaaggggcaagaggtctggcaggagg

SEQ ID NO: 7709 - DNA, 201 bp, Bos taurus
ttgaagaaataagaaataatattttaaagttattacaatatttagaagatagtattacaaatatatttggcttttgttttttgtttataacgtgtaatattgattcttaagatatgcttttctgttttatgtgaaaagcactgacctattgcatcataagtcagctacccgacatctaacctgaaccacaccaagcttaag

SEQ ID NO: 7710 - DNA, 201 bp, Bos taurus
ccccaatctctagacccaagggcaagacctgtctacaaaagccccttcctcttggtgaaaccagctgctgggcttcagtccaggtggcccccagactagcacagaacacaacagaatcctttcctctctcgttctccctttaaaaatattggcaaatgcaggcctcagaagaatggcgtggccttagtgggagatgcccag

SEQ ID NO: 7711 - DNA, 201 bp, Bos taurus
acttaaagtcaataaaaaatattttgtatgataaaataactaagaagtacatgcaactaaagttattatgcacatatattaagaaataaccttactacagtcaagtttttgtgtttataaatgagtctacacacaacagatgacttggactgactttcaggttcacagtaaccaattttttagaatgaattctaaatataa

SEQ ID NO: 7712 - DNA, 201 bp, Bos taurus
aaagcatgggatgaaggaataaatagggccagaaacagattttgggctgaagcccaaagaatctgaatatctttcttaaggagaaatgtgactttatcaccgagattacctggataaaataaaaggtaattaaagtgactgagaataaaactcatcacaaggtttgtggttaaagggaagacaaccaggatgaactgtgaa

SEQ ID NO: 7713 - DNA, 201 bp, Bos taurus
tcctaaagtgaggtacataatcagagataaactcagttcaagtatcagagtactgacccatgtttaagaatttctaagttaatagtaactgaaagggctggtttttttttcccttaatcattcggtatgattattttgtacctactatatagatgtactctgctgagcacagggttatagagaagaacattctggtcctga

SEQ ID NO: 7714 - DNA, 201 bp, Bos taurus
gtcacggaagtttcccagggtctcagaactcagctcttcgcagcgatgaggaggcctctgggtccctgaggggctggcctcactgccagccccgtcacccgccatcctcaagaagaatccagctctgtaccgttcccaaagtggactgcatcacatctttccaagctcctgagacccagggccccaactgagcacccccgt

SEQ ID NO: 7715 - DNA, 201 bp, Bos taurus
gaattcagggaaggatgctccctgggcctgccaggaaacataggcagagctgccctctagtggacatcagaggctacagcaaggtcaagcttctctgagcctgaagctgggactggaaagggtgtgctgaaatatgttgtcagaagtgctgagtgcgtgtggagtgcgaggtcgttaaatcacgccagcaactagcgcaga

SEQ ID NO: 7716 - DNA, 201 bp, Bos taurus
tatccatctatttccccctggccagggggcaggagtcctgtgttttagtggagatgatcttatttaccttgatgctcaaggttgctcctcaaatatttccaaagtccagcagcactcaggcccttgggtggctcatgggccctgagcatcacctcatatctcaccccccctggctgttccatttttgcctcattctcacca

SEQ ID NO: 7717 - DNA, 201 bp, Bos taurus
gaagaggaaatccaactagttggggtctgatggtgactttattctcccgaaagttctggagatgacatccaggttctatcagtcagcagaacgccccctgtccaggaagtaaggcctgtaggctccgggcagaacaccccacctccccagccctgggtttaatcacctggtttcccctggccatgtgctaacctgtgaaac

SEQ ID NO: 7718 - DNA, 201 bp, Bos taurus
agtgggatgactcacttacctggctggcctgagagtcgcctggggaggaaaggggagagcgtgagctcagggaggacacgtacggctgcctgctcccgccccccacggccagggctggttcactctgtgacctccctactttgtccacagcaggcccggtggcagagacagctctgactagtttacctgcccctgccaccc

SEQ ID NO: 7719 - DNA, 201 bp, Bos taurus
ctttcttggaagtttgcggtcaccgttgttattgtggccatcacttgtttctctaattggaactcaatgctaaggaccgcaagaatcctgagttcaaatcgctttagggccaatggttcaactttgcagagaagggggaaaaaaaaaaatccctagtcatagaaagacctgtctatacagaggagagaggataggatttgg

SEQ ID NO: 7720 - DNA, 201 bp, Bos taurus
atcagctctctctcctgggacttagagaggccttctccctccatcagttatccattaggtgaggcactgacttcagggtgggcggcttaagcccgcaccctcctccgaggcctccaggccccccacacgctgtcttgtctgggagataaatctagcttccagattagactctgggcccagcacccccacacccgaggctcc

SEQ ID NO: 7721 - DNA, 201 bp, Bos taurus
cttgtccattagcactttatagtttatgtgtgtatttgtggggcctttaaaaactcacatttatgtgaaggctgttaagagatgttttttgcagttagagttatttcttttagtatgggaaatgactacaagaaagtcatttctgtgtttatcgatgatctccctgaaatcctgttgccaatgagaagtcaacattttgct

SEQ ID NO: 7722 - DNA, 201 bp, Bos taurus
aatccctgacttccaagcacatacatattcagtgtatccaaatcccacctatctttccagccttaaccatgaagtctcctttaaccactactgtccacaccgattccctcttctctaaagccccacaacactgagactgccacacaattaacactcgtaacactgtcatatccacgttgttttgctttttatccttccccc

SEQ ID NO: 7723 - DNA, 201 bp, Bos taurus
tggattgagtaggggaggagaggggaacatgagccaggctggccccaggatataccctagattcatcccactaacaacacaggccagtgtctggtatgacgggcaggacctgaacaaaatcagttactccaggggactctgtagcagattctgtgcttctccagggggaaactgacagaaaatagacaaaggccagcctgg

SEQ ID NO: 7724 - DNA, 201 bp, Bos taurus
ctggtggccttggcaaatctctttgtgcttctgagtcgccgttatctcatctgtgaaatgggatcactgaccctggatgccctgggtaggtgtgagagtcagatgacacaaaatggcctcagaggggcaacttgtttttcgaggaaccacttaacaagggcaagtgtatcaggttatgctctcagcacctgccacgagctg

SEQ ID NO: 7725 - DNA, 201 bp, Bos taurus
tctttcagaacaaaagccaaaatcctaacagtggcctccgaggccgatgtaaatgcttggtacgtcactgacttcacctcctaccactcacagctcttcagtccagctcccctggcctccctgctgttcctctcccacctcaggtccttgctggaatgttcttcccctagacacccacaccattcactccctccttccctt

SEQ ID NO: 7726 - DNA, 201 bp, Bos taurus
cccatggactataacatgccagcctcccctgtccttcattgtctcctaagcttgctcagattggtgtttttgagtcattgagttggtcatgctattcagctgtcttaccctctgccacccccttctcttttctgttcaatctttcccaacttcagggtctttttctatcaatcggctctttctatcagatggccaaagtat

SEQ ID NO: 7727 - DNA, 201 bp, Bos taurus
gagggatgtgatgcaggccgctggatcacacataaccagtttgctgtgtccatttcaaagaattgttaagctttaaagaccttcaggcctgttctgttttctagccctggaagggatggtacctagtaatcttttatcttcacatcttaggttactgtatcaaatcatagaccatatgatggaatcatagtccatcataac

SEQ ID NO: 7728 - DNA, 201 bp, Bos taurus
ctgagtagataaccatgttgaaatttgagataataaactcatgtcctttctttctccccccactttttttttgtcttccaatattttgagcagattcatattcaaaggaccggggaccttggatcgtaaaaccagtggcctcttccagggggcggggcgtctacctgatcaacaacgtgagtttgtaatgggggcacactt

SEQ ID NO: 7729 - DNA, 201 bp, Bos taurus
tcagcttttattggtgactttgcaaatagtgaagaacctactagctgtgtgctctgctaactggtaggtaacagcgtgactttatccatgagcagtccacagggtaattacttaaaggcttaagaagctgtagattagttccatgtactgtgtgagaccattttaccaggtggactaataccttcaggatcttcagtacgt

SEQ ID NO: 7730 - DNA, 201 bp, Bos taurus
taccatcctccagttaaacttttttttttctttactagttgtttctttataaagttcttagattactgaaaacaaacttgtgtaatgatttttactatacataagtcattcgaacctgcctaaaatttaatattctagcaaggttttcctttttggatcagaatgacaggaagcctcaagctctttggaaaggtcagtgct

SEQ ID NO: 7731 - DNA, 201 bp, Bos taurus
ccagaccccatgcaactcgtggcataaattcgtgagttgaccagcctaggtttagtagcatagtctctgattattagcccagagaagccagctggcccaacggcgactatgctgtcaaagtcacttcagttgtgtccgattctgtgtgaccccatggactatagcctgccaggctcctctgtccatgggattctccaggcc

SEQ ID NO: 7732 - DNA, 201 bp, Bos taurus
tcagcaccttgaaaacatactggaaaaccagaaatgtctctcaactattttgccctctccatgcaagcaccctgaggcccgaagcagctcaaacccagacgacacgccttgggtgggctctgcaacatctggaaagcccagcagtcagagagctcatgctcatggccaccaaagttcatttcttttaggggaagtgaagac

SEQ ID NO: 7733 - DNA, 201 bp, Bos taurus
gttattagtgcacaagtccctttgatttggggacgaggtattaaggtcttctggctgtggaggagtgacttggatggtggtctttctgtttggaagctgcagggttagcagttgccacggtttcagaatggaaagatgagaggaaccgtgtctttgtgtgacctctggacggaaaggattctcactcatcctcccaatggc

SEQ ID NO: 7734 - DNA, 201 bp, Bos taurus
ggagtcaattgggtgggagtgaaatcagggtgggaagaggcagggagtgagaaatataaaataaagcagccattcatgttttttaagaaagaagatggatatttggagttaggaagcctggggttcaaatcctaactcagctgtttgctaacactgtaacctcaggtaaatcacttgtcagaatcactgtcttctataaat

SEQ ID NO: 7735 - DNA, 201 bp, Bos taurus
taaaatgccgcctcctcagagaagccttttctgactactgtgtccggatactgttctattctgccatctgtgccctggcccttctctttcttcatagttcagttcagttcagttcagtcactcagttgtgtccgactctctgtgaccccatggcctgcagcactccaggcctccctgtccatcatcaactcccggagcttg

SEQ ID NO: 7736 - DNA, 201 bp, Bos taurus
aactcaggtacgggcaagggtggggcctgcaggggagctcagacaggtcttggggcccaggggagcatgcacagctctggggccagcgattagggtggctttaaggagcaggagtggcatgatgatgctagagcttcttgccaccaaaggttgtgcatgaggtggcccggagttgcaaaggtggtgacgaaggctggcatt

SEQ ID NO: 7737 - DNA, 201 bp, Bos taurus
tgtccccaaaggtcagcaaatgcggaggctgagaaaccctaggctagatgtaggagtccaaaaggttctgaccccagctgtgcttctcactagcttccctatggccttaccaatcgaatccttgatttctctgaattctcttccttatctgtaaaatgggaaccttattaccaactgagagtagtggtgaggaacggaacc

SEQ ID NO: 7738 - DNA, 201 bp, Bos taurus
ctgctcaggcccggggctggagaagtggtcagaggaggtgatggggcttcacaagggaggcaaggtcccctggacattgcaggtatctcttgctttcagcgagatcaattaggggccatcatgtgcatcacgaaaggaaactacctttgataaaagaaaattttaaaaaagaagaaagagtaaccgtagggtttctctgag

SEQ ID NO: 7739 - DNA, 201 bp, Bos taurus
ttggctagtgcttgggagcagctgccaccatccagccattcccacccagctgaccaactcgataacctgccagtagccaaacacctccaggccacaggacaaggagaacaaagtcaaaggaaacgccaatttcctaacaaaggagggaagcaagtctggataagtatgatttgcttggaaagtgggagaggccaccactcc

SEQ ID NO: 7740 - DNA, 201 bp, Bos taurus
aaggaaaatcgctcacaggcgattttggggctcacaggccccaaaatgcaggggctctgggtcacctaagaaacaacagtagttgcggttcacttttcaaggactccaggccctactggggcttcccaggtggcaagaggggtaaagaacccgcctgctaatgcaggaggcgtcaagacatgcagcttcaatccctgggtc

SEQ ID NO: 7741 - DNA, 201 bp, Bos taurus
atacctggtacaggatccccagtaagcctcgcctaaatttcttctctggcttctagtcaatttctgttcatggagaaggccaagaaccctggttggtatccgccctacatatccacaaagagggctggttgcccagagtcacacagcaggtttcctggttgaagtgtccagtcactctggatgggccaaaccttcccctgg

SEQ ID NO: 7742 - DNA, 201 bp, Bos taurus
gagccagaggggtggcttaggtgggttgcccaccccttaggttgctgtgtgcagggggcatgcctagtagcctacttttgctcctgactccctgcttttgttccaagatcttcaaaagtggcagttcggctttatggtctctttatatcttttgagtccagaatctgccccaactgcacatgcatgcagttatttttaatc

SEQ ID NO: 7743 - DNA, 201 bp, Bos taurus
acggggtctcggggtacaaaccgagagcgctctcccgggctgacttccacccacgccctaagaagaatcacgcctccggccttgtctgctagaagccgacccgccccggcttctccagaccccgcctcagaactgcgccccacgcctgctccacagcagctcccgtagcacaaggtccccgtacaaaatggcggtttggcc

SEQ ID NO: 7744 - DNA, 201 bp, Bos taurus
ccccctcccccagagctggctgagggctgccccacaacatcccacctcctccccccaccatggggcaaggctgcttataaatggggactggatgagtggacgggctggagactcggaaggcagcctgggtggaggacagaatgcctcccttgttaaagatcactgcttgtctttgtacaaaatccccaagcccaactgtta

SEQ ID NO: 7745 - DNA, 201 bp, Bos taurus
aaatggaaactggggggtgcccgcagcccgttttccctctgccacagttcccaggaaaggacccctttcacaggcttgtaaaaatgcttttatgagggccgcacgaggaaaaagaagtccttcccatgtcttgtttgcttttctcctatgaacgtcattcctcgtatttgccgaggtggaaaacaccaaaaccactggaga

SEQ ID NO: 7746 - DNA, 201 bp, Bos taurus
tgggagttgctttattaatgagagaactcttattggcaatgacaccaaaaaccagaggtcagtctaaacatctgtgtacagaccataatggataatagaccggccttagattacatcccagctatctgaaataagacttactggtccttcctcccaactcctccacacatataattcttcctaggtggccaaatgcaggac

SEQ ID NO: 7747 - DNA, 201 bp, Bos taurus
gcaacatggggaacatagcaaatattttataataactataaatggagtataacatttaaaaattatgaatcattatattgtatacctgtaatctgtgtatcatacatcaactatacttcaattaaaaaaagtaagaaaataatccctaagcagatttgcaaactgtatttcatagaaatttcatctgagagaaaaaagtcc

SEQ ID NO: 7748 - DNA, 201 bp, Bos taurus
tacagaatcaaagactgacaattaccttttgttcctctctttcggttgcatggtgacacttttcaattctccaatgcctcaagaaatctcgaagatatccgaagagagtgaggacaccataccccacataagtaagcacagcaaccagcattggtgtttcttcaaaaccttcattaaagggtcttttatacagtcctccat

SEQ ID NO: 7749 - DNA, 201 bp, Bos taurus
gaaatgtttctgaaggatatacataagcaggaccagcaatatgatttgggggcccagtgcaaaatgaaaatgctaggcccttgctcaaaactgattaagagttttagatggtaatggcagagcattaaaccaagttcagaatactgagcatggagatctgggtgacttcggggatagtgtaccctggaagctggccctgat

SEQ ID NO: 7750 - DNA, 201 bp, Bos taurus
tcgttcactctgaacaaagtatctactccttcctcctctttttgccttcatgctcatgttccttgggacggctgctatctgagggtcttttagagccaccgtgttgcttggcttcttccaaaaatttgtccaaaccgaaaggatcctcctcaaactgaactggtccttctcggcctctttgtctacggtctgaaccagaaa

SEQ ID NO: 7751 - DNA, 201 bp, Bos taurus
accattcttaccagaggtctgggagacttggctaatgctgggtgaatgctgaggatggaagagactcttaaaggtcaagttcaacctacagacaagaaatgtgctccagagagttccctggttgcctacgggttaggattctgggccttcacctggccagagaactgaaatcctgcaagtgatgcagcatggccaagaaac

SEQ ID NO: 7752 - DNA, 201 bp, Bos taurus
gcaggatattgacaaatggcatggagtcagtgaaagctacaaaaatgatgacaggactggagggagtgatttatgagaggagattagcagagtgatggtgcggcctagcaaacaaagggatggggtgggggaggccgtgggtcctgtgaacctccgaagtccaaggagaggcgaggggctggggggcagcgtggagtggcc

SEQ ID NO: 7753 - DNA, 201 bp, Bos taurus
tctcagcctctatgatggtgagagataaattcctgttgtgtaagccacactgtctatggcgtttcgtatggcagccatgaagatttagacaggtggcttacctggccctgctgtaggacaggagagctcccttacactggtggaggaagactgcatggaggaggcagggttttggggcttcctgaatgaagacagggtgtg

SEQ ID NO: 7754 - DNA, 201 bp, Bos taurus
tgaagtctgtgcaaggaaccaggggagcagaggcgagagcaacagaccgcttagaaagggaggtgggggcaaagggcagcgggtccactgagggccaggaagggttcagagggagcctagcattggagaggaacactggaggagtttgccaggtagtgaagtggggaagggccccccagaaagaccaaacaatataagaaa

SEQ ID NO: 7755 - DNA, 201 bp, Bos taurus
actctgatgggaagagaggctggaaaaaaatgagcatttatctgacagaatgctgttctaaacacagtctgaatttgcttagcaaggacaccagagaccacgagaaccacgtgggcaaggccagtgtctgccacataccttaattgctttgcattattttttctggttggttcaactaggtagtgagttactgaaaacaga

SEQ ID NO: 7756 - DNA, 201 bp, Bos taurus
gatggggactggggatggggttgggggtggggtttgtattcttgaaaagcacaccactgtcagggaactgaggtgcagaatcttaaaatcccggtgggggcgggaccatgaggccccagcagagggtctgagttacaaccctgccctcttctgcggctggagcacggtgtgtctgtgtgtgcgtggccgtgcacgcgcgtg

SEQ ID NO: 7757 - DNA, 201 bp, Bos taurus
cctgggcggcgttcccgccgacatccggccgtctgctctgacccttgatggggtgcaggccatgcccagcttcaagggattaatctcggatctcaagtacggcaactcagagccccggcttctgggaagccagggtgtccagttggatgccgaggggccttgcggcgagcgtccctgtgaaaatggcggcatctgctttct

SEQ ID NO: 7758 - DNA, 201 bp, Bos taurus
cctttctaatgggttttggaggaggcattcctctgtcctcttcatcgtcctgactgttgaatgctcagtgtcctggccctcacctgagggtagctgaagcatcttccacggctgccttgcgtgagggagtgtctgggaagacagtgaagtctgcaggctccccgctcttgttcttctgtgaaagctgcagagaagaggcca

SEQ ID NO: 7759 - DNA, 201 bp, Bos taurus
acagggctgggatttgcattcagattttggattatttagagcaatggtaaacatgaaaattacctggggacttccctcgtggtccattggctaagactccgcactcccagtgtggagtgccctggttccatcttttgtcagggaactagatccctgcagctaagagtttgcctgctgcaacgaagaccctgtgtagccaaa

SEQ ID NO: 7760 - DNA, 201 bp, Bos taurus
ttctcaaagaaaagaccaagtcctagcctgattggccgtaatgagttgcttttctcttctgatgaagacccctatcaaggcaagtggactaattgtcgggggtggggtgtctttggccctgctaagctgtgtgacaccctagctgggaggggagaggtagttactatttttgaatatcgtatactagatactgtgccaggt

SEQ ID NO: 7761 - DNA, 201 bp, Bos taurus
tggataaccctcctccatgtgaatcaggggccatgctctgccctgaggtgtctggtatatctgagagtggacatctgtgtttggagcaaactgggagggattggaggccacttttggcttggtgtctttgcttcatcaaccgctctgccaaggtttgttcacagtctcctctggccatgctcatttagttatggaaaacat

SEQ ID NO: 7762 - DNA, 201 bp, Bos taurus
cggccatatctctcaaaccagacgcggggctgaggacccttgggggagctgcccagccctgacacgtgagttgcccacgtcccagcacgatcctgccctgtaggcccccatacctctttccctgaagtcttggccagggtgtaggcatcagctgatgattattattactgttattggagttattattttttaaaatactcc

SEQ ID NO: 7763 - DNA, 201 bp, Bos taurus
ctcaaacaagcagacggcagcattaggccgagaagggacaattcagatgggccgggaggtgacagggatgaatctatgcagaaacgaggcctgacctggatgagacgggggtgtgaggtgcagggagaaacagtgtctgagatgccacgggtgctctctgttcagacgcctgcactttcagataaagctctttggcttcag

SEQ ID NO: 7764 - DNA, 201 bp, Bos taurus
atcaaattagctttagttctgagctctcatctggtggaaagctgtataaaaaaatctattgcattctgtttgaggaaacgcatttcctagggttcttcaacaattttaagtgacactctcatgaggttaggaagataggagtggagggttgcatccttcccaggggaccctgctgtgattatttctctatctgccacgtgg

SEQ ID NO: 7765 - DNA, 201 bp, Bos taurus
ctgggcgctgcacgctccaggagtggacagggacatgaggcgatgtctgtggccaaggggaggacgtgtgctgagccccaggaggcaccgattggctggcggtgaggtaatgcgatgcagtctaaatgtggaaacggcagccccggtgtccagggcatgcctgctccccgaccagcccagttggccgctggccctgtctga

SEQ ID NO: 7766 - DNA, 201 bp, Bos taurus
gcttttttccaaagtcttagcttctttcaggatatctattagacctttggtagtaggaaagtcccccaaataccatgtattccctaggatcctcgcctgtgttttgtttctttgaccattctagtttatcctgattagatggtactaagctttccagctactgatttggatttcaaggggcattggtaatggagtgataca

SEQ ID NO: 7767 - DNA, 201 bp, Bos taurus
taggaacacctaggccctttatttagatctgtgactttgagattcttacttggatcctctggcttccttgttctgaaaaaataaaatgaggcaattgtgtttcatgctctcccagggcccattcaattataaaactctgtgattctcaaatgtcatcagcttggcaatgtcttcccttatcctgagtagaggggtaaaggt

SEQ ID NO: 7768 - DNA, 201 bp, Bos taurus
tccattccagcatggaaataggcaccgaaacccacagtcactgccatggccctcatgtctcacagcctggattgctcgttgatcatttggacttacaacaatggaaacatcaggaaccccaggcctcctgggtaattgcctaacctttgagatttttcaaaggaaattgcaccttttgtaaaatatctcacaggaggacag

SEQ ID NO: 7769 - DNA, 201 bp, Bos taurus
tatgcatatttcttttccagacccatgtctacatatgttctggaataaaatatgtctccatgtcatacattaggtgttaagctgtttaggcaagacttgtactcctacatagaattatggtaacatgaattgcttatcttcaaaggaataggttaagcatatttgttgtctttgccaagccttttctcactttgtagactt

SEQ ID NO: 7770 - DNA, 201 bp, Bos taurus
ttcatctcatctcaaaataggaagttacttatttagttctgctaaagttgtgaccctgattgttttactgaaattgatctactcacagttaattttctcctataaccacacatgttaaaacacggaggtttccttttcactcgagaaggatgtgtacatataggctatttcactgccttttcaggcttttttacacctttt

SEQ ID NO: 7771 - DNA, 201 bp, Bos taurus
ggagcaaccaggaccatgtgccacagctactgagtcagtgctctagagcctctgagcggcagttactgagcccaagggccacaactgctgaaggctgtgccgtataacctgtgctccacaaaaggaaaagctaaggcaatacgaagcccatgcaccatagtagctggccacaactagagaaagcctacgcacagcagcaaa

SEQ ID NO: 7772 - DNA, 201 bp, Bos taurus
tctttctccacactgcggagtcaagaaatagagacctgcagccataaaaatatgtaatgaaaagacagagaactgataaacagttataccctgctggtaccattcagtaaggcttacatttaataacacagtggtgggaggacttctgctttgtgtgaaagtgcagttgagtgaggccactaaaccgaagacaaaataaat

SEQ ID NO: 7773 - DNA, 201 bp, Bos taurus
cctgcgatactctgtgacgtgctctggcctttttggtctctctatcccagtgtccaccatagggtcatgataatttgcgatagacaatcaaacgtcgattcgatggcctacatgtacagctgcactctcttttgttcagaaaccagaaaattagaagtggtctccaaccaagaggcattctttatttactcaataaaaacc

SEQ ID NO: 7774 - DNA, 201 bp, Bos taurus
gtgaatgtgaatagttatttctcctccgtttataagattagtgtgtcatcctagaaagctctggtgaatcgttttctctgggtttgttagatgtgaagcccagagctgaccaggcttatcagttcgtggaaaggctcctcctttgttcttcaagactgtttgatttatttcctgttacttctgttcgtattctctacttat

SEQ ID NO: 7775 - DNA, 201 bp, Bos taurus
aatggactttgctagtattgactattcattctttccttgtgaaatgtctgaatgtgctcattttcatactttaagtcatcatcaattacagagttgcaggcgcttttcttgtgggctacctccagcagctgtcagtgaaaccgagcagctgctcggtagatagtgaagaggttccctcctcgcacgtcctcctgttttcgt

SEQ ID NO: 7776 - DNA, 201 bp, Bos taurus
gaaaacagatagtctatatgagatagcccatccttgagtggcttgatgtctggcaattaatgttagagcaaaaaattaagacccagttattttcatttctcaagggcatgacaatgagtctctcaatccaccatattaaaccactggaaatcatatataacagaatcttttcttcattaaaacttggtttaaggggacaaa

SEQ ID NO: 7777 - DNA, 201 bp, Bos taurus
attaaattggcttctctttctctctcttctctagatgctttgtttggtgtctctaaagtttgctggcaagtggttgctctggagattaaattgttcttgaaaggccagtgtaggaggattatactatcctagtgtatatttctttaggacttttaatataaatctttgtcggagtgggcgatggaggtgagggctgccata

SEQ ID NO: 7778 - DNA, 201 bp, Bos taurus
ttttgtctatatgagggcatggaaatgagatttctctgtatcatcctggcctataaatatgcattgaaaatacatggaaccatggccccacacttatgcaaagagtatgtgggttgtttgtcttcctgacctctccacagacttgcctagaacaaaaggactgtctggcccctgcctggctggaatttacctatagaacag

SEQ ID NO: 7779 - DNA, 201 bp, Bos taurus
ttctaacatagaaccaggtgacctgattaaaaccagccttctttgccactgcctaccctttcaaggaggaggtcgcctgaaaatttacttcctctggccactttttgtttggagtctgcgtggggcatgttattcacacaggcatagtgtgttagttgcctctttgtggccccatggactgtagcccaccaggctcctctg

SEQ ID NO: 7780 - DNA, 201 bp, Bos taurus
agggaaagtaaaggagaataagttagaagttgcccagagctaaagcgtaccaagcaagggaattctaagaaattgcaaacagcttggccaaattcagcccgtaaatgtgttttgtttgaccagcaaagtgttttctttttaaaataagtatcttaagccccatagaggagagagtaaatccctaatatgcaatagtctcaa

SEQ ID NO: 7781 - DNA, 201 bp, Bos taurus
atagactctgtaatttgaatcaaatatgatggaattcctccttaattatacatattactgttatttcactggcaggtgtctctatccacacaactgggccgtttttatcaacattggcatctatttttgatttatctagcagcatttcttcatggtttaatgtaaggtagaaagtagcagggccattcccttgagaatgag

SEQ ID NO: 7782 - DNA, 201 bp, Bos taurus
gtggaaacttggtttatttactttgagagaaaaaggacaagctagcacagtgtctccctgtttgatgagtccatacagttgatgatgagtatggatggtattctggccctcatattaaattctgctctgaagccattagaggcaaaacagcgtaactgactgtaacctgacacattttccaggaagatgcaagtgcttgtt

SEQ ID NO: 7783 - DNA, 201 bp, Bos taurus
actcacagccttgtccaactctctgcagccccatggactgtagcccgccaagctcccctgtccatgggattatctaggcaagaatactggagtttgattcatccctctgggagtagacatctgatcacaggccctttctgccctgcgccagaggagatgagacctgtgtgtcgtggatgcttggtcttaggtgccctgtgt

SEQ ID NO: 7784 - DNA, 201 bp, Bos taurus
agtcacactttgctccatgagatgcattaatttttcacatggtacttttacagctttacggtaagtccctgacactgtgttggcctggatggaggggtttaccaaatgtgaatgatggatacgcaatgctgcataaggacacttagggaccaggtgcagaattagaaaatgataattaaagccaaaggtgaaaggttatat

SEQ ID NO: 7785 - DNA, 201 bp, Bos taurus
cccaagggtgttctgaggtttaattaattagtctttgtgcaacactgactggaaacatgcaaagatttaatttaagcagtatgtgaacttggtgtccaaatgagggagcatttaatgacttccaagaggatgggcacccaaaacaaaacaccaaataacctgctacaaagcctgtactggtattgtagtcagattttatat

SEQ ID NO: 7786 - DNA, 201 bp, Bos taurus
atcctagggcaagagtcctttctcccaaagtaccgtggagagaatcaggctggttatacccaccccacagtcatgaggccaggagtaaaggcacaaatgatcccatacctaaactacttgttataatttgaatttctgcaaaccacctcagacctctttgttcgaaaacattttgcagaattgtcctcaggggcagctgtg

SEQ ID NO: 7787 - DNA, 201 bp, Bos taurus
ctctagagcccatattctattattttactctcctgctttaaactgaatctacttggattttaatcctttattaaaatggaggccttgaaaacttttatgcgggccagcgagtggcaatggtgtattaggtggctcactaaggtcttgagaacaccgagtccctggttagcaacccagagcaaaaaaaaaaatgtattttca

SEQ ID NO: 7788 - DNA, 201 bp, Bos taurus
ccctctttttgatgtgcaaaatagttacacagttgaggatgcggtttacattcactcaaagattaaagcccgcattcatttatggtgtctccaagtgtgtgttggtaatgaaatttagtacttaaaaattttacactgcagctagtcctaacacaattactatcggactatgtttataaccctgccataccatttatgaat

SEQ ID NO: 7789 - DNA, 201 bp, Bos taurus
cgttcatctatattgtagtctagagaaacgattattaaaagtgagcctagaggaaaggacccattgctatagagggtctatagcaatgaattaggtgagacggcttaaatgtgagccttggtagctacagtgggacaaagaaggatggcacagatgctttggcgctggatctgttgagtccttggcactgttgagatgcaa

SEQ ID NO: 7790 - DNA, 201 bp, Bos taurus
gtggcataattagattgcatgttgaaaggttcactctgactatagcatgaagaactgactagagtagcatataccagcggtgcagaggccaatttagagtttcttgagataaaccatagtgtttattggcatgttagataccaaaataaatcaaaatcccctgtggcccccctatttagccatcctcatctctaattcccc

SEQ ID NO: 7791 - DNA, 201 bp, Bos taurus
ccatcaccagactccatccatttctggggccacacaggcccatatgaccaaaagcaaacctctgaattgatttctctacctgtaaaatggagctaaagctgtcatcccacgtttttctcatgttggtggctaacacatccatgctttttgaaaagacttagtctttttaaaaaaaaatactcaaaataaaaagcaattttg

SEQ ID NO: 7792 - DNA, 201 bp, Bos taurus
tggagctttcttctgctgtattctcaggctggtggttcggttggtgagactgttggttacgaggtcatttctgactcctgcacttccattcaacactattcaggaaaagctgaagttgcacttccattgacgtgggatgtgtatgtgggtttgtgggggcggaggagaaagatgaagagagagatatggacatggggctct

SEQ ID NO: 7793 - DNA, 201 bp, Bos taurus
tcacctaatggaaagtttggcttttatttaaattcctttatcttggactgtttaggttctggacttataaggtataagcaggtatgtattttggggcctacagtaattctggctgtttgatgtgttctttgatcatctttgatttatagaaatcccaagtctttgtgcttgtttcttgatgtacctattaataaatcagat

SEQ ID NO: 7794 - DNA, 201 bp, Bos taurus
ttggccttttgactaagagcaaatgcatttctcccatcattctgacactgcagacctttcttttttcactcaagttttttttcctctgcatatgaacttgctcaggcctcctctgtcttggtacttcgcaccctccggagatagcattctgtctattcttctgtgcagtactactcccctccccttcctgcgtctgtgagt

SEQ ID NO: 7795 - DNA, 201 bp, Bos taurus
attacacacataagtgatatcatacagtattagtctttttctgacttaatttcactttgcaaaattaccttccaagtccatttgtggttgcaaatggcaaaatttccttcatttttatgactgagtagtattccattatacttcacaccttattttcttcacctgtctgttgatggacacttaatttgcctctgtatcttg

SEQ ID NO: 7796 - DNA, 201 bp, Bos taurus
ttctggcctggagaatccttgcaaagagttggacaagactgaatgactttcactttcaatgaaagagaaaaagatgtagtttgtttaaaagtatgttctattgtcctttaatgttgaggagactaatgctcaagaggaatatgagttatcactgatatttgtagctgggtaaagaatttctaaaataagttaactcatttc

SEQ ID NO: 7797 - DNA, 201 bp, Bos taurus
ggtacctgatggttttgttccactccacggccgccgtgcaggtgcagctgtcccagaccaacctgaaaatgaacaaaaaggaggcaaggtttgtaaatcatagcacctgcatctggcctgtaattaaattagctcaacaagaaacatttggtcacaaaaagggttctgtccataacactgaatattaaacacttttcttaa

SEQ ID NO: 7798 - DNA, 201 bp, Bos taurus
tccaactcctggagtgggctcgctgggtgccaccacctgcttccagccaggccagctaaagtcatgcctttagggtctgaacggaccccactaaatgcccagaggtgaatatgttaaaatggaggccaaaacgttaaaagtttgcattgctctcttctccaagaggagagggggtggggctgaaatcggatcccagggcta

SEQ ID NO: 7799 - DNA, 201 bp, Bos taurus
cttgggagcattactgggcccttctgagctgcctgacaagctcctaggccccagagcaggcctgtaagctgagaagcagagggacatctccttgagggggcagctgggaacctgttggtctgcatgtccttggaggtggctggtgaactcagaaattggccatggggccacgggcagggacaccaacagcatctattacag

SEQ ID NO: 7800 - DNA, 201 bp, Bos taurus
aaaaaagcttcagatctactggcctgtgttatgggagttgccacaatttcataccacaagcctcttatttctcacagcaggcttttctgtatcccaagtacttctctctaggcccagcaaaggatggaagatcatccagggtcataggtaaaatctctcagtgaacatcatttcagggtcttagtagccatgcgtggaatc

SEQ ID NO: 7801 - DNA, 201 bp, Bos taurus
acatttttagcacaatgaggaggaagtctgtttgcatgaagagaaaataaagactccagggagaagcagagatgagagagccagccacacttgagtgcctgctctgcttgtcccggccacacccttgcctgtgcaaggcacaggagcaagtattttttgtttgctttgcttaagtcagtttgagtggggacttctgaaaaa

SEQ ID NO: 7802 - DNA, 201 bp, Bos taurus
tcttttcacatggaatgcctgggaataacccataacatattaatttttctgattacatagtcaaaaccaaaatgtcccttggcctggcacatggtaatctatgatcaactgaaacttgcaacgtaaactttccttttgagcttctgtgcccctatgttctttgaagtgttgttcagagagaagcagtatcagtgtcctaag

SEQ ID NO: 7803 - DNA, 201 bp, Bos taurus
ttagagcttagacagatacttcaaactcagcaaacggaccccattcttctgatcgccatcctcactgccgtgcctcctggctctctggactgtctcttatcaccctggctttcatttactattcctccaggggttcctgttttgtggtgtaagtaaacactaaccagccagctatctgagcatctctcttcatttttcctt

SEQ ID NO: 7804 - DNA, 201 bp, Bos taurus
gtcttgcccaattgtcttatcaaaaagagaagggaatgcattttgtattgagttcatggcagttcctgcgaatcatctcattcttcttctgtttgtacacaagtattctctttagccattaggatgggtatgcaagtgacattcatgaattttgtttctaggtaatttctagaatcttcattctaaattgttcttttcctt

SEQ ID NO: 7805 - DNA, 201 bp, Bos taurus
aaacttgtagggactataaaatccagtgatgcccaatccgagtatagaaacctccatcatgttatatcagaaacccactgaaggaacaagctgttcaaaaagagcccagtgtgttaaattccaaatccttgggcatagtttgaaagctggaaccaagtttaaacgcagagttttgtgtattatcttgaaatttgtagaccc

SEQ ID NO: 7806 - DNA, 201 bp, Bos taurus
agtgcttgagtgattatgcagagaaaataagctggagatggacaaaacgtgtttcttttaggaaatcaatggtcgacttttgttagcctgaggaagttcaaacttgggcctaaaggttggaagacagacaaatagttctctcagattttgtgggttaaactagcaaatggaagttcaactgttagttatggttggtgtatg

SEQ ID NO: 7807 - DNA, 201 bp, Bos taurus
caaatggattgctggcctgtgagtagtcaggaacagtctaaacaggcttttacacagttttctaggctgtatttgcattttcattaagttggcactttgacctataccttactgataatgtaccagcgtcagatactttgttagtccttcacctgagctatgtactaatcataagactaaatggttgagatttagaaattg

SEQ ID NO: 7808 - DNA, 201 bp, Bos taurus
ctagattaggaattgaagcgtgtcaacataatttgacaaagtctgaagaaagaaacatcatccaagaccaagagatcttttattgtaaggggacacagtgaattgatcccttaaagaagatatgaaactagttaaaccatcaaaatgtaaaagttaagagaaagcacaaatagcattactcaagctgagttaggaattaag

SEQ ID NO: 7809 - DNA, 201 bp, Bos taurus
aatgagactcagtctatcatgttcaagagcttgaatcatgtatacagagaaatattaagagtaggatataaatgtctaggatagagtgtatataacgtaaaagctatagaaacttaaacacaacaaaggaaatgtcactacaaatcaaaaaattctctgggaaaggtgaagaatattcaattcccttaaattgctatttga

SEQ ID NO: 7810 - DNA, 201 bp, Bos taurus
gaatcatacaaataggaccccaaatttttaacacatttgtactttaacaaattcaccaacacttgataactcttacttgaacttgatgctagatgaatgatatgcaaatagtaagtgcattatgggttttccagaaacttctaacttatcaggaaagcaggaaaacaaactatgaccccatggacagtccatggttctcca

SEQ ID NO: 7811 - DNA, 201 bp, Bos taurus
ggatcccaaaagcacacgagcaggagctaccagactttcttaaaggcttaggcctggaactggaataacttcacttctgctgtattctgttgcccaaagtgagttgcaggcccagtccagattcagtgtgcaaggggactctacaagaatatgaatttggggaagaaatgtgcacagaggtcacctttggagaactaatta

SEQ ID NO: 7812 - DNA, 201 bp, Bos taurus
aattaaaaaatattttagaaaccttaacattgaacatttactaagtataataaacggactatgataaaaaccttaaatttggcaacactgtttttacccacagtttggtatgtctattgattttttgtttttgaaaacttgaataccatgcatgattatacaaaagaaggggttatttaatttaaaagatttgctcatcct

SEQ ID NO: 7813 - DNA, 201 bp, Bos taurus
gataaatatatttcatttggatttcaatcagattatggtaatatacaaactgagatgccttccaattcaccagggcaccactatactaaacctggcctttattcaatgatcaaaacactgcatactcttgaggtctccatttttccttatctaaggagaaaggctagtgattatagatttcctatctttggaggcctgggc

SEQ ID NO: 7814 - DNA, 201 bp, Bos taurus
agagctatactaaacacaatatatttcccaattaaaagggtcatttctctaaaaacattgaaaatataataaaatctggagataaaacagaatggcattcattgtactctgctgcgggatctaggggagacgcggagctcacctgtgctatgccacacagctcttcaccaggtggccttctacagcccctctgagtggctt

SEQ ID NO: 7815 - DNA, 201 bp, Bos taurus
atgacatctaatcattttggccatatgttattggttagaaccacttcacagatctcacccatattccacagaaagataataaaaccagaaatggtactggcggtggggatcatgtgtggcctagagttgatttaccacgtaaagagaatagaaggaaataaaagaaatggctgacataataactattctaaacaagccatc

SEQ ID NO: 7816 - DNA, 201 bp, Bos taurus
caaaaaaaacatcaactaaccacactacaggacagaatgaaaaagctactgatagatgtaccttttcatctttaaaatatgctaaggcagtgcagctatgtgacctgtgaattctgaagtgaagccaggaatgtaggctgggaaggttctacagaggtatgtgagagaacttacatacatgtacggatagaccctgatgta

SEQ ID NO: 7817 - DNA, 201 bp, Bos taurus
aatcaccaatcttcaattctccagggagcaatgtgaaacttgaagcttctgtagcaagtggtctctctcccttttgaagattgctaaaggaagctgaagagtgggatgatggtcctcggaaaatagtggccctcagtatttgtatgtagaaggaatttggttgaacccaagttcaaagggagacttggagaataaaaattc

SEQ ID NO: 7818 - DNA, 201 bp, Bos taurus
aggaaatggcagcaacccactccagtattgcctgggaaatcccatggacagaggatactggtgggctacagtccatggggtcacaaaagagtcagatacggcatagcaactaaacagcaacaccctgtgcttagtgattctagagaaagagatactactccctggtatgagtagcaggtattaagactatcatttttattg

SEQ ID NO: 7819 - DNA, 201 bp, Bos taurus
gtagagcatagagcatcttatcacatgggatacaaaagagttgcatgggaagagtaggtgtttcttcatccttgggtcccaatgtctgtgggcatcccctcccccacaaaactgaagatagcaaattgattttcacagacaaaaacacacgagaaactggtgaaaaaggaaaccagatggagagggagaaggagggggtgg

SEQ ID NO: 7820 - DNA, 201 bp, Bos taurus
atttgatacagataagtcaaattacctcacttaaactattgttcatgtttaccttactaactcaaaatttttcaataatttcacattaacaaaagaataacgcctaattttttaggcagagaatcaaagccttaaatatttttttttcttggaatctataattttttttccagctggccttaaaattgagtgtgtagatac

SEQ ID NO: 7821 - DNA, 201 bp, Bos taurus
gactcactgtttttcaagcaattgtctttccagggcagtacatccagactggacactctgatgtggggctctgactccttgctccttgggtagagcatccatggcagttttaatccacctctttgtgggtgaccaacccggggtggtgtgggccctgactttatcacatctctgcccctcctactcatcttgttgtggctc

SEQ ID NO: 7822 - DNA, 201 bp, Bos taurus
atgttagtaaaagaagtaagagtatattatcttcctaatgtgaattaaagataagcaacaatttaaaaaaattaagaaataccaaatacttggatatcatatagaatacttttattgatacattgccaaggacttaaacacatacaaaatgaaaatcataggatgatttgaacttaacaagacttgaaaaaatggatgtat

SEQ ID NO: 7823 - DNA, 201 bp, Bos taurus
gataaaatgataattatataaagaactaaatgatgagaatgaacaactgataggaaaattggtgggcagagttttctaggtggagtgaatagcatttgtctggggggaaggaatgcttgacatattttggacaatgtgggctcagactactgaagcagtgagagagtcagctgacagatgattcaggtgaggtgcttggat

SEQ ID NO: 7824 - DNA, 201 bp, Bos taurus
gcagaaagcacagaggattacgtggggaactacagtgaaatgtaaagattatcatgataaaaatgtcactggagcgtgggctgggatgggggttcttaagacagtgataaggttagcaaagtctcccattgtgagaagacttactcttaaagttaaagaacatgtaggatgaatctaggaaaataaaggagggacatgtgt

SEQ ID NO: 7825 - DNA, 201 bp, Bos taurus
aagcgatggtttttctagtaatcatgtatggatgtgatagctggactataaagaaggccaagggccaaagaattgaaagggccaaaaaatttgaattttgtttctagagaagactcttgggagtcccttggatggaaatcaacccttagtattcattggaaggactgatgctgaagctctaatattttggccacctgatat

SEQ ID NO: 7826 - DNA, 201 bp, Bos taurus
taacaaaggaaataccattataacaactacagaaatgaaagaagaatacataaatgttatgaacaactttcttctaattaatccaatgattctggtgaaattggcacttttaaagcataaatggccaaaactaactcaagacaagcgtctgcctacactgcgggagacccggattcgatccctgggtcaggaaaatctcct

SEQ ID NO: 7827 - DNA, 201 bp, Bos taurus
cctaagcatggaaatttcaggattatgggagaattgattatgaatcattgacatctaagacattggatttcatggagaattataaaaagatgagcaaaaaggggaaaaagaaattgaaaaataaaatttatgtttttctaggtaatatatgttaacacaatccttgtctcttttcactgcaataattacaagttcaaaaaa

SEQ ID NO: 7828 - DNA, 201 bp, Bos taurus
tactgttataacaatacttactctcctattacagaaggaaaacccatgcttcaaataagactttcccttggtgcttataacataaactttactgtacctgcggccatattaaaaaaacagtggagacagaagagaatagaccaggaaaacaccaggagcaaaataaaaagatgatgtcctccataaggcaaagcaatggga

SEQ ID NO: 7829 - DNA, 201 bp, Bos taurus
gtaatggcaggaacttttttctgcctttatacctgaaggtgcaaaggaggacacattgttatcagagcctgtagagagctggggcatgtcaaaggggccatgctataggagctattctcaggggtgcaacttccagaattgcaagtaggaaagcaaggaggggagaggaaggaactacaccacatcttcacatctccttcc

SEQ ID NO: 7830 - DNA, 201 bp, Bos taurus
ctaagttaacgttgatagttagcatggcttgacatgagaattcagctaactgaatgtaagtgcctcctgacagtcacctgggcccgcttgggggatgtgcggctgagctgtttccgtaggtgagagggcagttctctgagcacgtagtgtgcacagttatgttcttagggccttttggaagccaactggcttctccatttc

SEQ ID NO: 7831 - DNA, 201 bp, Bos taurus
tgtatggtagaagccatcacaatattgtaaagtatttatcctccacttaaaagttaaaaaaaaaaaaagtaactgatttcaatgatatcactttctttagggtgacgaggatgggtttgactgaagaactggccaaagttgttgatgccaaagactctttcccagaattataacaaaggttaagtattcagaaacagagag

SEQ ID NO: 7832 - DNA, 201 bp, Bos taurus
aagaatgaggccgagaagataccaaatctcccaacatcttgaacttcgatctagacgtcaaaactgtgacaaaatacatcagttgttcaaaccacccaatctgcaggcctagaaaattaatactctgtgtctataccccccaaaataccatcaccactccatttgctacctgactgaaatgaaagagaggaaggaaatggc

SEQ ID NO: 7833 - DNA, 201 bp, Bos taurus
acttatgtaatgatgaagaatttttgatttgaataaggccgctgggactatatacatgtgccgtgcgtacatgatttgattagaaattctctgtgtagttaggactgagaggccgagaagtgaagacataatagtatacctcagtctctgaccagggcaatgaaaccatgggcagatcacacacagaccttcaattccctc

SEQ ID NO: 7834 - DNA, 201 bp, Bos taurus
acacaattctgaaattcctattcagagcccattacggccttctgttatattgttccttatcctgaacatccagccaaacatcagtcattgatcatgtcctaatgtaaatccaggcctgggtgagtatctctgtgtagaacaaatgggcagtgaaacattctgcttaatattctgccagctggaaggatctttcccttgtcc

SEQ ID NO: 7835 - DNA, 201 bp, Bos taurus
caggaaaaaaaagaaacaaagacaaaaaaggcaagaggattccaactgaaatttgacaacaatgactatatgaagtattccagcttcttgaattggttaatgaggaaatgcactgggaaaaatgtttcagaagcaaattgattaggcatctcacagaataaacgatgtgactgttggaaatttaaaggtcaagagtaaact

SEQ ID NO: 7836 - DNA, 201 bp, Bos taurus
gaaagacagccgtgagaagcccaaggcagagaccagagtcagacttccataaactgaggaacatcaaggattgccatggccaccacaagcaggaagagaatgggaaggagtctgtctaccctagagatgcgagagggagccatgcctgactgacacatgggtttcagatttctggcctccagaaatgggaaagaataaact

SEQ ID NO: 7837 - DNA, 201 bp, Bos taurus
taaacatcaaaattcctcatgttccagaaaaattgtctctattataaagttatggattttatagctaacttcactaggctcctgtaaaattttattttattacaggtaatgtgaaatgagagtgcatcctaccaccactaaaagagatcagtgctacagctctgaggaggagagttagatctcagctgtcagcctgtggct

SEQ ID NO: 7838 - DNA, 201 bp, Bos taurus
tgcttagaaaatgggaagaaattagtctttcctgctgcttctgcccagaggggggggatgcggggattaggaaagaaaatgggaagaccacagtggccctctcagcctcttctgccgtcactgctgttcagcgaaggtgtgactcttagcaaagtttcagaatcatcacaggttacaaagaagacaccactaagaattcac

SEQ ID NO: 7839 - DNA, 201 bp, Bos taurus
gctcgtgagtcagtgtgtccttccttttattatttcccccattataaagcaaaaaggaatccccctgtgctctataagaaggcttcatattgagagctgtgtataacagccagttttctgttttaatcctctaaaaatacctgctggtataaaacaaatgtaggttgttacaaagccgctcactgtgttgttaccttgcca

SEQ ID NO: 7840 - DNA, 201 bp, Bos taurus
caccttgatgggcactttgctgtgcttacaggactctaagaagttgtacacaggggtgtcaccgcagctagtgaccgaggggcccttgcccccatccactgctttgcccgtagagtctttgatgtagtaggtaccatctctgaactccagccggaagacatcctagctgaagcagttggtggccagggtacccgtgacctt

SEQ ID NO: 7841 - DNA, 201 bp, Bos taurus
atgcagagtcttggtttcccatcaaactttatgccatttcccaatcttccatttcactcatatccaatctattatcatattttgtgggtgtcttcttaacgtctcctgaatctgtacctttctccattttcataatacatttcctaattctggtgtgcgttacatttccttgaaccattgccagagcctctcttctgtatt

SEQ ID NO: 7842 - DNA, 201 bp, Bos taurus
gtgatagtcattttgacaggtgtgaggagatatctcattgtggttctgatttgcatttccctgataattagcaattctattccattcacttttgaggggcggcacaaatatgttccttatacaccttttgaatttttcatatttttaaatctgcctgcaatgcaggagaccctggttcgatcctcggtctgaaagttcccc

SEQ ID NO: 7843 - DNA, 201 bp, Bos taurus
cagtgcttagagctttgtgacctttcagttactcatttcacttcctgaacaatggttgggtattccatacaaaataaggccaatgttagttcttaaattaatgtattattttacacagttcagttcacttcagtcgctcagtcgtgtccgactctttgtgaccccatgaatcacaccacgccaggcctccctgtctatcac

SEQ ID NO: 7844 - DNA, 201 bp, Bos taurus
actattctttattttccattaaggaacacttgatcccttagactgtccagtgcataatttagctacagatgccatatatttagcaaggctttcttattcacttgaaattagtactcaatactagggcaaagttcactgaagctggagtcctcttagattacccagaagttatcataaggatccttatgtttagccttcctt

SEQ ID NO: 7845 - DNA, 201 bp, Bos taurus
atgtaaagagagtatataaaataatttcttttccgttggcagggaactcattgacaaaagtttaaacttgcctccagttaactctccttagctccgacatcttaataaacctttccactcatctgtaaaaattaataataagaatagtagttattgtaataaaaggtttacttcccttacaaactcagcagacctcagggc

SEQ ID NO: 7846 - DNA, 201 bp, Bos taurus
aagagtcagaacaaaagaaggatccttgactgcaatcagcatgtttcacaataggtataaacaactaaagcaggaattttgaaaatgaataaagttgggggaaaaagtcttggtaagaacattagagaacaaaacattagaaaacattagaataacaaaaatgtgcatgaagattttacagttctgagaataccatgttgg

SEQ ID NO: 7847 - DNA, 201 bp, Bos taurus
tcattttaacaaaagaatcctgaaattgaagcttttatgtaaaacagtgccttgctaattttgctactctgtctggcctgccttaacaagataccacagactaggtggcttaaaaaacagaaatgtattatttcacagatttggaggttacaaggcccaaatcaagatgttaatagggcttattccttccaagggctctga

SEQ ID NO: 7848 - DNA, 201 bp, Bos taurus
atcatatttgtcttgcttttttccacatctagtatattcactaagacagagagttgttttattttttaattagtgaacttgtggttacatctgtgaacctctatttaaagacttatgtgatgttactagaggtttatagagactacattagcaaagcaatgctcaaaagctttcaaggtaggcttcagcagtaggtgatag

SEQ ID NO: 7849 - DNA, 201 bp, Bos taurus
ataaaaccttggtatcttccattttccaagacatataaaagaaataacacattcctttaaatgtaataactttacctaatggctaaactcttaaattaacagtaatggtaattaggcactgtgtttaaaggaaagcttcctgaagcacgtgctcacccctggtgaccatcgccttctaagtgtcacatagaatggagcaat

SEQ ID NO: 7850 - DNA, 201 bp, Bos taurus
ccatcaccaactcctgaagtttactcaaactcatgtccattgagttagagatatgcattaaatacttcattacgatctacatattcagtaggtgggtttctcaggtggccaagtggtaaagaatccacttgcaatgcaggagactcaagagacacaggcttgatccctgggtcaggaagattcccctggagaagaaaatgg

SEQ ID NO: 7851 - DNA, 201 bp, Bos taurus
gagttttatggctttgggctttaaatttaggccttcaatccattttgagtttatttttgtgtctggtgggaggaaagcttttagtctcattcttttacacgtagtggcccagttttcccagcagcacttattaaagaggctgacttttctcattgtatcttcttgccgcctttgtcaaaggtcaattgcccttaagtgtgt

SEQ ID NO: 7852 - DNA, 201 bp, Bos taurus
atatattggattacataaatacattaaaattcatttcatttgtttccttttgggttttattgtggctataataaaactaaaaattacatagtctaccctgtaacccatgaagtgccccatgccaggcttctctgtccttcactatctcctggagtttgctcagattcatgtccactgagtcagtgatgccatccaaccatt

SEQ ID NO: 7853 - DNA, 201 bp, Bos taurus
ttagtgccgtaccacccgaggtctaaggccactctcagagtgactgcagtcttacagacggcactgagggcatacacccagcccaggtccccagtacctgcggccagacctctgccagggactgagggctgtggtggttactgggtaaaatcagggaagccacaacctgagaatcggttctcgagagctgagaaaaaggta

SEQ ID NO: 7854 - DNA, 201 bp, Bos taurus
atcattcaacgggcctgctcgccttctaccgcaagtcaagagagggcagagaagatgggcagagcccgccgtgtgggctcacaggagttggccaggcatcggcaagtgttttcctttctgctaaagttgtgggactggctgtttgctgccttccagccgacgctgaggggatgctgcctcgtcacaggccagttaactgct

SEQ ID NO: 7855 - DNA, 201 bp, Bos taurus
acatttcaggggagacctcagcttcccacagggtctgcctctgcacacgcctcagcttttatttcagctcacctctctgcagtacccactgcctggcatcactcactccgtttctcaccagcccagcttgctccggctccttcctggtgcactaggttctgaccacaccttctctccctctacatgttgggcatcccaagg

SEQ ID NO: 7856 - DNA, 201 bp, Bos taurus
tattgctcgtgaataggaacttcccatcattcaaggctgtgtagggagcttgtctaatccttctatggctctctcagctcctggatctctgttaaatttgcagttgatccaggcccctaactggatttgcaacttcaatctaaacagagctatgtgtattctctatttgttttctggttttcactatttttttttcttttt

SEQ ID NO: 7857 - DNA, 201 bp, Bos taurus
aaagaagcgcacagaggcaccaggaaaggccaggtagacaacacccaacctaacaagcagaggtgctcagatttccccggcaaagtgctaggagggcctggaagcagggtggaggctgcatctggaggtacagtgaccctgtgtcactgaagacagcagacaaggttggacactgcccctgcccaccatggggaggctgct

SEQ ID NO: 7858 - DNA, 201 bp, Bos taurus
tgattagacgccctctaccccggcccacggtcagctgtccgcagtccccgaaacaccctcacaattcacactttggtcggcagaggattaaaccatcagggcaggccttccaccctgccacagggccagtgagcgcagaggccagcagtccagagtgactggggaaagaccctgaggactgggagggcgtgcagtggggtg

SEQ ID NO: 7859 - DNA, 201 bp, Bos taurus
gagtggcctcttccccacaaggtcagcaagcttctgagcctcgctagtcaggttcccgcaggatcttgtctaaaaggccaccctagccccaggtatttcacgttcccaccttttccatccaagggtctccactgggtggagctctctagagaaaggtgccattgctcatggacaaggagtgcagcagataaagctggggcc

SEQ ID NO: 7860 - DNA, 201 bp, Bos taurus
ggcatcggtcagaaccctggagtcatgtttctctcttctttgttgtccgaagtgttaattccaagccataagatgtgccaagatcctgttccctccttggggttcccacgtattagataattgccggtctgtcttccccctcaatgcctttcccttcccaccccacccccagagcctctcttaaataaaccagaccggccc

SEQ ID NO: 7861 - DNA, 201 bp, Bos taurus
ataatgctgtaaaggccatgcttgaatatacagcagtattttatttatctgatagccatgatcctaacaatgggtgttcaacaatggctttgtaccaggaatggtggcacacaccagctggttccaggctgctccctgagaaaggtaacagcagcagagaggggtccttgagagcccctttgaaaaacataattcctcgtg

SEQ ID NO: 7862 - DNA, 201 bp, Bos taurus
aatcttttttcttaagttgtttagaaaactttataaaattacattctagaaaggatattaggagaatttcacttcatacaaggaagaaggaacagatgacccccaaatctatttctatcagtctatgcttttccattagactgtaagatcttcaaagcctgtgtataaattcaatatacgtatccaagagatctgcttatt

SEQ ID NO: 7863 - DNA, 201 bp, Bos taurus
actccctcatggggatgcctgcccctcatggccagcagaaaccttccacaaaaatgtgaacctgctggcatgtgctcccctcactaaaaccacatgcacgatggcctcccctgcctctctggaggcactctttcctctttctcaagtgctgtctcccgggctgcaatctcattttgccccagagaaaacttaactcataac

SEQ ID NO: 7864 - DNA, 201 bp, Bos taurus
ggggagggggttgactcagtcaggacacagggcccgtgtccggctaccacatctgacctctcacgacttcctttctcacagccctaagccccagccccatcgggccagagaagcctcagatctgttctcaggggcaggaggctttgctttatctgaacagattggcttccaagcagattgtctgcctctcggtcctgccca

SEQ ID NO: 7865 - DNA, 201 bp, Bos taurus
cagtcatgcagcgttccccacttaaaagggcctcgctcttggtttaatgctctgctgttgtcattttgaggcttttaatcatttttttgtttttttaacaggagactgcattttcacttgacactgggctttgtgccttatgcagctggtcctggtggataaagtggggctctgtggcttactaaccttgagatattggac

SEQ ID NO: 7866 - DNA, 201 bp, Bos taurus
gtaaatgtttagctgaggaatggatgactggatgactaaaatccagctcattactatggccgctacgctccagttttatgtgaggggccaaaatggcagtgggctgattgattgggtcgtgtcacctgctgcctgaaacagtcagggctctcacgataaaatccaacatcaggccctggtggggtttcgccgctacctgtc

SEQ ID NO: 7867 - DNA, 201 bp, Bos taurus
acgagctacagacaccctaggctgggcagacgtccccgaacctcccgagaagaagcacggggaaaccaagggaaatcgtctgaaccggccgtgggtccgcgctgcgagggaagaagcacccgggctccggaggatgggtgcgcaaagccaggagaacgttccgggggctcgcggagcatcgacaggacccacggctcctgc

SEQ ID NO: 7868 - DNA, 201 bp, Bos taurus
cttgctattctttggaactctgcattcagatgcttctatctttccttttttcctttgcttttcactcctcttcttttcacagctatttgtaaggccttagggtttcaggaggatgcaaatgtgtggattcagcctgtggtcctcacccaggaggtgtcgctaactctgccatctgtctgctctgcctgacccaggccgtgc

SEQ ID NO: 7869 - DNA, 201 bp, Bos taurus
tgcatgacagagtaaatagtactgtagactggtgcaccagtgaaactgatagaaattgttttttaaaaattaagtctctggaaatggtttcaagaagataaaacaaaggaagaaacatttacctaagaaaatctgctaaaattcagtaagaacagtgagagtttgctgtatctgaactgagatgcactcttgtcctccctg

SEQ ID NO: 7870 - DNA, 201 bp, Bos taurus
tgtgcccactccttcaaaatggagtctagacttgaggcctctgtctgtcccagtggctgtcccagaaagcaagggggcttatctcctctgcactggaccccagaactggttcggccagattgtggctcagcctgctcgctctccagggctaggtcctcccatgcagactgactcctttcaaatccctcccaggggtgcagg

SEQ ID NO: 7871 - DNA, 201 bp, Bos taurus
ccctgcaggcctgtgatatccaggggcaggtaattaaaagacgaaggatgaaacatatcaaggagaaacagatgcaagagagcagatgttgatcgaaacgatatctcattttacactttgcttttgttttgggttaagtttaaatggcctgctgctgccgctgctgctaagtcacttcagtcgtgtccaactctgtgtgac

SEQ ID NO: 7872 - DNA, 201 bp, Bos taurus
ttcagctacaccagcgccctttcgtcctggtgttgactgacacacgcctggaaggactcaagcaaaccacctgtgctttccctgtgaagggaatgttcacgaacacgtggccttcctgggttgtgagcgcaagtccgcgtcagcacgcgttcatcgtcagggaggagaaagcaggcagtgcccagtgaccctggagccaca

SEQ ID NO: 7873 - DNA, 201 bp, Bos taurus
ccagtgggtctttaagcgctgcaacttgatcctcagtgaccgtgacactgcacaggcttagcttgtcacccgcactgccatctcaacttcccttgtggctttttggccactgttccccatgttcttagaaaatgaaacaaacccggtttctttgttgaaaatggcagcagactaaggagaaaatagaaatgaaaagtcaat

SEQ ID NO: 7874 - DNA, 201 bp, Bos taurus
gtcttcctcttcacttatccccttctctgtcagcctgaaagtagacataagagaagccgaacacttttctgagtcacaagttggaaggcccactgaaggacggcagagcaccgagagagaaggagcctggatccctgatgaccaaggagccacctcaccagccccaggtcaccttctggccttttaagtgagagaaacaaa

SEQ ID NO: 7875 - DNA, 201 bp, Bos taurus
gagagcagcgccctcagggggcaggggacagggccggctcagtcctactcaatcaacaccccccctcccctgcaccgcctcccctttgtgtctttttacacgacagtcaatagaggccgggcctcgagggtattatcagagccccgatcgcgacctctaacattataatccacgaggctgcggggagcatcagtacatcct

SEQ ID NO: 7876 - DNA, 201 bp, Bos taurus
ccttcttttagagcctggcacaaggcttggctttcttttctgatcggtggaactgccacgttggctgaaaaacaggacggaaagaaccttccttgttctgtgggccgctctgtggggctgactgagagcagagcaggaacaagacgctgcgcctctcatcagctgcaggaagccgcagagtccaggccagcggccagcttc

SEQ ID NO: 7877 - DNA, 201 bp, Bos taurus
tgagcatgcagttccctcaagccccagttaacagacttccggggatggttttctttgggacatgagacactatgaaagcgaaatggccttgaggcgtgaacgtgatccagaagtgctgcaaagaagctgggatgcggtgttgtgaagggacgcagcccagcacggcaggtctcttctgaacaagccatcggggcccagcgc

SEQ ID NO: 7878 - DNA, 201 bp, Bos taurus
aggtccccgtccacggccctgcggtcgtcagagcactgtaagggacacagaggacaacagctgttgcctccttaaggacactcaaggacggagcggggacgcggtccaggcttggggccggctgagaaggctcgggggtggggggtgggggtcggatgtcactttgtcagaactacctgtgtgggctgcggctgtgatcag

SEQ ID NO: 7879 - DNA, 201 bp, Bos taurus
ccgttaagtaaaacagaagaaatgttaagttccaggccagaagtctgaaatcaaggatctgacagaaccatccctcaacaaggctccagggaataacatccttccttgtttctcccaggcctggtggctcccagcaatccttggtgtcctgggcttgtggccgcatcactcccatttctgcctccaacatcacagagctct

SEQ ID NO: 7880 - DNA, 201 bp, Bos taurus
tttaggcatagctacgtgaaataaacttcatgttttatggcaagacaagaacaatttaaacataaattcttccctgccctttggcccccctctccccctcggtgccttgcattgcgtctgctccagccctccccaaccatgaagaagggataccctctcaaccacaaagagcagtattctcccggccccaccaaggtaact

SEQ ID NO: 7881 - DNA, 201 bp, Bos taurus
gggctttgtttttatttggaaagctcaggtggggtttggtctaagtgctttgtaaactataaatcactatctgagtagttttactcagagtcttcgactgtctttatcagtttgagtgtttagagccagggggcccaattggtacattacgtggttcttattctgggaaaagctccaatgttttctgaacattttgttcag

SEQ ID NO: 7882 - DNA, 201 bp, Bos taurus
gatggggatatgcctccctgtgtttccagcctggagccagaccgtctgggtcaagcccaaactctatcagctactgcgatctgacccacgtgacttggccgtgctgtgccttggtctcctcatctgtaaaatgggggcggtaacagtagctgtgtcacaggctggggaggaccaccgtcgagacaggcagagtgccgcggg

SEQ ID NO: 7883 - DNA, 201 bp, Bos taurus
gagcctccagttctgcagcaaccctcaggccatatgagtttgagacaatgtcccatagtaaggtgctcttcattatacataagcgaactaggctttaggaaaggccatgtgaaggtagtacctgcagaggactcccgtccaaaccttaaagctttaatgtacatcagacctaacaacaaaaggaagctccatgacttcgaa

SEQ ID NO: 7884 - DNA, 201 bp, Bos taurus
ccacctgggatgtcctgccgttggttctttttcacaagaatcacttaatactggagagacttagattgaaacccaaccttagaaaactaccttgcgagtttcacagtgcatgtgattcaagtcccacgaggggcagtcactggtctcatagcaggcttggtttgctgggaccagagcagagaggaggcagagagaaggctg

SEQ ID NO: 7885 - DNA, 201 bp, Bos taurus
ctggacccaccctcacctgaccaaatgcaattcacctttcaaagcttgattaaaatgtcactttcttagggggacttccgctgagcacccgtccccgacaaatctaaaacaggcctcctattttctaggactcctctgttgttattcacagcacctgtcacaaattgtaattagttatttgacttctataaatgtgtttgt

SEQ ID NO: 7886 - DNA, 201 bp, Bos taurus
atattaaaaaggaaaagaagatgacaaatgcagaatcagccacagtctgtgttatagcagaaaaccccaataacagtggcctcatcgcatagaggtttgcgtttcctgcctcgtgagaagtccagtggtctgcgttttagccctgggagaatagtccacgaggccaccggtgtcccggcgccgtctttctgtcctgctcag

SEQ ID NO: 7887 - DNA, 201 bp, Bos taurus
gtgcaggccgctactgagaccagtgtagcccaggtaaataattgaaaaaggaaaactaggactccttccctttggccacgcctctgcctcagcgcatgtccggcatccgtgtttctgccccagatcctgctctgcttgtcctgctttgccttgtgactggtctctggctaatcctctgtggccgtgccgcagactgtgacc

SEQ ID NO: 7888 - DNA, 201 bp, Bos taurus
agccaggaggaacccacaccccagagcctccgcaccacagtgcaggctcttaaagaagggttcgattctcccggtgcctggcctcaccttaagcatgaaagacttaagaaacttgttcgttccttctggttcttgaagtgttacccccacgaagagcattctggttcttaaaggccagttaaggagcaaggagtttaaaca

SEQ ID NO: 7889 - DNA, 201 bp, Bos taurus
ttttgtttttctgttatttgtaagatcttgaggcttgactgaggtgcatgtggacctcagcatggttaagaaaataaaattcagcttcaggcctttaaaccgcagcaaggtgatggggagagtccgctcttgtccctgaagactggagcttaccgtgttcctctgaacggtcccagagaccactgtatttttaccagggct

SEQ ID NO: 7890 - DNA, 201 bp, Bos taurus
taggattgctgtgggcatcagataagagacagctgggaagctgcgcacagagcctggcacaccaacaagtgctcacgaagtagaagctgtcatcatcgccatcagcatgagtgtccccgctttatggttgaagaaacaaggtccgcaggcagagctggctgtcatcctataaacagcggagccaggtcccccaactcctga

SEQ ID NO: 7891 - DNA, 201 bp, Bos taurus
ctgtcttcatctcctcctttcccgcggcccatcacacctgctgttcccaggcgtgccgagaatgagggtgatgacagacaaaaggcttgctttaacactagccattttctgaaaactgtcttacagaaatgagataaccaggattaactgaatcaataaccttgtcaagagcaaatttctgatcaggaatttcagtctgag

SEQ ID NO: 7892 - DNA, 201 bp, Bos taurus
gggagttggtgatggaaagggaggcctggcgtgctgcgattcatggggttgcaaagagtcggacacgactgagcgactgatctgatctgatacccatacatgtgtctaagaaaggaagaaggggaaggtgccaggcagaaaaacagctttagacccactgcctaacaaaaccaggcaggaactagaagaaccacattatct

SEQ ID NO: 7893 - DNA, 201 bp, Bos taurus
actgagggccagagatgcgagtgaagtgacttctggaattcacacaggtagttcagagcagagccaagacttgaatgcaggtctcttgaccctaaacctcggtgctctgagtgtgaggcctgtggagatggaagcttccagaaaatgctggaggggagagtaagagggtaggatgcaggctgcctggagctacccaggtgg

SEQ ID NO: 7894 - DNA, 201 bp, Bos taurus
tatgcctcctttgaagaaagaatattcttcttaacgtgtgtatgtaggttataagagggactggaagatgccatttgaaataacatcaaagaggccagacgagtcagattacagaagcctgtgagaggcagattcagaaatattcttgaatttgaggctagaaggagcatttgtgggtgtgggggtgagtaagggagcaga

SEQ ID NO: 7895 - DNA, 201 bp, Bos taurus
ctggagagggatgagaaacccactggagctgacaggcgtgttaaacggtactgacgacggggcacacgtgcctgccgagagcagggctgcttttgcacacacctgaaatctttgcagtggccttgtcctgcccattcgacggatgagaaaactgactcagaagtagggaccccgtccccgcaaggttcttcggagagtggg

SEQ ID NO: 7896 - DNA, 201 bp, Bos taurus
cgtcaaccacgggggagaggagtgaagacacagagcacagggcgggtgggccttgaaaacgtggggctaagaaaagccagtcacagcaaggccacgtgccacacaaagccgcttatgtgacgtgtccagaacaggcacatccacagaaataggaggtgagttagtggccacctgcggctgcaggaagagtagaatgagact

SEQ ID NO: 7897 - DNA, 201 bp, Bos taurus
ccccctcccaactgctcttaacaaacgacggcagtcccctggctgtcgaaggtgacgggagatgctgtgctccacgggaaggagaaaaaccacttccatctgcagggagccagcactgaggacggcctgcctgggcgcttagaggtgacaacttcgtcacagaaggtgtggaccagccaaagattttgctgcaggttaaca

SEQ ID NO: 7898 - DNA, 201 bp, Bos taurus
tccttccacgtagtgcagcttggccaggaccagactggactcctgtaggaattctgactggagggaagaggagagaaaagaaactgtcctcagatacacgcctgacactccctcgggcctgcggctctccactccagacggccgtgggaacttcccgccgcgccgtccacagggccccggggcgggagcggcgcgcccggc

SEQ ID NO: 7899 - DNA, 201 bp, Bos taurus
ggccacgacgggggctgcgtctgttcagtgctcgtgggtctccctcaccagactgtcagctccaggagggcaggggccttcgtgtggtcttgtttgctgctgcagccccagcacaggatggatgctcagcaaatctgtcgagtaactgagtgcggagaaggaaggtggtggggctggaggcaggcagctcgctgaagcgcg

SEQ ID NO: 7900 - DNA, 201 bp, Bos taurus
acctctgtgtttatccagagagccagcaactctggagaggggaatgctgacgcttgttcttgagactaaaaacctcttagccaggcagtgagacaacatacaaaacaaactttagaaaagactacaaagattattattaaattgaattgaattatatagtttttattctcttagaacaatggaatcaggaatgcaggcaga

SEQ ID NO: 7901 - DNA, 201 bp, Bos taurus
taccaaggacttccagggccacagttcagagaaggaagctactgcgcagggtctgggcaggtgggaaagagcaaagtatgaaggtggggaaggagataacgcggggcctcagggggtgggacagacccagaactgtaagggagtaaaaaccaaccagacttgtaagtaggtggaatatcggggtaactgaagaaaaagaca

SEQ ID NO: 7902 - DNA, 201 bp, Bos taurus
agagctctcatcaaacaaatttagctgtggccaaagcaagttattgccaactttaaattatggaagatgactgtgtccataatacccttatgaacagaatcggcccggattttagtaagtaaaagtgttagtcactcaatcatgtttgactctttgcaaccccacggactgtagcccatcaggctcctctgtccatggaat

SEQ ID NO: 7903 - DNA, 201 bp, Bos taurus
tgcagcttccacaccgctctccccttcgatcacctgtcccaggggagccagctgtcacacgagcaggacactcaggcagctgcacggaaagggccacagatcgaggacctgaagcgtcctgccgacaacacgcgagtaagctgtcttgaaagggcatctcctgccccagacaagtcttcaggtgaatgcagtcctggccaa

SEQ ID NO: 7904 - DNA, 201 bp, Bos taurus
gctttgcatttgggcagatgaaatttaaagcagcaactgcccataaacaaaatgtgctctctctgtgcagtgaaagattactcagccataaaaaggaagggaggccatgctacaacaggagggacctcgcggtaagacactaagtggaagaagccaggcacggaaggccgcagcgtgcgtttctactcacgtgaaacagcc

SEQ ID NO: 7905 - DNA, 201 bp, Bos taurus
gtgggactgtcttctctgtgaggcagcaccaacggtcataaacccgtgagggtggctggcctggcacagagcccggcccacagtggtctcctctgtgcgattgtagctgctattatttattttatgactggacggtctctggatggtatttgagggcatctctttggcagcagttgatgggcatgtacttcatgctctgtt

SEQ ID NO: 7906 - DNA, 201 bp, Bos taurus
gaaggtagatccaaagggcagagtggaaatggttgggtgggaacagatggaggatgggtgaaggcagaggaagtaaagaacagaataatgaggataaaagcacagtagacattaaatcattagagagatctacaatctgggtatttatgtgaaggataacaggaatacaaagcgtggtgaaattagttggtgtcaaagatt

SEQ ID NO: 7907 - DNA, 201 bp, Bos taurus
agtatacactatatcacaatggcaaaaactttaattcatacctcagtgtctgaaaaaaactacttctagacactggatctctcttttttttctctgacctccaggaagtctagagctagacctgtggttcactttcaactgttgttatttaaaataactgtagttattttaaacatttctgtgtaggagtttcactcctca

SEQ ID NO: 7908 - DNA, 201 bp, Bos taurus
tatgagtctgtttctgttttgttatgtttgttcatttcttttgtttttctagattccacacataagtaaaaccatatggtatttgtctatctctgtctaacacttcatttagtgtgatacttttaggcccatctatgttgctgcaaatgacatttcttctttctttttaatgactgagtagtattccattgtatatgtacc

SEQ ID NO: 7909 - DNA, 201 bp, Bos taurus
tgggaagctcactgaagtcccatggggaaaggcagcttttaagccttttcccaaacaccaaagggtggaggctgtcttcggggtggctattttccagcagtacagggctcaggtaaacagtgacattgtcagatatgaagaagcagagagagacctgtccactggctcctcagcagtgaggctgtgctcaagccagagctc

SEQ ID NO: 7910 - DNA, 201 bp, Bos taurus
cccagagtcacaaccagtgcaccaccagggaagtatcagcagagcctgcctcatgtttaagagagaaggccccagatttggaaacacagaggcctctctgggggatgctgttgttcccagcatccagaccctagaggggacctgggaagcaggcgtggttcgccagcgcctctgcaagcccgcagtggcgtgaggggccag

SEQ ID NO: 7911 - DNA, 201 bp, Bos taurus
aactttgggcttctgattcctgaccaaccttctcccattctccagtcagttgaactgctctaaggccagaagtaggccagaccaggggtatcattaggggaaactcaccgtgcagaagacagcagcaggagaaactgagtacgctttggccagagtgtttaattctgagagacgaatttatctgatatagtggcaatgtct

SEQ ID NO: 7912 - DNA, 201 bp, Bos taurus
aataacatacatcagtggaaaatttcaatagcaacaatctggaaggcatgagtaacatgacttggctatgtctgtttttttagaaggttattttaaagttctcagatgaattgagtttggggttctttttcttgctattaatttataatttatggaattgagttagcgaaggggccttgtgagatttctgctttgagaaac

SEQ ID NO: 7913 - DNA, 201 bp, Bos taurus
gctatcaaaaacgaaaggccagtaccacttgccattggtgaatgtcagcctaaaccataggatcaagtttaaattgaaaatgaccgcactgagacttccacggtggcccaggggctagcacttcacaccgccagtgcagggaacctgaggtgcatgtatctttttgaattagtgtctttgtttgtctgtttgttttgggta

SEQ ID NO: 7914 - DNA, 201 bp, Bos taurus
cctgacctgatttcaaactcagcttccccaaagcagacaggccactttctcctgtcctctcttcttgtttaaccaggaagctttgatagaaccatctagcaattcttgagtcctgcctcattcgggcctgtgttgaatccctctgtgagcacagcaacacctcggaaggcctccccatgacctcacttttgccagatactt

SEQ ID NO: 7915 - DNA, 201 bp, Bos taurus
ggagatgcctcaggcctgcagagtttgcctcagtggagttctgcaagggatcctcccctagcaaacctgggagagcttcacagagctccctggaggggagtgtgaactgaatgggggtgggactgcccaacagtcccttgagcagtccttcagttacacctcttccttcagttaaacccacttagcccctgtggcaaggtg

SEQ ID NO: 7916 - DNA, 201 bp, Bos taurus
cggaagggtcaggccatgtcactcgctaggggacttcaaatttcaagaaagacttgtgtgtctgagttcctagaacatcatgagacagagaaacagccccattgggccagaccacagtggtgaggggaggtgggggaggagggcttggccttcttccctccatgtctgtctgggatagcctatgcctttgggggcagcgtg

SEQ ID NO: 7917 - DNA, 201 bp, Bos taurus
tcatccttctgcctccggaagttaagcgccacaaggtcagaatttgttcacgttcgttccatcaaatggctatgggagttgaggaatctttcttgaataagtgaatgaataaataaatcccttttctgtgtccagcatctcatctgatccattcaattccttaacaatttcctttaacttttgtcactatgtccacctttc

SEQ ID NO: 7918 - DNA, 201 bp, Bos taurus
catggaatcttaaccactggacagccagggaagtcccagagctcttgaatttttgagtctagtttttctacctcttctggctcttgtttggccactagccctcttaactgcctgcctctggagaccaaatatcctcactggtgtgtgacacggcaggaaaccaggaatcacatgcaggagtcagccaccaggagcaggctc

SEQ ID NO: 7919 - DNA, 201 bp, Bos taurus
caggaggggagtgtaactcacatccccgtggggcctctggaaagggcaggacaggttcaggaaggaagagactgcagatggccagagagcacgtcaccaagcgggacttcaggaaggggtgcggctgtgggggtctcttctgaggactgcgtggtcccagcactggcagagggcctgaggttaaagacccctttaaaagga

SEQ ID NO: 7920 - DNA, 201 bp, Bos taurus
tcctctacagaattaccctcttggagagtagcatatcatctctgagaagttctctcaccaacagcagggaacatgtagcctggatctccacaagaaccctaagtcccaccagccccagcacggacctacaaaggcctcaggcatgtgccgagtgctcgctgactctgagtggacagtgtctccaggccctccactctgagt

SEQ ID NO: 7921 - DNA, 201 bp, Bos taurus
aatcaactaaacttcaataaaaaataaataaaaataaataaataagagacattcttcactaaaaaaaaagcaagctctgccagcacagcggggaggccctcggctttcctcaggtgctagcgtccaaacactcactggggacctagagccaggctgagccctggatgctgggccagaccacaaacaggacagatgagcttc

SEQ ID NO: 7922 - DNA, 201 bp, Bos taurus
ccatggatcaccaaaatggacttggaaaattttgaaaagggctgacgagatttacactgtccactcctttcctgagtttggatctcaggccaagaggctgtgggatggtggttatccctctcaggtgcacagagaaacagcagagtgctggctgagagcatgtgcccaagctgcagaggatgtgagctcttggtttggagc

SEQ ID NO: 7923 - DNA, 201 bp, Bos taurus
ggccccagttggctccccaagttttagggctctgaaaaacctccatctggactcgagatgagaacggcttctagaaaacgcacccaggacgcacctgttcggcgagggcctccatgggggtgatgtagacacagcggccctccgagttctgcagcagcatccgcaggatggcaaactccgcacagatggtcttcccgctgc

SEQ ID NO: 7924 - DNA, 201 bp, Bos taurus
ccgttgagggggcattagttagcaagttgggctcagctctggcctcatttcagtttgtgtgggtcacattgtgtggcctctctccaaagatgaccttcaggagtcactacttcttaagcctgaaaccggacatagggttactcaggctcctgggccctgtatgtctgcaccttaagacctgtcacctcatttagtcatctc

SEQ ID NO: 7925 - DNA, 201 bp, Bos taurus
gccatgctgaagcctccggtccagccaggggatccatgaggatctgccgtggtctcatgtcatgccctcccgcactggaattaggttgaaaatggtactacggaggcagggcctccaggaggtgattaggtcatgaggggaagagccggcgtggatgggattagtgcctttataaaggagactgagaaagctcccttgccc

SEQ ID NO: 7926 - DNA, 201 bp, Bos taurus
ttgccgtcgatgtccatcattatctacagcacagagagggggggcaagtcagggccgggccccggcagcggagcgagacggcccgcactgccgacgggcctggacagggactcaccgtcagatgcctcttgacatagcggatcacaaggaaggtgtcgtaatggaggttgcggacgatggctgtgcagccccccagctctg

SEQ ID NO: 7927 - DNA, 201 bp, Bos taurus
atgtcttttgctttttttttttggccgcgccctgccaggcttgcagcatcttagtctccccgccagggctagaacccaggtgcctggcagtggaagggccggggaaattcccctctcagtgttttacacacaggactggggagaacagtttgtttttcctgcgtgatggagggggaaactgaggtgctgaccagttttgag

SEQ ID NO: 7928 - DNA, 201 bp, Bos taurus
tattacttggcctcctgtgtttctggcacacaaacttgctgcattcagtaatagattcagaaggtctcagcagcttagtgtattgcctatgcgatgtctgcggttccaaggcttggggcgggggccccgggggtggtggggggttccatcaatgggggactctgctggccagagcctgccactccttcctcagctgctctg

SEQ ID NO: 7929 - DNA, 201 bp, Bos taurus
aagatggcgatgtcttcccacagatacacttctaggataccttcttctcttatgttgtgatgcttagggaatgcatagtaccgtatttactaacaaacttagctcccttttctcttgataatgttcactctacactgaaactgtggtcccattccttgccatactgaaaatgtaattaatctttataagattaaaaagtga

SEQ ID NO: 7930 - DNA, 201 bp, Bos taurus
acttttttttaatgctatgaaaataatcatttcatctgagtttaagtcttttcttttttccttttttactgctatcatttcttgtgcttgtttttttccctagtgagggttgtcgaagagaaaatacaatgaagaatgttggaagtcgcaaatatgcgtttaattccctgcagctgaaggctttccccaagcattacaggc

SEQ ID NO: 7931 - DNA, 201 bp, Bos taurus
tagaaacttatttctaatggtccaatgaataaaacagaatgttagaggcaacctcctatgaaaaataaatgttgcaaatgtcagagaattttaacagatatcagctgtaaaacagtcacttggatgaaaagaagaaattttaagcagtagatcaaaaagaacataaaattaaaaagactgaattttaaatcacttgaaggt

SEQ ID NO: 7932 - DNA, 201 bp, Bos taurus
cccctatagcacatgaatttgttattcctgactaggacatctgaaacattagatgaacaattagaggatgattctgtacctgcagcaaaaggccacttacacagtccagcctccactgcgttctcatggcaagaggagcaccataaatcaattccagacattatcaccattatcagggggtattgggctggcaactgaatg

SEQ ID NO: 7933 - DNA, 201 bp, Bos taurus
acaaacaaacaaaaactgaaagggtagagtatctcacttgatatttaatattgtatcgattcttttcctatctaatacagtttaaacttgtcttctattaggagccttcaatcttggaacactcctttaacttaaccaagtataacattatttttggccatccggctatgttaatgttgaccaattattagctaaaagtga

SEQ ID NO: 7934 - DNA, 201 bp, Bos taurus
acaatggagattctgggttgaagtgtgagtttccgcaggagctactcagcatcagcaaattgctttcatacaattctaggtctgttatcacatcatctgatgttggcaactattcaaactttggagctaggggaaaaaaacaggcttcagccatctggtttaagatataacctcttctggggctatttttactctgaggga

SEQ ID NO: 7935 - DNA, 201 bp, Bos taurus
ttttgaaaggctgtgtaatagcgcagagctgacagaccgtgtctggtgacagggaacatggacagcaattaaaataagcagaagcctagcaaggaaggacgtgtgggcctcacagtaagaagcccccaaagaggggagtttccaggaccggcaaactcagagactctggggcctcagcagggactcagtttccttccatat

SEQ ID NO: 7936 - DNA, 201 bp, Bos taurus
tgcatcattgactttcctgagttcattactcattcatgaatgactctgaagggtaagtctatgagtcaaaacaagttttctgccagaaataatcattttccaggttctcttcaagcaatgacatcttttctgtctttattataggaagctgctgcttgggagcctaatcagtagacttgcaggtttcagtgtacactagat

SEQ ID NO: 7937 - DNA, 201 bp, Bos taurus
ggtcttttacaaatacctggaatagtttctgtgtatgatgtgaggtaggagttaacttcctttttctccctatagattaccagttatgttggcactatctcttaagaagccattctttctccattgatctatattgttagctctgacatgaatctagttttcatatatctgtgggtctgtttcctctataccgtttcaccg

SEQ ID NO: 7938 - DNA, 201 bp, Bos taurus
aaccattgaaatgaaaacatccagaaaaaattttggttaaaggagactacagcttggatgctgtttaaccatcaaggcccaaagataccatccagagatatatgccagaaactcaaaccaggaactcaactcaccacaaccttccataaccagctgggccatcactttttgtcccagggacgctacggtactcacctatct

SEQ ID NO: 7939 - DNA, 201 bp, Bos taurus
atgtttctccttcttgctggggtgaaaattctgtagtcaattatgcatgatgtagaggaagatgttgagaattatgaattatttgaactctaaggtcctacaattcattctgtgcgagtgacactaaagatgattgattctaaatatccatataacacagtgtcagaaaatcaaggggtcctcccatgactgatgcatcac

SEQ ID NO: 7940 - DNA, 201 bp, Bos taurus
tttttctacatttgtagccctgatggaactcgtctgagcttaaaatttgctgccaaaattattttccaatatctgtaacactggtgggcctccagagagcatgtgtgccctgggctttcataattaggcagctcacacctgagcatctcgcctctggtaatgagatctcgtggcacagcttccttcccatctggccacggg

SEQ ID NO: 7941 - DNA, 201 bp, Bos taurus
tccttctccccatctttggcttggttgtgtctactggcttaacacccaccaagagacaaacacagttttcagcaaataccaatgaatggagtaaggatgaactacctaacccctctctctcttccctcctgccagcctctcccattggctgaatctcactgggaattaagtggacagggtgccaggtgacaggttctgcac

SEQ ID NO: 7942 - DNA, 201 bp, Bos taurus
atgaccaccgtcatttcttgaaacttcttgctgaaacttgttgctggaagcggaaacaagccatcattagtgttaatggagttactggccgacaggtaatgagctattgatcggataaaagctctgtggcctttttcccccttggaactccctgatcctgagcatgtgcagtattataatggaaatttctctcaacaagtc

SEQ ID NO: 7943 - DNA, 201 bp, Bos taurus
tgggatgaccttggacaaatcagcataatttgcccccttttttttaaacaaaaagaaagtcattccaaattcccatagtcccagctcctctcggcctgcccaccacttgcagtgtttccttgaacgcacaaactccccacggctctgcttcctgtccaagagcgatgggctcaaggctcatcatttctgtctgcagagagg

SEQ ID NO: 7944 - DNA, 201 bp, Bos taurus
atggtgataacagcagtggtcttactggctccctgagatgacggagcatctggtgaggtgcaaccccaaattcctgtgatggccactgcatctgggttactgaggggctttgcccaacactcgcctgtcatggtcatcattatctgtgattctgtgaagctccttgctgagaagagaactaagggaggccctcaagagaaa

SEQ ID NO: 7945 - DNA, 201 bp, Bos taurus
tgccccttcaccctgatcagctcagcagccatgcactgccggggcctgtgctcaatgcagatggaagtcagggtgcttacacgtcatgaacgcagcagttcatgtcagtgctagaggctgggccagtcctggatgaagagaacttgctataaaggctcctcccatagataggcccagcaggttcagtgcacagcctccctg

SEQ ID NO: 7946 - DNA, 201 bp, Bos taurus
gggacatggccatgcccaccttatttgcataatccatggctgcctttgcacaacactggcagagctgctacagctatcctacggtccataagcctgaaatatttactattggcctttacagaaccttgccaacctgtgctctagactcttaagaatgtccagacacactttgctccctagtgttcactcatgcactcgtgc

SEQ ID NO: 7947 - DNA, 201 bp, Bos taurus
aagttttaccaataatagctggattctttaacagtcaagtacaggcctaatgaaatgactctgtcccaagctgttcatgaaaggagtgaaaaaatgctggcgtgtcctggtgtttccatttttgatcagcctcatctgggaatttaatacgttttctgatcaaagtccaaagtctctgctttgcttcagctttaatcttcg

SEQ ID NO: 7948 - DNA, 201 bp, Bos taurus
ccccagtgccttcctgtgtcactcagagcagaggccagctccagccggtctccctgggtgtctccccgctctaaccccacccatcatgctgccctcttggcttaaatgggcagcaacaggccctctgttcactcatttgacatgcttgtggcttgccccctctgccctgcctgccccccaccacctaagtgccatgggaac

SEQ ID NO: 7949 - DNA, 201 bp, Bos taurus
ggccagtgacctcctggtgggtgactagctgccccaggcaccttcatcctgggccccagggtgcctggaccagaaagaagactgagtttgatgggccctgcagctgtggtccctgttctctcactaaactgaccttctggaacaaacccatctgggctgaatgtgggaggcgtgggtccgccttcccagaccggatgaact

SEQ ID NO: 7950 - DNA, 201 bp, Bos taurus
gaaaagtttcaatcatgtactatatttcctcttcaataatactagctttgttgttgatatttaataggcagtattttttgtcatttaaacaaataggaaacctcatcctctcccttcattttaaatgaatacaattctacagagttctctgtacgagtggatgattcttttctcaatgtagtctcttggacatgaaattgt

SEQ ID NO: 7951 - DNA, 201 bp, Bos taurus
gctcacaggcaagtttggatattcggaaggaagagagagatgtaggggctgttgataacatctggtcccagtgtcaacatcggccatgtaagtaagacatccctgcctccgttggctatcaggaaatatccaggttagttggcagctcttctcgatcttgtatcagttaagacttgaaaacgtggctgtaacttgtttgta

SEQ ID NO: 7952 - DNA, 201 bp, Bos taurus
tagtgtttgttcaggctccacaggcctagttgagaagaggctcagagcagccgaggagggggtctttgttagcgtagacaaggtgggcttgagatggggtgtgtgtgtgtcgtgtgctggccgctggccatcttggctggtaggacatctgcctgactgtgcttttcctgaggcttcatcccgggtgtgcagattctgtga

SEQ ID NO: 7953 - DNA, 201 bp, Bos taurus
ccactgctccgttctgcctgctgtgttcctcactgccacccttgattaaactgctcaggggctgctttttctttaacgtttatctgctcatttgcctgcaccgggccttagttgtgacacgcgagctccttaggtgcagcgggttggatcttaattgtgacatgttggatctggttccctgaccagggatcaaacccaggc

SEQ ID NO: 7954 - DNA, 201 bp, Bos taurus
gttaatgagttaaatttaaaaatcaaattgcagaaaaattggcatgactcactcctttacctattcaagtctttgttcaaatgtgatcttcccaaaggcctttatagttcagttcagttcagtagctcagtcgtgtccaactctttgcaaccccatgaatcccagcacgccaggcctccctgtccatcaccaactcccaga

SEQ ID NO: 7955 - DNA, 201 bp, Bos taurus
agagccttcaataaagttttaaattgctgtccattattgttgtcaatgactgggctaccgattcttctaaggaaaatgttgaacagggctggtctttgaagttaccctgcccggtggacacatatctgtatacatacctgcaatctgagaaagattcctgtgcgatggagacatgggaaaggcatctaactccttgcagaa

SEQ ID NO: 7956 - DNA, 201 bp, Bos taurus
cagacaggcctgaagacttcctgagcccgcagcacccacctctagatgcaccacttgacaggaccctacccaccaaagtgccaagacccagctctaccacgggtgggccagtaccagcaccctcccaccaggacacccaaacaagtctctagacagtctcatgcactagggtgtagataccagaagcaagaaaattatggt

SEQ ID NO: 7957 - DNA, 201 bp, Bos taurus
gcagacttgacgctgttcagttacagggcccgttgccaccatcgtgccagcctctgcaggtcccacaccaggcacttccttccctcagacctcccaccccccaggggcctgtcccattagcatacagctctcctcccagacaccttggtcaaggctggaggctggaatcccagggaggtaagagttctgctaccaaagact

SEQ ID NO: 7958 - DNA, 201 bp, Bos taurus
accttgttataatcactccagcaatttttgttttttatggattctttcagattttcttcatagacaatcatatcatctacaaagacagctttatttcttctttctccatatgtttaccttttgtttccttttcttatctaatagcataattaggatttccagggcagttgaaatgagtggtgagaggagacatccttgtct

SEQ ID NO: 7959 - DNA, 201 bp, Bos taurus
ttccagcaaggcccgggcaaacacgtgaaaccaccttttccctctctgcttccatgaagtctccgaaaggagaatctacggcaagctgcttctcgtgcctcttggcccgtcctgaaatagtcctgtcacgtgagaagctctgacccttcagaaggtttcggaggatgatatttctagccacagcaagagcgtacgccaaag

SEQ ID NO: 7960 - DNA, 201 bp, Bos taurus
atacctctccatggtcccctgagtcacaaccatttccggggacgatcccgatacacaggagggccactggcaatgccccttggccgcagctgctgatgcagagagcaggtttctggttcactgggtgcagaaagatgctactgccaagaagaggagatctgaaacacagagacattgctgtctgatgccatggcctctgag

SEQ ID NO: 7961 - DNA, 201 bp, Bos taurus
tgcttctcaatctgcatttacaatttcacctgaaaaaccctttatgcttccttccatgtaaagttgaagttagaacagaatctggccaaggtccatcaactagaaagagggaagctgagaaagtgaacatccccccccaagaaaagaggcactgctgccttgctgggtatcgggaaaacagaggcagcagaattccagcag

SEQ ID NO: 7962 - DNA, 201 bp, Bos taurus
ccagatcagtttccgactgaaaacagcaggagttcagattcaggaggttcatggaagatagcgtggaggaggctggtagctctaggaccacgaactgccgcgggccagttacgaggcgattacctgggaaacccggaagtccctcgtggaggattctggggagccgacgttgtggctcctgaagcgcatgcgccaggattc

SEQ ID NO: 7963 - DNA, 201 bp, Bos taurus
actgcaatgaagtcagataccgattcagtaagaaaactacaataggcagaaagaaaacaatgccagaattaaatctatgaggccattttatgtaaacagatcatttcaagcaaatagtttaataccaagtagtaatacctgatagaactattttttcagtaacacatcatttcaaattactgtacattttggtgggagtgg

SEQ ID NO: 7964 - DNA, 201 bp, Bos taurus
cacttcacactggttataatggccgtcatcaaaaaaaaatctacaaacaataaatgctgaagaggatatggagtagagggaatcctcttgcactgttggtagggatgtaaattgatccagctagtattgaagacagtatggaggttaaaaaaaaaaactaggaataaaactacaatatgacccagcagtcccactactggg

SEQ ID NO: 7965 - DNA, 201 bp, Bos taurus
cgtacagggacagcccagagatccagcagaactaatgtcatcactgagaaaggcacttaacccagactgtgcggcttttatgatgtggaatcaggaaagtaccaccactttcatcatacaaccagggaccaggatccaaaggtaataggacatgacagaaccttggcacctgccttccactgccagctccgtggctggagt

SEQ ID NO: 7966 - DNA, 201 bp, Bos taurus
tggcagaatgccactatattcatttttatttcaaacacaatgtgaagtctttaattttaatatactttgtaactataatggttataaggcatatactgtattaattcatcctcatccttttctggtcctgggcagattccactgaggaacagaaagatgccctgatttcatgtgtcttacatacttgaaaatattgctgaa

SEQ ID NO: 7967 - DNA, 201 bp, Bos taurus
gtggacctggtctggccccaaacctctggactgtgctgtgctgcccagaccatgccccagcctggaaagaatatggtaagtgtggtgggtgtgggagtgatagggaccagcaccccggccccagcccccagatgcagggctgaggcagcaggtgaattcagggtccccctacccagccaggtctgggtctaacctgaatgg

SEQ ID NO: 7968 - DNA, 201 bp, Bos taurus
aagttgtccttgggctttcatggcccacttccctcagcaccctctcggggccctggagtggcttcaggagctgaatggttgcaggttttggccagccaaacatctgaattctttggcaatatagtgacctggaaaaacccatcactttttggtttatttgcttctggtcaggccaggtacaaataactccaattaccatga

SEQ ID NO: 7969 - DNA, 201 bp, Bos taurus
gcatgggatctttgggcagttttcaaaaacacagaataatcttttaactttcaaatgaagaataaaaatagaatgtcctctttggtgactttgaggcctcgtcaagcattgctgaataagtttgttcttttccaattaacatttcactctaagattttctctttccttccttaacgaacatttttgtatggttggttagtt

SEQ ID NO: 7970 - DNA, 201 bp, Bos taurus
ggtgcccttcctgcttagcatatgcagtgtctgtgtggccagttcttagaatcagcaaaaccaccattgtcaggatcacctggaatgctgggaacaaaatgcggtctcccacggtccaggccttgctcagaattcccaccggcatcacccaggaatatacatttttagcaggctcccaaaagcctgtaaagatggtgattc

SEQ ID NO: 7971 - DNA, 201 bp, Bos taurus
tgagtaactccccagaatggccacaattcttaccttaaataccatcttcagctaaagataaaaaaggatattgggggtaggggtttgggacttcaaagggaaagaaggccattcatatggagaggtaaaagacaatgtttgataaaaaaaaataaaaatgtttgctgggccaggcagagataatgggacacagggaagagt

SEQ ID NO: 7972 - DNA, 201 bp, Bos taurus
caggatggctgcctacctgtgctggactgtgccagtcctgatgctggcccactattgaataggactagggctttgtctgtcctggggctggtgcaggcctgcggggtagttctgaatggctgtgtgtctcaggaggtcatggggctgtttctagtatacaaatgggtggtgcagggcctaggaggagaaggcaatggcacc

SEQ ID NO: 7973 - DNA, 201 bp, Bos taurus
gtatgattccacttatctaaaatacttagaatagacaaattcaaagagacagaaaatctagctcagacaaacccctttcacatagaaactgcaaatgctcgatccaatatccaaatttaaatgaatgtaggtcaaatgattgaaatttaatcattagaaaagatgaaaataaacatttcttccatcttgacatcttggaga

SEQ ID NO: 7974 - DNA, 201 bp, Bos taurus
acctctacccacactaatataaaactgcaaggcaaaaaccaccctccatacagacacatacacaagttccaaagagccttctcatccccgcactcgacaatagaagaaaaattacaaggcgtttgaagaatgcctgtctagtaaaaggaaagtaaaaagaagaacttggggaaagaacatgtaaggaaacaacaaaacaaa

SEQ ID NO: 7975 - DNA, 201 bp, Bos taurus
tttattattgtccccatcctgtaggattatacaggggcatggaatttggccagggggattactaaagattaaatccttttttcgagttttaagaaaatcaatggtaatggttgtgaaaagtgtgaacaaattgtatttatctcaggagagccaaggcttgggaaccaaactctacattgagtagacagagacaaaacctag

SEQ ID NO: 7976 - DNA, 201 bp, Bos taurus
aagccaagaagcctatgtagacaaaatttattatttatttactaatcttccacccaaacccaaactttgcttaaattcctaactaattaagcacccaaacttaagtttcttcttcctgccaattcctctcaaaattattgtttcttttctaaaaagtataaaagctgtcttctttggctacttcttaggtcccatttcaat

SEQ ID NO: 7977 - DNA, 201 bp, Bos taurus
aagtagagctgaaaacctcaactgggaaaggctggaccatttatgagagttcaggggggtccctcaccagggatgaatgaggcacattcacaggccaagactggaactgagcaggagaagcctagagctcctgggagtcgtgaagcaaaaggaggtctttacacttggtgagagttgacgtgtcttcaagtaggcacaggg

SEQ ID NO: 7978 - DNA, 201 bp, Bos taurus
cgtaccttttacaagttcactaggtgattcttactgcagccaaagtcaagaacctcagtcagatgagcacagctgtctaatcctaaaacccaaggacccaacaatgaagcagtcaggcacagaggaagtaaggggaagctggagtcctaggccggagaaggcaatggcaccccactccagcactctggcctggaaaaaccc

SEQ ID NO: 7979 - DNA, 201 bp, Bos taurus
ggccccgatcatcctgcagctcccccttgacgccaccgcttgctagccctgtaagtgcttctgaatcaccattcagccacgggcccactgtggactcccactactccaccccaaaagcttccacagcacttccattgcgtcactacagatccgactcagcgggggccgcagccgacatgaagggcgagtcgaagtgcaaat

SEQ ID NO: 7980 - DNA, 201 bp, Bos taurus
atcctaccctttttcttcatagctccgcttaggcggcgcttgtctcgtgccaggcactcatgctcgtcgtatgtaatcctcataacgacctgaggagtgcggtaattactgtatcctcactgcacaagtgagaaagctgaagctcaagaagttctctgacagtcaaggatccacggttaggaacgaagagagcagagttac

SEQ ID NO: 7981 - DNA, 201 bp, Bos taurus
gaccactcacacctccttcatccctgcttcttttacctgaagtctgggcaacctgcagcatcattttatatcagacttcctagaacacagtctatctctttaggaagagtcatttcagctcgatcaggtcttgtcactcgcctgctctgtgctgggtactgtgtaagcatactacacaaagtagcctgctgctgcctcata

SEQ ID NO: 7982 - DNA, 201 bp, Bos taurus
gtccaatgaactgttcctggttcaattaaccatggccaagaggcacagttcaggtactccacagacacagccacagagcgtcatcccttgggtgagggagtgtatgggccagcagatgacccgaagctactgatgggacaattcccgcaaacactacaggttcgcagattctcttccctgccttcccagagagcacatttt

SEQ ID NO: 7983 - DNA, 201 bp, Bos taurus
tcggggaaatataatgattccgttcaccagggatgtaggatgtaaaggaaagagggtccaaagtgaagagggcctatgtgtcttgtaaaaggtcctggcctttattctgagggtaatgagttctcctgagaagtctgatgcgggcacatatcatgatcagaaataagctagaagagactgaatgactgggagcaagagatg

SEQ ID NO: 7984 - DNA, 201 bp, Bos taurus
tgatgtaacctgctttcttcttgactcctacacagagataagacaggcaaactctttaattatggcaaaggaactctatgtactttaacatatcatggaaaaagcagtcaaagaaaaagcaataatatacataagcatctcaataaacctcaaactcattaaaaaaatatcacatctacaatacccaagaacaagggcttt

SEQ ID NO: 7985 - DNA, 201 bp, Bos taurus
gtagccctccactgcatgtggcctgaatatttaatgaacagacaaggaggaatccagactacacccaggcaaagtaacttagaaccataaaggggtgagagagaacagttgggcagagaaggccattgtggtagaacccacagagttggtagctaaactctaacagtgttccatgtctagaaggaacccacagagattatg

SEQ ID NO: 7986 - DNA, 201 bp, Bos taurus
actgagcttctaatatgtagacttttacaagtccttgtagggagtagggagaagagattcctatcaaaattcatggccaaacctggccctcactctcctgcctttgcttctctgtgtaactggtgtctgtgtgcctccagtcttcagttatttggaactacggtttatgtgcattccactctgttgtcaggcctgttcacg

SEQ ID NO: 7987 - DNA, 201 bp, Bos taurus
cgggaccatccacatactcatcgttgaggccgcatctccggctggtggggttcccgtacttccggagggtgtcggtgagctcctggtagagggtgtctccgaggctgcgggggatgccctcccaggccaggatgaggatgacgatcacggcattctggcagtggtggcccgcccggtgccgcaccaggcagagcagcttct

SEQ ID NO: 7988 - DNA, 201 bp, Bos taurus
gacgcctggttcctgcacacactcctgccctggcccacacacacgtgcacacactcaggggttcgccacgttcagaggtgaggaaactgtggccctcggaactgaactgacctgctctagggcacacatctacccaggggcaacgctggctacagcgcagccacggggtcagagagctgcggcctgagagcccacgcagcc

SEQ ID NO: 7989 - DNA, 201 bp, Bos taurus
agacatgtacaaattttacattattaaatttgaaaatcttaataaaaggcaattctttggaaaaaaattatcaaaagtgactaaaaaccctgaataataactgaggaagaaagagttgtccaatattcccctcaaacaacatcaagtccatgtaattttgaaactaatttctatcataccttcaaggaatagacaatttct

SEQ ID NO: 7990 - DNA, 201 bp, Bos taurus
gttaaaacatttttatagagtctactctcttgctttatttgccaatttctgcaccagtatctcagcattttaaatataactccaggttttaatatctccttaattaaatatttctttgttattttctttcaaacctttcttggttattatttatcatttattctccagaaaacctttaaaatcattttttgacattctctc

SEQ ID NO: 7991 - DNA, 201 bp, Bos taurus
gtgttcagatgagcagagtgtccacaaagaacaatgccagctaaggtagggctgagacaaggtgaaggagtgccttgaatactgagttgggggttacacgatagttggcgataaacatgaccatacaaagtttctgacgaggggggcttcctggtggctcaatggtaaagaatctgcctgccaatgtagaagtagtgggtt

SEQ ID NO: 7992 - DNA, 201 bp, Bos taurus
acacactattctacatagaaaacaccaatgaacacacacaactcaaacataatcaaacttataaacaagttcaacaaagttgcagtgaccaagataaatacgaaaaaatcagtagattcctgtacagttcagttcagctgctcagtcatgttcgactctgtgtgaccccatggactgcagcatcccaggcttccctgtcca

SEQ ID NO: 7993 - DNA, 201 bp, Bos taurus
agtggctcatatttccctgagaaagatacccagaaaccaagcaaatgaggcgagcagagactcacagacaacttgagagaactcccaggagggaaagctgactttctctgtgtatgtcctcagtgaatgaaattcccacaacaagattaatacaactgaaaaagatgctgcaaacatttctctctgactttattattaaga

SEQ ID NO: 7994 - DNA, 201 bp, Bos taurus
caccttctccccggggcctaggaggcagtcgggacccacctacccgtcccccaccccttgttcttagagcccctcttgctgaggtcaatccggccttgaaggcggagaacgtccttggaaagggcatcgaggttgccgggggaaatgagcgtggggggaggaagagaacacctacacccttggcagggcccgccaggctga

SEQ ID NO: 7995 - DNA, 201 bp, Bos taurus
tgtactcactgctatgggagagggcggtatttactcgtttttaaaaaatgtatttttcaagtttctgggttcttcctctagctcttttttccttgcaatttatttttttgaaaaaaattgtcctgtaatttcccacagtttggattttactggttatgtccctgagttgttgttcagcatttttttctgtcccatgtaagt

SEQ ID NO: 7996 - DNA, 201 bp, Bos taurus
ccttagcaaaccctgtggggtgaggaggtgctgaagggggatacttctggcccgctaaaaacgtgagagctcctctgtggccacctcttcttcgtgagacagcctgtggggtcacttggaaagccacgggaagggatgtgctgtctggtgatgtcttccttctgccaggatgaagccccacacacaggggaaagcccttgt

SEQ ID NO: 7997 - DNA, 201 bp, Bos taurus
ccaaggctgaggctggcaggaagcaggcttggagcgggcagcttgtcgtatcaccaggaggatttggggggcagttgcagagactagttagcaagggtctaactaaactctggcctcaaatactgacctgctcactttctgttgaacttaagcaagttagagcaatcaaccaacatgaaaagcaaatgtattaagtctaga

SEQ ID NO: 7998 - DNA, 201 bp, Bos taurus
gtttgagcatttgtcaggaggggaagctccgcctgtggcccgtgtttggtttttacttgccccaaatggtagggaggactgaccagccacaaggcaagatgggctacagctacaggccactggagtctcccctggggggggtccctcacctcctccccctctcttctcccacgtcccttccccctccccagttgtcaccct

SEQ ID NO: 7999 - DNA, 201 bp, Bos taurus
tgttggacgggcaggtggtttccgctaatccccctgtaatgggaatgtgccaactactcagggctgggcatgtctggggcctctcttgaaaagctcacttcaagctcaccttgccccacctctcacagggtcttgttcttttgcactttaccttgggaccaaaactgcccaccccagcccctctcccatcccctcctgggc

SEQ ID NO: 8000 - DNA, 201 bp, Bos taurus
ggcctgcctccacaaggaccagtgttgcctctggttccccaggaggcatggcctcagtgcgccctctgctgtgcacgaggaggaacaaagagatctgtccggcaatcagaggcagggctgaggcccgagatggctggcagggaccatggtctctgaccgaataaggaacagggacagagggctgcctggctgtagaccacc

SEQ ID NO: 8001 - DNA, 201 bp, Bos taurus
tggattggagtatttttatgaaagttgaagaacctgaataagccactttattccttcaaaagaaatgcagtgagagagagtacttaaggatagagccaaaagtctttgaaagttatttgggttgtgttctagaatgacataaatgctgttaaagccataataattttattcctaatagtcttaaatttggtgttaaaaaag

SEQ ID NO: 8002 - DNA, 201 bp, Bos taurus
tatatataacttgacttgtaaagtgttattacactccatccatgtgtgcatgagtgaatctgaagcagacaccattaacagcatacaattcttacagatgtgaatccagaaaatagaactgagcctgtgtattttaaaaaaatgtttattaagcagcttatccggtgcggctcctacgtgcactgtagtattgtagtatta

SEQ ID NO: 8003 - DNA, 201 bp, Bos taurus
cagatactgtactagttttgattttttgaaataaattttgccttgctcatcgtcctttgaaaattattcttgttttatggacaatttgcaaagattcagaagaatttcttttatattctgtttcccacaagttgcttttgataagttctcaaatgtcctgtctgattacagattacagactaaggcagcctttttttggtg

SEQ ID NO: 8004 - DNA, 201 bp, Bos taurus
gggttggtcctgaaaggccacccccccaccaactccccgtgtgaaggcacacagagatctgtggctgtgtcctgggagcagcaggtcccccagggagtggcgggtgtacttggatggtcgttggccccagaagcctgatgtgggatggaatgactgggagctgagtcctggctgcgtggctgggccaggtgtcttggcaac

SEQ ID NO: 8005 - DNA, 201 bp, Bos taurus
caacagttagccttcaaccacccacaccctagtggctgtggggcagatctaaagagtgccagtgaggtggttattatgatgaaccccaaagggccagtgagagggtgagaaggtggagagagtgcagttgggtcaagcccagagaacagagctggtggaggaatggtcgagaggggccaggctgagcctctgtagaggctg

SEQ ID NO: 8006 - DNA, 201 bp, Bos taurus
catagatgtatccatgtgttcacttttagcaaatactggcaaacatctactgctaaggaccactgccaaaaataattcttacaaattcacactaccccagcagtgtctgagagttctagttgctctgtatctttgcaaaattttttatttttagcctgttgggtgtgtttttcatttgcattttccttatgactaatgata

SEQ ID NO: 8007 - DNA, 201 bp, Bos taurus
gctcctgtgcaaagcgaggtttgtctggatgagatctgtttattctccacaagcccagcccaggcgggctccgtgtggggcccaggcccgctgaagctgcatggagcagcccctttccctgtatcccatgaggatgagcaaggtgtgggcaaggttcgggcaggagtgtggaggcaatgtggggagatgggcccagaggga

SEQ ID NO: 8008 - DNA, 201 bp, Bos taurus
aaatgcacccacatcccacattaaatagaatgattttgctataaaatacttggaaagaatttttataattttgcttttgaaattatttggctgaagtttactcatttagtttacgatctgctctgacttcccagccctcctcacgcatactcaggaatctgtaaggcgagggaatcgaaggtacaaattgttttcaaatgg

SEQ ID NO: 8009 - DNA, 201 bp, Bos taurus
actgcctaatactcatccagacccatggtcagaatccaagcttacaccttgggacatagcctctcacagaccattttcagagttgctccctggtcctgccgtggttcatggttcaggcctctccctaaaggcttcccctttctgaccctaccgtttttttcacattttgaccttgtattgtctcctttcaaagccctcacc

SEQ ID NO: 8010 - DNA, 201 bp, Bos taurus
tctgggagcctggggcacctcttgtaatcccgcggcccgtgtctacatggaagagaatggggctgggactttggcacctgataggccaaggcccaggccagcccctcttccccaaggagaagctactggcacttgcagggacagacagaagtgggtgagggaatctggaagggtctgaggcctccaagtccacaaatcatc

SEQ ID NO: 8011 - DNA, 201 bp, Bos taurus
aggaactgctttactcagctgttggggcgcttctgggagggggttgagctgactctgcaggtggcagcctaggtggaagggaggggacagggcagagctatttctgtaggagtagctacagggaagaggctactgctggatccatccagcttcatgtgtgggctgaggcagagtccacacatgtccacagcttcatatgca

SEQ ID NO: 8012 - DNA, 201 bp, Bos taurus
tggggctctacaggtgaacagggtgctcaccgagatagtgcaggccaagaggacaaggtctcaaggacagatgaggctctgtcctccccagagcagaatccatcctctacccactttcatctgtccaccctgttggccagttcagtgtagggaaccaaggccatgggccatgagggttgcttcctctcccagtcctagagg

SEQ ID NO: 8013 - DNA, 201 bp, Bos taurus
tgggagggactgggccacctgagctctgccgggccctgcacagcacttggggctgccccaatccctcccaccggggtgcctgagcctgcatcatcagccaactcttcagccttaacctcctcagggaccttgccctccacctccccatcacacacggctttccccagggactccacctccccagccctcccctggagaccc

SEQ ID NO: 8014 - DNA, 201 bp, Bos taurus
aagggaaaagcaaataacaaacaagggaacacccataagattatcagctgatttctcagcataagctctgcaggccacaagggaatggcacaattatattcagagtgatgaaagggaggcacctacaactaagaatactctacccagcaaagctctccttcagattcgatggagaaatcagaagctttatagacaagcaaa

SEQ ID NO: 8015 - DNA, 201 bp, Bos taurus
aaagatatgcacatgtacacacatacagaaatgcatgaaaagacggtaaccagaatgttaacggtggtcaccccaaggcgaaaggatactcctgcttgcacgtctcattcccatcttctctggcccctagagccaacaaatagtgagcatggagggtgagggaaggacaacactgtgaactggctaacttttcaaggggct

SEQ ID NO: 8016 - DNA, 201 bp, Bos taurus
gcgccaggagaggccaggccggatttcccttcctttgactcagaaaggggcttgaaagaaagattgagagaccgcagcgaagatatgtgtgcaaaagtgtatgtgcgcgggggagggccctgaccccctcccctaaaacgctagaacagcagccggcttcccctttgtgcgccgcgtgcaactgtgagcaagggtgcgtcg

SEQ ID NO: 8017 - DNA, 201 bp, Bos taurus
gggtcctatccttgacatggccagggaatctgagacacatttctagagttctttctctgcattactctgcattactttatactctggcctttttgggtgtcttcatggtctcccgtcttgtggctctcttctttgtgggtaagctcctgggcgacctgagccccactgactttctctccttcctgcacacaggccccaaag

SEQ ID NO: 8018 - DNA, 201 bp, Bos taurus
aaagggttcatacctgtgagtagagagctgaacccaaagggaaaggggtcaaagggcctcacccatgaccagtgatggtcgctgtctatgcaaaagtgtgcttccagtcataaaataactcacacagggcatggcaggcttttctggagtgtttaactggttttcatacaaggcacctttttcatggagtgactttaatca

SEQ ID NO: 8019 - DNA, 201 bp, Bos taurus
ttgccttctcctatctcctatgaaataaacttaaacatcaactctgagaatctgagccttgggccaagggaacagcaagtgattttgccctcttccccttcaaggagagtgggtctaccctgaggaggtagggtagagggattggatatgcagataacaccacccttatggcagaaagcgaagaagaactaaagagcctct

SEQ ID NO: 8020 - DNA, 201 bp, Bos taurus
ttctcagacatttgcttcgggtgggacattggagggatacatgcctcaggctggaggttgggagctctgcgtgttagacccatctggtctcagttctgccgtgtcctcaggcaagttattcatctggtttctgtttggatgttggccttgacttaggaatgacctgtgaagtttttcacatgaccactctgatggattgat

SEQ ID NO: 8021 - DNA, 201 bp, Bos taurus
atcagtaaatattctttgcatatattataatctccagtttggaccttcgagttagctaccagcaaggcaaagggcactgtactcttattagtcatgaggtggggaaagccagatagctagactcagtcagctgcccagtggtcagaggttattgccaggtgtggccagcatggaggtgggccgggggcggggagttcaagg

SEQ ID NO: 8022 - DNA, 201 bp, Bos taurus
gtagaggatctaaatagacatttctccaaagaagacatacgtatggccaacaggtatatgaaaagatgttcaacatcactaattattagaaaaatacaaatcaagaccacaatgatatgtggcctcccacctgtcagagtagctattagtattattgaaaaaacaagaaataacaaatgttggataggatatggagacaag

SEQ ID NO: 8023 - DNA, 201 bp, Bos taurus
agaactctttgccgtaacttcagcagcctggccatgaaagtctgcttactgatcacatcaggtatatccaggagttggtcagacagggtttcgaagagtccaccctgggccctgctcagacgaagaaagaagactaatttgaacttggtgagagcctggcactctccagaggcccagagcatggcgattcgctgcagcaga

SEQ ID NO: 8024 - DNA, 201 bp, Bos taurus
ttatttttctgagactagccatttagtatttgaatagcttaaggctaacataggagcttatctttttcacatccttttttaaaatttttaagttatagcacgaaattggttatgctaattactaccagttgaaaaaaacacagaaattttgtcaaaaatatctaagcaaatatctctctaccccagtttcagacgttactt

SEQ ID NO: 8025 - DNA, 201 bp, Bos taurus
atgagggcccaccctcatgaccttattttactttaattctttagagaccttgtccccagatacaatcacattttgaggggcttctcactgcgggtaagacttcaacataggaatttggaaggcctaccacaattcagtcataacatatagtgaggggttgatgtaaataataaacagtttacagtaggaataggaaggagt

SEQ ID NO: 8026 - DNA, 201 bp, Bos taurus
gggtcatgaatgaaatctcttaggactgtgtggagtaaaggagattatgtaatgtccttagcttctaggttggaacatgtaagtgctcagacagtgcttgatatgaactattacagtacatgttcctcactttccagacttgaaattctttaagagtaggaactatgtaatatatgtattttataaattatggcctaaatg

SEQ ID NO: 8027 - DNA, 201 bp, Bos taurus
ttttgcatttttttcccctctgcctaaattgaacccaccagattggttgttccaatctttttgtccccctctcagtgtaagtgcaggccagagagaaacattgccagtgggctcagctttaaagaggagaccggacttgggaacagacaacacaaaagaagaaaggcgagatgagactgaggccgggttggcagagtgagg

SEQ ID NO: 8028 - DNA, 201 bp, Bos taurus
cagcgtgagtgcctgcaggtcagatgggcaccgggtcctggaagtgggggactgagtctcttctccagtgctcttggaggtggatattctgccaactggatgaagtacaaataatcaaaatcataaaatgaggttctgccatgacattaaaaaaaaccattcccagcactgtcccactctgccccacccaacgccagctgg

SEQ ID NO: 8029 - DNA, 201 bp, Bos taurus
gggccttccgatgtgaatactgcgatagcgggtaccacatgaccccaggaggccagtgcgagggtgagtctgctgagaggaaggggagaccacagccctttgcagtgtggagcacacatgtccatgacatgcagggctagttccagaacttgaggcttgtaggcatctggcctggtacgggttttcctccactgccaatcc

SEQ ID NO: 8030 - DNA, 201 bp, Bos taurus
tagataaaattgaatcaaataccatccaggttacctaaaggggagatggttaagtagtatacacacattaaaaatctattttcaaaatagtgtaacacaggcaaataaagtgtccaaaatggtaggatgagcacaacaaaaaaaaagtcagtgtaagaatgtaaatgacccgggcagtggaaaaacaactaagtatgcagg

SEQ ID NO: 8031 - DNA, 201 bp, Bos taurus
ccggtgagacgtggcttcaggctgcagggaaacaggtaactcttgttttgaagctgtgtggaccttgacatcgccgtgtgtcctgcataagcccctgctcatggccaactcttcctacgaggcctgggcccggggaccatcccgggatagcctgaacgccgagtcccgcagcccctgacgtgcacctcgcgtgggatcacc

SEQ ID NO: 8032 - DNA, 201 bp, Bos taurus
tacatcagatcgaatttattgtcttttaatactgttctggaaaggtaaggtttttggtagtattggtttttataaaatgctgattggagaggtttactattctaacccttttaaattccattattgtacaattcaacatgctggggggtcagatcaaaatgtgtttttaagaaattgcagaaaggttttaatatgtctagg

SEQ ID NO: 8033 - DNA, 201 bp, Bos taurus
ttctgtgagtaagtgtgtccaaaggatggggcaactcaaccctacctcatcatcatctcctgactctcagctcccttttcctctctattccccctgggcttgaggggacgagaagcatggcatgggtaccctattccttattcactcgtattcatttctgtatattaaactttcaaaataatattattaaaacagggactc

SEQ ID NO: 8034 - DNA, 201 bp, Bos taurus
ctgttagaaaaaaaaatttagctccccaaaaatgtgttgtgaatcatgtaccatattctcaatgtttccatcaatttaaaatgtgttgctagtaatgcacataaatggcttaaacatgaaaaccaaatgacatgatgatatacagctgtgcctacattgtatatatcttttatgacatgtttcacttgctttactctatgg

SEQ ID NO: 8035 - DNA, 201 bp, Bos taurus
aaagtgtcaggcaataaatcattaggagacatttacagaagaatccatatcttccttagaggttgtttgtgtaacttggcctaaccgtgtttgatgctcaactcaggacagggcaacagagtaagtgggtaggactgcttgctcagaaatgttcttcttcatcccttgctttttcttccttttcccttgcccagtctcaga

SEQ ID NO: 8036 - DNA, 201 bp, Bos taurus
aatatgttgttgactaatcaaaatgcatattattttagaaagccagctctgcatttgtgcaagatgagaacccatgtatctaggatgatcctggaaccaatcatcttcagtctatggaactcaaggaattagaaatgttgccaccagagccttttacaaaatgagaagtccttcaataaggaaaatctggcttcttgaggc

SEQ ID NO: 8037 - DNA, 201 bp, Bos taurus
ttttagacctgtacaactgtcataaattatcaacacacaaattttgtataagaataaaaacatatagttttcttggaaataaatgatacaaagcatatctaaaatgccacctcttccttaagccactctctgactacaaaatttgtacatgtgctatctcagcttacaaacttcaggaccattacgacactggtaacacac

SEQ ID NO: 8038 - DNA, 201 bp, Bos taurus
tttatttggttgccttttttctgactttctctgattttgccattttattattagaatttttttttaatgtagtcctgggtgaaattgtgaaagcaggacacactgagaagcataaaatcatcaaatgcttatgctatggacaaaatagaattactcagcttgggatacagccatagatacttgccactgaaattttaatgt

SEQ ID NO: 8039 - DNA, 201 bp, Bos taurus
atagatgtggaagattggaaaaccgttccaaaagatgtcaatatcttaatccccagaatctgtcagtatgttaccttaactggcaaaaggctcattaaagatgagactaaattaaggattttgagatgtggagattatctcagattatcttgacctagtgtaatcataaagttcttataacaaggaatcagaaaagtcaga

SEQ ID NO: 8040 - DNA, 201 bp, Bos taurus
ataataattttaatgacatttaatgatggttttgcactattttacacctactcttagcaaccaaggagttaaaacatttattcttatctatacaagattcttttagtaaagcttgtgaaatgctcattataagtctcacacgtttagaaacaacaatacattaatagaaatgcaattaagtacttattgctgttgtcattt

SEQ ID NO: 8041 - DNA, 201 bp, Bos taurus
ggaaaattccatggacagaggaggctggcaagctacagttcatggggccacagagagtcagacacaactgagcaatcaagcacacacacatacacacagtaatatggggaaaactgttggccaaaacgtggtaaaaatggtaccaaatatatcgatagccaaaataagtatagagtacataaacttaactgttgaagagaa

SEQ ID NO: 8042 - DNA, 201 bp, Bos taurus
ataagtatccgaatgcaaaaattgccctcattgaatcaacaagaaactattccgcaacttaatatcagcactgtatatgaaatactgttttacataaaaggagagtcatttagaaaacaaacaataaaaagatgctaacttcactattaatcaggcaagcaatagagagatattttaccacatccataaggatgaaaaatt

SEQ ID NO: 8043 - DNA, 201 bp, Bos taurus
ggaatgttagtaaagttccataaaggcctgcacatgtaagaagaaaaaaataggaaagatagaaaaagtgattcagatggagagcgattgccctttcaaactggccctctgcaggggtctattcagacaccagttccaggacttcaaaaaacgggccagtgaaggagggggcactctgtcctctgtccattgcccaccagg

SEQ ID NO: 8044 - DNA, 201 bp, Bos taurus
ataattctgaaaaaagcactaacaaccttgaaatcgttactcttaatatagaacagggtaaggagtatgcctgaatggtggatctgttcaggcagaaagagactgggccattctcaaagtattcctttctgatccagtaatgtgcaatggatatatgacatggattccaatagaaatgaatcacaattgtgaagatggctt

SEQ ID NO: 8045 - DNA, 201 bp, Bos taurus
atgaatgaaactggctggtatgtgacattagggagtggtggaacctggagaagtacagagtgccttccctccccaatatcttaggaggagagtgtggggatgatgtgctagagtaaaggaacagaaatattaggctttagaatatatggagaggaagctgtcatttccttcttggagctgagagaagaatacaacagcagt

SEQ ID NO: 8046 - DNA, 201 bp, Bos taurus
ctctaaatcatctgatccgaaagctctaaagcaaaagattaagaatttggagaaactttgcagtgattactgaggtcaaagaggagaacaataactaagataaaggcaaactgggtataatttagggggatctgactgttctgctaagaggctgagaaaatgtataaaattccacacaaactaaaaaggatttgagggcta

SEQ ID NO: 8047 - DNA, 201 bp, Bos taurus
cttctactctactgacttggagaaatgagtaaagagagcccctctactactcttcccttcataaaagtggaaacccttgctgtctatgggagatgagaaacgaaggaatgaatgtttctcaaggaagaaccttcagattagttttatgcattccacacactgcatatccaaatgtcaatgggacagcatcagctgattatc

SEQ ID NO: 8048 - DNA, 201 bp, Bos taurus
cacaaaatctatcatgtaatacaaccagtagctcataatttatattatcatttatctgtattagtatattgatccaattgggcatgtaaaaactgaccttaggcaaaattagttgctacctctctatttaccctctatgtaaactggctaccattctgtatacaggatgtgcattatcaactactcaaagtttttaaagtt

SEQ ID NO: 8049 - DNA, 201 bp, Bos taurus
aagacatctaatcacagtccgagaaaagagattagagtggttagaggacaggcaatactagaagatacaggttgagaagttttcaaagccactgaaacacctaaatctataaatatgtaaatcatattatattctatgcagaataattagaaattcatacctaagcaaattctagcagaactgcagagtcgtctaagagga

SEQ ID NO: 8050 - DNA, 201 bp, Bos taurus
gaaactgggtcatttgccctttggatttcatacaggctgggttttgctaactgcattccacggtgttaacttgttcatccaaactgcccaactatctgaattgcttctgtaaaaataaacttccccataactattttggttatcttggagctatagttcgtacagtaaagggaaaccagacaatttttttattctttctct

SEQ ID NO: 8051 - DNA, 201 bp, Bos taurus
gggaaaagattttatagacaaaagtcaatgaataatagtttgtaaaaatatgaggttataataaagtacatcatgcaaacaaaaaataaaagtgataacagaataagaaagactgcaggtaaagaaaaaatttcaggtgttgggcaagaaaatcatggtatagaacaaatgggccaaattggaaaagggacctttaaaaag

SEQ ID NO: 8052 - DNA, 201 bp, Bos taurus
tagagcaaacaactgaacaaattttggggatcagtaatccaaaataaaagattagtatatattacccaagtcacaaattctttatagatttcctatcctgaaaaggaactgatctcaaaatatagaaaattcagaccagagtggggaaggaagaggaaacatctgaataaaatgaggagatgtgacatattctaaggattt

SEQ ID NO: 8053 - DNA, 201 bp, Bos taurus
cagaagatggaaccattactataaacagagattttctcatactaagatgccctccatccatgttctaagcaatattgaaacctttggctgaaagctgtgaagggctagatttctgcagaaagtcatatattccatatgcagagttaaagagtagaatgaaaacaaaggtacaaatacaaaggggaaagcaagacatcagct

SEQ ID NO: 8054 - DNA, 201 bp, Bos taurus
actgagagacttagcatgcacaccaagtcctacattggagatgacttcctcagtgttttttgtgtttttttttaatttgttttggcaagggaggggtgcagatcgggtagttactaagaatcagagctggtaactgaaactgtcaagtggtggtaatgtctgaagtctggcctaagtaaagcttttaaagaactcagattg

SEQ ID NO: 8055 - DNA, 201 bp, Bos taurus
agttatttgtgtttaagtaaaacagattgctctagtatggctagtttggctgcaaaaagaagaaataaaattgcaagtaaagtgaaatgtactttaaaaagacagtatcttgaatctcaggactgatggtgtattttcaagaggtttccagatactcaaagcagagaagacctataatctctcccttagggcatctcattt

SEQ ID NO: 8056 - DNA, 201 bp, Bos taurus
actttgggttcattagtcaggattttcagatccacttggctgccaccttcctgcagccagaccatcttggatcaaaaggtcagcaggccattcccatctcacacctgccacaagatctgatttttcttttcccccacactgatcctagtcactttctgttaattcgctaattttattgaccctgtaatacattctgggaat

SEQ ID NO: 8057 - DNA, 201 bp, Bos taurus
tataattttcatggttaattcttccttctctcagcttggtttaggcgtcaagcaccttgctggtacttttcatccttttctgttctattggagcttgaatacgttgtgaggtaaatggcagctcatcatacctttcaggagatagtgggaaggaatgagtcttagtggctctggtcctgaaccctgcatgattacaaaaag

SEQ ID NO: 8058 - DNA, 201 bp, Bos taurus
ttctacagacatgaaagctccctgtgcaggtggcttctgctcaggcagagaatggggcaagaaatgaacgagagaccagggccagtcgtgtctccccatcggaaatggctttctgatagtgccagctcttaaagtttcattaaggcacaggactgcacacagacagccagggcctgattcctacattggcctggactgcgg

SEQ ID NO: 8059 - DNA, 201 bp, Bos taurus
ggaggggagagaaaccaatcacaaccactggtgacttagatggccagatcagctggtttctaagtcctgcgtagcagagactatttccaaaacttctctatctgcccctgcactgtggccagcttagcaccgcccacccagcagacctgactcactgactaccaggaggaatgtggaggagctggcgccttctcacactgt

SEQ ID NO: 8060 - DNA, 201 bp, Bos taurus
ttttttgtctcttttacatccaaatagttcaaagctccattcaaacctacccccctaaataattcttctaggataccaggagaaaacaacgaacaacagattggaaacagaaaatgaagacaagcaaaatggaatgaaggaatttttcgagagaaaaaggtaaaaaggagaggagacagagtcatacatattcacacacat

SEQ ID NO: 8061 - DNA, 201 bp, Bos taurus
tcaccatactaaaaagctatgtaccatatgcctgaaacaatgatcacaatcttcaggctcaggaaatccactagcttctgttagcaggaatactatttcgatcaaatagtgcagcttgagaccttaaatgctaaactccaactacagcgaagccttgatatttgataagaaccaaataataaataatagatgaattctaca

SEQ ID NO: 8062 - DNA, 201 bp, Bos taurus
tacagctgtaaagatattaagctgcaccgcctgctggcgaacacctttggcttgtttaacacattcagcaaagtgatccaacatctgtaatctataatagaatcaagattacattagcaatactttttattcaaatatggctcaaaaaacagagataagacacactgtttaacaaataatgccccattctatctcttttct

SEQ ID NO: 8063 - DNA, 201 bp, Bos taurus
actaacacttgaaacttaaggaaggtcaaaacactttattccacaaacaactgagttatgagaaaaacagaagggacaaaaagaaaagtaaaaccgatatcgtcctagaaataacataagtaccactcggttgtacaaaagatatataatactgccctaatgtaaataagagtattcttctttgtattaaaagtttaaatc

SEQ ID NO: 8064 - DNA, 201 bp, Bos taurus
gtttttcacctttttaatcctataagatgcaaaaaaaaaaaaagtggaattctttgaataaaaagtgaaaatatatacatggtatgtatatatattcttttcataacatcagttgattgaaccttcaacattgcagtcaattttgatattgtatatatcagagctgtccattctgtaagcagtaaagacatgaagtttctt

SEQ ID NO: 8065 - DNA, 201 bp, Bos taurus
tcctgctactttctcttggggatgctctttttatgaaaactcaagttccatatgcagctctttcacttctatctctaaatttgcttattccaagaagtacatttgttaaaaattataaacagaaggattgaaagaagagaaatctttctttccatttaagaaccacataaaaatgctctgaatgtatatttgacgttatca

SEQ ID NO: 8066 - DNA, 201 bp, Bos taurus
cagtttgaaaggggaaaagataatgactgggttggtttctttccaggtttgatttgataagctcagcaatacaatttctgggactctgggcaaagttgtgctacctctccgtttcatttcacaagcatctgtgtctttccttatttgccagtttttgaagtttgtaacattaacctaacttttccttgtattatggctatt

SEQ ID NO: 8067 - DNA, 201 bp, Bos taurus
acagcccctggggaaactgctctgcttgcctctccactcagccctgttctctcacttcccctcctttgctccaactccccatcccatccaggcccagagatggtcacagagcatcctactgtgatttgaccactcctgacagtgggagtgatggttggctgtggaaaacccaggaggccagctagacgcaagcaggaagaa

SEQ ID NO: 8068 - DNA, 201 bp, Bos taurus
tgttctctttggagccctcagtgaaaacctgcttttcatgtactgatttaggccccttccttgtggtctgatgcttatgtaaatgcattagatccactgcgttatataaatgtgcccagtcggcctaatcacaataaactggaaaattctgaaagagatgggaatatcacaccacctgacctgcctcttgagaaacctgta

SEQ ID NO: 8069 - DNA, 201 bp, Bos taurus
ttatttaatattgttttggaagtactatctctaattagaaaagatactttaattacaatacaacgtttgaacttaatatattaacaaggaataataaatagcattctttatgtaggtaaataaacttctatgcatgagaaatgtgagaaaatgaagttcaaaactattttcggtaatagaatttactgagctagtgcagta

SEQ ID NO: 8070 - DNA, 201 bp, Bos taurus
aacagccactggcccacgtgcactgcggccagcaccgagagcagcagaaggagcatggtctgctggaccgacagaagggtcggcgacaggtgatcgtccgggctgaggccagtggccatgctggggagagaagggcgaaggcgtgacactcaggtaggcagagaaagaagagggcgccccaagctcctatccacctgcctc

SEQ ID NO: 8071 - DNA, 201 bp, Bos taurus
gattagataacgaatcccacttccaagaaaggcttctggtgagcaaagagtttccctcaatttctcactttgcttttcaaaacccacttagcacaggcccaggagttgaaccggtcaaggggtccagcagttctcaaagcagagtacagactaaaggatggagtttaaaaaataatactctgggaacagatgtatggcctg

SEQ ID NO: 8072 - DNA, 201 bp, Bos taurus
atgtaggaaatcacccactctttacaacattgtaaatcaactacacttcaataaaaattttaggaaaaaaagaaagaaatcatccactccttattttatatataaggacggtatatccagggagataaaatatactgtaacattacacaagtagttacaaaaacaaatcccacatccttcacagagggacctgaaccttct

SEQ ID NO: 8073 - DNA, 201 bp, Bos taurus
ttgaaaaccaggctcaactaaagagaagggaagctgtatagagtacaaatgaagcttccacaatgagagaaatgagaagggtccactacatttctcgacatagtgaaactaaactcataaaggcaatgtacaatgtcttcaggctttttttgcttttcccaacatttccatgcataacacatgtgcaacaccaaacaacat

SEQ ID NO: 8074 - DNA, 201 bp, Bos taurus
ctggagggttgcttatctccacttcatttagttgtttttctggggttttgtcttgtcccttcatgggggacataactttctgctttttcatctcaattaccttcctgtaatgtggtttttgttctagccgctttggcattgtggttcttcttgctttttttatctgccctctgatggaggaggctaagagacttgagtaag

SEQ ID NO: 8075 - DNA, 201 bp, Bos taurus
tgccttgtgagccaaacctgaggatatgtgatttggccctgccacggaaacctctctgcttagggagttgggccagccagttcctcagttcaaattccccttgagggtttaacctgcctgtttttcatccctctcctggttccagattcccaaggggagatcctccccaaagccagctccagggcagtctttgaacacaac

SEQ ID NO: 8076 - DNA, 201 bp, Bos taurus
ttcctatctgaagagctcaaatcaatgtacaatatccaagatatgggtgatgcaagaaagaaagggtaaaaacaactggagggataccctagaggcttgttaatagtagacaatttgttgatatgaggaaagcacacgtaggatcagaggaaatgtaatgacacttttaagatttaaaaatggttcttggttcaagacaac

SEQ ID NO: 8077 - DNA, 201 bp, Bos taurus
catacaaaatcttttaactcctatagtataaactgcaaagagtgcttttatttcatatgctcatacaaatgtcttttttcccctagttgatgtgtgaaaagttgggagctcaacaaatggttttgccaggcaaaaaccattaatcagagtgagatggggttttagctgcaaaagatgagcccttcaaaagccccatctgta

SEQ ID NO: 8078 - DNA, 201 bp, Bos taurus
attactgaaaagaaatgaggaatataaattatatttttaactatcacaggtcttggaacagcagtagatacataggtgagattttttttttttaagttgtgtaatttggtcttagatttctgattgccacattactgttctcagcaatagaatgcttaagaaagatgcttaaaaatacagagaaggatgcaatatagtata

SEQ ID NO: 8079 - DNA, 201 bp, Bos taurus
aaaccatagactgtcaaaccttggaggcatatggggagtgtctagtagctccatcagcataaggaatagaatgtccatgaaatgtatctatttatatagcgggcctctgtataaaacttggctttgagtatgtggtcatacttttaagtaacaccagcataccataaatgtaaatgcagcactatgaatcttatcatctga

SEQ ID NO: 8080 - DNA, 201 bp, Bos taurus
tgaagaccctgacaaggaagtccatcactcccgaagtcaaaccctcggatgcaacagaaaatataaaggccaagatccaagataacaaaggaattcctcctgatgggcaaagcctggtctttgctgccaagcaaatggaagatggatgtactgtgactacaatgcaaaaggagtccactctttaccttaacgttttaaact

SEQ ID NO: 8081 - DNA, 201 bp, Bos taurus
tttatgtactgtgtgtatatatctgtgcttaatatattaagattttttttttcttcttaaagaaataaattccgctgccttctcaagttaaaggcacatatgagaaaacattcctcagtggtaacagatggtctccaggtagtgagggaagaatggtttaatatgagattcctgactagcatgctaggtctctttttctct

SEQ ID NO: 8082 - DNA, 201 bp, Bos taurus
ttcccttcagtcctcattttcttcactcgtctgcagcatccagccacgttgattgctctccttttgcacctctctgcctttggccaatactgtgctccactgacttggttcactacctcttctgattcttccctttttaaacctactttcacttcctcctcttatgtgttagctgtagagggccccaaggtctttcccctc

SEQ ID NO: 8083 - DNA, 201 bp, Bos taurus
gtaggtgtccataagtgcctattcctaggaaggccacagcttaggttctttacaaatagcacaccataaatggaattggcccaaacattgctgttagccacagttttgatctgaaagatcaaagagaacttaagaaaaaaaaataagtcctgtgacttatcagaatgttgttaaatgttccttggccaggagtagtcatac

SEQ ID NO: 8084 - DNA, 201 bp, Bos taurus
ttgagtttgaccctgaagattcagttcaagtgttagattacatctgagaaggcagagcccacagggaaagccctcagtcatgggaacccagaagcaatctccaattctgtgtctcaaacagcagatctgttggcagacaattaaagggcattagaatgtcaaggaccaaactgcttctaatattttgccacctctgtttcc

SEQ ID NO: 8085 - DNA, 201 bp, Bos taurus
aggtgtgaaggatgaggtggtggctggcttaggtaaggaggccatggatggccttgctcatcagagggcatttcaactgagagcctgagcagtgcaggatgaggggagatgcccagggagagggccagcaagtccaaaggcctgagatgggacagaactttgcacattcctgggttggcaaggggtcagaatgagagagga

SEQ ID NO: 8086 - DNA, 201 bp, Bos taurus
gtaagcattaataggttaaaacaggaagattccaaaatgtagagattagtacttgctaccaggaagaatagaattatagcaccacaaataatgacaaaccgtattcttaacttctctgcttaggctataaccacaaaggaaccaccataggcgtgcacagacagctggaagttgtttccgtaatatttgtaagggttccat

SEQ ID NO: 8087 - DNA, 201 bp, Bos taurus
ttacttactttctcaatgctgccaaccccttctctactctgaggacaccaatcatttaggattattttaattgtatataaattccaaagatgcaaaattttggttacaggatatatttgggcttgagcgctttagcaggggggcaaaggagtgggggaagaaaccatgtttaaaacattttttaaaaagtctctactctgt

SEQ ID NO: 8088 - DNA, 201 bp, Bos taurus
acattccaaaataaatggagaaactaaatatcactccatatcatgtttgccacagtcttttctacctttgtactatatccttatgctaattcccataaggggcaaataagtacctttgtactttattcttatgcttccacctcccatatggaatgcccttccagccaacttctcttctgtaagttctactcagctaaacaa

SEQ ID NO: 8089 - DNA, 201 bp, Bos taurus
ctacacaaacatactacatggggcagggctgctgctttagcttgcagttttttccagatgcttctagaattcttgagaggccatggagccttaaccaagccgtagtgtgaattgctagaagaatgacatttgctccatcactgatgtttccttacccctcgaggcccctacgttcctggttgtcactggtgtggagatcag

SEQ ID NO: 8090 - DNA, 201 bp, Bos taurus
tatcacactaactggaaggccagtctggggtgtgctcactggatgcgtcaagatcaattacccctgcggagtttctcttctgcaggaaacaggggaacgccaggccatcagtattctgtacacacactaacagcttgtgcttgcagagacaataatttttcagctcctttcagattctatttattggttattttccccttt

SEQ ID NO: 8091 - DNA, 201 bp, Bos taurus
tggtgtgctgcaattcatggggtcacaaagagttggacacgactgagtgactgaagtgaactggtttaaaacatagtgttagtttcataaggcagttctatttccagttttttaaggaatctccacactgttctccatagtggctgtactagtttgcattcccaccaacagtgtaagagggttcccttttctccacaccct

SEQ ID NO: 8092 - DNA, 201 bp, Bos taurus
caccccttatttattcccaggaaatccccaccacatcacttccttaataaataatgactcaatttatttatttgaaggaccgctttctccctccagaccctgcagagaataaccataattaattcttttatagagaaaacagtttacattttctgttttaagaccaaaaaaaaaaagcagacagtttgacttgtgaggctt

SEQ ID NO: 8093 - DNA, 201 bp, Bos taurus
cacacagtgcagctgctacagctagcagcctcgctgagagctgagcatcactccccctcagcctcacaccagtgccaaaatccccatcgggaggcactgacggaacagcaactaggaaggcacacagaagctgtatggtgccccagccacatcagtgcaggactgcatatgtgcacagctacctcctcaaggccagcaaga

SEQ ID NO: 8094 - DNA, 201 bp, Bos taurus
tctaagttcccctttggtttcatttaaagaatagcatgtaatgaatacatctggatggcaaacattacacaagtgagttctcatgggtaaaccgcttgccgcaaaattaacacctctggagaggagggaggggaatcccttacaagtaaattgatggttccggtgctgctttccatgagtctatcatgcctgctttgtcct

SEQ ID NO: 8095 - DNA, 201 bp, Bos taurus
cattgttggggacttgcgtggtggcccagtggttaagactctgcagttccaatgcaggggtcaggggttcaatccctggtcagggaactaagattcttcacgcagcatggcatggccaaaattaataaataaatagagattacattgctgatttacagctctgggtcttccactggatgtgaaactttaggagaggaaaag

SEQ ID NO: 8096 - DNA, 201 bp, Bos taurus
tatatctgattcacactcagatagatgtagaaacatggctcatttaaaatagcataattatatgttacaaaaatagcattcatttattctttgttttccatggttaagatactgttagagtcacaggattatgtgaggctctatgggaaacattttatagggatgcatgctgacattctggtttatccccagtatgtcctg

SEQ ID NO: 8097 - DNA, 201 bp, Bos taurus
acactctgcacagtgtgtgggaaagaattctcaccttggagtcttccagtgaagctacctagaaaattaggcataaggcattactgttcaatgcaatgccatttatttattcattaatttatattgataattatttttattgaagtatagttaatttacaacactgtgttagattcaagtgcacagcaaaacaattcagct

SEQ ID NO: 8098 - DNA, 201 bp, Bos taurus
gacacttttgtcagcccattggtgagcagggctgaatctggaaggccagagacctaaggtgtcagagctggtaccagactgctagtgggtggactcggtcttgccacagctgtctgctggcctgcagttgtcctgaggctaatgtctgcctgctggtgggtaaggctagtcctgaagggtgaacaggcttagtagtagaca

SEQ ID NO: 8099 - DNA, 201 bp, Bos taurus
tcaaaattgcaaggtttcaaaatatatgcagaggattcaatgtatgttaacccctgggtcagaacggtcatgtaactctctgtgataagtataatcttggcatataatgatatgaaatttccatttttcacagtcaggctcatggaaactgaaatctttgtggaatgcccaattattctactgttagaaggtcaagaagga

SEQ ID NO: 8100 - DNA, 201 bp, Bos taurus
agtggtatccccagaaaactgaaagttcaactgaaaagtgtcaaaacatgtaattaagtagaatatttacaacttagtttcttcccaataatttgtaaatgctccacttacttggaataggttttaatttcctgtttaacaataactgattctaatcactttctgtttttcagttatgaaaaagagaaaagttatttgagt

SEQ ID NO: 8101 - DNA, 201 bp, Bos taurus
tttcaatgggaggaaacaatacctgttaacctgccactcctgaaaattctgcctcaatggcagcaatactgagaatagacagtgaggggtgggtggggggctgtcccttcatgcaaatagcatttaccaacaaaccaaaagaccaaagaggggaaatggttgacagaagacatcccctgaacctgcctcatcctttttagg

SEQ ID NO: 8102 - DNA, 201 bp, Bos taurus
ccctaacctaagacaccgccaggcctgggcacagaacaaaggactgaacagagatagccggctgcagacggtacccctctggtgacaggcagccagagccggaatgggaaaatcacagccccagagagacattatctataaaactgtaagcaggcttttttgctaactaaaacttcttgggggtctggacgatcaacatcc

SEQ ID NO: 8103 - DNA, 201 bp, Bos taurus
ggacatacttctcctccagcaacaaaatacaaagaaactgtttgggactaaaaataactgtgtgcatgaacagttggaacaaattctggacacaaaagatacgaaagtgacccaaaaaatccagcttctacttttgaagagcctggagtaaaaacaggttttggcagctaaagaagtacatatcctcctccactcaacacc

SEQ ID NO: 8104 - DNA, 201 bp, Bos taurus
ctcatatcattttctcctcctcccttggctcttcatatgcagctccactccatcacttgcagagtaagataaccgtgttcacacgtctctctctcactgcataggcccaaagagagactttgtcttattcttctgtgaagtaaaagtcactcaatcatgtctgactatttgcaacccaatggactatatagtccatggaat

SEQ ID NO: 8105 - DNA, 201 bp, Bos taurus
ggaagcctgtatctcagcactgtattcagcactagtcctgcagcagaggtggtaaaaaatggggaagacttcaagcgatttcaagcaggagtaagaagcacagctcaaatggcactgagagctaacgagcctactctgtcaccacccaacaggtgtgattcacacaggccggaatcaagtccattcaggctctctcttttc

SEQ ID NO: 8106 - DNA, 201 bp, Bos taurus
agatcttgagtcccaagtcaacacctccctcctataagcccattctctttaccaacaggaaattcagtatttctaaaagtatcttccttcatcaagctcgaaattgcagctagttaagtgtttctacctctgagtccataagatttgaaccttttaatactttaatgagaaagcattaaaacacaggtcaataggaaataa

SEQ ID NO: 8107 - DNA, 201 bp, Bos taurus
tgtttcttgaggattccctccttttttgtacagtggcttttctttgcaaagagaaggcgtctttcagggaggttccgataaatcttatgagcaaatgagtgaagtggaggtgtttgagacagcacgaggcccaggccctaagggagctccccaagtgcttcattcctttagtcctgagcaggggttccacgcagccggcct

SEQ ID NO: 8108 - DNA, 201 bp, Bos taurus
ggttacataattaagaggtctctatttccgcccagagctgcttaaggaagaaggtgtgtgacttgtgcttccagggcctacctaacactctgtctctttataggtgtttgatgcatgcttgttgatacaataataaaaataaacagagcaagcagagggactttctcaggccaggatctactgagataccctagtgtcact

SEQ ID NO: 8109 - DNA, 201 bp, Bos taurus
agacttgaagggatgctccaagatgtgggcgattctgtaccccagggcagctgcctctgggaacccaacagggggcgcctgccagccagcccaggggcacaagcaggagcacacaaggtatgagccaagtcgtgggttgaggagcaggtagcagtttgagccaggacctggggcgggggtggggccggggcctttctgcct

SEQ ID NO: 8110 - DNA, 201 bp, Bos taurus
ctcagctgcagctgccgggcagccgtccagggtgacaggcagaacgcagtgcgcaagggtgtggggacagacaacaggtggcagctcggcagcagtcggctgcgggggagatgagcggaggacctcctagcatttgggaagagggggtcctgaccagcaggtgggccacagcaatgagcaactccagagggaggttctgaa

SEQ ID NO: 8111 - DNA, 201 bp, Bos taurus
taattgactaagtcaaaaatagtagtattgtgggattttagcataacgtaaaacaattgctaatagcctaaaagttggaaggggaaaaaatggggtggtaacattgtaaggttctttcattctggatgaagaagtataatattacgtggagatagttgtgattaattgcaatgtatattttaaattctggactgcagccta

SEQ ID NO: 8112 - DNA, 201 bp, Bos taurus
tgactagaggtgactggggaagaattctggaacagagctgctcagtgtaaggtgaccagtggaaaccagcgtagattggggaatatggaaatacctggaaggaggcaaggaaggtaatccaataaagctggaaaaatctggataatctctctctccatgtgtgtttaaacgtgtgtttgtgtgtctgcatacctatacaga

SEQ ID NO: 8113 - DNA, 201 bp, Bos taurus
gagggcaaatgaccagtagatagatcagaggtgaggggagggggccatgcatgatggacataacttttctacagatagtatttaatattaggaatgctctgtagtacatttggtttttaaccagagacagactgtttcattgctgagagaaaaggaggtaaggatactgatttggggagggttatttctacctgaagtctg

SEQ ID NO: 8114 - DNA, 201 bp, Bos taurus
aggggacttctctgttggaaatttttttttttaagcagagatctgatttcttgttgttagtgacagtcatctagattaaaatgtatttcagggctgtccagttttttaaaatacaaaccaccccaacttctagaatatgtgtttttgacatcctctttgcttattttcagctgagaaaaaagccccgactgcccctgtttg

SEQ ID NO: 8115 - DNA, 201 bp, Bos taurus
ttggtatcatgttagcagtcagtttaggattagcaaattacttgatgagttagtaggacagattcttcaacagtctttaccacagaagagttttagggtagtgaataaaagaatgagtttttaaaagcaaatacataagtaaaacccaggccatttactattcagagaagagacttactgccttttttggtttattttctt

SEQ ID NO: 8116 - DNA, 201 bp, Bos taurus
agtgccctacccaagcacctccactccacccctgcctgcctgccacctgcctccatctccccctctccttcagagtgcaggaatgtgtgaagagccacagtatggccttcctgcctggcaaggtacccacaggaaacactcctatttctgagctgacttctttccagcactccacccagctctccttttctgagaaccccg

SEQ ID NO: 8117 - DNA, 201 bp, Bos taurus
gctcctcaaggatggggcacatcttccacatgtatgtgtagagcagagcagaaagaaatgaggcaaaaagaagaaaataaagccaagaaatgacagtaacgtgttatatggacggggagtcatgtgcttatttcttctcttcctgttttccatattttctagcatgtggattatttttaaactttttttaacaaatcagtt

SEQ ID NO: 8118 - DNA, 201 bp, Bos taurus
caggagctgggaagaggccaagtgcactgtgggaatacatgtcgggcaggagtttatgaaacgactggaagctgtagacagtgaggagactagacacaggcaagagaaagggaaggcccaaactggcagatgatgggaatacaatgaaattaaataaaatgatgggggaaaggtgacagaagtcttcaacaagaccctgcc

SEQ ID NO: 8119 - DNA, 201 bp, Bos taurus
aacccaatgtattccagagtaatgaacagacatgtaatgtgccatcatggagctatgcactaatgctaagggacccagaggaggagcaaccattagcctacgggcaagaagtacttgtaaggccagagtaggaattaccaggtggagtcaaaggggagatgatcagcatcagatactaaggtgcaagcaacataagggagt

SEQ ID NO: 8120 - DNA, 201 bp, Bos taurus
gcatttaatcatcacttgtcttcaacagttaatcaacataagcttatttcattgacaccctgctttgtccacctcagaccccaactcaaatctcagcacacactttgtttgtaaatacatcttttttaacctaatatttatttatatgaataggcttagtttgtctgatctattgattactaatgttaattatttctgtta

SEQ ID NO: 8121 - DNA, 201 bp, Bos taurus
gattgatgatgctcagaaattatcttttgttcacaggagcagaaataaaaagaagaaatagccaatatattttagtatattacactgtatttggccgcgccgagagcggacttttactgctgcactgtgtctgcgtggcttggcttgcgggatcttagttgcccgaccagggatggagcccaggccactgcgtgggagtgc

SEQ ID NO: 8122 - DNA, 201 bp, Bos taurus
gaacgtggtcccctgccaaggacagaaggcctccagaaggcaacatgccttccacacctgcttataaccgtttgcgaaattcggtttcttggtctattgtgctgggcacctgggccagatttctcaagcagcccaggtagtaggcactatcttcgtgaagctggtggctgcctgaagcagattcttcacccactcctgttt

SEQ ID NO: 8123 - DNA, 201 bp, Bos taurus
gtccccaggccaggtcttcctcagagtcaagttacccgctctgcatggaccatgtgggtgacaatagggacaaccatgcattgacgattaagcctctgccgtccatcttcatgggccaggcttagcctggggtccttctattcaatacaactttctttatccactgcctatcatcatgacaaaggcagattttagctagat

SEQ ID NO: 8124 - DNA, 201 bp, Bos taurus
aggaactgtgagttgggaaaagttggggtggggaagccacttgggagctgtaaccacaggacagccagaggaaaggagacactctactggggtcagagaggcaggagaggtcaagccaaaggggagaggtgtggcagggttccagccctatctctggggacctggaaagcgaggagaaagaatctggccgtctgagaggtg

SEQ ID NO: 8125 - DNA, 201 bp, Bos taurus
gacccccatgctcttggtgatctcagggtctagggagagagaggttgaaggcccctctgcgtttggggtcagggctgagtctgtggctgggagagcagaatagggtacactattctgtgtacaccaccactttgggtatactggcagaatagggtccactctgtgtaccctcagccgctcaacacagagtggacagagcag

SEQ ID NO: 8126 - DNA, 201 bp, Bos taurus
ctcacaagcctcttgagggcagaaaacatgtcacatattaacttttctttgtattctccagagaacctagctgagtgttatgcacttaataaccacacaacaggacttccctcactgtccagtggttaagactctgtacttctactgcagggggcatgggttcagtctctggtcaggggaactaagatcctgcatgccatg

SEQ ID NO: 8127 - DNA, 201 bp, Bos taurus
cctctgaaacccactgcatactgtaaaccagaggtggcccaaagagatgcaaagtcagatgcaccggatagaaatataaacctggtgtgggtcttggaagaaccctaatgtggcccactcaacagagcttccaggtaaactaaaaggatgagttacctgtccagcaatgaggatacagggaaagaagatcaggcatctgaa

SEQ ID NO: 8128 - DNA, 201 bp, Bos taurus
agcagaacagtgtgagcacaggcctgtgcgactgggctagaaaggctcgagcggagggtctgatctgggagcagtgggaggcgagttgagaacggcagccgtgaccagctgttttcagggccttgtaggggcttgccgttgaaggaccatgaaaacgatcacatgtcaatcagtgttttaagagtattaatgcggcaccag

SEQ ID NO: 8129 - DNA, 201 bp, Bos taurus
agtccaatctttgctactatgaaccataaaagaggtatcatctataaacacacaacaaaatttttgtctttatgcatcaggggccttaaaaataataacatatgatccacttctgagaaatgatcctaagtaaataatctgaaaaacaaataggctaggaggtaaagatgtgaattatgatgactacttacaatagtgaaa

SEQ ID NO: 8130 - DNA, 201 bp, Bos taurus
taattcataagaaaaatgaaaacaattaagccagatgcttaataatttccagtatcccaactgaacagagatcataaaacatcactgctatcacacagcattgatggatctacaaaataaaacttgacatgaataaatatcagagacaagggattagaggagtggggtgagaagagatctgtttaagacaaaagtttttaa

SEQ ID NO: 8131 - DNA, 201 bp, Bos taurus
tcaggtctgtggtttcattaacattcaagactcatgacattctttttatatttttaatttgatagataagtctagtttccatctgtcaccacacaaagttattacagtgttattagctataggctgtacattacagccctgtgacatttttattgaagtacagtgggtttacaatagtgtgttagttgcaggtgtacagca

SEQ ID NO: 8132 - DNA, 201 bp, Bos taurus
tcgatttgttcatgttgtgattcttcttttaaatgtgaccgacagagctttaaacacctgttttcttatactgggtgtctgattttctgtaaagacttgaggaataagtgaaagccttttcagtttgtctgctaggtcagtaaatactattttatgttagtaattcacatataattatcaaatcccttaagaatacatcat

SEQ ID NO: 8133 - DNA, 201 bp, Bos taurus
tcatgcaggtagaaaattgtcagcacagcatgctcaaaggggtgggaaggcagtaagaggcagaggctattccaccctacttgcaatcctcaggggcctacataaggaaaagggcttttgagcatacctccaaggctatcttctagagggacggagtccactaaggtcctgtccacccaccagggtcaaggacagattgct

SEQ ID NO: 8134 - DNA, 201 bp, Bos taurus
ctaaatgccaaactgaacaggggcataatgtgtgtattctgtggtcccagcaatttagtaattgtcagaaaaccaccctgagaccatctgttggcctcacccttgtactgccttccccgagaatgagagaaatgcagggtgttgggcaggtgagctgagaggctgctccactagggtggacctctggaccaacatctttgg

SEQ ID NO: 8135 - DNA, 201 bp, Bos taurus
cacgcgttctacgtaactcccaactagcacgagctctaagcagattccaccatatttattgtggtcaagaatggatttttctccttctgagatcattattgctcaaaatacaaatcttttggatctttgctagtcttcagaactcgagatgaaacaggagagaggagaacaaaaaggggcagggtcgcgctagatctgcca

SEQ ID NO: 8136 - DNA, 201 bp, Bos taurus
tatggaagtcaatttgccgagttcaaggctgtgttttttctgatctcaaatcacctagcaactttagattcaggcagaagttgaagtttattttactaaatatggaaaagcttttaaaccaacatttttgaggtaaatctgtagcaaaagtgaggccacctgctgttaaggagagtgcttacacatttgagcacatttctg

SEQ ID NO: 8137 - DNA, 201 bp, Bos taurus
tggtctcacctgaaaccatgagccctgatagcaggtttctcctgtggtaggcagaattctaaaaagccctcatgattcctggcccttggtgtacacatacgttttctcaggtattcaaacactactctagatgttgctgtggaaggattttgcactcataattaaggttccaaatcagttggccttcaggcagggaaataa

SEQ ID NO: 8138 - DNA, 201 bp, Bos taurus
ttttgtatctgtctttgaggcataattgacattcaacattattttaacttcaggtgtacaacataaagatctgatatttatatattttgtgaaaggatcaccacacagtcttgttaacatcctagcatgttgtcttaatagaagatagctagattctcccatctgcttctacaatcagtgttacaatgttatacatcatat

SEQ ID NO: 8139 - DNA, 201 bp, Bos taurus
ctctagccctcctggttgtaccccttctgcttcctctgtcttctcagtcagtacctccccttcctccctcaggctgctcaaggatttcaatggcctggctcctcaggactcactccagaagatcctccccaactggagggctctgtccctcttctcagccatgctggtctcttccttcaacttagcctgggccaactcact

SEQ ID NO: 8140 - DNA, 201 bp, Bos taurus
tttttaacagaagttttaacagccagcactctgtttgccctatgctttttcctctttgcaacaacaaatccaaaatgttgacagaggctgtttcctcatttctgggccccaaactgaagccaagatatggcaaagactcagctggcagaggacatacattatgagcaagaaataaactttatcatttgacactactggaaa

SEQ ID NO: 8141 - DNA, 201 bp, Bos taurus
agtaaacccacaggagctgtgccctgctgaagctcagtggactagccaaggaagttagttgaaggagaggatgcaaagcagtgggcacctaccaacttttctacatgatttggcccctcccttccaggcactcttggctccaggctaaccaagctgtttgccccacatcttcctgccctgttctcctgcctaagcaaagtc

SEQ ID NO: 8142 - DNA, 201 bp, Bos taurus
tctgcagcaaatctgcaaatgcaataagcagccccagcgatggagaaacggcagcaccatcactttggactcacagggatcgcaggccagcaccaccagtgaagcacgattggctctccgagcccctgccatcctcagggaccctgagtccttccggtacccacaagcagggctggctttgggatttttattggccctgaa

SEQ ID NO: 8143 - DNA, 201 bp, Bos taurus
taaagctgtgttcttgagattcccaaaggtaagaaaggaaaagaaagttacagcggtcacttaatatgttcttaacatcatgtgtaaagaaaatctctgacataatctgatcctgaagaatttaaactacagacttcctgattccccagtgctggcaatcacatccaacagtaactatgcacaatggctgaaagaactttt

SEQ ID NO: 8144 - DNA, 201 bp, Bos taurus
gtctcaggggcaggagcttgagctggagaatgggctttctcctgtcctcacggggaaaggcactggagaaatgtaaagtgggcagtgctggggccataccagagatggccctctgcacctgtgacagcctactgggtaccctatttgttgggtgttgagaatcaagcttgtttcaatttgggtggtgatggcaggtggctg

SEQ ID NO: 8145 - DNA, 201 bp, Bos taurus
tctgggtaactgagggccagagggaaaaaggatgctgatttttcattatgattgttttttctggtactttctaaacctgaacagtgttcatgtattatctattgtcaatgaaataaaaatataatctattgtcatatatggcttgaggaaaaaatggccatcatgtgtggcttgtaggtaagctttccgaattgttacagt

SEQ ID NO: 8146 - DNA, 201 bp, Bos taurus
ttaagtcccacaaacctgacttggagggagtagggaagagggggtgagagttgtttccagtcagaaaactgtgggaaagatgctaatgcaggacactgcacgtcatgtggtgaaagggaacttgtgcccccactgcagcaagacagacggaggcgctgccagttttccagatgttccaacagctttaccacttgccatgag

SEQ ID NO: 8147 - DNA, 201 bp, Bos taurus
tgtgtcctctctcagtatcctcggggcctacctctaaagcagaccctgagtggcctctcagtaaatagtctgaagcattatgtagtagggccaagtaggcaatggatgtattaggagttgttgtcatgccactgagtagactgtccttagaatgggcttaatatggatcctgcccattatatggatccagacactcaacaa

SEQ ID NO: 8148 - DNA, 201 bp, Bos taurus
gtaccctattttaatgagtagctgtttgggtctttaaatcccttccctgttgttctgtgtccctagggcttcctgacaggtatgacgcctggctggcccacggaactgcactgtgcccaacccagcgtaattatcttcaaactgagtcagcaggcaacccagattaaaaaccatggctcctgactcaggccctcattcact

SEQ ID NO: 8149 - DNA, 201 bp, Bos taurus
gcggcggttcccacctcggggcaccgataagggtttgataaacaggagcaaatcgcgccctttctggcagagcgcccgggcccttcgctcccggattgccgggagtggaggggagaaggggaggggattgagcctaactccgagtttacggccgcagctgcccctcccgcgtcactgcggcacccccaggcctgagatggc

SEQ ID NO: 8150 - DNA, 201 bp, Bos taurus
ggggctccaaaaggcccctggccccatccccagtttccatccgacagaggtgcgatatgccgcttagccttctctcaactctgagagcttgggctttaggggactcgccctaagatatgtgaggcctcgcgtgggacacattttatcagagctggagaccaagagaggcctgcagacagggaaagaagtggcttcctgaac

SEQ ID NO: 8151 - DNA, 201 bp, Bos taurus
ctaacttttattcacttggttgatcaatcacgtcaatttcattggagttgttgaacatttcataacagggggaaagtcatcgtatggtggccaaatggaccatggagcccaatgtttgccctctggtatccatcctacctccacttggcttaggatttgtcctttcccaaactccagtcaacactggccctgcccctgtga

SEQ ID NO: 8152 - DNA, 201 bp, Bos taurus
gccttcctcacttgtctggtggagatggggccgaggcaatatcagcagcagaaaacggaagcagaacttcttaagctgcccttggctccagtggtctgctgtctggcccagggtgtggacacagtaggttccatgagtatactttgatgaaacccaagtgtcaagccatgttctcccctgtactgtaagcagccagacaga

SEQ ID NO: 8153 - DNA, 201 bp, Bos taurus
tcagtgtctgatttcatttggggctggtttcctctcttgcaggccctggacgcatgaaatctgtattaatttatacatgtggcaggatagtacagcctatacctttccctgtgtttaactgccttctttcttcccctcactcaggcaactagcctagtttgtgcttcttacccagaggagagatgtgatagctagaagtag

SEQ ID NO: 8154 - DNA, 201 bp, Bos taurus
ctagagccaggctgatggacaggagaaaggatcaggctggggaaggacccagcatgatccaggtctggatgcaaggccacacttgggggtcagggaggagatggggttgctgggacacaggaacttgtaagagaataaacaataggacatagaattggatggatagaatagggaagaagaaaaactatttattatgtacca

SEQ ID NO: 8155 - DNA, 201 bp, Bos taurus
agtccaaggaggagcatgttgagtgttgtggggccaggttctgaaaacaagaatgttgttgtacatgaaaataattacacaaggggttaccatttttactgttatgttccaggccaagagatttgccatcgtgctttgatttaattctgttttaacggtttcgaaatgtaggtggcattcagttttatcaaagaggaagtt

SEQ ID NO: 8156 - DNA, 201 bp, Bos taurus
tacagaagcaggccacaggccagatttcctccctgggctatagcctgctgacccctgctctagatcagcactgtccagtagaaatataatttgaaccatgcatgtaatttaaaattttctagtggccacatttaaaaaataaaaagaagcagatgaaatgaattctactacaatattttaccagttatatccaaacttgtt

SEQ ID NO: 8157 - DNA, 201 bp, Bos taurus
gccttgagaaccccctgaacagttatgaaaaggcaaaaggatggggacacatctatggaaatactaggtatatacaaggaagtgtggcctggagcagagctgaaatcactgcagtcttccagcagcccggagggcagaggattctggctctcaaagtccggaaggatggctgcagctccaaggctggagccccagaggcag

SEQ ID NO: 8158 - DNA, 201 bp, Bos taurus
ttgacttgtcatctgtctcccccaactagaacacaagctccttaagggcagagatttccatctgactgatctgtttcccactaaagcctcagggcctgggctgggacacagtagatcctcaattaacatttttggagtcaatgaatgattgatgaaggatggatgaatgattgatgaaggaacgaataaatgaacttccag

SEQ ID NO: 8159 - DNA, 201 bp, Bos taurus
ccatggggtggcaaaaagttggacacaactgagcaactagtgactgactgactgactcaaagaacagccttcccagaacaatgatccagccccaaatatcagtacttctgagtgtttgatacgtgaattttaacatcttgaacatgtgcccttggacctgcctgctgcaggatgctgaaccaggaaagtataaagtcccag

SEQ ID NO: 8160 - DNA, 201 bp, Bos taurus
tccattacaagaaaaagaaagttctttccgtatcaatatgaactggtttcaaggtgtttaaagtgaaaatgaaaataagataccgaacagtattttgtttcattatttgtgtaaacacaaaagcacacggacacctagaaagtggacactagtcacccccggggcagtctgcagcttagggacatgagaaggactgattct

SEQ ID NO: 8161 - DNA, 201 bp, Bos taurus
ctcaaggtcccaggtgaggtcacagccctagcagacacggtgattccagatggtgagatcctgcccaaaggacacaggtactctgtgcccagactcctctcaatacattggtattgagacaatacaccggtattgttttaaactgctcagtgtatggtaatttcttatgcagcaacagaaaactaatataagcctcactct

SEQ ID NO: 8162 - DNA, 201 bp, Bos taurus
aagcactccccttaatagtgcatcttttgttggggatttcaggggaggatgtgggactgtaattttttcctgaattgagagcccccaaaggccttgatagggctctgggagagggatacgaacgtgataaaggggaagcttgcccggcggtggcttcctctcctaggcagtttggtggtgtttcacggtttggctggcctt

SEQ ID NO: 8163 - DNA, 201 bp, Bos taurus
cttgaagagctcagctgctgagtggctggataagagtgaggtcttaacacagtctctgaaagcctttggctccctctgcagagccagagcaagatgacttcgcagtcttgagggaccctgagtgtgtgtcttttgccagctctgtaccttctccctgctcctgccacctccctgctcagctctgctcagtggagactggct

SEQ ID NO: 8164 - DNA, 201 bp, Bos taurus
cttcttatttcagtgttgtctctcgttgtggaacatgggctctaggcacgtaagctcagttgctgtgacctgtgggcttaacttccccttggcctgtggtcctcctagaccagggatccaacctgggaccctgcattggcaggtgttaaccgctggaccactggggaaggcctcccattctctatagggattctgtaccag

SEQ ID NO: 8165 - DNA, 201 bp, Bos taurus
gttttttcctgcaaatccagcctatccttcaccatgctgttacaacagtttttagctggtcatgaggttgcttagatagaacatgccttccatggccatgcgaatgaattctggttaaagggatgttgatggaagcaagtgctggtaagtgtttaactattaataactcacacacacacgcacacaaactcacaaagtgct

SEQ ID NO: 8166 - DNA, 201 bp, Bos taurus
tgaaaagctgcctgttttgaatgaatcccagaataagagtaggctctgcaacaggtcaagctgctatgcaagctgttctgctaactgggccatatgactcggaagatatgatagtacttgaagtattggtggtacccaggatgctgtttggagccgttggcaggccccatcctataggtgaatcacagcacaaacacttag

SEQ ID NO: 8167 - DNA, 201 bp, Bos taurus
actggcggcccctccctggaggcccatttggctcaccagtggcagaaactgctcttaccaaagagccatgctgtgaagagcccataggtttctccatcacgatcatggtcaactagggccttcattattacaggaacctatccttaggaaatatttttactttcacccttcctgagtgccttctggcttgccaagtgaaac

SEQ ID NO: 8168 - DNA, 201 bp, Bos taurus
tgagccgtgtattccacccactccatcctcctaagaaaacctctgttcatctgtttatcctttgaaatgttcaaatgttcatcctttgaaaccctttgcacgggtcttctcctcagtgatccttctctggctacctcccaccattacccctaaattcaatgactctcttctcaccacagctgtatcttccatgtattttta

SEQ ID NO: 8169 - DNA, 201 bp, Bos taurus
aaaggtgctaatagcatttaagttgagctaacagctatcaaactgaggctgtgtttagaccaagataacagggaatgtttactggtggaatcacattaccataaaacaaggctcccatcccactatgcaggtaggctaatactgatgcatctccattttaatggcaagtttcagagtgaacttctactatattcattttct

SEQ ID NO: 8170 - DNA, 201 bp, Bos taurus
gaccttttgttacagtgttacatattacatatttctgaaaacactgtgggcaggtgatatgggtcacacccaaaacttgcaaagctttgtaaccagaacactaacagaagtaaatcttaataagaatgctagaatattttaaaaaatacattaaatctattacaagtaaagaaatattacagtcaacctgagatttaaaaa

SEQ ID NO: 8171 - DNA, 201 bp, Bos taurus
agggaaagtgctttatggcaactttagcccaaggccagtgacaatgaatgctctccagagagagccagctggcctggctgctgctgctccgggtgtttctttgcccttgagaatgtgtagatttagcaaatgacaacactgagcgggcctgtccccagtggagcccctggcccttcctctctttgtgttggctcttttcca

SEQ ID NO: 8172 - DNA, 201 bp, Bos taurus
tttcttaaccttctctcctcccctgccccgcccgcagcgtcttgacgtagttgcacggacaacgtgcacccacattcaaagcccacagggggccgtcctcggtgatgcgccgcaggtgctgcgcaggcgcaagcagcaaggtgctggagccggtgtcatggattgcgtcaactgggtggtaagtgaggatcatcagcatgg

SEQ ID NO: 8173 - DNA, 201 bp, Bos taurus
tcctcaccctttcatactactgtatatgctattcattaacctggaatgattttctcttccttttccatattctattaggtaaacttctggctgtccttcagaattcagcccaaagtcatttctaccataacaccttcttgaacccaacttagctgagtagttatacccatagcacttgatcttatagcccatgatataaca

SEQ ID NO: 8174 - DNA, 201 bp, Bos taurus
agagtgagcgggattggacctgcatggtgggggtcagatccccacaatggggcaattgtttggggaaccatatgaggaagtgtagctgatgggcccccaggagtaccatctcagggctgacttgacgtcaatgctaggctctgtccagctaatctgactggcttccgcctgacttttggccattgatttggacaggaccaa

SEQ ID NO: 8175 - DNA, 201 bp, Bos taurus
cagaggtttcagctcttccagagtcaaagtcagagcttcatcctctctgttctgccagagttcccccttcagtctagggccatgccttccacacatacacactcctaagttcctctcttgcccttactccctagaaacagggctgagggtttcttgctaataagaatgaatggcgctggccacaaagtacaggttaatatt

SEQ ID NO: 8176 - DNA, 201 bp, Bos taurus
aaaggacttggaactgctccacatctcagttttctcctctgcaaaatgggcatatccccttctgctctaccttctgatcaagattttaggaaggccaaattaaggaatatttggtaactatcaaataccacacaggtgtttttagagacaccttcctagtgtgatttcaggaatgcaagataaggctctctacctgcccac

SEQ ID NO: 8177 - DNA, 201 bp, Bos taurus
cagtattcttgcctgggtaatcccatgaagagaggagcctggagggctggagttcatgtggttgcagagtcggacatggcctagcgactaaccaacaatggcaatgtacatgttactttgactccctgagttatgctgtccaatacggtaagcactatcctcttggccactgggcacttgccatgtggctagtcttagttg

SEQ ID NO: 8178 - DNA, 201 bp, Bos taurus
tcaaccacagtgggtaaactcaccagtccctgcccaactttgtgctctctgtatccttacctttgtcttggtttatgcctacattgtgaactttctttaaccaattccttcatcacctcatcacattaatctgcttatttaaattttactcatccttccagattcatcacaaatgccaaccctgccttagtgcttctcttt

SEQ ID NO: 8179 - DNA, 201 bp, Bos taurus
ctcagaaaagctggacttcatcagcaagctgaagacagcagggcataggtgagagcagtgtgttttccagccctggtttggaactaggttcagtatgtatctcccagacgcagagaggggaaccctgactaacagctcctctgagtctgcttccattcccttgtccacatcctccacagctctcaacaggagcaacaaaag

SEQ ID NO: 8180 - DNA, 201 bp, Bos taurus
agaaatatcaaatatcagatcagaaagggtacaatagaatagaaatgatagatgatgatataaactcactgaaataaaagaaagggccagtaaagggacttgagttcttaattctactggggtgaatttttttgaagcaggagcctatcagcctcattaagcaaggcctgatttttctttcagcagctgcctcaactttct

SEQ ID NO: 8181 - DNA, 201 bp, Bos taurus
tcagaagtgtgtcatgtactagtaccacaaatacaatttttcaaataattctactcattaggcttttgctggtgtcttttaatataatcaaggtcaattattgtatctttttagtagtcttacatagcaatttaaaaagttagactctcaatttgagggttccttcatgagcgagaggcatgcttcagagtccgtgtctat

SEQ ID NO: 8182 - DNA, 201 bp, Bos taurus
agtcatcaaggaggacaaattgaatgatggggtgtgacaccaggtgtggctgacgaccaaaagcattattcaaaatctaaatttgtgactgcttagaaaacaacaaaagtaggcctagctccttcagtaccccaaattcaattagattctttcatatttgtgccttagtcttgttattctcacacctgtagttcccaatct

SEQ ID NO: 8183 - DNA, 201 bp, Bos taurus
actatttataacatcctagggctgtagtctatctatttacataaactttgaaatcctgatcatttcactgacaatgctttgattgtctcagtgcactgtcgccccaaatattctactgaacaaaatattctttataaataagtgaatgcaattctagtttgaattcactggaaattcttaatggcaaaataaatcttaaca

SEQ ID NO: 8184 - DNA, 201 bp, Bos taurus
caacataatgcagagaggtttatatgaagctgctctgtaccaacacattcctaaataacagaagaagaaaacagttctagaggatattctacagagtctataagcatttcccctagtcacaggatgtcagtgtgataaaaggcacattaaggaggaaaggatctgcctttctcaaccctacagactgttcactgtaaaaat

SEQ ID NO: 8185 - DNA, 201 bp, Bos taurus
tccgtgtctatgtggaaattcatttctacgaagccaaagggccagggtcgtgtcattggtcactgatcctcatggtttagtggccaggatttagcactcttggcatcacagcctgacttcagtctctggccaggaactgaaactccgcttcaagcttctggaggcccaggccacccaagatcagggtcttcatgatgggat

SEQ ID NO: 8186 - DNA, 201 bp, Bos taurus
aataacactaagcaggctacgtaagttcttacagtttctgattagcaaataaaatttgcttaatttggtactactgtacattctagatttggaaaagttaataaaggccatctagtctggactcttcactttatacataaggaatcatgctaagagagagggtaaggaccttgcctaagatcacaaatgatgttgggcaat

SEQ ID NO: 8187 - DNA, 201 bp, Bos taurus
agaatgaatttctaggtcctttaactcccaccacatattcagaaaaaaactaaaattgcaacactggaaagggagaaaaaattacccattgccactcaatatatttcactcagaaggaggctttgaaagaagcaatgatcctttgtgcccaaggctgctcaatttgagcactgcatcctgttactctctgaaatgatattt

SEQ ID NO: 8188 - DNA, 201 bp, Bos taurus
gtatagagtaggcactcaatatcttactgtaaatttctcaatactttgttacttccccatgtgttgatttgtctttaagaacttatcatgattttaatttcgaaaggagattcgttttcttatgataccgggttatcaagtgaaaaatagcgagtggcagttaagtatcaatagcctttgaaaatctatcaagagttctaa

SEQ ID NO: 8189 - DNA, 201 bp, Bos taurus
aagagttggacatgactgagcgactaagcagaacacagcacatataaatatagaaggctgtttggtctattgaggactaatctgacctagatgagtttattcctaagtccaaatcaaatgttgtaaggtgctttgttcctcttggataagtgtatttgagatgcaatatgatctcaaatgtttttgatatttttattatca

SEQ ID NO: 8190 - DNA, 201 bp, Bos taurus
gcagattcgcagttatatttgggtgtgggtccagggaatcccttaatctccacttccagaatacattcattttgtgtcttgaacaatccaccagacccattgcttctcaaatcaccacacttggcagtggtggggggtatgcagaggggctagagttggtaaaagacagaagaaaaatactaagtgggcagggaatgtcac

SEQ ID NO: 8191 - DNA, 201 bp, Bos taurus
aaagtgcattctcttttcactgttaattaaggcacagggccacaggcaataccatcgatcctgtctagtcataaggcatttctctgagttcttactaatacagagaactaggcttaaccaaaggaacttctgttatgcaaatccaagtcatgcccaaagtgtaatcaaatcctgatgaccaaaaatagtcttctcataaga

SEQ ID NO: 8192 - DNA, 201 bp, Bos taurus
catagctaggattgcctttggcataatatagacataaaaatgatatacttttcaccttataaatagtttctatctaggtggaggagacaggctaattaacgaggccagcgattcatagattaagatggaacaatatcatattggtcaaaatgtatattgtataattctgaattgagtgatctgcaaatcagaagcaaaaac

SEQ ID NO: 8193 - DNA, 201 bp, Bos taurus
cataaatggtatgtgaaaacagttcattacctacatgaattttcgtttttccctggctatcatcatcacacttttcacaattacttaaatgttctatacaatttaccatttacaaacaagcacatctttcgtattctgttatccaaattatttaactatttgtactatttacactgtggctaaaaggtgaactagattgcc

SEQ ID NO: 8194 - DNA, 201 bp, Bos taurus
gtccatgggggtcacaaagagtcggatatgattgagcaactaagtgcagagatctttgacaagacctgacataggattctcccttacagaccaaaaggtggtttaacaagaagcttcaaaaaaacaaaacaaaacaaacaaacaaaaaacagaatataagtatgcataataagactgacaaggttaaaaagcaaagacaga

SEQ ID NO: 8195 - DNA, 201 bp, Bos taurus
aggaagaacatttccccacttctaatgtttctctactggcactttggggacacccagggctcagcaccacactgttttccttttcaatctaatttcctctaggggcagctgtccacatctggtcttgcctaattctgagatcctattttagtaaattcatttatctcttactgttgaaggaaaggggaccccttccagggc

SEQ ID NO: 8196 - DNA, 201 bp, Bos taurus
agtgaagtggtgctcttgaacttttcataactttatgttgctaggaaacaactttaccatcactgcagagtttagacttggagcatctgtttcatttaaagtctggcttccaggcagtatagattgcattgagcattggggtagggggtggggtggaagcaaaagcaattgctttctaaaaacaacaatgtttaacatgtt

SEQ ID NO: 8197 - DNA, 201 bp, Bos taurus
acatggacccctgcatagactacccgagtttcctcacagcctgagtgattctggagggagcaagttagaacaatctgacagaatccacagaggcttttcactacctagtctctgatgtcacaaactgccacttcctccttattttacctattagaagacaggaaataagacagcactcgggggaagtaaatataggctcta

SEQ ID NO: 8198 - DNA, 201 bp, Bos taurus
catggaaactaatggacaggggccaaagatactgctaacatcctaaaatacacaggatattatcccccaccatgaagaattatctgcccctgaatatcaacagcatcaaggtcaagaaatccaggcctagggaaatacccatgtgtataaatgataggcagatgaaaagttaaagttagaaacacaatacagtaagttcaa

SEQ ID NO: 8199 - DNA, 201 bp, Bos taurus
agtaacagtctaaagcaactgcattggtcaggattcttgagagaaacacaaacaataggaaacatttggcaagtctaaatttgtaggccaggccaataggcgagaaacacaggcagaattcctatgctacagtcttgagacacaattctttctcttctgggaaacctccagttttgctcttaagattttcacctgattaaa

SEQ ID NO: 8200 - DNA, 201 bp, Bos taurus
caaaagaatgttctttagtattttctttaatttaggcctgctggtgattcaaaactgttttagattttttttgtctccatgtttttttattttaccttcattcttgaaaaatatctttgctgtgagtagaattctaacttgccatttattttttcagttccttgtggatgccatgacagtgttttggcatccattgcttta

SEQ ID NO: 8201 - DNA, 201 bp, Bos taurus
gaaataacaaacaaggccctctgacaggagctggtttctagcaagtggtttcagggcaggcactctgctataggggtttagctagactaaggaaaaaatcactttccacaggctagtggggccagcgtattccttcaggattacgtttatttttatctaaatcagaccatctaccccaatgcctaagcctcaaaactaggt

SEQ ID NO: 8202 - DNA, 201 bp, Bos taurus
ccagtgagccacatgatgtgtccagtttctgacacagatgctcggaaaccagaggccttcagctgtctggggtgtggccagtcattgtgcgaaaggccccggactccagcatcagcacccctaccctttctggaagatgtgggagaattcagttaaggagggggacagggtcagtctaagcaaattctcaggtccacttgg

SEQ ID NO: 8203 - DNA, 201 bp, Bos taurus
tactgattgcctgcttttcagtaagcagctgttctctggttaggaatcctgtgagtaagcgtggttcggttatgctggaaatgctggccgagctgatgagcagaagcaagtgaaggaataaacatgttccaggtgagagcccaggtaggcagagctcagagtacagagagaggaagggttgttaagaggggttctagaggc

SEQ ID NO: 8204 - DNA, 201 bp, Bos taurus
gagctgctcctatttgtagaactagaagtaggcgctctttttctctggtgctctggctgcctccttacttagctcaggcccagcaaaagcagtttgaagtagggaacatgcctctgaactgtcttccattgtctgcctctagggctcccagctcctccttgggcaggcatctggccagatctaccccggccttgctgggtt

SEQ ID NO: 8205 - DNA, 201 bp, Bos taurus
atgtgagaaggaaaaaagaattcttgagacaaaaggtatttaccattcatattattcacatcttctggtacttgacttggttcaatctaggatttcggacagcagaagtctgtattttggagtaggcagcaatatttaagctgtaagacctcccaggccacctcttgcaagatagtcctccttttccatttctttccttcc

SEQ ID NO: 8206 - DNA, 201 bp, Bos taurus
aaatatttatatataaattaagcaataagatcctgggcctgaagaaagtgtttttctttctcctgctaatacctttttttaggccagaaaggcatttcttataattgagggaggtcctgtccccataacccctaaggggtcccccagcccagcttaaaggtgatgtttctccagagcaaggcctgtatctcactggagtgt

SEQ ID NO: 8207 - DNA, 201 bp, Bos taurus
ctcctatgagtatcccctctgtttccttcttccttctgttccttggaggggctctcttcactatttgcatatcatcagtagaacactgttacttgtaggtgggagatgagaggtatgctgttctgattaatcctcagtcttaggaaggattatctccctggatcttgggtgtgagaagcattctcagtgctgaagtctctc

SEQ ID NO: 8208 - DNA, 201 bp, Bos taurus
atgtgtttattggaaatagtttctaacaaagtattaaattatcattatgattctgaaaatagtccttatggagcaaacttttaatacctattattagcatcattactatatgtactaacttgaaagttatgtacaattctttctcgaaaaactcaattttaagcaaatcaaactaacatatgccctctggtctcagttccc

SEQ ID NO: 8209 - DNA, 201 bp, Bos taurus
agatacttttttcccagagttagctggaagtttatttcaatatttgagtacagtagggactttgtacattttgttccttacagtatgctagcacagagaatggttcctggcacatgataggtactcattaaacacttatatactgaatggacattaattaggatttttttgtgtgtgcagattcttatgtatcattagaaa

SEQ ID NO: 8210 - DNA, 201 bp, Bos taurus
acatgtgctcttcatctggggcagccctgcatttaactggcttgttcacacttctgcttaagcttctgtggaacaaaggtgactttttacaaagtttgaacacccatgatctaacccagagaggccaacagaagcaacatttggatgcatgagctgggtttctggaccagagaatagatggtcccagatgacaccatttct

SEQ ID NO: 8211 - DNA, 201 bp, Bos taurus
ggagttggtgatggacagggaggcctggcgtgctgcgattcatggggtcgcaaagagttggacacaactgagtgactgatctgatctgatggtggttttgctattttggccgccatttagtctcaggctctgtttccttcacaattgctcatttacagtgggttctactgtttcttttcccttctctgttcttactgttgt

SEQ ID NO: 8212 - DNA, 201 bp, Bos taurus
aggtctgttaaggttaggactgctgtcttttgcagactctcactttaagccaagtctttgcccagcagaccacaatgcaacaaagaggatttggggcccagtgtacttggttttgccaaatattcactgctctgataaatcatctattagctaagctaactttggggaattatctatggaatttaattctatttgctggcc

SEQ ID NO: 8213 - DNA, 201 bp, Bos taurus
ataaaactgctaaaatacaactgctctggcccacgcagaggagcaacccagggcagtattattgacaactccacttaggggaaatgcatgacaaaagatatgcaaggccatttgggctgacccaactggaggttagtgggcttccctggaggctcaaagggtaaagaatctccctgaaatgcaggagaccaggttttgatt

SEQ ID NO: 8214 - DNA, 201 bp, Bos taurus
acacataggagcatccctggtatcttattatttagaaagagaaaatacaccatttgtgcaacatgatagagtaagagtttgttctttttcctctggtaaaaaagtttgattaaatttctcataagttggtctattttgggctgcagtcatgaaatttttgtgaagggcaagtctgggaaaaaaatgaacactgaatttgaa

SEQ ID NO: 8215 - DNA, 201 bp, Bos taurus
cacccatgatggaactcaaatagtactttggtctttatttccattatcatctgggagttttatgtatattgtctcatttttcatcttcacaatgatatggcatctgtattttcgttattaaacacagagatctggatatcaagaaggattacattgcccatctattttccttagtaatataagatctgggattcaaatcca

SEQ ID NO: 8216 - DNA, 201 bp, Bos taurus
gtgttcatatttcatttcttccaatgttacacatgtgaaaaaacactagggatttcccttgtgatccagtggctgactctgcactcccagtgccatgggttccagtttaatccctggtcagggactagatcccagatgccttaactaagagtttgtatacagcaatggaaagattccacaggccacaaggaaaatcgaaga

SEQ ID NO: 8217 - DNA, 201 bp, Bos taurus
tttatgttggtccattcaagtgagtgcattttctatgattctgcaggaagggctttatagtttttaaaaggggtcaaggcaggaacactgatttaaatacactgctgtcaatttggcctcacatatctgcattcatatatcccaggagtttaaacaaataggcaaaggcttttcattgacacaatgtctgttcaaataaaa

SEQ ID NO: 8218 - DNA, 201 bp, Bos taurus
caataacttaattgtatctgttatgagccttctattctacaagaaggagtgagaaggtttgatatgcacacttgtgtgtagggagagatggatagtaaaaaaagttagaaagaaggaatataagcggggaagttgactcaggcatgaagtgatttaattccatcttgtggcaagggagtatgtaaacatgaagctaagagt

SEQ ID NO: 8219 - DNA, 201 bp, Bos taurus
ctgcaatggcaggcgggttctttatcattagcaccacttgggaagcccaaagttgtcacatgattacctaatgatcagagaatgtctggccttttcataaggacacactttgccattcatatttatattgtcattttttaagaatggtgaggaacaagcatatcgtactgtgatttagaagctgactacttaaaggccagg

SEQ ID NO: 8220 - DNA, 201 bp, Bos taurus
cttatcctctagtttgaagtcctaaggaaagagcttccttttctgtcactcagctatattgaaccaattgttgtggccagcaggtagaataattttcctaaaacatagcactaatatatcatttccctactcaacagcctttgatgtcttccccttgttttctgaatagcttaaagatttaggttttatctaaggccctaa

SEQ ID NO: 8221 - DNA, 201 bp, Bos taurus
aaaatatacacttggtgaccagaatcaccagaagtgatgtgttgtgaatgtggaagtagtgtaagagtaaaggagatacacaaggactgaatctgtcaaacatactttgttaaggagagatgccagaaactggaataagctcaagagcagctccatttgcccgtctccctccaacttcccaaacaaatctcagttcatgat

SEQ ID NO: 8222 - DNA, 201 bp, Bos taurus
acacaggcccctgccctttgatttctccatccttagttttggcccttacactgtttgtctatttacagtcgtcagcaaaattgttctgagtgtctgtgtgcgctgtgcttgagggcctggggtgtgcaaaaccccatgaggaataagaaggatgtgatggtgggaccttctgtggaccactctcataggtcaaacaggatt

SEQ ID NO: 8223 - DNA, 201 bp, Bos taurus
agacaagttctcagtcttagaggtgaacctgctgctgtgagaggaccccaaacagtaggcactcaggttacccaagcggctcaggtccctcaggttagatcaacctcattaggcaaatccagaagtttcagaagttctgtttactcatcaaaagacagagttttcagcaacatggtttaacaaggactttgagtgctgagc

SEQ ID NO: 8224 - DNA, 201 bp, Bos taurus
ctgtgagccatgtgttactggtttgccaaaaggtgaatatggaaatggaaaggaagcctgccaaatattttaaagcaatttgacaaaaataattttatgtatgttgactctaataataaaaattgaggcttgaattttgtatgttttaaaaattttttttctagtaattttttgttgttattgttcagttgctaagtcgtg

SEQ ID NO: 8225 - DNA, 201 bp, Bos taurus
attgataataggtacctacgtgactttggaatacttggccatcgtgcctccttttaacacaaaactgagacaagtttaaagtccgatcaaggacttgacgaaggagggatggccacttgaggatcttaaatgaccacgtggatgtgaggtggaggtagttgatttcaacttggccattcctgcacctccatggttgaagtc

SEQ ID NO: 8226 - DNA, 201 bp, Bos taurus
aatctctgaaactctctttcctaaacactgaagacttagatattggttattgaatagaatcagaataatcaaatagaaaaaataaagatgatacaggcagggtaagaaagaatgagcacaggctagagagacaaaacaaggaaataaagaggatccttctttcacttatttttcttttcagaataagtagttctgtgttcc

SEQ ID NO: 8227 - DNA, 201 bp, Bos taurus
acttgagtcagacttggaattcctaattaaatcattaatatttgcgataatatgtccacttgtaattaaacagagcagaaatccagcccaggcctgtctcttcagaggaaaagaaaatcattatgactagtattgctggatctgatcactgtctcctgtttcttcatcatgtgaaatgcccagtccccatcagccaccaca

SEQ ID NO: 8228 - DNA, 201 bp, Bos taurus
ggggaaatatcaatgaatatatagtcggccagattctccccagggcaaaacagaaaaggatcagcatgcaaatctgcccagattactctgtggatctcaatacagggatttgggggccattccaggagagctggggctagtagtagaaggaggaaacctgtcaccatcagcacctcccccccaggcccctcaggactaata

SEQ ID NO: 8229 - DNA, 201 bp, Bos taurus
ctaaggcaggtagaatattttattccattattagctataaaattttaaatactgagatcccttgagaattaatcaagaaaaatcatgtgtttaaaaaaaagcctagtacagtttctgacttgggtttaaatttatactaaagaatgtaagatcttttcttgcaagtaggttttgatgaaaatacagagcataatgcataac

SEQ ID NO: 8230 - DNA, 201 bp, Bos taurus
cccatcttccaaatccatcaacttctcaaatcaggccaattaacgagaaatcaattctgaaacattatttaaaatgttaaattatcacttaactacccataccattggatcatgggccaaaagcccaaatggagaataataattcttttaagacagctctggataagaatgaccttgaaaaatgtattttgcacatgttcc

SEQ ID NO: 8231 - DNA, 201 bp, Bos taurus
aggaagaccccctggagagggaaatggcaacctgtcccagtattcctgtctggaaaatcacatggacagaggagcctggagggccacagtccatgcggccgcaaagagtcatgactgagcacccacaaagaaagagggagctgaaaaagtgaaatcagcaaggcaagatatgctaaagaacagagctaatagcattaaatc

SEQ ID NO: 8232 - DNA, 201 bp, Bos taurus
aatccccttaaaatgtttacaaatgaaagatttcagctccacatattttgcttggtacttctgcgttctgtagacagattaattcttgcgccaggcccaagtatttccggatgttctgttctactctgtctacttcctgtttggttgacttttatttcctgtactctttgttgaagttgtaaacttccattttggcctagg

SEQ ID NO: 8233 - DNA, 201 bp, Bos taurus
caaattcctgaccttgtaaaatttatagtcaagaaacagataacaagcaaaataaataaatgaatcacatgctatttcatgtgataaatgcaatgagaaatgatccatttattggttcagttcagttcagccactcagtcaggtccgattttttgcaacccatggactgtgtcacgccaggtctccttgtccatcaccaac

SEQ ID NO: 8234 - DNA, 201 bp, Bos taurus
tttccattattgctcccttttaaacagcttctgggcctcgtgacagcacttttggaaacactggggcacatctgtagtgaagtcactaatatgtttgacttctagtcttcctcaggcctcatgactccagcattgctggggagcccctatttatgtctccatttgaagaatctcaagagagtgcttgtggctccttctctc

SEQ ID NO: 8235 - DNA, 201 bp, Bos taurus
tgacggccgaggagctggggggacagctggggggacagctggggggacaggtagcaaggtggacaaggatacaggatcagccgcagattgctgagctgcatgtgcaaagaacggattcagggggcccagaggcttgcagcttgccatacgtagaatgctgaattccttaatttgatgccttctggagtgtgaagtcaagtg

SEQ ID NO: 8236 - DNA, 201 bp, Bos taurus
gcacaggggctcgcaggctggaagcccaacaccagctttcctttgcttcttcagtatctgcattaggtataatccagtaaaatgtggataaagcgttttaagtcaaggagagaggccagcctgaattaaggaaaagtcaaatacccgaaagtatagaaggaagcgttagctggaattctgatggggatgcaaatggaggag

SEQ ID NO: 8237 - DNA, 201 bp, Bos taurus
cttatattctcttgaaaaggcccaggtctccagatcccaggatgagatttgagatttatgctgatttcctctgtgcgtccaccctctgtcctgtggaccccggccacaaccctcccctctgatggcagcgaggtccccgatgctgggcccatggcagctcagatgtacgtgcttctgcttatggaaggcgaggctcttcac

SEQ ID NO: 8238 - DNA, 201 bp, Bos taurus
accacttcctgataacagtgacttcggtgggatttccggtggcatttcccacaatagttatgctgtttgacttattctttcggttgctatttatactcctgatctttatgctttactgactgagtcactcgggtataaagcttttcttacctaaaatcagactaagagaatatccaatgggtgcctgagcccacgccaagc

SEQ ID NO: 8239 - DNA, 201 bp, Bos taurus
cctgctgtgtgcatcggaatcacctggagggctttccaaacacaggctgctgcctcccatctcaagcttctgattcagtaggtctgggctgtggcccagctaatagtttcacctcacatactgttggtgtgttctggggaccccccacttgagaaccactggcttagattgtgagttggccacaaattaggttctcaccta

SEQ ID NO: 8240 - DNA, 201 bp, Bos taurus
aaaaggcctctcctggaacctctaattttcttagttccttcttatggatccagcattccagaatttgtctagaattgttaaagcagatgaatctgtgagcacattgcacctcatagacaggccagcagatgtgaatggagaggtggggctgttctgtgttcctctgtgcccctcgctcgccccgagtgttcacccaaaacc

SEQ ID NO: 8241 - DNA, 201 bp, Bos taurus
cactgccctggtccaggcaggctcctctcttattcttctgcctcctctcctgctcacagggcctctgtggtcacaaaggcctacaagggtgttccctcaagataagctgatcagtaacctccttccccccatgtttccccacatagcctaacatattcacaggtttccaaggaggaagatgtggacatctttgggggccag

SEQ ID NO: 8242 - DNA, 201 bp, Bos taurus
gagcccagatgaggcctctttgttaccaccagcttaccactgctttaagtttccaatttcagcctcagctagctgcagccagaggaccactaagatctggccactttcttcaatcaatactgctgctaagtcccttcaattgtgtctgactctgtgcaaccccatagacagcagcccaccaggttcctctgtccctgggat

SEQ ID NO: 8243 - DNA, 201 bp, Bos taurus
ccaccctcttcctcctcaccactccatgtccataaatttgttaattcatttcataaatgtttattgattgcctaacctgggccaggtaccagggacactatagtaaacaggacacgtgtgcccccaacacctaataagaacctactgtgttgtatagggaaatcaactcaatgctctgtgatggcctatgttggaaaagaa

SEQ ID NO: 8244 - DNA, 201 bp, Bos taurus
ggccaatacccataacagctacttctttaggacaaaatacagcagtcaaaagtctctctctctctgtgttgctgtaatgaagaaataaaagaaccagactatttttcaaggtaggcctcaactatccagcttccacaggtaaaatactgcttttgccatctgatcccatgatctaggctcactaaagcaactttctctgca

SEQ ID NO: 8245 - DNA, 201 bp, Bos taurus
tgcactccctgaatagaattcaatttagagaagttaacactcaggttatctcttagaggatattgggagttttccaggcagtcaggaaggacaacgcgtgaagaggtgatgaacagaaataatcacaaatgactctgcatatctaagacgaagaggtgtttggatataagagaaggtgagggcgatttacaaggttcagat

SEQ ID NO: 8246 - DNA, 201 bp, Bos taurus
tttgtctttttctgtctgactgacttcactcagtatgattatctctcagttgatggacactttgaatgtatccagtgttttctattacagtgctgcaagagtgttctattacatttgtcttcatgccgtaaccttactgatgtttctgtaaaatatagtgtttccagtgggtttattggttataagcaacacacaaccttt

SEQ ID NO: 8247 - DNA, 201 bp, Bos taurus
gctgcccattggactcatttgaagacctgaggcctgggtgccttccaggggcactgggacttttttaaagatattacttcttttataattaaaaaatttattatttatgtatttttggccgtgctgggtcttcgttgctgggcgtggactttttctagttgcagcgctactgattgcgttgccttctcttgttgtggagca

SEQ ID NO: 8248 - DNA, 201 bp, Bos taurus
cagccccgttttctcaccgaggcctggagcgtgggcttgggtcagcccccgcagaaccaaaaacgcccacggggagacagaggcaggcaggcaagcgatcgggtcacttccgctcactcgggggcctcccttcgtccccgcccgtaagacagctgctggaggtcatactcacccgcggcggcggagagtccaggacgcacc

SEQ ID NO: 8249 - DNA, 201 bp, Bos taurus
ggacacaactgagccactaacagacatgaagggaaaggttgttcacatcttgcccaaaacctcagaagacaagagggcctcttccttatgccaaagactaacccattcctctatcattttccagaaatcttctttgtattagcctcccgtgtgaagtcagcttatgagaacaaaggaagccccatttttctggccgtctca

SEQ ID NO: 8250 - DNA, 201 bp, Bos taurus
ccaatgaagaaaatagaaaacatcttcctttgagtttgttttccaacaggactggcaggggagctgataagtagtacacccaaattattcaatgtgcttacaagtggtgagtgctgtgcaaagaaatggagcatggaaaggggaattggaagtagcagagagcagtttagggtggtgagtgtaagtcttgttcagaaggtg

SEQ ID NO: 8251 - DNA, 201 bp, Bos taurus
agggagccagaaacaggccacagggtgaactggaagggaagctgacttgtcagtagggaacagactttggggacaagtcttcatggtctaaggcttggagtgagttagctgcaatggggcctcacccttgaagcttctagctctgtgctgtgggggccactaatctcagatgactcttgagattttcatttaaattcataa

SEQ ID NO: 8252 - DNA, 201 bp, Bos taurus
ccactgttgatagacatgatcatctccagctggcatgtagagggcactgggaagcccatggctttgttgctctgggcaggcttaagtgtgagcacctccaggggaacactgacctttctgggggccccaggaaatgccttgctctttttgtctcccttcttcactatatcagagcatatctgttcctttaggtaacacaag

SEQ ID NO: 8253 - DNA, 201 bp, Bos taurus
cagaactgtgagccgaggtaggaataggccacctggaaatccacctaaatgtcctcctgccccaagaatactgcgtgaagcctgtcagcctctaggatctctccatggaaaagggattttgttggccaaattgaggtcaggtgaaagagatcagggaacaccagtgatggtttaagtgttacactaactggaaggttaact

SEQ ID NO: 8254 - DNA, 201 bp, Bos taurus
aagtgggccttagaaaacatcactatgaacaaagctagtggaggtgatggaattccagttgagctattccaaatcctgaaagatgatgctgtgagggcgccggctgcggaaaatggctgctcggccgcggaggcatatctctggaattgcaaagcagccacagggtgacttgtgtgatggggctaagaaagcgattgatga

SEQ ID NO: 8255 - DNA, 201 bp, Bos taurus
gttgttcagggcggcctcgcgcatcttgtggtacatgaattcgttctggcggaacatgcgcagttccatctccgtctgcatccgcatggcctgtgggacgcggatacatcggaaacagtgatgacaaagccccaggacgtgtcggtctctgacttatgttggccctgctggaaaggacacatatacaccctacacacacat

SEQ ID NO: 8256 - DNA, 201 bp, Bos taurus
atgagaaaaaaagagcattcttacagttttattgttgaaaataatagaatctgagtggcagaaacaagtgtgaaggcccctttgtccaatattatgcctttatttagattgttgatgtctctcttatgaatgaactgacacactcatcatttaacgaaagatttgctacatttgcaagaatcttcaaacagttctcctgcc

SEQ ID NO: 8257 - DNA, 201 bp, Bos taurus
atcagaatggccaagtaaaatgtttccaggtttaaaaataggcacttacacaaaggcatgttttttaatcccaacgtttttgatgacattatctactctatgtccagcacgacgatgcagaaggccacttatttcactacttcacaaatcagaaattatctcattatgcttctatttatgtcttcttccacccagactttt

SEQ ID NO: 8258 - DNA, 201 bp, Bos taurus
cccaagtgggcctgggagtatgcaggaagcagagcaaactttcagggcaaaactgtagaggtgtatctttggggtcctcctttcaggcccactcttccttgttttgcccaaaggttacagcatggttgtcactgatctatctcctcagtctaccctagggtcagttctttaccttgttgttaacaaaggcctttaaaaaag

SEQ ID NO: 8259 - DNA, 201 bp, Bos taurus
aacagactggacaagaaagactggagacagggaggtctatcctaggctatggtcatggtcaaagcccaaagtgaaatgtgcgtgggccaaactggaaaaggaaagggaaagacagagacaggggcttgatccatgctctgggaagatcccacaggcttcagagcaactaggcctatgaggcacaattactgagccagtgct

SEQ ID NO: 8260 - DNA, 201 bp, Bos taurus
ttaacttctcctcttttgcttctttttttttattctccagagacgtaaatgggtaaatagacgggggaacttacacatctgacacaaggccctggagtgacaccctaccgtgtgcaacagacagaggtagcagtctttgttctcattccagattttatttatttgggccctctcttttttcttgatagctaccttttcttt

SEQ ID NO: 8261 - DNA, 201 bp, Bos taurus
taatagagagaatatagctagcacatcaaaaccatccatccattcacagctgtcattgagcagggaaaagctggagcagatctttcagggataaaacattagatggttgagagaaaatattaagtgatggtaaggtagtacaaaaatatgccaaaaatcacagaggtggcatttctacaactgaagtttgggaaattctgg

SEQ ID NO: 8262 - DNA, 201 bp, Bos taurus
gggacatgtgcggctccgttcagtcctctccagtgtgtccacagcccccacttctgatgagaatgcacagccatggcaggtgagtccagactcccattgacggaatggggggacggccctgcccccatcgggaggcggggctcttctgtccccaagcagaaagaggcagcctccgatcttccatcctgctcctcacaggct

SEQ ID NO: 8263 - DNA, 201 bp, Bos taurus
acaacgctcatcacaggctgcaccaatgctgcgggtctggtggtggtgggaaacttccaggtacacccgcctgccggcctttcagcttcctctagagggacagcgatgggggcaggggatgaagaggtggaggggaggggctgatctgtgctccctctctgggcccaggtggaccacgctaagtctctgcactatgtcgga

SEQ ID NO: 8264 - DNA, 201 bp, Bos taurus
ggtcccctcacagcaaacaagttattaggtgtttctgccaggagcttccttccactccaagcccacctggcctggccagggccctgtcctttccacccccgggatgtctctccttccagtgactcagaactctcacctgcatggatgatgactctggccagggctgtggccacctcaggcctgacccttcaggcagccaaa

SEQ ID NO: 8265 - DNA, 201 bp, Bos taurus
gctgctcccctcagtctccctggttaattcttgctcgtctctccaatttgtgaaagctgcagtgccagggctcggccctttacctgttttctcctcagccctcacaccccagagatcttctgtctgggtaccactgttgtgccgatgactgtgaatgtctctctgtctttaaccaggcctcctccctgacaggcttcccag

SEQ ID NO: 8266 - DNA, 201 bp, Bos taurus
ccatttactgctgtattcctggtgccacatgcctagagctgtgcctagtgcttggtgcgcacagcgtcagtagttgggaagcaaaggagcgttgaacaaacgcagggaaccatccatgtgccatgcctggatgttgtctggcacacagtcaatatcagccagctgctttcagtatcattactgtcagcgcgtggctagatg

SEQ ID NO: 8267 - DNA, 201 bp, Bos taurus
aatattagtttcaggtatataacagtgattcaatatttttatggattatactctatataaaggtattatgaaaattggcttactctgtgctgtacagtatgtccttgcagcttattattttatacagagtagtttgtatctcttaatcacctgcccctatcttgcccctccctccttccctctccccattgatacccacta

SEQ ID NO: 8268 - DNA, 201 bp, Bos taurus
ctataggatgtaagcatcacatgatatgaaacaagttacattaaaaaaaaagacattctatgggaagattctgggtcactgataagtgatcttgatctggtagttggtatataggtattttgggtccagaagatcccctggaggagggcatggcaaccagctccagtattcttacttggagaatcccatggacagaggagc

SEQ ID NO: 8269 - DNA, 201 bp, Bos taurus
agctggatacgaatgactgactaacactcatgttgggagtagggtccttcaacaggaaagattaagtgttgaggttttcaaggcctatcccttggcacttaaggagaatagacagctgctagttggagagagctttcttgtgttatctcctgtactctgtcttccatgttaagactatgaatattctggcctggaaagggc

SEQ ID NO: 8270 - DNA, 201 bp, Bos taurus
ggtgtccagtaatggtataacatatctttgtttgggttttttttttttttgctatgagagtacaacttccaatgattcctagctggtatctcagttccacttctcttcatcaattttctattgagaagaaagcattattttgcatttgttctggaaaaattcaataggtttatctgagaacagattattgtgctagatttg

SEQ ID NO: 8271 - DNA, 201 bp, Bos taurus
taacaagagcactggcctgtggtactttacaaaactccatcattgacttttagataagtcagttaatgtgcttgggattaggtttcctgttttgaagaataaagactttgaaatcaggaaatttctgaagggtctcttaaagccccaatttttatgcttgtaacagaacttgagtagttgagtcagcattttttggtcctc

SEQ ID NO: 8272 - DNA, 201 bp, Bos taurus
ggttattaaagataggatgtgactagcttgtggacatgcttctgattggttggtggtgaaggaaccctggagtcaacttcatcaagctgctggttccagttgttctgggatctacatgcttgagggcagcatacagttaacttctacctggtggggatttcagtatctgcaaaatagctcaaaggatatggctcagaatat

SEQ ID NO: 8273 - DNA, 201 bp, Bos taurus
agaagatatatgtgcttccatatccttatgttcatgtgtttttatttctcctcagggtgaatctctgatgatgaataagaaatttattctgggaggattttctggtgtattacagaataatttctatttctctgggcttccaactgctataacctgggccatcttatttagttagaatgcataagtggttttttagagtcc

SEQ ID NO: 8274 - DNA, 201 bp, Bos taurus
agcatcttgaaactcttccgccaattggctggccaccatccaaaagaatctctccctagtcatgtcttacctgagccccaccctgctgctgaattggtgaattgggttttcttctcaaagaaagcttctccaccttgttcattactgaactcagagcccccacccctgcctatctggttgttcataagaaagctcaaatcc

SEQ ID NO: 8275 - DNA, 201 bp, Bos taurus
tttttttttttttcacttcaaaagcttttataatattttcttacaataagaattattttctgagagaacacaaactgagaaccattttggggatagcttagatggtcattctagaaaatgggacggagcaatggtgtgttatagaaaccatacaggctatgtggaggactgtgttgaatgattagcacatagtgataggtt

SEQ ID NO: 8276 - DNA, 201 bp, Bos taurus
catggtgcacagtgtcctcctctcctaggatatgagtgtatgtggctaataatttgctgtcattctcatctgttcagtgtcagctgttgtgtgtttggccgttctataatctcaagacaggaatccattcttcaccaagaagttgaataagaggtgattaaaccactctgctaaatgaaatgggctcttttcaatggccta

SEQ ID NO: 8277 - DNA, 201 bp, Bos taurus
attcttctcccaatggggttctgaactcccatacctagccatgccctgttatgggtattctcattctggttgagttagaaaaccctacacaaggccaaccacacacataccctactcatctagcctggactctgacatcccatgtgagactcacttggaagtccctttatgtgtttttgaggactaatattaggccacttc

SEQ ID NO: 8278 - DNA, 201 bp, Bos taurus
agtctctgatacttacaaactctatggttataaacacacaattttcacatctattattgcttccttgggcattgttggagcactgaaaaatcccactgtatacactgccatttctgatggaatttttttttgtcctgaaattgatataaatttcttttcattcttggaatgtctacatgttcactcaaacctttaccagga

SEQ ID NO: 8279 - DNA, 201 bp, Bos taurus
aatgaagtgatggggtcagatgccatgatctttgtcttgtagaatgttgagttttaagccagcttcttcaaaaggctgctgctgatgaaagaaaaccaggcatctcaaggactgtagggttttttcatgtatgggaagatgcaaaatctgggcttgtttaaatcattcctttgattttcagctcagttatctggagccagt

SEQ ID NO: 8280 - DNA, 201 bp, Bos taurus
tattgcattttagtgggaggaagatgaaggagctaggatagaatgggaaagaagataaatgagatcaatttcatacaagtaggacttttttttctgcctcgcaatacttgtacctttctctcatgttaattctttcttttacacacatgcacacacacacaaactgcaccttaatcttcttttactaaaataaggaattcc

SEQ ID NO: 8281 - DNA, 201 bp, Bos taurus
aaacccatatatactcaatgtgaaggttgttgttttcaaccactaagcagttccagcttcaagtaataaatactacataaaggtttgtgtagtgttgcctattgcactaaccctgccgatatatgtctattatcagaggatttctgctataattaagtagatttttgagctgtttaaatgagaagaatacttgattttaac

SEQ ID NO: 8282 - DNA, 201 bp, Bos taurus
accagtgggtctgtggggagttttgtatctcagagggcaacataaccaggaggaaaaacaacaacaacaaaacccacagaatatgggcctaatcacaactcccagtggagaagtagcccagacgctcacgtaccagcgagagggggctgaacagagagtcgcaggttgcatgcttagggtaaggactgggcctgaatgccc

SEQ ID NO: 8283 - DNA, 201 bp, Bos taurus
tgatctgatcaaatctcattttccatgggaaaatcaaattcaatgaatagagcaggtgagccagtgaagaatccatttgtttacatgatgtagtatgaaacatcctgaaagttccacctcaaccatgttacctccaggcttaaaacactcactgttggcttgaggcaccatctctcaaaatctctacaacatcagaatctt

SEQ ID NO: 8284 - DNA, 201 bp, Bos taurus
tttaaagtgttttcatcagaccctcagttgtgctctctccattagaaccatcaataacaagagagacaaaaattatcaatctgtaactaggcaacaaggacaaagctaatgaacattaggccagagatggtagcctttataaataaaatccaaataacaccttagctgaatatatttttccagtttattgctgttttgaca

SEQ ID NO: 8285 - DNA, 201 bp, Bos taurus
atggttgtttaatttctctcagtggcttttaaaattttcaatacatgggttttgtatctacattattaaatgtatccctaggtagttcctgtttgcttctgaatgaaatatgataatttttatgtttaatttttcatttgtttttcattgttgcatatagaaatacaatttatatctcataataaccttataagtcagtaa

SEQ ID NO: 8286 - DNA, 201 bp, Bos taurus
ttctcttgtgttgttgctatattaaggactggcccctggttttgaacaagataaatttttctcactccgaattcattctcatcatagggctgcaggaaaggggactcctttcagggcctgagagtgggctcttgtctaacacttggatatgaattgtccaaggagacacacatgctgacaaactgcaaattttaagaaatg

SEQ ID NO: 8287 - DNA, 201 bp, Bos taurus
ccataaggctggatacaagacagctccctcacattccctctattagtgcaatggattccaacctctgtctctttttgttacatgttagtgatgacactcctgtgacttagatattctcatgtatgatgccaagtttatctacaactccaaactctattctacctctctaagaaagccaggattgaactggatgctgaagta

SEQ ID NO: 8288 - DNA, 201 bp, Bos taurus
tttgtgtgactccatgggctatggcccaccaagctatggagtctttaataactctattgtgttaaatcacatatttaaagtttaaatttgtcagctattctatgatcattccttggccataacccactcttctatactctgatctgaactgctgagactgtggtattgaaaagctcatttcccagatcttttacccctcat

SEQ ID NO: 8289 - DNA, 201 bp, Bos taurus
aatgccagagctggagtctatttccaggccctatctctctctctctcacacacacacacacacaattacatataaaatacatatcacaattgcaccctccgcaatcctgacaatggaaaaggccatcattctctttatagataactgagagccaatgaggcaggcttccaacactaagttaaagttaccttaagaggaatg

SEQ ID NO: 8290 - DNA, 201 bp, Bos taurus
gcagaatgtctccactggctcaggtgttcagcttctggcctagagactagaaactcagtcagtgctcacatcacttatctttggagataaggaaccatctttccaattgaaatcttcatggccttcaggaaaattatattatcaatacaaaaaattgactgcttacataataagtgttgcatagtagaaacagctgtaaga

SEQ ID NO: 8291 - DNA, 201 bp, Bos taurus
tacacaatggcctgcctcagagaattctgcccctctgcctgactgttaaactaaactgcctttgttaagaaccctgtccacccagaaacgcaggaaggaaaaaattaatgtgtcccctgtcagaggcttgccattctgggagatgtttgcaagataaacggcctttttactttgcttcctcaccttcccctaatgtctgaa

SEQ ID NO: 8292 - DNA, 201 bp, Bos taurus
cctgctagcagatctaaagttaaagggcaaatagttccgtggtctgcatgaaaatgaaaggctagcatatttttccaagttgaataaaaatgtactgttagtataaatatcctttttcagaagccacaaagggaagagaggcaacaattttgttctagtgctgcattctgccttaagtaggcaaatataggacagagtgct

SEQ ID NO: 8293 - DNA, 201 bp, Bos taurus
aataccatctaatagactccagtcttttgtggttaaaatgtagttccaggacttattttgtgcctaaagatcaggaaagtggacaggagttgataccaactggcacatcatccttataaaggaaatcatgagaatgagtaacaggacagagatcagactgagaataagagaatgaaggagaccatgaaacatgcttaaact

SEQ ID NO: 8294 - DNA, 201 bp, Bos taurus
gagaggaatttgaacaaaacaggccttgccaaggtctgtctagcacaatacacagattgatcccatactttttgtgatctttggtgataactattttcctggaccaaggcctctatttaaagtattttaagcagttaacagggaggtaaaatcctttcttaagtcatgtgggccttgattgttttcagtccaaaataatcc

SEQ ID NO: 8295 - DNA, 201 bp, Bos taurus
tcataaactttctttttccataattcctggatgccacatgcataatttgggttcattttgataatattctaagttaatatccttaatattggttggaacctgtgattgccaaggtgaactaagtggcttgtagatatattggttagcacaaggaaatgaattgttaacacctttaatgctgttaaatcaaccaccaaaggc

SEQ ID NO: 8296 - DNA, 201 bp, Bos taurus
gtgttataaaaggaagggtggtgaacagaaaaatcagaaacattgtttgaataacctgtgttaataagtgtatgatcaggccacttgaaatagctgttgtcttgatctccatacagcccctgctcaaccaaccaatgccttcttcacctacaatctacaatctgacttttttaggccacagctagagagtgctcctatcaa

SEQ ID NO: 8297 - DNA, 201 bp, Bos taurus
ctttttggagtttttagaaacataagtgtattatgtcaaatgggaaaaattttagagggattttaaagaaaagggtaatatcatgactattttaaagtttctatgcaatttgacacattagaacatttgtaacaacaaatggctagtaaaaatccaagaaaatcatcaagaaaaataagtccaaaacttgactgtggaaga

SEQ ID NO: 8298 - DNA, 201 bp, Bos taurus
aatcacttgaaaaactagaaaagatataaaaagtaaatgagaattgtggagctgagtcacactgagaataggattatggatagacgaatcataattcctgatactgcagtatctgaaaatggcctattttctttccatcccatgtttaattgagttactctatgaggttcctaaatacctgtcaacaaattggtctcccat

SEQ ID NO: 8299 - DNA, 201 bp, Bos taurus
ggaatcatcattgttggaagctgctgttcctgagtttactataatgaattttcaattagagtttaattgccctacctcactcttgtcagagctgccagatattaccaaagctgtgttgctgctgatttttcaacccagaggctgtactttgctagtttccaggccaaatataactttgcagtatttcagcagtctctgcct

SEQ ID NO: 8300 - DNA, 201 bp, Bos taurus
ttccagctactggcacaagatggccagctctagcagagacctttcccatttcccagcagcatgtgcaagagggtcagccgagatggggctcttttccagttccccgtttcagtattgggcctgtcccaggtctttttctagcacccagtggcaggcacatgtaggcttgccctggaagaggcctttcctagcattttgtta

SEQ ID NO: 8301 - DNA, 201 bp, Bos taurus
tatctttaagcttatcaatagtaaatgaaacatatttgatcaatgtagaaaattccaaaagttatagaaacaaagaaatataataatcatgccctctccatccacaggtaagagttaattattatggaaatgtattgttatagaatcaagaatatgtttgagcatatttgtttgtataatattttcattctatactatttt

SEQ ID NO: 8302 - DNA, 201 bp, Bos taurus
aggcatctctctctgactcagtttcctgagtcataaattacacgaactactttgtatatctttgaggaagttaaacaattttatagaagaaagcagctagtatgtatttcttgatagaaatctatctgttctagtccattattatctatctgatgaggtttgaaacttctgcccttcttatgtcactttgtcaaataatat

SEQ ID NO: 8303 - DNA, 201 bp, Bos taurus
ttactgattaatgtgacacattcagtaaaaattatctcttttataaagtttattttgtgactttttccccttttctttctaagaatattacaatgtatacgtttgactactgtgttctattatctaaagacatcttagaatggaaacactagttaaaggcttagaacatttgtttctatatatcttgatagttactgctaa

SEQ ID NO: 8304 - DNA, 201 bp, Bos taurus
accttttcactatgtgatatagtcctctcccatccaactaataatattatagattaaatccaacttgtcttgaaatcatgtattaatgaggggccttgggcataaaactaaagttaatttgcatggatgtctctgttctcttttttattgaagtctagccagaccatgtcaccgaggaactgtgagtgatggggaacctca

SEQ ID NO: 8305 - DNA, 201 bp, Bos taurus
tacatgctcccaggacaatggggcactttcaggaatctacagatatatttcttagtagggagagttatcctaccttcctgagacatgagggcaggtactgacagctgctggtggatttcccactaatgacagctatttttcaccctcccaggataatggggacaggttctaggaaatctgatggatttcctagggacagaa

SEQ ID NO: 8306 - DNA, 201 bp, Bos taurus
ttcatacttttattcatcagtttccttggaaatcctaggaatcttctttgctgagcttaaaattgcacacaaaaaagaagaagaacacttttagctttctcttctcattcaagatccgtggcaaattaaaaacagaaaacaaagaacaaagcccagctattttctggaaatgagagaggaaaagggtaaacacacaagaac

SEQ ID NO: 8307 - DNA, 201 bp, Bos taurus
ctcccaaggttactcacttggacctttaggaattgattctttttggacttctggcttccttcagattttgcctatgggcctcttcatagagcaattgagaatataacaacatgcttcatcagagtgagcaagtgaggagaggcagagagaggaggagaggaagagagagagagggagagagagactataagaaagaggcct

SEQ ID NO: 8308 - DNA, 201 bp, Bos taurus
tagagtaatgagtgaaaacacaggctctcaagtcagactgaggttggatttcactctacaacctattacctatttgagcttgggcctttagctcactcttcgtgtttttaattcctttacgtgtaaaatgagtataataataggatctgcctcaaaaagtgattgtttggggccaaatgaactaaaaatatataaaatttc

SEQ ID NO: 8309 - DNA, 201 bp, Bos taurus
gttaaagcatctatttccctatgaaacattctatcttactcttacatggcattctttggtatgaagaagcatgcaaataagaagagatggccttacattgtgtcagaaaagtagctctatatctaagggtgcagtctataaataattcaggggagaaggcaaggaaagcaatggcatacaggaagtgtgagatatggccac

SEQ ID NO: 8310 - DNA, 201 bp, Bos taurus
tgtctcttaactaatgataagtttatccaaccttattatttatattttttaatggatttctttaaattgagaacaatatgttttgctttccattaatgccgggtctaattaggtcataatttgattgcatttgttcttttgattttattatttaaaatgaattttgacatagacatattctgctattattaaaagactctt

SEQ ID NO: 8311 - DNA, 201 bp, Bos taurus
agtatttttagactcacagtaacaattaatatacaaaaatggactggatatatcaaattttcatgatatattagttgtctcttttgaaggacggaggtagaatggcaggaatgaagaacaggaaagagcataaaaatgatattcaattttgtgtataagaatttgttaacaaaagtgttctgaggcaaatatgaaaatcat

SEQ ID NO: 8312 - DNA, 201 bp, Bos taurus
ggataagtaaactatcatttcttatcccttttccagagtgtttcaaagtcagatcctataatgcatatagaattgttttggaatctgcatggaaatgatgaagttgaggggcattttgtcctttatctcatgtattgtcatgggttgcagttcatatttgtcatgtataagttttaggtacatattgcatgcctgtgcctc

SEQ ID NO: 8313 - DNA, 201 bp, Bos taurus
cacctttaaaactgagatactagagtttcctggtggtccagtagttaggactccatgctttcactgtagtgagccttggttccattcctggtcaggaaacgaagatcctgaaagccacatggcaaagccaaaaaaaaaacctgcgataccaatacctgctcctgcctatcacaaagggcagctaggaaagacaaatgaatt

SEQ ID NO: 8314 - DNA, 201 bp, Bos taurus
gacatatgaaggacatgggtattaacagtttcagctgcattttgtggggggctgcaccacacagcttgggggatctagtttcctgacgattgtgtgcgtgcgtggtaactcgcttcactagtgctggactcttagagactccacggactgtagcccgccagactcctctgtctatgggattcttcaggcaagaatcttttt

SEQ ID NO: 8315 - DNA, 201 bp, Bos taurus
acagaaatcaatccttctcaatatttgaagctctcatagtgcccaacctgttttgttcctctcttcatttcaatataatcattaccctgatttttgtagtcatcactctcttattttccttcagttttatgacacacatatatatgttattaaatgtctcatgctttcattgcatttttcacatttcatgtaccccaacat

SEQ ID NO: 8316 - DNA, 201 bp, Bos taurus
agacttttcagggccctgggtctcccacccattctgtggagacctccaggcctcaacttctggcattacaacacaggctctgagcttttcctcctctgtgcgtcatgtaagggctggcccaactgtggtagtcctcctctttccttttcccctcaatcgaaaacagttacatttctgcccctaggtttatgccctctaaat

SEQ ID NO: 8317 - DNA, 201 bp, Bos taurus
caggatttgtcttcaaagagtcctgagcttgaaacctagattgagtaaaaagtgtcactgtcaatatcttgtaattctgacgcctttatcaccttcttaatgtgagctcttgactgcatcagagaattaaaatgtgagtcacaaaataatgagagaaagatgagtgtgggagccattacattttgtgtcagaaatgacatg

SEQ ID NO: 8318 - DNA, 201 bp, Bos taurus
ataaaggaagctacttgagaccatcagaaacaatagactgaagagaaaggtagtatccttaatctgatctttttgatgatgctgcctctcaagcttttcttgttgtctgagaaatatcaaaaggaagctcttgagaaaggcttggggcctcagtcatttcctgactgtcagtcccaatatagattgcagatcacaggctga

SEQ ID NO: 8319 - DNA, 201 bp, Bos taurus
ccacagccctcacaatctcctctgggctcttggctccccatcttttgaattctgaggatgcagcttgttggaggatctccggccactgcccctggtgccaccctctctcatcctcaaggcaccacctctcctggggtgctgctgcctatgtgtcaggagcacctgatgatgactcaggcccctcttcccttctgcactatg

SEQ ID NO: 8320 - DNA, 201 bp, Bos taurus
tataaaccaataaattttcaattattttaaaaaataaaatgttgcttgcaatgaagagagtatgtctaatacaaaggttaaaagactggcccagagttgcccagccagtaagagaaaatggctagagcttgaatccggggttgtctggttccaaagcctaggcccttacctttggcccacactatagctacactcatttag

SEQ ID NO: 8321 - DNA, 201 bp, Bos taurus
ttaataccacctgttcattcacacccaattcaaagccactttttccataagtcctttcttgatcacattccccactccagtggaaatctccttcccctctgggtacttatcacgctaacctgtgtgtaaaaagtgttagcaaagaaccacactccttcacttgagacatagtctgatcatgacttttgaagtccaagtaaa

SEQ ID NO: 8322 - DNA, 201 bp, Bos taurus
agatgttcattggttgagggataactttcagttttctgtaaatcatgcatttacaggaaaccagtccctcaatccttaggtatcattttcctgagggcccgtgtgtgagattctccatttctgttttagatttaatttctttcatgaggcagcaggaacagaatatgtaaaggccccgaggcagaagcagactggcttgtt

SEQ ID NO: 8323 - DNA, 201 bp, Bos taurus
attggtttattggacttattttccagttgtgatgctcctaatatttcagatcccttctggatattttagaatcattgtatgtttcccttgaaacattatagatgtacttttgaaaagttatgagaactcacaatgtattaagcatattattgttgttatttagtcactctagtgatgtccagctctttgagaccccatgga

SEQ ID NO: 8324 - DNA, 201 bp, Bos taurus
atatatgcgttagtatactgtattagtgtttttctttctggcttacttcactctgtatagccatatttttaaaaagagatgatttgtagtgtctcagggacgtttgataactttgagctttccagtccttgcctattcactattgtgtttttacaacagactacgtcagtgatgacaattagaagattttgaagctctatt

SEQ ID NO: 8325 - DNA, 201 bp, Bos taurus
ttcctcagacctacctgggtttgggggctctgcccattcctctctgcgggtctagctttcccacgcctgtgccagggcgactcagagctctaggcctggagacagagcccctggctttgccttcctctcttcagagcgatgttccttcagccttctcctttttgatcacactaagtcctgcctgccactcagatatggaac

SEQ ID NO: 8326 - DNA, 201 bp, Bos taurus
acttgagcttagcttcaacgtccctctgaaaccagtttattactgtcactgaattcatgggcatggagacctaatgcataaaatgcctggccttactgattgggcaacaggcaaggagccttgggcaagaggtctcagtaggctgaatctgtccttagctctcttcctttcattggctatatattgccctctggctatcag

SEQ ID NO: 8327 - DNA, 201 bp, Bos taurus
tggcataaagatagatatgtcaatcaatggaatttaattgagagtccagaaagaaacactcacattgatgatcagttgattttcaacatgaatggtaagacaattcagtggggaaggaacagttttttggcaaatggtgctgggacaactggatgcccacacagaaaagaatgaagttcattctctaacacaaatcacatg

SEQ ID NO: 8328 - DNA, 201 bp, Bos taurus
aaggaaggcacgggtcccgcgaggggaggtggggccgccggacagcccctccagcgaagagccctgagctttgttcgcctcgggcccgcgggccgggcacgcactcttgtgcacgcgcgcacacacagatatacacaaagatatacacagagacacacagagatatacacacaagggccccgcagcgcgctgccccgcagg

SEQ ID NO: 8329 - DNA, 201 bp, Bos taurus
agaagtagtacacagcaacccagaaacatggacattggaactgaagctgatgaaacaggaaccaaataagctgtattctttggccagcatgctcaggaagctggcattttttggtttgtttatttgttcacctaagtccaggggtctgaagactctggcccatgagccaagtctggcccactatttgtttataaatgaggc

SEQ ID NO: 8330 - DNA, 201 bp, Bos taurus
aggaaatggcaacccactccaatattcttgcctgacaaatcccatggacagaggagcctggcagtttacaatctgtggggtcacaaagaatcggccatgattgagcgactgatgcacacaggcacgcatgtgtttaaaatatctattctgaaatcagttacatttttcattctgggttgtagacagtgagttagaaggcca

SEQ ID NO: 8331 - DNA, 201 bp, Bos taurus
aggcccatgacgccagccttgctcctcccagagcgtcgcccttctgccagctgagcccgatcgagacaccagcgtgatttatgggacgctctcctgcccttttgggccgtttactgccctgtgcatggagttcttcgctggttccctttctctttgtgtgcaagcaatggtcacatcttaatgcaaagcaacctttggaaa

SEQ ID NO: 8332 - DNA, 201 bp, Bos taurus
atggggatagggaggaaaaacccagacccaaggaaagggctgagcagggccctggggcatagccttcgatggaagccaagttttatttagctagtccctcgtgtgaagagccagcccaccttatggccagccgaaagcagcacaagcatttctgctcaaactgcccaccgtcccctcatcagctcatgctcagcccctctc

SEQ ID NO: 8333 - DNA, 201 bp, Bos taurus
gtgtttcaacaggtaggatggtctatgagaaattttaatcagaagaggccacaccttcaagtaagccactctttaaattcttttccaggcaaactcatcactctgtaaataaacctgtagttgcatttacataaaagtatttagtatgttagcatctcctctgaagattggggcaaaagaaaatagatgggatctctttct

SEQ ID NO: 8334 - DNA, 201 bp, Bos taurus
aacctcactggtggattcttagcacacccaagacacacgtgatcctgcgttccttcgaaactgagcataactgttcaatgccatctgggtcacagggatgtcatccaaggaggcctgctcacaggctctcattcatcctcttgcctggctctgtggtcctcatggagggtcttcgattcagtactgagaactgaattctga

SEQ ID NO: 8335 - DNA, 201 bp, Bos taurus
gcagaggggagtgtggagggcaggggccctgccttgaaggagcccctctctttttgaggatgggagttgggtggaggagcagcagacctggggctctgcagcatgagggcccacaggaggcagggcctctgacccagaggggcttccccagaggcgagagagctggttttggagctggacttggaaaaatgactccagctt

SEQ ID NO: 8336 - DNA, 201 bp, Bos taurus
gtgagatcctgagaaggccaggtggactcaggactgggctggaggtgggctggccagtgcagtgcccgtggggatctggtggaagacaggctggaaaaacaccccagagagagatcatgaaaggccttctatgccaggctaaaaagtgtgacctttatcctgaaggcaaagggcagccacagaaggattttaagtgccagg

SEQ ID NO: 8337 - DNA, 201 bp, Bos taurus
cactgctgccacgcacacttaggccccctcactgtcctccgtctgcagggcaaacactcatgagtccagaaagccaccttaggctcagtgctcccaagatgctttcggatgagtgctgtgtggccacgtggaggcacgctctgtactcatgataaaacaaggtattgagttgcccggggcatatttagggctttttttttt

SEQ ID NO: 8338 - DNA, 201 bp, Bos taurus
tcgggctagggcgcagccgaggctggtgggccaggagcgggagacggagggcctccgtctgcaggtgctggaggtggtggctgctgctgcggcggagggggatacatgccgttaggtgccgtgaggggtacccggggtcctaagatgtttcctgggattggaggcataccaggaggggtggggccactcccaggggggtgg

SEQ ID NO: 8339 - DNA, 201 bp, Bos taurus
ttaaatatacccaacagcttcagaaataggcagctatcagagattctaagttttgttcttggtggcaaaaatctttttctatgtgtaaagcatgaaaaaaaaaatatatatatataatatatatatatgtatataaacagacacgcattatattaggcttcccaggtggtgcactggtaaagaatccacctgccagtgcag

SEQ ID NO: 8340 - DNA, 201 bp, Bos taurus
cccttcccttcctttcgttcagctaaatattactaatgactaaggaatctataaactatagtgacagactgccaaggtaccctaaagataaagcattcttgcaggaattttgagttataaaaaagcttatagaatcctaagagaagggagggactgattgtttagggatgtaaagaagacatctcaaaagagggacacaag

SEQ ID NO: 8341 - DNA, 201 bp, Bos taurus
tataccaatttctatttccatgaacattattctagtgttcccttttctccacatccttgccaacatttgctacttgtggcctttttgatgttactcattctaacaggtgtgaagtgatatctcattgtggttttgatttgcatttctctgatgattagtgatgttgagtatcttttcatgtgactgttggccatctgtttg

SEQ ID NO: 8342 - DNA, 201 bp, Bos taurus
actcctcagagacacttgacactcatcacttttcaagttaggagatgtggtgttgaccctgaagctctcagtatattatcaggtcattgtttggcacagatttcagcttcttttaatggtgcactttaccaggcagcttttttctacatcattaaacagcaactctaatacgtgtgccccctttcttatttaccatagata

SEQ ID NO: 8343 - DNA, 201 bp, Bos taurus
tggcccaaactgaggcaccctgcctagtttttctataacttgactttaaggcaacagaaaatagaaagaggggctcataagaaaacaaagtgccatcaccggtatactctggctctttcagggccaatctcaacctgttatcaggaccagatccagaaacctccaatgcctcttgcttattcaaaatgccctcctattttt

SEQ ID NO: 8344 - DNA, 201 bp, Bos taurus
ttgtgaagaaagaaacaaaataattggccaaatataaataaagacctagaagaactgtcctatattagtgatttaaatctccttcctactgcacccttcctcactaaggaggcccatattcctcctcaggcgtgtatttctgccttgttctgacttatcctattcctcctccatcaggacaccccacattcctccatgggt

SEQ ID NO: 8345 - DNA, 201 bp, Bos taurus
ggggcaatgaaggccagtgaagacaggggacacaggaatggaagaaggacacaaggggctgggcagaaggagagacggaagtgaaaaggtgggaaaaagcaagagcggaagttcagaggccaagaagaaaatgtgaagaaaagagtaaaagtgaagagtccaacaaatagatcccttctgatatttccttctcttggtctt

SEQ ID NO: 8346 - DNA, 201 bp, Bos taurus
ccagccgagggcagtgactgcccagagcttactctctggctccctgcccactccatgctctcaaattccccaggggtcagaggggggccccttgtcctgccgagaatgtgctgctcctcttcttcctactcctgcctgaggtagaaggaccatcctcgcagttaaaactatctctgcagttactcctatgaagcagcttca

SEQ ID NO: 8347 - DNA, 201 bp, Bos taurus
ctctgattacatttagtcttttgatgtcagggaaggcctaggaagctaaaggtctcctacaaacaagaggcaggcagaggacatgatgggtgggtggtggcagcatctgtcccaggaaggcctttaaggtcccactgggctacatctcagggacatccctttgctgtcatcctaagaattgtctttaccttcatgctgagc

SEQ ID NO: 8348 - DNA, 201 bp, Bos taurus
gataatatcagggttaaaaaatgtcaaggagaggtggtgtttaatgaggaagatggccagggtccaacctccaggaattgccaaaaggaatgtctgggccaaagaagaaactccattaactagagttgagaagaattcgccagaacagttagaagagaaacagctaagaactgttaccactgaggccaggagagagagaat

SEQ ID NO: 8349 - DNA, 201 bp, Bos taurus
cctagattcatcgtgctttctggacccctttccagcctccacccactcccatctgaacacgccttgctctgaagcttgcaagattacacagagctctgccttggcctgccctgcaccgcaagccccagacgcccagtctgttgtcatctccaccttgccttcatggcttccctcatccctgcagggctggtcttgacactt

SEQ ID NO: 8350 - DNA, 201 bp, Bos taurus
gaagctaaatgatgccatctgttgaggttgctcttccaaggcatggaacaaggaaggcagagaattgcagagagtggatgggggcaggcagctcatggaggatggcccgcccactctctgccccactatcaacagggagaacatctccacccagggcaaaactttgagaaagttctagaaagagtcctggttccccagtga

SEQ ID NO: 8351 - DNA, 201 bp, Bos taurus
cctgcattggaaggcagacttttaacctctggcccactagagaagtccctaaaagtagctttgaatgaactaatgaacctgggcaagtggccacacttccagtagaattcatggatgctccactaaccccaaaagtctctggcacccttcctcaaatccttcacttggccacactgcttgaaactgtacccatcagagatc

SEQ ID NO: 8352 - DNA, 201 bp, Bos taurus
gggcctcccttcttccagcctgccacttccagagatgcccacagcttcctcatagagctaaaatcagagatgttttccagggctccctccctcaccccccaatcctggcccaaattatctattttgaaaacattgggcttcttctttagtacagtcttccatgaagcaggtgtcagactgtcgcagcgacccgcagtgcca

SEQ ID NO: 8353 - DNA, 201 bp, Bos taurus
agatcattcctttgtactgtcagagggagcctagccctgctgacaccttaatctcagacttctagcctacagagccctgagagaaaaatctctatatgccgtttcatttatggccctttattaaaaaggagccctaaatctaatgtaattagattattaatcaatttttcaacaaccctaaaaatgtaatcggagaaggca

SEQ ID NO: 8354 - DNA, 201 bp, Bos taurus
acttcagatgtaacaaaagaatgagtttttaaaaaatattcaaaggttagcaaactatgacccacagccaggtttgtctacttttactggaacatggccatgcccattcctctacttatttctacggttgctttcacactacaacagcaaactgagtggcatggcatggccaagaaagcctaaaatattcactatctggcc

SEQ ID NO: 8355 - DNA, 201 bp, Bos taurus
catctcgggccaagtagtcagattccaaactgttctgagttttcgtgccaggtacccgggaggggtccgggtataggggaaggcctttaacacccgtcgactctttaaagtgctctacagttattacaggagaggaaatgggctctctctggagacctagaaaagcacaaaatgcagaattaatgcactggtccattcaac

SEQ ID NO: 8356 - DNA, 201 bp, Bos taurus
cacagttccttgtaatttgattctatgtataaattagtctaaataccacaacaataatacacaactgttctatcagacaaaaatcttccctgtacacccagtccttactcttctcctaatctaattttgtcattttgagaatatcattaaagtgggcttctaactaagcttcgttaaaggctgatggaggaagagaagggt

SEQ ID NO: 8357 - DNA, 201 bp, Bos taurus
gttaattcataccacaatcctatgaagccaggtgatattcttccctgtaagacaattactctctgaagaaaacagaggcttaaagagattagattcaaccgaggacttctttaaaagaaaaaaaaaaaaaacacctaagtccaatacttaaacagagaggcttggaaattatttcaaaaaccgttttaagatagttggcaa

SEQ ID NO: 8358 - DNA, 201 bp, Bos taurus
taagagggaagtgagaagagtgtaggtaggtaaagcagacactggtagagcaggggatgcacagagagcaatagaaaagccatctttggtggcccaaccatacagtggtacttgtttagacagcgctagcaaaccgatatatcagtctatgatacacttgagccttgctagtatagctaagttttactgtcctaaaatccc

SEQ ID NO: 8359 - DNA, 201 bp, Bos taurus
tattgtattgaagtattaattacatatgataaaatgcacagatcttaagtccttagttcagtgaggtgttttttcttaaggggttcacttttaaaaattgcttctttttattttatttttaaaattttctttctctttgttgtttgttgttgtcgtttagtcactaagtcatgtccaactctttcgcaaccccatggactg

SEQ ID NO: 8360 - DNA, 201 bp, Bos taurus
cagcagactcctcagagggctcctccaagctaatctcctgcttcccaaggtcagtcctgccaaagttcaaatcaacatgtcaccacatggaaaagtgtaccgtggctgctcaggacatactgagccaggcctgccttacctgcccccttcccacaccctggcctgtgcagcagcagctcatgccagacactccccacccag

SEQ ID NO: 8361 - DNA, 201 bp, Bos taurus
atggaatcagagatatagggcagcctccgtctttctggcttgtcctcagtctggcttctttttggttgccagggttgaatgttgcttgggtttgcctaatcatactctgaatgggcctcactggcttgggggccagttctgcagtgatggcatgtgacgtctcctggatgcttttcctgggtggtggcaatggcttggagc

SEQ ID NO: 8362 - DNA, 201 bp, Bos taurus
tgaatcataaggccttcaagggaaggaatcatgctgttgatgtttcttttagaacatccctaatatgctgaattgcatactattggtgcctaataagtgcatggtaaccggccagtgctaaatcattggcactttgttattgtatcagtcctcaaagtcaaatggctgcagtggagattatagtcagagccaggggacctc

SEQ ID NO: 8363 - DNA, 201 bp, Bos taurus
taggtaatatttacttaacatggcctgctggggccaagctgactctgcattgactccagccagcccgtagctcacctcgctcacctgcctgccgcggtcacctgcccagtggccaaggctccggggagctggaaggctccttgtttacaggacaagcacagataaggtttctcacagccccacctgagctcctgtgccaag

SEQ ID NO: 8364 - DNA, 201 bp, Bos taurus
gggttaaagatggcaccttacataatgaacttggccttgaagtctcctctagcaatagggacccgggcaaaagaagcaccttccccagttcatccatagtcattcaggccctgcctgaggagaggccaaatgaaaactcaggccatgtcaagtgacagagactgactgtctctaagccccaggggagccttgtggctgtga

SEQ ID NO: 8365 - DNA, 201 bp, Bos taurus
atcatcattatattattattgtcctaaagttcaggacaataatattgtcctatcgtccccactgtttttagaggtaacaatgaggcctgttagaaatgttacttgtagtttagcaaaaagagccatgaattttgagtcacatgatctggatcataatggtggttgaagcacttgactcatccagtggcctagggcaagaca

SEQ ID NO: 8366 - DNA, 201 bp, Bos taurus
tctctgtcttcacgtggccgaaggggcaagagagctctctgggacctcttgataagagcgctcactaatcccattcatagggccttcaccctcatgacccgatccactacccaaaagccccgtctcctcttactaccactctggggggtagatttcaacataggaatttggggatgggggcagggagcacacacaggccat

SEQ ID NO: 8367 - DNA, 201 bp, Bos taurus
ttaatatattcccagtaaaccctgaatggtttcctcatctgttaagtaagtttggatgacatcatcgctaaggttatcttcccatccacacgtttggcctatggttcaaagtctccatccgtccatctctcccgcctgtaggacccagatgtgatcaacaccgctttgccggtagaatacgggcccctcgtggaagaggag

SEQ ID NO: 8368 - DNA, 201 bp, Bos taurus
gcagagccactttggtgaagacaataaaataggacttgaagtttatgaagttcggtcttgtgtgttaactttgtaagtatgtaacttgatcgtgaaaaaataaatttttcctttaagtcaattttaaaggtttactccattcttaaataggccttttttagactgtctgaaataaaacttctttccaaaagaatttaaaat

SEQ ID NO: 8369 - DNA, 201 bp, Bos taurus
ccacaggataaagagatgctgtcaaggggagataagcacagatgggtggagggaggcttccttgaatgaaccttggggcctcttctgaccctctgccctgcggtcatcatacctccaggacacctgtgattcagtgacagaaagcctgtgccaggatttccccatctgccctgggacggggaagccaacagggcataaggc

SEQ ID NO: 8370 - DNA, 201 bp, Bos taurus
ctgtggtggctccccggtggctctgggccatggacagggcgggcaatgcgtggagccacacatgaagggtggcagggcacttccttctgccccactggaccgcccaccatggcctgccctggagagtgcccagtcaggcagggcctccaccaggcactgggcacctttgtgtgaatgtgagtaaagcatccctctgtgcag

SEQ ID NO: 8371 - DNA, 201 bp, Bos taurus
ctcacctgggagaaagaataattgcaggagttcacgggccatcgtcttccacatgtgcagctccagagcagtttaatttaaagccctgctgcttgggaggggaccctaagaaagagctttagggccatcactggggtccagctataaagaactatgcttgtcaccactttatgcacccaaacgacaagtttcagtagaata

SEQ ID NO: 8372 - DNA, 201 bp, Bos taurus
tttatgcaattttattttaattaaagtgaattatcactgttactctgaggggaaagaatttcacaataccttctgaggcagttgaacacaccacagggtgttgcaaaagcaaggctgaaaaatcactgcttcagagtttctgttaactgatttttatcccccaaatttatcaaaacttgaatctttcttctagtttgaatt

SEQ ID NO: 8373 - DNA, 201 bp, Bos taurus
gatcctgagagaaaagattcatcaacctgaaattccatattcagtgaaaaatacccttaagatgaagaaaaaccaagaaaatttgtcaccagcagacctgctctgcgaaaaatgcaaagggaaataatttcaactgaaggaaaaaatgacactagagggaaatttggatttttaatactgaagaaagagtaagagaaatgg

SEQ ID NO: 8374 - DNA, 201 bp, Bos taurus
agattgtgccacatcttggagtcttcatgccagcaagaggcacaagtctgaagagaatctttcttttccagttcaaggcctgcttatgttcactttagaacgtctgactgaagcactatccttttctttagggggaaacactcacctccactttggcctggttgacacagtcccaggaatcatggacactttccagacttc

SEQ ID NO: 8375 - DNA, 201 bp, Bos taurus
tctagctgtaccattttgcgttcccactagcaatgaatgagttcctgttattctgtattctcatcagcatttgatgttatcagtgttttggattctggccgttctaataggtgtgtaatgttttaattctcatttccttgatgatatattatgtggagcatcttttcatatgcttattggccatcttctttggtgaggtgt

SEQ ID NO: 8376 - DNA, 201 bp, Bos taurus
ctccagcccatggggtcacaaatagttggacatgactgaagtgactgagcatgcacacatggggcattttaacatcatccaaaggcccactggaccattccgctgagttgtcccaaggcagcatcaatcagttcaaaaccaactgcactgtccccatcacccatccagaaatatgggacttctcctggattcctctccaac

SEQ ID NO: 8377 - DNA, 201 bp, Bos taurus
ctcctcccgccttcaatttcattaactgtagggcagtgattatccactctgttattgtgagggtcaaaagaggcagaatgaaggcccagactttggaagggaggggcactttttggacacctgcctgaatcattcacttagccgtgagatcaagtgatgctgcatctccaagtctcagtatccttcgctgcacaaggagga

SEQ ID NO: 8378 - DNA, 201 bp, Bos taurus
ttaggattgcaaactacctgtcttttaggatggagattaaaatttgatttatggaagatgttcctttgttttcaaatgcccagttgagtaggcccttttagttatgctaatacaaagcaaaaatctatcattcttggtgagaatggcaacacacttatggggccctaaaggagatttcttaatctaaaatgttaatactct

SEQ ID NO: 8379 - DNA, 201 bp, Bos taurus
cagattccctggtccccaagccaggccccacccctagtgcccagggttcccgcgtgaacaaatgttccactgagaaaggagagagaacaaagggacgggattggcctgccaagcgccccagcccagcctcccaggctcccacccaagggctccatctcacagggcctaaggtcactctgagcctttcatctgtccctccca

SEQ ID NO: 8380 - DNA, 201 bp, Bos taurus
agcctcaggtttttcatgggttgaaagaggagaagcatatggccctcccaggacacatggactgcagtccctcccaggactgccatgaagatgaaattagcaaacatctggaaaagccttggcccagattagttgctcaaggaaagttatattgtctcttactggggagaaacttttaaagataattccaaaggctttggt

SEQ ID NO: 8381 - DNA, 201 bp, Bos taurus
ccctgttatcagcaattccattttcatccctatgaggacttgtcatgcttgtctagatcattattttgagtttcaactgtataatgctgtcaactgctttgtaattatacaaatacgattaaaagtccttgagagcagagattctaccttttatttctgcaatgctggattcttaataaatatttgtaggattgaaatgaa

SEQ ID NO: 8382 - DNA, 201 bp, Bos taurus
acttggcggggcctgcgacttccccccaaacagagcgggcacttgctcggtcttcggggcgctcctttcctttctagaactctgggattcggctaggggcaccaggtggggaggacaacaggcccacacttggggcagcaggacgagccctgggcagcggcccttctccagctttctgcgggcctgggccctgccccaccc

SEQ ID NO: 8383 - DNA, 201 bp, Bos taurus
tggcggaggcggaggctgaggcggccgagaagaaggactcggggccctataagatggaacacttccgctggggcagcccgcccaaggacaagcgctacggcgggttcatgacctccgagaagagccaaacgccccttgtcacgctgttcaaaaacgccatcatcaagaacgcccacaagaagggccagtgagggcgcagcg

SEQ ID NO: 8384 - DNA, 201 bp, Bos taurus
tcacaaagagtcggacacgactgaggaactgaactgaactgaactgaacccctccaatcgctcaaacgtggaaggatcaggcaggcctaatggggactggagtgcaagaagagttcgcctctcttagcctctgatctgaactccagactgagaaacccagggacattgttctgtgatctaactcaggcctggccccaggga

SEQ ID NO: 8385 - DNA, 201 bp, Bos taurus
ctggcccctcttaactctttggattcatctccctctgcagcccctcgtgttctccactcaaactatctacacttctcaaccacagcacttacttaacacctgggcctctgcactcccctagtcccttgacctgcgagacccttccccaccctccaacttcatcggacccctctcttgtgtttctagctctggctcatgcac

SEQ ID NO: 8386 - DNA, 201 bp, Bos taurus
aatcatgggaaagacacagctcagattctctccagggttcaagctttcctggcggccaaaagtttgcaaaagctgggccaaagctgggtctgcagcttttaaactgtagtgtgagaggcaatactagcagatgagttagagagatgacagctgcccgccttgtccatcatcgtggcctcccctggacctagaccttctctg

SEQ ID NO: 8387 - DNA, 201 bp, Bos taurus
tctgctctcttgaaatttgggacggttttatctatgaatttgtgtttggtaagtgcagtctatgggacagcagagctgaaactaacaagaggcccctggacgcttctcaccatggctcacagcctcatgtgagccatgaggacacgagggagggcaggttctcagcttcctactccctacttcttgccatcctatgcccca

SEQ ID NO: 8388 - DNA, 201 bp, Bos taurus
cccgccgaaaggacccagggaggagtcagcggatggcaaccctgagtaaggtgctcaccagagcctgattgtgctggcctcctaatctcagccttccactctgcagaaccacgagcaataaatacctgctgtttataagccgcccaggttacggtttttcattagggccgtctgagctaagacatacacacgcacctccca

SEQ ID NO: 8389 - DNA, 201 bp, Bos taurus
ctgaggctaagtcaaagggattaacccctttcccccagccctgaccttccatgtaagaaatgcaccctcctgggtcaccacacagtgagaagagaggccatacacaaaggctgcagcagacagcccagcagagttggtgggtagccagcctccatgccagccactggagagatgtccctggctgattctagggcccgcagt

SEQ ID NO: 8390 - DNA, 201 bp, Bos taurus
cctcctgcagagcctgcaacatgagtgctggtgcccaggccatctctctcagcagcactgaagggcaaggacatgtcctacccagccagcctcttccccacaggactgatattacaggccactcagggagggctgtcctagtgctgggattctgggcacacttgtgagaaaggtgagtgaatttatgaagcaggaaaggtc

SEQ ID NO: 8391 - DNA, 201 bp, Bos taurus
ggttacctgaggctggaagctctgacaggcaaaggcagagctggagaaggatgtcctcttcctgctcggagccacatgacggcctcggcctccctgggcggtgttctcctgtcaaatgtaggagccgggaccagagaagacattctgccactgttcagccgatccatgcagcatccatcaccaagcatcgagagcctttgg

SEQ ID NO: 8392 - DNA, 201 bp, Bos taurus
caggctgtttttctggagctctctagaggacgtgcaaagttcagtgtgtgctccaccaagtagtacacttttatcaaatgtctgttaggggctaggccccaagctaagtggagaggtgataggatgtacttggtccctgctctaaatttagaaggaaactgtcactcttccaggcctcccagccttcatctacaaccatgc

SEQ ID NO: 8393 - DNA, 201 bp, Bos taurus
ttccaacccccctaatctgatggggttttctcagtgatgttatggagtcatagaggtgacagtcacaaactgggccacctcccagtggcctttttccctcgaagggttggtggcagaggaagatcagccccttttcagtgtgtgcacttacctggtttaatttggagatagcagaggacagaggagcatggcatgctacag

SEQ ID NO: 8394 - DNA, 201 bp, Bos taurus
gcaggcatggactgtcagcctcatttatcttcaagaaagcagaccatcttgaagaaagactatacccaaatcccaggaggctgcttcagtgtaaccaccagcccaccagctttgagggaatcttgagtttaagattatcagtgccaatcttttttgctcctcagccctagtggttgagaaacaatgaaaggtgcagggcaa

SEQ ID NO: 8395 - DNA, 201 bp, Bos taurus
aaatgattcaccaagtataatcttagccttaaaaaaatgagggctggctagtcttctctctgtttctgtgcctggtcttccagctatggcccagactaacgggcatcctgagagctggcagctagggctgctgccaataggctctgagacacagtcacttcatcagagatgcggagttggccctggttctcttgaggagaa

SEQ ID NO: 8396 - DNA, 201 bp, Bos taurus
tttttgaaaaccagaatccactgcatgcctgccacagatcctgatgttgacccaggtattgaatatggatttattattggggcatttttattatgctttacctgtatacattttttaaagacaagctttctttttaattcaataaatgtaatgcttaaaaatgaaagacctttcataaaatgaactcaggttaaaccaggt

SEQ ID NO: 8397 - DNA, 201 bp, Bos taurus
tcctttctgagtgtgatagggactatggcaacaagtgtcacagaccacagctgaacctgcgttcccatccataagcccaggccagggtcacggtcaaacagatatcactgcctcagacaatgtcctcattagctcactacagtcattactgccgtggcaacggcagaatgccttcatcctgctgatggccctgagagggac

SEQ ID NO: 8398 - DNA, 201 bp, Bos taurus
gaaagttgtgggacacacaacttcaacaaagtcatctggcatcgtgcgagagcccattcatttcacctacctagggacctccctccaaacctagagaaaatggtcaaacatcctacctacagtctaggagattgatcaggaagtggacaggaactagtttatatttcctgaaaatatctaaaattttgaagtcttacaaat

SEQ ID NO: 8399 - DNA, 201 bp, Bos taurus
aagcttctttcttacttaagtccaaggtgagtgtttctggttagcaagccctattcacagtcttacaggtactcagaatccttgcatctcatggcctcatgtcctggaaactcatcctctatattcagcttcaaaaaggaggatggaggagtgtaagtgagagtttttaggggcctggcataaatactgttcacattacac

SEQ ID NO: 8400 - DNA, 201 bp, Bos taurus
actatctcatcctctgtcatccccttctcctcttgccctcaatctttcccagcatcagggtcttttccgatgagttggctcttcacatcaagtggccaaattattggcgtctcaacttcagcattgatcctttcaatgagtattcagggttgatttcctttaggattgactggtttgacctccttgcagtccaagggcctc

SEQ ID NO: 8401 - DNA, 201 bp, Bos taurus
tacagagtcaagttccagatccttggacccttactttccaactattttatgtctatgatacccatagctcacatctcaaagagagtatctattaggcccaatgtcttctctaactggatactcacccattatcccgaattcctatgatgcttgtacatgatcttacttctttgatcaaaagaacaatccgtctaagttggg

SEQ ID NO: 8402 - DNA, 201 bp, Bos taurus
gagggacaggcatgattaatgacagaggggcctcctaagtaaagcagaaggaccctcctcttcattccctttaaagagccccccacctgttatgccctgtgtcctcaccagggccacaaggggagttgctgattggtttccttctctggttcttcctgagctgagaagaatggattgggctgcagcaaaaggggagagaaa

SEQ ID NO: 8403 - DNA, 201 bp, Bos taurus
ctggggatctcctggagtgaccagactcagggggcaggttaggggggcccatccctccagaccatccaagaccctgtagcttaggacgtggggttgcaacgtggagagctgtagcaggtgcctggccaaccaaatcttttgactttctattgctccctctgaagatagaaagagtgaccaggaagggaagactgaggagag

SEQ ID NO: 8404 - DNA, 201 bp, Bos taurus
aagtcttaaccactggactgccagggaagtccctccctttctctggaagttgtttccctctcttccttcccactagaacttcccttgtccaggccaccgccatctttcccaaatggaccacagtcctcacttcccactggtctctccttccagtcttgattcttaatcactgacttctcgtccttcagccacggctcatca

SEQ ID NO: 8405 - DNA, 201 bp, Bos taurus
gggaaccctgggagccgctcccctgcatcgtggggcttggaagatttcaaaaatctttggtttgagaatggcttgcaaatagaacaggagactgtaaagccccagcctgggaattgggggccccgcgttctaatcgagccctgcctttaactggctgtgtgaccttgaggaagctcctgtcattttggggccttactgcct

SEQ ID NO: 8406 - DNA, 201 bp, Bos taurus
acccagagtccttccatggacaggaattcactattctcagagcctgtatttccagggagctacaagaaagcagtggaggctggtggaggccaaggaacacccttttgtttgcaaagggtgtgctgttcaaccagtttcttggtccagaatcgtcgtgcacagacatctgcccagtctgtaggccactgcaggtcatcctgg

SEQ ID NO: 8407 - DNA, 201 bp, Bos taurus
agtgtaagagtaattatggatttgttaatggattggctaccagaactagggagagagatccgtctcagagagttcttatctctgtgttgggcgactggatctttcatccagatctttcactgtccagattcaatgtatgcttgagcttttgggaaaacccaggtcagagggcctgccaccagatttctgtccagaagcaag

SEQ ID NO: 8408 - DNA, 201 bp, Bos taurus
tcgtgatgttttttcgtgaccacccaaaggctgaaaggaaccagttagtgcatcttccagtgatctgttccctaggacctacaaaccaaaacagataaactggttttcaaaggccattctccagtgacaagacagataaactggtgtcctgaggccatgctccacttgagaaactgcatcaaaatcggaagtgctgattca

SEQ ID NO: 8409 - DNA, 201 bp, Bos taurus
gcaggtacagccctgggtatgcagacaggaggaataggtgagggagtgcaaacttaggttgaaatcatattgtaggaggtgttgactgacctggaaagaattactgggaagtcttgttgggaaataggcagtgaactgggaaggacaagagaagaggacgtgggatttcctgatagtccagttgtcaagactctgagcttc

SEQ ID NO: 8410 - DNA, 201 bp, Bos taurus
gcaggacttaggccctgggtaaatggtctcccatcccgaaattctagtgtataactctctgtgggatagactctcagaactcaagcccttgatctcagccaaaacctgtcttctcagtcctccacattcaccacaattggagtctaatgttccttgggaggggttgctgcatttctttttatcacatcagtaggtcctttg

SEQ ID NO: 8411 - DNA, 201 bp, Bos taurus
ataggaatccctctgttggctctagggtaaaatccttcttgacttcttctagcttctgatggcctaaggaattctttggtgtccttagctgtggccacaatgctccaatctctgactccatcttcatatctgttcttctctaaggatacctaccattgcatttaggggccacctagacaatctaggataaaatcttcacct

SEQ ID NO: 8412 - DNA, 201 bp, Bos taurus
tttgaccactctcacaattctaaacctaactcctcctgactttgggagcaccatccactttgggttccgccctgttgtttttccaacagtgaggtcctgcgtgtgacttcctccttacccagctttctcactatgccatcattctaagtctccctaatctctgtcttctgtccacatttctcttctggtgcaccagccaca

SEQ ID NO: 8413 - DNA, 201 bp, Bos taurus
taaaggtcatttagatcaagagcctcaacttatgactacatctaaaaaataaaaaaatggcttgactgatatcccactctcagacaatggtagagctgataattgtctataagtctatgcctccatcatcgcacatacagaccacggcacgtagcatagggcactactataaatattcaaaacaaattttaaggaaagaat

SEQ ID NO: 8414 - DNA, 201 bp, Bos taurus
tgagggacatatacccgcatttctgtgctgagtgacctggatgagtcctttcacatcccttggcctcgaaatggggccagtagtcccttccttgcagagttacagcaagggttaatgggaacattggatgtgtgcagagctgctgactgcccctgctggccagtggccgcccagccgaggtggactttccagcctcctttg

SEQ ID NO: 8415 - DNA, 201 bp, Bos taurus
gggagtcttcagggccctctgtgcccacactgatgcctatcgggaagatgaatgaagagtagtggacaggacttacctgggacgggacccactgccagcccacctgctccaaggccaaaaacagtgaggaccacttcagaatgcaggccttcttgccttgccagagcttttatttcacagagcatcccacagtgcaattcc

SEQ ID NO: 8416 - DNA, 201 bp, Bos taurus
agccaaggaacacctggagcccctggaggctgaaagaggcaaggaaagattctccgctagagccactggagggcacgaggccctacagatgcatgccttcgttttggattttgggactccagaactgggagagaatacatttctgctgctttaagccaccaagtttggcaactctcagaatgtcatacattgtataagtca

SEQ ID NO: 8417 - DNA, 201 bp, Bos taurus
caaacttaattaccgcctttactactaagggctctgtatttgccgattttcctactcactgaaatttatttgcaacccacaaatgcacccccaaatcaatattctcagggcctcttgggatcactggtggacatgcccaatgtggggaaaagccaagccctcttctcaatccccctgctgacactcacattcccagcaaaa

SEQ ID NO: 8418 - DNA, 201 bp, Bos taurus
agaggcctgagttgttataccttatctctcctccatgtcacctcttaatctccaacaggttaacctgggcatttgctcatggaggaagcaagattcagagatagcacacggaaatgcacaggcccttttgaggcctgggctcagaactggcatactatcacttctgctgcatcttattggctaaagcaaatcacaaggcag

SEQ ID NO: 8419 - DNA, 201 bp, Bos taurus
ctgcgaactcaccccaaggatggggtccttgcctgcccaacactaccacccagaaatagctcccagcccctcatgccagggccggggctgcacttactgcccaggattcctaaaagtgccttgacatctggaaaactgccttctgctcccttactttaagaagagaggcttaggccatcccaagatcagattcaatctaac

SEQ ID NO: 8420 - DNA, 201 bp, Bos taurus
agtattggagtttcagctttagcatcagtccttccaatgaacacccaggactgatctcctttagaatggattggttgtagaaagtggtaataaagttccagtgaaggaaagaagtcaatgggccattggaacagaacagaaccagcctgagaggagttagaatttgttaccataaaaaggtagaaattgagatggagggtg

SEQ ID NO: 8421 - DNA, 201 bp, Bos taurus
caccgccactcctctcccaggtgacgatgaccaggccctgcgcccctgtcgtctcctttggcatcaaacactctgactacatgacgcccctggtcgtggatgtggactagccccggccccgcccccactgccggaagcctctgcacgtcgccccaccaacagattccccaagctgagggctgtgggtgcctcctcctccag

SEQ ID NO: 8422 - DNA, 201 bp, Bos taurus
agggctacagcagcatccacaaaggaggcttttgcctatggctggctccgtcgtcaatgacagtcctccgtggcaattggcccaggaagaacagtccatactccaaactgactcccacccccacccccgattaaacgcaggtcttcctgctgcctgggccacccgccatgcaacacctctccacggacgggctgaggcccg

SEQ ID NO: 8423 - DNA, 201 bp, Bos taurus
cccctgcacaggtgggtgcacacacacacgcatggcacacacgcctgacacacacgcctggggaaatgtcagcttatgtcagtcctgtggacaaagggccgcctgccagccccacctaatgcctgtgcccacatctggctccagggctgcaaagccaagtgtctgcttcatggggaccatccgtggccaaaatgcttggct

SEQ ID NO: 8424 - DNA, 201 bp, Bos taurus
aacacagtcaagttcacaactgaagacagcttgatccacatgactgctgatttatcagtccccactttgggtttttagtttcagtcccttgtagaccctctatccatacaaggaaagcctaatagatttgcatttaggaagatccatagtgttcctccagagtgtcacagctggctggtggaaattccattctgatagttg

SEQ ID NO: 8425 - DNA, 201 bp, Bos taurus
cttctttaaggggtctttccagatggtttgagaggcaatccattcttaagaattatagagacctggatttatatctggttccacagctcactagctatgtaaggaactaagttaggaaaccacctaatttttttgttttaattgaaatatagttgatttacagtattatgttagtttctggtgttcagtgaaatgattcag

SEQ ID NO: 8426 - DNA, 201 bp, Bos taurus
ggattagatgaactagggagacacgcattgcgcacggagcccaacggaatgccaggtgttcagttaagggggggtgacggccatgactctgcttcagatgcgctgcaactcctgctgcttttaaaactcctgcttcgggacttctggtggcccagcagttaagaatctgccttgcaatgcattgtaatagaggggacatgg

SEQ ID NO: 8427 - DNA, 201 bp, Bos taurus
taagtattgctgaaaaaaatggttttaaaatgaccatctgtatacatttgatgtgtatgaatcttttgaaaaacttggccattgcccatgtaggagttataagaataccagctgccatccttggagctgaccacagcttgtgatgacattttttagacttgctataaataataagcaactgatttgggccctgtagtcaag

SEQ ID NO: 8428 - DNA, 201 bp, Bos taurus
tctggccacccctcctttatggaagaagaaaattctagattgtcagagccagagattcccctgaagaatccaaccccctgttcctagagatgaggagaccaaggcctaatgagatgaaatatcttacctatggtcatacaaccagttaaagattgtagcacctgcccttcttcccctgtgttctaccacatactacccaag

SEQ ID NO: 8429 - DNA, 201 bp, Bos taurus
ttgagggtgtggtcagctacttccttttagttcatgggctcaagaacagacctgagatttcactaactctaactactgttaaactgggcacagggcctggtacagtggtctatcctcagcaaatgtttgactgaatgaaatagataagtggaacataaaaactttggccccagagttgttcaccttgattctaatcctagt

SEQ ID NO: 8430 - DNA, 201 bp, Bos taurus
ttttaaccataatcatgaccaactgagataagggtttgtaaaccatggccttgattataggaagagctttctctttggtgttcttgatacttagagtattggaataatcttttacttttacaaccctaacacgttacttttgaaatctctagacatttattagcattcaactttattttcaaataaacaacaatatatacc

SEQ ID NO: 8431 - DNA, 201 bp, Bos taurus
catgccaattacacaacatcatgcagttctttcactataaatggaatgaactggatattcctatcgtgagtgccttgatttcttgcccaaaagtcttgtctcactgttctcacttctggagtacttccctgtgttttaattaaatactattttactttcagaggtaattttgacacttgcatgcgaccatgcctccaagct

SEQ ID NO: 8432 - DNA, 201 bp, Bos taurus
ggggagagttcaaatcaatagaaagaaaccctgtttgtccaattgcttgacatcacacaaccacagcttcaactagatgagtcagtttgatcttactgagttttcccttccttttggttagaaaaagtttcaggacaaagatgtggaggtatggctacagctcagaaaagtaaaaccccagaacctgcctagataattcca

SEQ ID NO: 8433 - DNA, 201 bp, Bos taurus
agcgaccccatggactgtagcctgccaggctcctccatccgtgggattttccaggcaagagtactggggtggggtgccattgccttctccagtgccattgcctctccacacacaatagtgactctttctacactactgtggctcagtagcaaagaatctgcctaacaatgcaggagactcgggttctatccctgggtctgg

SEQ ID NO: 8434 - DNA, 201 bp, Bos taurus
tgcaaccaactagttagtagctcaaattactgcttctgtccagatgtggtatcctagctataaaagatgactatgactttgatacatggcctacagccatccatggagaaaatgagtccacccctatcagaaaagatgattaagctggttgcatttacatggaactgacaacacaacacatttcaaactttgctctggagg

SEQ ID NO: 8435 - DNA, 201 bp, Bos taurus
tgactccatgaaccgcagcaagccaggcctccctgtccatcaccaacccctggagtattcttctctaaatacaaaacattcctcttacctatttcctgtcgtaccttattgtacttcagcttccctggtggttcagtggtaaaaaatctacctgccagagcaggagacatgggtttgatccatgggttgggaagatcccct

SEQ ID NO: 8436 - DNA, 201 bp, Bos taurus
aaagtgaaagtaaatttccatatccacatatcttattcttttcccatatgttactgaaactcattagggcttagactgtggcctcatattccttcagtttgcacaaaaacttgaagaatatggtaatatgtgtttccatgttattctctaccatatgtaaaatagacagccaataggaatttgctgtatgactcacttctc

SEQ ID NO: 8437 - DNA, 201 bp, Bos taurus
tatccttcctccagcttttgtctcactaccttggaacacaagataaaagccaaaaaccatggcactgggtcattctaataaatagttgaactattttctgactttaaaatttcactactccataatctgtatatccagttgtgaattcctgtctggggaagatcaaattaaacaaagaaaaatgctttgagatgtgtagaa

SEQ ID NO: 8438 - DNA, 201 bp, Bos taurus
tctccagtggcacccccatgggatgttccattacacagcaaaagggactttgcaatgtaagtaaggtttcttaccagttgaatgtaacaaggaggaggtcgtctaggtgggcctaacttaatgacaaggaccctttaaaatggtggtatttctccagaacagcagcagaagaggaagtcagagagatgaaaaagactcgct

SEQ ID NO: 8439 - DNA, 201 bp, Bos taurus
gctttttggaggtatcatggatcaaatagaagaacagaagtgatataaagcctggacatgctcgcgaggcggtgacaagacctccaagattgctgtggcaggcagacaaagggagtccagatggcatccaggacagtgtcattcctgtgggctggtggttagaaaatacatcccacaggaagcgattgggaataataatac

SEQ ID NO: 8440 - DNA, 201 bp, Bos taurus
ctgcgttggaaggcagattcttaaccactggaccaccagggaagtccttggtaggacacttttgagtcaaaaaaagagggctctgtaggattatgcccacatatttgcagtttatgattatgcacaaactccagagataagccattcctgggaggctggcagaagagatcacagactgtatgacaggccaccacagggcca

SEQ ID NO: 8441 - DNA, 201 bp, Bos taurus
aaatgtaccaaagaaaacatgtgggcaccctgagggagaaggaaatagactccagagcctagactgagggatctagactcagccagcatctcagcaaacggacagcagaagcaaggtagtttaataaataaaatgtgtcccccccaccccgtcaaggtaagtaatactaatcctgactccaccaaaactgtagctatgtga

SEQ ID NO: 8442 - DNA, 201 bp, Bos taurus
tgtctcaatggcctttcctccagtcagtgaattcacacatcagcaaattccccagtctcaggacagtggaggcgttgtttacaggtgactatttcccacgcgcttctgactcgttctcctcggcctctttcactcaggagcgtcagggggcaaacgggctgcgaggttctgggctcgtccctggtcagctactttcaggcc

SEQ ID NO: 8443 - DNA, 201 bp, Bos taurus
gactgtctccttcgtgacacctacatgcgtttctagttccaacaatgaattctagaaatgacatcgtttcatatacagagctatggccaggaagccaaggactggacagctaagcctgccttccccaggaaacaataggttgggaaaatctcattggctcagtgacagtacacttaaggcatgcctactctgagtcaggca

SEQ ID NO: 8444 - DNA, 201 bp, Bos taurus
cttactctttgaaacttagccagccaacacagtagccactggccacatggggttatttaaatctaaatggtaatttgtttaaaatcaaataaaggggagtcaattcctgagtcacactggccacatttcaagggcttactggtcatgtgtggctggcatctcacacatttggtagcacagggagagatcatttctgttgca

SEQ ID NO: 8445 - DNA, 201 bp, Bos taurus
gcgatttctgaggtctattggatatttggtgggtccttgcatatagattctgggtctcaggtagaagtagatagaggtattggccatagaaaatggttttcaggataaagttcagatacgtgtttgtttcgttaacttctcccattgagtgtggtggtgtgggttagtcactaagtcatgtccgactcttgtagtctcatg

SEQ ID NO: 8446 - DNA, 201 bp, Bos taurus
atccaccaggctctccgcttaggcaaagtcggccgtaaatctctccttgtttacaccgcctgcccggagtgggcactggttgcgcacttagaaaattcccggtgtcagaacaagcaaggcctaggagatcatccaggacacctgtggacatggccccagcgtgaactggacatggggccgggcacaggagtgggacccggc

SEQ ID NO: 8447 - DNA, 201 bp, Bos taurus
tgtgtgccaaaggccccggacacccgtgaaaggtgccaccatcaagcaacgccatggggggccggggccaggactgaggcaagcggggagaggcctcagctaaagagtgggctcgaacgcccttgggttattttggtttcgggtgggctggggtaaaggaggacaccctttggcctcagctccggctggtgatcatccttt

SEQ ID NO: 8448 - DNA, 201 bp, Bos taurus
actggccatgtggccactcagaggatggcccaggggcctagggtccaacacacaaaactgaggcagaggaccccgaaaggccccaggttaaaggaagagacagaggagggagggaaaaaaagaacagagtagtggggaaagcaacttgctttggtatctaaccattatctgtttggggccaaaaaactgatgaatacaagt

SEQ ID NO: 8449 - DNA, 201 bp, Bos taurus
acaatgctggctcaggccccccccccaccacgcccgtggcagtgggcaaaggtgagagccaggttagagcccagccaaccatcgcagggcatgacaagacggcaggtgacaaggcccccccaagggaaatgacaacaggtgatacagacctccctcacaaaataacaacaggcgacgagagcttccaagggaaacgacggc

SEQ ID NO: 8450 - DNA, 201 bp, Bos taurus
gccctggtcttgtccagagcgcggccaccacccgacgtacggcagggcagtgagtcccggatcggcgggcttcctgtctccccaccagcacacgctctgctcagggcccagtgtccccggtgcctggaccagcacgggtacccagcagggctgggattaatggcctcccggccccagcctcacccctcctccagacggctg

SEQ ID NO: 8451 - DNA, 201 bp, Bos taurus
gggaggactcatgtgacagcagccaacgaggctctaagggctgaagctgtcatccgagaccactcacacaggcaaggccttcttgccagctctgcccaaccgtcagcctccatgcgccccttccttgtatctctgcaaaccccacctggggcaggggccagcactttccagaaaagccaggagcacacagcttctaatccc

SEQ ID NO: 8452 - DNA, 201 bp, Bos taurus
gataattacaggcctctttccaaagtctttttagagttttattcatatcaaaaaacaaacatcagggggatataaatgggctgactttttctttatacataggataggccttctccaacaagtattttaaactaatatatgtacctagctttaaaaaaaactacagaggggtgtccctgatagtccagtggttaatactcc

SEQ ID NO: 8453 - DNA, 201 bp, Bos taurus
agaaataatgtaatttactgaaagggagaggagaggagcaggtgtggaggggaagatggcttctgctttaggcatttctgcctttgatgagtctgtgcaacatccaagtagcagtatctttggcctcatctttatgcatgaataattcagagatgagaatgatttgcttaattaagaacatgcatcaaaatagtggcagat

SEQ ID NO: 8454 - DNA, 201 bp, Bos taurus
ggacttcccccatgtcctgggtctccccagatggctctctaggggtctggcggggacccaaccaccacaactgccatcacggcccagagtcacttgcacccgtagagacggagagacaagtgggctggaggtccctgtggggaaggggtgatgctggctgggcccttcagagcccttgccgcccccccacccccgaccgga

SEQ ID NO: 8455 - DNA, 201 bp, Bos taurus
attaattacagaatcaacttaaaatggttcagttcgacattttacttcaggatactgaagatatttttacgtataacttggcaacaatgagcatgttttccctgagcccaagttgcccacgtcattacagtgggggtagataacgtcaagaccatccccccaaatctgatacgtaggtttaccttttcttcagctccaatt

SEQ ID NO: 8456 - DNA, 201 bp, Bos taurus
cttgcctggaatagaagtaccaaatgtttatcatttaatgaaatagagaacatgaagcagtggtctctgtttgaagaaaactattcacatttctttattgtttggatttgcaagtgctttcccaggtacattatttcatcaagtcctggatttaaaaaaaaataaaaaatatgatttaactgttgttttcatcaagcccag

SEQ ID NO: 8457 - DNA, 201 bp, Bos taurus
tggggaagggtgagaattagtctctcactagtctttttttttaattcaaacttttcattttaattaattaatcaacggccataccgtgtggcatattgatctagttgcccaaccagggattgaaccctcaccccctgcactggaagctcagagtcccaactgttggacccggggaagtcctctctggtcctcctgagcggg

SEQ ID NO: 8458 - DNA, 201 bp, Bos taurus
tgggttgttttgcaggagggaccctggataagaaatgcgcgtgggccttcgcagccttgactttgacagggtagcccaaggccggctgttatttcatcactgaccctgccagccaggaccgttgcccttgctgctgctgaaggcagagcctggaactcccagtcaggggtttttctctgcttcctcctccttcctggccac

SEQ ID NO: 8459 - DNA, 201 bp, Bos taurus
gcctagctgaccagagtgccccagagaaggccagcatctcaaatagcaggcgaagaagatcaagcagtcataatatggggttaaaacacggcctcccctcatgtataagctgaagccatgcaaggggcttctttgttcctgcttagatgagaagtgatcagagtatgcatgccagcattaccaggtagatcttgaggcttg

SEQ ID NO: 8460 - DNA, 201 bp, Bos taurus
tacccagaagggcctctgagtctacagttctcacttatgtggagaagcttgccctgatgatccaggagagaagataaaggaccacggtgtttgaccctttctgttccatccacacatcgtacggccagctggatgctctcacagcagtgactgcgtttatccacatcacagccctctaaggtgtcatcacgggcttccttg

SEQ ID NO: 8461 - DNA, 201 bp, Bos taurus
cccttctgtctatttctccatctttgagcaaacaaaaacagctggcagattcaggaccacacctcacccagccaccgccaagttaatgtcacatctgtttttgtgcaggtgtcttccctttggccttgaatgttgacatgtcattgatggtttgcttttcggggaattaatttgagatgtccatgtttcttacaagggtat

SEQ ID NO: 8462 - DNA, 201 bp, Bos taurus
catggcccccttcagacctataaacatgtttgtttatctcacatgatcatttttcatttgaggcaacttctaaaaattgggagttttcacattagaaagtccaatccgccaacactgggcccaggttttcatgtggcaatgattggttggcacttgctttaggtagacaggcactcccaacctccccccgacccactcgtg

SEQ ID NO: 8463 - DNA, 201 bp, Bos taurus
caaaggacaccgacatggaggcaggaaattatcctgcgtctgccccaaactccagctgtgatgcaagtcccttctctgatctcagttctttcatttccaaacaaaacatgagatacttaaatgatctcttcttttaagatctcttctagttcggacacctgtcgcctggagtcactactctcaaacaaaatagtgatgagg

SEQ ID NO: 8464 - DNA, 201 bp, Bos taurus
tgctaggaagcctacagggccaatggcatgtgatagaaacaaaggcttcattatttggttctaatagatctgcagtttgaaaggtacctcttctccaggtaataggttaggtaacggtgtggccacttctctccctgtgttcttaattctggaatcatcattagagtcaggtaaagtagaattaacctctaagatgaagtg

SEQ ID NO: 8465 - DNA, 201 bp, Bos taurus
tccctatgagcttgctctcctcccattacacacactttctccacttcacggtatgaggataagggacatgtgcagatactaacttcaacaggacggccagcgttctcaaagatgctttgcaggcagtgaactcaacctccaccttccatctgtccagatgggtcctgggctgaccagtttctgagactgaaggcagggcca

SEQ ID NO: 8466 - DNA, 201 bp, Bos taurus
ctcaggaagggaggtagtagtaggaggtcaaagttgcttatggtttttatacaggatgaaaggatttgacttcagcctccacatttatttcccttttattccttttcatttctactattttttggtagttttattatatatattatgtatatattatatatattatgtgtatatagtaataaaagtctaatttataaatat

SEQ ID NO: 8467 - DNA, 201 bp, Bos taurus
gagggaccaaggaagaaagaagccatcagaacaaaaggaggtggggagttatgatggcttgaagctccctacacaaaggctttcttctgcttaggcccattcttttttcagtcttcctttccggagaatttcccaaggaggcagctacaaacagacttgagatttctgagcatcttgaataaagagaggaaatgcagatga

SEQ ID NO: 8468 - DNA, 201 bp, Bos taurus
ttgctttttacccttaggatttttgtctttcctgaaacaacatgtccaagattgtctcaaaaaaaattatgcagagatttatgcttgtctctgcagcccttggctcttcttgtgtgtgtttttctttataatacacacagtgacttcgcttcccttatatctctcatttcttttatttcctcttcgtatcaagttaaaatc

SEQ ID NO: 8469 - DNA, 201 bp, Bos taurus
cacattttcctgcttcagtcaaatccctggtcaaaactctgtgacctcggcacctataaaaacaacccaatcaaagtgttgagattgctttcctcgaaactatcatcctctcccccagccctgcagtaggtaatgaagtcctaaaagtcctaaaaccaagcattgtgatgagatgcattccagcagcttaggcggaattcc

SEQ ID NO: 8470 - DNA, 201 bp, Bos taurus
tgtgcaggagaccaggaaaatctggtgagaaagcaaggccactcttggcttgcaccttccacctgtccggtggttttgatttgtgagcaggcaggacaccgccacccaaccttcagccagggcctgacaggcagactcactggctcacctctgatagcatcactgggttgtttggtgctggtgaaacgtatgaggaagaca

SEQ ID NO: 8471 - DNA, 201 bp, Bos taurus
aaaagaggaggaggggaggaagggggagaggagcagagggtccacacccttccttccaggacagtgtgagcattgctctctgctggccagattctgatcagaattatgagtaagtacgaaaaaagaaggaacaccaggaatgctaggttgattgaatctagaaaggacagaatactaaccactgaaaacaaattacagatt

SEQ ID NO: 8472 - DNA, 201 bp, Bos taurus
cagcgctgtctagaactaacctggcacgtggcaagggccaacgatcattgctgttaatactatcagcatctctgaagaggcacaagatgtccactcacaagttcttccaaggaaatgatggcctttgaaactcaagtctgagggctggagaggttaccgggttgtgcccctctcccttgaagccaggcagcatacccacca

SEQ ID NO: 8473 - DNA, 201 bp, Bos taurus
aggcaagaacactggagtgggttgccatttccttctccaatgcatgaaagtgaaaagtgaaagtgaagtcgctcaggccaccacatcactctccaactcaaatacctcagtcacattatagcgcccagaccagatcgcagaccaaagcccagtggggtgaggaaacgtgtttctgggccctttctccccttgcatgcctct

SEQ ID NO: 8474 - DNA, 201 bp, Bos taurus
atcttgaaaacacacgtctgacttacagagagaacaacatgaatacctaagtacctcttactctaagaaagcatccgcatcattccctttctggcccttgtgggctcagcacacaggtttagtggtgatacaagcatgtgtgtgtgcgtgtagtcgtgtctgactctgtgacctcatggactgaagctcgccaggctcctc

SEQ ID NO: 8475 - DNA, 201 bp, Bos taurus
gtccagtgttctatgaatgatgaagctttcctgtgtacaccacccagtgttgtgtgaacgatgaagccttctagtctacctgggagcaacaggcactgtgcagtcaccaaatgttttcccctataaggcctacagttgtgtgtctgttgctcttactgcctcaggttgccttctcacataccttttctgatcaatacttaa

SEQ ID NO: 8476 - DNA, 201 bp, Bos taurus
tcccctatggccgttttctgtgccatcactgagtgtgagaaggtaaagccatcagtgcaccagggcatgcgcccacccaagtcctccactgaacagatccgagcagttaccatgctgctgcttcattttgcgtctagtctggacattaaatgtggaaaataagaatgataaaataaagagttgatgtatttacagtaaaga

SEQ ID NO: 8477 - DNA, 201 bp, Bos taurus
cctgcctttaacacctcacctgagcctgtgttttctgactcacaaatggtgaagacgcagaccctcaccttagcctggagctgacaacttacttcctcccatatcccactggccagaaccagtcaccaatatcatctagatccaagaaactggagagtagacagttattctaccaactggtctaccaactcaggagaaacc

SEQ ID NO: 8478 - DNA, 201 bp, Bos taurus
ccaggcctttatccctccttgcccctaaaacaacctcaacctctttgccattcacatcttgagactctactgcccactccccgtccctgaagtagctacaccctgtctcctgggccagcttagcctgtggtccagggctgttagcagactttaggttcaggggcagtgcttaccatcctttgttccatgtggcaaacccca

SEQ ID NO: 8479 - DNA, 201 bp, Bos taurus
acatcgcatgtcatcagtgacggcgggtcatgtagccacacctgacttaaagtgaggtgactagtggccggactgatgctaatgctgagccccgagggccgacagctcctgccagctgagcctggaagtgcagccctttgtttctgctcctgtgcaggagcccagcctcgagatcagcccctcggccagatcatctgtccc

SEQ ID NO: 8480 - DNA, 201 bp, Bos taurus
aactctgtgttgcttcagacccagcagagataggaagacacagaaatcaagaggacagcccctcacaatcattatcttgttgccaaacacttccctttgcgtacttctctccagtaagtcaattggcacatatagaatgtttctggctttttctttgtctgtgacaatttttttttttttttggttcaactgatggtgtat

SEQ ID NO: 8481 - DNA, 201 bp, Bos taurus
acggggatattttttatcttggcacttgtctgctcacggagcattcaccgggcaccaagtgagatgcatttgcatgctctgggcgatgtgccaggccctcggggatacagaacgagtagtgagcgccttttctgggctgctaagtgctctgcttgtgttctctgttcaccctcacggccccctccattgtggcttccccca

SEQ ID NO: 8482 - DNA, 201 bp, Bos taurus
tgctatcaaacggcagttgttccttcttgcctgagggtatgtgttctttcccacggttatgaacaagcaagatacagattcagtttagcaaatgcatggtgtatttaaatattgctttatcatatttctgagccaactgccaagttagccagttttctggagaggactccctctagtgaccaacagactataatggtgagt

SEQ ID NO: 8483 - DNA, 201 bp, Bos taurus
gaccgctatgtagctatctgcaaccccttgcactatgtcactgttatgaaccatggacactgcatattgctactggccttctccacagctttctcctgccttcactccctcctgcatgtcctcctggtgaatcggctcactttttgtgcatcaaatgttatccatcactttttctgtgatgtcaaccctgttctgaagctg

SEQ ID NO: 8484 - DNA, 201 bp, Bos taurus
ctctaggtgctcagccgctggttactgtagctctccactgtctccctgggtgactccttccaccctacagcctcagctgtcaccactgcgtaagtgtttccgaatctacattagctcaaggcctgaatttccagctgctttttgatctccttgcggaagtctgtcaagtataccagaaaaggtataataatacggtccatt

SEQ ID NO: 8485 - DNA, 201 bp, Bos taurus
ttcattgctggataactctattggctatgttaaaatcagatatgtttcttaaaatgtccaccactggtcttaagagttcaggccacttttgctcttcaaagatgtgaagatacttgtatcttttttcagcttctctagtgtaaaaagccctagtctcttcaaatttgaaacagtttacacagtctgcattctctcccaggc

SEQ ID NO: 8486 - DNA, 201 bp, Bos taurus
cgcccccaacatggcccaaccaaagggcctccggaggaggcttctcctgacccaccccaggggagtcagtgcctctctgtacagccccactctcctcatcgcgtgtgtagttcccccagcaccaaccctgtgttatcactgagtccagtagtggccccgggtcccatctgcctgacccagggggccctgtgaaggcggggt

SEQ ID NO: 8487 - DNA, 201 bp, Bos taurus
ctgcccatggaccccctctccccccagggtgccaggagatgtgggaggtggtgctcagaaacctcccccacaccaggtttccgcaggaagggtggggtggacactggccggtactcctctagtttgagagctcctctgacttggggagctctgctccgttcccctcccctaggtggggctgcagcgctggcctggattggt

SEQ ID NO: 8488 - DNA, 201 bp, Bos taurus
ggttgggtaggctcctaaggacagatactctcttccagctgtggcctgtctaggcctccatgttgtcaactcaccagctggccacgtgactgctgggagacgtggacatgagccggtaagccccaaagtgtgactgacacgaagtcccagagaagagagggactctttgacctctgccagtctctgcctggccctcggcgt

SEQ ID NO: 8489 - DNA, 201 bp, Bos taurus
ccaggcaaggggccaggtacatacctgtccaaagtggactgtgattggccgccggtcctctcggaacttggggtccttggcctctaccagtggggacggcacagtctttggcagctgctcttctgtggtgggggcacagccattctcagtgatgtcctgcaaggagaagtcccatggcggggttggtgtctgggttatggc

SEQ ID NO: 8490 - DNA, 201 bp, Bos taurus
caactcagatgaaacacttaaaatgatctagctgtccacttccctgtttactgtgtctgtttcactagactgtaagctccttgaggacatctgtctctagatgctactatgggctgcctcatttcctcctttctttcttaacacaaccacgatttgttcatgccctcaccctcctccgtgaggacaagtgtttcaggcccc

SEQ ID NO: 8491 - DNA, 201 bp, Bos taurus
cagcactgcattaaaatttcagaacaagaaggccagggggatggttatccccactatacagatgagaaaagtgaaccttagctccaagtcacacagacaacagagccaggggcagaggccaaagtcaagtacaaatgtgtcttactccaaagtctgtgctattccattaattctcactgctgccaggattttttagacaag

SEQ ID NO: 8492 - DNA, 201 bp, Bos taurus
cgtgaattaacaggtccccatactgactacctaccaaataccaggcactggaccaggtactcttggcggtgtaattttaagcactcttcacaaaaatccaatgagatattattctttccaacatatagataaattaagtctgggagagagtagtaactggtcaagttactactggaccccaatgcaacaccatagcccata

SEQ ID NO: 8493 - DNA, 201 bp, Bos taurus
tgaagacacagattcccaggtcccagagattctaattcagagtatccagggtggggtcctagtaaaaaatgttaagttccccaagtgagtctactacataatcagtcaagtttacggcctacttagttaattaatagtaccaacatcgaccacaagtaggaagagcccatagagaggagggagacagaaaattcaattaca

SEQ ID NO: 8494 - DNA, 201 bp, Bos taurus
gctggtgtgtgagacttaagtcacgagctggcctctgcccacctctctggtgcaggactcgggccctgtccatctctgggtttaaagccagccaagtacacaccaaattcacccatgctttatacgctgggtgagccctctgcctgggggtccttcccccttctcccttcaaaaactcctgctcagttgctccctccttta

SEQ ID NO: 8495 - DNA, 201 bp, Bos taurus
aaaaagtcacttctccaaggagacccaccgtccccaccctgtcaggatgaatcccatgtccatggctctccattccctggactggctttatttcaaggcccctacccgccccgggcaccgtgtttgttacctgcctcccagaatggaccgtgactccgtgtggatacgacttggtctgtgggccgcagctgcacctcagta

SEQ ID NO: 8496 - DNA, 201 bp, Bos taurus
tgtgggggggcaagcagaatggtatgcggcgggcccactgtgtgaaggcacagtgctggctggctgattcagctgtgcccgaggagcaagggtccactgggacctggagctgccttggcccctcccaggggctttattttcatcttctgaagtcactaaactgaccaaggaggtgtgttaacaaagaagacatggtttaaa

SEQ ID NO: 8497 - DNA, 201 bp, Bos taurus
tcttccatggcccagaaatgatggctgagaaaccccactggacgtggcagaaggctctgtactcagagtgaggctcagacatgctgatggcccccagccccccgactgtggggaccccccaggggactgcggtcctgtccatctgcccgcaggagcggtaagcagcaccagtggccagccggcccctgcatttctgctgtc

SEQ ID NO: 8498 - DNA, 201 bp, Bos taurus
gggcctttgtggggcccgtgctcttcgtgctgaccgtgagcggagaggcccaggggtcctgccggggtgggacaggtcgtgggagggggagccccttttgcgctctgacaccagatctccaggccaacacctgcatcctggtccgggtggtgattgtcaccgtgtccagtgcccgctgccgcgcccgcatgctgagcccac

SEQ ID NO: 8499 - DNA, 201 bp, Bos taurus
caaaacataaagagacaattgccgatgggagggacaggtgggtggctgggtagctctgtgtggaccagggacaaaggagtgtggtcctgcccagaggcccagtgaggagacaaaaatcaagtgtctccagtgtgaaatggatggtggttgaaatcccagccccactgcttagaattggtggcccgcgccctatcctctcct

SEQ ID NO: 8500 - DNA, 201 bp, Bos taurus
ttcagtcattaagactcagcacttgcactgcaaggaccatgggttctgtccctggtgggcaaagttctgtgtgctgcacggtgtggccaaaaaggagggggaaaaaaaagagcactctttcctctgtaccttccaggattgctattatcgtgcctcactttgttgcacttgggactccctggtagctcatctggtaaagaa

SEQ ID NO: 8501 - DNA, 201 bp, Bos taurus
gaggcccactgaggcaggggacttgaccgaggccactcgcctgaggggcttacagccagtctgccgaccaggaagccctctccacttcctactttgcaaggcttttcactcttcaggggccagcccctcctctcccccatggccccagtgctggcagcccggtgggcctggggaggatcccgggcagtggtgggtgctgct

SEQ ID NO: 8502 - DNA, 201 bp, Bos taurus
gatggtttaaattccagtctgggagccagcgggctcgagatccaagaagagcaaggttccagctcgcatccaaaggcaggaaaagattgagggcccaactcaagcagtcagacaggagttccttcttactcagccttttggtttcaggtcttcagtcgactggataaggccccacccatactgaggagggcagtctgtacc

SEQ ID NO: 8503 - DNA, 201 bp, Bos taurus
aattttattcgtatttcttcctttccctagtccctgtactatgctttatacataacagctactcaaaattttctaaatctatgattaaaaagaaaaaaatcaaacaagtagctagtagcttttcttaatccagaaacaggtcctcaataccttagtgtaagatgtcagtatgaggaccatgaaggctttgcaggttgctca

SEQ ID NO: 8504 - DNA, 201 bp, Bos taurus
atccgacatactgtgtctgttaactctttctcccccacaagctccatcggaggagagattttgcctcctgtttactgctgtacctttcaggcctataacagtgcataactgttcagttgctcagtcatgtccaactctttgcgatcccatggactgcagcacgccaggcctccctgtccatcaccaactcccagagtctat

SEQ ID NO: 8505 - DNA, 201 bp, Bos taurus
agcaggggagaaaaggaaggtcccttgctgggcgacgtgaccagaggaaccattccccaccccaaattccttagagcttacagccctcctaactctgtctcgtcgcctgggcccccctgaggacagcgtcctgtggggcggacgggaggtgtgtcacagacagtgcgggccgaggggacaaggaagaccctctgcttgggc

SEQ ID NO: 8506 - DNA, 201 bp, Bos taurus
ccagtatttccaggggggcccaggcagattctcctgggtcgataggcaatgaatgaagccacccttaccagtattcccagcccttgtgactctgacctccgactttggccgttcacacccatttctatcctgggtgtgatagaaatgggaaatgtgttattttccccaaacaaaggttattgcatgagcagacttactgaa

SEQ ID NO: 8507 - DNA, 201 bp, Bos taurus
ggttgccgagtgccctggtgggtcttcacactgcgtgtgcccttaccgtgtacaggatatgcactagcacgtccgtgtggccgcacacacacgcaggtgcgcaccaacacacacccagggctcccaggtagagtttgctttgtgcctgctgttgggtgttggcctttcagccagtggtttatcaagcccagaagggctgct

SEQ ID NO: 8508 - DNA, 201 bp, Bos taurus
cttgcccagagccccacgcagacgacgctggttgacacacaggttcccgccaggcccccagccccgcagcacaggaggggcctggagaagcagagctcgttaatactcacacagagatctaagtcccaccgtggaatgcacgttcccccgtttcctttaaaatgcctggccttctccatctgtatttcgttttcctacttt

SEQ ID NO: 8509 - DNA, 201 bp, Bos taurus
cttgggttcaagtccatactcctcgtcgtgacctaggatgtcctgcggtcagactcctgtccacacctgcagccatggccttcctctgacccagccattcgggcgtccaatggatcgagttctttcccacctcaggacctttgcatatccagtgacacccttgcccccgcctccaacaggccacctccaattcttccagac

SEQ ID NO: 8510 - DNA, 201 bp, Bos taurus
taggattctggggctggaaggaaagtctttagcctaagagcttggagggcgcaaatgtgtgtctccctcagaatcagtactggatttgcagcctgaaggcggcaggttccagagaacccgagggtcagctggagccagcatgaggaagcttccagaagcaagaggaagcttccagaggcaccctggaatgaactggggtag

SEQ ID NO: 8511 - DNA, 201 bp, Bos taurus
aataggaaagaccactttgaggaggtgacattggagctgagatctgaaggaagagaatgagccagctgtttgagtttctggataaggaacatcctgggccacactgtgtgttgaagctttgagtggaaatgagttttaacttgtgttaggatcagcagaccctaggactcagtaaacaaaagagagtgctgggcagagcag

SEQ ID NO: 8512 - DNA, 201 bp, Bos taurus
aggaccaggtcgaccagtcctcctccagtgaggcccaggcgccccctggtggccagaggctggaggacacagtggagctgggccctgtgccaagtccagcgcccacaatatcacccacaacagccccagaaaggatggggtctttcattgaccacattttctagacatgattgtcacggcctgaagtgacatcacaaagct

SEQ ID NO: 8513 - DNA, 201 bp, Bos taurus
cagagtgggcccacactactcgcagaaccacaagggcctgtgggaggtctgcagcccctgcgggagcaccaatatggagctctggtggcagaggagggggtactaggaggctcagagggccgagtccaatcagaggctgggtttgaatccctgcttctagcacagttgctgctgccgctaagtcacttctaagtcacttca

SEQ ID NO: 8514 - DNA, 201 bp, Bos taurus
gatgactagatcagtgacatccacagtccggctcccaataaggagccctagacccttcttgcgctgagatttccacctccaggaaagtggcctccagctgtggtcaggacatgtactctagctttcggtggtcttcgaggagtgagaggtcatcaccacctctggatctgcccccaggtggtcccactgctcctggtccct

SEQ ID NO: 8515 - DNA, 201 bp, Bos taurus
agagtaggcaggcccaggcaggagtcggggagggtcatcccctggggctagtgtggagggaggtagccttccatgccctgtggatagaaaccaagtctgggctttgtcccccagggccgcagcagacgtccagtgttagcggcgaggggtctgccagggtggggtgcacaagaggccgaatgatcctgtcccccactgcac

SEQ ID NO: 8516 - DNA, 201 bp, Bos taurus
cctctactgttgccccgtgagtgcctcatccccggaaggcggtcaggcaagactcacatcctcaggtgacggacaatcaccagaagtggttgtctcagggctactgccattcttgatctttctttttttcttagctcctgcaggaacaccagggctgttcttctgctgatactcccttaactgtaaaaaggaaaagcagtg

SEQ ID NO: 8517 - DNA, 201 bp, Bos taurus
cttaaagacagatacggtgccattgtggcatacggaatgtgggaggccatgtcaggcactgggctgggatctgattttcctaattcgaggggcacagggagagagactgaatgggaacatggccagtggggccctctgaaaccatcagtaaagaaatagtaggattataggttggcaggaacgtgagctgagtaaatttga

SEQ ID NO: 8518 - DNA, 201 bp, Bos taurus
gccccaagagccagagactcccaggcttcctacttggaagctcccccaggactttggacatgtacagaatgagctgaatgaattcaggtctcacttcgagggtcagaatgttagtctgcttttgttttttcatgttttgttctttgaatcaatgctgttgatgacaagctgtctttaataaattgtgttctttgcagtagg

SEQ ID NO: 8519 - DNA, 201 bp, Bos taurus
ggaaagtcagggctgctgctcacacttgtccagcagctgcccccgcccctggcccccgcccccgggcaggctagctggagaagctgggtgtgggagccgtgcctgtccctcagccttgtgccgggccctttctggaaggctcactgttcccttggcccctccttcacactcaggagggttgggaagaaagggggacagcag

SEQ ID NO: 8520 - DNA, 201 bp, Bos taurus
gcaaaacaggggtgattctggcctcacagagctcacttggggaggctgacattccttaaataatttcacattttaggaccaagagaagtggtatgggggtgggggagcgtacggggccatgaaggccaaccgttcccatgtggaccgcaggtggggatgtccgggaagacatctttttaaattatttgtttatttttggct

SEQ ID NO: 8521 - DNA, 201 bp, Bos taurus
agaatccaattctgagtcagggccagggctttctctttcctgtgaatgtgaagacaggaaggaaattttctgtagccacaaaatcagtttttaaaaaagtgttttgtaggcacagaagaggccaagcagttggctttggtttaaggcacaaataacaaatggaaatggtcagtcgtggggaaggagggtctgggagtattc

SEQ ID NO: 8522 - DNA, 201 bp, Bos taurus
tgcctgaaaactaggggtggggaataatagagcatgttatttagtgatacagacgtaaatcccaaaagcaatagtaaaagagtagaagttgcttgcccctcgggatcagaaagatggacgaatttgaggatgggggacaggaggctgaagttttcatgataagtctgtggacctacttgatgcattaaactatacgcctgt

SEQ ID NO: 8523 - DNA, 201 bp, Bos taurus
cccagcccttaggcaagcacatacagaggttttacccagagaccaagccaccccactgggcaccctcccaccaggcagggcgctccacgcggctggccaccggcaggtgctcaccagcttctggctccaggaacaggacgatttgcccacctgctccaggagggctttgaggtccccccgctgcctctgggcggtggccct

SEQ ID NO: 8524 - DNA, 201 bp, Bos taurus
agggagatgggggtgcccggcagcccccaggggcaagggggcagggtgttccccgtccagagggagccgagctgctgctagcgagaggccatgcctccccgggagccagggaatctccaggtgtcctgggaatgaaggtcactgaatacgtgaccctgatgctcgggctgggccccccgaccctgccagccaggcccctcg

SEQ ID NO: 8525 - DNA, 201 bp, Bos taurus
atatttaacttttttttttcatattcaggtatgaattttacactcatgacacatctcagtttgggcttttcacatttcaggagctcagggatcatttctggtttgaggttgccatagggacagtgcagctctacataaaatattctaggacttgtctttctggttttattttatttccttaagacacttgatacaaaggtc

SEQ ID NO: 8526 - DNA, 201 bp, Bos taurus
gcctgtggaaccttgctaaggtggaggtgggccagggattccaggtggggcagtgacagattcaggcacatcacacctagaaaagcctaaagatcattctttgtgattctacattgtacacctggcccagagactggaagatgcagagagcagaagggaccttcccatgttacgctctgggcagggagagaggcaggccca

SEQ ID NO: 8527 - DNA, 201 bp, Bos taurus
tgaagagtttgggagaacattagatctggctgcctcagtttcccctccacttcctctgtaatagctccacagaggggggcccccatccatccacgccccccccccaattttcttgaggggcagtgacatcttagaggaagaaacaaggatggagcacaaagtcagaggatggagacgtaaagagaggccagagggaactcc

SEQ ID NO: 8528 - DNA, 201 bp, Bos taurus
cttcccaagtctgcaggggccctcagggctttcatttttttttcttttaagtggaacctctttctctgcccctttaaccgaccagccagcagctgcttagggggtgagagtggcccggaggtgagcagtaataagctctagtgatctgctttgaccccaaacaccaggaggcagagaagccccccagacagtagctgcctg

SEQ ID NO: 8529 - DNA, 201 bp, Bos taurus
agacctagagaaccaacttatgattatggtggcagggatagtagggcgtttgtaggattgacatgtacacattgcaatatttaaaatggataaccaataagaacctactgtatatgcagggaaccctgctcagtattatataacaacctaaatggggaaataatttggaaaagaatcaatacatgtatatgtgtaattgga

SEQ ID NO: 8530 - DNA, 201 bp, Bos taurus
tcccctgcagtcttgctcttcagacagactcagactccatgttgaaacctgggaggggacggtctcacttccctcattggcctttatagcaacagactacgtcacatctcatccactggcttcttcctttggtggtcagaaaagaagtctccctgacataagcccacccccacgatcttgataacagggccaaccccagga

SEQ ID NO: 8531 - DNA, 201 bp, Bos taurus
gggatctcagactcggaagccctggtcttgcccttgagctgaccacggcatgccatgcgttccaggtcggcacaggccacaggtcatccgcaggtcctcctaggctcccaggagtgttttctctaactcggggttcagggtgaactgcagttgtggcttcaggtttttggaaaccagctgggctttggggaccctggaggg

SEQ ID NO: 8532 - DNA, 201 bp, Bos taurus
ctgcggaggtaacatcaaacctgcacacactggaaaaccctcggagtctaagacaatgggtcagctcctcagatgccaagggaacctgggctccttgccaagctggccagccactctgctcgcatctgtgaccagctgagcaggggcccagatgtcggccagcagaggtcactgaaggaggtgggggttggtgtgtctgct

SEQ ID NO: 8533 - DNA, 201 bp, Bos taurus
aagtcagcatcctcgcgcgacagagcagccaggtaaatgtttctcttttgccacttttatgtgatgttgttctcagagattttggagggtttaactgtgacgttaagatttagctgaagtcacaccccttttattgagtttccagatgagagcacagcttaaaaaagctgttggccaaatggctcgggtattgtgttggac

SEQ ID NO: 8534 - DNA, 201 bp, Bos taurus
catgaggtactagaatggagagatttgagagagaagagctaaccattcattgctctgtatgggcatagaagttatatctcactcagtgtcagaggaaatgatcatataacatattttctccagtagaagtgggcagacagcatccagcatccttgaaagataaaagtgccaacctgtcagtttgccagtattttctgttaa

SEQ ID NO: 8535 - DNA, 201 bp, Bos taurus
agaccctaagggccctaagttgttgagcccttctgagcctcagtttccccctctctaaaatggggataatgctaccttgcataatgctggagcatccagaactgtgtggcccaggcgggcacactgaagggtcaagaaaggaagacagagcttcttgggctgcacccgcccccgcccaagaaccacatgtccctgctgggc

SEQ ID NO: 8536 - DNA, 201 bp, Bos taurus
cagtaatctgttatagcagccacaacgaaccaggccaaatgctggctctggggtcctgacgtgtgctcactgacacccccacacccctgaagcatgaaaacgcacagagcactggagtgggccctgcagtaaccaagccctaacttatacacacgcgtgcacgtgcacatacacacacacacagtgggtgccttttctgga

SEQ ID NO: 8537 - DNA, 201 bp, Bos taurus
gcttctcgtgcccactgtgtctacttcctctctggcctttctctctcacatcccctttcacctccagcaccgccctgaaactggtccaggtctccagtgaatgccacggccctaaggccagtgctcaagtctcggtccttacgtgactagccccaatcagcatcgtctgtcagctctcgtcctctgcccctgacactgtct

SEQ ID NO: 8538 - DNA, 201 bp, Bos taurus
tctggctagagggtggactaggggagcaacagcagagccagaggcgttattgtcatgggaatgactgatacctgggcccttacggtcagtctggtatatttatttcgttccttcctcctgcagcctgtgaggaagcactgcgattatccccattttacagatacggtaaacaacgggccctgatgctgggaaagattcaag

SEQ ID NO: 8539 - DNA, 201 bp, Bos taurus
acacttccaccgggaggaagggggagggggaagcaaagacctccttcctctcaccactcccttaagaaccccttccagcagttggacacaatccgaggcacgtctcaatggccatataactgtaaaggagttgggatatgaagtctttatcccaggctgaagctgggagctctatttggaagggaagaatggaagtgtgac

SEQ ID NO: 8540 - DNA, 201 bp, Bos taurus
gctgagcagttgtagcaaggtgtcgaccgtgtatggagagccaggggcacaggtaagacgatccacgggcttatgggcagtgacgagtggtccagtcattcggtcaagggcctagagggaaaggctggaaggtcagcacaagaaagtctaaggtgcaaggacgttcctggtggtccagtggctgagattcctcactccccg

SEQ ID NO: 8541 - DNA, 201 bp, Bos taurus
aaaccccaggtggaagaagttaactacaggatgaccagactacacccaggacttgagctgccacaatgccgagaagtggccacgaagaaatgggaacaaatggaccctggaactaaagatcgactgtacctacaacaaccaagatgactctggtcagaccaccaatggccagtctgaagatgactgtgctatttctgcatg

SEQ ID NO: 8542 - DNA, 201 bp, Bos taurus
gtgccccgcccccagcctggtgatccgcaggatctatgtagctgtaaccggggctaatgaggcatgggccggacatacagggccgggcaggggaaatccaactggggaagaggcaggtcaattccaggctaattgcgaggtcctgttctgctgctgccctggcttggccgcctccctaccccttagcagagggagcatggg

SEQ ID NO: 8543 - DNA, 201 bp, Bos taurus
aagcggatatcgtcgtgcgtcacttccggcccgccctccggcaacgcgttgctatgacagcatgccggcctgctccaggctgtgattcttaggcctttgtgttctgcaggttttgtttcctaccgggatctttgggagttgggtgcgtcaggggaggggcttcccaggtggcgctcgtggttaagaacctgccggccaatg

SEQ ID NO: 8544 - DNA, 201 bp, Bos taurus
cttcacacctgcgtcgatgtacttacacaagtatggccctttctccccagcttcttcctttattcttgacctacatcttggagatcttcctgagtcattactcgtatggccacttcattcttgctagcagcttcattatatttcctgataaatgtgcacaagtgggaggggcaagggtcttcagaacgtgagcgtccttga

SEQ ID NO: 8545 - DNA, 201 bp, Bos taurus
acgcaggatagaccctggaaaaggccttttgtttacggctacttccgtcctgcacgaagtattggaccttctctcttctcagtaccttccgtgaggccacgtggtaagttttctgaatcaggagaccaagctgagaacagcattgtggtgtgtcatgtagacactgctgtatttgagatggataaccaagccttgagcctg

SEQ ID NO: 8546 - DNA, 201 bp, Bos taurus
cacgggagggagccggctgtgatgccgtggaaggccagattccatctcacggggacgggtgccatcagctcaatgggatcagtccctggccttcctggccgcgggtgcaggctgcagattgccaccatgaccgtcctaaaatacggtgcacaggagaacgtgacgctgcacggagtctggatgcaaggctgccctggagac

SEQ ID NO: 8547 - DNA, 201 bp, Bos taurus
tgatggccccccacacaaggcctattaattatgacgtcacacagaatccaggttttctgaccctctggtctagggccttcctaccagaacagagactgattgcacaacgccaggggaccctgcttacagaaaacatggagtcagtggcggcctctgaggttgtgtgggagatgagggcttgcccgactgtggcaccgaccc

SEQ ID NO: 8548 - DNA, 201 bp, Bos taurus
agaggaacgcacgtggggctgtgccccgtgagggggtgaggggcagagggcagagtcagggtcgtctccgccgctgggaatccggcctgggtatgtgcccgaggacagcagagcaagagtcaaacccagagactccaaagccagtgctcgcaacaaggccagggggctgcctctctcccctcctctcgactgttctgtggt

SEQ ID NO: 8549 - DNA, 201 bp, Bos taurus
ttcttcgaagagctgaggacgattctgctcttatttccaccgtcaggggttcctctttagaggatgaccatcaggggccagagcctcagagtgacttgtacgaaaggtcacatgccttaatggggaagctccgccccctctcccaggctggggagaagtaggggccggtcagagcggcagagccctagcaagaaaggcagg

SEQ ID NO: 8550 - DNA, 201 bp, Bos taurus
agccccgccctcgaccttggcatggcagtgaccccggccaagccgcgtccccattttgcagctgcgactttctgacaaccagcttgcctgtttctcccaaggatctctgagcatccaggccgcccctctgtgcactgcccctgtcatgcctgtccttccagcacccccaatgtgcccagcagggacagtccttgccacgcc

SEQ ID NO: 8551 - DNA, 201 bp, Bos taurus
cgcctccccgacacccacgaggtgcaggcccctggtgagtggaggaagatcctgcaggaagaagcccagctcaaggtctccagctgagaggcagaatctcgggagggggcctgcagtgctttgaatggtgtcccccaagttcctgtccactggcacctgggaatgtgaccttatttggaaatagcgtctttgcggctgtaa

SEQ ID NO: 8552 - DNA, 201 bp, Bos taurus
gtccttattcctggctccggccccctgtgtctgggggacacgagccgggtgcttggcctctgtgtgggggcatctgctggcccgtgttcatatactcaccccacacacgtgtgcatgcaagtcctgggctgcccgccccgtgcggctgtggccgcgggcaccagcccgtctgagccgccctgtcttgcagagggagcgtga

SEQ ID NO: 8553 - DNA, 201 bp, Bos taurus
gacgtcccacacagggccccaatcctgggctccccttgcctccacacccaaccagctctacagaagaacctgattccgtggcagaggagagtcagagcccatgtgccccggccccagggcgatgcctgcttgggggaacagaactgggcagccgggaatcgcaggcagagcatcaagccatggaagggcgtggggacagga

SEQ ID NO: 8554 - DNA, 201 bp, Bos taurus
gtgtacacgtgtatcagcatgggcccaaagtcgcatacatgagagcgtgtgtacactcctgggcaagtgcggatgcctgcaagggggctcaccaggcacccgaggccttacattccggagtcctgagacccctgggagaggggaagacttggtcctcccagcgggccccccacccgctgctccaccccgcagggccgcacc

SEQ ID NO: 8555 - DNA, 201 bp, Bos taurus
gcctggtgtccgggtgggagccccggagctgggctgcccccggctctgcgggtcctcactcttcctcaggcgggtccagctctcccgcatcgaccttcccgtctgtaaagcagggccaacaacctgccccagagagagctacagtgagacatgcgggggacaggggcagaggggtggccagaggttagatgtggtgctaaa

SEQ ID NO: 8556 - DNA, 201 bp, Bos taurus
agggcgggagtcacaggtgtgccagggatgttcgcaccccagctccagtcctgccttcccagggaggcggagccaaggctgcctgaagccaggtggcccaaccttcagaagcactgcaggcagctgccaggtgggtgactggtgccagagtccccgcaaggcaagggggcccgccccactttccaagggcccaggggggca

SEQ ID NO: 8557 - DNA, 201 bp, Bos taurus
cctgctgatccacaccactgctgcttctcaacacgcgacgcgacgagcctgctcgttcttcagagcaacttccgaggccgtggctttcccaggctctgtactgcccgcgagtccggcggcacgtggctgctaggctgctctccggggttcccacctgcagacaggaaaccgaggggacccactaggcgtgcctcccggtgc

SEQ ID NO: 8558 - DNA, 201 bp, Bos taurus
ctagagccaattctagaaccagccccagcacggttgcctgatacagccatgttccagcctcgtaagaggcaccagctcccaggcccgttccacaggcagaaccagccatctgtccagcctcatccacagctccaccctcagcgcctatcgctaagctctggccactcccgactacaaccccagagacctcctccacctcgc

SEQ ID NO: 8559 - DNA, 201 bp, Bos taurus
agaagcaaggtctagtgggctgactagggaaccggaaaagttcccattacttcctttggtgctcagccaaaacctggaacccacagtggcccaagctaagattaagtgaactttacagaaatccctaggaataacttacaagagctaagaactctcagtagagggccaggcttgttggagggtcttaactgtgttacctgc

SEQ ID NO: 8560 - DNA, 201 bp, Bos taurus
tcatcagagccgtgcccacgatgttctggaggatctgcataggtcgaaaggtatggaatgagaatgaacgtgaagaagagacgtgtcctgtttgatgtgccggccggttccagctgcccgcgtccctgcgggcctcgcgccagggtggagtaactcgggacggagagaggtctgcagttcacaggcagggttattagcggg

SEQ ID NO: 8561 - DNA, 201 bp, Bos taurus
accttctctccccatcaaagtagggtacatctgggccttgaacttgtcatctattcagacttgctttgatgaaatgatgagggtgaacaggacatggagatggcttgattcaggggcctggcaggaagggcagcaagggaaaggcaggcctgggccagggacagaggagcctggctgaccctggcgcgctgagcctgaggg

SEQ ID NO: 8562 - DNA, 201 bp, Bos taurus
ctgctcagggagggcgcaatccaggcgtggtccagagagcaaggttattttcaccttcttggaaccacctcgaacaaccaggggaggcctgactccagacaccagggctgggatgcagacatggggtctctctcgcagcctgggtgggggtggggaagcaaagctctttccgagtctcttaggaaccatccaggccatcca

SEQ ID NO: 8563 - DNA, 201 bp, Bos taurus
agcccccgcccccctccctgctcctgtccacccagaggacagactcgcctcctggaaggcgttctcacttccgccccccgcttcacagtgcaagtgaacatgtggccggcggtggctgtccacaaaggactctaacgagaacgaaatgcaaactctgtctgctcagtgaccactgggctccagcccacacggcgagctgcc

SEQ ID NO: 8564 - DNA, 201 bp, Bos taurus
ctctgcagtcctccgacttaagtccagctcaggaaggaagcaaagttctgacttagctggaatgcctgtgcctgttcctagactgaccgaggaatgggccatggctggtcagctgcagtcacagaggtggtggcaaggacaggagagcaggcactgagctgcttggtgagcagctggcctgggcacctggccttccccgct

SEQ ID NO: 8565 - DNA, 201 bp, Bos taurus
cttaaaaagaatgtttttttcatgaaattgctgccaaacgttcaagtttatgggaatgaactccactttcccgaggccccctctagccctttctctgtgagccatcgtgttttctttccaggcacagcctcttgacgcggcttcccaggtaaagggcccgcccacctgtgagtgcaggagaccctcgttctgtccctggat

SEQ ID NO: 8566 - DNA, 201 bp, Bos taurus
tccatccatcagaggggccttgcagggtctcaacactcccctccttgagctgcttgcaagttcaagtttcttgggggagattctccctcaaccaagcacgcgggggccttcctcctgccccgctcacttcccccaggagccagagtgttggccccagactggatcaaacacacgatgcgggaataaagtgcaaacaagggt

SEQ ID NO: 8567 - DNA, 201 bp, Bos taurus
atcttttatgtctcctgcgttgcaagaaggttctctaccgctgagccacctgggaagccctgaggcaatatacctaaatgtattaaaaggcaagcaacgagcccttctgcccttcctctctccctccctccatttatctttctataagtgaaagtcgctcagtcgtgtctgactctttgcgacccatggactatacggtcc

SEQ ID NO: 8568 - DNA, 201 bp, Bos taurus
gcctcagacactcagagctttagacacaggaataattctcgggctgttagaagcccctgccccaccgtcccagggaccaggccccccaggccacctcgccattacctctgcagaccctgaaagatctcatcttcaccctgtttctcccaaggcctgtcttcttgccagatgttagcagagggcaaaggtgggctggagctg

SEQ ID NO: 8569 - DNA, 201 bp, Bos taurus
agagtggtgagtcatcagagagagatatgctgcacggaagctgacaacccccggacggagggcgctcagacagcctgcgtgtcaggccttccctgggggcggggattcactggtgcttccccagccacaggcatcacagcagacaacgcttcagtgagtgaggagaacgaggccaggatattgaccatgcatcaaagttta

SEQ ID NO: 8570 - DNA, 201 bp, Bos taurus
gtcctgcttcactcttagagcctgcccctccctcccaggacccgccatagcctggctccgcctcgtgtgccaacctttctgggacactcggccagggcagcgggcgcaaagacgagaccaccaatttgtcagatgttctgggaacaagtgcccttcacaggtctttaaacggcgcaggcccggccctagtggggaaggcgg

SEQ ID NO: 8571 - DNA, 201 bp, Bos taurus
gctgacctgacagtgcccctccttgctggttctcagcgatgccatttccctgctcttgtgtttctctctctgtcgtaacaagaacacgaactcgggtgtccggcagacttgggccgcatccagggtctgtcacctacgcgctgggccactgggcaggtgactcaccgcccgcgacccgccccttggcctcctcatctggag

SEQ ID NO: 8572 - DNA, 201 bp, Bos taurus
ggaagaggatgaaattgaagaatagggtaacattcggccaattaaatcgtttcctggtaattaactggtaattcattggccaattaagctgttagaaaacatccaagcaccagctccctgtcacgactcagaaaataaaatgaaaacgaacatcacccccagaatccccgactcggttgtttcccaggtttgcagcctgta

SEQ ID NO: 8573 - DNA, 201 bp, Bos taurus
ctgggggaagcagtcccgggggcctgtggtcagggctgcctctgtgccaggaaggacgggtctggaggtcctgggggccctgacatgacggccccccttatgctgctcagataacctagtcaccccccgtgctgtggacactgctcttcttcagttcagtctctcagtcgtgtccgactctttgtgaccccatgtatcaca

SEQ ID NO: 8574 - DNA, 201 bp, Bos taurus
tcctggctcccacctgaccccaagctggccaggcctaaggccagccagtccaaggtgggactcctgggatcacttacgtggggaacccaaacttgatgcccaggttgccgttggccaaggaggtcaccaagaccacgggcatcttcatgttgtccttggcatccaggaagctctggtcgtccgacaccgccccaaccacgt

SEQ ID NO: 8575 - DNA, 201 bp, Bos taurus
ctgtgagtccccggacagacggaccaacggacacagccagcctggcagcagagggcgggaggcgggaggcaggcccggcggggccgtgcggcctgaggaccgggtcctgctcagctgtcctctcctctctgtggagtgctgagcggggctggggcagacgcgcctgggggcctggaaggacacggcctggccccgagcctg

SEQ ID NO: 8576 - DNA, 201 bp, Bos taurus
tcccggagaggctgggctgggccgcgcctgcccccacgccctcctgaccccggtgtcacccccagtttgggatcgtgttcgacgctgggtcctcccacacatccctctttgtgtatcagtggccggccaacaaggagaacgacaccggcatagtcagccaggccctggcctgccaggcggaaggtcagtggacagtctgcc

SEQ ID NO: 8577 - DNA, 201 bp, Bos taurus
cagccatctgcagaggacaagaaggatggccggctgcctactacagggatcaagatctgtgactgcgaccaggatctggaggcagcagactttgacatcaaccttctggccacttgctctttttataatcgtgttcttcacctctggaagtgggagaacatctgagctggggaagaccttgcttggtttgacatggtaaag

SEQ ID NO: 8578 - DNA, 201 bp, Bos taurus
aatgtcctagatacctttttgctggtctgacactttgacccgggtggctgggatggcgggggctggtcaggttccccttccctgaggcctcctcatatgatttgcttcagggtctgcacagaatgagaatttacaggtagtgagactgtttacctgtaggcaggcccccgagagggaggaagatgaagctgtcaggcctca

SEQ ID NO: 8579 - DNA, 201 bp, Bos taurus
tgctggggtgagcacattctgctcaaccctcaacccttacaagtgtacagacccccattaccacaaagcaaactgtccctcacttgtgaggctggaggcaagctggcccactcaagcctgctgcccagggggaaggcccaagcctgactgcccctgccacccccagcctgcctccctctggccccacccctgccacgccct

SEQ ID NO: 8580 - DNA, 201 bp, Bos taurus
tgcactgaatttaggcatgttcttctctttgatctgtggttgtcatatctctttcaggggcaggctgctccccagttttgggggtagaaacctcaagacctaattctaagctgtggtgtgaagtaagtgagactggattgtttcctctgggaaaggagcagttgcatattcctcccaaggagctgttcacagggacatggc

SEQ ID NO: 8581 - DNA, 201 bp, Bos taurus
ggagatgagtgttaaatcattaccaaaaaaaaagaagaagaaagaaatctagaaaactgtctttcagttcttgtttcatgggcaattcattttcttgctacgtaagtcaatttaacttgagatatccagatacctacagcctcaagaatcctaaataagccattgttatgtgctctagaatgcctctagaatacctgtcat

SEQ ID NO: 8582 - DNA, 201 bp, Bos taurus
gtgtgttagtaagcaagaaaacctttatgcccctggccttgaggcccttccttaaatggttgctgcaggttttctggtaggcagggaaatcctctagtgccaataggctagagagaggatttaaaaatggtgtttggcagttgatggtattagtacagtataataaggtccccaaaatgactgtgaccagtctctctgtcc

SEQ ID NO: 8583 - DNA, 201 bp, Bos taurus
gtttgattagataaatagaactcagtgtatgatataggaaaagggaattgttataggggttagagagctggctatgactctatacaaggatgttgccttattgtttaatgttggacctgaagtcatgataggtcaacctagcctgcagccaggaaggagagccacatataacttggatgaaagcagagtaaacaaatgaat

SEQ ID NO: 8584 - DNA, 201 bp, Bos taurus
aaattaatttctgttgatatcttcataggcaagtaaagtatctctgaatttaaaacttcttccctctgctctattataattcatttgtgatacatataccacttaatcctccaaatcttattccttggcatccataacccttgttaatttcttcataaaatttattcacattaactttttacaatcattaatcataaattt

SEQ ID NO: 8585 - DNA, 201 bp, Bos taurus
aagtgcatctttttatttgatggtctttgagggggtaacagactttattagaagtctctattactgtgatgtcctattggaaactaccactgtggcccctctgacagctgcagtccctgagaagtgatggtatgtattaacacttgtagtagaactaagcacccctatgaattcttcactccttgattgtctgaggcctct

SEQ ID NO: 8586 - DNA, 201 bp, Bos taurus
ggcactgctaataacacttgtaaaggttaactggtttaactctgaaaggaagttactcaattatccccaatcactatacatgaactcaaacatgcttattgttgtcccagctttcggttttagaaggagttggagccgcactgacatcaaacagtgtgttgtaacctgatctacttataggtgctttgatctttaagtgtc

SEQ ID NO: 8587 - DNA, 201 bp, Bos taurus
ctcactcactttctttagaagacagtgacagctgcacggcagctcagcaaatgagggaacaagacacagaaggagcggtacccggacagagggcccctaacacgggacgaccccaggtgtgctgagggcaaccctaggagcacaacatacacaaagctgatgagcaggacccacttccagagaagaagtcaggaatgggag

SEQ ID NO: 8588 - DNA, 201 bp, Bos taurus
tacagtatttcactgactttactcaaattatgcagaaatttaagtatggtaaattatacccattaatttatttaagaatttattagcagaaatgaaaaactttctggactatgatgaaatatgtgcatgtactttttactggatactaactggcagaatctcactgttacataattctaatttctctttgaagttaatggt

SEQ ID NO: 8589 - DNA, 201 bp, Bos taurus
cttgaaggtttctcaggccatatgatccctgtcatatctcctcaaatctacctcataccataatagcatggtctggttgtgtttcaaaaagttttataaaaacaagcagcaggtcaaatttggcctatgggccatagtttaccaacctcctacctagggtaaagctatttacctttctttcctcaaaaactagacttagga

SEQ ID NO: 8590 - DNA, 201 bp, Bos taurus
taaataaaattaacattcctaaagatatttgcaatctactttgtaacttttgtgattgtgaactacaaataagaacattaagtacgtatttcaacctggtgatgtacaatcactttttattttgatcacatattgagttctgcaatttgtaggaaatactagcaaatgtatattcagatcagctttcaatgtttatatgaa

SEQ ID NO: 8591 - DNA, 201 bp, Bos taurus
ctgtctctcacttctctgaaatcatctgcttcttctctgcagccttctgttcatttgtttcagggacatgggttttaaacgggccgtgggaccggtgttgatctggatgccgccccggggatgtttaatgctgatggtggtggagtggggtcctgggctcactgcagcagagttctcttgggccccaaagtgtgcaggatc

SEQ ID NO: 8592 - DNA, 201 bp, Bos taurus
ccagcagggatgcggcgtggaggacttacctgctgtgggaccagctccagggcgctctgcctgcactcagggcattgtcctcccaacgtgagaactgtaaggcagggggcctgtgttcctgttgtctgctgaacatgtggtctaaagtagaaaggtattggggccgggaggttagaccagtgaaattttggtatttgttgt

SEQ ID NO: 8593 - DNA, 201 bp, Bos taurus
ctgtttttgaacatgcaggcacaagtcagtgaagggcatggtgtgtgaagaggtaaccagtggagtctccaagcagagaaaagcaccttctcctgagagcacccctgggtccatgccacacttgcaccattggcagtattgtcctctctaatacgtctcagggttctcatcatgtcctaaacactgctctccctgtttgct

SEQ ID NO: 8594 - DNA, 201 bp, Bos taurus
actgccttatccttaatgtgacacacgtcacttcagctcagtcagagaccataactagtcacatggccccaccgtaaccgcagagcaggccagggagtattggaaggcacctgaactacttggtgagcgccgtctctgctacacctttcagtactgcgttctttgtggacaagtgtcagcaaaaccatgtggtggcctaag

SEQ ID NO: 8595 - DNA, 201 bp, Bos taurus
cttgagacagctgtcagtgacagatagcaagactagtaatagtaaacagacgctttggttggttttggtatgtaaaagttaagagggagttgctttgcacatgaaaatttgaattgaaaatgtgttctgtgattgtgcaaaacagcagtgctgtctttaaatttttattcaaaggacagtgaaatagaccaagactgaatt

SEQ ID NO: 8596 - DNA, 201 bp, Bos taurus
attcactttctctatttttgtccactggagggaagggctatgcaagcaaaatgacttaagccctacagtctaactgagttgggtgatgtagctctcttagtgaacactagccctacccagtgggcacaaaggaatgaacttgtaaagtggtactgaaatttcagaggatatagtggatattccgtatcgaactgagctcaa

SEQ ID NO: 8597 - DNA, 201 bp, Bos taurus
tgggcctttgaaatctggctcatgtccttagaagactcggatgcagagaaagagagacactaggggtgtgcctgcaaggagggacacgtgaggacacaacgagaagggggccatctgcaaatcgggggagaggcttagaacacactcttctctcatggtcttcagaggaagccaaccctgccagaacgtgaccttgaactt

SEQ ID NO: 8598 - DNA, 201 bp, Bos taurus
caaccggggactcagcctacagaaggcagcagcaacgatatccctgatgtcagatgcagataacgtcaggacccaaggcaatggggcccagagcagctgggatttgagagacagcctctccaaggacgtaacacttgaggtaaggggtgacaaaggagaaggaactggccatgcaaagacttggaggaacagccttattgg

SEQ ID NO: 8599 - DNA, 201 bp, Bos taurus
tgaggaacctcaagatctgcagtcaacgagtcagagacccagaagacccagaactgtagtttcatttgtgttcaaaggcctgagaaccagggatgctgagagtgtgagttcccatctgagggcagaaaatggatgtcccagctccagcaatcaggaaggagaggttccctcttcctcagcatttctgttccactcaggcct

SEQ ID NO: 8600 - DNA, 201 bp, Bos taurus
ctctgaggcagatggtaaaatccaacagccacagaccatcagaaatacacctgtggtccaaaaataagtagttatactgagttttctgcagctagggtgactgtacctcatagcatttgtaggtcttttttttaaaatgaagtagggtaggcttaatttttttaggtattcatatttcaaaaactagacaaagtaactata

SEQ ID NO: 8601 - DNA, 201 bp, Bos taurus
ttccttaagttccaaaatttactagagacatgatgaagaagcctgtattttacaactgtagcaactgtcaagaatctttttaggtcactatattatccttcgtcaaagatcaatagaagtcacttattgtgctttttgtgggtgggattagaagggagaccactgatgggcataattcaaatcacatactgtgtgggtaag

SEQ ID NO: 8602 - DNA, 201 bp, Bos taurus
tatacataacattccctgacgagtatctgaagcaaaactagcccatgttgccaattaaaagggaagtagttaagttagggagagaccatcttgagtgagccgatgagggaaacagatttatgaagaggatgctccagctctattcagaggtagtatagatacatgcatttttttttttctaatttgaaaacaagcatgagg

SEQ ID NO: 8603 - DNA, 201 bp, Bos taurus
ccaatcccatgagcctttgttttcttccaaggaactgaatatctgacctcacttgaccacaaaaaagcactcagagtcatctccaagacattagctgggtgtacccaaggcaagggctctcttcatttcagaattctcccaataagagtccatgtaaatctggagctgcctgccactggccatggttgccatttctaggaa

SEQ ID NO: 8604 - DNA, 201 bp, Bos taurus
gtgttggggccgtgtgtgaggtgtgaatcaggcacaggtgcctggaacagtctgtcccagtggggaatctgtaagggatgggcaaagtaaagggatgtaagcaaagaggaatttgaggccataggataggggccacattaaggagagcctcctgtgtcatacagaggactttttagtagtcctgtagtaaacagggaatca

SEQ ID NO: 8605 - DNA, 201 bp, Bos taurus
ttgttagggaccaagcaagaaacaaaacaaccattccagtcaggaggaaagagataggtagataataaatatatagtacacttgaaaatgataaggcctactaaataaacacacagcactgattagtgttgggataaggatctgaggggtagagacaagaattagacattgtaactagagtggccagtagggtgaagacca

SEQ ID NO: 8606 - DNA, 201 bp, Bos taurus
accaagagcttttctgcattggttgattctgatttttgagctaagcacagaactccagggattcaattgtatatattcatgcaatatcatttaaagctcacattggaaatgcaaaggtttgctgaatatcaatagctgtaagaaaagctaaatagcgtaaattatatttcagtaaattatgtgtaggtttgaaatcaagtt

SEQ ID NO: 8607 - DNA, 201 bp, Bos taurus
tcagagaaaatctagtcctgactaaactgtcagcagggccatatttcaggctttcagcctctaaaactgtaagaccgatatatttctattgttttatccactcagtttatggtactttgctaagggtgtcaaatgagatctacattgtataatccaggtcatcagcatagacagacaccatacaaagggcaacccatacaa

SEQ ID NO: 8608 - DNA, 201 bp, Bos taurus
tctccaccctccagatgtgttctgcttctacaaaatccagagacttattgctcttcttcattcaagctttaatcagaaatttattcatatttttgctaatatacaagaccttctcaattgatggacaggatttttcagaaagaatttgaaagtcatgctaagaattatttgagcagcattgcaatgattctcacagaccct

SEQ ID NO: 8609 - DNA, 201 bp, Bos taurus
gacaccggggaagtccaaaattgagagttgttttatttggccaacattctgagaacttcaaactggggagactggagtcttaggttgctccaagggactgttccaagaaggcaaacagaggagttagatatacaggagctttttcaacaaagaccaggtagctgaaacattaaagattacagttaactaaagaaaatcaga

SEQ ID NO: 8610 - DNA, 201 bp, Bos taurus
caatttttcttttttcttaaatctattcatttgttattgggttgtatgagtctttatgcactttgaatataaacccctcaacattgtatattggaatatggcatggataatacataaataaggatctctgcagatagcctgagtacctccaataaatcattgccacaaggtctatctggctaaatttagcagctttatatg

SEQ ID NO: 8611 - DNA, 201 bp, Bos taurus
ataatccttactatcactaaataaatcttaaagttgtaaatattatgcataaatgatatggagaaaacattatagagtatttgtgacgtctgtatgtacatttatcagagtctgagttggtatcctggttgtagttatttcactttaatcagttttatcagtctccttcatcatattttttttcataaagaaaactggcat

SEQ ID NO: 8612 - DNA, 201 bp, Bos taurus
gccgcctgagagacaacttgccaaccaacagaaaaggccatcttaaacatttaaccactagaccattatcagctaaccaaaaatacatgaaagtagccaaagctattcaatctggcccagatgtgaaaacatccctatccttgcaactctcacacagaaaatgagtaaagccattacgttttgtaatgttttgctacgtaa

SEQ ID NO: 8613 - DNA, 201 bp, Bos taurus
agtcttttaaatttctttaagaataaataagaagagttaaaagatttgaagcagaaaagtgacagttaaatctgatatttttgagtgaaaattctagtagaaatatgattagtggattgaaaagaagcatcaataaaatcagagagggcctaaaaacatcatgttgagattcttgagaaataggagtttgttaaagagacc

SEQ ID NO: 8614 - DNA, 201 bp, Bos taurus
aaaggatccctggatttctttttccaccacagaacagcaggtttccctcctcccaagccatcgtacccaacaatacttcagagatagctcagttctttagattttagtgtctgttaaaatgtagaattaaaagcacactacagagctttgattcttcattttttccctcctcatagaaacaaaaacctaaaagaagttcag

SEQ ID NO: 8615 - DNA, 201 bp, Bos taurus
tttccttatcacattatttctaatcaatcaatataaaggccaagatacttaacatctttatggcttctcttgatcattggattaagtcactactatttttcatgccccttggccattttaccaggcatcagatgtatcagcataagattgatgatcacaagttatttttccctcagacatatgaaacagaagttaattact

SEQ ID NO: 8616 - DNA, 201 bp, Bos taurus
gaagtaacaatgaagtttgtttttgacgacaaagtcatccaagaggagcaaaattttgaactgtgttttttaaaaattgcataagaaatactaagaaaacagatgttcccagggaaatagataattatgtgctctttggagaaactgtaaaaagaaataatgggtttttaccataggtttgtgtgtggcagaaaagagaaa

SEQ ID NO: 8617 - DNA, 201 bp, Bos taurus
gagggatgaaacaaatccaacaaaaaattgtgtacttttgaaagaagaaaatataaaccactgcttagcaaagagaatgtgggcctcctctccagtatttcagaggttaataatgggcaaataaatggataagagataagatataaatgccatccagtaaagtatatgccctgattataggcctgtacaagtaagataaat

SEQ ID NO: 8618 - DNA, 201 bp, Bos taurus
taaccatcattagcccaggtgccttacgatcccttgaagccacagtcaccccaagccttgatctgtccaccagagggcccaggacccagccccacacactagtgcattggcactagccacacgactacttggagccccagagccagcagtacaaactccactgtcaccacatcagtgggttggcagcaaatcttggactcc

SEQ ID NO: 8619 - DNA, 201 bp, Bos taurus
aagaaaaacatgatttgtttaacagaaagaaaaaatatatgtcagtgtgtaagaaataaacatgtatagaaatcaactttcctttagaacaaaaccaaatataataaagcaaaattaaaaatcaaggtatgatctaaaataagtttatgtagcaaatagtaaaactatttttctgttataaactgaaaattgtctattgaa

SEQ ID NO: 8620 - DNA, 201 bp, Bos taurus
gggatttcagatggttctttaagataacacagagaccatactttgtaggccttcaaatgtgcaggtctaaaacatttctttggagaatgatagcccagttgggttggagaagaccacacaggccaacccacagagcagcctctgctctagtacaatgtcacatggatgctgtctttggaattacaactcagtaggtctgga

SEQ ID NO: 8621 - DNA, 201 bp, Bos taurus
taatggctgaatgtgttccagattcagagaaaacaataaaccctgagactgatggaggtcagtaagatccaagcataggaaatatgagtaaaactaaccccaggcacatcttaattgaattgtttataaaatagtggaaatgtatgaatagaaaatgttaaaagtagctggggggtggaatatgtaaagagaaataatata

SEQ ID NO: 8622 - DNA, 201 bp, Bos taurus
ttcctgatagaattaaacctgagagacgtgggtgaaaagtaaccaagtaagttcatctttgtcctagatttattaatcgagatttagatcctatcattacggtgtccacattatcacttaaagtgataaactgtagcatttagtgactctgaatgaactataaaattctgaatttgcccaatttgtgaatgaaattatcac

SEQ ID NO: 8623 - DNA, 201 bp, Bos taurus
aaatatattttcagaaagtcaaactttctcaccactatggttccctctcccaggcctcctcacctcctcacaggcatatcctgagtattcccgggcctgacttctctcaccccttcagacccactcagtctggaggactcggatgctcttatgtgctaatgacttccaaatctacctagaggccctgttctttcctggact

SEQ ID NO: 8624 - DNA, 201 bp, Bos taurus
acaaaatcagtacaatttagtggtaactctctaattttactagcagttattttactataaattcaactcaaaaggtagtcattgagaaacagctacttatatattccaactgatcaggaggctcagaaaatatagtgtttttgataatgaaacattcttttattttctatgacatgagtggttcaaagtagtatctcacta

SEQ ID NO: 8625 - DNA, 201 bp, Bos taurus
aaccttccaaactaagggatgcgtgtgatttcatttttaaacctggtttcctaagaatggctactgggtggaggaagttgattttcagtcactatttggtcagaagttctgtttaagccccttgtgctattaaaatctctgctttttgttgattcaggtgaagcttttggaatgcttgcgcacctgccttgtgtccagttt

SEQ ID NO: 8626 - DNA, 201 bp, Bos taurus
agtaaataaatgggatgaattcacataaagtttattagttagatataaaggacaatttaaaattaaattacttatgtatgctaaaatttcaaaaataaataatgaaatactgctttgttaagaagtcttacaattgactaattggcatatatgagagagattcagagatacaggaagccaagcaatactttgtttataaaa

SEQ ID NO: 8627 - DNA, 201 bp, Bos taurus
cactaaatgggtttttgcacagatttttaggtacatgttaaagttaatttccaaacagagattttggcttcacaatactgacaggaaatgtggctttcatggtttcctgtaggttgttcaaactacaaactgttccaggagttaccatatgtgttggcatctctctctaatccagttttgaaggacaagctaaatctaatg

SEQ ID NO: 8628 - DNA, 201 bp, Bos taurus
cttctaaaattttttgattgtttttctgagccaagtttttttttcctcaaatttgttgttatgtgactttgttttactcttaaatattattcagtgcttcctagaacaaataaatccttagggagctgtctgtgaatagaaggcttgctaaagatctgaagaaatatttgatatcttaccatttacctgaatagcaaaact

SEQ ID NO: 8629 - DNA, 201 bp, Bos taurus
cttattctcagcaattaaccttagctcttgccttacagagaaattagacaccatcagatcccacccccctttctcattctgaaatcccacaccttcaaacatgtcctaattttcacctaaatattttccttctctttcttcacaggagatgtttggaactagcacgcgtgccccacttccgtgccccgggtgatctctgta

SEQ ID NO: 8630 - DNA, 201 bp, Bos taurus
ggactcctgcatttgtccctttcctcagttgaaatccctcttctgagctagttcaagtgcattggtatgaaaaattcattcataccaatgaccagttgtgggctaatcggtcacctcatttgaaaacagacctccattgtaagatatgatggatatagcattttcttaatcttcagattattgaattaattttaaacacaa

SEQ ID NO: 8631 - DNA, 201 bp, Bos taurus
gcaacatctgtgttaaaggaaactctaagaaagttaagtctgcatagtttgacctgaaaacaccacagcttgcttgagttacatggccacctgtcacaactgcgctccagattcttctaaaacagtaggagtttgtcacataaatggaatgtgcaggatttaaattattggagaccaggaggccaccccaacgagtgtgaa

SEQ ID NO: 8632 - DNA, 201 bp, Bos taurus
ccagaaatatctggcaatgtgtgaaaaggccgatagaatagcacagtgggaaagagcttggtctcacactccacccttttcaagatgaactaccttgggaagtttaacctatcttggcctgtgggggttgttgtgggaattaaataagatgttgacaaatactcaatttgaatacaccgttacttcccttggctgccacag

SEQ ID NO: 8633 - DNA, 201 bp, Bos taurus
atatatgcaatatatacaatgatccgtttaactgatctatccgttcagttaaaagttatgtcacggctttggtccaccgtcatggagtggcctgcaattttctgcctagcactttaccattcttttggcagctcacaatctccatcttcctcctggctttgaaagaaactaggatatttgcaaagacctcatgatctggct

SEQ ID NO: 8634 - DNA, 201 bp, Bos taurus
ctgcgatggcctcttggaggcctcctggaaagcaagggttcaaaggagaagagagtaggcagactctaaacacaggttcaggagcaatgaacaggcaggcagtgcggcctgtgggttaaccaaaggacagatgtaattctaactcccttgtgtcatgcatgttgttactacactgtacttcgggtctaccttggtggtaca

SEQ ID NO: 8635 - DNA, 201 bp, Bos taurus
aatctaccttcttttctaccactggactcagagatggaaagatgaggtttctctccttctattgcctcagcttcctctttgagtatgttgcgaggcggaggaaacggttagaaacagaggagaaaagaaaaaattgaaaatgccacattagagcattaaaaaaagtcaagtttgctaagaaaaggtggtagggaatattgg

SEQ ID NO: 8636 - DNA, 201 bp, Bos taurus
cagaagtatacacaggccttgatggacgactgggtgtagcagatgaggggcaagaaggagccacagtcagagtctgctcaaccaagcaaccatggaactagcagatgatggccttgagatgaaaacaaatgtaaaattctggtataatatccatttggaaatatctaatggtccatcacaatcaatatctgagtacctatc

SEQ ID NO: 8637 - DNA, 201 bp, Bos taurus
tttttgtgttttatggctgattgatgggggtcagagcgagggctttgagacatgccgagggggaggaactgggccgctttttgatggcctcatttgtggcatgtcttcttctgggagagagggaggtcaaggtgaatccctctttcagactcagatgactcaggcgacgtcacccctgggcagaagaggcaatggtggggg

SEQ ID NO: 8638 - DNA, 201 bp, Bos taurus
atatcttcttagtgtagctcaagtagccatcctaatcggcagacctatgaggctggtactctttcatagacttcaagtagctctccaggggagggccctacgctcattaggagagcaatcagacagctacactgcttaagttttgttgaaaaaacaccaaacaataacattagcaggaggccacctctccatctggggaag

SEQ ID NO: 8639 - DNA, 201 bp, Bos taurus
atattttcctaatattttaatctttaatgcaaggtacctattagttttgccatattctattaattttaatagcatctcactatgcctttatagctaggcttgtacaatttaactacagaatcttctagatgaaaagtggtttcatttttttccatactcatatataataacaactgcatacgttttctaaagaaagtaccc

SEQ ID NO: 8640 - DNA, 201 bp, Bos taurus
ttttgttcaacgtagtaatgaaaggcctagccagggcagttaaaaaagaaaaataaataaaaggcatccaaattggaaaggaagaagtaaaattgtctctatttgctgatggcctggtattatgcatagaaaggcctaaagacagcaccaaaattatatatatatatatctgttagaactagtaaatgaattcagtaaagc

SEQ ID NO: 8641 - DNA, 201 bp, Bos taurus
ccaaagtgtgtgcgccgaacagctgacccggtcttgttccaaatccaagggcctgtaagacaaatgggatcggaatggaagccaaataaaaatggaaaaaatgctactccggttacataaagaagtcggtgtttaattagacaggggctatgaatcgcagccttcaaaataaaattgaggggtgaaaaaaaacaataaaac

SEQ ID NO: 8642 - DNA, 201 bp, Bos taurus
taagtgcccttcctgcgggtgagcccgttgtgaatcttttgaaggaagcgtcctacgaaactgagagaggaagaaaggcctgcccttgccctcaagaggcgccaggtctgtccagctctccctgagaggttcttgcgggagagacaagatgggggtaggagcaggccagaggcacagagcaatgtccctggagatctgggc

SEQ ID NO: 8643 - DNA, 201 bp, Bos taurus
ctcgattagatttgggttccatgtgaatacttcataggtgacactttgaacttcctgttacagcacatctgaaggccgaaggcattctcgttgtctctctttttgtgaaactaagattcatcagaatttagatgtttgtcagcctaatctggccatgcagtcagtgtttcttagtggtcacttacctgatgatttttgcag

SEQ ID NO: 8644 - DNA, 201 bp, Bos taurus
ctcttttagtagcacatgtttctaaaatgagttatattaaaaatccgataattgcataaatatttgaaggcatatatgtgctagtgctgtatgagctattctgaagcccaaggcagtgcttcagagctactgttcactgagaaaagtaatgttgaatatttaaggacacatcccaggaggatactaaagtgcgtaagtatt

SEQ ID NO: 8645 - DNA, 201 bp, Bos taurus
gcttgtttacgtctccaagagtgtttccaagcttactttccttttactttctcataccttccccctcaaacccaatttagggccttagaattagcagtttccttcgccccaaattcttctctgatatttgcatgcctgttacgcaaaccgcttcttaaatgtttcctcctcaaaagggccactccattgcaatagtcatca

SEQ ID NO: 8646 - DNA, 201 bp, Bos taurus
ttaggatctgccaccttccacgtgtctgaagccacaaaagcagttgataggattacttacgcagaaaagctgtcacctctggtgggtcaggcttgccgatcctgtgaccgtaaagagctccatgactgcactggaaattcgtctcctcgctttcccagaccggattcgcttgctggtagtaagccagtttctcattcacag

SEQ ID NO: 8647 - DNA, 201 bp, Bos taurus
aacagtgcaccaaatggcaaagtggcttgggtggtcaggggtgacgaatgtaattctgatctttagggtcctgccaggaaggtgagcgagttggccttcgctgacacgtgctctgtctgactttgctctgatacaacggaggagagtgactaactcagcagaaagagcaaggccactctgtgtgagtgtcaggatactgga

SEQ ID NO: 8648 - DNA, 201 bp, Bos taurus
agtccctggtcagtgccaggctatggtaaatagaggtgtgtttgtaggtctgaggtccttagcttagtatattgtgtaattgcacttccccactgctgcccggaaccaaaaggaagggccggggtaccaaaacacctagcctagctctttggaggagctgccgtcttacagccctcccgtcttcagaatcataagatgtgt

SEQ ID NO: 8649 - DNA, 201 bp, Bos taurus
tagcccagcaaacagcaggcctacttgggcttaatctgtggcactttcttgtaaccagagctgtctaacaatgggactatttgtcctataaagtagtaacataactgaacaggactctacggggccttcctgggacagacctgctccatatcctctgctttagctcctctctgaagtgcttagataacagtatttgactgc

SEQ ID NO: 8650 - DNA, 201 bp, Bos taurus
cagactccctctctggggtccatctgcatctggattatgccttgcagacctgatcttctcccacttacacgtacaatgtgctactcttgttgcatgaggtgtgtttatcacctgaaacaactcgcaggttacaatcaatcacgattcagaaacacatatttctcagcgtcgttagtggaaacaaatgtctgcaacaactaa

SEQ ID NO: 8651 - DNA, 201 bp, Bos taurus
ctcagcagcctcatgccagccacggtcaccctcattctgccctgaagccacaccgcctcttccagggactcccgctcacacacagaccctccccaccaccgcgccctgcaacaaccccaaccaatctccaggtcttgaatgactctcccacacaggccttccctaaccaccctcacggtatcttttcagagaaacctggtc

SEQ ID NO: 8652 - DNA, 201 bp, Bos taurus
tgttttcttattgctgagttttaaaattttactttatattttaaataatggttctttaccaggtttgtcttttgcaaatattttctttcagtcaatggctcgtcttatcactctcttgacagtgtctattacagagcaaacatttttaattttaatgacgtctagctcttcaattatttctttcatgagttgtgcctttgg

SEQ ID NO: 8653 - DNA, 201 bp, Bos taurus
ataaatattttgattgtcctaaaattttctatccagaccgtctgcacatatactataattatagtgctaccataacaactatttctcaattacagttgattaattttcattataggcctgcattttcaggttgttatgtcttttctaaacactctagaagcttcctcctggcagctttcctctaatttgctactaatttta

SEQ ID NO: 8654 - DNA, 201 bp, Bos taurus
atcatttatcaagggctggtaatcatactccataatgcctcccctatataagttgtcctctccattcccactgttcttcactgccaaggtcaagttctgaccctgcctcctgccttgagtattgaaccaccctataacaggactttttcccatgtaatacgtcacatacttgcagtcaagatttgcctgtgctctacaatt

SEQ ID NO: 8655 - DNA, 201 bp, Bos taurus
ttaaactattggcaaagactgaccgggccaagcccagagacacagattatatttaagatcaagattcagaagcaaggtaggtgaagaaggtccagggtcaaggaggccacgggtttgaggtgatgatgaatgatcaccagcgcccacgagactctgctcagggctggcccttcagcctcttctcggttttctatgagcagg

SEQ ID NO: 8656 - DNA, 201 bp, Bos taurus
acagggaaggtatggtcctgtttgcctgggcaaggcaggaaggctctcagacaaagtagcctccaaaggatgagagcatcggagtggcattggaggagaaggtgatgtaatcagagaagagcaagtcaggagtcatacacagggctgggaaggagaagaaagtgtgaaaggaggtgggcagaggttagatcttgaagcatc

SEQ ID NO: 8657 - DNA, 201 bp, Bos taurus
actcagatcaaggcaggcccccaccactcctctatctaaaatttctggcccattattgtgagcgctcattctttactcaaacaagcaaacaaaatccaaagggaacgaaaccacaacaaaggggccaggggatgtgcagggaatgtacctcttccaagtgtagttgtttaagcacctccacgttccccacccaccaccctc

SEQ ID NO: 8658 - DNA, 201 bp, Bos taurus
gactaccagggaagtccataggccccatttttagacagggtcttccagtagtttctctggggcagccagcagcaacaggacacgtactgctggataaatacggttcctcccctgctggatggccaaggacccagagtccccagaacccactggctgctagcatatcagaccccctctcttcagcctgatgaccacctagta

SEQ ID NO: 8659 - DNA, 201 bp, Bos taurus
cttagcttaaaagatactccttttaaaaaaatgggtatgtataggcgcaaaggttgctgggcggttcttgccggaagtagagagaggccaatcgcggtccggaggtgagacagaagtctgaggtggtacattatggctgacatgcgaaatctggtagaaagattggagagagtggtgggccgcctggaggcagtctcccat

SEQ ID NO: 8660 - DNA, 201 bp, Bos taurus
ttcaggaagaaagaatgcactctctcagcctgtcttcaagctgggacatttatcatctcctgccttcagatttggcctggaaattacatcatcatctctcctgcctctcaggcctttgaactcagactagaagcataccttcagctctcctggtcttcagcttgtcaactgcagattttaggacttctgagcctccatagg

SEQ ID NO: 8661 - DNA, 201 bp, Bos taurus
agtgtgcttgttatactcgttagtgatgcaaagattgatacacaaagataattgtttcagcatggtttgttatggagaaaaatgagtagcattctcaaatctcttagtaagggattaattaagtaaactggggacattttaaaattgcttaatatttttaatttgaaacagtctcaagcaggagaaaagttggaagaacaa

SEQ ID NO: 8662 - DNA, 201 bp, Bos taurus
tcccagagtcacaagaactggttgcgtgtgctgtcttctgccccccttcctccagcttgggcatctgtatgggacttgggcgtgaccagagtgctggagacggggaagtaatgccactgcataggctgaaggtgggcttccctagtggctcagatgataaagaatctgcctgcagcgcaggagacgtaagagacttgggtt

SEQ ID NO: 8663 - DNA, 201 bp, Bos taurus
ctgatgctctccagtggccacctgggatccagcttctgtggcaaggacgggagtatccccaggcagcctggtacagatacgtggggtcctagtcgctattctggccagaaaggagtgggccctgcatggctgtctcggtgttagggcgagccggccactggctctggagccccccggcacccgcccacctgctgcggccac

SEQ ID NO: 8664 - DNA, 201 bp, Bos taurus
tttctgcctaacaggagacttgaaatacatgagtgttcccactgacagcctccagggacaaatgatttgacagaatggaggccaggagactagactgctcgtttcatgaagcccaggtgtcaacaattgctacatgtgatctagtaaaaatatgtatttggtcttggcccccagttcctggcacagagtaactaaaacttt

SEQ ID NO: 8665 - DNA, 201 bp, Bos taurus
ctgcccagaaagcactctggtcttggccactgtcttgtctctgcagtggcctcatgaatggtttccttgattccaccctcactccctccagtccattctccgtactccactctcgatacagtggccaaggtgacagtatgacaactgaagttaattgtctgactctgctactaaaaccctacaattccttgctttcctatt

SEQ ID NO: 8666 - DNA, 201 bp, Bos taurus
gtcattatcctggtttgttcataggatggccctccccgctgctccctcctcacttctggactcatcctctaagacccagctttcctccagaggctccccacacacgcagacaagacccaggacactcaggggtccctgccttcctcgctcaggctcccaacaccccagccctgaagctttcttgcttggtttcatctcagt

SEQ ID NO: 8667 - DNA, 201 bp, Bos taurus
tgcaaagaataaagcactttttgttaaatacatgaaggctacttggcggaacagatatacatttttttttggaactgtgaataatgtcatcgagttgaaattttggaatggctgactcctcccgtgtttcccgggggcaccaggcatgagcagccagagacccacacacaccccctaccccgcccactgggccttacaccc

SEQ ID NO: 8668 - DNA, 201 bp, Bos taurus
ttcaggacgctttgcatctctcttagacgctcatttcatccacccattcactcatccagcaataattgagtatgtattggattggccaaaaaattcgttcgggtctttgcattagctgctgaccttgaacagacttttttgccaacccaatatataacatgtctggcctatgcgagattaaaaaaaaaataaactagaata

SEQ ID NO: 8669 - DNA, 201 bp, Bos taurus
tggatacagattgtccagacagggcaagtggccccagaccatccttccatccaaggattgtctctgaactatggacccagcaagggaccgagcaagagggcgaaggtggcctggcccagagggtcctgtcagttattaggaagacagtggggcccgtatgcttgtctgtgggtcaggggttgagatttatgtgtgaaggac

SEQ ID NO: 8670 - DNA, 201 bp, Bos taurus
ctctggccttggtcatggcacccagggatcacgaagataatccttttggtttagttcagataccttgtgggttgtgagagacggtggtctctgagttgccgtgttaaagtcaggcctggggtcttcaggtgctggtccttattccctgaggatggtgctaggatggctgggctctatctaaacgaatgtgtccgagcatca

SEQ ID NO: 8671 - DNA, 201 bp, Bos taurus
aacaaattatagggagtggatatgtgcttagctgtgaaacagatatatcatttatttaaaagttctgttcattcatagttgaatcaaggactatgactaaggggaaagatggccttgtactgctgaaagtgtgtgccacataactctccacttgtttttctattttagatgaaaatgaacattttgtcacattccctcatc

SEQ ID NO: 8672 - DNA, 201 bp, Bos taurus
ctctaatcaccattgtcttattcttacaacttgttccttgctggtttatttcttgacattcaagataagagactggattttagggcaaaacagggtagaacaaagcaatcttttgtcctgcttcatctctggttataaatttctcttggaaaaatgatagtgttctgaataatgggttaagaacaagattcaggcatttgt

SEQ ID NO: 8673 - DNA, 201 bp, Bos taurus
agttcatggacttctaagtccataccagctaagaaagaggcctagcttagtaattctattttagccacctacccccagatccccgatagacacaatttttaggaatggggcctgacaattcaacagagagattgtcaaagccagtctggtaccctttcagtgaaaaaattttacaggcaatttatgataaagaagaacaat

SEQ ID NO: 8674 - DNA, 201 bp, Bos taurus
tcacctcaactttgcagatgtagtcccggggccctggaggaaatgagggaggtggtttctccatcaccagcaagtccaccccgtcatccactaacaatgcacgactcaggcaggccacatgctctgccggggcccagttggttatatgctcagtgaacattagcagccttgcctgtgagagaggaggtagtttggcacatg

SEQ ID NO: 8675 - DNA, 201 bp, Bos taurus
ccgagctgagctccctgtgctgtacagcagcttcccactcgctatttccacagggtagtgtatatatgttaacacttctttcccagtttatctcacccccccttccccacgtgtgtctctgttcctgccctgcaaatagattcatctttaccattttcctagattccacacgtatgcattaatatatgatacttgtttttc

SEQ ID NO: 8676 - DNA, 201 bp, Bos taurus
gagagagagaactagccatttgatctggatcaattcaatggttaatttattatttatttaacaaacatttcttaacaccgatacagggccaagcactgggcgtacaatggaaaacaaaatgcaatgtctctctacaagggattatggtgtaatggaacataggaagcagacataactttttcagtgtggttttccaggccc

SEQ ID NO: 8677 - DNA, 201 bp, Bos taurus
tctttagtgcaccaagttaatttagccaataaatgttctatggaactcaaaatctgttcaaaataatgtttttgtctcatctgcagtgacagtgatgtaaatgtgttgatgggtggtaagccattgttgccaaaataaaagggacagagagtcacaaaaatgattccaaatccattcccaagttcagaccaagcagaggta

SEQ ID NO: 8678 - DNA, 201 bp, Bos taurus
acagaggcttgaaagcccatggctaaaggacctcaggagatttggagccatgtaagcagaagagaaacacttggcttgatttcaccattcttccacttactttaaaacggcaactgcaaaattcttattgaacagattgagtagctgtctggtttgattgtagcttcagcaaatctgtgcctttgacctccatcgaattgc

SEQ ID NO: 8679 - DNA, 201 bp, Bos taurus
ggaaatagaagaacattaaataaaccataatagcaagtattatgaacttataaatatatacacagtaacttctagaaaataacttctatgatttaaattttattatataagtgactatttcaaaattgctgggctaaaactaaattagctcttcaatatggttaaatggttgttctcggtttgtgcttacaaacctaacaa

SEQ ID NO: 8680 - DNA, 201 bp, Bos taurus
atttgggtcagcattctctcatcatcacagtcaggccatgctgattctcccagtttatcagccctgtcttctgttcttctatagcactacattcattagcttcaacacactataaaaggccttgaaggaaaaaaccatgtgttccaaaatccaagcccagtgtccaatacaaagggacatatgtatacagctacttcaatg

SEQ ID NO: 8681 - DNA, 201 bp, Bos taurus
aacaataacctgaccacaagactgctaacccagtagggagctctggagcaaaaacggcctgttagataaatccgatgtgggataaaagtgccttgtacctctgcctctaactgtgatctcagtcactgactgaggaacaccacaaggtgacctcagtcgaaacactgagggtgggaggatctgaaggagctaatagctgga

SEQ ID NO: 8682 - DNA, 201 bp, Bos taurus
accccaaattctctctcttaggagatctgaaactgcaagccgctcttcattaagaacttgtttttcactggaaagcccattccaaacgttggccacagttcactccatctgatccacgctttttatctcttctcaaccagacaaatgcataataaagcttcatttgctgcatgatcaggcaatccattttcaagactggat

SEQ ID NO: 8683 - DNA, 201 bp, Bos taurus
agagggccccagaagttagagctggtacctcaggaaacaggtcaggatggagatgcaagtggtgaattatgaggaaagactgcatttcccagcctttcttgcagttaagtttggccatatgactaatttctggacaatgggatataagtagaagttttctgaagaaactggaaaagttccttcaagaaaatggactcagct

SEQ ID NO: 8684 - DNA, 201 bp, Bos taurus
gggccatttaaatgctatatgttaactataagaagaccgggtataaaggctaggttacaaagtggagaagagaaaactgtgattaggaggaaaaagtgataaaatggccatagtaggcagtgttacttactgtgtttgacaggataaaccacaaaagaattgaaggatatgcactttattgttaaggattctacaatctaa

SEQ ID NO: 8685 - DNA, 201 bp, Bos taurus
cagcgaccctatggactgcagccctccaggctcctccgtccatgggattttccaggcaagagtactggagtggtttgccattgccttctccaaggaagtccctaggtgttttaaaaagagaatgagaaaaaggagagagaagggagcgagcaggggctcagtagagtcagggaatttaaaaaattacaaataggaaggagg

SEQ ID NO: 8686 - DNA, 201 bp, Bos taurus
agcaggaaactcatgcccatattcagcatcttaaattataagtatcaagtggtcttatgagataggagcacacagtgtggtgggcttctttcaaaaggccggtttagaaatacagcacagggacttccctggtggtccgtggttaagatgccaaacttccaatgcaggagacccaggttcgattcctggttggggaactga

SEQ ID NO: 8687 - DNA, 201 bp, Bos taurus
ggtcaaaaaagagaacattcttagcatcccagaagccacctggaatgccctcttttcagtctagaagtaaatccttctatgtctttgatgacaatcacttatttacttttctttacaggttattttaaaatctatgtttgtttcccaaaaccacatagctgagttctgctgacttggaatagcacctgtaccctcttatga

SEQ ID NO: 8688 - DNA, 201 bp, Bos taurus
aatctatttctggtgtcatgaacccctcctccggggacatctctaaaatgatttcacctactactctccactgcgtgaagagtatccctgtgccctgtgatggcctaaagccaaactacaatcccagcaatggatgggcagaagcacactatattcactctgtaagtgtttactggatgtcctctaggtaaacaagacaca

SEQ ID NO: 8689 - DNA, 201 bp, Bos taurus
cctttctacacagaacttcgggccagtgaactactgacactttccagagtgggacactaaaaataccccagccacctgatgcccaagcgggcagtaaatcactggccttcaagctccagaatgcaggccaggcctggcctaccatggccgcaggcggctgacccttgccagatggcccaggtccacttcttcgcacccagg

SEQ ID NO: 8690 - DNA, 201 bp, Bos taurus
ttagtttagagtcaggtttctgcttccaccaaaaaagaatgacacaagtttcccagatctgcggtgaactccaggccgactgatttcttaggatcctctaagtttttttgcctgtagaagtgattttgagctgttcctctttaaccacacgtgagctggccacaggcctgttcacgcttcgccccgttaggtctgtgcctc

SEQ ID NO: 8691 - DNA, 201 bp, Bos taurus
acatggcagcacagactcacgtaaggacatccccacaaatctatattttgttaaggttcaatgttgcattcatgtcagaagtgaccctgaaacattctcactgcaatttttttaaacagtcaggatgaccacaactttgatcaaatcccactcagcattttccttagtcatcttgaaagcaaagctgtttggtgtgttggc

SEQ ID NO: 8692 - DNA, 201 bp, Bos taurus
cttgtttacaagctccctctcagggaagtgctagcttacctcgacttcaggtataccctctgctctgcagagaaatcccaggccctccctgaacttgccagaaaagtagtgtagcaaagctaaagtgtgcattttctactgttgtgtgcctttgagaaaaattttcagtctctgggcctccacttctccatccacacagtg

SEQ ID NO: 8693 - DNA, 201 bp, Bos taurus
taccttgatcataataaacatggaacaaaatccgccccgttttcagccaggcccgggacacctgcttcgccatttctggcagccttcggtggagctgagcattaaactggcatagtctgtctgggccaaggaggcaaagcgagctgccagctgggagccagggccgcaggctccagcttttctccttccaaaaacaaaaca

SEQ ID NO: 8694 - DNA, 201 bp, Bos taurus
aaaaagtaaaaaacagaacaaacccagcagctcttttctgggaacaggtgtgtcctgacggctgcgtttccagctccccaccacgacgtgggctgatcccctttgttcatcgtctcccaggcctgcccaccccactgtgtgtggcccattcacaaggcacaccctggcctggccttcagagcaccctctagaactgtcttc

SEQ ID NO: 8695 - DNA, 201 bp, Bos taurus
tttagtttggcctgtccacggctctgcttccaaaggggtttggtttggcggtggacctggaagaaagggctgctgattctgcccatggcaggtggctccccgtaggtagggccgatccactgtaagccacagtgtgcctctgactaattaactgcagggaagggacagtccagcgccaaggctgggagctgctcaagtcgg

SEQ ID NO: 8696 - DNA, 201 bp, Bos taurus
actaagtagtcatgtgacccacttttggccaatgaggtataagcagaagtctactgtatggaacttctatggaagctattattttgttgatgaaaacggatagattcagttggcccatcacttttttttaatattttttgagagaaagagaaatgtgaggttcacagcaaagttgagcagaaagtacagagttgtcagaag

SEQ ID NO: 8697 - DNA, 201 bp, Bos taurus
cccttgacaggtggccagccagctcccctcttaggtaaggcaagagacttaaagtccgtgccctggaggtcatcatgtaaacaaaggctccgccagggatgaggccctagagcacttggggcgaagggagtcaggggtgggggtgacactgtgcagcacccagtctcactttttagtctcacccccgcccccacccccgcc

SEQ ID NO: 8698 - DNA, 201 bp, Bos taurus
gacactgtcccttccagccttcccccttcactcctgcttggcttgtttgtcaaaaccaaagcttaaatggtttgtctcttggctagcctgcagatctgtacttggcctccctctggggctctctgtcaacctgctgacaggccgtagtcaattagggtcactgaccagggtgggccaagcttgctggaacaaaggtggcat

SEQ ID NO: 8699 - DNA, 201 bp, Bos taurus
acccagtatggtgtcacggccagggctggggtatgttttcctgacgtaggagacttcttaggaatcaaatcattttttccattcccctgtcttctgagcagtcggcctatcatgctctcctcctgtcatctcctccccttcttcctcctcctgtacctggtgtttgccttccttcctcccacagaagcattcaggaggggt

SEQ ID NO: 8700 - DNA, 201 bp, Bos taurus
cccctgggtcagtggccgcaaacgtgggggctgaggatgtggtttccagcctcaccccagcgtacagccaatcagggaggaagatgggggcttctcccaccttctcctctgttctggccttggactcacttggagagaagtttgcataaggggctctggcagggagctcaggatgcgactggggaagccaaactggacagt

SEQ ID NO: 8701 - DNA, 201 bp, Bos taurus
ctgacaggtggggaggtcagctcaaaccccttcccagctctggccacctgaacagaggctgcccagctaagacttcagaatcgatggccggatccaaatcgtccttggcttctctgatgtatactgctgggtgccacctgccttcatcctgccccagagccaagtgtgacagtgggcacggggctggccctgggagctggt

SEQ ID NO: 8702 - DNA, 201 bp, Bos taurus
catctcatcctctgttgcccccttctcctcctgccttcaatctttcccagcatcagggtcttttccaatgagccagctcttcacatcaggtggccaaagtcttgtgatgctggaggctgacacgtctcaaatctgcagggtgggctggcaagtttggaagatccagtgctctggtctgaatatttgttcccctgctccccc

SEQ ID NO: 8703 - DNA, 201 bp, Bos taurus
gtgtgtgttggggcagacgtgctaacctggagtgggtgggggccactgactataacgtccctggaggaaaggacagagaagttaatctctttcacacacataaacttgtgcagcatcacgtctggcagggaaggtccagattggttcaggtgtatagtcgggtctgggaaatgcagataatgattaatcacaggtctcctt

SEQ ID NO: 8704 - DNA, 201 bp, Bos taurus
cgcctcacttgtccctccctgacaggaccgcgggtctgtgtctccatgggttggctcttgttctagctctcgtttcgggggagaaggcccattgacctctcccgggctcctgctttttttcttcctcacccttgctcctctgcatcatcatctttctctcactcttgaagggctggtccagtgcacacaccaggccaccta

SEQ ID NO: 8705 - DNA, 201 bp, Bos taurus
cactcagttttacatctgaacaatgaacagcaatgccgggaccaggtggacagtgaggacgagggaaaggatgacagagaaagagatgtttcaaggcctaccccctgagacttcctcccgtatccccttcctggtgttccggtgcattctgctgatgaatttagatggtgatgtctacttttaattttatctgcagaaaga

SEQ ID NO: 8706 - DNA, 201 bp, Bos taurus
catagggtagtatttgaaaaccagtaagagccaacagaatccaagtcacccaacccagagtttgaaagagaaggaaagaactgagcaatacgaatgtgaagatttagcttaatttatcatgggatcaaagtgactggtgctgccaatagcttataatcagcttaactggtgagtccacagttaataacttggaagtgggag

SEQ ID NO: 8707 - DNA, 201 bp, Bos taurus
gttacttggtttgcagtttggggccaatccttttcaagagctgcctagtgtcagagacagagtggtttattccgaacaagaaattcagttcagaataaactgaataaaagaaattcagcaaggccatggaacaccaaagccaactggcactttgcagcagaggaaggaagagcccagagaagagcctggggaggcgcgaca

SEQ ID NO: 8708 - DNA, 201 bp, Bos taurus
aggatgagcagagccggaggttctgccccactggagataaagctgacccagtttgagagaggtcggggaagtcttcctggatgaggagacatttaggccaatacttgaaagacaggtggcaattatctaaagtgatcactttatggatgctatactaggcatccatatctgaggtgcaaaggtcaagaagcaggacagaat

SEQ ID NO: 8709 - DNA, 201 bp, Bos taurus
cttatgggtaaatcatcttgaatcccttttttgatagttggtattcaaagacatcattagtgcatttaacttgaaagggccaagtgtgtgtgcttgacataaaaggcaaatcatacacatctggcaggttctgcccaccgtgcccttcagtgagttaggcctggagagagcctgcactggaaatagaagtctctgcttgtc

SEQ ID NO: 8710 - DNA, 201 bp, Bos taurus
gatagtgtttacctgttgggtttcactttagattttatgttcggcacttaaaatccttgtttcactagagaaagggccaggaagttgctgagactctgttttactggctatatctcctcaggatcagaagcaaacagaaaaggggaaagaatttgtaacactctttgccaggcccagagaaagtgattgtttttattccac

SEQ ID NO: 8711 - DNA, 201 bp, Bos taurus
aacagtgtctatttttcgttttgaatgactgcaatttcagtagcagctgttgcgctgaaaattataatggtcaacatttagtcagtgcaatgtttccccatcccctgcttcatcaatcaatcatttgcttcagctaccagaaaaatctcaaactttagttaacagtaactttaaaagcctcatcagaatctggcccgacct

SEQ ID NO: 8712 - DNA, 201 bp, Bos taurus
cccctggagaaggagcaaatggcaccccattccagtggtcctgcctgagaaatcccatggacagaggaacctggcttgctacaggcagtccagggggtcgcaactgagcactcgcatgtgcacgcagaactctcagaaatgaagtcagggaaatactgaaaagttaaaaagaggacaactgctttcccccctttctcacca

SEQ ID NO: 8713 - DNA, 201 bp, Bos taurus
actttgctcagctatatggggtttctggatatttgctccttttccatgatacaggggtggtgtgggggaggtgctctgctacttgttggacaaaatggaactgactatcaaaagtaaattctctactgtaaacacacagcttttcatccaaattgcctaaagagttttcttaccgttttaattgtctaacaaagactgata

SEQ ID NO: 8714 - DNA, 201 bp, Bos taurus
gtatgtggttttagaactaatattccagagtcccacttagttatgtaatagaaagtggtgaccacacttgaaataatttagcaagagtttcaaaaaagctaaagcactgggtccagaggtttcatcagaccacactttcaagcaagatttctggaactgtacttcctgtttattcccagtcagaactattgggaagctctc

SEQ ID NO: 8715 - DNA, 201 bp, Bos taurus
atgtatgtatgtatcaatcccaatcttcccattaatccctcccctctctgcccccaataaccataagtttttttccataggtttattttttacatatgtgactctatttctgttctatagatgagttcctttggagcctttttttagatgccacatataagcaatatcatatgatatttgtctttctctgacttgcttcac

SEQ ID NO: 8716 - DNA, 201 bp, Bos taurus
cactcactggcacaaaaagcagggtgtcagagccctgaagggtcttttagaaaggaaaggccagctctgcaagcatcacaggagcctggaaacagggtccctgagtacgacatggagcttccatactggcagacaactttgggtgatcttagaaatatatggctttctctaagactcattttctgaaagaaaataatgctg

SEQ ID NO: 8717 - DNA, 201 bp, Bos taurus
ccagggagaatatgtggagtgagatgaaaagaaagcttaggatgtagtcctaacttgtgtaacatgggtgaaaaaaaataagtacaaaccccagatttcataaaagtttggcctcaatgcagtgagatgatgagaccacaatggaaggaagcagattaactccaaacaaaatactttccccatttctgtaagtgctttttc

SEQ ID NO: 8718 - DNA, 201 bp, Bos taurus
agcaagctctgaataaacagtcgttgcctgttccgatttggttggcccttgtttattccacactggccccctccatatcttcccctctccagcacagagatgatctagcatacagattgggttgtaggaagagactgaagcccagaaatctgcatggggatgatgggacttgagctgtgctttgaggagaagcatgattca

SEQ ID NO: 8719 - DNA, 201 bp, Bos taurus
tgtaccgttggcttctcatcggagtttttggcttagattattttcatttggaatcctttttttctttccatgttcttctttctctaaattggcctggaattctgtcattcaggactcctaaaacatagaactctcctgatcagatcagatcagtcactcagtcgtgtccgactctttgcgaccccatgaatcacagcacgc

SEQ ID NO: 8720 - DNA, 201 bp, Bos taurus
cccgcgtctgttgaatcggccaatcagcgcagctcccgggcctcgcgggggccgtttccatgccaaccgcaggggggcgtgcgcgctctgcggcctcatcgctatggcgacctcctcacccgacacgctctgggaggtcgcaccgcgacccccgggcgttcagggctgggtggggccaaccggcggcggccctgggctcct

SEQ ID NO: 8721 - DNA, 201 bp, Bos taurus
caggcctgctgggaagggcagggccctgatgggaagaaccagggatcctaaacctgtggcaggacatctggatgactgcccgtaatgactctacccctccacccggcccctctgggtgggcaggggcggcccacgtctagctctgggaagggctggagcactcacagtcctggaagctgctgcacaggcctctcgccaaca

SEQ ID NO: 8722 - DNA, 201 bp, Bos taurus
ttatttttaaatgacatggtcttactggactagcaaagattaataataaataataataatatgcagggttggcaagcttaggaggaaaccagtcatctcatatgactcggttcaagattaacctgatggaactcttccgaaaagtagtttggtaatacgtaactacagccttaaataatatgaactctgtggtcaagtaat

SEQ ID NO: 8723 - DNA, 201 bp, Bos taurus
ctccattagaccagatacttcctgaagacagcaaggacagcatgtaggcaggtaccaagaagtgtttgtaaagttgaagagagtgtaaatagcttacattgaaaattgttttccctcaataatcatatcattcacttaaaggtattattaaataaaatgatataagaatcaatatatttgaaatttgtttttgattttgaa

SEQ ID NO: 8724 - DNA, 201 bp, Bos taurus
ttggtgcagctcattgatttgctgaacaattacgtttgcaccaacctaatacttggtttgacaggcttgaaaagttccctattatgtactgaattaactatggtcacctttaagatctaagcactcaaaactactaacttatttatttcatgacataaatattgattggttaactcctagagagaagaaaggaattaccat

SEQ ID NO: 8725 - DNA, 201 bp, Bos taurus
ttaacattgtaaatttgttattttcaaatgaaaactgatgtttgaccacattttgttttggaattatctactcttaataaaatatattcttgaaatatcccttcgcccatcagcaacaattctgagtactcactccttgcctggcatcattccaagtggtttacaagcattaacttcacaaatccctgtaacaagcttaag

SEQ ID NO: 8726 - DNA, 201 bp, Bos taurus
ctcagtggacatgagtctgaacgaactacgggaggtagagaaggacagggaagcctggcgtgctgcagtccatggggtcacagagagttggacacagcttagcaactgaacaacagcattcctgttttatagatgaggacagtgagactcaattacccaaggtcacagagcaactgagagtgccaggaatttactttcctg

SEQ ID NO: 8727 - DNA, 201 bp, Bos taurus
tagcacaatgacattgtctctgctcactgtggacacatgtccttttcacagtctaatctgtgtcctgtttttgcacttatataatttttattggtgatttcagtgtttacaaggcccctggatgtagtactgaagagctgtctaagtgtcctaagtctgtgaaagctgggatgtgccttatggagaaaagggtatgtgatc

SEQ ID NO: 8728 - DNA, 201 bp, Bos taurus
tgggtagtgacatttacaatcaattttagaagcactatcttgcttgatttgcctccatactgtgtggatttgtttctgtttgaaacatatgtactttcgacatttcactgtaatcaaggaaccaaaaataacttgtaaatgggcctagcatttttactccaggtgtggatttgttgttgttgttgttgtttgtttgtttct

SEQ ID NO: 8729 - DNA, 201 bp, Bos taurus
caactcttcagccctcttttctctgctatttatgttcgtgttacccttttctcccccttctaccttccaactcctcaaagtaacagattggctatctgacatggtctttctgaaagagggattcttggcctgaaatccaagaacagtggctcttaagaaagacgagaagccacagaatggctaaggtcatctgggtagaag

SEQ ID NO: 8730 - DNA, 201 bp, Bos taurus
gatgatttctgacattttataagttaataatgtcatgtccatataatcaaatgtttgtgggcatctgcactcatgcatttcatgactacttgctggagaaataaaacgatcctaccaacaccagacccctccataacaatacggaagtgggagagaaaacagtttaaaattgagtgctatcagttttacattcataaaaaa

SEQ ID NO: 8731 - DNA, 201 bp, Bos taurus
accaactgagctatcacatattcttgattcctccttttgtgcctgtgcgaagcatttataggcattcaattatttatcacaggcctactatgtatcaaattccataaaggatataaaaaatacataatatacagtctatagcaagctatgaatgaatgaggccaagacagataaatattcaacatcactaaagagcatcca

SEQ ID NO: 8732 - DNA, 201 bp, Bos taurus
ccccagacccgccttcacgcaaggggctccatcaggtttgagatgtggctcagggctggaactgggtgaggatctatggcttcccatcataagagctcaagtcaggcccctttcaccacacctagagatagatttcttttttattttaacacatcaagaaggaccaaagagagcttccaatcagtaatcccatgatcaatt

SEQ ID NO: 8733 - DNA, 201 bp, Bos taurus
ggaaaggtttctttgggaaagtaacatttaggatgaagcttgagcagtggaatgagccagaaagggagaagagtgtattgcatgggccctgaatagggaagcttccggggtatactgaaacacttattctgccaaagaggagtgaacacggaggagaaaagcatgagaagaggctgaacaggccaaggaagagactgtgct

SEQ ID NO: 8734 - DNA, 201 bp, Bos taurus
gaattcatttaagctctcaggcctgttacatggaagatccagggggaaaaaataattttttaaaaggctgatttataatttttattacagtattaacttattataatgatttggccaagggtttatttataatttccttgtttctccctagttttcactttagaaaaatttaagcctagagcaaaaatagattatgaatag

SEQ ID NO: 8735 - DNA, 201 bp, Bos taurus
aggccacagcagagaacactggctcttgctctgggtgggaagggaaacaggagggtttgagcagagacgtgacatgaacccgtgttgcttctaaaggatccggccttgcctgctctttcgagaaaagatgggagaggtaagggggctgggaacaggatggctggtagccgtggaagtaaggagtcagatttctggatctat

SEQ ID NO: 8736 - DNA, 201 bp, Bos taurus
gggacagagcacagacatctggacctaagggtcaaacagccctgtctgggaatctctgtaatctggcatggagccagccagcaagtaagaggccaggccatgcaaggtgctcagagaagccacggtgccaagtacaggcagcagctgaacgaggagatcacagggctcagtcactccatcatgtccgactctttgtgaccc

SEQ ID NO: 8737 - DNA, 201 bp, Bos taurus
agaagccctcacaatgcaactagagtgtagctcccatcaccgcaactagaaaaagcccacgtgtggcaacaaagacccagtgctgccaaataaataactagttaactttaaaaacattattcaaggagaaataagcccaacacaaaagaccatactatgtgattccattttatgtaatctcaaaaaggcaagagctataat

SEQ ID NO: 8738 - DNA, 201 bp, Bos taurus
cttgtatcgtctaactggcagaaacacaggacacagaagaatgcctgagaataactgcagcatttgaaatacgcttccagcattttaaagtcactaggcttttagcagacaaaggccttcattggaagaaattatttttttcccctagcaggctaagtgatgcttttggtgaatcacttctttactcagtttttagattgc

SEQ ID NO: 8739 - DNA, 201 bp, Bos taurus
tctcattatgtaatttagaggaacccttttaatggtaggatgctaaaaaaacaaccaaaattttaaaaaagaacaacaaacaccaaacttctccagtcttgaagctgtagtatgtttgtataacaacacatttatgcatcactgacttaggattttgatgtcatcatcagtgagattttataatacatatgtgtattcttc

SEQ ID NO: 8740 - DNA, 201 bp, Bos taurus
agcctgtaatggcttgaatcaaaatgatgatggcacaccctgcttctttacctccttcgcaagtacaggacacacaaaggggccatctctgctggctctctgcagctcacaaagacagacaacaaggaaccagcttttcaaaacactcaatgctttttctgatgtttctgttattggaatcacactctgcacatttgaaat

SEQ ID NO: 8741 - DNA, 201 bp, Bos taurus
aagtcaagaaggagggggaccaaagacccagagtggcccaacagggggtgagcttctctacagactcaccaaggaagccatgattctcattggaaaaaagcagatcaatacagaggtaggggactgttgctgctattgttcagctgctgagtcgtgtctgactctgcaaccccatggactgcagttcgccaggcttccctg

SEQ ID NO: 8742 - DNA, 201 bp, Bos taurus
gaggaagcgttaagctggcagcacaaagaggcaaaaagccaagacggatggaagatggaagaaaatggtctcgattttcttggtgttcgatttcttattttctggccacagtttccaaccatgtcagctgcagataaggctcattcttaactgtgtgttgtaggccaaaaactctaggaatcatgcaaagcatgggaggta

SEQ ID NO: 8743 - DNA, 201 bp, Bos taurus
tccacaaagtttgacagagggtgatgaatctgcactcctttctcctggcagtcactgacagcagagcccaccagtaacttcaactatcacctaaagaggtgtcatgattttctgtattttctaatttcctatatccctaaactaagaggcaatggtaaagccttcctgtgagtaagctgatacacattttgtccttgtgta

SEQ ID NO: 8744 - DNA, 201 bp, Bos taurus
taggtaagcactaaatgggtcattctagcttattaaaatataataatattttattatattacaatgataatctatatggccaagtagaagtgagtagaaggggactcaatattttattatattacaataataatctatatggccaaatagaagtgagtagtagaaggggactataagcctcagagaaacacaaggcaagga

SEQ ID NO: 8745 - DNA, 201 bp, Bos taurus
tgtcgcactccaaaccattcagcccctatggccccagcccagccctgttggcaatccaggaaaccccactcttcctgcccacacctagctccatctgagggcttgcaggccaccctcgggtgaagggagaaaacagatgttgctggtttccaggagcagttggctgtctgtcctgtgcaggtcagacggacacactgaact

SEQ ID NO: 8746 - DNA, 201 bp, Bos taurus
cttactctgcgggcactaaccccatcatggagtttctaccctcgtgacctcatctaaacttgattaccttctaaaggccctgcctctacatactgtctccgtacactggggtaagaattctgttgacactcagacatggagtttgtaactcccagcagctccaaaaacccttgagtggccaaatgatttcctttaggaata

SEQ ID NO: 8747 - DNA, 201 bp, Bos taurus
tgaagtcaccagtgtaggacttggatgcgacagaacttgtgtctgtatgagaggagacaccagagaacactctccatggcagacaaagaagaggtcccgcgagcacacaccaggccagcggccaccctcaaaccaagagaagagccatagaaacctgcctcaccagcaccttgatcttggacatcccagcctccaaaacga

SEQ ID NO: 8748 - DNA, 201 bp, Bos taurus
gagtctgtctgtgttccaaggccacagacaacaacctttttgctggtgagaaagagggacagtcaagtgatgctgggagatcagctccaactgcccccagatgaaccagtaagccccctggccctggtcagtagaaggatcttgggatatgcttttattcctgagttgacttggttctctgggtcatgccttgaccctttc

SEQ ID NO: 8749 - DNA, 201 bp, Bos taurus
catatttactctttcagatgaacttcagaatcaacttgttgagcttcaaaacaatctcttagatatgttcattggaattccattgaaattgacatttaatctggggagaggtgacatcttcacaatattaaaatttcccattcacgaacaaaatggcttcccttttatttggtctttcttttacatttttaaagaaaggct

SEQ ID NO: 8750 - DNA, 201 bp, Bos taurus
agaagcccagctcctgcctttaatgtggccggaagccatgcccttgggctggagcggggagctggaggaggtggagaaaatgaagcctgcactgggctgcgctcagactagggcagacggccacccactcagaagaggctggaaagaaactcgcagagtgtctggaggaaggcgggggtgggtccttttaaacagaaagtc

SEQ ID NO: 8751 - DNA, 201 bp, Bos taurus
tgtaggtgccctcaacgaggtttgaaatgatcctggaggcaaagagaagccactgggggatgttaaaaagattgtctcatggctggatttgaagttctgacgatcacactggccacaatgtagagaacaagttggaggagccagcatcggcacgggaaaacagctggggtccattccagatacctatggagaaaagatgac

SEQ ID NO: 8752 - DNA, 201 bp, Bos taurus
ttctggttgtctggacctaagccacatgcccacatctaatagggtacaggagagcgaggtcctccttctaatttgctaatttccaactcatccctcccagtattatatacaaagcggaggtttaggccaaatgagacaccatggcaggcgtccagagaatggaaatcaggggtcccctgacctccaagatctaatgcctga

SEQ ID NO: 8753 - DNA, 201 bp, Bos taurus
tcatgtcggattacaacacacaggtcgtggttctgctactgaggaccctgactgaggggctcttgcagaagcagctttccctgttggccacacctcctgtggggtactcttctgtatgtggagttccggatgtgtatgagtggtgatggatggagaggacaaggagggcctccacatatccgctccaaccacctgcccagg

SEQ ID NO: 8754 - DNA, 201 bp, Bos taurus
gtcccccctacattgcaaggcaagactctcaacctggaccaccagggaagcccccgacactttaatctttattttatgtcttaggccaggccatcagctgtgtttgagatcttagttccctgaccagggattgaacctgtacccactgctttgggaatgtggaatcttaaccaatggaccaccagggaaggcccttctctt

SEQ ID NO: 8755 - DNA, 201 bp, Bos taurus
tctttggcaggccccaggaaccttctctaagagattctgctgactcttctttgacccttcccccatcctgtggcctgagatgtgggccatcttagacatgcggatggaaaacatgccctggggatgcaacatgatgatttggaaggaatctgtgtccctgaacatttcttagagcaaaagtcttaccagatgctctgggtt

SEQ ID NO: 8756 - DNA, 201 bp, Bos taurus
agcctcatctgtgatcttttctgctcaggtgcaagcaatggacaggtaagggtcgggtgttccctcaaacactgttaatcctttcacccacaagggcagcgggaatatcatgccagttatgggggcctcccagggttacaggcaactcaccagcttttccagctcaagaatcttcttttcctgctgatgtatctgttgatt

SEQ ID NO: 8757 - DNA, 201 bp, Bos taurus
aacatgataaaactcaactcggcagggccagcctggggacttcctgagaccagaggatgggtaagcagggggctaggaagggagcgccccaggcaaaggtcaggagggccagcaacaccaaacagcactttggctatttctggggacctctgtcaccccataagatgggcccttcttgccaagtctgcctctggttggcaa

SEQ ID NO: 8758 - DNA, 201 bp, Bos taurus
tcccctactggcttctcagcttttccactgagggatccatgaccacctgctgccaagtcaacacacacgtcttctgattagtcacacggggtggccatccgagcacacaggagcctcaccagccaatgagcactcgccccctctcaaaccctaaccaaccccaacaccttcaggccccagaggttctctggggttcagttt

SEQ ID NO: 8759 - DNA, 201 bp, Bos taurus
cccctgagccacaggtgtgccttccgtccgactgcacgctctcagttgagttccttaacctccctgaagcgcagcttaccgcatttgtaagaaggagacaataaccccttacaggatgattgccaagacagcaatggggactgggagggaggccccaaagggaggggatatatgtatacttagagctgattcacactgatg

SEQ ID NO: 8760 - DNA, 201 bp, Bos taurus
cagagtacactttaaatacgtatactgtacaatatgcaaacatgtcaataaaactattgttttaaaaaacaacaacaaaccaaacaggtggccagctcaccggctagtttgcagaccctgaggtaaaccaaagggtgtccgcagacacctgtgagcagtggggccccagctcatcaactacagaagactggagggctgtga

SEQ ID NO: 8761 - DNA, 201 bp, Bos taurus
gggaggtcgctgctatttgtgctggtgacacctggcaccattcttaagatctgacagactcactgattagaggaccctgtctctgatatatatggatctcgggccaatctagttaatctggtttcattccatgatcacaacctgcatccctgaccccaagtagttatcttcaagaggcagctaaatggataaatgagggaa

SEQ ID NO: 8762 - DNA, 201 bp, Bos taurus
ctactcaactttctggctgtagttacctgttctatgaggataataaatgtgatgagatcaaatggtgagtttggaggaggtgaatttacaattctaagattgattagaggttcatagacttacagatacatcgagctgtgacttcgatctgttgtcataaatggtagttgggtttaataagattgttctccccttgacaga

SEQ ID NO: 8763 - DNA, 201 bp, Bos taurus
ctcggcggggagaactgtgttgcttgttcaatcacgcgagcactgtcctcgtgtggagctgtgggaagcttgggtttggggattagctgatctgtgcgtcagttgtggctggtttcagagggcaggtgtggcgttggtgtgagatgcacacccagtgatgggggtgcctctgaaactttctgtgtggctgcatgcttgtgc

SEQ ID NO: 8764 - DNA, 201 bp, Bos taurus
gtgcttgggatggcaaagagtagactgagcaactacatatgcacacacacacacactctccataaatgaccagcgtgtagttcaggcttccttacagacaactttatcacatttgatttctgctccaaagttgatgaatgtcgggcaaattttttgccgcatgaatgcagtgagtgcttggatgacatttttatacacacc

SEQ ID NO: 8765 - DNA, 201 bp, Bos taurus
tccatggagtcacaaagagtcagacatgactaagtgactaacacattgggcatagggatttgggggtgtaattgtaaggagttaatctgtacaagatgcaaatcctggcacctggcacttagtgagtaactgctgggggatgtcattgttgctgttgttacagcaccttacagtttacgaggcgcttctatcaatattaca

SEQ ID NO: 8766 - DNA, 201 bp, Bos taurus
attcctgcaggaggggatgctgctgttgtaagttctgaagacccgttattccccctgcaaagatcacatgtgttttcctcttactgaacaattacttggggaaagttactcacttgctgggtcagaaactgaaaaggaaattgctcttagctcccttggtctctgaaaacccactgtcaacaattcaagatgctgtgatta

SEQ ID NO: 8767 - DNA, 201 bp, Bos taurus
ccagctaagaccggcccagtgggctcaggtgaccctgaaagtcagaggtcggcttgcccttgaccacacacaagagccacccacacacaagagccgcacatgcggcttctgaacgagatcacggccggaggagctgagaaaccaaggcagggggttgcaggccttttctttctacagtttttactatgtcaataggcaact

SEQ ID NO: 8768 - DNA, 201 bp, Bos taurus
tcttatctaaaagcgtgctcagagcccatgcccagggcctggtctgaaggatatgagcgggtccagaaccagtgggcctctgagtgatgccacatcctgaggagtcacgtcagggaagccaccgagcctggtgctcaggcttccattttggccttgagtcatggagccaattatcctcagaagatccttctccttaatgat

SEQ ID NO: 8769 - DNA, 201 bp, Bos taurus
acccaagagctgaggcaaagcagaagcagcccacgggccaaggtagggacaagtggacaagaatcaaacctgagatccaagagcaagaatcaggtgattcgtggtgggcgcttggggggccagggatgccagacccgcaaagcacagttatagccctgagggagggtgagctgctgttctccctgaaagaagagaaagaaa

SEQ ID NO: 8770 - DNA, 201 bp, Bos taurus
attttctgagcccaaactgggacttttgatttgacaagtaagcatgttcttactgaaacaaaagaagagaatgtggaaagtggatttgcattgtgaggcctgggatgtactgtgtcgtcagatttcaaacgctctgctgtttctccagcaaagggcagtgcccactccaatacgggggatcaggattgcagccctccccgc

SEQ ID NO: 8771 - DNA, 201 bp, Bos taurus
tcccttacctgggggctgttttgcctccatgtctttttaattgaagtatggttgacccacaatgctgtgttagggtcagaagggcctggcagtgggcagctggtttatctccaccctgcattccctcggggctcagcgtcccagtggctataatgtgatggcctgatggctgtgacatcctttgttgactgagacagcaat

SEQ ID NO: 8772 - DNA, 201 bp, Bos taurus
tgttctctaggccagtgagggagaggtaccagcagtgtgtgtgtggagtgagaagagggggtagcaccgggggtagcccgtgaaggaaaagaaatccacaatgaagatagaaatggaatggccagacaggtgagtggtgtccagttgtccaaggatgctgagccctgggaggcagtgcttacagtgtcacctgtggcaggg

SEQ ID NO: 8773 - DNA, 201 bp, Bos taurus
acccatcactcccctgcccaggcccctccttgctctccagtccctctttgttcgaggtcctggtgtccaagtgaagctacatgtgtccacagtcaggagcaaggcccctctcccaggagaccctgtccttctcacagggatgtttgatgacagatgagccttggcaaggagcccaccatcgtgaaaggagataggagtggc

SEQ ID NO: 8774 - DNA, 201 bp, Bos taurus
cggccacagagtcagggggtgaagcaaaagccagctgagaaagcagcttctgggctccatgtcggggtagacgatccacttgggcacccgtaccagctcactgccctggtgtccacaggcctcccgtcattgtgactgggagtgggtccctgggtggcacagggctggcaccaagctgggttaggaaggcaggaggccccg

SEQ ID NO: 8775 - DNA, 201 bp, Bos taurus
ggactctccacacccctggtgaccctgcacattcccattggcctgcggaggctggaccaggaatgaaggggtccccaggccaggtcagggtggaccccccgcagtctcgtgggtggggagtggttagggtcagtgatatgcccaagctcacccagctgctggtggcaggactcactggaatctggcctcggtgtccagctt

SEQ ID NO: 8776 - DNA, 201 bp, Bos taurus
ggaagttgtggatggccctttcatcttagaagacgtttttcctgaatccatgaagtacgattttcacctctacctcactttcctgtggtacaggcagtaatgtggaccctgggcctggctggatgtgaagccccttcagtttccacccccttccatgagcgcagtccgtactgtttaggaagtagacataaaactggttct

SEQ ID NO: 8777 - DNA, 201 bp, Bos taurus
gggttttcacataggaaacattcgttggcaaaaacagagggaagctctcttgaggtaaaagtgaatcaaccccagacacattggttcaaatggggattgtgcggataacacttgccccatgggttgacgatcattccttccatttcccagatggttctgggttctgtttcctggtgtggctcttacagtggacagttgact

SEQ ID NO: 8778 - DNA, 201 bp, Bos taurus
tagtctggaagggcgacctctgtgagctctgtgcaccccctgacatgtgcgatgcagcccatgccatcctggttggctcgtcacttccccttgtggagagcgtacatgtaaacttggagaaagctttaggcatcctcacaaaacctggtatcaacgctgtcttaaagcactttaagatcgttgtggattggtatacatcaa

SEQ ID NO: 8779 - DNA, 201 bp, Bos taurus
gcttcattgccccttggcatgtggaatcttcctggaccagggattgaacccatgtcccctgcatttggcaggcagatactttacattaaaccaccagagacgtctccaagtgtatgcattttaacaaaaacaattcatagtcccttcagagtctccaaatcaataaaaatgaaactactagactactgatggggtatctta

SEQ ID NO: 8780 - DNA, 201 bp, Bos taurus
gtggaggcaactacaatcctcacacacctcttgtgtctccgtgttcaggctcagggtccccgtggaccacccctcctggccgtgtgctgtctcttcccctgccctagacggctgggcagaacccgaggtctctgccgtctaccaggtagtgttcaggcgggaggggtggcctcaccaggaatttatttctcctttggggtc

SEQ ID NO: 8781 - DNA, 201 bp, Bos taurus
ccttgagcgaggccgcctcttcctggggctagcaccctccaacagccagtgtggagggccaatcccgcttctaaggacggcccatgagtcggtggccctgaaatcagccaacttagcagatgaccaggagccagtgctgaagaggggggctggctttcctgggagacacaaaaccaaggccctcagagccctgcccagccc

SEQ ID NO: 8782 - DNA, 201 bp, Bos taurus
gtccggtcagcccagctcagggccacacccagggcttcccctgactacggacctcagctcacaggaggaccctgcccctgagaaacagtggctacagacatttccaggacgtgtccggaggcctgaactgtgccccccagtggcctcttccaccagcggaagccctaaggtcccctgaactagtaactgctgagaagctgg

SEQ ID NO: 8783 - DNA, 201 bp, Bos taurus
cttgtgcttgttccccaagctgtgctacctgctgcagatggcaggggaccaaaggcccctgaggtcccgtccgcatcatcttggatgctcatcttcccacgaaacctccccaggaggaggggtgacaccaagaagaaggagaaaagctagaactggagttgatgctgggacctgcaggtgaccttccgggagagatgccgg

SEQ ID NO: 8784 - DNA, 201 bp, Bos taurus
ggctcaagcgggccaagatggacaagtccatgtttgtgaaggtgaagaccctgggcgttggcgcctttggggaggtgtgcctggcctgcaaggtggacacgcacgcgctgtatgccatgaagacccttagaaagaaggacgtcctgaaccgcaaccaggtggcccacgtcaaggcagagcgggacatcctggcggaggcgg

SEQ ID NO: 8785 - DNA, 201 bp, Bos taurus
tactggccatacaggttttgggagaaattaatttactgtatatctttttttttttttttaagtcccctcaataccaagtctcctaaggagaggcatcatatattgtgtgcagtttgtgcagttgaacacttttttgcacagatatttattttcacactcaatgaagaactgttacataatgagaactgctggtgattaagg

SEQ ID NO: 8786 - DNA, 201 bp, Bos taurus
ttttcttaagaggaaaagcgctagatttctgaactttagtgatggtcttctccttttgtttttaaagtattctacattaagaattatctgggagaagtgtatttcggggtcacttatacatagatacagacataagtaactggtaataccaaatcaaaagttgaattaccttaattctctacattattttgaatctgcagt

SEQ ID NO: 8787 - DNA, 201 bp, Bos taurus
agataacgggcaccaggccacaaaggtcagtggtccctgaaaaagggaaatgaacagactgaacctgatggttacttcgtcttactgcccgaaagacttttcaggccgctacgcagggaagggaacccagggaccgctctgagttgaggaaatactgatagattctggggaagcctcatgggaagcaagcagggcagagtg

SEQ ID NO: 8788 - DNA, 201 bp, Bos taurus
acaataaaactctaagacaggcatcagcaaactacatccctcggcccttatatgggacagagccacactcccttcgtctacatgctgtctctggctacctttccacagatgcacaactgggtctcccagagcctaaacctcccgggctcttcacagaaaagctcgctaactcctgttcagaaacatcaccaaaaccaaatt

SEQ ID NO: 8789 - DNA, 201 bp, Bos taurus
ggcagccttccctctcttactacagagcacagagaagaggtccaaaccatctgcctgacactcacagcactatctaaagaccaaggggacaaaggccaaggttttggaaacaccccaggagtgagccgagctgccctacaggggataagccctcccagaagcctgtcaaccgtgggacaagaagcaagaggcctatgggac

SEQ ID NO: 8790 - DNA, 201 bp, Bos taurus
ccccacccctacccagaggaaggagagacagtctgcaggattaaaccagtccttttgcccaaaaaacgatgtcctggccccaaataaccctttctttccttttgctatgacttccttgccccgccctacagcttataaaaagcttctgttctgcacagctccctcagagggccctgctgtctcctaaaatggatgctaccc

SEQ ID NO: 8791 - DNA, 201 bp, Bos taurus
tttcatttttcatggggaaaatacctaagggtggagttgctgagtgttgcgtatgaaacagccaagcagttttccagagttgcttggccttgcagcccgagcagtgatgatgcctacagctctgtatccatgccagcatcagtcctgttggtattcactgttgagatgcaggcacattatgtttccctagtaacttctcat

SEQ ID NO: 8792 - DNA, 201 bp, Bos taurus
gtgtgcctccccttctgaggggggtgggtgtgcgggggcccaacagcagggtggatgccagcagaattgaggtggtctctgagtatctccttggtctgtaggtttccagagtctggaggaggggccaggatggaggctccgttctgctggcctgtaccccgtgtccctgactctaggactcccccactccagggccttgga

SEQ ID NO: 8793 - DNA, 201 bp, Bos taurus
agtgactaacacaacacacagattgtggttgaaagaaatggatgagaaacaactttggacacaagtgagcgactagcacaaatacttaggtggccagatgagtaaagaagggagagagcaaatgtatactacttaaaaaaaaatttggatacaaagaggtagaggtacagtggacctacaacttaatatagggccaaagca

SEQ ID NO: 8794 - DNA, 201 bp, Bos taurus
tggaagtatatagtaatgtgttaaaggaccataacttttactatttgaaaaaaaggagcaaattatgatcattctttatttttacaatgtaacggcctaagtcctcttggagttcaccattactcctaccatagagcctgttaatattccttagaggttgcaaactctagcactgggctccctcaggccaaactatacaga

SEQ ID NO: 8795 - DNA, 201 bp, Bos taurus
aaacacaccttagaacagatcatggggtctttattctaacaaataaagaaagggcagactccacccctgataaggcaaaataactgcagaacaaaggggaagccctgctcaaaattcagtatagactctgttcaccaaatcatttcctatcaaggagataagtatcagcatacactgttgaaaaagatggcagacatccat

SEQ ID NO: 8796 - DNA, 201 bp, Bos taurus
agaaactgtggtctgttttaagtattgagtcttaaaaagactacttttaaacaaaataaagattctggtcactaattccaatatgtgtggggcaaggaaaggttcccatcaaaccgtcaaaccatcaagccattttccatcaccacctgagtgttcaataattcaactcaattttcatactatgtatcccaagacagtgtc

SEQ ID NO: 8797 - DNA, 201 bp, Bos taurus
atattcactcatgatataaactggaaaggagtcagtgatgagaaaagaatcataattattaagaataatgaaatggacagaaaagtatcaccaaaaactagtttatatcacccagaaagactcaactaggcaaaagcaatgctaatagctaagcaaagtatttatccagaaaggaactcaaagaaatcatgtattgataac

SEQ ID NO: 8798 - DNA, 201 bp, Bos taurus
ctcagggttatctctggccaatcattgtttttttaactttttattttatattagaatttagtcaattatacatttatggacatgaacttaagcaatctccaggagacagttaagacagggaggcctcacgtgctgcaatcctggggtcacaaaaagtcggacagaactttgtgactgaacaataacaacaaaaacatagtc

SEQ ID NO: 8799 - DNA, 201 bp, Bos taurus
gactatcctggccctgtggaggtagcaatgagcagagagcctgataaaaatgaaactaacaaagagcaaagcaggatagaggaagaaatgagccctaacctactttttgaggccctgtggttagccatagctgaatccagtctctctctcgacattttggatttgtaagccaacacattctctttcctgttttagtcactt

SEQ ID NO: 8800 - DNA, 201 bp, Bos taurus
tatgtatttttattatcttccaatctgtctcatcaaaatgacccgtctcttgggcataaatggtggtttcctactctgataagctcattaatcttacaacgttattgaccaaaatgctaattgttatcctttagaaggataaagaatatctacacttcagtaagagccttacagagccacttcaatccatacatatgaata

SEQ ID NO: 8801 - DNA, 201 bp, Bos taurus
ttctgatacagataatatcataatttcacccaaatcaaaatatgtcaactgggaaaagtgtctctaaatgaagaacatcttctttgcaatttctccctccacaaagtgtacacagtttaagggttagctttaaaaaaaaaatatatatatatatattcttacagatacatcaaattttatacttgagcaaacaaaatataa

SEQ ID NO: 8802 - DNA, 201 bp, Bos taurus
cagtattaatgaacaagcatattaatacagttattaatgaatagaaaaccactttctctctattactattttaaaaatctgtggttacataatgagaattcttttaagagtcctaagttcttattcatagctcatacatgtttcctaaatgaaaattatttttctttttccagaaagttgggagtataattgatacatttt

SEQ ID NO: 8803 - DNA, 201 bp, Bos taurus
gagggactatcctaccacataacccactatatttaaacactgtacttctaaatgactcacaaatgaatgctgggaatatgactcacccatgaatcattttaaattggaaaacatagaaaaatgtaaaattacttcgatgaagaaaaatatggctacacaaagtatgcaaagagggaaatatcattttacatttcaatagca

SEQ ID NO: 8804 - DNA, 201 bp, Bos taurus
tgaactgtcttccccttgggcctacaaactccaaggctatttggctctaattaaaagctcaataaaggttgaacttctgattgtgggcagtttggaggcacggcctctataactcatcggtgtgtcttgttcagggtctcccacagtttttgcacacagtaggtgttcataattatatctcgagaattgaatctgctgctg

SEQ ID NO: 8805 - DNA, 201 bp, Bos taurus
tttctcagttttttaataatgaatcctagtcttacatataagtctcaggtttttttcctgatgctcaaccttcccatcaatgtccattgcagcttctttacggtaggcttgtgtgtgcctgagtaaaaaggtattgttttagtttctagaaatttatttataggaaatcttaatctctgagtcaaatgctattgcaacatt

SEQ ID NO: 8806 - DNA, 201 bp, Bos taurus
ttgacatgtttattataacacccatttatttaagttttcaattatcaaagagtatgctcttatccctggaagtgtctacatagatgttattagtgtgtatgttgcatatttttatccatgaacacgatccccttctacttctggaaattactaaagatatcttacataaatacttccaacaagaatgaaataaattatgtt

SEQ ID NO: 8807 - DNA, 201 bp, Bos taurus
ataatactccaggtccccagtcctccagccagtcatttcaagatccagacccaccaaccaatgggccaacactaaactcaagacctctcagaccttatgagccagtcccaccaaccagctgacttgcatcaggacagggattcccctggatatgtagttagccatggcaggaacaaaccctgttcaccagaggctggcagc

SEQ ID NO: 8808 - DNA, 201 bp, Bos taurus
tgggaaggcccattaaagagtgcccccacttaggcaaaaagttacatagttgcaaattccatccaatttgtaccctgttccaaggttagactgcagtttcggtctgcttatggccacttaccagtgtatttaaaaagctatgtcattggaaacattttgtgtagacattttaatttttatctgcaagagtctaagtctgtg

SEQ ID NO: 8809 - DNA, 201 bp, Bos taurus
cccactccagtattctagcctgggaaatcccatgaacagaggaacgtggtgggctaccatccacggggtcacgtagagtcagataggactttgtgattaagcaacaacaaattagagcctcaaaagtttcttccatttattttaggtgaatttatgagtttgctttgtttttattttattatcaagcatagggtctacata

SEQ ID NO: 8810 - DNA, 201 bp, Bos taurus
gtaagctccgggagttggtgatagacagggaggcctggcgtgctgaagtccatggggtaccaaagagtcagacacaactgactgactgaactgaactgaacttgctatgaacattagcatagatcaatttgtctaaatctactgctgcatttggcaatttagaaagcaccaagaataatataaacaatataagacaatgca

SEQ ID NO: 8811 - DNA, 201 bp, Bos taurus
aggaatcatgaatcaaagaacgtctgttacctcttaaagcttgtaagggccagaagctggattctcctccagtgcctccagagaaactctgccctgatgacacttgattttaacccagtgaggcccatggtgaacttctgacctactagattgcaagattatacatttgtattgttttaagccattagtgaacctgttagt

SEQ ID NO: 8812 - DNA, 201 bp, Bos taurus
tggttgggtgtgtgttttgtgcccttctcaggtctgagcagctcaggtaaccaagtgctttgtgagtgcactgtcctatggagactgcgtgtcttaatcagctccctggtcctagccgctctgcttcctaagtgtgccatgacagcactatcgcaggtgtgccatgtgtctcctctggggagctgatctcaggctgtgacc

SEQ ID NO: 8813 - DNA, 201 bp, Bos taurus
ggagagagtggtctccccgtcctatacctctgccatcttaggaccgaccctaaccattctatcctatattccctatgctatattccaagtgttccctgttagtacaatgtttttccatgtaatgcccagatacattattttcatttcctggaataataatcagagatcttcacctgttaatttttcttttcagaatcaagt

SEQ ID NO: 8814 - DNA, 201 bp, Bos taurus
attttactaaggatataaaggaaagtttctagaatgaagccaaactaagtaacaaaacaggttccttatccttaaatgcaattctaatattaagtagttatgaaattaggatttgtaacaagctaaaatctagactgatggtttccaacctggctccacattaaaatcattgatcagttagttctggtcagtcgctcagtt

SEQ ID NO: 8815 - DNA, 201 bp, Bos taurus
ttgatcctaattcaggacctttgatatctagtttacattgttttcagttttccagtggaaattcatcctggtcttaaagaattatttgggactcttgtaagaaatatagatcttgaaattcccttgaattattgattcagtattctaaaagaatacattctggtgtttcactcaccatattataaaattatactaaaatat

SEQ ID NO: 8816 - DNA, 201 bp, Bos taurus
atatttgttaaaggaatgatgtacttaatatagacatatgtagatgcaatatctcagaaagcctcccgcatatttagggactgttctggaaatgcataaacatttttcttttcttcaagtgaaaatttttgattggcattactttctggatgctatcaatacagttaatatctataagtagttatcacattttgtcaactt

SEQ ID NO: 8817 - DNA, 201 bp, Bos taurus
tcaattacatgccccattaaaaagtgaatgcaaaataataccattgaattccagcttccgaagcaggcttaagatcagatgcattgtgttaatttggaatttcctgtaattgaaatgttggacccatttatgacattgataatattcttttatattttcaaaatagttttttctcatgtctttattataaaaattgtcata

SEQ ID NO: 8818 - DNA, 201 bp, Bos taurus
tggaaggactatcctgtcatcatgacccattcatgccgtgagtcctagaaactactcaggaggcagacttttgcatttttatgaggcttatctctaagcttccaggagacatgtatctcatcaagtcattcagggtttctgcatctttctttccaccagactcggtgttataaatgtcatagaccaacatgttgtggtgtg

SEQ ID NO: 8819 - DNA, 201 bp, Bos taurus
tctagtattctagacatatattctatattataattatgccttacatgttaaggcataattatgtgctgttcttagttgctcattcgtgtctgacattttgcgaccccaaagagggatctactctttgacagtctgccagggtcctctgtccatggggattctccaggcaagactactagagtgtattgccatgccttccta

SEQ ID NO: 8820 - DNA, 201 bp, Bos taurus
ccttaggccaagctatcagacaactgaagacatatcacccaccagaagacagtctgcctctcaacctcctgagtccacaactatcccaggataaagttatgtccaccagagggcccaggacccagctccacacaccatggggccagcactagctctaggacagccatagccatgcagccagagaccccaagactcagatat

SEQ ID NO: 8821 - DNA, 201 bp, Bos taurus
gcaggtacaattctcatttacaattcataactgaatactaattgcaagtacatggatcaaataattaatttttaatctttgttagtgtcctttagatagtcaaatataagaaaactactaaatgaccattggtaaattgaaaaagaacaaggtgcttaagtttctagtggaacattagaaaaaaatatgtaacaatccaga

SEQ ID NO: 8822 - DNA, 201 bp, Bos taurus
tccaaattctggtccttctttagtccttgggcatgtaaacctttactcaccactgggtgtcagtcagtgtgccacgtcggggctggccaaaggacctgttggattttctgggaagggggtacagggaagactggagctgaggttggaggatgatcatgaactgaggactccttggcctcactgttgctgctggctgtcctg

SEQ ID NO: 8823 - DNA, 201 bp, Bos taurus
ataatttactttccctctttcaaacaaacctgatataaagcatatatttttccaaaaaatatatgaattaggcaaaaataacagctcatggaataggacacagttacatttggaagattaaactgcagaaaagagttcgcctactatgaaggagatcttggttcaatccctgagctgataaagatgttctagagaggggaa

SEQ ID NO: 8824 - DNA, 201 bp, Bos taurus
actccaccaagctgcacagcccagcctattgccccctcaattgctggacatagactagcagggaacccagctagtggccctatgagaatacagactgcagccccacacaaccttgagaccacaacatagacagtgacttgccacacaacagaacacagtctgcagccccacccaactgtactcagtacaatacagttggag

SEQ ID NO: 8825 - DNA, 201 bp, Bos taurus
aagtaatgtctccgttttttaatatgctgtctagattggccacaacttttcttccaaggagcaagcatctttttatttcatggctgcaatcaccatctgcagtgatttttggggccaataaaataagttctgctactgtttctccatctatttgccatgaagtgaagggactgaatgccatgatctttgttttctgaatgt

SEQ ID NO: 8826 - DNA, 201 bp, Bos taurus
ttttgtgaatttgctccttttctggttgtggaattacttttttggtactgtgtttcatttttagtgtcaagaatttctgtatttcaatagcaatgtggcatatgagaaaaacattaaagtacatccctttttcatgtgtttattctttaagagcgttcaaagcttgcttgctctcaatttaacaaaccacaagtttgttaa

SEQ ID NO: 8827 - DNA, 201 bp, Bos taurus
gtcttttagccactgtcattctggactcctgtttcctattctaactactaacaatatggttgctccatatattatcaattgtctaacccattttgtctctgtccagatcaacaaactacatgcagtgacagttcaacaaaggtatataaaaccacctgaccacagaaaatatccatccttagatggacaccactataagga

SEQ ID NO: 8828 - DNA, 201 bp, Bos taurus
aacccaggtctcctgcactgcaggtggattctttaccaactaaactactagttaaaactagccactacctgatggactttggccattatttctacctagacgagtttctcctgtttaattgcagagggaaagaagggcacaataacgcatacacaaacagcaggaatgggccagggctcagatatgagtctagagtgttaa

SEQ ID NO: 8829 - DNA, 201 bp, Bos taurus
gggttccttacttattttgcaaatcttcataagaacaattcatttgctatcactgatatggaaagagaagaaaggcaggagaaatagggagcaagtaaaaaagcaagtaaagtgaatggagaatgaagagagaaaaatagagatggacagccaactcccaattatccacagaagaaagaacacagcatatagtcatatatt

SEQ ID NO: 8830 - DNA, 201 bp, Bos taurus
tatgagtcataaaataaaaaatgatacataaatacctacgtctgacattcatgtggtcttatgtcacaataattaacacagctttcttgtttactaaataatttagaccacatttaacatgcttgtcttattttaaatgcattaaaagtgaattacatgattctatttttaaaggcttaatggcaaacaagagaaaaatac

SEQ ID NO: 8831 - DNA, 201 bp, Bos taurus
agatgtgtaaaaattgcaggttgtattttcattttttaatcccaaatccccatttctcctgctttaaaggaactttcactttcaggactcattctgtttctccattttgaggccttatgtaatgccaaccaaaatgtcagagggagatattacctgtagcttcaattaaattatcactgaaacaccttttatctccatatt

SEQ ID NO: 8832 - DNA, 201 bp, Bos taurus
catggtcttatttcaagtctgtcttgatcattctttcaaattacttcagcaatcttttgttacattctctctaatcccttcaacatgatgattgtcttttaaaaaaatgattttgttactttacattaagacctcccttgagtgtccattggttgcaaaataaaagctcagttcctgagtttggcatacaaagtcattcag

SEQ ID NO: 8833 - DNA, 201 bp, Bos taurus
tagaataactcatgctttcctctagctgattagtgtatagaccaaatacgttaatatttagatagtacttaacaattttggtttaagctatgggtgtttacttatttatttggtgtaaaaaagattagcaagtgtcttcatataactttagtcattttgagttattcagacatttgttgaatatctgtagtgcgccttaca

SEQ ID NO: 8834 - DNA, 201 bp, Bos taurus
agaactccttattttaaaactatgaattggttaaatctataagcagtaaaaattatgtgattaatgatataatggatatatttcattatatatatggtacaaagagacgagaaaccatgtcctttaaaggttaagctcaggattcaaatcctgcactaagctatagctacaagtaaaaacaaaaaagttacagtttcatag

SEQ ID NO: 8835 - DNA, 201 bp, Bos taurus
acagaaaactagtatatgttattattcatactgtaatcattttatttacatatttggagtcgagtcagaaatacatgctcaaatactcttactactactactaaatattcttaagtggtgcatttttcccatagtcccctgttatgatcactaaagtttttaatcttctgtatgcacaataaagatgttatgttacattat

SEQ ID NO: 8836 - DNA, 201 bp, Bos taurus
aaacactcgacttggctaatattgaaaaagcatgttcaacagagtaaccacaaatatctcaccagttcagacagcttgtttctttaaagcagacatcaatcaagcaggacataacaagaaagatctgtttattttatggacatttattaacataccacatgaattgagaaaacagaaagatattttaaacactaaagctgt

SEQ ID NO: 8837 - DNA, 201 bp, Bos taurus
gggtcaattaaactcactggtgtattcaaagcaccaagaagaatgcctgctacttatttagtgtgtaacaaatatgcattgaacagatgcacaaaacagacgaaaatcacaatcacttcatgcatgcacacatatacacatgtacattttgggggattctgttgagcagtaaatggagagtagtaacaatgtgaaattagg

SEQ ID NO: 8838 - DNA, 201 bp, Bos taurus
ctatgtttcagggaagaaaggaggaaaaaagaaaatgagcttaacagatgtcagctctttgtcagatctcaatcatatggcctcccctagttttaaccaaaaattttaagattcagacaatggggaagaagagggactgaaaatgaaagttgaggcccccaaccaaaaatgtctgccttcccacctcctataaactgaatt

SEQ ID NO: 8839 - DNA, 201 bp, Bos taurus
aaagtagtcactcatcttactatttcataaccactaaaacgttttaaaaatctaatgtattcctcctctttctgtttctcctcagaaagagtttctttctcttctgtaggataacccaacatataatgctaaatttacttagttctttttctcagtcatcctccccaaaatagctactctgaaagactccactaacactat

SEQ ID NO: 8840 - DNA, 201 bp, Bos taurus
aggggaaactaggggcttacaaaattatgtgattttcatccttatacataattggtgtcaaatataaacattttagctccaagacttgtaatcctaacctcgtactcagatcactaaactgcatgtacttcagaacattccaaacataaactcttacctggtaaggacctgaaagcttttctagtccagcccttggattgt

SEQ ID NO: 8841 - DNA, 201 bp, Bos taurus
cagaaagtataattctggatgatatatgatttcagaaacttgggcccagagatgtccagtgactgggcagggtcccatatgccgcaggtggcaggacccacgatgcctgaatttgggccaggtgggacttattgaaatttggttctgtgagggaatactcctaaaaatctaatgtaaattttcttcattaagaaataagga

SEQ ID NO: 8842 - DNA, 201 bp, Bos taurus
cccacgttgggatcactactggtctctcagatgacaccccctgaccatgttgttttaaaggcactgtttctctcatcacccctcccccatgaacccaaacctttcattcattcatcttatttttccttctgcctctttcttagcatacccagtcactgagtcctgtggattctttttcctgcaaagtttcccttgcctaat

SEQ ID NO: 8843 - DNA, 201 bp, Bos taurus
gactagattccagtcttgagccacctgtgcctggcaaaggctgaaaagcaaaacgcagctgactattcaaaaagcagccatgaagtttcaggacactgtcaatagcaagatttgtttgttatggctttctatggctacaaaatgcatgaagcagatacaccaaactgtggtcagagcttgggggccaccaccgtgatcaat

SEQ ID NO: 8844 - DNA, 201 bp, Bos taurus
aatgcaccacatagtacccttctcttgaaaatgtatgagatatgctattggattaaagaccaggaagtccaacagtatcaaaatatattggatgagatggttggatgacatcaccaactcgatggacatgaatttcagcaagctccaggagttggtgatggacagggaggtctggtatgctgcagtccatggggttgcaaa

SEQ ID NO: 8845 - DNA, 201 bp, Bos taurus
cagaagagagctcatatttttgagaacactcagtcttgaagatcctgactttcaaaaaaaaatccttctgatcaaaagaagatagtattctaattgatggttcacatgagaattagtggaaaattatcacatctacagacagtcatatacagcatcatgttcaattatctatccggaaagatgcaaatctcattatcacac

SEQ ID NO: 8846 - DNA, 201 bp, Bos taurus
agatctcctggattcaactaataggaatttttagggatagcaaacataggaagccacttttgtagtagttactacagtcttttacacaatacattctcaatcagtcttcactgaatctgaagaaggaggaggggaggggaagagggagggggagaaaaggaagacactttcatctttgatgaagaaacttcagttgcgagg

SEQ ID NO: 8847 - DNA, 201 bp, Bos taurus
atttcacaaagaaatagcaacagttcatcacttaagtagatgtagatgttgtatgattcattgagcttcttcctagctttcctatatgatttatttccatataacagtttcataatatttacataagaaaaattcaaggtagtttttacaacaggatttgtaactaaactcacaaccaaataagttagaaatgtctccagg

SEQ ID NO: 8848 - DNA, 201 bp, Bos taurus
aagcaattctattctatctgtgcatttttaaaaaaattaatagcagatgttcctaagcaatgaaaagactgacaaacatgtttggacatgaacataatgcacaacatgtaaattaatagtattttgtactaccacataatcagtgaacactcaaccacatttgctggatgagaatatttatgctcaaaatattaaaccact

SEQ ID NO: 8849 - DNA, 201 bp, Bos taurus
ttcctcagtgatgacactgacataatttgtaaagcaataataaaaaaaaaaaaggcaattgctgacatccctatgttgttacttatttatgaaattctgcgttctcaaaataccaggactaagagacagagttttcaagaaggtgaatctaatacgtgctgtcagctctgctcaatatcttgatttctgaaattgatacac

SEQ ID NO: 8850 - DNA, 201 bp, Bos taurus
tctcccttaggaagttcccctaccagagatttgactattaactcccaaatgaacttctctaagcctaaacttttgctaaaatcttgctctacctttttttccccacacagatattacagaatgatgtccagtgtatatatacacgagtcattccaaagttagctatcacccataaagtgaaagccactcagttgtgtccaa

SEQ ID NO: 8851 - DNA, 201 bp, Bos taurus
ggcctcctggtagttcctgtacacaccaggccacacttgctgctgcctctgccctgagctctgtgcctggtgaatattctcacctctaatgtctgctcacccagtcaaggaggccttcctggatcaccttttgaaaaacagcaacttcttccccaccctgtcccacctcccttctctgatttatttctctccatatatcaa

SEQ ID NO: 8852 - DNA, 201 bp, Bos taurus
tggcagcctacagtccatagggtggtaaagagttggacatgactaaagcgacttggcacggcacagcatggagctggccttaagtcaaagagttttaggtgtatttacctgataacatagcaaggatgtgaaatggtagttcaaattctttgcatcctgactcatctctgctgtaagtggcatttgtgagacagctctggc

SEQ ID NO: 8853 - DNA, 201 bp, Bos taurus
agcatactaagacttctttttttttttttccaatttaacaatatattgtggccatttttcatgacaacatgaaaaatttctttgtggcattggctagattgtgagtacattgccgaattttaatgttgagaacaactattctttattctcatttgtcattttaatatcatagtggttgctgcagacttctggaagctattt

SEQ ID NO: 8854 - DNA, 201 bp, Bos taurus
gaattggacaggactgagtgactttcactttttgtccttccaaaagaaaagtataaatactcattataaatagttgattcctgttaacatttgaatcaaggatgtcttgataacaattttttgacaaaacttttgatttcaaaccaaatgcaagggaaacctttattaggggtttgtctaactgattactatatgttaaaa

SEQ ID NO: 8855 - DNA, 201 bp, Bos taurus
gtggctgccacctaccatacacacacatcatgaaggtttgtttttatggatattttctcatcctttttctctttccccacctactttattccaaggcaagcactatgggctgaatgtttgtgtctccccccaaactcatatgttgaaaccctaatccacagtgttatcatctttggaagtgaggccattgggaaatgatta

SEQ ID NO: 8856 - DNA, 201 bp, Bos taurus
tcagattcctagggaagttttagaaaaaaatattcttgagcttccagaagaaggagcagaagagaacccttcttctgtattttgaaatacatcagagcacgctttctcctaacattgcctgccattaggggagactagttaaccaaagcctaacacggtgtatcatcagagcctatttgacctggagaaacaatccaccca

SEQ ID NO: 8857 - DNA, 201 bp, Bos taurus
gtggaatctaaaatacaacacaaatataatataaatgaacatatctatgaaacagaaacagactcacaggtacagagaacgaacgtgtggtttccatgagagagggggagtaggcgagtgaaggattgggagtttgggattagcagatgcaaactatttatatagagaatggataaacagcaaagtcctactatatagcac

SEQ ID NO: 8858 - DNA, 201 bp, Bos taurus
tggagctttgtttttggcaagaggaacagatttggaagaacccacaggcctaacagagctaatagagaaagcatgctgttgatccaatgattctccggcaggaaccaaatctgccttggccagtggcacattgaaggagccaacacaccattaggcagaggctcaagtaagcaggtggtttctgtcaatggatggcctaca

SEQ ID NO: 8859 - DNA, 201 bp, Bos taurus
aattgggtgggaggcctctcttctctttgcgtcttttgggttggcatgccctcacaccacgaggatgtaatttcctttactttccaaataaaatgaagctataacatggagctgtaccactggtccatccaagggctgtaacactggtctgtcgcctcaaatttttgttgcaatgagacagaaccgaggaaattacaaact

SEQ ID NO: 8860 - DNA, 201 bp, Bos taurus
ggtttctgccatgcaacagtgaaaatcagtcataattatacatatatctcccagttacaaggtccttaaagaattatcccaaaaccaattccagcccccatccatgaaaaactgtctcccatgaaactagtcggagaaggcaatggcaccccactccagtactcttgcctggaaaatcccatggatggaggagcctggtag

SEQ ID NO: 8861 - DNA, 201 bp, Bos taurus
gctgtgctccctcctggttagttgtttggcctgaagtaacccagtccaagagtctataagctctaaggtagggctactggcgatctccaaataggacttacgaccacacacgacgcccagaaccgctgctggctgtgcccccgtctccatggcaggccacggccgacccatgcctccgcagaagaccctcaaacactcacg

SEQ ID NO: 8862 - DNA, 201 bp, Bos taurus
aaaaatactcatgttttaaatcacaaaattatgatgaatttttttccatttcaaaagaaatttatgattctttcattaacacacacaggggctttggtcatctgaacaaagaatatttttttttaaggaaggttttttaggtctttgtttttcaagggaaatgaacacttgttacacgtttgattttgacctcaagtccta

SEQ ID NO: 8863 - DNA, 201 bp, Bos taurus
caagggtgggcagccgcaggcagtagacctgggctcctcacactagtgtgctaccaagcagaggatcaagaaagtggattcacgttacacacctgcgggtatgctgacagggtgtgaagtggactgaaaactcccagcagggagggtcagaagaggaaacaaaggtaagaggcagaaatgaagtttcctgcagtggtgcca

SEQ ID NO: 8864 - DNA, 201 bp, Bos taurus
tactcagtgtcagcagacactgtttaatgttgactagtttgtataagaatgattaacacatgtcaactatatgaagatcattattaactgttgcacattagttggtaaccacatgtcttggtaggtgtggtaagtagtaatttcttttattgcttactgtgctgtcaatctcttctcaggatattttgtcttactctaggt

SEQ ID NO: 8865 - DNA, 201 bp, Bos taurus
ggttagtgttgtcttagaaggttattttgactgttgggtaagcagtgggtaaatcctgatttcaggtgtttgtacacacaatttaagatacattgtgtgtgtatgtgtttgtagttggcttttctggcccagtcagtgcggactgtgcaatgcagggagagactgtgtcaagttttatcttcattagatgtttaagaattc

SEQ ID NO: 8866 - DNA, 201 bp, Bos taurus
ggtcgcacagagtcggacacgactgaagcgacttagcagcagcagcagcagcaatacatagttaagtttattaatcttttgtggttttgtatcataagcacccttctcattcctagagtacaaaaatctctgtttttttaggttattttgtagatcttttatactttacaatcattgatctagttggaattaacttgcgct

SEQ ID NO: 8867 - DNA, 201 bp, Bos taurus
ccaggtagcaaaaacctcctattatctcttatgtggaggtgggagaattcatggctattgagagggtcgttttatagaaaaagtgttgggcttatgccggtgcaggccaataaatgtggtggctgagagagggcagatgatgaatatgaatgccatattttgaactttacttgaggaaataaaccataagaaaaaagaatt

SEQ ID NO: 8868 - DNA, 201 bp, Bos taurus
gttttattatattccagagactggtatccatcaggctgatcattaatgagtattctcactacctacatcttcgttcccatatttcaactgctttatatgatgtctgatgaaaaaaaaaagtttctatattattagctatactgttttttttttttcttaaaaattctgtacccactcttgaagagtcagtaattatttctt

SEQ ID NO: 8869 - DNA, 201 bp, Bos taurus
gaagtaattgttggatgatgaaatattgacagtttaagaaaatctttaaggatcaaagtccttgggtcatttgagaagtatcaataatagcatggccttcgatactttctacttaacttttcaaatccaagttctttattacattgctgccaagtatgaactgaggaccagtggctctggatcacctgagaagtgtagaat

SEQ ID NO: 8870 - DNA, 201 bp, Bos taurus
gtttactgtgtaaggagtattgacatcacttctttttttctaaatgataacgaggatagaacagagtctatatcttatccttttctgatagtgggcttagttgggcagctgagaaaggaaataaaagagagaggctgaaaagcccaaatagaactttatctacttcacaatgttgaaaaagcccaaccctgtaccataaat

SEQ ID NO: 8871 - DNA, 201 bp, Bos taurus
atgcaatgccttaatatccaagcattaataattcttaccactgttttcttaactatagttaacttttaattatctgcaatacagagcaatttatcaacagtgaaacttcatctcctctacagaagcattgtgctaagatttgattactgatcagcgggatttttaattaaaatacaatatgtgatgctggaggaatctgca

SEQ ID NO: 8872 - DNA, 201 bp, Bos taurus
tatatttgaagtgattgattttggagtcaaagtgatgaaactgttgcagataaatgatttgctcacaaaagcatattgaagaaattgaagaaatctgaaactcagaattgaaaatacttttttttgttgttgggaaatagtgttttactattaagaaagtctgcttcatttgtaaagaaaagcaattttttgttgaaaatt

SEQ ID NO: 8873 - DNA, 201 bp, Bos taurus
acacattatgctacaaatttcagtgttagtctttcaattgcagaggatcaggtatgacctcttcaacatcccccagccttgctggggcctcttttccatgttctcacagcatcctactcatgtcccagccagtgcacatcctatggagattccataaaagcttacttggccataagtaacaaccagtagataatagagata

SEQ ID NO: 8874 - DNA, 201 bp, Bos taurus
aaatgaaaatatctcctgctatatcaataaacaagaaatgtcacagtcatcagtggtttctggcctccaaatgtgaatgagggcccccaaaactgtgatccgtcagatgctgccatgccccatgattgctgaagatctgggggaatgcaaaaagcaaggtaaacaaggaaaccggagtggccctagatagctgaggtgcat

SEQ ID NO: 8875 - DNA, 201 bp, Bos taurus
ctgctctcccgtaatttgttttccgggccaaaaggcaaactcattagttaggagacctcagaactggaggaaacgggctgaaatggcagagggggacttcggggcaagttcccttctgagtggccgtcgcggtctcctccccgcttaccctgcccttcgaggccaggttgaaaaggcgtacaaggtgaggcctaagggaaa

SEQ ID NO: 8876 - DNA, 201 bp, Bos taurus
acctaaattccagctccactttccccattaatatttagtatgaaatgtgactgaattcttaagcaaatcctcaataaagaatagttgctggccatgacttggaaaaaataatgtgaactaaaataatgttctgaacaagcactggaaggcaatttcataaacttaaggcttgtttcgtgagtacttcttgaaatacagtac

SEQ ID NO: 8877 - DNA, 201 bp, Bos taurus
ttggttagtagtagaaatattataattttagtattcaaaataaacaggcttattttctgagtttttacttatcagagttactgcttattcagagttgcacgaatctgataactgttgaacaaactattaaactctgtaaatctcactgctatgatcccatactttatatactcagtaataagacaaaagcagttgtagaat

SEQ ID NO: 8878 - DNA, 201 bp, Bos taurus
gaatgaagggctgaggtgagactctgaaagatgaacttgagtggagaggtcaggtctggctcacgggtcaccaccaatctgagttacatccctaactgccagtccagagctcttccccagagccgtgaaacgtcccatgatccatcatacaggccacacgctgaggccttcaaggaccaagatttggacacaggcacaccc

SEQ ID NO: 8879 - DNA, 201 bp, Bos taurus
tgaggagtccagttatctgaagttcaaggcacacgaagacattgttctaacattgtcaggaatcacagatgtgaagcaattagttctatcttgggaagtaggaaaggctttgcagattgttgttgctgtttaggctttgcagagctgatatttacatcagttatttgaggataaatatgttttctacaggtgaagatagtg

SEQ ID NO: 8880 - DNA, 201 bp, Bos taurus
ttcttggccttcacaaatgcacatctgacttttatttccccaaaccatctccttcctgtacacccagatcttcttctcgattcatctctgcctctcagacacacccaggcagtctttccggcctctttgagggcttaatggcttcccaggtggggctagtggtaaagaacccacctgtcaatgcaggagacatgagagaca

SEQ ID NO: 8881 - DNA, 201 bp, Bos taurus
gaagagccatctgtgagaagagctgctggaaaggaggaagccacctaggcgaaggcttaggacagtgtacatccatctgggatgtctgaggaagagcagataggccaatgtggctgcaggcagaaggaacatgagggaagcggtagagatgagatcggaaaggagagaggggaaggcctgtggagggcatgtgggccacaa

SEQ ID NO: 8882 - DNA, 201 bp, Bos taurus
tgaaagccaaccaggctggggccagtcctgcttaccagaaatgaatcatttcaatctttgtgactccatgaactgcaacatgccagatagttggctccataacaacagaatggcccatacagcccacatagagagaactcctagagcatatagccctggtgaccagagaggagtgcattgctagaacccatagtaaggcta

SEQ ID NO: 8883 - DNA, 201 bp, Bos taurus
aatttagggaaaataagttagtgacaggtagaggaccatgaaagactgaattaagagagcctttttcttagagtgaaaaaagaacaccatctacttcagaaaaagttccatattgctacatatttatactcattctcttttctcatttctttctggatgggaggtggaggaagaaagcaaattatgagaactatccagggt

SEQ ID NO: 8884 - DNA, 201 bp, Bos taurus
acttctgagccctgaggtaggaaggagcactgtgtgttggaggaactgaggccaggacagctagagagcagtgcgtgaggggtcgtccagggcagacgaggttggagacagagttgccttgttggccactgtaagaaatttcttcattatcctaagaatgaaaggcagtcacttatgtgtttcaagcaaggcagtgaataa

SEQ ID NO: 8885 - DNA, 201 bp, Bos taurus
tatttgtctgaatatgctttgcttgtccttcacaccaattcacacttcagacataaattttgtattaacttgtaatgtaacaagtgacaaaacctggcctgaaacaacatgaatttatttatcttacagttttgtaggtcagaagtctgaaacagttctcattgcactaaaatcaaggtgttggccaggctaggttccatt

SEQ ID NO: 8886 - DNA, 201 bp, Bos taurus
atacactccatttttagggagaagtagatggtggcttggagaagtttgttgtcctacacagagttgtggctgatacaataaataataaagttggtgctcttgatatattcattcattcactcaggagtacttttgaggttccctgctaagtggtgataaccatacgaaattaaaaaaaaaagtgactagttgtttttaagg

SEQ ID NO: 8887 - DNA, 201 bp, Bos taurus
cacctacactgggggaaaggacacaaatgttctctctttcatggctaccggtaaacttaaaaccaaggtggtttgagggtcagtttgaaattgagcggttacagtacactgaggagaagccctcttctactgactgtataggtattgaaaaccaggtgaggtcattatactttgtggtttagatattctgtagttacataa

SEQ ID NO: 8888 - DNA, 201 bp, Bos taurus
ccctttggtcactggaatcagttacagctgcttccctgaggctggctaccttcgctttggctgctggcctcggaggtaaaacgtgcagcctgtagccctactctgcactcagccttgactcacgtgaggaaggctgtctcacctttggaaaagtgactcacactactgcctgctccaaatgaaaaagctgtctcttaaata

SEQ ID NO: 8889 - DNA, 201 bp, Bos taurus
attaagtactaaatagatatcagttttactattttttcatctttatatacatttatagagattcaatgttttgataaaagtattaaagtttatagaacaatgtgatttttctcactgattattaagattgctttgcatggttttaggttcagtggtcatttttatggttctatacaacatggaaagtgaggattacctgta

SEQ ID NO: 8890 - DNA, 201 bp, Bos taurus
agatccaggtcattacctactgtcattcaaggtttgccttttcccatcttactgtgttcttccttgttcttgtctccttgtttaaacctatcatggtgtttttgtacctgtcatccccacaatcttgaatgggataaagggctgagaatattctgtctctcccacagatccctggagactatgcaataggaagatatgttg

SEQ ID NO: 8891 - DNA, 201 bp, Bos taurus
gagttagcccctgtgccttcatgtgggttaaaaaggagccagacttgggatcttttattacagtttctttttgcctataaaaaatactaaagaagaagttattttcagatctatgtagtaagacatattagtgattatttgtgatagtgcgttgcctcagttaaagcaaaagaaacagacttcagctgtgaaaggagaata

SEQ ID NO: 8892 - DNA, 201 bp, Bos taurus
gcctatagcaatagcatacgaggaagctagattggccccatcaagaatacaccagctagtgcgtcctgcttcacgtcagacaacatcgcagatggttcacttagtgtgctggtgtgttttggaaagaatacaatgtcactagaagacttactgaaatgatggggaaaaaattgcataaagatagtgttttggttggtggct

SEQ ID NO: 8893 - DNA, 201 bp, Bos taurus
gaaaaatcaagtccccggccactactgtctaaaaactaattgtgtctttcttttcttccttggctccaaagagctgctcacagtaaatcataaattcactcagggaagcaggaactctgggctaaagaatctatggacagaaagggaaagacagcaagaaaaggattgcgttcagacacgaagcctttccatgacatgata

SEQ ID NO: 8894 - DNA, 201 bp, Bos taurus
tatatttagttttccctggtcactaattccacatgccctggaaccattccatacttggaccacagaaattgaaaaatatacctaactacttctgcttaagctacttgcttgtcttttcatagagcaacattctccttgtgaaactgaggatgatatggatgataccttcaaaccctatcagtgggccacactgtcctccaa

SEQ ID NO: 8895 - DNA, 201 bp, Bos taurus
ctctgatgcaaggccaggcctttcacgtcctgccaaaaccagagccgttctcaagctgggtaacttgtgattattttctcctgttgccttctctttgaaacctaattgtagatgtgaaatggccatgtttaaataattcataaaaaataataaatccagaggaaagtggcaaagggtacagagaaacctgctgaagtacaa

SEQ ID NO: 8896 - DNA, 201 bp, Bos taurus
aatatggtgctctcagtgctaacatagactcactcacagggtcctctgggaccatataggaggggccccaggggagacggtgttcgcttagattaaacagagaagaagtcaaggaggggaacactgaccaataaagctgaagaagtgggcactgatcacatcataaccaaagactataaccgttttccacttgagcatcgg

SEQ ID NO: 8897 - DNA, 201 bp, Bos taurus
taaatgcttaagatggtaaatttcatataccttctaccacaataaaacattataattattttacattaataactttgctatataccaatagtgtcacatacgatttttattcaattggcttcaagacagagaagaaaggaaaagaagcacttcaattatggaccacatcagatgaacatattggaatcaaccaaccatttt

SEQ ID NO: 8898 - DNA, 201 bp, Bos taurus
ccctggacttcccagcctccagaacagtgagaactcaatttctgttctttaggccacccagtctagtgtatgtttatttcggcagtctgaagagtggaggcgagcaggagcaacaatatccgtggcctcatggagcttacattctgggggtaaaggaagaaaataatcaaagtagcaaatattagtagttatataatgtcc

SEQ ID NO: 8899 - DNA, 201 bp, Bos taurus
gtgtgtgcacagagaactctctgtcatctctgcctcttcctgtagggacaccagtcctgttatattacggctttacccttataacctcaggtactcgtaactccctctctgaaggccctgtctctacataagtcacactggggggttaggactttaatctacaagtttcgaggcgagtgcagttcagtcagtaacaaatta

SEQ ID NO: 8900 - DNA, 201 bp, Bos taurus
tggcccagactctgagctgctccctagagtcaatgggaagggaaagtggagacactgcaagtgtgaaagtggcatctgagaatctcctctgggggcaccacctctggcctctttctaggttctgcttagaggccaagccccactctctctccccccatcacagagaacaagagtttattctcttctggaggacagagagct

SEQ ID NO: 8901 - DNA, 201 bp, Bos taurus
tggggtcacaaaagagtctgatatgactgagtgactaacactttcactttttagttttcacttgaccaggcaccagggccctagattagagcatgaagtacgcaccctgggaggaaaatcgcctcaccagaaataatttcactctgcccaggttgagagggtgggagccaccaggcccaggcaggatggaacgtgcctgga

SEQ ID NO: 8902 - DNA, 201 bp, Bos taurus
ctggagctttctggttgttttttccttattaagaggagagaagtatacttttaccttattactaaggtaactcacccttttcttcatcatattcattattcgaatgaattgattttccttcttggatttcactgatttgcggttggggttaaagcaacagtagacagcttttcctatctcacgtgtcagaatgagagggac

SEQ ID NO: 8903 - DNA, 201 bp, Bos taurus
tcttctctgaaaatgtattgggggtggcgtgtggcagtgggggcatcgttgcatctacaatgagcactaactacatcctggatcaaatgtgtggtttttttaaaagaattttttttgtagtcaatggctcatagaggcatgcatttgggctatatttactaaacatgaaataaatgtctaggaactttaggcagactatct

SEQ ID NO: 8904 - DNA, 201 bp, Bos taurus
cattgagcattttcttttattgcctcttttcattctcttctgcagattttgtcccagcactggttagcctgtgtgatcatttattccagacatttattttgtctcatcccaatttgtcccctgataagctgtataagctctgataagaactttgaaaattctgaatttcaatgttctccaccagattttgaaaccatagaa

SEQ ID NO: 8905 - DNA, 201 bp, Bos taurus
gatttttacctggaaaatggaagggaggcttcaagtcttaagagtcaagagaacagtaaatgcacacatttctttctccccttctgcaatctgagtgcttcaagaaagcttctgaaactatctttgctctgaacagagtttcacttcagatagttttgaaatctggagaagaaatgacaccaatttttattccaagcattc

SEQ ID NO: 8906 - DNA, 201 bp, Bos taurus
actggaggaaaaagtcctccaaaaaaacaacaggatgctagagttactgacggagagcaattgaatccctggaccccaagcacaggaagaaaggactgcactgggatccaatatagtctgtaaagatgaatggcagaaagatctctgtagggtttcaacattctgacgagggtaacatttgctattcattcataaacagca

SEQ ID NO: 8907 - DNA, 201 bp, Bos taurus
tgggttgccatttccttctccaggggatcttcttgacacaggaatcaaacctgtctcctgcatctcctgcattgcaggtggattctttacccctgagccaactggaaagtcctttattaactctaagtaccttcagtttgtttttttcaaatgaggcagtgtataaacaggtgtgaattttgcctcccccagtcttccata

SEQ ID NO: 8908 - DNA, 201 bp, Bos taurus
aaaatggcacaggtgaaccaatttgcagggcagaaacagagacgcagatgtagagaatggatgagtggacatggcggagaggatgaactgaaagagtggaattgacatgcacactaccaggtgttaaatagccggtgggaacctgcacagggagctcagctcagtgctctgtggtgacctagaggggagggacggggaggg

SEQ ID NO: 8909 - DNA, 201 bp, Bos taurus
attctgagcatgtttgaagtctataagttaagaggcaaaataaggagtgaaaacttatacagaaagaggatacagttgtgggaccaagttcctatcagggctaaaattagctttgaggagaaaactaggacaacatcctatattaaagacaggtgatatggtcaatgcagactctctttttaaaaatctaagcctctttaa

SEQ ID NO: 8910 - DNA, 201 bp, Bos taurus
tgtaagaatcacttagaataccctgaatagtcaacaagagtccaaaatgcagttcttggatgcaatgtcaaaaatgacagaatgatctctgttggtttccaaggtaaacagtaatctaagtttatgacccaaccactaacactgaagaagcggaagttgaatggttctaggatgacataaaagacctgctagaactaacac

SEQ ID NO: 8911 - DNA, 201 bp, Bos taurus
ttttggaaacaaaaaggagattcaaagccagaaaaaacagtgacaggaatacaaaaagaacacttccgtagtcactggagggaatatggccttatgtgtgtgtgcgtgcgtgctcaatcgtgtccaactctttgcaagcctatggactgcagcctgccaggttcctctgcctgaaggaatatggcctttctgacatcttaa

SEQ ID NO: 8912 - DNA, 201 bp, Bos taurus
tgggcaaattactaaacaaaggaaaaactagcaaaaacagcaaccttcacaggggaaagaaatcaacattaaaaatttgcatttcagacaataccatgaaaagttattacctttagtttctctaggtagagcaggtagttgctccctataaggatcacaggaatatatggcgttcctttatactaccatttcttctatatg

SEQ ID NO: 8913 - DNA, 201 bp, Bos taurus
aggaggttgtcaggtgttgaatttgcaatttatgaagaagcacatttccatctttagtagcttgatgtctccagcaccagaagcaagcatcttcatggtgtccttaggttccaagttgatcctcagcacgtcctacatcccttgaacccctgcactgcactgatattgaccaccaatgctgcttgggctcaggccaccttg

SEQ ID NO: 8914 - DNA, 201 bp, Bos taurus
acttatttttccctttatcaatttcataattattggcagataaccatagaggcagctagaatattcatctttttatcacaaagatagtaatgccaacagaagttctgaaatctctttatatcaagtattacatatgtagaccaaaaagactcttgtcacttcagtattatctcatcagtgcccttgaattcctcagcaggc

SEQ ID NO: 8915 - DNA, 201 bp, Bos taurus
aactcttaaaatacacagaaataactgtaaaataagtaggattgtggattagactttttaggtgacttgactttgatcaaaaaggagaaattgaacaaactgagacttgaatctaggccatcacaactaagcagcagcagagtctctatgcagaatctatgcttttgaccttcacacttcatcaacctatagtacgatgca

SEQ ID NO: 8916 - DNA, 201 bp, Bos taurus
gacattaacaatgcttagagaacagatgttcctagtactgttcttaatgaaagggtggccttcaaaaggtactagtggcctcaaggttgcacgagcctaacgtgcacatcttaaggaagatatccatctccttcatgctcactgtgtttgttctacgtgagttcacaacaaaagcaaacagatgttttcttaagcaattct

SEQ ID NO: 8917 - DNA, 201 bp, Bos taurus
tatttacaaaataatggcttggaaaactagacatcctcatacagtctttaatggaagtatatagattggtaagaatgtttaattttaatagatgtgacttttgaaaaaatatatacaaatgaatttaaagctttttctgagtttaacataagtattttttcaaaataggtggggagacaaattttcaagatatttactgca

SEQ ID NO: 8918 - DNA, 201 bp, Bos taurus
tgaagtgagccagagtaaaagtatgtgtcatgaatatgaagatgcacctggcataagaacacttttttcattagcagcatcttcagcttgtaaagaaaaaacgacacttcacggatatgattcatgggaattatttgagtattgacgtttctgaacatgctggagaggatgtgagtgaaagaatcttgttgcaaatatgta

SEQ ID NO: 8919 - DNA, 201 bp, Bos taurus
tttaaaaattaatttttaagtcctctttgatcccacaaggagagatataacttcaaaactcatcttataggttaatttttatgtggccaaattctgaattgttttagataaatagtaattaataggtaaagaatttttaacagaaatcacatttgtaagataaaatgattcatataacaaactgatatatactggcctgct

SEQ ID NO: 8920 - DNA, 201 bp, Bos taurus
cagtcattaattcttgagccaggcttttgtgattcaagagaggcctgggagactacaattttctacaaataaaaaccaggcagaggacatgggtaaggatgttttcccaaaaaggccccataggaccttgctaggttatagtatggcaataagcctattattattattattattatttttgtataagtaagtaagtatgct

SEQ ID NO: 8921 - DNA, 201 bp, Bos taurus
ataaacctatgactattgagaattgtggctccagtcctataaaactcatcttttggctcttgaatgttaaaccttgcttatacttttgatctctttttattcctctcgcttcttttaaaatccacttaaccatgttcaaatggttgtctccctcacaccccattattaaatgcacacctaagtttgtagtttttgctgttg

SEQ ID NO: 8922 - DNA, 201 bp, Bos taurus
aattcagctgttttttacttctacattattaaatgcattccacctaaacaaagcattttactgcctaagttacctttcttataagtttaaataatctcttttcacttacctttaacaaaatggcaaaagtttgagctgccagtgttgcaatgaatattaacatttcagtaaacacaagataagtgttttcagatttaataa

SEQ ID NO: 8923 - DNA, 201 bp, Bos taurus
caatacattcttaattatttttaccaagggtcaaaactgtgaagaaaaatgtgtattgtaatggttgtgatacaacaaagtaattacatcatagctgtcaataaggagtttgcaaattagcctagtaggattgcaaaactatataaagacaagtttaaagtgacagaaagatatataatatatagaaaagattagtcgacc

SEQ ID NO: 8924 - DNA, 201 bp, Bos taurus
accatacaacatgcagcataattttatacttaaactctagatttaaaagttatagctccagtgaatttaaacactctaaattcagtcattcttttccttacggattcttgaaaatctaaagatatactgtgtattcctagatttttatatctttcctgaacaacttcaacagtttgtgagggtacagatggtagcttatct

SEQ ID NO: 8925 - DNA, 201 bp, Bos taurus
agctacagagctcatattttgttttctgtaatattatcgttttaacttaaaagtaatgagactgattcttctactcacagctacaagtatatttaacttactcatttaaagaaaactatgacctggaaaatatccatgagatgcactatgcagagcaaaggaaatcagtatattttgatttaagtactttggattataaat

SEQ ID NO: 8926 - DNA, 201 bp, Bos taurus
actgctacagtctagataaattatcttgatagtgataagtatctgatatgtcactgaaaaaagtgacatatttatgtgattatcaccagctgaaacagccgtatctattgaaactatagccaaaaactaaataattggcctgtggaaaccaatgtacagacattattgaaagagtcagtcatgtttctaagtgaaatgcat

SEQ ID NO: 8927 - DNA, 201 bp, Bos taurus
cagactggaagacagtatcgctaaaagtattaatactgcccaaaaaaatctacagactcaatgctgcaagcatcatgctacctggcctcaaaatgtaatataaagctatagtaatcaaaacggtgcagtaccagcataagaatagatacatgagacgatggaactggcccattctctaatgacacacagaaacacaccaaa

SEQ ID NO: 8928 - DNA, 201 bp, Bos taurus
ctccagaaatgttaaactgagtatgatggacacaatgtattagaaaataaaaataaatggagctaatatttataccatatttcataatggatatgaaatatctttcagatatctttggaactatgatgctttgtgagtaatgcttttcaactccccatatatagttcaaaacctctaaaaatagaattttattacattatc

SEQ ID NO: 8929 - DNA, 201 bp, Bos taurus
gtaaaagttgatgtgtttctctttgcattgttgtacaacagtctgcaaaaaaaagagccagcaactataagacaaaaattttaattagtttggtgtcacttaattaggagaaggaagaaatgagtctgtatctgaaaagtgatggcttatattacttcaatatgagagctataggaaatatatattcagagcatacttttg

SEQ ID NO: 8930 - DNA, 201 bp, Bos taurus
tccttatccttcaaggcctgctttcacacagattcaagtttagccaaaggtgaaagtttagagatactaggtctgtcttgagtatgagtacaatcctgtgtagacacctggcctttaaaatttagaaattgatttatttaaatcttactatgtctgtgggtcccttgaaaagtcttcctatatacccccatgaatgactac

SEQ ID NO: 8931 - DNA, 201 bp, Bos taurus
agttttgcacctaagtaaaattatttatgttcttgaaaaattgatgtctacacatgataagtgcatgtggtatgaatataggagatgggctaattacagagatatattaggtggcatgaatacaaaagggaattactcatgattcatatttaatagtttcactgttttatggaaaatgtacataaaattagtgtgctataa

SEQ ID NO: 8932 - DNA, 201 bp, Bos taurus
gatcacactgggtgagcagacaagctgaaagcaaactcagggagagaagaaggggatgtattgtgataacccttgtgagaaatcatgacttggaattaagtgttggggaacaaaaccgaaatggagagaagtgaatgtatttcagatagaagaggagggatagactggacctgggatacatagaatctagagaataaatga

SEQ ID NO: 8933 - DNA, 201 bp, Bos taurus
agtatatattaatacctggaagaatctagagattttatttcagcaaatatcataccctcaagcaattgaattcaatcaaacgttgagtccaaatttgtttcagagaaagaaacttttcaaattacttcataaaccaaaaatcgagctcctatcagttcttccctgacaatagcgatcaaattacccacataaaacagggaa

SEQ ID NO: 8934 - DNA, 201 bp, Bos taurus
tatattaattttatagacctgcacagacggttaacagggaattgaggactaaacatatatttatgtaagtgttggtggaatttgacatgaacattcaattatatcttaccgacacttattaaaagcattttagctaaggggtgccttttacttttccttcttctcttgttttggtccgtttacatttcttttcttgctttg

SEQ ID NO: 8935 - DNA, 201 bp, Bos taurus
gctcttatcacatattattaggttagttacctaaatataccagaaatcagacgcactatggaatccttcaaaccggcacactggagtcatcaactctgtgtatttaagccatggtataagagaaccaaaagtaaagggaaaaaaaaaaaaaaacaacctttcatcccatggtaatgaaaaaggggttgattcaggggtttt

SEQ ID NO: 8936 - DNA, 201 bp, Bos taurus
ctgcgttgtaaggcccattgtgccagtaggaagagtcacagactgtctgtagggaattaatctcggacgccgaggagttggcgtcccttctcttggaccgctttcgattcctcaggataaacacgagcatgcccaccacagtgaaggcggaggtgacaaacaccagcagcagtcctgggaccaacacggagatggacaccc

SEQ ID NO: 8937 - DNA, 201 bp, Bos taurus
aacaagggttttcttataagacatctgccttagctgaagtaaaaatatttgtatctgcagtctgtgtataaactgagattatttttttaattattttggactccaagacttcaatattattctgtgtctatgcacaactggtcaaaaccacttatcacattatagattttgatgaatatttggtgaatacatataataaca

SEQ ID NO: 8938 - DNA, 201 bp, Bos taurus
actcaggatagacatcggttgaaaggctgtaacctctcaggcctccatttcacacatacatggcagaagagatcttctcaagtctttcttctggactaattgtttctcaatctacacaaaaaagcccacaaagaaggattcttccatttttactgagttacaatatcttctgaattttatgtaacaagaattcagaatctt

SEQ ID NO: 8939 - DNA, 201 bp, Bos taurus
ttctaaaagtttataagccacaagaaacattgcacaggatgagactgtatgggtaaaaactgaaaatctgcctatcactgatggttccagcatcaaaatggttccagtatcaaaaggtattgtcagacgtgcagctatttcacccaattaaaataagttaacaaaatgaccttacgttcaatatagcttgatgtctgaaac

SEQ ID NO: 8940 - DNA, 201 bp, Bos taurus
ggatgaaatgttcccttggtatctctaattttcttgaagagatttctagtctttcccattctattgttttcctctatttattttcactgagtgcaaattcaagattcagaaaactaacatcatggtatccagtcccatcacttcatgacaaatacatggggaaacaatggaaacagtgacagacgttatttggcgggaggg

SEQ ID NO: 8941 - DNA, 201 bp, Bos taurus
cattttaatttgttcttccaaacaagtgtgaatgagagagtcatggccaagtaaatatgcccaatcatatattccctgtgttgggtgcagaaagtgaagtgcagaagcacattagatccgattttggtgtataactctattatctcacatttgaccttttgaaatggcttagcatggagtgaaatatgagcacacattagg

SEQ ID NO: 8942 - DNA, 201 bp, Bos taurus
gagcctggtgggctgctgtctatggggccgcacagagttggacacgactgaagtgacttagcagtagcatacctccttcctgttcactaccaaataaacagtaggcctcataagaatgttattaaaaatagaatgttcaaagtatttttaaattaaaaccatacttatttatattttataagatactaatgctactattca

SEQ ID NO: 8943 - DNA, 201 bp, Bos taurus
atcacacttattcttaatatgctgaaagtcatttagaatgtgtgtgtgtgtgtttcttaaaattacatggcacctcaatcacatgctatggaagatctcattgttgctgagtttctcaaacactccatcccactgtcatgatcttgccccttaaaacagtccccattgtccccactgtatgtttccattggtgttccttca

SEQ ID NO: 8944 - DNA, 201 bp, Bos taurus
ttggtgccatggcctgacatgtacttggtgcttcatattgagatgttacaaacatgttcagtgtcacacagctgttagtggccaccaggattttaatagccgacctttgcctagggttactggatcattggttcaggacactaatctgtatctcattctatgttgaaagagtttgaggatatgtcacatctcaatttaggc

SEQ ID NO: 8945 - DNA, 201 bp, Bos taurus
gtggattgtttagagactgtttctgccctttttgttgttttttttccatctaaatattatttcttttaagaacttagaatcagatttataagatctcgctgcctttgctaatagggcaatccatcttaagatctctaaaaaaaatgtatcctttatgttaacagacaaaatttttcccaaatgtatccatgttctgatctg

SEQ ID NO: 8946 - DNA, 201 bp, Bos taurus
aggagttttaaataggattgtctttaaacaaaactgtccatatatcctccatagtaaagtaacctcaattaactattaggttggtgtagaagtaataatggtttcataccctgaattttacatcataatagctaggctcaatcacatctttattaatcaaaataggaaccattacaatcaacacatttttttttgccaatg

SEQ ID NO: 8947 - DNA, 201 bp, Bos taurus
tggaaatagactaaatagcaaacaaatttgccccctgggtgggggggtggggaagaacagaagaaggtggggaactaagtcttgtctataaaaaaaaatactcatggtttgaatacaagactgtcatgggttgaatacaagactgacaagtagataaaagatatagaagcataaacccaataaaataaaccaggaatattt

SEQ ID NO: 8948 - DNA, 201 bp, Bos taurus
ttacagtctccataggccaaattgagagtttgctttgctttgttgaacccataccagaagatgtatttccccccatacttctatactttttacaagggtaagaatgagaagtggatgtctctagttgctctggtgtatcaatctagacttaactaaagaaactgaaccaataaaatgtgtatatcaaatatatgttgttgt

SEQ ID NO: 8949 - DNA, 201 bp, Bos taurus
tactatggccagcaatatatagaaaaactggcatattttcaatatgagtgtaaaaaaaaaagcagaacactaaaattaaaaggtacatcagttcagatccgtcacttagttgtgttttactgttggtgaccccatggactgcagcacacaaggcttccctgcacatcactactttcgaagcttgctcaaacacatgtctat

SEQ ID NO: 8950 - DNA, 201 bp, Bos taurus
gtgtgtacaaccaacttcttagacttactttaacaccagacccaaaagaagttcagcagttaccatggagttaaggttatatgtgtacctctatcaacactgtcagttctgatgatatttatcttctaaaaattccttcatttaattattagtgtaatgtcttgtagggcttcccaggttgtgccagtggtttaaaagaaa

SEQ ID NO: 8951 - DNA, 201 bp, Bos taurus
cctctcttttactgtctcttcctcaacagcttctccaaatatggcttgggtataagagtgagaataaaaacttgaacaaatggattccaacagaagcatgactgggccagtgacacacacatcttttactacaatgatgcacaaaaataagtaaaatatgctttaccaacatctgtaacttgccaattttttgagctgagc

SEQ ID NO: 8952 - DNA, 201 bp, Bos taurus
tggacagggccatgatcagtaaatctttaacccaattgtctgctgacaggtggagctgtgcaccctttctattagttgtttggcctgaggcagcccactcatgaagtctacaggctttaaggtggggctaaaggcaacctccaagaggatgtatgccaacatgcccctcccaggactgctgtcaccagtgcccttcttcct

SEQ ID NO: 8953 - DNA, 201 bp, Bos taurus
ttaattgactcaagagaaaatttatgacctcttaatttaacacaatgactttccagagtttgctaataaaaaatgatataacctttcaattaattgaacacgttttcaggaatgtaaataaaatcctttactgaactttagcaatcttgatttttttttttaataccacagtgattttaaagagattggaaatgactgttt

SEQ ID NO: 8954 - DNA, 201 bp, Bos taurus
ttaagctaagatcagagttgtagtgactaagatgttcaaacattgcaggatgaagttctaaagaagaagcagctgggcagaggaaaagagtaacagtcttccttcccttgagttttgggctgtatcccatacttgcctactctttgcatgaggctaaaaagagaacaactattggggaaaacgaaacaaaacaaatactgg

SEQ ID NO: 8955 - DNA, 201 bp, Bos taurus
gatcagtcctcagctgttctgtgtagttgaggttccagaacctcctcttagtgaacaagaaaaattatgccaatttggcccttttctaccatcagaatggcatcagggaatgggtagattagggatctgctgaggatgctaggggcagaaaggcaaggtgcaggttgacggacgctggtccaggaaagatgctggaagctt

SEQ ID NO: 8956 - DNA, 201 bp, Bos taurus
cattcttttatttctttttacaatttattgattataattatctagtctaactagactagtctaaatatctagtctaagtagaccatctcatctctaaagtgaatagattttcggtttgctgtaaagtagacaatcctaggggctgctttggtaactcaattggtagagaatctgtctgcaatgctgaagaccctcatttga

SEQ ID NO: 8957 - DNA, 201 bp, Bos taurus
caaagaaaaaccagaaatcatcaagttgaggaaaggtattataagagtgtgaatctaaagctgcagataccaggaactgagaaatgaatccaagatacaaaaatggcttcccaattgtgatttgaagactgaacatacatttcctaagatgctatggcataggggtgggggtgatggcttcagtcgtgagaaagagtgata

SEQ ID NO: 8958 - DNA, 201 bp, Bos taurus
atattcatcctaaagatagttgtaagaattgctttttgcctttagcatatcaaaatatttcacattcgcacctgataggttcccatacaatttcattacaatatttcattatttatgatgttgtacatctaagatacaaaactgtggtttctcctctgttttgtcctccaaatcttttggaacaatgtgcatgcaggaatt

SEQ ID NO: 8959 - DNA, 201 bp, Bos taurus
agatcttcacatttttgatcaagaaatgccctcaggcagcatattcactgggaaggacttctttcaagaaatgctgttctcaaaggtttagttctttcatgtctcaagttttaagaaaataactctactacaaactcaattcaactaaacataagcctttgaagtagtttgacatgaaacctcatccacaaatgcctataa

SEQ ID NO: 8960 - DNA, 201 bp, Bos taurus
tcaatgaaagttaacagtataaaggaaaacaatgatgacggggatgctggagaaagctacataatttgccttaaaagctattttactcatattgacaagtcactcactttgactaacttctttttctttcacagcccttaaagattttatatcctgttccaaacatgaaaatccttacagtagttagtttgcattgaaaaa

SEQ ID NO: 8961 - DNA, 201 bp, Bos taurus
attttgaacattcatctctgtctccttaacttggtgagactgtgctctgctcagaatgtttccatacattgccagttttataagggcttttaggttcatccgtgttctaatgtccaaaaagtgatccagtctcagttactctatcacatctaatgccagacttctctccaatacaattgtgcaaaattatctcacagtttc

SEQ ID NO: 8962 - DNA, 201 bp, Bos taurus
agtgaaaattatcttctgtaattggccccaaattcacaccgcctacctatgttgcctttttgtttcccctcacacagtctacttcatatattgtgtcagggttctttgtcagggaaaaacaaatattttaaaatacataaagaatcatttgaatatatcagcaaaatggccaaattttacatatctacatttattaggatt

SEQ ID NO: 8963 - DNA, 201 bp, Bos taurus
taatcaatcaatttactaatggctgcacagttgtagatatgctaataactccaactagaaagttagagattatcagcatcaataagtgaagacacaactacatactgtttatgagagagaaactataaatatgaagttacaaatattgataaattgcagttaaaatgctagaaaacatatataatgaaagtcataagaaac

SEQ ID NO: 8964 - DNA, 201 bp, Bos taurus
tacataagtattatgtattttattaaagatacatgtgcctggatattaggatttctaatgcctggggtatggcttggccttctgaatcttaatgtattatgtaataaccaaaaggtataaaatgtaatacagttacaagcagtgtattgaggttggccaaaaagtgttttttggtttttctctaacatcttacggaaaaac

SEQ ID NO: 8965 - DNA, 201 bp, Bos taurus
tctaatatggcctgagaatttcttaggtttttcacagcatgcttaaggttagaatcagttagtcctgagcctacatgtatgtgtgcatgcatgcaaagtccccatgtttggccgaagcagacatctcacataaaatttcttataatcatgatcacctctatattaatcgagtgcagcagttaccttcctactcttcacttt

SEQ ID NO: 8966 - DNA, 201 bp, Bos taurus
atctagataaatgatatttacaaatgactctgatctccacagtaatctattgtgtgatttttacttggagcataaccaaaatttgaaacaagagtgagtaagcaaagatatccaaatccttgatcatagtgccctatttatttgaatatttatttatatatttataactacaagttgattaaatgactactgtaagtgtta

SEQ ID NO: 8967 - DNA, 201 bp, Bos taurus
taaaattatctagggtagagagacataactgagaaatgtattttggcaagatttatttcaatatatttaagtatttattttgataaaaagcaacatcatagcttgatttattcatcctttatatattatttgtactctggtctcagtttttaaaaaagagaatttatatcataccaaaattatatttactgattttggaaa

SEQ ID NO: 8968 - DNA, 201 bp, Bos taurus
tctttctcaacaactaatccaagggagagttttagtatttccttcaaaaatgaaatagcttgctaaattgctttctaggcactaagtcaaaattcttttagatatgaattatgtgaaaagcataaaagctttttgaaaattgtgtgtgttgtaagcatttttataaaaggaagctttgattaatacaggaaagttaatgct

SEQ ID NO: 8969 - DNA, 201 bp, Bos taurus
agaggtgatttagtatttttagttgaagttttatgaattgaaatgaagacgatgaggttttagttttctgagttgtttatagttttaacactggagaaaacattttccaaaagtgattataagctcactggatgtctactatatttagcaaggcactatataatgtttttcatttgaacataaaaaatctggagacagaaa

SEQ ID NO: 8970 - DNA, 201 bp, Bos taurus
tctctgttttgtgtttgctgttctatactggagtagttacagatgtcagatgaaatgggtagccagaaatatgtagcagtgaatggcatctgtagtacactgcagccttgcttatcaccagatgtggatagaaagcaactgctaattttccatttcacatcagactaaatagtcactcaatactctgtaaaaatcctggta

SEQ ID NO: 8971 - DNA, 201 bp, Bos taurus
ctatttcacttatgccttttatagtccttttcaactcagcagccagaatgttaaaatgttaaattaaattaattgagtggccctggagcacaagcttcccctgacttctcacatcaatcaggtaacagaaaatattttatggttgcctataaggccccacgtgaccatctacatctctaacctcacttccagtgacacatc

SEQ ID NO: 8972 - DNA, 201 bp, Bos taurus
tggcaggacactcagagctccccgttgttcaggggcctatatggagctattaccatttgtaactttatggacttaatccaagaggttatgacctggtaacggcactgagaatacaagggccagacaagagtgctgcaaagagcataaaaagagggcctgttaaagggagaagccacgatgcccagctccagatattatgcc

SEQ ID NO: 8973 - DNA, 201 bp, Bos taurus
aaggggattatctgtttcaggaaagccttgtagggtcttgcttggttatagaggcacctacccagtctgtaggcctgagctctggcctggatgcttgctgcaggcagacaaaggggtaagtgccttcctaggagatgacatgggagaagacccaaataggccaatgtaggagaaaaaaagcgaaaaacaaaacaaaaaacc

SEQ ID NO: 8974 - DNA, 201 bp, Bos taurus
atgttcctgttttaatcctccaaatttatgaatatgtaacttttcattgtaaagctacacaattaaataagtgtaattgagtcaatgaccttgaaatggaaagattatgttggattgtgttaatttgtcatagcagcaaggggacactaatgtagaagttgtgagtggattaaatatgaaatgaattataatatgtaaaca

SEQ ID NO: 8975 - DNA, 201 bp, Bos taurus
aaaagatcgattttgtgctaaggcaagacctattaattaaagtaatagaagttacaaattggtcaggtagctaatgagtatgaaaatatttactttttcagttgtcagatcacatagttgaatatcttaataattaatgcaacttaatagaatttttataaggttgactttgattaaaacttgtctatatgatgatattgg

SEQ ID NO: 8976 - DNA, 201 bp, Bos taurus
caaatccttagtttcattgagagtgtactgatgcagatacagtattagaagctataaaatgtgctgtatccccagcctaaaagggagaatacatactaacacattggataaaaggagatggactaattatttttaacttaattaccagaaattcttgtatagctaatgttggtatcaatttagccctgaaaagcaaatatg

SEQ ID NO: 8977 - DNA, 201 bp, Bos taurus
tcatgggatcatatagctacacttgatatcaatatcagtttacaaaccatatcaaagtacaatagtttctcaagcatattattgctttcctcattggaatcggaactagatgttcatataatacatcgtcattgcattttctaatccatgtaaggctagcttgcttacttctgaatcatggagtttagaaatccaagagtt

SEQ ID NO: 8978 - DNA, 201 bp, Bos taurus
agtaacaaaaagtgacagtcataaaatgttgcactgaagggattgcttgtgttcttgtccaatctcataaattacaaacaaggaacacaaaacccgaagtggttaaacgaaacactcacagtcatatattttgccaataacacaacagcaagagagagcatctactttctaacttccattctgtgtactttccagcatata

SEQ ID NO: 8979 - DNA, 201 bp, Bos taurus
cagaatatatagcatttttaaagtgagggaaattgtcctgtaaaatgatgtaacataatcagtttgctcggggcatacagaaagactttcctgtgaccaacattataaatgtctgagcactattaagtctgaaaagcagacacaaaccagaatgggtgggaagagagactgcatttggcacaccttcaaaaacatcatttc

SEQ ID NO: 8980 - DNA, 201 bp, Bos taurus
tgtttatagaggtatatctgcagtctatcaattttgtaatctctagacagatttcaatagaaagttgtccaactggtataacattatccttcctaaggtcgaggtaggaaaaagtgaatgggctgcaaactgtggagtggcaggtatactctgctctctgaaagtctgtggataccatgtaacattctgtgctatttgaat

SEQ ID NO: 8981 - DNA, 201 bp, Bos taurus
tgactgaacaactaacactttcgctttcctttagaatgaaagcctttcctatataagcatataagctttaacgtgaagtgaaaaaaatgcatttagtaagaggtagttggctgtcactgtttgttcctctgtgagagattccattccagtaagaaagatgtcttggtgttttctctttttagtgtgagaagcagtgtgtaa

SEQ ID NO: 8982 - DNA, 201 bp, Bos taurus
agtgtttctaaacattgtttttattaacccctgtaaagaacctttttagatatatatgtttttccaaattcagtctccttccttgaaaatttaatgacacggatgtagtctttttatgtactgcagccctttggagggtcatgaatgactttaatatctaacattttctgtcctttttccctcaacaaacaactttgcctc

SEQ ID NO: 8983 - DNA, 201 bp, Bos taurus
gaatctttttgtaactttattagaagatatttcctcatttttcaaaattcttcaaagctacatgtctgtatgcattcatatgtggaatatgtttattcagtagatgtttattaaatggtgtcagctgatggtgattattattaagtgagcaaatacttattacaaaggcaccctttgggatggttatcaaggtgttcgact

SEQ ID NO: 8984 - DNA, 201 bp, Bos taurus
atccagcaccatgattcctccttctcagatctatatcgccaacctcaagtttccccatcgtttgaatttttaattggcattataccaatcttaacatgtccaaaatggaaattttaatttctgactcacaccacaaacatgatgtagccatagtcttacttatctgagttaatggcatcagtgcacatccaggtgctgagg

SEQ ID NO: 8985 - DNA, 201 bp, Bos taurus
aggagagcccagttcgattcctgggttgggaagatcccctggagaagggaacagctatacccactccagtattctggcctagagtattccatggacacaactgagtgactttcattttcactggcattgctcttctttgggattggaatggaaaattaaccttttccagtcttatggccactgctgagttttccaaatttg

SEQ ID NO: 8986 - DNA, 201 bp, Bos taurus
tgtaaagagaagttttccacttctgatctcagttatgtgattatctttggggatgttgtgatctgaagcaaaatatagttaagcctttcatcttcatctacgggtagtaggatctatatatttaatatgaaggcagataaaaaaaaatgtgaatccatgctatgtggtagtgcctgaagattataaactatcaatgtccaa

SEQ ID NO: 8987 - DNA, 201 bp, Bos taurus
agtaaccacaagtataggaatcttagcgtcctaggcatgtataattctatggaactgggtccagctgttttctgcatagcacaactgggcttgccaagaaagagctggagaagcaattttctcatatatgcaagtggacacaaattagagtccatcacacaagttgattgttttctcaggactatttgacaccaggaattt

SEQ ID NO: 8988 - DNA, 201 bp, Bos taurus
atcagtcatataaatccacctaatactttgtcagcaaacccacactgtctcatctctcataaagcaagtagtccaaggcattgccttgttcaagttctaacgtagagggctgtgcctgtaggacttcaccggacttcacggagattactgcatcagcatgacagggcacgtactatactagagctcaccagttacattttt

SEQ ID NO: 8989 - DNA, 201 bp, Bos taurus
caattgtttttacattcccacaaataaccccgaatatagagcattccaacattccttgtctgccttccttcctaccttatcagaaagttcctcttatctactcttcaaagatgtcaatcaaaatctttaaatggtctacaaaattttcccattctcctctatacctaaatgatcttgtcataagcttccttccctaacaca

SEQ ID NO: 8990 - DNA, 201 bp, Bos taurus
attttataggcaccatgtttaaatggaggtcattatataaaatgttcaaaaattctactttaacaccattttctttgtttttactttgctatcagccttcttgttgtattaaaatggcaataggacaacatagggaattctgttttgatacttataggattgccttgttttgatatttaaagttaaatacattaattaact

SEQ ID NO: 8991 - DNA, 201 bp, Bos taurus
cctcttggcaactaaatagtttctgaactcaaatgctctaacaacacaggctattatagccaaggaaagagtagaaaaatcagaagtctgctcagctcgtgaagactttctgtcagcacttgatattctgtccagtttccctcgagacagcatctaattgatttttaagtgaccgcagtatcagcctgtacctcaccttgc

SEQ ID NO: 8992 - DNA, 201 bp, Bos taurus
caccctcttgaattatgactttaacggtatactctaaaactacttcatgtactgaaattgacttcattgaattttatgacaggaaacaattttgacttccaatgaaaagattaatatcatctttgcaaattttgtctaaacgttgtcagtcagaattgcagagtgattctatctcctatcagacatctgaacatttctttc

SEQ ID NO: 8993 - DNA, 201 bp, Bos taurus
ctttcagagatactgcactggcttttaaaggcccagggaaaaacttcctacatttttcacatgtcaaacaaaggcattcatgggttaacccccttcaactgtttgtagccacatcacctctacccagcatgcaacatacagtcttttaggtctctaacaacccacaccttgcaagtatcttatatctttacctgaaacacc

SEQ ID NO: 8994 - DNA, 201 bp, Bos taurus
gctccagtggggatttccagtgagtgacttggtctcaacctcaagtcatatcacacaaaagtttcatttaaaatgatctttgttatcaagtaaaattaatgtttgtgctgaattatagataaactaaccagttagcaaaaacacagtgctagaatacgaaatctctcatatttaaaatacatgtagttagtatagtaccaa

SEQ ID NO: 8995 - DNA, 201 bp, Bos taurus
aagtccaacaaagaatattcttctagcattagatacaatagactgttttctaacatttctaaaaaggacattaaggctccgtgtgaatcagggtcacatagtaaacagccagtactaaaatctaaggcttctgaaatgcattctttatatcatctttaaaagaatgaactgtagtagcatggaggtggtgacaatgcagct

SEQ ID NO: 8996 - DNA, 201 bp, Bos taurus
agagaactcgcactcacatcttatttgccaggttaattcacctgctttctgcagaattaattccgcaccccccccccgccccgtcatcagatccaaggcccttattggctcagacctagaaccctgaccaatccctagcaaggagaaggagattactgtgctgaagttagacacctggggctgcccgtagagtccaggtcc

SEQ ID NO: 8997 - DNA, 201 bp, Bos taurus
cagggaggcctggcacactgcggttcatgaggtcgcaaagagtcggacacgactgagccactgagctgaactgaacagtggataagaactggcttgccaatgcagggttcctggcccggggaagactccatataccacggaacaactaaagccgtgcactgcagctactgagcccttttgttgcaactgctgaagcccaca

SEQ ID NO: 8998 - DNA, 201 bp, Bos taurus
ataataggaattccttgtttatactggaatctttggacctcctagggaatggtaccatatgggaaaaaaggacttaattccttgttttgtgtttgctaattgattattttaaacttttcttacctctttgaaccccagtatccttatctgtaaaaaagggtaataatatagtgtggctcataatacttttttgtgaggatt

SEQ ID NO: 8999 - DNA, 201 bp, Bos taurus
atctcttgatgttctttaagaataacactgcatattcagtgaggattttcaattaaggtaaatgacgggttttatatacaaaaaaggacttgcaaatatggaggaaattattgaaagagattgcagaatacacaatgcaagaggaggtgtttcttgggacttattcagaggagagaaaatactaccatcaataaaactctg

SEQ ID NO: 9000 - DNA, 201 bp, Bos taurus
ggatcccgggtaaagctataggatgataatcaggaacatttggcgtctcggtgctcctagcatcagataaagacaccatcagaaacttatgaactgctcatgaaatcattggtttactcatttatttcccccattacactctaagcccttcaaaacggtgtcagaataatgttgagcattggaaaggtgttaaaaataagc

SEQ ID NO: 9001 - DNA, 201 bp, Bos taurus
cagactttagatccaactttacatcctgggggtagaaattagttggaagtgaacttgagccttgcttatttccagagctaaacacacaatcaaaggtcatgtgaagttttaaaaaatttttttagttataaaatgggatgcatgtttattgctggtattttagaaaacagaaatctacaaaagaaggatatttaagatgtc

SEQ ID NO: 9002 - DNA, 201 bp, Bos taurus
tctcaaatatgagattcaaattaaaaaaaaaaaaacttaaaaaaatgtagcagcatcctagttgggggatcatgtacttctagttgggttttcagattgataactgtgccagccaccagatgttccaatgtaaaacttattaatgcatttaattagtattgaatttccccagtatttatggaccagaggaatatggaagtg

SEQ ID NO: 9003 - DNA, 201 bp, Bos taurus
aaaaccactagaccattcaggtatgacctaaatcaaatcccttatgattatacagtggaagtgagaaatagatttaagggcctagatctggaatgaggttcgtgacattgtacaggagacagggatgaagaccattctcatagaaaagaaatgcaaaaaagcaaaatggctgtctggggaggccttacaaatagctgtgaa

SEQ ID NO: 9004 - DNA, 201 bp, Bos taurus
actaccgaattactcagacttggtgaaatatataaatatgagactacttgttgcacacgttttaagaatttcaagatggccactgcagaatgtcaaaccaatatggcacccttctaagcttgggtgttgagggattgtgtataggtcacacacccaagacgctggccctgccaccaaacctcagttcatcacttgtgttat

SEQ ID NO: 9005 - DNA, 201 bp, Bos taurus
aagaggcaaatagctctttcagaccctaattcagaattcctttaatgcaatttgttcaaccatagacacccagctcattccaagaggaatgtatctgaaccaggtattgcatatgaaagtaaggagcgagcctgggtgtccagtctgtctgagtggtaccttgttccacaggttcagacacacacatcacttcacagcctt

SEQ ID NO: 9006 - DNA, 201 bp, Bos taurus
gaaccaggtggttgttgctaccttctggcctcctctgcttctgaaatgctgagtgaggctacaaaaaaaagatgatgccaagtgcgatcagggagaaatgcaaagcacatgtatctggccaagcaagtattactttgcagtctattagctatggttaaatatttaacacttttgaaagctctgggttgatgacattctcaa

SEQ ID NO: 9007 - DNA, 201 bp, Bos taurus
ttctcaactgttaaaaacaaaaatattcacaccaacctcataaagtgcttggagatcaataatatcattttaatatggctgttaggccatcatcgtttcacgagatgggggtggggttttcatgaattattttcatcagtgtatttctagcacctaatgtgtagcaggccctcaagattaatttctcaagtggtttaaagg

SEQ ID NO: 9008 - DNA, 201 bp, Bos taurus
gttaaaagtgatttaacttattaagattcctctttgtgtatattttagaataaaggtggctttcttccaagcatcttcccccattggctaaacagctaccgtagacatcagtctgaagacaaaactgtgactttgtgggggaaaactggggagttctcatcccttggtgcccaaagcactaaggctgtggtagaaactcta

SEQ ID NO: 9009 - DNA, 201 bp, Bos taurus
tctgtaaaaataaacaaaatatcttttttgaatcttaattccctctctagtcactaagttatttccttgtttgaaaatcaacttttggaggcttccctggtggctcagtgataaagaatctgcctgcgcattcagaagacatgggttctatccctggtccgggaagatcctacatgccacagagcaactaaacccatgcac

SEQ ID NO: 9010 - DNA, 201 bp, Bos taurus
taagtcatatttcttatgtttatttcataactctttgctcaccagatggcattctgagtcctcatatgagttgttcagcttctgtgatcaacaaggggggcgggcggggaactttcaacaaaggaagtgatccttactagctctggagaggtagaccactaccaccactcttatattttactaatacattgccattgcgat

SEQ ID NO: 9011 - DNA, 201 bp, Bos taurus
ggcacagactttttgcttcattttcagttactagtggacacctgcatgaactcatccccctcaagggtctgaaatgaaaacaatcatcaacaatacaatcactttgctttagccacaggcttgacacgaatcaaatgtttctgccctgtgctcataccctccccaaagaagagttcttttaatgaaccgctgaacaattcg

SEQ ID NO: 9012 - DNA, 201 bp, Bos taurus
atgatgaacagtgactattgccttagtgttctagttagttgcaggtaggaagttattccaaataacttggcaatttcttgcaaatcaaaagctccagatgcgggtttaatataaattttttcacactatttctgataacaatatacacattcactccagaaaatttgacaaacacagaaaagtacagagaagaaaatttaa

SEQ ID NO: 9013 - DNA, 201 bp, Bos taurus
tttttggcttgttgcttgtgcaggatcaatccccctgatgttagatctgccaaatggaaacacaatggattttaagggtgggcatctagtcatgaaaacgtttctcctaaatttcacattgccaaaaggccattaaccatgccctctcacccaaagaactgtgttcatgctttccttccacccagaagagtcttctgccaa

SEQ ID NO: 9014 - DNA, 201 bp, Bos taurus
tagcccagtgcccccatccccctgcctccgctaggtcgcaacctgggcgcccctcactccctcgcctcctcgcgggggaccgcggctgccagcgaggccactgccgaagttcggggacgaagactgcatgtcatctcgcttctccttctggcgcgtccacgctccaccggggcggggggacttgaggccctgcttccccat

SEQ ID NO: 9015 - DNA, 201 bp, Bos taurus
cgcatgaggtggccaaagtactggagtttcagctttagcatcattccttccaaagaaatcttgagcacttaatctggggaaacacactgcttccagggagcaatgaatattcataaaatgtggcctttgcttaaggggattttactgtctctataaacagcacactgttagtgcattgatggaccgtgaataaagaacaaa

SEQ ID NO: 9016 - DNA, 201 bp, Bos taurus
ccaagactatctaagataggattccttacttaagtgaactgattatgcactttaatcatttttacaaaatatctacacagtaacagcttgactacttttttactgagtaactgtggaatgctgcctggccaaaccgacacataaactgaccctggtagcttggtggttaggattccaagctttcactgccatggcctgggg

SEQ ID NO: 9017 - DNA, 201 bp, Bos taurus
ctgagagctggtttctgaaaagagggcagtcttggggaggaacatgcccttcacctgtgaggcttgggtcagctccagggagttggggccagacttcagcgttaagggggactcttccctagagcttatgatcacacattatcagctcacacctcaggaaacgttctgctggccgagaggtctgctcaccaactgcctccc

SEQ ID NO: 9018 - DNA, 201 bp, Bos taurus
tggccagggtcgactttagaaaccaggtgtcatctcagccttgaacaccagggaaccaaacatcccaccacctacctcacctcatgcccaagagtttcagcgggccagagggaacgcacacctgtgaaaagccatcctgtttctttcaaaccccacttagggctgagcaggatgccaggatgagtgaactggagggtctgc

SEQ ID NO: 9019 - DNA, 201 bp, Bos taurus
tgttgggaaagttagacagccacacgtaaaccagtgtagttagaacaaaaacccttagaccatatgcaaaaataaatttgaaatggcctaaagactgaaacgagatatgacaccataaaactcttagaagagaacacaggcaaaatgttctctgacataaatcgtaccaatgtttccttaggccagtttcccaaggcaata

SEQ ID NO: 9020 - DNA, 201 bp, Bos taurus
ttcaatgcttaaatttgaaagatccacaatcccataaaaatattccaaagtagtatgagtaaagatttctagatagaaatttcaggcaatgtgaaggagacatggccagttcagttcagtcgctcagtcgtgtctgactctttgcaaccccatgaattgcagcatgccaggcctccctgtccatcaccaactcccagagtt

SEQ ID NO: 9021 - DNA, 201 bp, Bos taurus
tactgtcatgtctaaaatctgcagagttgatatatcagcttaagtccaaagctgaaagatgctatagattcaggaataacatatattcagtagggaggatgtcagacagcaaagtctgtcttaattgggtgatggtcagtattgtgttctattcagaccttcacctgattggatgagacccacccaaacaaggaagagcaa

SEQ ID NO: 9022 - DNA, 201 bp, Bos taurus
ggaaaggattttcacaaatgaaaggacgctcctcagaaggaggaaggttcagcatttgtgagaaacatatccatcctctataacgggatttcctccaatgtggccactctgctgatttctgtcatcacaatgatttttgtcaacttttgacattcccataagtggagctgcacggtacccgctcttgtgtctgccttcttt

SEQ ID NO: 9023 - DNA, 201 bp, Bos taurus
atttctcttagacttctcagcaatttaatactttgactagtcttttgctggtctcttcaacaaaactatgacttttgtcctgagtctgccctatatcttagcctgctttacgtgtaaccttcccagtccaaagggaggtgagcagactgtagaaactaagcttttacatactcagcttgggcatctttcttagacttttag

SEQ ID NO: 9024 - DNA, 201 bp, Bos taurus
ctgaaatgcgcaacggatcctgttttctgtaggatgttcaagagcattgcagtcaaaaagcttctggacgtcttgaccgcaaagaagccttgattggaaggttgtctttcatctgaagccaagtccctgtactgctgtgagagaagaaacacatccctgccatgtcgtcagatgctgggaccgcagtgaagtcaccactgt

SEQ ID NO: 9025 - DNA, 201 bp, Bos taurus
gccacccaggttccaaagttcatttgttccaagtgaacaagttccctacaccgcaggatttctgactgctggagtcagggaggcgatacagatggaccccgcgggccctttgctcttcttcccaccagcattcacactacctggtctgtgtcctgtctggaatgctcttccccagacacctttttggcaaactccctccct

SEQ ID NO: 9026 - DNA, 201 bp, Bos taurus
accccatgccctggggctgctcacacgttctgagatggtcgagatctgtctatagaatgtgtatctgtcccaataacctgctttccctttactttggctgagtcttgaattcttccctgggcaaagtcaagaactttcacttgctgtccatcctaaggactcctgacttttcactgtccagtaacatcaacatgtgaaagt

SEQ ID NO: 9027 - DNA, 201 bp, Bos taurus
ctaaacgcgggggctcagtgcggagggaacaggagctcagtgtgggcccgccagatgccgtgcccaccctgggagcagcggtgtcaaggaagaattaggcgtttgtgcgcccaggagatgggccggcctccacgtttagctccattctccccgaatgaaagccttgtcctggctccacagactctggttttaccgtgtggt

SEQ ID NO: 9028 - DNA, 201 bp, Bos taurus
ggagccctgctgtgtgcggccccccacccttctgaaccttcctccgcagagcaccctgatcggccctcgctaggctgcagacttcctgaggacaggccagaaggaggcttcacctgccggggctgctggagaaacacgccgcgtgtatgcgggctccccatccagcccaatgccagatcgcactccacagatcggccttcc

SEQ ID NO: 9029 - DNA, 201 bp, Bos taurus
tagccctacatggcatttggggaggattaaataaagtgacattcttgagggttttatctcaggtccttctcattcctcattcactgacaggcccccgccacctctcacagacattccatgggtacctgcaggtggctgtcttcatcccagactgctatgctcaattcagaccctaatgcccagctgaccaccagccacctt

SEQ ID NO: 9030 - DNA, 201 bp, Bos taurus
ggagccccatggaggccagacacggacgactcgggatcctgtccgcatgcagcagagaccacgcacggtttcctatagaccagcacgcggctctgcaccagaccaagcaacaccggcctcctcccccgcctctctatgctcatttacttccaagacagtcccaggaagcattcttttacatgcaaatatatacagggtgct

SEQ ID NO: 9031 - DNA, 201 bp, Bos taurus
tttaaaaaagtctgttcatggtggacacctacagagactcctcccaaaaatttcctccaaaccaatgatttcctccaaacgatgccccaggccatcttgggaaacatgaagagacaattttttttttacagctcgattacagctcagagttttatgcggcaagcaaaggaaagtacacccctgaggtatgagggtgggcca

SEQ ID NO: 9032 - DNA, 201 bp, Bos taurus
tgagtaaaaatttacaattcagctcttcttgccaaagcttgtcctctgacctgcgtttcagagctcaccctgagtgttctttattcagattcaggcctgaattgttgctgggtgcctaccttaagtccgatctggaagacccctcccagccatcctggaagccaggtatggccagcacctgcctactctgccctcgaggtg

SEQ ID NO: 9033 - DNA, 201 bp, Bos taurus
tgggaaatccccatggatggaggagcctggagggatacagtccatggagttgcaaagaggcagacatgactgagcacacatgtgctctttaaaggccttgtctacaagtatggttgcattgggggggtcagggacttcagcatatgaacttgggggtggggggtacatgcttcagtctatagcagcaccccttcctgagca

SEQ ID NO: 9034 - DNA, 201 bp, Bos taurus
aattgttttcgtgaagtcacataatgtatttggtattatctaaaaagcttttttttttttttcagctttttgactacagtagatattcctaatagtcacacgttttctcttaagttttaccagttaactctttccacattcacctgatttcctctaaagattaaactctccctaatattccagttggcagttggtctgttt

SEQ ID NO: 9035 - DNA, 201 bp, Bos taurus
ttacacagcattcccgaaatagggtgaccgtccaagccctcccctgcctagtccaaaacacacaaaattcctcgtgttccacgaccagactggccatccacgatcacattattttcctatcactaaagtcaccatttcggtaaactgaagaagcatgccattcgcttagatttaatttctgattcagattttcatctgaat

SEQ ID NO: 9036 - DNA, 201 bp, Bos taurus
ttggattggaggtcctgggccgaggcccttgggcgctttatttgtgatccgcgaaggggcgggaggggggaggaggaagccaggaatgaagccggtttgcgccaggcctttgtctttctttgcagaagctactccctttgtaagagaactccccgccagactgcctactcgagtcttggagggctggggtgtagatggtcc

SEQ ID NO: 9037 - DNA, 201 bp, Bos taurus
agagatgggcctattgctggggaactaaatgtgattttagtagcttttattgaaaccgttaactctacctggtaaattgctactgtattctttattcagttcttgtagtcacaaggatattaaaattccatactttaatttgtctctttctctgaggtactggtgatctgtttcatgtccccttgaattaattgatatcct

SEQ ID NO: 9038 - DNA, 201 bp, Bos taurus
atgatcctggcagcaggcccccgccccagtgtgtcccaaagagtaaagagagaatggaggcaaacctgatcccccaaactccagcctcagtgtcttcccgcagaatagctggggccattgtcttgatgacgggaggcacagatgttgctctctggggaagtggaggtgaattcttgcttcactccacatggtccctgaagt

SEQ ID NO: 9039 - DNA, 201 bp, Bos taurus
gtaaagctgaaaaattaaaataaagtaaaaagaatggccaattgtttattcagatggaaataggctaaaaattcaataatatcttgggcctgtttccttgtcattatttatagatgcaaggaaatctgttacaatctgggatgcagtctaaggtttaaacgacagattataaaaagaattaggccttggtcaggtcaattc

SEQ ID NO: 9040 - DNA, 201 bp, Bos taurus
acacgactgatgcgacgcagcagcagcagcagcagcagcagcgcgtatatgtggactccaaaggagcaaaacgaaaccactgaccccccaacgaaagtcacagaaaaaagggatcagactcatgactaccagaggcagggatggctaggcggggcagggagtggaggaatgtgggcagaggtacaaacttcctgttttaag

SEQ ID NO: 9041 - DNA, 201 bp, Bos taurus
agcttcccagagcagagcatcactgttgacagtccctcttccactgagatttctctagatgagagcccttggaaacctgctttgttacaaaaaggatttggtccaccctagtgaatgaaggaagcatagtcattaagaggggtcatttgctcaaatgccagtcttggttagacagtcgtcgtaatatcataattggcaaga

SEQ ID NO: 9042 - DNA, 201 bp, Bos taurus
agaaagtttgctctaagcttgtaaaaccgaacagatagttcttcctagctctagagacgttttgtctaaataaataagacaagaacctacccttctggacagagttgggagcaaatgaaatcaattcttcagctgatatgttttagtgtccccttaacactggtagttttataaatgcttgtgattcaaagtccaatgaag

SEQ ID NO: 9043 - DNA, 201 bp, Bos taurus
gggtcttctgaactttaggtcacattttcttctgccctgtgtttgaccagctaagattcacggctttgttgggatggcagttcaggccttatgaatatacagtgtatatgtttacactgcaagtcaggtattcagcatctctgtgtgccagacactggttagagggtatgacatcaagatgaataggcagggcctactttc

SEQ ID NO: 9044 - DNA, 201 bp, Bos taurus
ctggccacggctcccccaggctgtgtgagaaggaagtaggtgggtagaggagaccaaacccaagaaagacagcggagttgcggctcctcctccgtgggacacgggcccgtgtgacgtaagcaccctctcctcctccatgggacgcgggcccgcgtgacgtaagcacgtgtgctctgtatgacgccacgcacacccgcctgc

SEQ ID NO: 9045 - DNA, 201 bp, Bos taurus
gagccacactactgagcctacgtgccgtcactactgaggcctgagcacctagagcccgtaggcgacaagagaagccactacagtgagaagcccgtgtgccacaactagaggaggcccggcacagccaaaaagaaagaaataaattaaattttaaaaaagaaagaacacttgagggacttccccggtggtccagtggctaag

SEQ ID NO: 9046 - DNA, 201 bp, Bos taurus
atgttggaattttggcttttaggtggtgagcaggaagatttctgtctatatttttgttctcctccttcctgttccctttcactctgttctaatggtgccttcatcctgcacttctcaggatcacagttcataccaggattgatggcattgctggtattcacaagctccagtagtactcaggacactgcatccagttcccaa

SEQ ID NO: 9047 - DNA, 201 bp, Bos taurus
gggtatgaactaaacccagtataagacaaagacatttaacaactttggggaaaagttgccttgttcctaagaaagacacagaaagaattggcctcttaaatcctctggaaactgctggtctgatttggaaactcttggtggcaatctttctatttacctcaaggtaaaaccaacaccaagaaaggcagagggaggggctcc

SEQ ID NO: 9048 - DNA, 201 bp, Bos taurus
caaaaggcaagcagagaattacattcatttcaaagatgagcattttttatgtttgcactgaattctgtgattccctttctctaataagaggactcaatggaatgtccatttgactgagtgaactgaggtgacagttctctgatctttgagaatcagctttgacagtgagaaggaaaagctgccaggttgcatggcttgtat

SEQ ID NO: 9049 - DNA, 201 bp, Bos taurus
agcaaactcagattgtgaaggacagggaaacctggggtgtggcagttcatggggtcacaaagagtctgatatgacttcatgactgagcaacaacagttcaactaaagcatggggcaagactggaattcttccttgagcaagttattgggttaaggttctagactcaagagacctctgtgatggtttaagtatctttttgta

SEQ ID NO: 9050 - DNA, 201 bp, Bos taurus
tccagcgaaagagcagagcataggatagatgctgatgttcagaagacagatcggtgggactcgtctccgacgtcatggccttggtccccagtgaaagtgagagtcgtgtctgactctctgtgaccccgtggactgtacagtccatggaattctccaggccagaatactggagaaggtagccgttcccttctccagggggtc

SEQ ID NO: 9051 - DNA, 201 bp, Bos taurus
acagcggcatcatccctagggcgagcagcgtggagcaggtggtcatgctgacgctggaaggaaacgggcaagttgacatggccacctgggctttccagggaagaggtggtttcctttctcaacccatgatcagaaagtcctgccaaagactctctccaaactgtgccacccgatctgatggatggaaatatacatgtcccg

SEQ ID NO: 9052 - DNA, 201 bp, Bos taurus
ctttatttttcagggccgaggcactgttctcaggcaccaatgagagggagccacccaaaccctcacttttcctttaaaattcagctcagagtaggattctcggtgacacctccctggcctgcatctgacttaggctcagctgggtgctcctggtctgtgctctcacatcactgctatgaattgtcaccagactgctctgcc

SEQ ID NO: 9053 - DNA, 201 bp, Bos taurus
cgggtgagccctatgatggttctgcttctagaagtatctccaggccatagcacagaaggggggtcaggggaacccttaggcattctcaagctgagaagacgggtctgggagtccagcaaggccaacgtggtcaacttagcacatataacaaaatacaagaaaaaatatttgaaaaaaaatccaacatctgttgcaaaccaa

SEQ ID NO: 9054 - DNA, 201 bp, Bos taurus
aaatctgagtgtgttttagaaaacatttcatctcatacatgaatttttagcatgcacaaataaagccagattcaggacaagatgcctgtatgcatgatccatcactcagttgtgtccgactctttgcaacgctatggactgtagggtcttctgtccatggacttctccaggcaaatctactggagtggtttgccatttttc

SEQ ID NO: 9055 - DNA, 201 bp, Bos taurus
gcattcaattagtaactcacaatgatgtgtaaaattgcacagagtgttaaaagaatttgttctggtgtgcagctataactggagatgtaatttacaagtgaatgagcataagtatgatcattagcatcactgctgaaagtgagccctctccctccccagtgttagaagtcactgaccaacgacctactggggatataccca

SEQ ID NO: 9056 - DNA, 201 bp, Bos taurus
tatttataactaaacaaatatttattcttggaaagatcacaaactagttggtagagaatgcaagcatatgtgaaatgaaactaaatcttttcaaaataacgatttaaaaattagataattctatacatactgatgtatagatatacactatatttattgacacattgtaagtttaaatttgtaatgcaattttcaaaacag

SEQ ID NO: 9057 - DNA, 201 bp, Bos taurus
tcattgaaatttctaccagggtagttggatccactggatttccattggtattgttttgtaattttatgaccatttgcccatatttattttatcctgaataatgcatgggagcaacatttctaaaaacttcatgtagtctgttatatgataaactggtggtaagatgtagaagctgtcatttaaaaatttaaaaaattttga

SEQ ID NO: 9058 - DNA, 201 bp, Bos taurus
aaactgtatcttttaaagtaaaattgcccaatgctgtgagcatcttcaggaaatgagaaatgtgaaatccataaaagtctaagttggctaaaccagatgtttaaatacctcctgtgtaataaataatatgaatagatttttgtgaccaatagaacataatttgatttgaatttgatctctcctcaggattcaagtttaaga

SEQ ID NO: 9059 - DNA, 201 bp, Bos taurus
aatcttatgatcacccaactcaaataatagtgttgagtttattttgcactgtctttatgcctcttatcatttactttaggtaattctacaatttttatctaaactttttgtgttagcatcgtacagtgaactatacttctctagtatacatttgtgtatttgtacaagtaattagttcatccagcacttactaagtgtgaa

SEQ ID NO: 9060 - DNA, 201 bp, Bos taurus
acagtttgaagcaaatgggaacctgacacctggttaaattttgcccatgggtttctcagccaagtgcttggtcagtggctagggtccatggctgggccatccccaggactggagacatccccagggggtgagggtaagctagttatcagaatgaacagtattcacagggccgcatggtggtcgatgggccacactgccctt

SEQ ID NO: 9061 - DNA, 201 bp, Bos taurus
gcccaagaatcgcctggttgtgttcattacaatcctctaacctctacaagaatggaaacatcagtacttgcttaaattctcttcatgactttggccaatccggggaacaagcagcaagggtctttcttctccgtgtttaagtataagcttcctgcctttcctcccaggagcgtggtgggaagtgctctggagagaagaaag

SEQ ID NO: 9062 - DNA, 201 bp, Bos taurus
caggctggaagtaaaagctatccacaattctgcagtgctatccagctgcccaggataaaatccagaactgctgatcctgatggccctgggtgaggctccatgtgtgatcaggagctggaattccccgataaacagttccttcacagtcttgaggtccagatgccagggagattttcaggcctgctccatcctatttgggag

SEQ ID NO: 9063 - DNA, 201 bp, Bos taurus
caaggaaaaagacaaaagatcttctgatccccttggtgggggacagctgtttgaaggaaaccactcaagtgattcttttttccccaataataataaaaatttgttccaaggtgacttgttatgtgaaccttttaagaggttggcttattttttttaattctatttccccaggtgtccaattatttgaaggtataaaaataa

SEQ ID NO: 9064 - DNA, 201 bp, Bos taurus
ggaggacctagcttcagaaagatggtgagttgcaacaaaaattaaggtcacacgcagaaacaactgaagttgtgcacggccgctgtgagccctggaccaatagtcaccgctacctctgcactgtgggtgctggcgactctggtggaagaagtactaagaagtccctgcttgctgtgtatgccaatggccaactgaggacat

SEQ ID NO: 9065 - DNA, 201 bp, Bos taurus
agaactgcacgtctgggagacaacattaatttgtatggcatgactcacgctgaaaaataacaagtttgtagtcaagaaccatgcattcccacttaattaatctcccttgtaactgctggggtggattatcggtgagtcacacacgttttttgtccacaggatgaaggcaggtgtgccactttggttcgctgtatgattttt

SEQ ID NO: 9066 - DNA, 201 bp, Bos taurus
gctgctgcagaggagctaggtcaccctgaactttagaagccccagagcacaaaaagggtagttttcctcagctgggaaaagagagtggacttgtagacttgggatcagaagtggaataattatccaattttaaaaaattactattattataaggatgtagatttctactgtggccaagtcttttgtaatattaatatttcc

SEQ ID NO: 9067 - DNA, 201 bp, Bos taurus
cggcagtgcggcagctggcatcctcccgggtaccagcccaggcaggttccagcagcatccgcggcccgcgccacgcccttgctggccagctccccgccccagctcgctttggcagctgcagctagcctgagggggaactacatttctgtttccaagtgggccaccgtgctcgaggaggccagccgcctttaaccccgcaag

SEQ ID NO: 9068 - DNA, 201 bp, Bos taurus
ggcctgtggtcttagtcccttccctgagtgtgactaactgagaacattcttactggctgtactgtctgctgtttctctctcttggtgggggagtgggtggcgggtatttctgagttctggcctgtattagatggtgtggtgcctggggatgaaaaccattgtggatcttatagaacaaagtccctatttacttgtccctga

SEQ ID NO: 9069 - DNA, 201 bp, Bos taurus
tgagccaggagatgacccgattaactctgtacagactcttgaggcttggctgtgttggcagtatcagagcccagggcccagctttggggtgtgtatggtggtgatccctgaagtctgtaggatgttccagacagggtcctgacatctgatggcagattcgggattctggaggcctgtctgggggttctcggttccagcttc

SEQ ID NO: 9070 - DNA, 201 bp, Bos taurus
attatttgtgaacttagagtcccaactgtagagagagatgtcttgtagaatgcggtaaaggagcctaagaaagcgtgaagcttgggggccaggtgagatagcaaagatctctcccttgttcctctcttgtctggaccttgactagctcacctccattcatgaccgttcctgtctggcccttaaagggacagctctactaga

SEQ ID NO: 9071 - DNA, 201 bp, Bos taurus
ggtgaagttggcagggagagaagacgggtactggagaggcctgctcagaggctggtaccctgggcgacaagaaagctatcacacaggaagaccgatagcacagcgagagcgtggggcccacttgggatgagagaaactgcatctggtaccatccaaactgcttaatggcatcaccgacccaatggacgtgagtctgagcaa

SEQ ID NO: 9072 - DNA, 201 bp, Bos taurus
ttggcaagccactggttagggctccacaccacggcacgaggcccagtttccatcactggttgagactaaggtcctccaggccgtgcagtgcagcaaaagaggcatacataaataagaggaacagaaaaggaaaatatctttatgcgtttgagctgaagaaggccttttctgacagtgctttttaaaaacaaaagcctttta

SEQ ID NO: 9073 - DNA, 201 bp, Bos taurus
ggagtgggtagctgattccttctccagggcatcttcctgacccagggctcaaaaccgagtgtcctgcattggcaggcgggttctctaccactgagccacatggggaagcctaacgtcatctgtgatactctcacaatgcagatgtggtttctgagaatggatggcagaggaccaggtgtccattacctacaatcaaaccac

SEQ ID NO: 9074 - DNA, 201 bp, Bos taurus
cccacggcagctgcagcgccgggcgttgtgaggatatctgatgtaaacacaaaagtttccattttatctagctctgaaaaaaaccggttgataagcgctccggatgcagtggatcttggaaaccatgacctcctgtgtagcttctccaggtgccaccctcgaaggtggacctcagaatcctgatgctatttgtttccaaga

SEQ ID NO: 9075 - DNA, 201 bp, Bos taurus
acacggaggtcctgggtgaggctgatggcaatgagaagcgggagggcaccttttaaatggagtagaaggaccaaacgaaaggacacgggacggaaagacctagccaggagagcctagactcttgttctgtcactagagtggccaggaaggttcctgggacagcctgctgccctggagacactttctctgcaggccccttga

SEQ ID NO: 9076 - DNA, 201 bp, Bos taurus
attaggtctggtacttcctacattgtcttatatcatttactaatattttctagactattgcccatctctttcattttcatcatactttttgggaaattccctcaactttagactataattcctctggtaatttttttcagcaattatagtcccagtttccaagagttctttttcacttgtctgacaatttattttacatcc

SEQ ID NO: 9077 - DNA, 201 bp, Bos taurus
agctcaggggcgctatctcaggagcacgcacggcccgaaaggaacagtcgagtctgttttctcccatgtcaactgtaagacttgttggtctcggcagccaaaggggagaagaaagtgccacggcccatcagctgcctcttctgaacgcagtcaggaaagcccagaacaaatgcacaaggtgacctaaatcgggggcaaggt

SEQ ID NO: 9078 - DNA, 201 bp, Bos taurus
gacacgtctctgccgtttacacacgtaggccttgctggcttcaggtttcggttgcgatacgggatcgtctgagtaggctctccaaagccacacatgggacttggacatcccctggagtagcagtagccatgttatattgcaattatccatttgtgtgtctaagtcttatttgtctttgtcacccagtacctaagagagtat

SEQ ID NO: 9079 - DNA, 201 bp, Bos taurus
tttctcttctctcgctggtctcggaccctcaagtctagctgccctggctgctttctgatgtcgctgaacagattttcttttgcagaggggtgcagaggtaggtgagaagtattgctttaggtgttgcttttctaattcttttctgatttcagaggatacagaaggtttgctttgctggtctggtccctcgtagctggaaac

SEQ ID NO: 9080 - DNA, 201 bp, Bos taurus
aattcagatagagccagaagaagattcaaaagaccagtgaaaaattataacttggaaaagtcttgttttacacatttggccaaaaccaaacatgctgttcatcactgtaaaggatgcagctgctcctccgctgtgagcttgcacttcacagagccgtggtcttcctggcgcggtggccgctccacgctgaccctccctgga

SEQ ID NO: 9081 - DNA, 201 bp, Bos taurus
atttttgtagatttgataaatgtttccttatccagggttttattaggaagaaaaaaaacacaggcttttatttagggaatctcactgttttctttttttttcccaaagatttaactggttccttcatcttcgtgaatgacagacatttataaataggaaactttagaatttccttgaatattgatatcttattgttagttg

SEQ ID NO: 9082 - DNA, 201 bp, Bos taurus
taggaatccgcccatcatccaaacagcgattccagagaacaggctcctcaactggaacgggccgctctcctgagtcgtcgcttcctcggggacctggggatgcgagcgatcagcaccgagatctttcgccccagctcaggcctgccctcacttgcctcttgtggaggctgagaaagaggttttcccttagaccccagaggc

SEQ ID NO: 9083 - DNA, 201 bp, Bos taurus
ggggaatggtgtcacaaccatgtaacatcgaggtgtccagagaactaaaaggagaaattcaattactttctaacccttcctacgtttctactttacacaacgcttcatcattagaaaagttcactagttcttagttccctttcattatagactgtctcatcaaggactccaactcaaactacccacccggccaccagattc

SEQ ID NO: 9084 - DNA, 201 bp, Bos taurus
gggttgcacacttttctcctggttggtacgagaggcagcccagatgtgaagagcgtgatggtttagactctgtcctcaccaagccccctccagggactgggttcatggtgctgtctcgggaactaagtcagaaatcagccttctcatttaactgacattcccagaagaacgtgggccacgctcccatgggagttccacctc

SEQ ID NO: 9085 - DNA, 201 bp, Bos taurus
gcacacacagaaccccagaatccagcagcccgtatggcgaaggaacagacgtgcccatcgccacctggtttagggcttctgtctcagtgctaacttctccgccacttttctaaaaccctcccgtccgtgagttctcaccaccatctcaccatccctctccttcagcccgtctttcaaagactccttttttctcacgcttac

SEQ ID NO: 9086 - DNA, 201 bp, Bos taurus
cggccggttctgcctgtcagctcgtcccctgcagtcacagccaggagctccccccgcatgtccgtccccacgtgcacacagcccggctgtgcaggacgcgtgggactgacggccgagtctgtgtgtccgtctgtctctctgtacctgccgtgacagcccccttttggcgtctgagtcgcggaattcgtcagaggccgagtt

SEQ ID NO: 9087 - DNA, 201 bp, Bos taurus
gacccacgcgtgtgcacacggccctccgtgagcgctgccgctgccgcctgcgcctggactcatggtcacccggggcgccggcactgacggcaggccccacatcctcacgagcaacaccagcggttaacacggggtcacctgatcccagcccagggacgggagcactgcagggacgggagcactgtgtcaccgggccctggg

SEQ ID NO: 9088 - DNA, 201 bp, Bos taurus
tcctcggagcgggacgctcctccaggaaaggacttcctctccccaccggctgcggggactgggcggctggctgatggctcggcccccactgacggagcttttccagttttggaaagtggcgtgtgcctccttgcccaggcagacggtaatttatgctgcgaattcaggcctgggcgtgacgactcagtcctttcaggcccc

SEQ ID NO: 9089 - DNA, 201 bp, Bos taurus
gaaagttacgctgacaaagacagaccaacaggaggaaagcatacatgttgacttaatgttttacatgaaatggaaaccttcacaaggaaacgaaggtctgtggaagtgtttggatggacgtgagggttttcacactggctctgatgaggaatggacagtcctggaggaatgcggctgatcaagcagtagcaggtaagtgtc

SEQ ID NO: 9090 - DNA, 201 bp, Bos taurus
ttcctttggctgctcctgactttggcctgggctgtgacccggagaggaagtgtgttgtaggtgtgcctggcggccttggcctcagtctaaggagaagagccctctctgagtgccaggagtgccccacgtcactaggagggtggggcagggtggttcagaaatggactcagccccaggagcagagtggcctggcctcctgga

SEQ ID NO: 9091 - DNA, 201 bp, Bos taurus
gacacgttctatttatttttaattgtttgctttccttcttttctctttttctgccagtaacttgtttctttgcatcgatggtcggcctgtatgtggacacttctatgacgccttcatctccccccacccactggatcaccccctgtctgtattagcttggctgtctgactcctctccctctgacctcctgggtgagctggc

SEQ ID NO: 9092 - DNA, 201 bp, Bos taurus
ctcaccgggacgcccatcggggaagccggaggaagaggaggtaggcggcgcctccggctggcccaggtggggcggggaaggcccgccctggcctcctgcccgctcctccttttcgtcattaagtttagaacgagtgcgggtctgctccccggcgctgccccggggcccctgcccctagccctcccgctgcgcccgtgaaga

SEQ ID NO: 9093 - DNA, 201 bp, Bos taurus
agacaggaggggggagtggagctgcccaccctcatgcccagagccagtgcctggagtgcccagcaccctctgtggggaagcaggggggggccctccccacggtctcagcttcccctcctgcagcttgctgtgcctggggctgaggtccactcctgatggcttccggaggccaggctgtccctccccgggtgccagcccagt

SEQ ID NO: 9094 - DNA, 201 bp, Bos taurus
aagaggaagccaagacagatccaggagtgtgtcaaacagctaagaaccaggatgtaaaatctgttccaatccccacatcacatgtggcctgtctctctaggacacagagagcaaagcacggtgttcaccccagaacacccccacgccttgaggacatggccactaacctgggctccaccgagctctcctggggtccggtga

SEQ ID NO: 9095 - DNA, 201 bp, Bos taurus
gactcagccccttgggaggccccatgcggtgctcagcacagggtctctccagaatcgttgtcgcgatgacagtggggaaggcttggctgggagattcttcgtgggaagaatggccagagaccctggaggaggtgacgtttaatgttcagcaagctgtgcccagtctactctcaagggagaccttagacacagattcagagc

SEQ ID NO: 9096 - DNA, 201 bp, Bos taurus
atcctcagaccactgactggcccatgtaggacacgaacccaccatgccacctgcaaacgcaagctctgttcacgtttaataaggctacagacgctgcaacgttcgcagcatcctccagggccactcctcaaggtggactgctgcccgcacgtccacattagctcccggtatcctcgagaaaaacagccagagtcctccagc

SEQ ID NO: 9097 - DNA, 201 bp, Bos taurus
gacgtgggcagcgagggtggcccggagcctggtttccttagagtggctgcagtgtgcgcgtgtttcgggaatgcagccagcacgcgggtctctcccacagtgggcctgtcgtttgtgagcctggttttcatccagcagtggcagacgccacggcaacggtcgtccagtttagctcctggagaacaggctgggagctggtgg

SEQ ID NO: 9098 - DNA, 201 bp, Bos taurus
gggctccccgaccctgggcacagtggcgcgggcacgcggctctgacgggagggcggggcacgtggcatagaggctgcgtggaagcccaacacgtcctgtgcgcctgggccagggtcgactcaccttagccggcttcccttcctggaagatgactctgttaatctccacacccccagccctgcctgcacccgcgcggcgggg

SEQ ID NO: 9099 - DNA, 201 bp, Bos taurus
tgaaaactaaagtgttaaggtagctttaaacaaatgtatacacttgaattaaggactttgataaaggatacttctaaaattaaaagaaactattgtatccgatgtaatatttatataacattttaaagctatcatttacaccatctattatgtggcagacactttaaatatacaaagtatcattattgatcttgctggaaa

SEQ ID NO: 9100 - DNA, 201 bp, Bos taurus
gtgccccagagtgtggcagcttatcctgccttacccacacgtggcccacacagtcatccccactgtgacggacttacgtgctgagggatgcggcagaggtcggggcagcgtcagggccatgagtgggcgagggacagtcacgagtgggtgaagatgggccacatgtgagtgaggacaggtgcgtgtgggtgagggacagtc

SEQ ID NO: 9101 - DNA, 201 bp, Bos taurus
tgtgtcccagtaaacctatcgtgagcgaaaatatttaagtcaaaaatgcatttaatacacctcacctacttggtggcttggcctggcctacctcaaacatgctcaggacactaaagtctatttcataataaagtgttgaagagttcatgtgatttattgaacactgtactgaaagtgaaaatcagagtggccgtctgtaca

SEQ ID NO: 9102 - DNA, 201 bp, Bos taurus
ccatgtaatactgttgtaatgataacgcaactgatgtaatactgtacatcaactatacttcgattaacaataagaaaaagtggctggagtgacacacgaggtcaccacgtgcctctgtacagcaggcacttctccaggcgtcagccgcacagtggtgagcagagcagaccagcccaacttcagaggcctcagtgctcttct

SEQ ID NO: 9103 - DNA, 201 bp, Bos taurus
gtgcatataaaatttcgatgtgcaattcagagcaacttccccctgaaactacacaaagacattcattgcagacttgtctccactcaaaataataataatagtagaaatgacctaaatatttgaaaatagactagaaataagatgtgttatgtttttattagaaaaacttgaaagaaaaaaaaattttttggaagtcttgtt

SEQ ID NO: 9104 - DNA, 201 bp, Bos taurus
agcttttaccaattacaggaacaccacaaggcagacagaggaattcaaagaagttatgtccagacaataggctatgagtaataatagaggggagggaggcaaggagacaatgataagagaaactatagggggatccctggtgctaacaatgtttccttttttttttttttcctaacaatgtttcaaaggtctttattctgt

SEQ ID NO: 9105 - DNA, 201 bp, Bos taurus
atgccaagtacttgccttaaaagacacttctatcatctacccaaatcacacatacacaaatcttatagaaataccacagctatcaacaaggatttgggccctaagagtcaaaatttggctttctccaccatcagagtcagcctgaccaaagcttgcttgctttttatcacagtagtaattttggatttcttcttgtaatca

SEQ ID NO: 9106 - DNA, 201 bp, Bos taurus
ctgcatctctgactggttttgttggcagatttagctgtcatattcattagtctataacttgttatcttcatcagtaattgtaccttttcttgtgcataattttcctttatcctgttagcactttcaatcttaaattctccttctttacattgttattacaaaatttatgttctttttagttttgattaccttggagctacc

SEQ ID NO: 9107 - DNA, 201 bp, Bos taurus
caatgtatgagcattctagttttttcacattctcaccagtacttggtataattacactttttatttccagcaattcttgcaagtgtgctgtgctatcctactatagctttaatttgcctttctctaatgactaataatgttgagcatctttccacatgtttatttcatgcaccttctatgtgtcttctgtgatgaggtgtc

SEQ ID NO: 9108 - DNA, 201 bp, Bos taurus
cttcttctccacaagaataatattgctgcttcataagaatctggtgaggattaaatgagatcacacacctgaaatgtttggtatagcacacagagtaaactctcagtgcttcagttcagttcagttcagttgtgtccaactctttgcgaccccatggactgcagcacaccaggcttctctgttcatcaccagctcctggag

SEQ ID NO: 9109 - DNA, 201 bp, Bos taurus
aatcttgtgaatctcaaaaggccataaaaatctgaaaacttcaacagcttatgcaatctgtttggaattctagtttgaggctcaggcgggcttgtgaacactgagagatctgggcctgtcttgacaaacttgaatttgctgtatgctctgtgactatcagccttgttttgattatatagaccaagtgctctgggcatagat

SEQ ID NO: 9110 - DNA, 201 bp, Bos taurus
cagagaggattgctggttttctgagccctagcagagtaggctctcttgctgagatcaggtgagcagagacatgaattaagggaaggggaaggattccaggaagagggtgcaataagagcaaagaccctgaaataggaacaagcttggcatgtttgaggaaccaactctgtgcgcagtgtggctacagcgaagtacagcaaa

SEQ ID NO: 9111 - DNA, 201 bp, Bos taurus
cttcctctggaagtgtatatactaagattttaatagtaattctctctggatgaagagttaggcatgttcagaaaaatttcagttttcttccctctctgctcttgtcatttcctattttttcttccataaacatatactacttttatattaatagaaaactttttcaacaaggaaaaagaaatactatcctctaatatttac

SEQ ID NO: 9112 - DNA, 201 bp, Bos taurus
cactggcctagagaatggcaggagacagaaaagctgaagatgaggagaggttagtactggacatggtatgattgaaatctaagtagagaagttaaggaaatggtgagatatatccatttggaattgagagaagtcttctggaggaaaaaaagatttgaaaatcatatataatataaagatggaagaatgcctgagcattaa

SEQ ID NO: 9113 - DNA, 201 bp, Bos taurus
taagaaatgtaagaaatgtgatgcaattcatgacattactggcaaaacagaacaaaaagcctacttttataatttcctcattctgcgctctagcaagttcgataagaaagttcagcaagttcaataagaaagttcagaaaatttatctgaagaaagaatacacttcaaacggaagaaagcaggaatattttattttaagaa

SEQ ID NO: 9114 - DNA, 201 bp, Bos taurus
gtacattatatctcggtggagtactgacttggagctccaatagaaccccatgcagagggaaggaaggagggatggaggaaggaaagatggacataaaagcgccaccagttgtttgacctgagctgtcagagttgagtcaaactcttcgcacaatttttcttttttaaaaaaaatgatttattttaaacaaaagaaagatga

SEQ ID NO: 9115 - DNA, 201 bp, Bos taurus
aggaggggacttctgccaatattttccctctctcctttgtttctcccccaaagagaaagctggttaatccagctgggcatatattaatctttactgggcctatttcactagtgggccaagttactgtgtccccaaagcctcatctgtattttctctctttaacaacctgtttaaatgcagacacagacggtcctctcactt

SEQ ID NO: 9116 - DNA, 201 bp, Bos taurus
cacatgtaaaataaaggagaattcatttttaaatggcttaacaataggcaatgctctgtccccaggatatacatattttgaaatcacttttgcactaaaactggataatggtttctagccttggaatgtaagtaccttgggaagcaaacacaatctattcaccacctcacaattaaattaaaaggcagaactcggttagta

SEQ ID NO: 9117 - DNA, 201 bp, Bos taurus
cattgcactggtgaatccctcatctgtaccaacatttaattttacttaactcacttctgtttctatttattttttaatattaacccaaagcctgaatcaacctagttctaatgctcataatcagatgggtctggtgcactgaaaaagtgtggctgtgctctcacagaatgacactaaagtaagaaaaagagaagtaagccc

SEQ ID NO: 9118 - DNA, 201 bp, Bos taurus
gatggagaagcctggtttgcctggtagagtcttgggagattttatggacatgaacccaagggcgtgagtagaaaatcatttcccccataatcttcttctaagtttcctccctagataacagcccacatctcgtgataggtggtaggagtctgtgtatgttaaagttatcattttatcatctgtgatagacatttgtcacaa

SEQ ID NO: 9119 - DNA, 201 bp, Bos taurus
aatagaaatgtatattttatgtttcttcaagttcattagtacctttactagtgttgctgtttcctttcctccatgattgattatctgaaatatttttctacaaacatagacacacatgtatttgcctcaaatctggcccaaattattatacaaatggatcttcatttgttcccttcactcatttttatttcctttatcaca

SEQ ID NO: 9120 - DNA, 201 bp, Bos taurus
actcacttatccattggccgtgcgttgggggataaggtggcccagtttttatgcttctgattgaatagctaagcagctcatcctagcacagagagctccatggtgggtattgtgaggcttcaggcctggggttgcttctaactaatagtgggaccttaaaaggcattttccttctctacgtcatgtttctttatctatgag

SEQ ID NO: 9121 - DNA, 201 bp, Bos taurus
tccctggagcaagcggtgagctgactgcaataggtttactgggttgcaggctttaaacttggttggaaggaccaagggcactcttcttttggttttgatctgtagactttggggataaaagggaagcaaaaaatacaatttttgtgtgttttgaggatttgcaggagaggaagaacagaggaggcagatctgtctgaacct

SEQ ID NO: 9122 - DNA, 201 bp, Bos taurus
gcagcggcccagtgaacagtcatgtagttgcatcggggattattacaagtgtgctagactccagacacttctcgtgtttatggtcatgcccttggaaccacgatgagaaccttgttggctattcaaagcagagccaccatgcaggcttttgggtgaaaactgcttgttaaaatttcaagggaggcagaggttggagagatt

SEQ ID NO: 9123 - DNA, 201 bp, Bos taurus
catataattctcagatccataacttgagccttgaccttacttttcctaagcactggtacttctaagagattttcagttaaacaaatggcccaagtgcacattgtatgtaattgatcaaaaaatgaagacctttcctacatctgtcctccttgtttaacagtctgtaacaggtgctaaaccccagggccatcttgtatctgc

SEQ ID NO: 9124 - DNA, 201 bp, Bos taurus
aaggatggactgaggcccccgtttaagcggagaaactgaggctcagggaggtgaagtaaccagcccgggctgtgctctggtggctgccagcactgtgaccggagcctgtctttgggtatcagatcctgtactcttagcatcttcaagtctctcagctgctcccgctgagagactgtaccaaacacatgaaagcaggggcca

SEQ ID NO: 9125 - DNA, 201 bp, Bos taurus
caccatcatcatcaataacctgcctctgattccacagctccctcccaaccttaaggcgcccactcccagtagagactgtccagagcatctcactgaatgactgtcattcacctaaggccctcaaacccccagaagacctgaggatgatgcttggcagcagggggataaatgtatccagtgaactaaaggctttcaggaaca

SEQ ID NO: 9126 - DNA, 201 bp, Bos taurus
gagttattccaactagtttcgagaaggggcagaaatttttatgaattgggccaccaatcacttttattttacttattttttaatggttggcctcagaactatcaagtgctagtgagtgtgtcattaagcatgctaatatattcagttcagttcagttcagtcattcagtcatgtccgactctttgcgaccccatgaattgc

SEQ ID NO: 9127 - DNA, 201 bp, Bos taurus
gccctcaaatttggactggctgtgtgatttgctttggcctacaaagcagaggtgacatctgagcctaggctgcaaaaaaccattcacgctcttaaacttttctcagcccatgagggtgggcctggactagtctgctggagaactgagtttcccaatcagttaccagatatgcacctcagactgtctgaaaggcacctgaag

SEQ ID NO: 9128 - DNA, 201 bp, Bos taurus
tttgagcaagttccaggggatagtgaaggacagggaaacctgatgtgctgcagtccatggggtgacaaatgttcagatatgactgagtgactgaacaacaacgacatattagaacaaacagttgtgtccctgcagtcttctgattcaaagatgaaagcacatatgcagatgcgttttaaggtgatttccactcagaatgaa

SEQ ID NO: 9129 - DNA, 201 bp, Bos taurus
gttggttctaatgagtttatgtcacgtccttgggatatgtcattcttttaaaggttgtgccctgccctcttcctgtctcataaggacatattgtacaacacggtaaatatagccaatattctgaaataactataatggagaataactttaaaaattgtggattatggacttccctgatagtctagaggttaagaatctgct

SEQ ID NO: 9130 - DNA, 201 bp, Bos taurus
atacatatggcacagtggccctctaaaatttcacctacccattcacaggtccacagagaaaccccacagcatcgtgtagttgctccaaaactttctccatggttgggcgtgtgcattttctttgatagctgctttcatgtttggtctatggtgtgcctgcatatcttttattgcacttatgttccctaagatgaactgaga

SEQ ID NO: 9131 - DNA, 201 bp, Bos taurus
tatccccatttcacagatgaagagaccaaggcacaaactaggtcggtgacttgtcaaggtttattcaactcctttgtgtagataatgttgcagaggaggaagaaacacaaggtgggggcgggggagcaacagatctggtttcccatcatacacccttttcactgtacctctcctctttgtaaccaatcactcttgcctcat

SEQ ID NO: 9132 - DNA, 201 bp, Bos taurus
tccttggaggcctgggaaagatgcttggacgtgatgtgatgggagtccatggtgttatctataggaggactgatggagaggagtcaaaggggctgatccagaaggagaggagccagaggggctggccacagtgatccagacagcaagaaagagagcctttcacagggaagactgtcttccttgtatccatggtaaaccagg

SEQ ID NO: 9133 - DNA, 201 bp, Bos taurus
actgttctagcactgtgctagaacagtgaattcaggtaacaacttgaactcaagtaacaactcagtgagatatgaactattatgatcacggtattacaaatgagggaactgaggcccagaacacttaagacccttggccaaggacccatagccaggaaagaaaatcaccaggattccagggcagagcctggcttcagaatc

SEQ ID NO: 9134 - DNA, 201 bp, Bos taurus
tgcaggcagggggctgtgccaggcccatgctgcccctcaccaccctgttgcttgctgctcacaggctctgtacgtggcgcaggctggtctcctaggaatgatggcctgggggttccactgaaaaggagaaattttggaaaatcattgaggttagtgtttaaagaaatgaagtcagttcttacctttccaagggagtgactg

SEQ ID NO: 9135 - DNA, 201 bp, Bos taurus
aaacaatattaacccctgacgtgccggttactccgattccaacgggagtggctggccccctacccgagggcgttgtaggacttgtgctggggcgtggctcactttccctttaagggatttcggtggtgcctggtgtagtagattctgattatactggggaaattaaagttttgatctcgccgcctactaaaactatgcaaa

SEQ ID NO: 9136 - DNA, 201 bp, Bos taurus
agattagggcatactaaagggcagagaaaaacatctagcagttcatgttccttgacctctcagaagcccattatgtaggcctttaggttataaagggtcattttccttctcaacacatttcccttaaggcgtaaatgtttggtaatgtgctcattaaacattaaggcctcaaacaagcacaaacacccttttttggtacag

SEQ ID NO: 9137 - DNA, 201 bp, Bos taurus
agcgtgggcactgggcacagctgtgggatttctccatctgctggccttcaccctggctcatctgaaagccgtagggctgtgcctgtgaaatggcttttgttctcacattttaggtgctctgagggccccaaatggcaaaatggagaggagtagccagggaagagggcccagtgaggctcccttagtctccagcaggtcttc

SEQ ID NO: 9138 - DNA, 201 bp, Bos taurus
gagattcaaacaagaccatggcttagaaatgctgaagcctgctataaatgagatgcaaacagctgtgcaagttcagagtcagtaggtcagaagttgaagaaaagaaggaggcttggtggggaagggcagcccaactcctggagggcataacaggtgatagaaggttcaggaaagcagcatctggggaaggggtgggaactc

SEQ ID NO: 9139 - DNA, 201 bp, Bos taurus
gtaaattcctcccagtgggccttgacttgaactttccgggcctggaatatctccctcacagctccctgacactcctgttaccccaagggtgagaggaagcgacgtgagtgaaaaggggccccatttccctggggttagcatgggacacacctcatagtcacttgtcactttgaaattcccctctcccaggagtgcatagaa

SEQ ID NO: 9140 - DNA, 201 bp, Bos taurus
aggcatgcaatgttttcttggttattttggtaatggcagcacctttagcagtttcattcatgcagtcaggaagcaggttagtgggaagctagaattggaaagactgatatggggaggagaaatagagaaacaaaagctaaatttctcatttttcctccaaccttaacagagccctcaagactactctggattgtgttagat

SEQ ID NO: 9141 - DNA, 201 bp, Bos taurus
gaattcactgggttcttgaatggcccagtaatcatcttggcttccaacattcattttctttttatcactggaaaataattagattatattctaactttttcctaaaaaagtcaaagttgttcattaatattgagaaaatggggcatttctctgttttgagtggacagaaacgtgatcttttccagaactgatattaaagac

SEQ ID NO: 9142 - DNA, 201 bp, Bos taurus
cacagaagttctcccctacatatccataacccttgtccttgaatcttgtcttagtctcacattatagtttccatttagttatttgctgctccactacatacaaactgttaagataaaatcattttttaaagtatttatttatttatttatttttatctgtctgtgccaggagaaggaaatggcaacccactccagtgttct

SEQ ID NO: 9143 - DNA, 201 bp, Bos taurus
ctttggcaggtttaagagcctgacaggtgagtggtcctggcttctgagggccaggctgtaagcgagcaactggcaggccagtgctgctgacaaggagccgtgttctgaagcaacataatgcaacctaattgttaataacaagtgtcattactgatgccggggttctggctcaacgttgagcccactgtccagccctcggcc

SEQ ID NO: 9144 - DNA, 201 bp, Bos taurus
aatccctatggacagaggagtctgatgagctacagtccacggggtcacaaggagttggacacgactgagagattaagcacagcattacttacccatcactgtacaacaaattacctgaaaacagtggcataaaacaacaaacatgtattatagtttcgctgagtcagaaatctgacttaatctgggtgcttttgactcaga

SEQ ID NO: 9145 - DNA, 201 bp, Bos taurus
atttatttacattctattgagttttaacatccttggtttttactagccagttagctctgtaggactagaacttgaaagagatcagttaagcaatctgggcgatagcattttcatctacttgtagcaataataaaatattacttacagaaattatgtatagaaagtttctatacattttaggaatagaaaatatgtagtaaa

SEQ ID NO: 9146 - DNA, 201 bp, Bos taurus
tttttaacaggctgaggcccaggaatcatttcctattggatgcaaagctcttcatggaggaaccaaatctttggtctccccggaggtctcagcatctctcgtggccagtccttgtcctgggacattaggagtttttcttgtttgtggaagatctctgttttgagtgtgctctgcacacccccagcgcagcctgctggggag

SEQ ID NO: 9147 - DNA, 201 bp, Bos taurus
taatttaccactaactttgtgatcttggttatatcctagacttgtacctcaatttcctcatatataaaataggaaattacatcttctacatttatagaatgtggtgtgggctctgaaagacaattaaaataaactgattagtaataacttttaatggagaataatatgtaaaattactgaatcattattctgtacacctga

SEQ ID NO: 9148 - DNA, 201 bp, Bos taurus
agcccagcccgattccacaccccgtcaacccactggcccctgtgccctgtcagaagtcctggctcaccgaggctccttcagtggccaaccatggacttcaatgaataaggcctgaattctcaggggagcagctcttagtgatgcatggtgggaagttggcatggggggtgtgaagactggagataaaaagtattcctacct

SEQ ID NO: 9149 - DNA, 201 bp, Bos taurus
tcacatggcctgaagatgaggacacagacatctttggcaggggcattgttctgtctaccctggaaccatcaagctagatcacccagaagaggagacctgcgtcttcctggaaggcccccctcaatgcccttgttgctctcccttactgacggggggcagtccccgcaagggctcatggagcactcaggcagagatccacga

SEQ ID NO: 9150 - DNA, 201 bp, Bos taurus
tgcaccccacccagagtggtctcacctgaagggggaagactgagacctgcccacgtggacagggacttcagcctaattctgacctgctctgtgaatggccgagcctggtttccactgacagagagggtgctcgggaagacagtcagaggtgctcacagtgaggagcggtcagtgcccaggggaagaggagaccaggagaca

SEQ ID NO: 9151 - DNA, 201 bp, Bos taurus
cttggcccttcaaatacatggcacagttttctatgtgttttctctttctctctggctagaagcaaatgaccccatgatggcagagccacaccatgaagagtctgggcctctgagtcagtgcttacaggatgagggggccaggaggtcctcttgccggggcagtggcatgtgagttaggtcacctcctgggcttacgtcact

SEQ ID NO: 9152 - DNA, 201 bp, Bos taurus
ccaacacacatctcatgtctagctcaaattcaagacgtggggaagtagattcccaccatttatgggagaagcttcaaagtcacaatgagcaggggcacattaaggcatgattccttggggccatttttcatattctgccacatcacccatgaatgcccccacatagcaccctctgcttgtccccccacggatagatgcagg

SEQ ID NO: 9153 - DNA, 201 bp, Bos taurus
aaattttgaaatagtcacacatgggatgaataatacgaatgacctacaaccaaacccaaaatctgaatggagttcagaaacttaacactgagaaaagaaaaacagaaaagatatacagtgtatgattacatttatagaaaatctaaaaataggcaaaaaaaaccaatactgtcagaaacaagtaaggtgttaccctgggga

SEQ ID NO: 9154 - DNA, 201 bp, Bos taurus
atgttcactctggctgctgagggtccactggagtgaccatccaggtttaggaaccagcaacttcagctgtgaaagggaagaagagtccccgagcctggtggtagacccatccttatgtgtttgaagcccccttttctgtttggggcagaaggcagggcttttggtgatgcgtcaccaccgctggtatcacaaggcggtttc

SEQ ID NO: 9155 - DNA, 201 bp, Bos taurus
gaggtcaccatgagttcagtctctccattttatagataaggaactgaagcccagggctgtgactttgcttagggtcacatgattacatggtgggagagccgggaccagaagccatcctcctcttcttcctcatcatcattattaccatcatcatcctcagtgttttttcccacaactagcactcagaaacacatgtgccat

SEQ ID NO: 9156 - DNA, 201 bp, Bos taurus
gcttgaggtacaggccagtggggagtcagtgagagaaacagagtgtgtgtgacagaggaaggagagacagtggggcaggaccagcattctggttgttcccgcagggacttggtgttggggccatcaacgtaacttgggcagttctgaattctcctcttacagcatgtagaacagaaatagctaatagcaatgatgactgac

SEQ ID NO: 9157 - DNA, 201 bp, Bos taurus
gtggtacaggagtgcttggaaattctctgatagtctaaggggcgtgttgatctctcctaggtttacatttcaaagcctggccacccagctgtgagttgctataatagaatagccacacttcccggaggctgctgggttgacaagagtgattcattacatcttcggggcacaggttaatgaggttgacttgccttagggccc

SEQ ID NO: 9158 - DNA, 201 bp, Bos taurus
gcctgtggccagctggagggtcagctagagactcactggtcttgattgatttcacttgggaaacataggtcttttccatatgtctctcaaatcttttcaacaggccagtgtggacatgttctcatgatgcttgcagaaaaccaagagtagaaagttgctacttgtgtcacatatcctttcatgcgtcaactgaaccagtcc

SEQ ID NO: 9159 - DNA, 201 bp, Bos taurus
atcctgcatgggaaatacctcctccatttagaaagttaatatccataattatgaacacttatgaatttagaggcagttgttaacattaaagaaatcagtaatgtgaacatatagtcacttaaaatgtcctctcctgtgtatgtgactgtagtattattttgcccctgttaatagcacacacttgattatttctaaaattgt

SEQ ID NO: 9160 - DNA, 201 bp, Bos taurus
tactcttgacttcaaggcccatgcagtgctttttacagcttattgggtaagtacatatttattaaatatatacattttaaggctggttctcatcagattacagtaatgaggccaaagggcaaggtattgctttaaattatcctttttttaagaaaatagatagcatgggaaaaatcagacattcggcaaagtcagagccaa

SEQ ID NO: 9161 - DNA, 201 bp, Bos taurus
gtgttgaaggagaccaatttatttagcctggctctactaggaggcagaaactatatgccctttgtcattatctttgaattagcccctttggtggttgaatcggggtcaggggaagatagataaaacaaagatttagaaacagagagagctttgattgctgccttcataatttacttattataaattattggccaattattt

SEQ ID NO: 9162 - DNA, 201 bp, Bos taurus
aactgagctggggttattggttggattgccagggcaagattgcaactcatccctctgattacattcaaaaatcccccctcggaaaacgacgagactgcatgcccccatgacttgacttcattgcattctacattctgttccctagagtcgcttcttctctaaggttttttggtaagaaaatctatacttctttagagaggt

SEQ ID NO: 9163 - DNA, 201 bp, Bos taurus
catcctgttgccttcctgaacatctatggcttaatcagagcttgcagtggccaaaaaaagtcatcagtcatggacaaaagcttctgtaaacactagtccagacaggacagattaggaaatcttgaaactggataatcaatcaagagaacaaatactccttagcaaacgctgtaatattcacattgggcttccagttaatca

SEQ ID NO: 9164 - DNA, 201 bp, Bos taurus
atgaatatgaatacccaaacatgaagaatccaaaaatcattagagctagagagaaaaaacgtgcttccaagtacgatccctcttggaggccctcaggaatgattttcttggaacacagtgaatgatgattttatgtatacttccaaagaacgtaaaatctggcccattctccggaatgcataccaatagtagctacagtat

SEQ ID NO: 9165 - DNA, 201 bp, Bos taurus
gttgactgacatgcggacaaacgtttgccccaactgttccctggtgcttctatcaagaggatggagggaacttatgcacaaatgtccccaggagcaaagttcaatgactacaattcataaggtaagaatgacagagagaaaagatccctgcagacagaatttctagggggatcagaggaggtggtagagataggaagtgat

SEQ ID NO: 9166 - DNA, 201 bp, Bos taurus
gtctgggcctattttcttcccaaaaggcagtctgttgctcctagcagtgcacaaaaccagtctgagccatggcccctccgccaggatgagcagcccaggctcctgcttatctcttgctctgcccttgggccaccagaatgatggccaccagtaatgtccatccagatgaactgctatgcttgcggacactttggagaacac

SEQ ID NO: 9167 - DNA, 201 bp, Bos taurus
tggggttcttagggcatgagccacccatctccttgtatgaacctgtagtcaattcttctcttttccaatctctaatgtcttagtattgattggcctcaccgtgcttggggcacatggacttgtgatttggtaacagctgtgcttagagagatttagcccaccaacaggcccaaagctcaatctagagattgagatctagag

SEQ ID NO: 9168 - DNA, 201 bp, Bos taurus
gatgttattcccttaagaggatccccatctccatcagctaattgctcttgaggatcttatccatgcaaacacataaacacccgtttaaactctcggccttttaaaattaaagagggctgtgggaatccatgttacaggtcttgaagtgagctcctattcccgcgtgcctcttccccttgactttatttattggcctgtgtt

SEQ ID NO: 9169 - DNA, 201 bp, Bos taurus
gtgtgaacattagcccagaagcctggcaccaaaggcggaagccagctctgctcttcatgctcagccctggctggaattaacagccctttgaaggagatgggggtcatggaatgaatgccaagatgtttaccctaagagcctcctgtccgacttcctcagaaaaaccactcttgtccttgaactccaggttcagggttttgt

SEQ ID NO: 9170 - DNA, 201 bp, Bos taurus
ttgaaaactcatgatggttaggactgcgttaaacattcctaaaagatggtttctttgatgtccactctcacgtcatttcgccagggcctcgtgcaccaccattgtccaccactgagtcctttgtttgtggatctgggtcaggaaatcagcgcttggggtggcccagaagacagggtgcttcgggaacgccacaggacactg

SEQ ID NO: 9171 - DNA, 201 bp, Bos taurus
gctccttgcctcttaatatcagacattactgacaaaatgaactgagagttagaagatgaggtgaattgggagctggggagggttcctgggcccttcacctgctgggaacaccactagcttcccacccatcatccagacactgccatcctgtctggaaatttgctgaactataatttgcctctatccagatgtccctcattc

SEQ ID NO: 9172 - DNA, 201 bp, Bos taurus
agagacccagagagaacgccagacgcccagagggccctgaccgtccaggcgcactagcctacagagcccgagagggctgccaaggccaacgcaagaacctcagaaaagaggaagccacacagttcccggcactcacagaggggagagtaagtcagctcccaccagcccgagtgaggacaccaggaaaagtctcagaaggta

SEQ ID NO: 9173 - DNA, 201 bp, Bos taurus
catagagatgggcggtgactacatggttaggttcatcgtggatgaaactacaccctagttcctgataaagataaaatatttgctggccaccttctccaggggttggcttcaagtgagacgtcagtgaaacagaagtaaactgcccgcggattattgaccagtttcttctaccgtgaaccttgtatcataccagcttcctca

SEQ ID NO: 9174 - DNA, 201 bp, Bos taurus
aaggaccagctgtttgagttaaatagaccaaaatttcaaaaaagaactcagcaaggataatagttcgcagactcttcttgttctctgagaggtgttttgtctttggaggactggagggcagaggggcaagaagcacgggctgttgagactgtgtttaccgagagctgaaatacgccatgttcagagtgtggcgggaacata

SEQ ID NO: 9175 - DNA, 201 bp, Bos taurus
ccatgcccccggcatccctatgcagtcggagtcctgggtcccctttccttctgttatccaaacagcttcctacctcagaagcccttctgacaaaagactacgtgaagaaatgtacacagcctagaatggatgggaagtatccctaatgggcagattaagtaacaaggctcctgtttctctagtctcctcttagatcatgag

SEQ ID NO: 9176 - DNA, 201 bp, Bos taurus
gaatctattaccataatcaagttaatagtattttaaatgaatgtttacttcttattactttgtgtcacaaaatacagttagatgtttgtctacatacaaacggtttaagagtatttactctacaaatggctctgcatgaatcttttgtaagaaagagtttaacttctttagcatgtccaatgagtcagaattcaatagtat

SEQ ID NO: 9177 - DNA, 201 bp, Bos taurus
tactacattctgcctggccccttactacttttgagagcttatgtgtaatggcttaaaccttatttaagccattaatggttctcaaccaggagttactttccccttccaaaggccttctggcaatgtctggaggcattttggtttgccaaaccagtgggtgggatgtggagaggaaggagccaccactagcttctaggggct

SEQ ID NO: 9178 - DNA, 201 bp, Bos taurus
tcttaatttataaaaattcatacaaatcagtaagaacaaaatatataaataacccaagaatatggcaagtcactgaaaaagaagtatacctttataaaaatataaaatgaccatcttcagtctcataaagaaacacaagtcaaacaataatgagatgccatattttgattaaatgtatattttgattgattatcagattga

SEQ ID NO: 9179 - DNA, 201 bp, Bos taurus
attgtcagaaaatgtccttgtgtcagatggggccacagcttatagtgaaaacaagcctcttagtgcttctgcagcatatgaagagacagctccactttattagtgagattacactggccaaggatgactggctgtctcaatcacctgcaggccaatcatgaagcaattgccagggtcactgggcaacccagtccaattcag

SEQ ID NO: 9180 - DNA, 201 bp, Bos taurus
tgatgtggttgagaaggatggcgtggatgtggatgaaccacagaggggagagggaagggagtcagggccgtcctttttcctcaaatggcccttcttttggggtcccgtagtcagtgagcttggtcatcaggtcgttcagagcctccttgtccaggaagcagtatgactgagggcctttttctcaaccctgcagttggctcc

SEQ ID NO: 9181 - DNA, 201 bp, Bos taurus
gaataatatcagttcttttcggtagtaacagttccctggaacattgacctgacgttctatccactcttgtacctctggtctccccagggccatggattcagggggcatggtacgcagagggagggtctcaaagtcaggatggaatggaggagggggaggagggacaagacagtggctctcggctccctacctggggccccc

SEQ ID NO: 9182 - DNA, 201 bp, Bos taurus
gaggctttccttccaccacacgtggaggggcccacactggtttgcattcagttttgaagagctgtgcttctgttcatttttctgtgtgttgtggatgatgctgtgatgcggccttgactaccccacacccagagctccgtgagatccaaagaacagatgtgccaatgaaatgcttagagatcttctgctgtagattgtaaa

SEQ ID NO: 9183 - DNA, 201 bp, Bos taurus
atcaagtcacgtgttccaaaagtcctttgaactccaagcagaataattcccaaaccatcatagtaaaattgctgaaagccagggataaacagaacatccaaaagcagtcatcaaacaatcggaccgatagctgacttttcagaagacatgatggaaataaaaagacaatacaaaagagtcactgccacccaagaactctaa

SEQ ID NO: 9184 - DNA, 201 bp, Bos taurus
gaagagatggccccagcacgtctgcactcggagagccatgtggactgggtgtggctccaggtcaggaggctcaaggtctaagaggaccaaggaggtgggtaaatgagaggccacagcttcagaagggagccactcaagcctcactccagtcaaccgaaggggaaccagtgcaatgcaacattgctcatcacctgcatcctg

SEQ ID NO: 9185 - DNA, 201 bp, Bos taurus
agctgtctagtttcgtgtggcatgtctcatgcaattcatccgatgtcagctgaggctgcatcatgtgaagattcggctggtttggaatattcaagttgattcattcatgtggccagctgtggacagtgctgcttaggtgaggctgtgaactgaaatacctccatggggctttggcattcacagtgtggcagctggctctaa

SEQ ID NO: 9186 - DNA, 201 bp, Bos taurus
ccctattttgccccaaattaaaactgggcctggggtgaggcgctgacgcagagaggagggacagatgagcagcatagcaaacatatcaggtcaaaacacgcaactattctcttccacgccgagaacactgggcatagatgctgcatgtctttgaggagccaactcattacttctctctcattgaacaggtctgcagataca

SEQ ID NO: 9187 - DNA, 201 bp, Bos taurus
aaagcggtgaccgatcgttatttgatcactagcttcacatgctgctctgacttctccctgaactgatacgtcctggaaatggccttaaaacactgcacacccttcactaaaattaaaaataaaaagagagaacaacattttccttttaatatccagtggcctgctgttttatttttttactctgtaactgtccaacatatc

SEQ ID NO: 9188 - DNA, 201 bp, Bos taurus
agcctacccagagtcgaaggcgccaccatcaagcacaacgaagctggtacctgaatcctgggacaggaaatgggttccaagcggggagatgaatccacccatgtaaacacgctacatactcccaaagattcaaacagccccacaacactcaacagatgggaacgtgcttcttaaattgaagacaaccctaaacacctgtgt

SEQ ID NO: 9189 - DNA, 201 bp, Bos taurus
accccaaattcatatgttgaagccctagtacctcaaaatgtaactgtatttggagaggggaccttgagagaggaagttaagttataatgaggtcatataggtaggccctgacgctacataactggtatctttataagaaacggaaaccaggacgcagacgaacacagagggaagtccacatgaagccaaagggaaagacgg

SEQ ID NO: 9190 - DNA, 201 bp, Bos taurus
catggacatgggcatgaacagtcccatcacctggcattgacaatggcatgtggaggagctcagtgacgatttagtggctgaatggatggagaggttgagccaagagtggcacccccaacattagctacactagaagccttccctgctgctgccaagtcgcttcagtcgtgtctgactctgtgcgaccccatagacggcagc

SEQ ID NO: 9191 - DNA, 201 bp, Bos taurus
gccccacctccaggtcttttgatttccatagatctggggcaggggggtgggaggctgagggaggaggtgaaggcttttcctccctaaaaagtctccagatgctgctgctgctggcccaggtcacactgagagcagaccctcagtacaagattgctaatacttcagacactcaccccaccctacaccttctctttttattct

SEQ ID NO: 9192 - DNA, 201 bp, Bos taurus
tcccatcatttcagatgtgaatttctctacctgaatccaaggcccatcctgcatctggctccaggcaacctgtctaacctgatatcccccgtgtgtccctttggtgccagctggccttttcaccaattataatatgctagccagttcctcttgatgttggcttctggaaaaccattcctttgccatcttccctgtgtcctt

SEQ ID NO: 9193 - DNA, 201 bp, Bos taurus
ctatgccaaaaaataacatttgggatagttgtctttaaaggactctgttatttatagctttcgttttgataacatttggtcagttcattttaatagttgggaaagcggaagtgtatgtgagctttttgtaaaggatttaaaagattacctagtctctgtttagccttagtgaactgtgaaggccttaattttgtacaataa

SEQ ID NO: 9194 - DNA, 201 bp, Bos taurus
tggccccatccctggactcacagtgggggctggggtttgcaaggttctaggatgttctttacctgcatccctaagagctggtctcatctggcctccttcccctgtgatccatctgactgtgtattagcacgagagacttcaggtcttcaagaaatgaaacaggccataggctttgctttgtctcccccaatcctgggctga

SEQ ID NO: 9195 - DNA, 201 bp, Bos taurus
tctccagagctgtccaggaatttggtctcacacggttcaaaagcaacgtgacctagactatgaagggttttgaatacaccttggccaagctgcaaggtgcagtccctccaaaaacccttgttgaaacagccaacgaaacccaggagaaggcaaaggagacggcactggcagctacagagaaggccaaggaccttgccggca

SEQ ID NO: 9196 - DNA, 201 bp, Bos taurus
tgggctcagggataatgtaggtggaggcccccagctggcagaaggagggctgtgggtgatggggggacagaggggatcttacaatcctgcctggggtcctgcaaggcccaggactcacctaaaagattattttttctgcattttatggaatgtttgcaagacagctggtggccaacacatgacttgggatgtcaattccaa

SEQ ID NO: 9197 - DNA, 201 bp, Bos taurus
gtgttcaatctgactgactaatgttttaagatagatgcttaggacaaggggcatgtgagtcaatatgtaagccagtctaagcaaacagtgcggcggtgtctctggcttattgcctgccttcccacggaacatagaagtggtgtgctgggcttccctggtggctcagtggtgaagaatctgcctgccactgtaggagacatg

SEQ ID NO: 9198 - DNA, 201 bp, Bos taurus
gacttagcattggaggaatcacaaatcctcaaactacttgagatattttgaggactagcggaaaaagaaaaagcaggtaaccctcagtctcctgaataaggagtggccaaaataattatgacctcatggctatctggccaccttagttttgtctattcttccagcagtttctgtagatcaaaatgatgagagaaaaaagga

SEQ ID NO: 9199 - DNA, 201 bp, Bos taurus
atgtctggcccacagttagtggatcaaatcactgacgtaggtcagaaatagctggggcttccctgttggctcagaggttaagaatccttcttgaaatgcaggagacatgagttcaatctgtggcctgggaggatccctggtgcagcggagcaactaaccccgtgtgctgcacctactgaagcctacgtgccctagagcctg

SEQ ID NO: 9200 - DNA, 201 bp, Bos taurus
actgagaatcccgattgccagaactaaacccaactaatcccacctgccttctggaagcacgttcctcctctctcgtttttttggtgcttctccggccacttcttcctgactttggggatgggctcctcgccctctgctcacctctagatgccacgatcctcagggttctctcttcttgttccctacactcctcccaggcag

SEQ ID NO: 9201 - DNA, 201 bp, Bos taurus
gaggctgccaacctgagatcaaggggctggcagtgaggggtggcgagggaggatctgtttcaggctctctccttggctcgttgacgatggccatcttcttcctgtgtcttttcacatcatcttccacttatgcaggtctctgtgtccccatttcctcttataaggacaccagtcatgtgggattagggcccaccccaaggc

SEQ ID NO: 9202 - DNA, 201 bp, Bos taurus
gaaattggatttcctccctatctagtgggaaagggagcttagattaatttttagaaagggaaacataaatagagcatttcttaaagtctgcctgttgttatatattcaaagctgctccataaggaatgaaaagcatttgcttgtatctgacagctaggaggtcataggtgcagtttcagcagagtttgggggtgaaatcta

SEQ ID NO: 9203 - DNA, 201 bp, Bos taurus
agatcagaattaggtcttgtgttagtggaccaggccccggccccggtgacgttggggatatcacagatttggtcactgggtcagctggcaagaggtcagccgtttcctaggctgtggcctcagtgcagttagcacaaatcttttcgatctagttccctaaagaaggcagagcgccaccccagtgcctggttttcagcaaag

SEQ ID NO: 9204 - DNA, 201 bp, Bos taurus
attgacagatgtggtgcttcctgtcaaggaagttatgaaggcaccataagagaacccctgaagatggtcctgaagaggccgctcctggactgacaagggaagagtcggcatggagaggagagtgccagctgaaggggattggatattcgctggcccagaagcagaagagcggaagggaggggaaggtgcccctcgaactgg

SEQ ID NO: 9205 - DNA, 201 bp, Bos taurus
ctctgctgctcagactgacctaaagctgacaactctttcacctaatgtgtttgtggaaagatctttcaagtgctaattacagaatctatcatgatgcattgtacctacgctttaatctcagcttcagtccaataaaatacttgtagaattacatgactttatgtccttctctagtatacatatgtctgtggtagtatgtaa

SEQ ID NO: 9206 - DNA, 201 bp, Bos taurus
ctctgtgatttgcagctgtaggggcttaatcacacttctccagcttttatagtttatttaaaatgttttagagaagaagtttggcttgtctgtgggcaactggatggcccacttccagggggtaatgggatggttcctttctgctagtccagatactgtactgccaaggggcataggtggcaattcgaggacaaatcttac

SEQ ID NO: 9207 - DNA, 201 bp, Bos taurus
gggccccggggacagacgctttggctcttcttgcccctggcgctcctgtaaccagagggtctcacctgcagtgtggacatctcccctcccctcccgttcaaggcaggggcttgggggcctggcggccccactgctagtgggaaaggcctcggacctcagctacgaaggcagctcaggaggctccgaggggacgcaccccga

SEQ ID NO: 9208 - DNA, 201 bp, Bos taurus
caactggttggtgtaggaaagtgcactggagtcaggaccagggatcaagtcttgccgagggtgtcacccaccctcaaagcatgctttcagataaaggccttgcctattagaattcttgtgaagccacacagcacttgaggatcacacggagaatgtcagattcccgacagcacagacactaggcatggagatttagtacat

SEQ ID NO: 9209 - DNA, 201 bp, Bos taurus
gcttttatcacattttaagcaaaagccatggataggttgtcattttgtgacacattattttcagcctaaaggaacagggtgtgaagagccctacaattagaatacaatacgcctgcaccatcgcaggaacttctgcattagttaagcttttcaaaagtcatctaaaagaactcctgagccccgtgcacccacacctcccac

SEQ ID NO: 9210 - DNA, 201 bp, Bos taurus
acttcttctttaagctgcaagttttggcctctgggcccaaagaggaacatttctgagattacctctaattctttttggccccaaatgaaaaatctatcacatggactttctctgccctgtgtgaatcaggttaaaaacgtttattgttcaaattatcttggaggttctgccccacattcattactgttgcggtaaacacag

SEQ ID NO: 9211 - DNA, 201 bp, Bos taurus
tttgtcactaattctccacatctctatcacattggtaatatcctccaaaaagccactaccgtgtcagtaattcccaggccccgtccttggtgtttccgccctgtaatttggaatgttcatgtgtcaagcttgagcgtcctaaataacagggtgggaacaccaaggacagggcctgggaattacactcgggcttccctcata

SEQ ID NO: 9212 - DNA, 201 bp, Bos taurus
atgcttagatagtcgggatggagccttcgtgaatggagttagtgctgttaaaatagatcccagacagctgccttgccccttccgccaactatgaaccacaaagagggccctcaccaggatgggaccaggctggggctttgaatttggacttaccagcctctagggctgtgagaagtaaattcctgctgtttataagccact

SEQ ID NO: 9213 - DNA, 201 bp, Bos taurus
cagcaatgaaatgcctctgctcaaaataacacactccattgccatgcacactttttaaacaaagctcatcccatagctacacctcatgtgaagttcaggacacaagagggaatgcaaaagtacaaacctacatataatagaccaggaagaagtaaagcaggggtgaatggttgtaatgttcgctctgctacacagttgtga

SEQ ID NO: 9214 - DNA, 201 bp, Bos taurus
tcagcggaggtggccagcaggagcaagaacatctgcttttctctctctctgctgggcatccaccaggatggttgtgtgtgccagatgctgcatggatgctgatcagatagttggccaggcttgtgtttttgttttaatttccattttgctatagattgaatgtttgtcccacctccccacacaaaaaaattatatgttgaa

SEQ ID NO: 9215 - DNA, 201 bp, Bos taurus
aaagtctatattttttttttagtagctgcaacctaacacttttaaaattatggaaattcacaagccaggtaattatattattttagatagtttctctcaatatggcagaataacaattgagtagatacaattttagctcaccagctggtactgtcactaacatgctgacagatacctgttttgaatgaattgacagattgc

SEQ ID NO: 9216 - DNA, 201 bp, Bos taurus
gttaaagattgctggcgaggacaatatttttctcctacttgtacttcattatgttaacatgtgctttatggccagactgggattaatttattcatttgggttcacaataccaattttaattcattacagttcacttctttatttgttgagctaataatctacaaactctaaagaaattaaaagaaaaaaaatctgtgaggc

SEQ ID NO: 9217 - DNA, 201 bp, Bos taurus
aaaacttggtcaaccaaacatggcaatagattttatgcaagaatgcattatgaatggcttaggagtaaatgcaaggttccagaagccaaagggccagggagtcaccggacgacacagcccactggacctttgcccaattgagcctgactctccacttctccccctggccctgtgtttactgatcctgtatattctacatat

SEQ ID NO: 9218 - DNA, 201 bp, Bos taurus
cctggagggttccaggcaagggtgattcagaagctggccacatctagtgcccgcacaggctgtgcttccgagtgccccattagcgtggagccagcctgcttgggctttagcacacacttggccctgtctcctttttccttctttcccccctccctgctacattcttgcttcctaggtgcactttatgcatttttgccaagg

SEQ ID NO: 9219 - DNA, 201 bp, Bos taurus
gaagaatctttaatatgattagtattattaaagacagggcaatttgttttattctgcttttcaagttaagtctaagagcatgtactattttatgatttcaatagattggggcaaatctttaaaaatagggaaagtatgttgaatcctaagatttggcagtgttctaaatcatttgacatgattgaactcatttaattatct

SEQ ID NO: 9220 - DNA, 201 bp, Bos taurus
tgcattttcttctccaggagatcgccccaacccagggatggaaccaatgcctcctgctttataggcagattctttacccgctgagccaccagggaggcccatgaaccaatacagtattgattaaatcaaaatgaatctaattacaatacaaagcttcaaccacatgaggccaaggacctcttctctggaagagagattgac

SEQ ID NO: 9221 - DNA, 201 bp, Bos taurus
tgttactcaattagatgactcaacaataacccatggctgtaaagtctgagcaagcaagtctttgagatgctggagaggtcagacagggcctgagaagttacgtaaatcaagctagtgatctggaattattggctaaactctaattcattagaggagaataagcaatatctataaacatgtgaggtttccaaggataattca

SEQ ID NO: 9222 - DNA, 201 bp, Bos taurus
caggaccaaagaacgtttccccagctaagagaaatgccatcaaccttctcttcaggaacagtactcagctaaagagaacctccttgcaagaagaggtcacatcccctgtcccaactctaaagggccacctaaggttcagagttcccttgcacacttggttgaagccattgtgaaaacgcccaacttccccctctgcctatt

SEQ ID NO: 9223 - DNA, 201 bp, Bos taurus
ttttataggtggcatggtaaagcattttacctcatgtcaactagctggttagtcaagcactggactacacgtgtggccgttattgtcagccagcctctcgagtcttcagtctcctcatctgtaaagtgaaagctcggactacagcagggatggccacgtctggctccttgtgtaaacaaagctttgttgaaaccccgccat

SEQ ID NO: 9224 - DNA, 201 bp, Bos taurus
gataaatggacagatacaacatattactaagtaaatggtcttgcatggaaaagagaatatagtaaacagtctgtcatcacaaacgtttcatcagagaaaacgctttgcaaggatagacagcttgattcagcctacatgattcatcaccacacataccttccgaaacctttgcaactggaatcagaaaggccaagtgaacag

SEQ ID NO: 9225 - DNA, 201 bp, Bos taurus
tattcagttttcttcaccactaggcaaaccacatgactggtcctggtcctcaccaggtgggtgatggcaggggtctcagataatggccccacagaagccactgatgttatgtaacaacaaacaggacacttgaactttgagtgattcatcgggtcatcttatgataatctttgggccctgtacttatgggttggttggttt

SEQ ID NO: 9226 - DNA, 201 bp, Bos taurus
aaactgctacctgatttggaaaaaggatctttgtggatacagtaaaggatcctgatcatcctgatctacccggtgggcccgaaatccaatgacaaatgttcttacaagagcagagggagatttaagacactcaggaggaggtgatgtgatcagggaggcataggtcagaatgacaggccatgaggccacaagtcaaggaat

SEQ ID NO: 9227 - DNA, 201 bp, Bos taurus
tacacacacttttctgggctgcttacatctgtaggatggagcatgacccccaaaagtccagataagttctccagttcaatgaccacagactttttttccaatttcagtcaagtatcattcagattcttaaagctggtatgaagaagtactgggagattatttatcatctttggggtaatgtgtcttccacatgggaatgaa

SEQ ID NO: 9228 - DNA, 201 bp, Bos taurus
ctcagagaaacggccagttttcgagggacgtttgcctgttgtgactgtgtcattactgtgtttttgtccctcgtggcgggaagagttcatctcacatctgtagctgccagcgcaccacggcccctaggataaacgcttgttggttgaagtgctccacagcgatgcccccacccctcctcatccccagatgctgccgtctcc

SEQ ID NO: 9229 - DNA, 201 bp, Bos taurus
ctggattggaacccacagcgggaccgggtcccattttgagtggaaatcacacgcagccagttcgttaggtctgcggctttcctctgaggcctttgcaccatgtatgttacattgtcctgttcacgtcacagggtttctgcgtcatccattcccttcccggtggttgtcctgttgggatgggtcatctcagcctgtttgaat

SEQ ID NO: 9230 - DNA, 201 bp, Bos taurus
ctgggttggaaagaacctaccatccaattagagtttccagaatcgtttctttctcctctttagagcaggaggcagtagaaggaagaaataattagcaagaacagcagggccagcatatttttttacaccagatgatgacgctgagttccactgcgtgaaaggaaaaagggaatttgatgggaattctgactgctaatgttt

SEQ ID NO: 9231 - DNA, 201 bp, Bos taurus
taagatctttaaaagtaacagttaacatctttgtccttttcgtttggctctttgacctacagtgtgatcaaagtcaggttccggtgaatgtcagtagcaaagtaacatgttttcaggacccagagtgaagttataaatcgactctttgtggtggtgcagatggaaagaagtgttcactgccccaaaactctgtgagaactt

SEQ ID NO: 9232 - DNA, 201 bp, Bos taurus
actatcctgtcctaacccaggagtctctgggtgaggtggtgagccttctagcagcttttgagtgctcaatccatgcccaccaattttgtggcttttcttgtgtctgaaattcccatcaacagtagcctttatttacataagacaaacaaatgtacaccttaacacaccaggaataaccaagagctgtcattgcatcctggc

SEQ ID NO: 9233 - DNA, 201 bp, Bos taurus
tttgtagttgcaagtacaagtaattaactgtgatcaaatcatcaaacctaaaatgaatatctccctgctagcatgaaacatcctcattaatcttatactaagtcaaccaaccatttgcatattgtactagaaaagtgctgctaaaaagaattctagttcctcatctgccttggcattgatgaatgaatagccttcctaata

SEQ ID NO: 9234 - DNA, 201 bp, Bos taurus
aaatgccttccattaggaaactgtcatcaaggcctgtggatgatcaaaacagtcccacatttctaccacttcttccaccaaaggatggtgtctatgtcccattctcttgaatgcattggccagtgacacagttccatcaatagatatggctgtgttgatgttgtctatgctcccaggctgggctttgaaagacctgaggtt

SEQ ID NO: 9235 - DNA, 201 bp, Bos taurus
ctatgcagtcacacaggggcccgtgctcagtaggacgctgtgcctggattaaggctgtgttcctgccatcgtgaaattcttaactttacctttgaactgaggttttagaaatgaagtctgggccttcacgtctccttggccccttggcgtcctgctagactgcaggaggggtcaagagagggattctgagagtcaggagga

SEQ ID NO: 9236 - DNA, 201 bp, Bos taurus
ttaaccacaacacatgtcaaatccagcgagtcctaaaaaaaacccacaagccccacctgaagtcaaccttaaaactggttttcaaacactggcaaacaaacttctaattataggtagaaggactaaaagtttttagaccaaaggtatagacttataaccttaaagcaaacgtcattttatcaagaaaaaaaaggatgtcat

SEQ ID NO: 9237 - DNA, 201 bp, Bos taurus
aagatgattttaaagggagttgtggacactgtgatatttgagccattttgaattttttttttccccatgaagactggaaactaaaatgggatgttcttttaagaaggattaagcagatagcttcagattttttcattttgtcttcgcaagtttagtctttttggtgaagatcacagtggttatactatggagaacagttgg

SEQ ID NO: 9238 - DNA, 201 bp, Bos taurus
gaccatccccaccaactgaaaaccacggccacactcgccatccagccccagccattctcaaaggctcagagacacccaatgtgacccaggagcaaagccactgactactcctgggccaccgtgggggctgtgcttgtctgggggtcttgtgctaggtctcctcccccattctcgaggccactgcagctccttcacacacac

SEQ ID NO: 9239 - DNA, 201 bp, Bos taurus
gaatcggagtggccctggctaatacttcacccatgccttacatcagtgtgttttgtaaggatctccacctgcagatgagaaaaccctgcatgctgggtgacgtgtgtctgccctggccttctccacgactcagagcaagcaaactgctaggctcttttctgactccctgtcactgtcccctcagacactgccgttaatcat

SEQ ID NO: 9240 - DNA, 201 bp, Bos taurus
atggaatggggatggagtgcttctggtaccagctggtgctgtggcctggactgggctaagccgggggtatttggctccatccagggaatcggcaggttgaagttctcctggtttctgtggccagggtggcttatgttctcttgtgtatgtttttttattggttgccgtctttgattagtagttgttccatgtactaaacag

SEQ ID NO: 9241 - DNA, 201 bp, Bos taurus
cttccctggtcttagccaatccaggccagaggattcagaggctgtcttgatgcagcagttccctgcattaccaaattgtccccaagatgaaataaatcccatttggggccactcaattaacctaaactctcactctaatctagtgatgatttataaagtttttatctgggatactgtctaagtcatgtagttaagagttat

SEQ ID NO: 9242 - DNA, 201 bp, Bos taurus
aaactgtacagcaccatataaacacagattattcctgttattttattatcatcaatctacacagaaaatctcaagaggctgggaggaaggcattattaacccacatttttgagttgacagaacacagaggaaagggaagaatatgcagttcacagactcagaaaagctgtggctgcttactgttccggaagaaaggaaata

SEQ ID NO: 9243 - DNA, 201 bp, Bos taurus
acatgaacagcagacactatgtcattaaggaattgcattcagacgcttccagaattctttgcctttcatttagccttctttattccacctaaatggtcccagataaaacatgactaaaggaattaattttcctttatcctgtttccaattgtcttgatgatattggtttaaaagtctccaaggaaccagaaaacactcctc

SEQ ID NO: 9244 - DNA, 201 bp, Bos taurus
tcaccccagttcagtatcctctcctgaactgttggtctgcagggtagtaactatatctgtgactctggaaagaatctcatcaagtggcccatcaactctcagttgtaaacaatagcagtggaaggtttgatggtccatgaatgggcatttgtaaggatcatctcatcatgatgcttttatctcaattatctggcctcatgg

SEQ ID NO: 9245 - DNA, 201 bp, Bos taurus
agccaagatgcaggcctggctcagggaccagctcagctaagcatcttcaacctcattcttctctacacgatgggggcaaggcggcagaggcaaggtgaggtaaggtcttaccggcctgtctgggtgggctgagagaggtggcaccatcacacagacaggtgaccatcattaggtaaatcagtgggagaaaacagaccccag

SEQ ID NO: 9246 - DNA, 201 bp, Bos taurus
tgcatgaaaaatgggataccacagtcccaaagttctagtaaaatagtgtgaacacagtttataaaataggtggaatcagatgatcacttcaggcaaactagtcacataggaaagaattttttaaattctgcgcggcactctcttgtgtgtgccctccaaaatgaattacttggaaatatgaccgaagaaaatgagcttact

SEQ ID NO: 9247 - DNA, 201 bp, Bos taurus
ggagggggatgggcgagggcgtccgcgtcccctactcggccgcccgccttctctcctcggtgattccttccaggtgattcacatgggcaggtgattcacgtgcgcaggtgcttctaggctttcggcctggagagctaaaacaccatcctctgtggtgctttgagagcttgggcttcactggcaaaacctgagtcccaggcc

SEQ ID NO: 9248 - DNA, 201 bp, Bos taurus
cctagcaaaatttctaataagtggtagaaggcagggggacccacccatgttacttctgggagattattctacatatttgtttttaatttgagataaagaaactaaacaaatctttggttataactaaaatgtaactgttacccttgtaagttcaaggcatttttcttaattttgaacatgttgcattcttcctgtttaaac

SEQ ID NO: 9249 - DNA, 201 bp, Bos taurus
tttgggtatttatcttgaatttaaatccatggtcatcaacatcaggatagataacagctttcctataaaactttgtttcaggcacatttttatgctgcctgtctctacccgtctatctctctgtctgtctgtctctccatccatccatctaatcagcgaatcctcttttctgtgagaaaatatcaatattattattatctc

SEQ ID NO: 9250 - DNA, 201 bp, Bos taurus
ccattcaattaggcaatcttgaacgtgcagtccaagaagagcttagcacacaaagtggctgggaattctcagaacaccagttcttccccaccgatgtctacatggccttccattcctctcctgccacttctttcctcttagccatctgttttctaaaatgtgagactgatccagaacttaaaagcttttctatgagattct

SEQ ID NO: 9251 - DNA, 201 bp, Bos taurus
ggtcagataccactgtttcatttacttttttaatatttatttatttggccactccatgtctgagttgcaatacacgggagcgtcaatcttcatcacggcatgtgggatctttcagtgtggcctgtggaatcttctagctgctacaggagaactcttagctgtagtatgtgagatctagttccccaaccagggatcgaacca

SEQ ID NO: 9252 - DNA, 201 bp, Bos taurus
ttgtccctggagttctctgctgtctagatattaccattccacaatgatgaccacagagatagcaacatcaccctgtaccactcaggccctttgagtgtgcatggctgattaacacagacacactcattaggatgacatgttatggtgcatttgtagttggggccctggaattctctctttttctttaaactgaagtagagt

SEQ ID NO: 9253 - DNA, 201 bp, Bos taurus
acagggaggcctggcgtgctgcgattcatggggtcgcaaagagttggacacgactgagcgactgatctgatctgatctgatctgatatatatgtatgtatgtagtaatttgattacatgttccttcaatttcccctttgtccttttttgtttaaatatccccattgttctttttgagttaaataacaattcttaaatcata

SEQ ID NO: 9254 - DNA, 201 bp, Bos taurus
tctcacaagagttggacatgacctagcaactaaacaacaataacaaactacagatttaattctccaataacttactagaaattgcaatagagaatttgaaacaatgagggccatgatatgctaatgaaagctttattcagaccatgaaatgagataaaagttttacacttttaggggtttaaattcaacataattttgtgg

SEQ ID NO: 9255 - DNA, 201 bp, Bos taurus
ttccctaccaagaccatcacagaaatcagaaaactccaacctaggagatcctcgagtgtgtgtatgaattccttctttaccactgtcatctcagatgctacgatgatacttaacgttttgactaagattttccagtttcaacttaaatttcaatgcgtgtgcctaattattgcctgcctgacatgtattttaaatcatcca

SEQ ID NO: 9256 - DNA, 201 bp, Bos taurus
cagcagcagcagcaagcttttgacatgttttattttagtttaaataaaagctatgtaagctacttggcatagaggaaaacatttcatagtacctattcttacctctatttaaaatatatgttattataattattgttggcatgtttctttcacccactattcagggacctccttaaatacagaatatttgtcctgctcttt

SEQ ID NO: 9257 - DNA, 201 bp, Bos taurus
atgtcccccagtacctcccacaccatgacttctcctgtcactcagcatcatagtgacggagactgagcagccagtctctcgctgtctgttatccccaccctcgggagcccacattcttccatgccattctccacattcaggatcaaggcagaaaaccgagaggacaggaagataacgccttattactttggagagcctgag

SEQ ID NO: 9258 - DNA, 201 bp, Bos taurus
atgatccaatcgaattagcccccaaagtagccacaattcctataagagaactcagggagactcggatgcaccgtggcgacacacacattagcatcggccagaggagcttggctgcgggctgccctgcggctacacagacaaaggctttgtttgtcctgaggcttagttgtctctgggtgactcatcacaatacagaccagt

SEQ ID NO: 9259 - DNA, 201 bp, Bos taurus
aagaccagattcttcagcataatacatacacttggatttgacatttatctcattacatcaaggcacagaaataaaattaacatgaggtcatataacgtggcaggcatttttaaataggaatacacagtttttcagaagttcaaagtgaaaatcatacaattaaatgtctttgtcaaacatgtttttcccctattactctat

SEQ ID NO: 9260 - DNA, 201 bp, Bos taurus
atgagcagaggctgaagaattctgaaagccaaaaggccctctcttttgtgaggctggccccaactgaaggcagacaaaaaaggcaaagatgaaataaaacggactttgtcttactaacctggcacacatgcctgctgatcggtggcttagctggcaaattgcaaggacctcgatgggaggttgaaaactcaacaagtcact

SEQ ID NO: 9261 - DNA, 201 bp, Bos taurus
gtcacttcagtcatgtccgattctttgggacctatggactgtagcccgccaggcttctctgcccatgggattctccaggcaagaatgctagagtgggttcccattgggatgttctacccagacccttttcggtaaactccatcttggctaagagatgcatgcgcacacatggaggatcctgagatctaccaaatgtggact

SEQ ID NO: 9262 - DNA, 201 bp, Bos taurus
tttatgacagtgagaccttatcattttagtttctttaccctctctttcactatcacttatctttgaccatctacatctaaacatgctctagtctttcctcttgaaaaaacacccagactctcttttaatccctttcctgtttgtgtgcctaagcttcagaccgttttccatgcacacccctgtttaagatcttctgtgctg

SEQ ID NO: 9263 - DNA, 201 bp, Bos taurus
aggagaatactgagaattgctgtggctgacgtcttcaccgcacctggacagtgaacgcggcagctgattcactagtataatggccttcagtgctttccaggtgagtaaggccaggcatagtaaagacaattgtggaagcttcagacaaagtattccggtgtgagacctctccttttcatctgacttcacgtacaggaaaac

SEQ ID NO: 9264 - DNA, 201 bp, Bos taurus
agagttgccgaagtaagagacggaggagaaaagaaagacgtcctagaggccgaggctccattttcagcagcgccatttcgcttttcctttcgccgcgttttgtttggttttgtttgcagcgggtggacgggcgccaacgcgtttctgcagcttcagcagctttgctccggcagacggggaggcacgcagggcccgcgctgc

SEQ ID NO: 9265 - DNA, 201 bp, Bos taurus
agtttggcctaaggccaaaaggatttatgccagcatgctgtagctcccaggactgttgtattcagtgcccttgactgttgtattcagtgcccttgactgcgcagcaggccactgttgacccacgcctccgctggagactcctggacactcacagtcaactctggctcagttgcttatggggtcattgttcctttctcgtgg

SEQ ID NO: 9266 - DNA, 201 bp, Bos taurus
attttctctcactgaatgaaaccttgagtcccaggaggcctgcagaggagctggtaccgaggacccaggtctcaggaatgaggcaggagtggctggagctcagtgggagctgcagaggccgcaggccaggggctgctccaccccgacgggtgagccagcaggtcatgggcaggcgttgcagcacccctgctgtcctgtcct

SEQ ID NO: 9267 - DNA, 201 bp, Bos taurus
ccctgcgtgtccttgccatgtggctggataccccctggtgttacctctacccttcctgaagagcaagtgcaacagtgtcccttctctggtgactgttcttcgtcctatgggcctaaataatcctgcagatgtgttcgtgtgtttcatcctaaatctccttattaagatttagctccccttttcttgtaacagaagtactag

SEQ ID NO: 9268 - DNA, 201 bp, Bos taurus
gcccgccaggtggggttcatctgtctgggttttacttaaagagccttgtccctggtgagagatgacagaggctgctctccttgcagtgtgaagctcacctcggccatgtgttccccgacggacctgggcctgctgggcagaggttctgcatcaacagtgtggcgctccggttcaagccaagaaaacactgaccacctccga

SEQ ID NO: 9269 - DNA, 201 bp, Bos taurus
ctgaggcctctacattggaaggcagattctaaaccactggacctccagggaagtccctcaacacacatcttaaaagggaaatgctattaacccagctaccaatgatgaagttgaagctcaggcaggaggtgacaatggaaattggccttcaggggtgggtagggttttcgttcctggtgagttgggcatcccaggtgagag

SEQ ID NO: 9270 - DNA, 201 bp, Bos taurus
tagagaattctttagctagtgtttctggcttaagttggtccatgtcaactcttccctcaagtagggcaaggcctgggagatgaccttcttttctctctttgctcaagaatctcagtgctggaggttctgtgagctctaccagctgagaaccatttatgccataaaatttaggaaccttctgtaacatgcttggacagacct

SEQ ID NO: 9271 - DNA, 201 bp, Bos taurus
ttacctggattttttgacaaggttgaatcaagtgaaaatagactccattcattgaacctttgattgagggtgggtggtgattcatacattctaaaggttagaaactcttaggacacttaggactttgcctctttgagatgttggctggcctctctccatttcaatggaaacagttgtggtcagtctaatactataaagaga

SEQ ID NO: 9272 - DNA, 201 bp, Bos taurus
ggagtgaatctccagactccagtactatgaaaggaaactaggcaaaacccagaaaaatccttgagttgggaagatagagttgggagttcagggcctccacagtgggtggtgtgcatagggcaagatatcagagagaaaacagctgcttggagggacagagagcactggagacctgaagaaggtccctctcaggccttttgc

SEQ ID NO: 9273 - DNA, 201 bp, Bos taurus
gcagataaaagagtcactagtagtttcataaaccacgttaataattctgcgttaacaataaataactgcatgtttagtgttgttacctaagctctcatagtcaagaccctcactgggcctggtcgttaaaagcaacggagctcttttaagcagaatctgaattaaacctgctttacctaaaatttcgtccaaagacacttc

SEQ ID NO: 9274 - DNA, 201 bp, Bos taurus
acgtatcaccttttaagtttccagttatgaaggctgagctccgcagatttgccatgagattcccagtttccacaagcccctcaggcctttctcaacatcctgctggtgccttcttgtcccctccagaccatgtcccttgtgacagccattgtgttctactggccgtggtcaccgcggcctcagccttggtagcccagcacg

SEQ ID NO: 9275 - DNA, 201 bp, Bos taurus
aatagccttctgctccattcaatccccgagggctcaggaagcatgatggtgattaaacagagcctacgtggaagctaaggaaatgcttcttctgtcctttggtcggtaatgcgttcatacctgtctcctctgagagcagcacaagccccttcttgctgggaacacagacctcctagcgcctgttcccctggaggaaaagag

SEQ ID NO: 9276 - DNA, 201 bp, Bos taurus
gcttccaccaccttctattcctatccaggctcagttcctgacgctaggactgaggacttctcctccttataagcatcaatcagaaaatgctgggttgacaagcactactatctataaaatagatggctggtggaaagctgctgtatagcacagggagctcagctgggtgctttgtgatgacttagttgggtgtggtggagt

SEQ ID NO: 9277 - DNA, 201 bp, Bos taurus
tcacatcagagtccacacagccctccctcagtcagcatcagcaccgctaaaaacaaagagtgggtcctttgtcagccaggtggcagacctgggcctccccaagaaacctcacctcacaccccagaagggtctcttaagccaaaccaatctactcctccccagctgctgcttccgcctccccgggcatggagggacccgcgg

SEQ ID NO: 9278 - DNA, 201 bp, Bos taurus
ggccaggtggctttccctgggggagtgtaggggttcatcagaacacctggggaaaccgagagaaaaggctgccctgaaagtcaccaggactaacgtgtgtgttgactgcatcgcactagaggcccattaaccatcatgatgccccgcccccaccccagtaacagccccgcatggccccctgccccctgaacccagaggtgg

SEQ ID NO: 9279 - DNA, 201 bp, Bos taurus
tggcacagaacggacattcgataaatcattgctcaataagtgaacaaacttcttatttaaatcttacatcaagctttcgcttacaactagtttgaaaggggaaaaaaaaattcttttcaatttaactcacttaaaatgcaaacacttaattccaaacaagttggtaatcaggctaggtccttatgtagccaactcaacatt

SEQ ID NO: 9280 - DNA, 201 bp, Bos taurus
gacctggtggcctatagtccaaggggtccttttttcttttttttagaggacccaggcaggctacagtctacagtgtcacacagagtcagacgcaactcaagtgacttggcctgcacacatatgctaagtatacctgacaactctgggcttggagcttctcttgatggacgaagtctctttcttagccaggttgataacaat

SEQ ID NO: 9281 - DNA, 201 bp, Bos taurus
gtctaaaccacacggtaagtagcagcagcaatcctgcaaaagcccaggtcaacacactttcggttactgacttactggatcaacttatcccgtgattcttttgcagcccaaatatttctttaggattaattacaatgaagacgtcttgacaaggtcttggatctcaaactagaaagttttttgatgatgagaccaataaat

SEQ ID NO: 9282 - DNA, 201 bp, Bos taurus
taaaccaataaataaaatacaaaaagataaataggcagttcacaaaagaggaaacacatgtgggcactaaccataaaagatgctcagtatcactgtcatcgggataatgcaaattaaaatgataatgagaccatttcaaatccatcagactggcaaaaataagtctgataacatccagtgttgaagtgttgatgaaaacag

SEQ ID NO: 9283 - DNA, 201 bp, Bos taurus
aaaaatgaaatgaatatagtgtctcccccttctttcgtattctgcactgtcacagagaaaaaagtctcaagcatccactctggccacatcacactcacactgcaacacgcagagaaggggctctggctggacaacagggtccagaagccactggcacgcgcccaaaaggatgctccccaaagcccttaattatgagacctg

SEQ ID NO: 9284 - DNA, 201 bp, Bos taurus
atattgtattttttttaagtttaaaataatattgtatattgtccttgtttacttgaagaggagcttgttttatggctagaacatcattacttacttttttctttacttactgtttttaatagtctcactgcttccccaggtctgtttctatttattgtatgttgtgggaaaacagctaaaaacacatttcttattgagtga

SEQ ID NO: 9285 - DNA, 201 bp, Bos taurus
agttcaggatttctacagatgatgaactgttctatctatccaagatataatgagtttactaagagttatcccattccataatttactagccagtcctccagtagtttgaacttgacacagtctaaaatgtattttgacagattcttttccctaaatatttaaaggcaagtgcatttcaaataaaatataatactttcaact

SEQ ID NO: 9286 - DNA, 201 bp, Bos taurus
cctttggggaaaatattatttagagcagtagctctcaaactatagccttcatcagaatttatttaaagggcttgttaaaatacagatttctgggccataacccccagtgtttctgacatagtagatctggaggggacccaagaatttgcatttttaacaagttttgggatgatgttaatgctactggtttgggaaccactg

SEQ ID NO: 9287 - DNA, 201 bp, Bos taurus
aaactgaactgaactgttaatctcataaatttctacatcagatctccatctaaaacaagaaccagttaacacccaaatgtgcacagacagaatctcaggcctctcctgtccctgtctattgccttcctattggcaaagtctcagctaatactaatcacttcagcacaaatatatgtacatatatacacaaataggcattat

SEQ ID NO: 9288 - DNA, 201 bp, Bos taurus
cccttcgtccatcccggctgggctccctctccttcaaaatcgctcgagtgctcgggcgctttcccatctcccggcggtgaggacccttcagtcctctcctctattcactccccgaagctttcagagctttgccacttctctaagctctaatcccaacacacacgcgcgcacacggacacgcacgtttcctgcccctgtgtg

SEQ ID NO: 9289 - DNA, 201 bp, Bos taurus
gtataactgaggaggaaaatagatttgacaacttgctaggaaatatgagtcaccaaatttccaatgtatggtcagctagtaagataggccgtatatgagacgttttgactccacagttagtcacaccaagaaataatggagagcactcatcaagacattttcaaatgaaaacagatgtcaacttttagaaggacaaactaa

SEQ ID NO: 9290 - DNA, 201 bp, Bos taurus
ctgcagtggcagcttttggccacggggcggcagtgtgtccatagccagctcccaggttgtccaggaaagaactgccttaaacagtatttttgacactcttgttaagatctcatctgggttctggtatttcacaggaggacctctgattaaatctcacttaaaagaggcataataaaagtcactaaaagtgtaatatttagc

SEQ ID NO: 9291 - DNA, 201 bp, Bos taurus
ggaccacaccccatgagcagagctggtcctggggttccatctataactccttgttcagtccacaggtggcttcactcaaggcaacacggaagctctcagcagtgatgcgatcatctgaaaagcttgaccagaatgtggagttcttgagaccatcagagctggaaggactcggcagacagtgtttttgcctactaatcattc

SEQ ID NO: 9292 - DNA, 201 bp, Bos taurus
aggttaaaattgaccttgactctttaactcacagagtagttgggagtatcaacaaggtcatctatgtaaacgcagttcataaactgaaagtgtacataagcgcaagatgtaataaaatttaaagaaagaaagaaaaagtcataagtcaagtcaaaaaacataagtcaagtcaaagtcaagaaaacataagtcaaagctgga

SEQ ID NO: 9293 - DNA, 201 bp, Bos taurus
attttccatatgtggatctaaccaggcagaaacttattttacagacaccctgacagatgagtatagttcccccaagcacaatgatgcccctgttcaagcactgtttgtgagctgtatttagcccttccactccagtcctcttccccagttcttcgctaatctaatatctcaaactgattatattcaagataaggctattct

SEQ ID NO: 9294 - DNA, 201 bp, Bos taurus
atttttctctcaaagatcttataggaaaacagataggatagcatccattttaagactaagatgagctacaaagagaggattccagtatccaaaataccaagatagcattactacaaattgagaaaacacaatctgttgttttgtgccagcctccatcctgctcaagcaagcgatattcatcgatggtagagaatgtgccct

SEQ ID NO: 9295 - DNA, 201 bp, Bos taurus
gggggggcggttcaggatgaatcaagcacactaccttcattgtgcactttttctctattattattattattacgacataataataataataataataataatattattattataactcgaaggttgaggatccctgttctagagcaaagggaagagggaaagtgttggaaggagagcattctagagatggctatattttca

SEQ ID NO: 9296 - DNA, 201 bp, Bos taurus
cgggtaaaataaaactgtcaggtctctgcagagtgccacaagtaaatgcaccatgggccaatctgtctactagatcttagtgacgtttatcatcaaacccgcctgcttttctgaaaaatggaaacttatttaatcatcgtgaaaacagcaagaagccgaataattattgcaatgatggcaatcgttggaaatgcaatagac

SEQ ID NO: 9297 - DNA, 201 bp, Bos taurus
attttgtatgacagtcatgaaagaaaggtaaagaagtaatcacctggctgtcttaattaatgtacatttgagagagttcagctttctataattagatccctccaccccagtgtcaaaagacacacatacacacagagctcttccctttctttcccaggactgccatagacaactttttggttaaatccatgttcagtggtt

SEQ ID NO: 9298 - DNA, 201 bp, Bos taurus
agtaatgataagggctgtgaattgtgatgcagaattactggcaattactccttttagctggactggtctggaaaggcctttagaaaatacagcctttgtatagaaacttgaattatgagcaaggaggaaaccacatgaagatcattaagagaataaccatataaagagaagtaaacattggaggccctaatgtaggaatgg

SEQ ID NO: 9299 - DNA, 201 bp, Bos taurus
agtgtagctttccagaatgtttagttactgcagtgatggccgtggttttcttcatcattgactgcctcttgatttaatctgagtttgaagtcaagaaatatattcgacataccaacagggcctacatttctgtgctctagttattagaaaccaaaaacaaaaatgctttttcttctcctgacttgagaatatggtgttttc

SEQ ID NO: 9300 - DNA, 201 bp, Bos taurus
aaaagggcaaaggcagaaatgagtgtggtgtgtaaataaggaaaactgactaagcttattttacagtgaaaagccaggaggtggagggaaccattagctgtgtgataacaacagcccaagtctgcatcttgaaacctagacagggtttcaggacaaaaagaaaagggccaacggatgtcataaagtttaaagggatgaata

SEQ ID NO: 9301 - DNA, 201 bp, Bos taurus
tcagaagttagccgagagggttttgcccacagactagctctctgtgaggctgggagaaaggagttgtgtccattaacattgtccccggcctgttgccctaatgttgatacagctgctctttctcttcacagaacgactgtgaatactgtcagtatcacatccaggcccagtacaagaggcttagcgccaggcgagctgact

SEQ ID NO: 9302 - DNA, 201 bp, Bos taurus
agctgttttctctgtgctgcattgtgttacacatgcacacacaagtacagccttcttaacaacaggcaccctctttacctgggccacctaagccgcctcacctaacaccaggtccatcctggaacctccccatactcactggacaggagtgcaacggcggagagacagatcagaaacagctgtctccaggccatctttgga

SEQ ID NO: 9303 - DNA, 201 bp, Bos taurus
ccaggaattgaacccagggccacagcagtgaaagtcctgaccaccatggaagtccccatgtggagaactttgcatgttatcccattaattgtccctcaaaagtattattattcccactttgagaaatttgaggttttcatggagtaactcagtgacagaaccaggatccaaaccagggtctgttgtctccaaaactctctt

SEQ ID NO: 9304 - DNA, 201 bp, Bos taurus
gtagcttttatttttaagattcttggcaggtgggaggtttcggggggccaaagtgaaacgatctcatccttgagctattcgagggccagtttttaatctgtttacacatctgctttgggaccaatgtgatggtcccagcacacagagcccatgctactttcagaggcccacactgctgtgtggggagaggatgtagcttca

SEQ ID NO: 9305 - DNA, 201 bp, Bos taurus
acacaacctctgcagaaatcaaaatgctttcagattaacacaggtaaccaatcctactacgggcacggaatactggccaaacagataacttaagaaaagaatacaggagggctactcaggaggaaaagagggtgtggtgttgggcagaatgaaacatcattagagaaaaccctggcgccctcacaaataggccaggaaggc

SEQ ID NO: 9306 - DNA, 201 bp, Bos taurus
tggactgccaggaactggtccctccttaactgttgtctcctctccgacctcaacttttgtccctacattcagaaccaggccgccttcctgcggtgaaggcatccttgctcatgaaataatcccagctgccagcccctggcagggttttctggcttgtagcagaaagcaggaaggcctccgtttcattttgacacagaatat

SEQ ID NO: 9307 - DNA, 201 bp, Bos taurus
cagctcctctgaaggcaaaggtgcggctcaccctggtcctgcccctacttgaaagctggctcccattgtctcggtgccatggggcctagctgctgtaactgggtcagagtgttagggagactcctgcctgggctggaggggcagttgttgctacaaaagggccttcaggtgcccagaactgggtgccactccccgtttact

SEQ ID NO: 9308 - DNA, 201 bp, Bos taurus
atctcgactcaggtcctctggccctgcctgcacagggagcaatggtaggctctctgattagcaatcttgatgtcccctttcatttgtgagagggagactgagtggtgcagagggcaaggccccaggatgggagtcagatctggctggacagatacagtaacttactagccatgctggggagagagtttacttaaacatctt

SEQ ID NO: 9309 - DNA, 201 bp, Bos taurus
ggggcctctctttcctggtgccatgagagtgccaggactgagacaagacagtgagcccctccttgctgggggctgtttcccaggactttgatggccaggtacctttggatcctttctgaggacagcttgcaattaagaactggtgatgccagcctctcattttgcagatgagaaaactgtagcctgagagggagcctggca

SEQ ID NO: 9310 - DNA, 201 bp, Bos taurus
aagggaagctttagattttcctgcccttggtgcttcgtggtcttgctgctgctgctaagtcacttcagtcgtgtccgactctgtgcatattgcctggcccagtaatcatggggaatggggaggtagcaaacagttgttgacacaggtaatgttcacgtccccgatcgtagcggcatatggcagtgattgtaatggcctaac

SEQ ID NO: 9311 - DNA, 201 bp, Bos taurus
gttacagtgtgtcggctggatggaattttgaaatttttgtggcctgttctagctcctttagagaataccaagcatcattttgaagcaaattttcatgatagtatggacagaatcacatgagtggccactgtcagtcttgtcagcactcagtagcacttgaggggtgcttccctgggagaccctgatgtagacagaccagag

SEQ ID NO: 9312 - DNA, 201 bp, Bos taurus
tttccaccagtgacagggacagaagcacagtaattgggagaaggttgtgcagagactcagacaaattgtgctctactctattccatattttatcgggaacgcttacaactggacgaactctggaacagactatgcctcgttactttcaacaggctgtgccagaaagcctgtatcgctgagtgattcatcaccatttatacc

SEQ ID NO: 9313 - DNA, 201 bp, Bos taurus
aaatgatacactgaaggtcccccttcgaaatttctaggaggagcatcccaaagtacttcttcctctaagaacaggagagagtccggttttcaagggcctcacactccagtgctcccacagccctcacaggcagacaaatctctgccatgtttaacacagacatgaaaatagagattagggccaaaagaaattacaaagtga

SEQ ID NO: 9314 - DNA, 201 bp, Bos taurus
acctgtacctttatcagagcacagaagtgccaaaattttgccacacctacagtgagacatttaggtggtttccagttgtccctgatggaacacaaggaggtgagagacttcttcgaccatttatatctgtcctatccaagtatttctgttggcaacattctcagaagcagaactgctggctaagcatctgcatattctgga

SEQ ID NO: 9315 - DNA, 201 bp, Bos taurus
tgacacaaaaggtactctgtagataatactgaaaaacattgtcagggaaagtgcaaagttgatatttgtgtccctgttatgcagaaggggccctagagagttgaagactaactaaagctgtgtgcttctgggtaggacaagattcataccatctgcctgggtctgggcctcagtgctctctgcaataccatgctgtctcct

SEQ ID NO: 9316 - DNA, 201 bp, Bos taurus
cagaggacccattttcaaagaactaaacgagaaaaaaagcattaaatattgatgttgaggtgtttacaataagaagctgtggtccagccactatcctacagcgtaatcactaactggcaaactccggacctcacaaagtcttgctagtttccagcgccttttctactgcctctctcctaaatgcagcagacaaggaaggca

SEQ ID NO: 9317 - DNA, 201 bp, Bos taurus
aaggtccttcccttcatctctgcccttaaaaatcctaaccctccttctagacccatcccaaatttcacttcccctgcaatgtgcctttccagacactccagcctccttgaaccatctttcgtgtgtctctctttggggcacttacattcagccttgcagtgtgtgtgacggctggttccatcaaaagccctgcctcacctc

SEQ ID NO: 9318 - DNA, 201 bp, Bos taurus
tctggagcgaagcagggtgattgagcagatgtgcagtgaggaggcctaaattatgctagacctgactggcctgctaactggccatgtgaccttgattagacgacttcttttccttgactgtggtttccccggaagaaatgtaaatggatggggccaaatcagcgttttcaaaacttctaaagacaaagtggccagtaagct

SEQ ID NO: 9319 - DNA, 201 bp, Bos taurus
actcctagaacacaaggttgttacaatatatgaagatcaattaacatatatgccacattaacagaatgaggataaaattcatatgctcatctctctggatacagaaaaagcatttgacaatgttaactacactttcatgataaaaactcttaacaaactaggcatagaaggaatgtagttcaattagtcatggtcacgtat

SEQ ID NO: 9320 - DNA, 201 bp, Bos taurus
gttgatgctgttttgttttttatgaaggactcccaaagtacaaggttctgtttcatgtttctcatgaaatatctgtttacttaaacatgaaagtctgttacgaaatagagaaagaacatggaaacaccatacaataggggagaaaattttactctacacagatatgcatgttctcaacttagttttagctgtttttattaa

SEQ ID NO: 9321 - DNA, 201 bp, Bos taurus
aaaatgaggtcactagggtgggccctagtccaacgtgactgatgtccttgtaagaggaaatcaggacacagacacagagggaagagccaatgaagatacaagtagaagatggccatttataagccaaggggagaagccgggaacaaattctcccttcgtggctctcagaagaaatcacccctgcagacaccttcatctcag

SEQ ID NO: 9322 - DNA, 201 bp, Bos taurus
aggaggagcatgggcttgttaccaataggagcacgcaggctactgctccaaactttacagaagcatcaacagcactgtcaggcgctttccttagcaggccatccacttacgaaagtatgagttgaaaacatgaacaattctaaagaggtctaaataaatacaagtaagaaaggctaaccctcacactggtcagaatggcca

SEQ ID NO: 9323 - DNA, 201 bp, Bos taurus
tgtgctttttatcaaataaggcacccagcagattggtaaacatgcagtactctgcacacccatgaattctattttggtatgtgctcaaagtggtagaattgtagtgaatgtgtagagattacacaaaaatgccagtctggaattcagttctttcttatagcttatctttcagctgatgctaaaatatggctgtgatgttca

SEQ ID NO: 9324 - DNA, 201 bp, Bos taurus
ccaggctagaacactggggtgggaaaacgcacataaaatttgccatttaaacaattctcaagaattcaagtcagtggcattaagtacgttcatactgttgttcactcatactgttgtgccattctccatctccagaacactctcccctcccagagcctccacatccattaaacactaacgcccattcctctggtcccctga

SEQ ID NO: 9325 - DNA, 201 bp, Bos taurus
ataatcagccacagagggattcttactattacctgcatgtccccagaacctggacacttgtacagtttttgcttatgagttttcatcagcattgcatcctctgtgataagctgtagaaatcacactcactcctcaaacgtcatcttttctgaatacagtttctgatcttacccaaatagatgtgaccatgtctccatataa

SEQ ID NO: 9326 - DNA, 201 bp, Bos taurus
gagatcacaccaaggagcaaaggcctctgtactcattagcaaattgactgaattgagcagtcgccccagtttgtaggcacagatcactgtggctgcacaacgatgaatacttatgggggcctactctgggtttacccttaccggtattctactgctgacaccactattgtcagttcagttcagttcagtcgctcagttgtg

SEQ ID NO: 9327 - DNA, 201 bp, Bos taurus
accagcaaagtcccgattgctcttctgtccacagccaaccagtgtttttccatcccccgcagccacaggccaggatcctgaccacagtctacagggcctgtgtacgcaggctcctctcctctgtttctgctgtctcacttcatgccactctgcccttgcctactctgctcagccatcaaggcctccttgctgtctcttgaa

SEQ ID NO: 9328 - DNA, 201 bp, Bos taurus
taattaaattaagatgaggtcatactccatttgttggggttgagggggcctcatcctgcatgatcgacatccttacaggaagagaaaactgagatgcagatgcatccacaggagatggccttgtggagacagaggcagaaatgtacaagctgaggtaagtcaaggaccacgggccactccagaagctaagaacctttggag

SEQ ID NO: 9329 - DNA, 201 bp, Bos taurus
tttacagcttggtagatgattttagcccagtggaacagtcagctgagataacttgttaaaagttggtctcttcttccttatcctgatggacctgctgtgtttctggactatggtgatggatacaggaagctacacatgggataaaactgcatagaactcagtacacatacacatgcagatgagtacataaaactcaggcag

SEQ ID NO: 9330 - DNA, 201 bp, Bos taurus
caaaaggcaacccaaagaatgggagaaaatgtttgcaaaccatgtgaccaacaagggattaatctccaaaatttacaaacaggccatatgactcaatgtctgaaaaaaaaaaaaaaaaaaaacttaatcaaaaaatgggaaaaaaaactctaaaaaaacatttatccaaggagacacacagatggccaagaggcacaggaa

SEQ ID NO: 9331 - DNA, 201 bp, Bos taurus
gggacctgagtgaccagcccacttggcaacctcagtggaggctgcctgtggcagtggcagcccggggaccttggcacatgctcaagtgcagagcagggacgaggggcacctggggtgagggccagccattggaaggccctccagtcctcttaggtctcaccacacatttgtctttactcagggccaaagttggggggctcc

SEQ ID NO: 9332 - DNA, 201 bp, Bos taurus
agggagtgtgtccccctgtacactgtgggatctccccccaccccaaagtgctatgggagcagtagctgtaggcatggccaccgagctgagctgggactgtgctctgaccacgcttcaactctctgtgctgggtgagcaggtggatgtctctgctgaggggccgtgattttgccccttgaggctgggggtttggggactgat

SEQ ID NO: 9333 - DNA, 201 bp, Bos taurus
acttaataaatgtgttgacaagctgagtagcactttcttctctgggcaactcacagaaatggaaactcacagttgagaatgtggctgtgctctcagttaagtcgcttggcctgaacgttgggaaactacccaagaaatgccaatagaagtaaattgcctgctctgaaaatggaagcgttcagtttataatgttatgaaaga

SEQ ID NO: 9334 - DNA, 201 bp, Bos taurus
tagccagcagggaggtggcctgggggcccagaggggcccactgcagctttccccctccccggagccaccatgccaggccccctctctccagcttctcctgagtccctggggatgcacagtgatgttggggagccaggatgggttggtggctggctccaggcctgacacctgcatccatgtgtctgggttttaaaaggtctc

SEQ ID NO: 9335 - DNA, 201 bp, Bos taurus
tgtggagccaagcatttcaacagggaacatagttctggtctgcggtaagaataacacacactgcctgtttgcttcagcagcctggcctcgcatctcccggtctgggcgtgtcagcccccgtggtgacccctcgccctccccacagctcctcctgcaagtgcctgtgctggtcaggaaccccacgggtcccagactcagggt

SEQ ID NO: 9336 - DNA, 201 bp, Bos taurus
ctggcccaagtactaacatgctattctagattctaaatccagatgatctggaccaaatgattctaaagcttacaaggagatacaagagcacagtctctggagtcagactgcttggtcctaatcacagcttcctctcttatcggttgtgttgccttgggcacattactcaatcttctcatgcctcagtttcctcatctctaa

SEQ ID NO: 9337 - DNA, 201 bp, Bos taurus
ggcagttaatgacacttaaaaatgttgacatatatgaaacatctgaagcctgctactagagaaactgaagacactaggatattctttacctttgcataatttaatttttaagtcattttaggagtgggtcaagtccttctaaaaacacggccaggcaatctgtagagatcgaaggaaatgtattactgaaaaaattaacct

SEQ ID NO: 9338 - DNA, 201 bp, Bos taurus
ggagaagacgggggatgtgacaggggcaggctgagcgctgctggagtgcctggtggggaaggcctttgggaggaggtgcataagagaggcctgaatgaccgtgaccaagaggcagagcgttctaggctgagtgacgtcaggagactaagatctccactcgtgcccgggtggtccgggtgggatcaacccagggaggatgca

SEQ ID NO: 9339 - DNA, 201 bp, Bos taurus
ttcgcctgttgagcttctgacacttgctggcagtccttggcgttccttggcttgtggttgcttcagtccagtttctgcctctgacgcgtggccttcttccctgcttgagtgtgtatatctgtatgttctctccttctcttataaggaagaggagatggattgagggcccaccctaccctaatatgacctcattgtcactga

SEQ ID NO: 9340 - DNA, 201 bp, Bos taurus
ggccggagattctcaagagtagctgtgggctgactcagcccggctcctgggccacagtgaagttttgtctagtggaccgggtattcccctgtcccaggccggctttggctgactcatacagcaaatcagagtttcacatctaactgttctgggcattgtttatcaaggttggaacccaaaggcctggctgaaatgaggaga

SEQ ID NO: 9341 - DNA, 201 bp, Bos taurus
gatagataataatactacttcaacaagctaagtgtcataatagacacacacagggcgttccaggagttcagaggtctatgtgtgtgtttggggccagttgtgaataagaaaaggtctgaagaaggagatactggattaggttgtaggttacaaataggagtaagtcatgagatgcatgtgtgatgtcaatgggttgctgaa

SEQ ID NO: 9342 - DNA, 201 bp, Bos taurus
tcattctaaattaaatataccaaagatattaataatagttgttttcattttgctgtataatctctgctttcaacaaattacttttatctggtttttgttgttggtgatggtctcattttctcatgccagtgacagcctatgaagtctagtcattggcagatttctagttagctgcacttatttaagagaaggatgctaaaa

SEQ ID NO: 9343 - DNA, 201 bp, Bos taurus
gtaggtatcctacatgttcaggaagagaaagattaaatggaatttagtgaacaagtaaagattaaacggaatttagtgaacaagtatcactgtcttttctgcagagattgaatttcattgtaacataggaaaagcctataagaataagttttcaattactccatgcattaaaatattaataatggttctctatgtcccagg

SEQ ID NO: 9344 - DNA, 201 bp, Bos taurus
gacactgggtgacagctgactgaagaggaggagccgctcgcatcaaaagtcaagaaagaaggatgtccgcaaggggagagtatggaggcaagtgcaggacgggaaaacacagcagctctagaggcctgtggggttgtcaggcaggaaccaaaggtccccgaggatgggggacggggtcccagagaatcttctggatgtaga

SEQ ID NO: 9345 - DNA, 201 bp, Bos taurus
agcaggagctgtctagatctcagcactaggaattaggaacacaaaaggctctttcactagagccctcactcgagtaaaaagagagacatgaaagaaagctatccctccaacactcctgaaatggtgggcgcttgcgctgcagtctgatcctgcccagtgggttctttttctgaagttgggagaagagaagaggtctggaca

SEQ ID NO: 9346 - DNA, 201 bp, Bos taurus
gggtggagggggggcggtgtggctataaatgtatttgaaggaaagaggaacgaattaggaacttgtaataaatattcttgggcctgggtcaatggtcatcagtgctgtctaagcctcaagacacctgctttaaactacagatgtatagagctcactggggacttgttaaattgcttgagtaagggcccaggtgtctgcaac

SEQ ID NO: 9347 - DNA, 201 bp, Bos taurus
tccatcagacagacaaaaatttgagtttgatactatcaaatgtgatgagatccacaaagaaaatacagagcgtgtgacctacagggagagtggtggagagagtcagtggacatttattaccaaagtctgattttctccgcagtgtcgtctccttctccatgcttactgctgggctgcacttgccccctaaggtttccagtt

SEQ ID NO: 9348 - DNA, 201 bp, Bos taurus
tggggagaaagatttgaagcttagggagggcagtggggatgaagtgtgggaagcaggcacagactcccgtgcagagagaaggtgccaagaatgaggccatcgtggaggaaatgatgcacaggtgactggggaagaaaagggaacaggaaaggtgagaggaagaagtgtggtctggcctctgctgcttgcattacggttcca

SEQ ID NO: 9349 - DNA, 201 bp, Bos taurus
caaagctactgagcgtgtccacggaaggactgcaatgatctcggggacggtggagccactggggtggaaaggagtttggtgcttgacgaactgcatgagacggggaggccagccgctctccctctcttgtttctcatgagaccctctctggaacaggacatgagcaagacgtaagatgggccagaaaggaaagacattaca

SEQ ID NO: 9350 - DNA, 201 bp, Bos taurus
ggattatcaatgtgtggattatcaatgtgtagatttcttttcttcaatatctttgtctggtttgagtatcagattaatactggccttatagaatgagttggaagattctaactcccattcagttttctggaagaatgcttagaattggtgtcctgtgttaactgttgtgtagaattcaccagtgacgccatctgggcctgg

SEQ ID NO: 9351 - DNA, 201 bp, Bos taurus
caccatggccttgctgacacctgtgcgctggatctcgcaccacacacctcagggaggtcccagatcagaggcaggtgtggccacttttgctatttctcctggggctgccccagtgctgcggctcccaggctccatgataactgctgtcagagaaccgggaagtcactagactggaggccagttcatttatactctgtctta

SEQ ID NO: 9352 - DNA, 201 bp, Bos taurus
actcggagcagtcacttcctgagtttttggccttttttgactgtgaagaaccataatttcagccctgccggccacttgggaaccaggccacgctggggcctgtgttccaaatcaccaagtaggctggtaaccatttgtcttctgcctccaggcttaatccttcaggtcaggggggccagtttgctgtggttttactgccag

SEQ ID NO: 9353 - DNA, 201 bp, Bos taurus
ataacatgaaaagggaataaaagaaaataatacaaatatccgatgaaatactagaagtgctcaaccacacgagtaatccaagaaatacaataaaattgcatacttttgttatttatcaggttagtgaaagaaaaagacactgctgtgtgtgagagagatggtgaggaagcaggccccacgaaaactaaaagctcaaccact

SEQ ID NO: 9354 - DNA, 201 bp, Bos taurus
ggagctggcctgcccctttggccccttggatgagattccagcccttaggacgagaggtcaggatcaagagctggaggagccagatgaggctttgttatttgatgcagacagtgctgtttcaaggcccacgggacagtatacctgagcctgggaagatggtcttgtgttttaattctacatttgacccttgttcagtcagtc

SEQ ID NO: 9355 - DNA, 201 bp, Bos taurus
atcaggaatattgaatggactctgaacaccagaaggaaggtttaaaacaacactgaactatgaaaaattaatagtcatgctcatggaccgattcattcacgtattgcaatcacgaagatttttttcccattctcaggaatcatctaaagcagacaacatctgaataacttcatagtgcttttcaggtctactttatccttc

SEQ ID NO: 9356 - DNA, 201 bp, Bos taurus
aggctttgagaggtgtttgtgtaagtccctcacttactacaggaggaaactgaggcccaggatgaaggtgaatggccagaggccacacaccaggttaaagaagagctagtcctggactcgggtcccaatcctgtgaaccccacaattcacaccacatgaccaaggcgcacatccggccaaatctggctccacttggggaag

SEQ ID NO: 9357 - DNA, 201 bp, Bos taurus
ctgggagaaggaacaaagccatgatgtgcctaccaatggacatcacagggagctgtgacatgatggggagtgataccaagcgggtggtatctggcggcctgagtgggtgggtctccatcagctggcagcaccccacaactcccagcagctgaagatggcgacactggataaggtttactggagggccctgccttaccagtc

SEQ ID NO: 9358 - DNA, 201 bp, Bos taurus
acacagccaccctccattgagggctcccaggagtcatgcttgcccagtcaaatcacagccgactgtgacccaaggactgtggcctaggtaaaggccatctggggatctggggtatccagatgacccatggagctgccttgtgtcattcaccaacattcacctccattgctttaggtaacatgaactttatatgagtgaagg

SEQ ID NO: 9359 - DNA, 201 bp, Bos taurus
tgagaacagaggtacaagtcagtgccttccgggaaggcggttgccatggttccagggaagtggatcaggggctgcggccatggggagagagaagaaagacacagtaaaagacccgtggcagatggcagcatctcccgtccatgggctcttccacagtgagacctcgacacacccctaccaagaagtgaggcctgagtctct

SEQ ID NO: 9360 - DNA, 201 bp, Bos taurus
aaacacctaaactccccatcttttctgtcttcccttgtcccaccgtccttgctgtagatggcagattttgttgcctaaaaagggccacagagacatggacggttctcattagctcatctagaaccatcctcccaccaaaggggaagactcatttccctcccctcaatgtggactggccttaggacttgcctctgacagaaa

SEQ ID NO: 9361 - DNA, 201 bp, Bos taurus
catggagccaccttctccacctccccatctcctcactgcttctggatcatgggcctcctgcctccctccccagcctgagcaacctccctgccctctctccatccacaccccccgtcccaactcatgagtttaggttttctttatagactgcaagagagatgccctcaaaaacccttgattttcaacccaaacctccctgaa

SEQ ID NO: 9362 - DNA, 201 bp, Bos taurus
aaacacatgccaacatagctaagggtctacagtgtgtgcaattacacgtggttcaaaggatagaaagaagagcttgttcacttggacacataagagagaccctggagcaaaacactaattatcagtgagtctgataaatacagtattggtgttgtccaattaaaaaatatgtacaacctaaacccactttagtattcttgc

SEQ ID NO: 9363 - DNA, 201 bp, Bos taurus
aaccagttcatgaaactccgtgttctggaaatggccgcggtcagtgaatttgtacaatttggcttccagcctgtcggccacttcttgttgttccttccaaggaaggaaagggtcatcggtggagccaaactgcacaatgtgagggcagttggctttgatcttctcccactgccagggccgactgaagtagcctgtgagaaa

SEQ ID NO: 9364 - DNA, 201 bp, Bos taurus
tgcaggtcagaagtgggggcagggctgactgggttcctcgcttccatctcacaggcctgaagtgagggtgttggccagactgggctcttatctgggggcccgggaaagggtcagttcaattcctcatggtggtagcaccgaggtccccatagcctcactggttgtcagccaggccagctctctcagctcctggaagccagc

SEQ ID NO: 9365 - DNA, 201 bp, Bos taurus
ccaaccccacagcctaagtggcttgatcacttaggtcttcaatgtctgcattcctcccctgccccacttccccatgtcagagttccctttccctcccagcaaatgagctgccttgaatctttgtctcagattctccttctggggagtccaaattcagattgaatgactggtggctcagacagtaaagaatctgcctgtaat

SEQ ID NO: 9366 - DNA, 201 bp, Bos taurus
cagaaccacagttcatggagtaaaatcagaccacctgggatatttgattgtgcagaaccacacagaagtgctgtgggtctttgctactcaaagtgtgggtcggccttcagtgggcagctttgactagaatgagagacttggggaaccctgtaaaatggcactgtccgctggaactttccacaggaatgtgactgtcctcca

SEQ ID NO: 9367 - DNA, 201 bp, Bos taurus
actcctggacactgattcatagccatccacttcctcccaagctcagcaaaccaccaggtcctctgggaaatggattagtcacagcccagccaggcaccttgcgtgccatggtcggtattagctccaacagtcatgcgtttaggaggaaaaggtaaaaactgctgcaccatcttcctttggggaaggaataaggccttagtt

SEQ ID NO: 9368 - DNA, 201 bp, Bos taurus
aaagaagacatggccagggcctgggcctgtcagtgtctaggcaaagagggttaggaggtgtctttacagggtttagaggtccatgcccaggctctttaagttgtgctttttcaggccgagaattggctgggtttcagcaaagtttgtggtcacttagtacataatacagttcagggtgggtggattcagcatgtcaagagt

SEQ ID NO: 9369 - DNA, 201 bp, Bos taurus
aacctttgttttccaaacagctgctggtccatctcctaagaactaccttccttccctttgaagccctcttttgtctttagctgaaggtgatatttaaaggttttggccattttggttcttttggctcccccctatgtgtacatgttattacactttgtttgactttctgctgttaacctgtttcatcctaatttaatttat

SEQ ID NO: 9370 - DNA, 201 bp, Bos taurus
atacatcaggcgtgaagagcaaggacgcaccctcttccgtccatgacgagaacatgggaaggaagtgcaagtaggagtcacccggccagactgtcaaccacgtcagaacacccaggagtaccccaaaagcttcaaagcgcgactccgtctaaagggggtttcattacagagacgtcactatgtgagttttggagaattcca

SEQ ID NO: 9371 - DNA, 201 bp, Bos taurus
ttttccccactctctgactaccagaattcccagctctagagaactgtctgcaatgcataatcataaacatgttagatactatttaggtgaagacaacttctgtgtaaacatcaaactaacttgacttcaaatttcctgaaagatgtgtccatgtctcaatgtcagggatgcttcatttaaaaagttttccttttataaatc

SEQ ID NO: 9372 - DNA, 201 bp, Bos taurus
cacagggaggacttgttgagcctgcagagttggcatcctggttcgcctgtgagctcttggctgcttctccgcaagcgtaggcttcgtggccactgttggcgggagacttggcttcttggaggctagagcactggctagagtcaaagcctttgaaaggtctaacgacacgggacaggagagccaaggagaaccctcagtggc

SEQ ID NO: 9373 - DNA, 201 bp, Bos taurus
accctcctgcacctcctgcattggcaggagcacatttcccctgcttcttggctcagatccttaaaagaagcatttttattggcccagcttgtctttttaagtcaagccacaaaatgtttctaagcagttttctgattggttgcctaggaccaggtggccactctaacccaatcaattatactttagagtagaagatggaca

SEQ ID NO: 9374 - DNA, 201 bp, Bos taurus
ttagcatgcacacacaggtactatttatttcatagatgttgaaatttactcatgcacacacatgcacacagcaagctgtattctctaaatggccacttcgctattacctgtcctacatgctcttctagaaccttgccactccctcatcaggaagtcggatctaatccactggcccttccgttttttaaaaaagattttttt

SEQ ID NO: 9375 - DNA, 201 bp, Bos taurus
acacgagtggtcttgtggatgaaagaataaaagtaacttcctcctctcgaaccttggggagtcgtttgaaattggagattgccctcgccctcacagtgtcgtggcggcctttagtcagacaacagattgactataatctgcgaaggagaacctagcttggctctcctcaccaccaccaccaaccaccccacgccccaggtt

SEQ ID NO: 9376 - DNA, 201 bp, Bos taurus
tgccccccaccccggccccggcctttgtgctgcggctcctcctccctccctccagactttgtgcgcctttaagtggcccccaggaagggaccacccagggtgctgcacaatgggggctgaagtagcccctgaaacataggtttcttgagacaggccgtgaaaagaaaagtactgtttaactatgtacatgtttgtcctttc

SEQ ID NO: 9377 - DNA, 201 bp, Bos taurus
ccctggccctttcagagtcctcacaaatacgcccatctttccacttagtcagctctgaacattctaggtcctctggtcaaccagctctgcttggatgtgctggtctccccatcctgggattcttgagtaccttctttctgggtgccgtcacgcacacccaggaggggactgtgtcctgggtcccctcttgtttgggtttgg

SEQ ID NO: 9378 - DNA, 201 bp, Bos taurus
ggttggagctccagtggcccaaagccccttcctgcgtttctgatccttgataagtagaatgatgggcagtcagaaggagcagcgagtgggatggagtctacagatggagatgctgaggccggccctgggctggtcccaccaggcaggtggcagaggtggagcccagggccttcgctcctgacacctcaactggtggaagga

SEQ ID NO: 9379 - DNA, 201 bp, Bos taurus
gttttcaaaccactgtccgcttccatgagttgaggatcactgggagggggacagtgaacaggggacaggcaggacagggaggggccagtccagtgatgaacgggtgactactgggggcacctggggctcagtcccatggtggaccctttgggagactgtgtaggacatacctcagatttttcctaactgaggggccaaggt

SEQ ID NO: 9380 - DNA, 201 bp, Bos taurus
gcctgccttggctccgggttttagaagacctgccgtagcctcctccagctgcactcctcccctcaggtggggggtctgagggccaaaatcccctgtccattctgctcagagcccatgactgatttttagacctactctgggtccagggtctggcaattccctgcccagtggcctttctttgtggtcaggtatcctatggct

SEQ ID NO: 9381 - DNA, 201 bp, Bos taurus
gaggtgttgattccctccgtaataaatggatcggccgtcagctggtgctaagcaatcagtgatctcacgaggctcactgctgcaataaacaggaacaaaacgagatggagcggcaggctggccagggggcaagggaggggcatgaaattctgcccagagtaagcaggactgctcggaatccatcttaacaaactcaaacat

SEQ ID NO: 9382 - DNA, 201 bp, Bos taurus
cgttaaagaggctgagtcacttgcccagaaactggtttgtcaaacccaggtctcagtagctctaagacccatgctcttcaccatcaggctccaggaaaccggctgactgcaccgtgtggaccaccttccatgtccttccccagccccacccaggcagatgccttctggtctgaatgcaaggctcagccctctggaaagcca

SEQ ID NO: 9383 - DNA, 201 bp, Bos taurus
tcttcctctccttcatcctctttacccctaaatactttcctgtgtgtcccctaaaaacaagaagtttctcacgcaaaatttcaaaaattatcagaattagcaaattaagacctctacagtcatccccctgccccttatctgtggtttcactttttgtggctgcagttatccaagatcaaccgcagtctaaaaatattacat

SEQ ID NO: 9384 - DNA, 201 bp, Bos taurus
gtgctgcaggccatgggatcacaaagactgaacaacaacaagctgaaataagtgtaccaccctcctccttcctgcagcaaagaacattcaccacaggccaccttcaaataacattcgtctccaatctttgaaaatgaacatcgttttccatgttttggggggcaacatttgcctttcccatgagcagtctgctcttcagtc

SEQ ID NO: 9385 - DNA, 201 bp, Bos taurus
tttgttcatcatctcagagaggcagtgcaattcacacccccaaagggacgcacggggtgccctcgcggggagggtctgtctgttggggtcttttccccaatagatcagatggatacaggggcgcacagagatgccacttgattcgcaaaggacacggacgaggggcgattaagcgcgcgtgcggggtggggagcgctggga

SEQ ID NO: 9386 - DNA, 201 bp, Bos taurus
aagagcccaagcgctgcaacaaaaacccagtgcagccaaaataaagtaaaatcatcatgatgatttggtgacttctcttcattttctgtttaggcttccacgcctgcagatagatgcagtcaacacaagctggatgatatcgatgctattttaattgtagcttccattcatatgtaaaagaggagtattttgttttgttta

SEQ ID NO: 9387 - DNA, 201 bp, Bos taurus
caactgccccacgtaaaagttgtgatgcccgcactgccagctcagctctgtcccctgggggtgaagccttcttgtaggtcctgacctaggacacgaagcatgacctcctcatctcatcacagttcccatcttcttctgtatgtaagaggcgattagtcctctgcctctctctgctctgtccatcagctatgggaggatcgg

SEQ ID NO: 9388 - DNA, 201 bp, Bos taurus
ttgctgctggaccaatttagacaaacacctgctcacctgaatttctaaactttaatgaagcttctcctccttccctgccaggcccctggactttggaccaacccagcctgagcccattggaatgtgggcacccttcgccagcactccccttcaaggcacccggccaagaagtgggctgtcaggatacctccctgccttgcc

SEQ ID NO: 9389 - DNA, 201 bp, Bos taurus
ttaggagggcaggaaacccacacagctacctaagtgaacagcagtcccatgtggacagcccttctcgtgtccaggtggccaccaccagcaactgcaatcatgtagagctccacggtttctagaatgtttagcaaggacttctcaggtggtccagtggttaagacaggcttgatccctggccgaggaactaagatcttccat

SEQ ID NO: 9390 - DNA, 201 bp, Bos taurus
tgtctcagatgccggatcactgggcctctgggagaagccaagcagagagtggacagggtcctcagggctcagagttgctaggggagcaagaaccccccacggcaggaggtctgttttctaaggccagatctaagcagtcttgggctccccgggtggcgctagtggtaaagaacccacctgccaatgcagtagatgtaggaa

SEQ ID NO: 9391 - DNA, 201 bp, Bos taurus
agcagctcagtgtctgcagggcagccccaaggatctgagacgggggtgtggggatgcaggggaaccccatcagaagagcccttggaccagggtcactgggtagcccccagagctgactgcatggccttgggccctctcccgtgggcgccggcggaatgaccagggagcagagccacctctggagccacgtcaacctcgact

SEQ ID NO: 9392 - DNA, 201 bp, Bos taurus
ttcaactaaaaccgtcctgtactccttgccgtttcctaccacaggtagctgctatgtttacaacgaacaagtattgaaggaaacacagaagaaagcaacatggactccccttcactttgttacctttgctcttcaaactaaacgaaagagcacaagaaaacaaatcagcatctgtaaggcattcaccggagacccctgaag

SEQ ID NO: 9393 - DNA, 201 bp, Bos taurus
ttctgaccaaggaacaccaaggctatcccagagggagaaccatctgccagcttgtttctcacgcatcccagaggacagagagtggtgtgctttcccttgcggtggggcttatccctgctccagaggctgcaaaagccctggtgggtctgggtgaggggaactctagaatgagtggaaaaaatatttcaactcactcaggac

SEQ ID NO: 9394 - DNA, 201 bp, Bos taurus
gtcccgggcctgcatcacctccggggtgttctattcacgcctgaaatctcttccccaaggtttagggctgtgtctgtctctcaccttctaatcaaactagaggttttctgtctgcagggccggtggattaggaccagaataatcacccacaaattggccagacagcccagacgagataactcaggtcagagtaatttaaac

SEQ ID NO: 9395 - DNA, 201 bp, Bos taurus
tcctactcagatgagcactctaagctccgagcagggtgccaccagctgcttcaggctgacagatggacagatgagacagaagtcgcatcccaaatgtggcattgtttgatgccgtgtcatgattctaattctgagtccattttaaagcatgacctttcaaaaatgttcacttgtcttaattatttcctggagagtctctct

SEQ ID NO: 9396 - DNA, 201 bp, Bos taurus
ctaagatggtggtcctgccaagattgtgcttctctgctgctcaggaggtaagctctgtcccgggccggtgagggcagggctggtgtgtcactggaaggcagtgagccttgggaagcagccttgcttgtgcacggtgttgttgctctgattcacagagcatcacagcctctcaggatgaatcatctcccgggcacagacagg

SEQ ID NO: 9397 - DNA, 201 bp, Bos taurus
ctctggtctctacagtctgctggccaaaaataccaaggggtgacatgccctgagaagtccaggaccaaagacagcaggagttggagtataaacaccaccccaggtgttcggtgggataactcaggcctcccagaagcccccagctgagtctgcaccagttatcactaattgtgcatggtcagtcgcttcagttgtgtccga

SEQ ID NO: 9398 - DNA, 201 bp, Bos taurus
caagtccatacaaacatcacaatggtttgatatatctcttaggtgtaggattcctccatctttctctttgaattaattttactttgctgaacgaactcatttgtcttaacttcttgcagattgaactcaggctgactttcttggcaagactgcttaggtggtgggtgggcgccttgtctggaggtatggtggtctttatta

SEQ ID NO: 9399 - DNA, 201 bp, Bos taurus
cggacaccattttcctggcaaactccaagtagtggagaatattgcacataaggatttctgcaatgagtctgctttgagggaggcagcggggtgctgcaccgccaccctttacagatcaagatggccctgctcaagtcatgggagaggtgagtgtgaataaaaacatacagaaatatccttccagtcttttggctcttccct

SEQ ID NO: 9400 - DNA, 201 bp, Bos taurus
tgcattatgtgattattttatgccatttggactgttttaacaaaatgccacaaatttggtgttttagaaacaatgaaaatttgcttctcacatttctgaagctggaggtctgaggtcagggtgcattcttggtcaggtgagggccctcctccaggcttcttcttgtattttaatgtagttaaggtgggaaggagagttctc

SEQ ID NO: 9401 - DNA, 201 bp, Bos taurus
tacaagttcttgtctctgtctccacccttagtcccttgtccttggcatctgtgcctatatagcccctgcagctgtaactgccattcctatttcccttgaaataatacacaccccagtcttcaggcagcctggaaatagcctggaacattgcatatttttttgtgatcagtctggtttaagggaggtaactgagagctgaac

SEQ ID NO: 9402 - DNA, 201 bp, Bos taurus
gtatactataaatagtcacaactgactctgattcttttgttttcctacatttttttatggagctgtaaaaaaaacctagcacacctagagatgttactgcttacattaaaagggtataaaatgtctttatggaatcccaggaaatcctgaaactaaaattatactattgtattcattcattgactcaacaaatgtttattg

SEQ ID NO: 9403 - DNA, 201 bp, Bos taurus
taaagaaggctgaaggcaggtgtgtatactggtccttcagtatacattccacctacattccatcatgcctgggcaagcagtattatcccaaaggaggcaaatccttgacttccccatcagctcgtctaaaccattgtcttggagaaacggattcaggactattttactattctgcatcaagactgaaaacaatatgaaaat

SEQ ID NO: 9404 - DNA, 201 bp, Bos taurus
aaggagggaccactcgttttatcaatgcaaatttgactctaaattactagcagtttaacctgatgaaagtaaggctcagaaacacctggaattaagacgacgactctccacgttgtcatctgcagaataactatttgtcctaccaaggaattcatgcacttcagctttatgagaggatttaattattttcagctgtggaaa

SEQ ID NO: 9405 - DNA, 201 bp, Bos taurus
caagcactgggactcagtgtgtcgggaacagcgatgcaccacggggagacaatggtgagaacatgggaagccgcctccagcgtgacttcaaggccaggctttgtgattcagagattgccttactttaactttgcagaaagctctagtgacaagtgtgtccttgcccttgattatgatgtgatggagggaagaagtggccag

SEQ ID NO: 9406 - DNA, 201 bp, Bos taurus
cactgcattttctcttgaggtgttttatgttgggtggtgatgtgcccccggcctgggcccactggctttgctccctggcctcgcctccgccggtgctgaactggggactgcgaccccgccgtgatgtcactgttcaggcagccacagcgcatggccctgtcatcaggagcagaacaatgatgccattttcctcttatgcta

SEQ ID NO: 9407 - DNA, 201 bp, Bos taurus
aaggggagacagtgagccccgcttggccgtggggaagggctgccctggccggagctcagcccacaccccctgcttccaggacaggacagggacgaagaccacagtgtggaggctaggtaggccaatgggaaaggccgcacagccgatcctcagtccagtcaactaacagggcacgcggcagtggaccgaggagaacaccaa

SEQ ID NO: 9408 - DNA, 201 bp, Bos taurus
actttctgataaaaagatgttatttttatttggttaacattaaaactggatttggaagaaccatgcaaattcatacttgtaataaatgcatttatgtagggacatttaaatttcccattcacaagtacatacgctctttctgaataaggtactttattgcctggcataaggcacttatgcaaaggtttagaaataccaggc

SEQ ID NO: 9409 - DNA, 201 bp, Bos taurus
ctcctgtctcagaagacaaatggcatggacagaaacgcagactgagcaacacagcatgctcattttcaaaaggcaaagtttaaaaccttcagaagcttttagatccggcctcatagtcaacaaccagtcagatccctggcagcagccgcggccgtgttgtgctgatgctcctgccctgatgggcgacacgagaggttttgt

SEQ ID NO: 9410 - DNA, 201 bp, Bos taurus
gataactctccctctctctcaaatgaaattgctcttctagtttacaaaaataattttgctttcctctgaatttttaccatccttgtatagtcttacactacggtattacctggttagatggcacctttttttctttgcttcatgtgcccacatctttgatacatgcagttgtccattcattcttagggctaagtttgtcaa

SEQ ID NO: 9411 - DNA, 201 bp, Bos taurus
cctagaaaagagtttcataagcggccgcatcatcagtcccttgtggggaccgcacaggatccccttactacttgcgcagcagatgtgcgtcgagtggacacagggaaaagaggttaagtcaaggccgtcccgtacaccctgagcagcctgacagtggtgtactcctggctgccctggacagaaggcaatggcaacccactc

SEQ ID NO: 9412 - DNA, 201 bp, Bos taurus
ttcaataacttattcaccaaaaattgattttaggcttccaagggtacatgagagtaaataagagagccttgcgccctcatgtttagggtatgtgggcagcatagcggccagggctcatggttcaaaaccctaaagccatgcacacagggctaaatgctcaatgctgcctccctgaaactctgaataaggccagtatttctc

SEQ ID NO: 9413 - DNA, 201 bp, Bos taurus
caaaggcttcatttctcaaagcttttaattcgttgctttaaaaaattgtcttaacaactacttatattcttctttgatttggcaaacttctttttcagtcatgtgaaaaccaagttccaattgggcatggtgggcttctcacaaattccaaaatagtgaagtacaaattaaaagagatgtattaaaagcaactctcattac

SEQ ID NO: 9414 - DNA, 201 bp, Bos taurus
gtttgttagctagggtcttgttgctgcagagaagactgaccagggcctccagggatccattctttctcctccagcttcctaagccattcttctgtctttgtgccaccaaacaagggcggccacgtccccaaatctctaatgccacggctctgccctggctctgctcatgttcacagatttggttgcaaagctcccattttg

SEQ ID NO: 9415 - DNA, 201 bp, Bos taurus
cactgggcaggtgtaaagattgctcccttgggtcccaccatgtttgtacttggctgttgccaagaacttccctgtattctgacgatggtttctccacacagacagcttttgtctctgcggctgctggtgtgtttcagggcggtctgtcagcctctgctgacaccctcacccgccatgtgacctacaaggcttgaaatatca

SEQ ID NO: 9416 - DNA, 201 bp, Bos taurus
ttctgggaaatagacaatgaaagttgactaggagcagactaattcgactttattttaacttggggaatataaacagtgatttggaaaaaataaacctgcggtgaatgacttcctgtttcgtgcacacaagggcctgcagaaatatgccacagagcaatttctgggtcagaataaattagagtttgtaatgcatttgcctat

SEQ ID NO: 9417 - DNA, 201 bp, Bos taurus
aagtgaaggaaggcccagtccatcgtttcagagaccttggaaccagctcccacttcccagttccatccttgataagagctttgagcatctgtatttgtttcatttcaaacccaaaggccaaaagtgggatttgctgttgacaaggactcggtcgtgaacagtactcatttgtgacccctacattccccacccaaagccact

SEQ ID NO: 9418 - DNA, 201 bp, Bos taurus
atgcttgtagttcctctgtaactatagatccaaagcaaattgcaagttaatgataaaatgatgggttgtggaaaaaatgagctgcctataggttgaatgtggtgggagatatcctccttcccatgtgcttctctccccaccagccttggcaggtggagctgcttgtgcagttgtgcactcctgatgtggatgttgcagggc

SEQ ID NO: 9419 - DNA, 201 bp, Bos taurus
aggcctcccccaccccatggggtaaatcagactgcaacaaaggagacccctcgctgggtggagtcctccaggctgttcactgggtgttaatgaagactgacttgggccccttatgctccgtgctgaggaggatgcgctgttgacactaaatactgaaatcctctggtttatctcccattatgacaatacagtggcatgtgt

SEQ ID NO: 9420 - DNA, 201 bp, Bos taurus
tgtggggtcggaacgtgcaaacagtgtctgtagagcgttcctctcagcagcatgtgtatcggaaaggccagggctgcctaccttgtctctgaaactctgtgcagttctcatcggccatcccagccctgattccagtcagcgcagtggccagagtcagctgctgctagtggtggtgccttccgtgtgtgagcagggtgatct

SEQ ID NO: 9421 - DNA, 201 bp, Bos taurus
cacagggaaattcttagcagtagagttttcgcatttcagataagatccacctgcccagcagggacaggagacaagatgaactctgagggcaggatgaggacgagaggccggctgccctgaagcaactagagaaacaacataatcttatacctgaagcaactagagaaagaaggacaaacaaaacccaaagttaataccaga

SEQ ID NO: 9422 - DNA, 201 bp, Bos taurus
tgccagccattctttaagttataagcaatcaacattgttaatttactcagatttctatattctgaacagactgaggcaaaaggccaccggctacatcccggcaagactagggggaaaaaacagagttgcagcctgaatgtctgctaagcgatggtacaacatgaagaggccacacgtctgaactccccactgggcacgggc

SEQ ID NO: 9423 - DNA, 201 bp, Bos taurus
atcttttctgcatgtgctgtatatggctggacaaggatgccctaagatattaatacccacatgttgctatgtggcacactctggagtctgccagggtctccacttgaaatgctgacagtggggcccacgtgcctatatgcgggtagtgataacacatgggcagactacatatgccaggcaagtaatcaagaaaacttacac

SEQ ID NO: 9424 - DNA, 201 bp, Bos taurus
caggcatacataaatacatacttaaaccatataatctgatgagattcagaatgctttagaaagactaaactttttacagtgtttgtaaatgtgttaagaccaggacgaacaacttccagaatcactatcgtttaacatgcttagaacatttatctttgacccaatcttaatatttttggcttttcctcattgtcagaaaat

SEQ ID NO: 9425 - DNA, 201 bp, Bos taurus
actttttttttttaattacaaataaatttgacgtactcttcacctccaagggggaaaaagaaaactaaagtattttttattttggataaagaaatgccacgaatggagattccagcccagacttgccatgaatgagctctgtcatcttgggaggcaatttaatccacccttctccaagtgttgtgccacttctaaaatcct

SEQ ID NO: 9426 - DNA, 201 bp, Bos taurus
gaagaaaaggatgccatttagccactagaaaatagcaatattaatttacccagctacagactgaaaagcaaaaaatcatctcaatagattcagaaaaaaaccccacaaataataaattcaacaaccattttatgaaaacagtctacagaccctcacaataatcccatcagagggatgagggaacaaggcgatttatagtcc

SEQ ID NO: 9427 - DNA, 201 bp, Bos taurus
catgatacccacaagtgccaccccgataacaatcttggctgcaaagaaggtctgagtcttggtcatatcctcatcctcatccagagggaggtcataatcatcataactgaagttgaaggggagggaggaggcatgttcttggggtatactgaagttggctggaaaactagcatttccattctgggctgccatggtgaagct

SEQ ID NO: 9428 - DNA, 201 bp, Bos taurus
gggattcagtcaagcttttatgagttagggcaggcggatttgtgtgtggaagtgctggtcagcaggttttgattacagggctttggggtttggccaggtacggtgagtagacagagcagtttcagcaccagatcttccttgaacagtggaccctccacttctgagaggcctctggggtccaggttctagtcacacgggggt

SEQ ID NO: 9429 - DNA, 201 bp, Bos taurus
attatttcaaactgaaaacaatcaacatggctcaaaagacctgagaagaaactttccctctaattgccttgaaaattttttgatagagggcttattctggaactagagctatctctggagatctctgcaaagaatatggacagggtgttgtaggggaacagggctttgagatcagagtccactctgtctattgtctctgcc

SEQ ID NO: 9430 - DNA, 201 bp, Bos taurus
tgtgctaagtcaggccttagtgcctcggctacactctcctcgcgtgtactcttgtgtccctagtcagcaccagtccactccagagattaaagaattgaacttgtcagttagctgatggacttgagctccctgcctcatagatacgtgttgcctttgtcttttgttactgggctcaaagaaggcataccgtaaacaggatgg

SEQ ID NO: 9431 - DNA, 201 bp, Bos taurus
cataaggaagaggaaagtacgggcccttgcttctttctttcctaccatacccctccctccagctcctgtttgtttgaaatgaagtggaaaacgactgtgttagtggaggtgtcagagatggccagcatcatctgtggtcctctcttggttttcagtgccctctgtcatggcacacctccagatgatggctgatcctttccc

SEQ ID NO: 9432 - DNA, 201 bp, Bos taurus
gccaagaatggggaaaggactctggaaagattaagtaagatacttaacatagaggaccgggaataaggtcacggctctgttggaagaccggaggcgtgagggtgatcccgagggccaaggatgggatcctgggggctaagtcctcagtggaaagatccgagaggagataacgagggagaagattgagaatccagagaacca

SEQ ID NO: 9433 - DNA, 201 bp, Bos taurus
acttttaaaccgttccctcaagagaagttacgggtaggtcattcggtcgggacgaatatcagcggtaccagcctgatcctctttgcgtctcggtggtgaaattagaatcctctcctccccctctatcctcacctgtagctggacgcgcctctggatgttgcattggtaaaaatagccttcacttatctttttaaaagcccg

SEQ ID NO: 9434 - DNA, 201 bp, Bos taurus
tacacaggcagctgggagatcaaattggggtaggtaaggcagcagtgggctggtgtgggagtggcaaagctatttccagctaggtcctggccttgaggtcctggcttgacatcccctcatttctgcaggtgtgtgtttctgctctgctgtgtgtgttgactgctaagtccctgagcaaccaccctggatccagggaaaggg

SEQ ID NO: 9435 - DNA, 201 bp, Bos taurus
ctgactcagtccagcacagcctgtgatgtaggtgtggcctggttcctagggcagtgatgatcggggtggacctgagagtcctcaaccagttatacctcttggcagccagtcagatgaggcctgttttggatttattctgtatgatatatacatctcaggtggcttctgctaagtaattatcagcctaaatcttatataatc

SEQ ID NO: 9436 - DNA, 201 bp, Bos taurus
atctcctctgtgcgctggggctatgttctgcttggctcccaccatgctcaggctttgttccactgtggctcctcttggcacaggcccctcacttggatggcaggctatctccttcttaggcagatctctatacatatgtaaacaacaaaaaaggaagcttagcactgagggacatgatgggcccagggcaggcagcaacca

SEQ ID NO: 9437 - DNA, 201 bp, Bos taurus
ttttggataaataggagaaacttttacagaaactctgagggatgaaggaaatgttgtatgtgatcggccctttaaaataacagatgacactgataaaattttaagtctgtggataagtcataaagatgatcattcacaactaatggttagttgcaattttactgctgataaccgaatggggaaaaagtaagatattttact

SEQ ID NO: 9438 - DNA, 201 bp, Bos taurus
atatccccctcttatcctataggctgcttttcccaggctcctctgactgctagcttcatgctgaatggggccagttggaaataactgaaggtgggaaggttgtgggaggaaagtctatttttctctcttctctattctttgagcagcatctctaggagtggctgtgtcttctccatggatgcaatttctgtcagatcactc

SEQ ID NO: 9439 - DNA, 201 bp, Bos taurus
atttcttacttgtttttctcctcaatggtggaactcaagatttgaaagtttgagtgaaatactgttacaagtcactaatgggaacaataggtgctcttctgagggctttctttcatcaggaatttgttctgggtttcacttagctaaactaaactgtcatttctacattctataagttttgtaataaagataaataaatat

SEQ ID NO: 9440 - DNA, 201 bp, Bos taurus
ccagaacctgagggctactgagaattataaataaatttggcttcacaagtctggagtcataaatgacatttctttaaatgatggaaggggggagaattgaattgtataggaaccttccgtttaactcccttcctcccaaatatgtccaaaatttaaagaaatctcctctaaatataatcctcagttaaaaagaagcttttg

SEQ ID NO: 9441 - DNA, 201 bp, Bos taurus
attgccaaccagggcccacgtgggtagtgaactaatttagcctcctggacacttgatgaatgaagaatttcctcttgggcctaaattatagggcttgtcatagttgctctttcgtgatctgttatttggaggtaattttccaaaagggctggaacacagggccgtgagctagaataggattcaccaagcacagctgccaca

SEQ ID NO: 9442 - DNA, 201 bp, Bos taurus
ttttaagaaagaatgtcttatctctttaactttctcaggttatctgcccttgttccttcctgcccaggagcgtcaatgatgtgagtatcctccagctatagtttgtctttctctgtgacttgactgctgactgattcaaatgtctgtcacttccctctcataaaaaattctggaaggataaagaggagggtgacaggagag

SEQ ID NO: 9443 - DNA, 201 bp, Bos taurus
aaaatctagctcagtccttcaatgagcttacaatctcaatttttttaaactgtacaatgcagaacctttaaggacattttcagatataagattctgagtactgaaaatcatcttcatttatttaaaatgcttttgcatttataaggtattaacttttaacttatatagctgcttttttgatgggagtcttaattaccttta

SEQ ID NO: 9444 - DNA, 201 bp, Bos taurus
acattacccttctaaactaaagaaataaatgaaattgtctttgttctagagcagccttaactttaaaatcatcacgacttttgtcagcataaaatatttaaattccttaaaatcatttaaattttttttttaaaaaaaggagaactaagttgtagggaaaaaatctacttccctacctctgtgtctaaacatttttgggct

SEQ ID NO: 9445 - DNA, 201 bp, Bos taurus
tccactggctaagtttatgaagtgctcagacatcctttggaaatgaaagtgctgtatagtggcaagagctctagggtgggaaggaaaggaaacacagccacggagcctaagtctcattagcccaacatattgcttttgcaatgaagttagacatattttaagataattaagaccaatccatcgcactgaaatgcacagagt

SEQ ID NO: 9446 - DNA, 201 bp, Bos taurus
attcctttgaaacctactggtgaagaggcaaccagctcattctcactgtgtgtagttgatccctcaccaatgtcctctatttgaaccgaggttatgcacatagacagatgccaaatgaatggagatatcactagtttccttgttttggccaaaattcttagttccagtcttgtactttaacctgccactatggtttagttt

SEQ ID NO: 9447 - DNA, 201 bp, Bos taurus
aaaatctgctgtgatactgtgttcacagtgtttggctgcttgccattcaaaagccaatatttgagagacaagtgttggttgaaaagaaaaatttgctttgaataccaggaatctggagagaaggcagcctcatgttgaaaagccaactctgaggattctgtttgactataaaagtttttaaaaagagaacggaaaagataa

SEQ ID NO: 9448 - DNA, 201 bp, Bos taurus
tgttctctatgtctctgtctctacttctgctttgcaaataatgttaacttatttttaaactctgctggaacaggccatggttctcaatagcactgtattactatggactgcagtcaaactcctgatctgggactcttaatgataagtatttctccatacaagaaagctctgtgatttatagaaatgcagaaatcatacagt

SEQ ID NO: 9449 - DNA, 201 bp, Bos taurus
gattaggtgaaactctttcagatgacttcctaacaagaagtggcaagcactctgttgctttccgaaaactccaaaactagaacaaagcacttgttataatgaagagagaaatgaaccagtgtgtttttctggcacttttgaggctgaagatatccagctttcacagtggaaaaatacttctttttccatcaggctccaatt

SEQ ID NO: 9450 - DNA, 201 bp, Bos taurus
cattagaacctgaagcaaaatgaaaaatcagtaatacttatcctatttattcaaaagatttatattttattcatcatgggttttgtattgtcatttttttaaaaatatttcttatcttgagagacaagatagaatacaacagtccagcaagaaaaggagacctacagccactgagccccatagccagagcccagacactgg

SEQ ID NO: 9451 - DNA, 201 bp, Bos taurus
agagcagaagctaggcagcctagccccaccttcttatctcttgcagaggtgggaaggtgaagagtgagagtcctgggcagctggaatatctactctgcttgtatctgctgtgtgacctggggcaggtgagtgccctttgagtatccaggggccttcctcctcataaaaccagaccacttgagcattcagggtggtacaggc

SEQ ID NO: 9452 - DNA, 201 bp, Bos taurus
gggccaaggaacagttttggctacttactttttttggaagcagggttactttgtggtattatagcacctagcccccaaaaaggtatgtgcacgtggtggcattttaggcctgccaagatgagagtctgcacgcggaggggccttccatccaggtcacagagaggtcttgtggaatggggtgttcagtttgggaggcttgac

SEQ ID NO: 9453 - DNA, 201 bp, Bos taurus
tgggcgcgtgcaggcctagactgagtatctggaggaggacagcctggcagctgaaagatggtgagctgggtaggggctggcctgagctccccactgtctctacagaccctccagaccctccaaagctgtctgctctcctggatgtggaccagggccacacagctgtgtttgtctgcactgtggacagtcgccctcctgccc

SEQ ID NO: 9454 - DNA, 201 bp, Bos taurus
aaaggcagagtaataacacatgtgaaagtttcaataaacagcttttgtgttgtaatttttaatcaagtttatttgacttgccaattataaatatttgtttgacttattaatattacttttggaatggagctgtggaaataaatcaacactaaaaaataaaactcaagcaaatacttaatcagacacacatttatctttcct

SEQ ID NO: 9455 - DNA, 201 bp, Bos taurus
cctcttcaagaaaagacttgttgccagctgcagaagcgattgtggtccacagacagcacccagatgtcagttccatcaggagctgccttacctcaggccatgcccttccaagtacagtccatcctagaatggatataaaggctgggcatttttcaatttaacacaggacaactctggcaagcaatcattcctccagagctc

SEQ ID NO: 9456 - DNA, 201 bp, Bos taurus
aggatacaggtacttccttaactatggatctcattaactctgttatttcacaatgtccagtttgtcaacatatcaagcatagacacttgacacagtttgttgaaggacaattggcacttgacaagaagcctgggcaaatatggaaaattgattatattggcccattaattcgagataaaggatgccaatatgcgtgtactg

SEQ ID NO: 9457 - DNA, 201 bp, Bos taurus
agctaaactagcaaatataactgaacacaaggagggggtctttggaaactttgatctatagctggttggtcagaagcacctgggcttgtgattggcatctaaagtgggttgtagtcttgaggaaatgagtctgtggggtctgatgctatctttgggtaggtagtgtcacagttgacttatattgtgggacacccagcaatg

SEQ ID NO: 9458 - DNA, 201 bp, Bos taurus
gggaatgccttctctggataaggtgagctggtgtgatggccgggctcttaccctccacctacaggctgcaccaaagagcttcctacagggaagtttgcaggggcagggcagccacggggccatggagatctggatggcagccacgtgtccttgcaaattttgcggtctgtattatgagcggctgattctgaggttcctttg

SEQ ID NO: 9459 - DNA, 201 bp, Bos taurus
taagagacccctcaaaggaccatggaggcctgagccatggtccccacagccagctgactaaggttttgcaatcttgaaatccctgtttggcctttctccatgaagggcgctgtcagggtgttgccctaccacctgacaggtaatcgctacctgtgcatttttctttgcagcttccaaagtagaatttccatccacactctc

SEQ ID NO: 9460 - DNA, 201 bp, Bos taurus
tcagagtcaggcttttccgagtcttcatctacttgcctctccagcctcacatctgtcgagtttagcaacacatcttcccttctcatgtctccctatgccaaggtccaaggcctcctgcctaaatatgacgaagtcccaacatctttcaaggtcaactcatctaagaagtccttcttgattgctccagtctcccatctgcac

SEQ ID NO: 9461 - DNA, 201 bp, Bos taurus
tacccaacatgggggtaaatggatacaactgatagacacactggtgaccgattccaggtgatgtgcgatgccagatgtgggcctcttcctgccgcagacctaaaggaggtctttaagggagccctcctcttgtcatcaagcagtgacgctcagcagtgcttcaggttttggggatcagaggggatttgaaacatggcctcc

SEQ ID NO: 9462 - DNA, 201 bp, Bos taurus
agggaggcctggtgtgctgtgattcatggggtcgcaaagaatcggacagaactgagtgactgaactgaactgaactgaaagcatgtaccagtggagatgagtgggccaaactgtgatgtcagaaacacaccaaatataggaatcacttgtcctgcttagtgcccatgctttgcacctatttactgtcttttgggtgccctg

SEQ ID NO: 9463 - DNA, 201 bp, Bos taurus
aaaatagaggtaaattggtcctctttgaggtgtaaagacctccctctgccccctgggcagtctttttagccacttagcctgattctgaggtcttcttcttggcaacttgtaattccagatagcagcaagaaatataactgcacctgagcctggagggtttgtgccagggctggagaggtaggggggcatgttcctagaagc

SEQ ID NO: 9464 - DNA, 201 bp, Bos taurus
aaatgtacattagggtgcatatttaaaatgtttttactgatgggaatatgattaaaacattttaaaacatgactgatttttaagcctggtgaaattgggagagaatattagatctggaaggaatttcaaaggccttcagttcccccatcattccctctctcatttgatgtgcaaatctctctgttacattagattgcctcc

SEQ ID NO: 9465 - DNA, 201 bp, Bos taurus
tttggccagagatcttgtggtttccctcctaggtcctcttcccaccctgctccctgctctttgtcctgggaggttgctcttcagggatcatgtcaatgacttcccttgtcctctggccttcagctggacctggcccatggggagcaatggcaggctgtgggagggaggaggcgaggttagggtatctgttccccagctcta

SEQ ID NO: 9466 - DNA, 201 bp, Bos taurus
actgctgtgtctgactgtccccaactgcagtggcctcttgcttcctgtccccctcttgcctcctccctgaccctctcctctccatcctcaccatggccacaagagtgtgcttttaatttacaaattggatcctcccacacctctgctctcagcccaccagtgtgctgcacacggattgcaatcccacctctttactgtgac

SEQ ID NO: 9467 - DNA, 201 bp, Bos taurus
cagcaccttcagtgttctcctgggcccggcccctcctcctgggggcctttatcactgatgaccgagtattgtgtcgtcattcgtccagaatccagctcccggggggaagagggggcaacaggggcctgtttcccccaatgcccagctgcgggcctgccccagtcttgggccaggtggacaggtgaaggaagacaggacact

SEQ ID NO: 9468 - DNA, 201 bp, Bos taurus
ggactttggatataaggacagcccggatataagaaccattgccccccaccccacccccagtggcgctgcagcccaggaaccgccttccttgggaaggccccacagcacggtgactgacagcacgcccttaaccgcgtttcacagctaaggatactcagtgtcagagagcctagggacggcccaggagtgaccacggggtcc

SEQ ID NO: 9469 - DNA, 201 bp, Bos taurus
caagtctctgcaagattgagtgagcacacggagtttctctgtgtggtaagaagcctgacaccagcacaagaaggctcggcttcctaggcccaccataggcgccagacctgggggatgggaactgcccctgaacccagggacaaagacatgcgggcaaggccctactctggacaggacagttgggggaacttgcacagtcat

SEQ ID NO: 9470 - DNA, 201 bp, Bos taurus
gggctcggctgcactgggctggcgcaggggccccaggccaatttgctttgacacacacggttcctttgcagaaaactctgtacggtgcaaatgtcatcatctttgagggaatcatggcctttgctgacaagacgctgctggaggtgagaacaggctccaggtggacgacccgggtcctcctgcaggactggccttaagcac

SEQ ID NO: 9471 - DNA, 201 bp, Bos taurus
caggcgaacagagcacccccaccccctgggttcttcctgctgtgctggcacctctgcaccagaggcagcagtgccccattcctctgcagccaggggcctcctgctgggcagacccaggtaaaggtctggaaagagtgcagaagcacctcagggtgggagtcagtgctgacaccaacctgtctgctgcccttgagcacagta

SEQ ID NO: 9472 - DNA, 201 bp, Bos taurus
gagccccagggcagcaaaagcgaccagggccggcactcagggctgctgtgcgctccccccgcccctccacgcgggtcctcaatccgccaggatggctgtcacatagggcccttcccagctgcagttccttgccctttgctggagtcgggagtggcccttctcccttgcatggggtgcaaactgcctccctcagcccaacat

SEQ ID NO: 9473 - DNA, 201 bp, Bos taurus
ctggctctgaatctgctttgcccttgacctggaagtggtaaagaggggcccccaggcaggtccgcactggagggaaggggcagagacaagctttgaagcacgactgctgggcaatccaggcccccactcatccttcctggtgggttgctgcctccagcatctgcatcgatttaacgccttcaaggttggaccccagatggt

SEQ ID NO: 9474 - DNA, 201 bp, Bos taurus
cccctggactctccaggcaccaccgccctggcgcggccctggtgacgctgtatggagaccgagatgcgccctctgcttaaaggcggctgcatggaggagggctcctggggtgtcaggggagggcctagtttagccctggtgacaggccaaggcccctctccaccgaccccgcacaattctgggagaggtgacccggccccg

SEQ ID NO: 9475 - DNA, 201 bp, Bos taurus
gccacgaggaggcttactaattggtgagtgggtggacgagtagtaaatgaagaacagcccgatccctggaggaactggcaccccaagcctcggcctggcacgctcggttccccagctctctagacctccctgtttgtggtaccaagctcacccccacacccaccccagggcccagaagttacgtacgtaagacccggacac

SEQ ID NO: 9476 - DNA, 201 bp, Bos taurus
tctgcatagatgtcactgtttaaaacagtggacattggcccggatttgccaaatggcccagaagcccatgtggggaacataaaatcccctgggaacctctactgggacagtggatggcgcagagggacaaggggggagggggcaaggccagggctgagcttccccatgaggaatgttccttccggcacatggagcagcaca

SEQ ID NO: 9477 - DNA, 201 bp, Bos taurus
agggggtgtcctgagtggacatgacactctttcctggagtcaatgttgagagaggatcacagcctttcccagccatagaaacacccagtaaactgagttagaggcccactgctgtgacttcagaggtacatccacaaaatttagctacagtgggtcatagtatcccctgtacccacttcacacatgtctgcttgcgggaga

SEQ ID NO: 9478 - DNA, 201 bp, Bos taurus
atggatcagccaggaagtacggccgtcgcaagaaaggagactttctggggaaacatgtaacagaactccacggaagaatattcgggaaaaataacaccacaaggatagaagtaggccagtgacttccctcatcaagtggacttggataaataaagttaaaggctcatcagcgtcctcagaatcctattggttataattgtg

SEQ ID NO: 9479 - DNA, 201 bp, Bos taurus
catgctcccacttgtgcaacttcagcggcttcctgaaaccatgtggggtgtttctaaaaactacccacatggagcccattcccaggcacccaatgttttatagttctacacagagtaccgattgtctaaacacccatcacggcctgtaattctgtgtgtatatgtggtggtaattgaagatagctcagtttacaataaaat

SEQ ID NO: 9480 - DNA, 201 bp, Bos taurus
tcggatattagaaactcatcttcttgaaatatcttacttacctagaactgcctggtcacctaactgagatttatttccaaaatctcatttggaaaaattagggagattatttcttggggaaatattacacatcacaatgggagaacattttatttcagagaaatggttcttttccatttgatctgcctttaaaatccaccc

SEQ ID NO: 9481 - DNA, 201 bp, Bos taurus
gcagcagcagggctatctgggaaggcatatacaattgattggtgtgtgtaattgtcagacgtattgaatggacacttaagatctgtgcatgttaatgcccgtaatttataccccaattaaaatgacagtcacatagataaaggtgtctatgtgggattctgcagggaagttctatgaccctggaaactttttgcagaggaa

SEQ ID NO: 9482 - DNA, 201 bp, Bos taurus
ggtggacgtggggagacaccactgttatctatacatgtgcaacaacggctatagcaaactcaggccttccctcataaataaaatcttatgatcatgtgacgttctgttttcctattgtcaggagtgatgggagcatctcatttgcaaagagtcttgggaaaacaaaatctgtagaaaacatcatgagatctcaccctttgc

SEQ ID NO: 9483 - DNA, 201 bp, Bos taurus
ctggggttgggtggagtccctcaaagatccatgttctcacagaatcacaggatgtgaccttatttggatacaggctggggtaaggtggcccttagtgcaatgcgactggagtatgagacaagaagaggaaagcagaggtgcgcaggagaactaacaccacgtgagacagagtcaggggtgagagtgatgcggagtgagccg

SEQ ID NO: 9484 - DNA, 201 bp, Bos taurus
ttatctacacaatcttttttattatttgttttggatactttgcttgtttgtgtttgttcactattataaataatactttaatgatctcacacaatcatctttgcacacttttccaattattttcttagggtgaatcataaaagttggatgctagactaacttttaattgttagcttaggtctgtttattttgttgcgttac

SEQ ID NO: 9485 - DNA, 201 bp, Bos taurus
gacctcgggagtgtgtacgaggccaggcaaggatgaggcgtatgtaatcagggtagccagggagctctcccagacatgcagttgtttgattaaaccaagtcaccactggccagagcagacagaatcaattggccttgtttcagggcaaaaggccagggaggggaaggccggaccattctggcctcaaataatcaaatgctt

SEQ ID NO: 9486 - DNA, 201 bp, Bos taurus
tggcctgatctgcttcgctgtttgtacctcctcaggcctttttcccagcagactcgctgctcgctgatcagcagccaccgtggtggtcctgctcagcatcgtaagatgctgtcctgggccccatgtccactctcattcagctctctcctctccctctatgagacaaaggatgctgcgaggctgctagtcctgaacttgtcc

SEQ ID NO: 9487 - DNA, 201 bp, Bos taurus
attctaagcaaaacgttaagactggaacaagcaaagcagaacaaacacttcccttcccaattaacagctctcagggaaacagctcaattatcttttcaggaccaagtgtgatgtccattaatgctaatgggatccaggcaggaggctgaggccctctggcttctgggagccggaaatgcctggtttctggtttgtgggggg

SEQ ID NO: 9488 - DNA, 201 bp, Bos taurus
tatagaaggtacatgccaacttaacagtaacgcttctgcactacaggaaagacaccactgaatattactgagtcttgaactagtagagtcttcaaatcatccatttgtactggcatctgacttcttaataggaataagcatttctgtgattctaaaaggatgattcttcttaatgaggtacagagaagtccttcaagccca

SEQ ID NO: 9489 - DNA, 201 bp, Bos taurus
cattaagtgaggcctgacagtgtgcttgcttctaacacatgtaatgagccaagtcaggaaatcgggtgatgcacaaactccaggtaattggctgagcatcactgaccagcatggccctcggccctggaaacatgaaccccatcgtgcaccgagacctgaaatgacccccctgctgcctcagatgcccatttcagagcccga

SEQ ID NO: 9490 - DNA, 201 bp, Bos taurus
tgcatttatttagagaaaggcagtgtccctaagcagaactcacagtgccaggaaggcgccagaacccaaaggattattcaaatccctttgtcccctctacctttggggccagtctcactcacaggccatctgtacccaagtgcataaattcatgtgctcccgagcacccactgactccataccacctagctccccatctga

SEQ ID NO: 9491 - DNA, 201 bp, Bos taurus
aaaggcactgccaactcttttctggctgtaaagcagggaaaagtccctacctcctttctttacaagatgtcacactgaccaatgagaggatgtatgggattgctcgagctgccttggagaaaggcaaggtatttattcaacctagaattctgcccaaacactcgttactgaatgggttggaccccaaagggttgaaagagg

SEQ ID NO: 9492 - DNA, 201 bp, Bos taurus
ttcgctgaatcaagcctggaaaaactcttatcatggtcatatgtgagggtgagttaattccatgtctgaatttaaaactcctaattggggggtaaaaagttacataagtttaatttttctcttcagtatgtagatgtgaaacaaatcctctttcatatagaaagaacagttttactttgaagacacgatggatttcatcaa

SEQ ID NO: 9493 - DNA, 201 bp, Bos taurus
agttagaccctgtgtgtctctggagggtctacggaccaggccaggggcttctgggcgggaatgtgcacttggcttttgctgcgactctctaggtcagcgctgtctgcctgtcggatggtctgtgggcctgagggtctgttttattttcgtttttactgttttggcctctaactaaattaagacattggctgtgaaacttgg

SEQ ID NO: 9494 - DNA, 201 bp, Bos taurus
cttgctaaaacgggctggagaaagagggagacagaggcagaggtgtgatgtggtttagccatgtttaattcaacttgcagtgaactcagaggggcccgagcagacattccttttgctccataaaacctgaaccaagtcgccccatcctttcaaaggggtggtctgttggaggcagggactgccccagctggagtggggcct

SEQ ID NO: 9495 - DNA, 201 bp, Bos taurus
gggccatccctgagctgggccctcagaaggccttggactggctgcagaggagaaaactgccgaggagcccagtaaagggagacgctgggcaaaggaaagcatgcatgacaagaaggcccgaggctgtctgcagcccccaggaccacagtgtcagaagtaagagccaaaacctaagctttcaaagttcctgccactgcagtc

SEQ ID NO: 9496 - DNA, 201 bp, Bos taurus
ggtgatggggcttggaacatttaggactctaaaggctggagagtgctcagagagtggagaagcacagaaaactgacctaggtacccttcctttccttcccctttccccattatactataaatgttgagtgaaatgtgactaaaaggcaaaacagtacccaatcagcctgcattgtttgtgatgacaagcactgaggcaaga

SEQ ID NO: 9497 - DNA, 201 bp, Bos taurus
tcctgtcctgtttcccacctctttaacagtgatacctgtggttgggtcagcatgacgcacacatcttaaaagatgatctgcattcttacactgtttcctggaagatgctgagaggttatactgaaaataaaaaacctgagtgaccagaggtctgattaaaattattaacacagtgattcattttgacaaggtgttggctgt

SEQ ID NO: 9498 - DNA, 201 bp, Bos taurus
gctccatgcaggggcctctgaaggcagggccaggggcttgtgcttttgggacaacctgtgaggaactgtggaacacgtgcctagaccctctggaggctcctggatgaagattctagaggcctgtcccaggccagcgctagctccaatgttaccttctactctcccaacccaccagaaagctccctgctgggaagtcctttg

SEQ ID NO: 9499 - DNA, 201 bp, Bos taurus
gaatcaagtacgttttgaattatgcggcccttgagtgattctgcctcacctctagagaaacgtggtttcctcatgttgtgttctagggatctcatggaagtttgcaaaccgctggccaccatgctggtgaagtccacacaagcccacatatatgtgggtctttatatggtgttttataaatggagccactattctagactc

SEQ ID NO: 9500 - DNA, 201 bp, Bos taurus
cagagcctttctggaaagtccagtggacacccactgtggtgtggtgctgagagtgggtggtcagggaggaccttggaaaccagacagaggtcagaggtgacggtgccctggagctgagataggcctgttccccttccttctggtgtgagcaccccaattctgttcttaggccctgctcttccctcacaagtgctctgggct

SEQ ID NO: 9501 - DNA, 201 bp, Bos taurus
aaactgagccatagagcagccaatctcagagccagagtggttcaagcccagggaatctggttagaggctgtgcccttaaaccatgagtcctccgtggtggtgctacggtgcccagattggcctggagtcagcctttgtcttggatgaactatttggattaaaataaaactgacttacttcactctgtataatgggttccag

SEQ ID NO: 9502 - DNA, 201 bp, Bos taurus
tgttggagaagtgactcacactgttggtcacactctttattttgaaattggggaagcaaccctaagacaagtgacgaacttacatacaccaagcaaccacggcatctcacagggtacatcattctggaagaactgccatccttggcactcagctttcttacctgctgaaccactggtgccttgcagcagcccagctcaggt

SEQ ID NO: 9503 - DNA, 201 bp, Bos taurus
aaacacacagagacaatttgagttttctttctttcccttcaagtttcctctttttggccaactatgtggcttacagggccaaagaggcgctgcaaacttcgggacgtgcacactcccagccttctctagtgtggcgtggcttcatgtctgggtacaagtcctgcacatgtcactcggccagctgatcgggcctcagtttcc

SEQ ID NO: 9504 - DNA, 201 bp, Bos taurus
agtcaggacacggccagccaccctcagccacagccaaaacccacgctggcttccgtggtccccgactggctgccaacctgggcttggcacctaagcaggatgtctgcaggatttgctgggccctttgttcaaaaatgatcagttatgaagaatttcaagatggtgacaatagaacatcaaaccaagcacgggcccttctga

SEQ ID NO: 9505 - DNA, 201 bp, Bos taurus
tacagtttaagcattttggttacaacgggcaattttctgtacttttttgtgttttcctctgtggattttatggtttcatcaaggcaaagagttacaccagactgtaattaacagtattgtgcttgtttgaatacttgtttttgtgtattagctccagaaaggtcaggaagaggaacagctgctgactgaaggtggattcag

SEQ ID NO: 9506 - DNA, 201 bp, Bos taurus
aggtgctttcagtgccaggacctgagggttttgctctgcatggttctacccgccaaagggcacctcggcagccctctggtggcctggcaacggcttttgccccccctgggaacggaaggagacagagctctggaagcgacaggtgacctgtgttctggagtctgctgggcctcctccatggtttggcactgagatcccaca

SEQ ID NO: 9507 - DNA, 201 bp, Bos taurus
tcgaaaggaagacagagccagtgatggagagaaatcaagtcctggtgacaggatttgatctcctggagccagaaccagaccatttcagttacataaaaattgtttttcgtaagtctattctgtcagagttggtgtcactcatgacagagccctgcgcagttttctgtctctttcttttgtgaaggatacagtcacatagga

SEQ ID NO: 9508 - DNA, 201 bp, Bos taurus
ggggccagaggaggctgctgggacaaagatgcactgagagctggaggagtccagcaggtgaaagctggaggattcgacagcaagtgcaaaggtcctgtggtgggctctagtgtgggggccctcccagaccacagtgacagctttggcttcttcctcaaggatgatggggagccacagagggttctgagctgggggagtggg

SEQ ID NO: 9509 - DNA, 201 bp, Bos taurus
tggcatgtgtccctgctatgtcccatgattgctggcctctgtctcctcgaattctcactacggccccataactgggggcctctttgtgtccccatcttatcgaaggggaagctaagcctcacgaagatgggttcgcaggtcccaagtcactgctggcagaacccaagtcaacccaagctgtcaggccccatctcagcccaa

SEQ ID NO: 9510 - DNA, 201 bp, Bos taurus
ggccagcccatcttgcatttactcaacctgcttttgcagccctggaaaatatgtaaataaatgggtaatgctgttccaataaaactttatttacaaaagcgggtgatagggtggagttggcccacaagccctagtttgccaagcctggtttagcccaacaggaactgagatgcacaaattgaagcaagctgacctcttcac

SEQ ID NO: 9511 - DNA, 201 bp, Bos taurus
aggctgaggacagtgggaagcctggggcctcggggagcttccttccagcccaatggacctgtgaaaggatctgcttttgttttagttttcagggctgcatgatgaagggccacagatggcagcttgaaacagcaccacctatttgctctcatttctgtaggactggagttcacagtataaccagggccccttctcaaggtc

SEQ ID NO: 9512 - DNA, 201 bp, Bos taurus
agagatgcctgtccctgaatgtcagtagtgtggagctgagaactctagtgtaggcagagcggcctccccctaggccaccaggtctcccagcttgggcctcgcccagtcagtcagttatacccaatgtcaccctgaccttgccactccctgattcaaccacctcaatgattgctctttatgagtaaagcccggttcctctca

SEQ ID NO: 9513 - DNA, 201 bp, Bos taurus
ctgcttccctcagtttcttgtgcctcattctccaccaagcgtccatcacaggcagcagtggcccaactcaagggcatccttacagctactttcttggccagcatcttcatctgccagggaaggactctgattggtcagtttgggtcttggatccacccttagaccaatcatcatgcccaaagaaatgggacactcccattg

SEQ ID NO: 9514 - DNA, 201 bp, Bos taurus
gtccagggcaggcttcggtgcccatggacagctttccctacagctgaccgcaaagccagctctgagagccattctgtcaccttcctctatttgccttggagccagctcgggagatggtgtgacacacccacacaaagcttggcagtgcttctcggcttggcaagcgctggcggagatgcgcagaggtgttcgtgaagggga

SEQ ID NO: 9515 - DNA, 201 bp, Bos taurus
ctcgctgtcagcaggctgaagcagagcttcccaacccaggtttgcctgaatcagctgaagcagagcaaatgtgagaataaatgcttgttgttgaaagaaagaaatcaggaagaatcaggccaagtaacacagagctcagtgaggcagggaagggccagtggtctggtgtctcaacagtaagcaaattcctggagggcagga

SEQ ID NO: 9516 - DNA, 201 bp, Bos taurus
ttaggtactggagattcatgttgccagctcttcgaccctctgcgagctgagtattttttaagaatgggagctacggcggcaacaggtccccaagggccgcgtcgtgtgccgtaaaatgctcggagcgtttatttaattaacggaagggggatgggggcacaattcacagccagaacgggctatcgcgattggaagacacac

SEQ ID NO: 9517 - DNA, 201 bp, Bos taurus
tgcaagctccctgagccctgacgtttagggttttacggaggatccatttcacggttgtgattgagtaaatcattggccattggtgattaactcacttttcagctcctctctcctccctggaggtcagaccaaccttctaatcattccaagatctctttggccacagtccccttcctgaagccatcaagggcccccaacatg

SEQ ID NO: 9518 - DNA, 201 bp, Bos taurus
aaagtagcctgccttaaatatgactttctgtatgttttcttctaaagtaaagttttgttcaaagcgctccttttgcagtagtatagatgcttctagtgacgggccactgaagggcttaggtggtgacatgtctatagtgttggctgcccagagttggattagtggggccaggacagaaggattgagagcctggcgattctg

SEQ ID NO: 9519 - DNA, 201 bp, Bos taurus
aataccaagttagacccagggccaggctaatgaggctggcacagccgccacagcctgcaaagggaaagcagacagattctaggttcgaatcccagttccatggcttagcacatgtgatcatgggccctcaccatgcctgtccgagtctcagtttacttgtcacaacaccccagtggtcatgctttaggggtttcaaggagc

SEQ ID NO: 9520 - DNA, 201 bp, Bos taurus
tcaaatttatatatcccattaaacatctttcctgaatttcagatccacatattcaactacctacctgctgtcttggatgtgtaacagtcatctcaaaacttatgtccaaaacctaatttactttcctttaccttgcccctttaagcttgccattctctatgctatactaagtcacttcagtcgtgtccgactctgtgcgac

SEQ ID NO: 9521 - DNA, 201 bp, Bos taurus
gccaccaactctggatggctcaagcagacatgcgtggatggttgcctgagtgccagcaggaagtgggcaagagcaagaacataaaaaagcacaccttttccggccatcatggcctgcactttcagctctacaagctccaggaccccacaacactgagatccctgccatgtcctgcagccaaggaggggggcacgattttat

SEQ ID NO: 9522 - DNA, 201 bp, Bos taurus
ttttggccaaatcatttcactggtatggattcccagtgcttacactctgaaacaggctactgtgtgaattaagcctaacatggtatgcgagaggttctgtcacaggtgggcctcagcccatagtaactgccttcctccctcctatcattcagtttgcagaaactgaagatgaattttctagctgtgttttgcagtggcatt

SEQ ID NO: 9523 - DNA, 201 bp, Bos taurus
cacagtaatcctcatttctaggaatctaaatatacacaaactatgcacaaagttattcattgcagcttcatttgtattaacaaaagattggaatcaacccgaatgaataaacaaggatacatttccttctgcatatcaaatgaccccaatctggtgaaacacaaccaccacaggctttattttgctcacggattctgtagg

SEQ ID NO: 9524 - DNA, 201 bp, Bos taurus
ttgaaagaggtcttttccctcctccactccactgatcctctggggcaacactgcctctgttttgcagcccgtgagttacctgccttggccaatgtagggcgggaaccttgcctttccatccagccccagccactgctccctcccctctacctgtagctctgcctctgctttggcccatgatgcatctgggtcctgccgccc

SEQ ID NO: 9525 - DNA, 201 bp, Bos taurus
gaaatgagaaaaatcctgtgccggcttagaacatgcctgtcacggataaatagcaggggctcagtaaatggtagctattcccttgcaaaccaaatctcccgtggagaccaagctaggacatgaggaaagaatgggggctctgcgaaagctgaagctctctcctctctaccttgcggtggccacagaggcccctctcaaaag

SEQ ID NO: 9526 - DNA, 201 bp, Bos taurus
agaaggaggaagccaagatccgcagtaagaatctctccgcgggttagttgaccctcacctggctctctaggggaagccatcaggcccaccacctcgcttctgaggcagaggggactgctaagatgcacagcgacagcttactcatcacttagcacttgcaggccctgtgtgctctgtttttacgggcatactttcagtcct

SEQ ID NO: 9527 - DNA, 201 bp, Bos taurus
tccaatacaccatctgaagctcgtttaatgttcatgttccatctccctttttagtagcaatttgaacatccagttgacacaactgggaaaatattactcttaggatctctgaaagaatttcatagtctgttagtttccatagtgtgaaatttataaacttttagctatttggatgaatgacgtctgcagttctaatggaaa

SEQ ID NO: 9528 - DNA, 201 bp, Bos taurus
actgaagcccacaggcctaaagcctgtgctctgcagtaagagaagccaccataacgagaagcctgcacactgcaatgaagtgtagtgcccacttgctacaactagagaaggcccgcacatggcaatgacaactcagtgcagccaaaaattaaattaattaattagttaatcctttaaaaaagaatatttatgttgttgttg

SEQ ID NO: 9529 - DNA, 201 bp, Bos taurus
gatttagggtgacagtccatttccaggaggagatgggctctgcccttgtctggccctgggcacctctcattcatctgcggcctcaaactgtaccctccagcgctatttactaccccctcaattttcaagctcctctgagctaccgggaaaccggccaggagtgagtcaggctggttcctgcgggcaaaaactttgcatgga

SEQ ID NO: 9530 - DNA, 201 bp, Bos taurus
atcctgcaagaaacagaaaacccacctgaaccttacagttctcttgggtggttctagaattcatgtctgttacctgctgagtacttccccaccatgtgacttcccttggccttcaatcctgggaaagtgggggagactgatgaaagccagtcccagagcttcacagctgtgtcccgtgggtagcctttaggaagagatgcc

SEQ ID NO: 9531 - DNA, 201 bp, Bos taurus
gccatctactttgggtaaggaaggcccatcacagaggggtaggcctctaggaagccaaagagaaagtcaacacagagcggggagtgagaccccggctgaccgctgcctccgggctgtgtggccttagagtggtagtttaactccctgggccgcagttgccttaactgtgaaatgggccacggcgcctccatcacaggactg

SEQ ID NO: 9532 - DNA, 201 bp, Bos taurus
agtgagggctgggggacagcctagaggctaggggagatgaagggcagcgagcagaagcccagaaggtggaaagaggggcagagctgggccgtgtgggctcggtggcttttgctcagacagtgatggggacccacagaagggtttgagcagagaatgaacatggtcaggtatacatttttaacatcacactttggcctctgt

SEQ ID NO: 9533 - DNA, 201 bp, Bos taurus
agtttgcatgtatgaaaggccagagcacgggcatcagtattagtaaggcaggtgtcattggctacaggtgaaaacgagggtagtaatgaactgccagccaatccccagcctccatggcccacagggcaggcctggtctcccacagcttccagctctgcactcggcaccatgacccagaccaggcttttccaccatgaacac

SEQ ID NO: 9534 - DNA, 201 bp, Bos taurus
actcagggcccccttcagcccagcgctttctcttcttccagatgtgccctgccattgatgcagtcctggtgtatgtgaacaagaagtgggccagcctgaatggtatgtagccctagccatgccttgctcccacatggggtcagcaggatggctagaatttttggatgtcccactccccattcaagtacctgctcctggccc

SEQ ID NO: 9535 - DNA, 201 bp, Bos taurus
gaagtacaaactttccccagagtgaggggccccgtccagcctccattcctggaggcacacaggtgacccagaaggcgagagggacccagggggctgggacgcgtccctgggggtctgaaaagggccctaaggaatgcggagggacagattggtgagaggataaagaggtgaggcttgagatatatacagtccttggttgga

SEQ ID NO: 9536 - DNA, 201 bp, Bos taurus
catcaaagtcacaggagaacttagaggtcatcattttaaccattttgcttaaaagtctagggagactgacccagagagggataagaactcatctctggccacatgtgacttgaatgctacttattttatactttctgtttgcatatgttcagttcagttcagttcagtctctcggtcatgtccgaccctttgtgaacccat

SEQ ID NO: 9537 - DNA, 201 bp, Bos taurus
tcacagagagggggatgaagggcagcagtgatgaggtcagggtgatttgaatgggaagattcattttgaggatccctaagaagtaggtcaaggcagaagggcaaggctgggtcatgaagcgctctgtatgtgtgtgttagccattcagttatgtccaactcttttcgacttcatggactatagcccaccaggctcctctgt

SEQ ID NO: 9538 - DNA, 201 bp, Bos taurus
gatccagatcccacacacctcagagcagccaagcccatgggccacatatggagttatgctgtagagcccaggagccacaagcactgagtcaccacactgagactcctgaagcccgtgggccctagagacggtactctgaaacaagagaagccgctgtgatgaaaagcccgcacactgcagctagagtagcccctgctgcct

SEQ ID NO: 9539 - DNA, 201 bp, Bos taurus
tacagcagaaaaaatcagttacatttatacatccactcttttttagattctcttcccatctaggttattacagagtattgagtagtttcctgtgctatactgtaggttcctgttagtcatctgttttatgtttgctactgctaagtcgcttcagtcatgtccgactctgtgcgaccccatagacggcagcccaccaggctc

SEQ ID NO: 9540 - DNA, 201 bp, Bos taurus
aacttgcctgccatctggtggggactgacccatcaggggaaaaaaaaagaaagctaagacgcaatcaagaatgagattcctaggccccatataaatatcacttcttccagggagcactcaggtattgaagttactggcttcctccattgtccaccccaacctctgttccagcactgagcgggcacactggatctctttatc

SEQ ID NO: 9541 - DNA, 201 bp, Bos taurus
aagcaggtacatcataacatgcatgagcagtgctgtaagtggtctcacctgttacataactatgtctttacaaaacgtggagagcaaaaggccctggggcgagagagcctgaccaccgccatcttggctaacttgctttccctgcacgtggcacaagccaacctgcacaaccccaccggttgttttagtccctgctacctc

SEQ ID NO: 9542 - DNA, 201 bp, Bos taurus
tccatgggattttccaggcaagagtactggagtggggtgccattgccttctccaatagaatgggctattgttgactaatgccagcatgacggcctatatccacggtacttataattatgactgagcagggacagatcgtgcccagccaagctatgttaccagcagaggcccccacacagctagaaccagaactgggtcaat

SEQ ID NO: 9543 - DNA, 201 bp, Bos taurus
gaaagactggaaaggcacaagccagaattgtttattcaatggatattgctgcagaatccttgaggcccttctttctagtttccctaccatctgtacttgaatagagcctgtctttccacatatgtaaaatgaaaggagtagattagatcagtgttttcccaagaatgcttttgaaaccactaattactagacatattagca

SEQ ID NO: 9544 - DNA, 201 bp, Bos taurus
ctatctctgccttggttttgggcagcctggctaagggtactggaaaaatgtgtaatgatttgttggttacagttagagaaaagattggccccattgccaccccggattacatccagaatgcacctggattgcctaaaactcgctcaggtatgttcagaggcctctagggattgggattggatgggccaaggcccactaggg

SEQ ID NO: 9545 - DNA, 201 bp, Bos taurus
ttaaggataccacagctggagtcactgctttcatcaccactgcatggtgccatcttaaagaaattctaccctgtgtcttacactatttgttcaagattcaaagtcctggtggaagcattcaaatggccatgcctggatcgtgttgcctttgccatagttacaagggggtgatggagagggaaactttaagcatctttggtt

SEQ ID NO: 9546 - DNA, 201 bp, Bos taurus
aaaaattgacagtcgactggagccgggcccgggatgagctaatgaggaaggagagccagtggcagatggagcaggaggtaagagaaacgggtgggaatagcgcgaggagtgcaggttgggcacggcctggtcagtgccagaaggaacgggctaccttcaggacctggatgggtactgagctgtagtttaagtctctggccg

SEQ ID NO: 9547 - DNA, 201 bp, Bos taurus
tgggtctgcacttggcatggagctggctctaaatttacaccacctgcatgatccaggggaccaggcatagaaattaatgcagatattgtccctgagctacgaaagtcaagtcgggcccttcctccccaacactgtcctcgaagggaggagaatcaggccaggattttattcagcaccagactgatcactatacaatttcct

SEQ ID NO: 9548 - DNA, 201 bp, Bos taurus
tggtcttcacagcggtctgcagggatgcgcctgaacgttggggcaggcaggtgcatctggaggggccagggaaggtggtctcactggggttgtaggaagatgattaatgtggctctgtgggcatagggcctgtgggcactcagtgagaggtgacccatctctgcctctccgtctggctgttgtcagagcagggagcccagg

SEQ ID NO: 9549 - DNA, 201 bp, Bos taurus
gtatttctgaacagctgcaacacttaggatgcttttagttacaagtaacaggaaacccagttcaatttgattttgcaataaaggggatgtgtgagtacgcattaatagggaagtctggggaaggtgtactgctccaggactgtcggttgtcttagcatgtcacctctcactgctgtttttacattaaacccttgtggtcag

SEQ ID NO: 9550 - DNA, 201 bp, Bos taurus
ccttctgggttcttagatctcaaatctcctgttttcctaggactttctccttccctcccacctgctaaagacaaacaccagcaatagcaaacccaattaagggccaaggaaagggggatccagaggctgaaggaaagttgtttgtgaacacactgtgggctcaggacccgggatcctggaatccagttgcctttttgcagg

SEQ ID NO: 9551 - DNA, 201 bp, Bos taurus
atgcagaacctgctgggagtcaggaaacctgaattctggtcctgactctgcctccagtttgctgtgtgaccttgggtgaggaactcccttctctgggccagttcctcatccaaaaaagtgaggggtttgacaaaaaaggaccaacactgtgtgattccactgggaatacttagaacaggtaaattcatagggacagaacgt

SEQ ID NO: 9552 - DNA, 201 bp, Bos taurus
gccatagcagggctgcacgacatgatgaatccagcagacggaaaggggagcccaggtgaactgatgctacagtcagtgcccttcttaacccataagagtgggaatcaggccaagaagcccaggccagagaaggaggtcctcactggaataagcagccccttcagaggtcctgaaacacagcagggttccttctgggaaggc

SEQ ID NO: 9553 - DNA, 201 bp, Bos taurus
tggtcctgatttgacaagtcgtatttcaatgcgaatgacttcactcttcctacatatattgtattgtaaaatttgataagatcacctctctcctctttcactggtccactggagcagtccggtgtttttgtagcatcttccaagtctgttaaaagaattcaatgttgtgataggtgtaccttaatctataatttgaggatc

SEQ ID NO: 9554 - DNA, 201 bp, Bos taurus
cttccagctgccaccgatgctagtgacttcctttgaaggcaaacacggcagtgtcagatactgcatcaaagccaccctccaccggccctggtccctgcccgtcggacaaagaaggcgtttactgttattgagcctgtggacagcaacacaccggctctgctggcccctcaagccggagctcgggaaaagatcgcccaatcc

SEQ ID NO: 9555 - DNA, 201 bp, Bos taurus
tctacagtttggttcttcactagaggcctgggtctcatggactgacatcaccaaacggacacctgggatcttcctccttcgcttatgtgcacccatccccccttcacaggccagcttcctgccttcgagacttgacctcccaatggttcctgaatccttccagctctcttcaagttcactggcaacatgctagtccaagac

SEQ ID NO: 9556 - DNA, 201 bp, Bos taurus
gtggcatttctcccagcgctggggcactgggggcctttccctcaccaggtatttatgcagcccacccccctccgcttcctcacacaccatgaagggcctctgggacacacatacgagtccctactgtggtccatgtgtccaaactctgtgcacaccttctgccatcctctgccccttgcttttctgtgctcctggaacaat

SEQ ID NO: 9557 - DNA, 201 bp, Bos taurus
agcctcactggtgggagcgtgcgcctccgcagcccccacttctgtgttgttggggcaagccagccatgaggcagagctgtgtgcattgggaatcgcacaagcatcttccctcaagctgtgcctcaggccaggatgagagactagagcttggggaagacagtgaccttgttgtctgtgtccttcttagctacccattccctt

SEQ ID NO: 9558 - DNA, 201 bp, Bos taurus
cccccctgagttccgggcacgtggggtgggccggggaacctgctgggcacggacagtgggctagcgccttcttcaggagcatctggatgtcctcgtgtctcgcctgggcctcctcccacaggtcccggcccaggccctcccggctcagcgaggccacctgcagccccatggctgtgagcttctcggcaggaaactcggacg

SEQ ID NO: 9559 - DNA, 201 bp, Bos taurus
tgggctacagtccaccgggtcagaaagggtcagacatgactgagcacatgcattatagatactgaattattattcttggcttctaaacacattgatcaacaggtatctctgaggaccccaagttccataagttccataaagatctatccaggctacatgctcattgccttcaagacaccagagatcctaagtcctctcgtc

SEQ ID NO: 9560 - DNA, 201 bp, Bos taurus
tgttgggtgcaagtcctcagtgacctctggacttgaacagccctaggggctggcccaggcatatttgggctcaaggcccagagaggacaaatcaaggtcatggaactggtgtgcagcaaagctgagggcaagatgtaggtgtctggatgccgagtctattcagttagacagcaaatggttagatgcttggccaagggtcaa

SEQ ID NO: 9561 - DNA, 201 bp, Bos taurus
atgttaggcatgaaaaagagggaattatgggctctatgtcttaaaacactccctcctcctttgcccccaagaggaagagtaggaggaagttccttttgctctggtgaacttcatacctgggagctccagcaagaacaccccggagcttgattaatgtcacctagcgttggaaagcccaggtgacccgtgcccaaccccttc

SEQ ID NO: 9562 - DNA, 201 bp, Bos taurus
ttaacctatagtgaaaaaaacaaatcggcagtaacctagggaggggacaaaaaggagtagggggaagttttgggtttttttcctggggaagtgttataaaggttcatgagaagattaaggggtaatgaatatgtctaccgtcttgattgtggtaatagtttacaggtgtatacttagtccaaaatttatcaaattgtacac

SEQ ID NO: 9563 - DNA, 201 bp, Bos taurus
cccatcttgaggcaccagtacatgcagaaatggagtatttcctgccgtatcagtaaacaaggatgtcacagtcaccagcgattgcagccaccacagatgacgggccagtgagccctgagggagctcaggaaggaaagaacacctgccatctagcagccgtcagactgcagccactccctatactgagccttgaagaagtgc

SEQ ID NO: 9564 - DNA, 201 bp, Bos taurus
ctccaacgtggctgttggcaggaggcctcagcatctcatgatgaggtctttccaaggctgactaagttgtcctcacagcatggcagctccttctccagagcgagtggcccagggagcaagatggagcctgcagtgtctgctgtgacccagcctcgcagggcacatgccctcctatgatgacacttggcagtcggtcctatt

SEQ ID NO: 9565 - DNA, 201 bp, Bos taurus
gaggtggcacactgaaccaccaggggcgcgcggccactaatcagccctacatgtatgttgagcaacagtgtcatcattagaatgacaggcctgtctccctttgtggaaacagcagtgtgggcgaggtagtgaggagcactgcccctgtggttctcaaggtctggggcccagtctaggctctaccacgagcttcccccggga

SEQ ID NO: 9566 - DNA, 201 bp, Bos taurus
ctggggacgttcacataagagaggagagggactttcttctctcaaaccacagcccttctttgtgggactttgaaatcctactggccgtaaagcaactgcagtgactgtgcttggcacagggcagggcatggaagtgcccagcggtggcagaaacaatgtcccacagaagcaatggtaccttcaggaagtggtgttggtggc

SEQ ID NO: 9567 - DNA, 201 bp, Bos taurus
ggggtgggagggactggcaactctgagggaggaggcagaaggaccctgaggctggggcagcaaggaggacccagctggtccccacagggccagcttggctttgccttcccaggcagtgacttcaaagcccttcatcagaagtgagtcaagatgtgtcggtccctggaggtgtccctagccctcggaaggcctctgccaggg

SEQ ID NO: 9568 - DNA, 201 bp, Bos taurus
ttaaattagccatatccctatttttggatatttaggtagcttgcatgttttcttcagtgttataaataatactggtatcttcaaacatatagcctttctatatttaggaattttactttgagtacattcttagaattaccaccgagttaaatacataaactcttttttatttgtctggaaatctattgcctagttttgttt

SEQ ID NO: 9569 - DNA, 201 bp, Bos taurus
gagtggtcctgggaggcaggaaggccgtggcaggtcctttcatttccatggggaagggacttccacatactctctgcagttgtctgcaagtctaagaaaggatggagggagggaagggctggggcctcaggctagagcatggtgctgatgaagttccagccggtccgatctgcggggagtttcagggccgcagttgcccag

SEQ ID NO: 9570 - DNA, 201 bp, Bos taurus
ttactgccatttcactcctgcctagctatcccagagaaaggacacgatactggacactacctttagcactgcatcaggctcagctgaaacagccaggcaggtgtctcttcggattagatgagggaaggtccaaaaaagctggcaaagtgaaagctttctcatttgaacatcccgtgttccttacaagcaagacgaaaaagt

SEQ ID NO: 9571 - DNA, 201 bp, Bos taurus
cattctcttacactcctgaccttgaattccatttctagcctgggcttcccccaggttctgacctccatatctctgtccctggccaagcaccctgatcctggctcctaattgctccctttgcttaactgcctgatttaatatccagatcctgaattggccttgggctctgactaattgcagcctagggctcggcagcagggg

SEQ ID NO: 9572 - DNA, 201 bp, Bos taurus
ccgttctctagctgtgactgtgtcctgaaaaactctgaatctgggagaaagatgatttaaacccgctttgttttccacacaaagttctgaaggtatttacatatttggcccctggtccttcagcatctgcagtgactggcactgccggcgtgttttcttcctagatcatttttattgccagtgtccactgttgctggaaga

SEQ ID NO: 9573 - DNA, 201 bp, Bos taurus
gctttggcccaccagggagtggagaagtttgccaaagtgtgcacatcttgggtgctggggtaagcagcccatggtaaaatgccatgcccctggtggtgagcgccaccgggtgtcccctggcctccttcctctagagaagcaaagactcaataacagaaccaagatggaacagcccctttccagtccagtgtctctccagcg

SEQ ID NO: 9574 - DNA, 201 bp, Bos taurus
tgaaggacaatttcactcctggcctcttttctggagccctagggctccaagtcttccatgttgcctgtcatcaatccctgaatgaatgtgagaagacctggtggccatgggttcttggccggtctttccaggatcccatctcactcctcctcacctgcctgccttccctccgttggctgcccttgcctccccagccaggac

SEQ ID NO: 9575 - DNA, 201 bp, Bos taurus
ttgtggaaaacagtttttccacaggccgagggtagtggtgatgcgggcagaagatggtttcagtttcacccgccactcacctcctacagtgagcctgtcttctaacaggccacaggccggtaccagtccatggccagtgttgaggacccttgtcatacaggatatctgctcgcttttgcctccctgaaccttggaactcct

SEQ ID NO: 9576 - DNA, 201 bp, Bos taurus
ggacaaaggagagcagcctcatcaacccctagaagcccaggaaacgctcgctcacagtgcactcctgaaagataaccacggtggagcggcaggccgggtgcgctgaaaggaaggaccacaggtaaggaaaaggatccagaacaggtggacacactcccccagctggactggccagggagagctgggaagtgggtggagaga

SEQ ID NO: 9577 - DNA, 201 bp, Bos taurus
tttcaaaagtttgtctaacaacaccctaaatattttaagtaataattcattcatttccagtcttgactagtcacagccatccagagttctctggccagccggtgaccccatcaaactggtataatttctgcctaaggcaaagctgagtgttttaggtaacttgggtggcctgatggcagcttgttgaaatattaaatatag

SEQ ID NO: 9578 - DNA, 201 bp, Bos taurus
ccccacctggccccatggcacagaaagtgggcaatgccacccaggcttgcagtggtatgaaggtgaaggaggggtagcagtgggaacatgagactgcccacagtccccttggccagcccccaggccagagcatccattggaggggatggcatccgaagggaagagcatccaatgagggggccccctgcagagctgggaggc

SEQ ID NO: 9579 - DNA, 201 bp, Bos taurus
gggcccgggagggctcctttgaagctcgctaccagcagccctttgaggacttccgcatctcccaggagcatctcgcagaccattttgacggtcgggatcgcaggtgaggggtgggggcaaggtggcctggaggagtggtcctgagaggctgggggttggccggccgccctcggttcccctcgcccgtccccccaggcttca

SEQ ID NO: 9580 - DNA, 201 bp, Bos taurus
aacctaagtttggccaccatccacaagacatgaaaaactgcagaaagcctttatgtaaaataaacacgaaaaaagctgacggtagtggcctctgaagactgtatgtgagagactccgggcagctttcttttgtcagcagaaattctctctacagcattcctctggaggtgtgctttccatcaggccatgtactgttaccaa

SEQ ID NO: 9581 - DNA, 201 bp, Bos taurus
tcccgctttctctctcttctggccttgagcatgagtaagctgcctgtgcagaggcagaagtggagcgaaggtcctctgagccctgctcctaggttcccccagaggccacctccccgccttcccctttccaaccagtctgccagccatcgacacgtctacactcaatgggcctattttctcacttcctcttccctttggaat

SEQ ID NO: 9582 - DNA, 201 bp, Bos taurus
gtagtatcctggtttcacactgtcacttgcaaaccaggctcttcctttcgacacaaaatgcccctttgctttgaagcccttgctggggccatctggcaccgcctttgctgagatgacactctttcatgcaccattcaccatcctcacccaagctccatcctctgaagcctggctcccagtctgccctccactctgagcatc

SEQ ID NO: 9583 - DNA, 201 bp, Bos taurus
agcagggccatccctcgtgaagactcacgttaactgaggttaggatactgacattaaaaaccagtataggagttttctctccagggccaagtttacctgacaatgtcctggaagagtctgctttcagtccaagggagacattccttgatgtttgaggatgccaggctgagacatgttcactgtgccgtagggccggtctga

SEQ ID NO: 9584 - DNA, 201 bp, Bos taurus
ctaaggagtggtgggcaactgaggccctctgtacagcaacccacgaggaagtgaaacctgtcaacaccaaccacaggggtgagcttggaagtggatctgttggccctagttgagccttgagatgacagcagaccaggctgacacctccactctaacttcaagaatgaccttgagccagaagcacccagctaagctgctccc

SEQ ID NO: 9585 - DNA, 201 bp, Bos taurus
ggcccggagatcatctccaggatgctgcgaggggcactgatcctatctcagctccatcaccaagaccagtggacaggcttgggcacatagtctgatcctggcttgtcactcactctggccagagtatcaaaagtgagcacagcccggattcttccccaggacctacagacagcagagggtgtcagctgattcattccagtg

SEQ ID NO: 9586 - DNA, 201 bp, Bos taurus
tttgtcctctgtcctctgtccctcccccagcttgacatggggaggaccgagggagctaactcaggacggctgatcagggaacttcagaaagaacagagatagtggtttccctggcctggctgtagtggcgggtttaagaaaataaacaaccaaccaaccagtgacacaataacctgcggtctatttctacttcaagggtgc

SEQ ID NO: 9587 - DNA, 201 bp, Bos taurus
ccactggtccatgaaatcttcttgtgctcaaatgacattgtctacctttgtggtttttgccagaatcattcattgactctgagctctcactgaaatcagcggagatggaaaccagaagagggggtgtcctatccaactgctcagaggagaagttttggaagtttaagaatcaccatctacaactgccctaccttcattcta

SEQ ID NO: 9588 - DNA, 201 bp, Bos taurus
ggccaccagatttgaaataaatgacccaggctaacatcctgggctgtactttatctgccttatgactacacgagacacagatccccatctgtatacagtgactctggaaggcctggaggagatctagaaccagggcaataaatactggaggctttgggggcaaggtggggagaagtggaggagcaagaaagagcaggaact

SEQ ID NO: 9589 - DNA, 201 bp, Bos taurus
aaattataaaagaaaactattattaacatccccagagacataaaagaacacatcataaaactatagacaaaatgttagtggaaaatgaacattccccaaacaagaaaaagcccttggaaattaaaaatatggtagtgtgtactaaaattcaatagaagggtcagaagatgaagctgaggaaatctcttcaaaagcagagcc

SEQ ID NO: 9590 - DNA, 201 bp, Bos taurus
aaagggccaaggctgagagctggaggccgggctggggctccagccaacagaaggaagtctgatttacttctggacggttattaaggagtatttaatatctataaggaggccctctggtcaccatcagtgttccatgcatgccacaggcacatctgaagacaaaaaaactggcacaaatgatcccacaggtgtgcacctgtg

SEQ ID NO: 9591 - DNA, 201 bp, Bos taurus
aagacacctccctgtcgcctaggtaagcagaaagaaaaaaatgtaaagtgaacacctttgcccctgagaccccacaacacctggccttggtgatgatgctaatactgaggacaatggtgggggtaggggagcaaagagaagaggagggaaagaggaggagaacaccaatggccttcactcactcgcggcttagtattcgcc

SEQ ID NO: 9592 - DNA, 201 bp, Bos taurus
gtgacaacctctggtggcctgaatccaaagaagagaaacacagaggaagtggcaggtataacaggcacacattaggggaaggagatgggctccctgagatgtacagagaaagggggccatccccatggcggtggctttggttcccagaagcggagtgagtgtgtggggcttttgaactggatgaaaagcatctctggatta

SEQ ID NO: 9593 - DNA, 201 bp, Bos taurus
ccaactcagccctgaggaccctggaaagtgagagagggccccttgggggtagccctgcccctccactgcccagaccagagcaggctgttccaatgggccacgctaggagtagagcccaagaggcaataagaatacctcctgctccaaaacacacaggttcagttcagtcgctcagttgtgaccgactctttgcgaccccat

SEQ ID NO: 9594 - DNA, 201 bp, Bos taurus
gagagaagagcctaatgctgatcaattttgtgtcatctactgcataaacagcttcatccaacaacttcacggcaccttttggaggcatgaagtattggccccttttcagaaatgaagagaatgagctccagagagatttgaagtagtgtcagaaatggcaccactaatatgcggtggcatcagaactgaaggccaggatat

SEQ ID NO: 9595 - DNA, 201 bp, Bos taurus
ggactaagaaaaagtccaagaagctcaagtactgcgaccaaggggcagctcagaataaaagggatcttcaggttcaacaggggccaacccctggaggctgcatcatggatttatttgtcctttaacaccagagcaaagtcatataacaattgtgctatttcacttagaagtggaaattgatgttcagagaggccaggagac

SEQ ID NO: 9596 - DNA, 201 bp, Bos taurus
aagtcatgagggaaaagataaaagatttaggggaaagatccaggaatcctaacatgcaaagacacaggttccagatggagacaaaataggagtagaaaaagaggcaaatatcaaactcagaccagaagaagatttccctgaactgaggaaagatctagatagcctgtgcactccctggaaacaaaagtgcttctggctaag

SEQ ID NO: 9597 - DNA, 201 bp, Bos taurus
ttactgctatggcaggaaatattccattcctcgggtcttataaggcagatattattggaatggggtgggggtaggggagatttttgcacactagacacattcagtcatatctggagatattcttcatcgtcataactgagtttgctactggcatctagtgggtagatgctgctaaatattctacaatgcacaggatacaca

SEQ ID NO: 9598 - DNA, 201 bp, Bos taurus
agactcattgaagataagccacgaacaagccataggcggtcttattctggaagcagatctaggtaatgtattgaagggtattgggggagacagtatttgctacaaacaaaagaaaattcaagcagcagtatttcaattactgctgaattgaaattaggtcaatttttagtttcttttgttattggcattgttgggttcttt

SEQ ID NO: 9599 - DNA, 201 bp, Bos taurus
gagcaaggggcctcaccttgggcccccagcagcacagagagtcaggatcctctggggctgctaagaaaaattacattgtcagagcccaggaggcaccaacgccaggcagggccacctcctccctcctctccagagccccatgcccttggcaacacgtctcctttggtttccaaggtcttcggcttcgttcagaccctgaca

SEQ ID NO: 9600 - DNA, 201 bp, Bos taurus
attctgatttgatttacatcttaagagtgtccgctaagagacaagtgtcgaacgtgatgagagagaggcccaaattcccccaacttcccagagccaagagtaagagcgctaatcatcagaaatggaaatagtattgtcaaagtacacaacttgctatgagttgtgaaacacccaaaggttctatctgttctaagactgcaa

SEQ ID NO: 9601 - DNA, 201 bp, Bos taurus
ttctctctggtaaccactgctttgtacctatatgctcatatctacagttttagaaggaactttttggatcatatccaagttcactttccagcagagacacaggggccttgtagaccaaggggcagaggagcagtgactacctgcctgcctgctaacctggagcttctcccatcacactcctgactcaagaagtttccttgg

SEQ ID NO: 9602 - DNA, 201 bp, Bos taurus
agtaccggtggctgagggtcttgaatccagacctcgtcaaagggccatggaccaaagaggaggaccagaaggtaacacctgggcctgggcctgccacaccgtggcattcacgcaccccggggaaggggtcaggggacatcccactggtgggtgctagggtgggaaacggggtggagagggtcccgctggcctcacggcgtc

SEQ ID NO: 9603 - DNA, 201 bp, Bos taurus
aggtgacagcaaagcatgggcctcctgcccgagatcctgggcccaaagggtcaagccgagatggtcactcccccaccccacaaaactccttgcttgggaaccccggacctccggcccctctgccttagcacgtgagagtcctcttctccacccctttcacctgcctctgtatttgacatgttcttacttgctgtgccctgc

SEQ ID NO: 9604 - DNA, 201 bp, Bos taurus
ccagccatcgtgtgcctccaactctgaaagtctggggtccaggtcacagctttcctacccactggctgtaagcctgtggcttcacctcaagggcctgcggtggggatagaagcagacctagctcagaggttaacgccagttaccagccctatgagctcaggctgaccacctgacctctccccgatatcacccacatcttgg

SEQ ID NO: 9605 - DNA, 201 bp, Bos taurus
ttaatagtaaagaaatagtaacccaaagggtatatatggccatggttcggcttgggaaggtacatcagtgaacgacatttgggaaactccggctcaccccccagggtcacacctctgggcctttgctcatgctggtcccgctgcctgctcttccatgcagacctcactaggctcccgtggccttagtccgggctgaagtca

SEQ ID NO: 9606 - DNA, 201 bp, Bos taurus
tacaacaaaaataaataaaaacttattttaaagttccagtaaccatgctatcatgatatcggcacaaagatagacacctagatcaataaaaatgatattcctttggggagcgaatatagaaagaaatatgaaagttaagtttcttcaaggaacacatgtcacagacccaggtcatgtgacagcagatattactcagggctc

SEQ ID NO: 9607 - DNA, 201 bp, Bos taurus
tgagtgtccttaataactatagattcatctctttaaaaacaacatttttcaagcctgagccaagatgaagctgggccatcttgtcaaaaccagaaagtaaggaagccataacctaccaaggactgctaaggtcatttcagaaggacacagaagccaattagaaaagctcccacaggccaaagatgggacaacttgagccta

SEQ ID NO: 9608 - DNA, 201 bp, Bos taurus
aatgaatgagaaagtggatgaatgaataaataaataaataaatggatacctggatgggtagataggtagatgctttgatgaaccaatgtgatggtctagtgcatggacagatggatggatgggcatgatatggagagacagatgaatgaatgggacaaatgaatacataacagggaatatgggcagatgggcaggtggatg

SEQ ID NO: 9609 - DNA, 201 bp, Bos taurus
ccacttggcgccctggtgggtgcgggctggcagccgtgggaggggtgtcacaggcggggtgggacccaggcaggggagcgctgctgggagctggccccccatccagggtggtgggtctaagaagaggagttttcttaccttgggacctctgttacatcccactaactctgggttccctttacactatctgtgtttttattt

SEQ ID NO: 9610 - DNA, 201 bp, Bos taurus
cttagcctgttgaggacagcagtctttcatcggacctttacagatcctaacctacaggccctcaatttatgttcatggaatgaatgaacgaatttgtcattttctgttattacataaccatctttcagaacatttcctttgaattcattgttagtggatagtcttctagttaagtcagattccacaggaaagcataaaaaa

SEQ ID NO: 9611 - DNA, 201 bp, Bos taurus
taaaggaaggaaagggttttcatgagtgctcctcatgcagcctcagggtgcccttcacagatagattgaacttgggccatgggtggccttgaatgtcaaggcgaggaatcaggcaatgggcagtcatgggaggttttagagcagagggcagccttgagggtaactgtcaattaggcaagagttaactgtcaggtatgaaga

SEQ ID NO: 9612 - DNA, 201 bp, Bos taurus
tcacgctttttttttgttttggccgtgccattggcctgtaggaatcttagttccccgaccagcgatccaacccgcgcccctggcagtggaggcgcggagttttaaccgctgggccgccagagaagaccctcacacttttcttaaattatctttttgtttgtttttcatacaaccctctatcctaggatatccgctctattt

SEQ ID NO: 9613 - DNA, 201 bp, Bos taurus
acctcccttcccttgtttattcccttccagagactagtaagtgtgtgaattccactggctacggagacggagcagatggatgtcaggctgagcttgtcacaaaatctcaggccctggtcacagggactagttaagggaatggcctgtgtttataggctagattatattaagaaaagatgagccagggattttagtggaaga

SEQ ID NO: 9614 - DNA, 201 bp, Bos taurus
ggaggacaccaggaggctgcgggggccctccagcccctggagccggcctcaccctccggctgggctgtgctgaacagatgaggtcggggtcagctccttcaccatgctttcagccttacgcgggccacccctggcttccagagctattagtgatgtcctgggaaagacaatttgcattgcctttcagagtctcaggagaag

SEQ ID NO: 9615 - DNA, 201 bp, Bos taurus
tggctgtggtggctggtcacagaggttgaaggtggcctctgggaccccttccctggccctaagggatcctgagcaaaaggtcatctcagccaagcacccctgcctagatttcacatcatctggctcctgtgtttggtggaagagggataagtggagctcagagtcctaaggggccccaagcggaaatgtactgaacctgag

SEQ ID NO: 9616 - DNA, 201 bp, Bos taurus
ttagttctcaagctgtgcaggcaacagatgccagtgggctctactggtctgtctagtacaccagccaccggccccacgtggccgctgagcacttgaaatgcggattagtataattgaggaatgaactttaacttcctgtcattttaattgatttcagagtggccggcacttgccatgttagatagcacagctctccgatct

SEQ ID NO: 9617 - DNA, 201 bp, Bos taurus
cgggggccagaatggcaccgggggtgggggtggtgggaagctccaggtccccttgagtcttatgggagggacaattaaagcaggttaacttcccctggaaggtgagtcttaacactctcttcagtgactccccagatcagggtagcttcctcctggcattcccagagggcagttagcacttagcccagggaccacagagcc

SEQ ID NO: 9618 - DNA, 201 bp, Bos taurus
tctggtggcccagttttcatgatgtgaagatggaagaggttgagcatatcctggaacagctgccctggaaacaccttttcccttccctgccctcctcctcccttccgggggcctggctgacttcgtgatccagattccccctcctcggctccccagtcccagccccaaggcctggacaggtagggacaagtggtgcaggcg

SEQ ID NO: 9619 - DNA, 201 bp, Bos taurus
ttgttcctgtctttcagtttctctaaagaggccttcagggaccagggagctttctaattaatgaccacacttccatgagcaaggagagggggagctggagcgagaactggcccattacgaggcttgtggatctgggggacctgtaattaggaccatagtgaggaagaccaggagaggaggacattgagagagaaagataga

SEQ ID NO: 9620 - DNA, 201 bp, Bos taurus
gatcctgggcctggttcctggtttcacctaccagctgcccaggaagataagaagggctgtggagaagcagagccagatcatctttgtggcattgcaggagaaattctgaggaaagatgggggccgactgagctttttgcacccccatctgagggctcaaaagggccaaaaaagaggagagtaatggaagggaggagctggg

SEQ ID NO: 9621 - DNA, 201 bp, Bos taurus
agctccatccaccctggtcctggctgctgttccaacacacaccaggcacgttacttctgcagcctctgctcaaagcctccttatcacagaaggtttccctaaccctggagagaaaaaggacagcaaactttttccacgtacctctctaccttcaggaaacttataatctaccacaggatttctcccctctgctattgtttg

SEQ ID NO: 9622 - DNA, 201 bp, Bos taurus
agtgttcccatctgaaaaatgggagcatgtgagtaggctcagattatgatgacagggcttctagggggtggcctttcaccaagctggtccatggaggacacgctcaatccacagatactgctgccacttctcttgggaaacagcgaggaaaaaaatcacttttttggaaaggtgtgtggccttctgagcgccaccactttc

SEQ ID NO: 9623 - DNA, 201 bp, Bos taurus
gaggggtaggatcaggccacgaggaggggagtgggcaaagggaggagctgggtcagtcctgtttattgtgtgatctccctacctaaccacgtctcctgctgctctctgaaggggccaaatgtcaaaaaacagcagttctcagaccttccaatgcctgtggggtctcatgtaaacatagatagtgacctgacaggtgaaatt

SEQ ID NO: 9624 - DNA, 201 bp, Bos taurus
tacagcttctctccctgaggcagagaaattaaatataacacctgacttttccaggcagagacaaaataccttcaggccccacgaactgtcaagggtgtgggcacaaagtgtctttggtccaggactgacctgtcagagcacaaaggtagacaacatccctggagtcgctgggatgaagcagggccaggtagacagagctca

SEQ ID NO: 9625 - DNA, 201 bp, Bos taurus
ctcacaggacgttcatgcaaatgttcccgcagaaggttgaacagcatatggtattttgtggacagtgctggaagtatgaacagtggttcccacaagtaaattccgtgggccgcttcgtacaggctttagctttgagatctaaaaagagcaggagcagaagcagggtcaatggaaccaggtttctcagagaactcctctcga

SEQ ID NO: 9626 - DNA, 201 bp, Bos taurus
tatcaaacggcaagtttcaacatcaaccaacatatcttaaataaaatagtaggtaaaatggaaaagagaccatgtttgtgctatgtgtatgctcaatcatgtccaactctttgcaacctcgtggactaaaactcgccaggctcctctggccatgggattttccaggcaacagtactggagtgggttgccgtttcctcctcc

SEQ ID NO: 9627 - DNA, 201 bp, Bos taurus
cattgccatggtgaccgggctgcagcctgttaattaagcccccggttaccacggagatgatggtggttgacgtgtctgcagcgggccctatgtgtgtgtgtgggggtgtgtgctctgccccagactcatcaattcatggcaagagcttgggttccagaggaggggccctcccagtgggggagagaagggtgaagaacggag

SEQ ID NO: 9628 - DNA, 201 bp, Bos taurus
ggagggcagtcatggggctgcttggcttcgacagaggcctgtaccaccctggacccgcaggccatggtcattggtggccttttcaatctgagcctctatctcatcatttggaaaaggacttcaaaatcagaagaggtgatgggctttggatataggaagagccaggtgccagcgtctgctttgtcacccacttgttgcctg

SEQ ID NO: 9629 - DNA, 201 bp, Bos taurus
gtctgggagttgaggctgatgcttgtggccagttgattttgactctgggtcaaaggatcacaattttggttggaaaatgagacaaagttgagggtggcattaggggcccaatttgaggatgttcattaggtcttagaagcatctctgacaggatactatcagtataagacagagactcacattttataacaaagttctaac

SEQ ID NO: 9630 - DNA, 201 bp, Bos taurus
tccgccctgggaaccaatgtcggtccccagtggcacccactggcctctggaatctcaaacctagcttctggcaggctcaaactagagccaccttgaacaaaaacaacaacgaaacaggctggagggcccctgagctatccttaagctacagcatgcagtttggcttcagactccacagaaacaccaagatatcccaggagt

SEQ ID NO: 9631 - DNA, 201 bp, Bos taurus
tcctttgatgctgcgcaaggtttgatttcacacaggaggttttctcaccttcattacatatacggggtttctctcctgcatgaattctctgatggatgataagggctgacttcaggcaggattttccacattcatgacacacatagagtttccttcgttctctgatgctcagtaagattgaacttcacaaagaaggacttt

SEQ ID NO: 9632 - DNA, 201 bp, Bos taurus
aacgatacaaatgtgatgcatgttacaaggcctttaatttttattcactccttattcagcatcagagttcacactggagagaaaccctttcagtgtgataggtgtggaaaggcctttagccaaaagtcaaccatgcaacgacataaagaaactcatactctagggcaaagctttgaatgtagcagatgtgaagacatcttt

SEQ ID NO: 9633 - DNA, 201 bp, Bos taurus
ggggccgcttctccagtgggtggtggggatgtgatctggggtctaaaaagaagacaagggctggaagcagctggagacagatgccatgcttgattatccagggtgagaggcccagtcagagacctgtgggctccctcggacctggggctccaaccagactgagcctcacaggagaataagagcagaaagtgttcttcttgt

SEQ ID NO: 9634 - DNA, 201 bp, Bos taurus
gtttcaagcagtgtgggcatgtcggccgtcctgctcaagctcgggtttaaagagtcactggtccagtcaaaaatggcagctggcaccagccccttcgtggtagcgtaggccacccactcacacacacccatgaggatcagtgttaccttagtttcctggcccttgactgtcagatatttttggaaagtgagaatttttaaa

SEQ ID NO: 9635 - DNA, 201 bp, Bos taurus
aggggatgcgcccacccagaatccacacaccatctcccagaccacccactctggaccctagaattttcttccagggctgttcgagcttcctccccagggcaatcctcccacgagcagatggcatcagcaaggtccacatgttgcagccccagagaaagccaagcacaggggtcaggtcagagctggcacataggcactggc

SEQ ID NO: 9636 - DNA, 201 bp, Bos taurus
gtaaggtagtcctcagcagggccaggttttgttcagcggagtttgcgacgccagagatgccggctggcagcttcaagagtggaaagccgactctttctcccgttagctgcccaaagggcggggccagcaccaggggcccaggccccttccgtctcgttgctctgccagtcctagtactgctcttaccacacagaccgcttc

SEQ ID NO: 9637 - DNA, 201 bp, Bos taurus
acttctacttctaaacacagaaatctaatattggccataaataagtgctaactgtaaaatattactaataaatattattaataagttctaactagacggtgtttcctgctagagtctcctggcctgggatctgcttgctctgcattagaaagagatttcaaagacagattagttccaaaccaacactttgccattcacata

SEQ ID NO: 9638 - DNA, 201 bp, Bos taurus
atgcgggtcatccatcaaaggcgccaacctctcaaaatgggaggagtgtcgcaacctcggctcgtaagccacacttgactgcactacaacaacaagaaaaaggaattccaatttcctcctctgctctggaatagataacacaaggtttttacttacctttggagcgggtggaaatatccatgccctctaccacctcctgtt

SEQ ID NO: 9639 - DNA, 201 bp, Bos taurus
aaagatggtcacttcaagccgtgggaaagcagcttagaaagacgtgtgcgttcaagcctggcttgggcattttctagttatgtcactttggacatgttctggcctgccccgatgccccagttacctccaacactgtcgagtagatgagatcatgataagtaaagaggctcttagcctcataaacccagaaacgccttgtag

SEQ ID NO: 9640 - DNA, 201 bp, Bos taurus
gcgggttcttatccatggtgccaccagggaagtcccaggatagctttttctaattggataattgggaatggtttcaccaaaggtgacagtcatttgatcccgaaggatgactaaaagtgtttcagtattgtaggtaagagagggatagaggggacatctaaaaagaaatacgtgacttaagggttaaatacaaatagtagc

SEQ ID NO: 9641 - DNA, 201 bp, Bos taurus
tctcgggtggttttcctgaacgattgcacagctgcttttctacagcagcatgtgatggctacagtctgtacccctcaccagcactgctggcccggcccccaaagaggagagaacccacggtgtgaatgagcaagtgactggacaagtactgaacatgattgttcttgccagtctaatggccgacacagattcgtgttttaa

SEQ ID NO: 9642 - DNA, 201 bp, Bos taurus
tctgcggccccaggtcaagctgtcttgtgcaaagcggcctcctgggtcctcgtgcccccaggcagtcctcttgtctctctccaggttctgggccaggaacgggggaagcacgtgaggtgttgtcgtccacagaccccagcacacgtattttaaagttaaacgagattcctagctccttcttccaagtgttgcttgcgtgat

SEQ ID NO: 9643 - DNA, 201 bp, Bos taurus
taacctctgtagccatcagatcgtctcagcccacagatattctagaggccaccatgttttcactatcatagacaaagctgcagtgaacattacgaggtgtgggtcactgggcatttgtctaagactctctcaggtctctagattacagctggaaattgtaaaggtggggacttggggacagggaggcaattgtttccctcc

SEQ ID NO: 9644 - DNA, 201 bp, Bos taurus
gtactgttggctttcacatccatcctcctcataaatatttgtgttgtctctcccagcctcaccatgtcttctggggtcataggagagtctcacgaaacgtgtcagaaaaaaaaaaagaactttatagtgaaatggtagcttccttcacagaggctccacgtaggctgggaacaactgctccatggccgggttaatgagtaa

SEQ ID NO: 9645 - DNA, 201 bp, Bos taurus
agccacccaatgacttctgtgcagagaaaggtgaccaagccatcctggtttgcctgggactttctggctttagaaccaaaagtcttaaaacctgagaacctgctcaatccaaggcacaccaggactggtggtcttcagactagctgatgaactgattagagaaagcaaggaatcagggcattgaccagactgtcactcgtg

SEQ ID NO: 9646 - DNA, 201 bp, Bos taurus
catatggccacaggcacctaagcccacgtgccacaactactgatcccgctctgcaactactgaacctgcacgcctggagtctacactctacgacaagagacgccacagcaaaaagaaggccacgcaccgcaacagagtagcccccgcgtgctgcaactagagagccccacgcaaagcagcaaggaccaagcgcagccaaaa

SEQ ID NO: 9647 - DNA, 201 bp, Bos taurus
aattggaaccaaggtcagggttcacattggacttactgaataaggcatttaacgtgcttgctatttttggcccagttgggcccaaacagctgaatgccaacaatgcagtggaacacggtgatatttggtacaatgaaaaaaaaaatctctgacgacgacattgtggcaaaaagcagaagagctggcctagattagaggcaa

SEQ ID NO: 9648 - DNA, 201 bp, Bos taurus
gtgttggcaaggagactgggattaaacacggcaaacctccgttggatctcagttccaccagctgagtggcgtagggcaagacatgccgcctcaatgagccccatttcatggggacaatcaaaataacactggctgccctgcagacctgggatggggcggaaatgcttctaaagctgtcaagtgtccacatgaaaagactta

SEQ ID NO: 9649 - DNA, 201 bp, Bos taurus
agcctgacggtgagagccacggccactcaggagcggcgctcccgaagccccctggatttgtccccccgcccccgaaggacaggcaagccacactctagaaacaagcagtcagtctatgtgggccacagcaaggacaaatggacgtctctccacctgggtatgtgggtttctgatttggacgaaaagtcgctggaaaccact

SEQ ID NO: 9650 - DNA, 201 bp, Bos taurus
ctgttacctcttgtggcctcatctccttcctcctcctgtctgtgttttaaaaggatgattctgacccctgtgggggacagcagatggaaatgggtcagagggcagcggggaggccccctgcagtgatgtgggcaggaaaggatactgtctggaccagggtggtggcgacagggagaggaacgagggatcatcatttcctct

SEQ ID NO: 9651 - DNA, 201 bp, Bos taurus
gggcctggggtccagaggagtgaggaaaatttcacttttcactgtacctttcggactttgaacttggtacctcctccaggggtgctcaattgaagggcttctgtccctcaggagacatctggccatgtctagagacattttttggctgtcacagctgaggagagggtgtccttggaatccagtgggtggaggccagggatg

SEQ ID NO: 9652 - DNA, 201 bp, Bos taurus
ggcctgactcaaactggctaatcaagtttcgttctgggattgcttctgaaattattgggaaataatttcatcagagactgctgagttgacaggatatccacgtataggggccagagagtaatttttggccctctggaaagaatttgcccaagaatacagccagtgtagagggactccatgctaagagacaaaggcaggttt

SEQ ID NO: 9653 - DNA, 201 bp, Bos taurus
cgggctgtcggtctcttgccactattgcctgaaagagcgcttgatttgtctacgcagagcagggcctggcaggccgtcagcatctgactgtggcccagtgccgctcctgcatagagcacacaggtgctggtagatgtcgtttcctgtgggtgtctctgtgggcacgtgtgcaccctcgtgcctgccctgctgaggccctca

SEQ ID NO: 9654 - DNA, 201 bp, Bos taurus
ggatggggcccagagctggagctcctgagctagaatggaggaaaccaaggtctcctcttgtttggctccaccagccccaggagtcctggctgcttgcttttacaggggccactcagtctgggctgtgtcctgctaattccctgcctgagtcccagcgctgggaaaacccatcccacgtgtgctgagaagcctgctcctcag

SEQ ID NO: 9655 - DNA, 201 bp, Bos taurus
acccgctgacagggagccacgtgccagcttggggagcagcaggtcaagctggcggaaggtgtggaagacgtcggctgagtggacacggtcctgggcctggctctcctgggtgtgtggcggtgcctcaacgccgtactgggtcaggtagccggctctgggggcggcaagcagagggtcagcaggccgtctctgaatggtccc

SEQ ID NO: 9656 - DNA, 201 bp, Bos taurus
tccagggtggtagggaaacaagagggccttgtgaccctggcagggatgaatggctggctcctggggacacaccctgacccagatgaggcctccgcagctcaggaaaccacctcacactgagctgcattcaggagctgagatctcctctttcggctcctcttaccgtggatagaccagaccccccttcacatgtggccctga

SEQ ID NO: 9657 - DNA, 201 bp, Bos taurus
tgtggttgtgcagtaccccagtacttgtgccttgtggacccgcacaagtttggtcttcaatgtcatcttaaagtgggttgttcctgggcccgtctggcctcgtaactcggtagatgtggcatcccagcttgtgaaggacagttctggctgcgtgggcacttgatgccccatactcaggggctctgtctctgccacggccca

SEQ ID NO: 9658 - DNA, 201 bp, Bos taurus
gcctgacatcggaacaagaaaaagaaatggtgaaatggaagcattggctctcttgggctgctgcctacacaccaagttactggttagtgaaaagatggcccacatggctagttaaaaataatcctcttgctgccagcaggtcaagcagaatcaatccagaggactggggatgggccagacgaggcgcaaatttgcattcag

SEQ ID NO: 9659 - DNA, 201 bp, Bos taurus
gcgtggggggcgtggggccggcatgtgaaaagcaggtgatgagggcgtggtttggggggtgacctggtggggcacggggtcacctacttcctgaggcggcggggccatgggggacaggagaggaaaatgaggatctgtctgggaaacacggccgcagctgtgtcccatatgggaccccttccaccccatggccagctgcgg

SEQ ID NO: 9660 - DNA, 201 bp, Bos taurus
ccagccttctcctctgccttccaggtggcagggtggagaaggaaagacagtgagtagagggcaaacaatagctgaatctctaggaaggtttccagaaactgctacacatactcccaatcacagcctgggagtcggagcttggttgtatggctgcacccagctacaggggaagcgggagaaaactgtctttattctgcacgg

SEQ ID NO: 9661 - DNA, 201 bp, Bos taurus
cggagtgcggcctctagggagctggacatcatggcatgctctgctaggcagggagctgggaagacagcacttgcccttcctgcctgaatattgtttgctgcagagggccccgggggtgggggggtgtgctttctaccaggctgagttctcagcccggctccgggctccagaaaagccttcttgatactccaactgctgacc

SEQ ID NO: 9662 - DNA, 201 bp, Bos taurus
gtggccctggcttgggacctccttctttcttctgatccaagcttcggacgagtggggacctgtgggaggcaggcgatgtcccagcgtggagtgctgtcccctgcttgggcctttgtgaacaccgatcaggttagaggtcccagagaggctggtctccctggtggctgtccagagagaaacacttcgtttctgatgaaatca

SEQ ID NO: 9663 - DNA, 201 bp, Bos taurus
ggtttgggttcatggacgtggacgtggagaaccccagtgggacagggaggccactggccgtgggcagctggtttggtgccctggcctggaaaagcatcttgttttacctgatctgttctgggatagccccagctgcagccaaatccatccactgaggtcctccccaaactctaccgttgctgccacaagccgcccttggcc

SEQ ID NO: 9664 - DNA, 201 bp, Bos taurus
cccaccctcaacccctatactgcacaagtctcactagtacttcatgtaggactcacaagaccaggctaaattcttcctattaggcagagtaatttcaaagtaaatgtgagatggcttaaatgcaggtaagacatgttctcaacgccaccttttctgattaggtaatctgcagcatattggatgtccacagaatttataatc

SEQ ID NO: 9665 - DNA, 201 bp, Bos taurus
tggggtgagccgtgcagcgggcacaagtcatggcaggtccctgcagctcagaggaaggttgttaactttattctgagcaaagtggagccacaggagggcctgagccgggaggagcaggacccgtctggctgctgtgtggtcaagggggaggtggtaagaggtgctggtgtcggggttccgggggccgccgtgcaggtgggc

SEQ ID NO: 9666 - DNA, 201 bp, Bos taurus
cacttgctctgcagcaagcttgacttgcagcagcagctccacagagcccagcacggtgaccagctccctggagaaagcccgacaggcctcacattaaacagatccccttctaagccagcgcgcacggggcgtggcttaaagaccacactcagcactgagatcacgcccaccggcctcagttccaggaggccgactgtcaac

SEQ ID NO: 9667 - DNA, 201 bp, Bos taurus
gaaacaacacatctttctaagctgctgagtttgggggtgacctgttacacggccacagaaaatgcacgcaggcacccaccccccattccacacaagggacgggctccagaacgtgcttccagggcccgtttccacgtcccacgcggcacatacctcttcctccagccagtcattgtactgcacgatgcctgccatgaccac

SEQ ID NO: 9668 - DNA, 201 bp, Bos taurus
cgactctgatttaacttgcaaataaaaggctcctccacgcaccaaatggtgatccgcacacaccaggaaggcactggccactacgaggggctcggccagcgtttgcactgggtccggctgttaagcatccccacgttgcccatatggaaaagcttcccattgtacagtgtttatctccagcctcctccccataggcccttt

SEQ ID NO: 9669 - DNA, 201 bp, Bos taurus
caggcaacaagcagaaatgcccagtgtgttcaggacaccgtccggcccctcgctcctgccctgccatggagacatggatgctccacataccccaggcggtgtagctgtgagatgcgggacagtggcctggcgtgcctcagagtttccatgagtgaggaattaacttgcacttgactttagatactgagatttcaggggcca

SEQ ID NO: 9670 - DNA, 201 bp, Bos taurus
tacagacaggcggcagacacacaggtaaatacatgccgtgcagggaacagatgattacagagtgaccggaggcagaggccacctgagttcatgggttcatgagtccagagctgctgatgcgcggaggaagaatgcttcacaaacagccagggccctgaggctggaatgagcttggacaagttgaagatcagaaatgaggcc

SEQ ID NO: 9671 - DNA, 201 bp, Bos taurus
ggccatatctggggacgtttcgggtggtcacgactggggagatgcgaccagcatttagtgggcgtagaagccaggaacattgccagcagcctacggtgccggaagtggcccctcagcaagggccagctggcccaaacgccgagagtgctgaggttgaggcacacggcttacgggaaggcacgtaggtgacagttttctgtt

SEQ ID NO: 9672 - DNA, 201 bp, Bos taurus
gcctccgactcactggctggccccacaggtggacgttcctgaaggtaaaggaacgttttcccagaacaagcgttctgaacgtctagctgtgcggctgggtgtggcaggcctggactcctcagttatcctacctgctcgtgagaaaaacgcgtttcctgttcctttccggtgacactgaaatcacccagcccactgtcatcc

SEQ ID NO: 9673 - DNA, 201 bp, Bos taurus
ggccttttgttacacagcgtcactgtgacattagatagctgatacatgtatcagcgtccagaagcacagcgctgccttaacaggaaactgaaatacgtagcgctgactgtgggcctgggcggcaggcagaagcagggaacagtggcaatggccagcaccgaacggcgaacgtttggtaaaactgccgcctgttgtgactca

SEQ ID NO: 9674 - DNA, 201 bp, Bos taurus
aattacacggaaaaaggcaagtcagcctgacaagtactgaggctcaactaatgttagctctcatgatttactacttctatatgcacaggccctgaattcatattctctaactttgatttcttacaaccatcatgtactctgaggcaaaaaatcttcaaagtgaaatcactccttatgaatggaatcaagtaaggccaaagt

SEQ ID NO: 9675 - DNA, 201 bp, Bos taurus
tcccagaaggcacctctgtgtgtctcattggtcaggattggccacatgaccagcacttgccacaaaggaggctgggaaggtgattccttggtcttttcagtctctgggtgggaggtgggtcaggccattgggaacaggcacacagagccacagtgttcctgtatctggtgcatctcacccttttaaaatattttgtagcag

SEQ ID NO: 9676 - DNA, 201 bp, Bos taurus
gtctttctatatttccctgccagattttcagtggaggaggagagagtgttttataattattagtattattttatcgtcacatatatatctcagttaatgccgacatgattgttcttgctgttgtaatctgaattaggaattttcacggctgggtgttgatcattcatgtaattgtacgacgcagggaaaacaattccctct

SEQ ID NO: 9677 - DNA, 201 bp, Bos taurus
acgctggccgttcacactttttctcaaaaatgctaccgcgtagcgtcttatcttcctgatacgctcatgaaacagaccctggatgacaacagatgctgggtgttggtggcctgccagccactgcgggcctagggatctgtgatgtcgggggtcttgggaccgtatttcgtatggagcagttattggagccttactgagacc

SEQ ID NO: 9678 - DNA, 201 bp, Bos taurus
aaggaagctagcccacatgaaagaaatgttgaaatggcatgggttcttggacgatgttgttgaggaaattaataaatccagacgtgaccatgcctctagatttcgagttatagaaaaacatcatttcccttatttcaagtcacagggggttaatgttgtgcttgcagtgaatgcagctcctgtaagcggtgtgtcctggcc

SEQ ID NO: 9679 - DNA, 201 bp, Bos taurus
tcctgctaagtgcagattccctagacttgtgacggggaatagaaagaagcagcaaaaaattatagtacagccaggaagaaatttgagttccagtttggctacctagagtctgagtgtctgtaggcaggttaagcaggccctctgagtgttcccttggcagaaagacagacaataaggacgtctcagaaaattctcgatgct

SEQ ID NO: 9680 - DNA, 201 bp, Bos taurus
agaggagcctggtgggccattgttacaaaaaaacaaccataccaatatatatatttttttaaacaaatggatgtgtctgtcttccaatagaatgttatttataaaaccagctggtgggccagcatgctgtagttttccaaccccttatcgacatcatgaaaatcagaaaacactaaaaatcagaacttcttttcaggttgt

SEQ ID NO: 9681 - DNA, 201 bp, Bos taurus
cagggtgttccccctaggcagcaaccaggttacccagcctgggtagaccatgcaaggggtttggaccgtcctttttgtgcagtgagagagcatagatgcgcttcaggcaggcaaagcctcaaggccgttctgcatggagactgaaacaccccctctgtgttttcggcaagtcacccaaacccctcctggccttagttccct

SEQ ID NO: 9682 - DNA, 201 bp, Bos taurus
gtcacaaaccccattctcactgaagcccccctgccccagagtggaggcagtcaaagagatatgtaattattctggccttctgcttaaattattttatgcctcgggtatgtatttatttgcctgcagcgatttcagaagcatggacaatgcacagatttcactaagagtcactggtgttttcaaatcatggccagcaacttc

SEQ ID NO: 9683 - DNA, 201 bp, Bos taurus
ctgttgtaacaattatttactctgaacttcagagatcttgaagaagtgggaagtaaccttaagcaggtaattgacagatttgacagacacttaaaaaactatttggaaaacattattttgcactttgaaggatcctaaatctgctctatgacatcgtattccatttttctctttcagacctctctttcctaaactgcatct

SEQ ID NO: 9684 - DNA, 201 bp, Bos taurus
gggtttcaccaggtgcttttattaagggccctgtgttttttataaagagaaatgataggattcggacaggaagggaaaacgggacacagaagctgatgtttatcgaggccacttctttctagactccaggggtgggtgcttaacttcagttgtcctccatttcatgatttatttgggaaattcctgaagtgagagcgaagg

SEQ ID NO: 9685 - DNA, 201 bp, Bos taurus
ggataaaatgtgatttcatcagatcggccagaacatgagtaactaccagagtcattcattaccaaggaaggttgatactgacctccacatatgaactgtcctttccttaaatgaagttgtcttctgatttttttttttctggttctaacaaggaacatgttgcccaaacttctcctaagtacattccaggctagttgatga

SEQ ID NO: 9686 - DNA, 201 bp, Bos taurus
aagatcaattactgctcaacaacagtgatatcatttattggctgtcggctgttgctttaatacaaatacacaaaataacatatatgtaaaatatatttgcattctgaagcatgataatgaaatagacaaccggaccttagcacccaccttaagaagtcaagtatcacctttatcatcagagttcttgtatgtctctctttg

SEQ ID NO: 9687 - DNA, 201 bp, Bos taurus
agatgctatgtgtctaacacactacttcatacgctgtaaatattttaaaacatacacagaccagctaggcatccagacccagacaaagagcccaggccacgcgggctcgttaattttaaaggcagcgcaaggtgtcctggacaaacgattttcaaagtacatcctgccctgccagaatgcacaatcagcacctcggagcat

SEQ ID NO: 9688 - DNA, 201 bp, Bos taurus
attttcctttgaatgagaattggggaatttaacacatggaatgtaagtacgataattaaaggtgtggattttgcatgaaaaggtttgtgtttacatctcaacaccaaagcttcctagctctgagaccttgacctgtctttcctgttccggaaacaagagcaacattactaactgcccgtgggggttctgcgagaagtcatt

SEQ ID NO: 9689 - DNA, 201 bp, Bos taurus
aagctcagtctaggctgtcatttacaattgccttgttattttaaaagtggccgtttctggattttattattttctcttcatctcgatcatttttctccaatgtgtttctccaccattcggtcacccttgggcagctctcagttgactctacccggaaaacctctgctgtaagatttcagctgtgcgtttgctgtagctgac

SEQ ID NO: 9690 - DNA, 201 bp, Bos taurus
gcaggagagacaaagctgggaaaattaaacagtgtagactggctggtgaggatcatttcagtgggctttgagctgaaggggtggtcctggttccttggcacctggccccagggtgaattaggcagaggcatgttactccctgctgggatgtgtggctctggtctggtttacttgagagaggagtgctccagcctggccttt

SEQ ID NO: 9691 - DNA, 201 bp, Bos taurus
acgaagcgctgacagtggtgttatttgcctgaagaaacggccaccgcctgtcccgtgactgtcttcaggtgactgacacctgtgtgagccggtcagtagccgagagccacagggccctcagagtcctcacgctcagaccctgccccgccgctctgccaggctagtcatccagttccccgttttgcagtaggttatgaaatc

SEQ ID NO: 9692 - DNA, 201 bp, Bos taurus
gaaaggaaaaatggaggttggcccaaaatataaatgaaagtggtaccgacagtttggggctgcaaagagtctgtatcttagaacgtctgtgtttttctacagcaggccttcacctggtatttttaatctggcatgttcaccacttctcgtggtttctttagaagggcttttatatttcctctgaatgatggatgtgtcaaa

SEQ ID NO: 9693 - DNA, 201 bp, Bos taurus
ttgtgcatgaaaagtttggccagttttaggtggtcatgatcgtctctaggcatctttgtgaaatttatcttacacggccgtctcttcctaagtttaagaatattcagtgtgatttcactcgtggtggtggtagtggtggtggtttactttctaactcttgtctgactcttttgtgaccccatggactgtagcctgccaagg

SEQ ID NO: 9694 - DNA, 201 bp, Bos taurus
taaatagagtagtatagcaggtatagtagtataacataataaacgtaacagtttagtggtgggataagtataggataataagtatagtgacggccgcatcactgattcctgctcgtcccccccgtctccctcttcaggggtcttagccgcatccctgattcctgctcgttcccccccgtctctcttcaggggtcttagtaa

SEQ ID NO: 9695 - DNA, 201 bp, Bos taurus
tggctgccttttatcgtttacatctcagctttgccacgagaaaccttcactgactgccccgcctaaaatcccctcaccgcgctggtcactgtcccccaccctgactggccttctccccgggaagcacagtggccactcgcgtgtttcctgtctgccttgctgactgcggggtgctctccttggaggtgaggtcacgctccc

SEQ ID NO: 9696 - DNA, 201 bp, Bos taurus
tctgagttatctagggggaagtagggaccagatttaagttttcataattacttttctcaatgctgtaccaagttttttgcatgtagtagggaatcaataagtatctgttacattactaaaaggaagaatgcaggtagtcagtgagtatttgatgaattgcttagctgaaccacttacaagctgatttccagtcatctgcgc

SEQ ID NO: 9697 - DNA, 201 bp, Bos taurus
ccttaggttaaggtttcctttctgcttttgatgaaaatcatagtgtatgggaaacctttgaaagaacacccagctccaggcctcaccccagcccagatggcgcttagaggctctgagttagtaggttttggtgctgtgggtgggcgagcacagtgggaggtttagaactcccgctgtgcatcagctccgggctctgtgatg

SEQ ID NO: 9698 - DNA, 201 bp, Bos taurus
cccctaacggggatagtggttcattctactgcctctggaagggaagcttgaccagtatccttgcaatgtatggacagccaaggtggcctggatgccatccggggtcttgctccctgtgaaagcccagctgtgtgcacggctggcaacaagctgcccagcggccgttcccatgttcatcatgagggtagatatgcttctact

SEQ ID NO: 9699 - DNA, 201 bp, Bos taurus
aaaaattgtaatgacttgagatggagtgataactccacatattagtctgcttgttgtctgtatgtttaaccacccaaggccacattgaaggaaaacagccgaacagtccaaaaggctgataaggagacagacacacgactccctgcttggagaggctgctttattttctcagaggccagaggatggaaagatgttagatgg

SEQ ID NO: 9700 - DNA, 201 bp, Bos taurus
agtcatttgaggcagtattttcctggagaaggagcttaaggcctgggtccctttggaaattcttatttcacaggaatgtaaactaccaaggaatgaagacctgagaaatgaaaggcctttggaatcctgatacaagaatacacagcaaacacttgactgaaccccttgaattgctgtgcgcacactcggagcacagaatac

SEQ ID NO: 9701 - DNA, 201 bp, Bos taurus
ctacagtaaataagtaaacaaatcctaaaaaaaaagactacattcccagaaaaggtttaaactgcagttaagtcaggtattaaacccagattcaggattatggcctttaccaccactgatgccattttgagcctgtggtcttctctttaacaacacactggcttctcccttccgccctccagttttctatgagtgcctccc

SEQ ID NO: 9702 - DNA, 201 bp, Bos taurus
tcctgggtcttcaacatgcagattgtagtccatgggacttctcttagcctccataatcacatgagccaattcctatggtaattcaatctctctctatagatagattttttcctgattgtcaggaaaaccctggctactagtagaaatgttgagaaacagaattttaaagatgagatttcttattatttattgaagtgtagt

SEQ ID NO: 9703 - DNA, 201 bp, Bos taurus
tgtagcagccacatttggggcattaccccaccccaccccctgcacctttcaaagcttcatgaggaagcctctgcccccatggccggtctctggcccttaacgtcttgtccatgcgagctgccctgtgtctggaagggcagaggataattagaagggacccagaggcgctggcctggcactgcgggcagcagcctggcctct

SEQ ID NO: 9704 - DNA, 201 bp, Bos taurus
tggcagcaaaggggtatttggatgcagaagagcaggagaggtgaccttggaggcagagttgtggagtgaggcagcctcaagccagggagtgctggccactagacacagcaaagaacaaactctcccccggaccctccggaaggaactatctgttattttagcccataagacttagtttggacttctggcctttagagctgg

SEQ ID NO: 9705 - DNA, 201 bp, Bos taurus
tgcacctgagacctcgctcaggacggccaagtcgccctttgagctattccacttcacacccgggagagaaaagagattgccttttgccccttggccttcctcctcttcctccttggcgtgtagatgtgacagctgcagcccctgcagccttttctctgtctgtgaggatggaagctaaggctaagaatggcagatcagaaa

SEQ ID NO: 9706 - DNA, 201 bp, Bos taurus
cgcttccaagagcttgctgactggtgctcagcatgtttggggcaaggtccagaatgttctttctcctcccctctgtttctggggtcccatcaccgtcttggtctgatttctgccgtctcttcctccccatcacactcaccaaagttttgtatattttagcagccttctcagaaaaaccaccttttggattttgatccagac

SEQ ID NO: 9707 - DNA, 201 bp, Bos taurus
tcaaggctgatctaggccggctaccgacctgccgagtaactgttttgacatcaactcatgcactcaagctgacaatttggacagattgtcagaaatgtgggtggtgagaggaggacagatcctctctggggcaggggggcttcttggaacagaccagagtgtgaatacgctggaagggtacccactgcagggagccgaggc

SEQ ID NO: 9708 - DNA, 201 bp, Bos taurus
gggggctgtgccctgggggccaggggccaggcttccccttctttggagaaacagcacctggagcagcaggtagatggcctggccactcacctggagaagcgtgatttcccggaacgtcctctggaaggagacagaaacatgagtgtgggtatggaggaagaaggaaggccctgtccggagaggatgcgaaaggacagacgc

SEQ ID NO: 9709 - DNA, 201 bp, Bos taurus
ccccccaccaggccatggccctgcacatgcgtgttaaatgccttccgagctccttgtgcatgctgccccagggtaccccatttgggaggctgagcagggagggctgatcgggaggggccgtgttgcaactgccctcttgtgcttgctttttaatgctgcacgcaagatgaggagcttgaagtcctcctgcgccctggagac

SEQ ID NO: 9710 - DNA, 201 bp, Bos taurus
tgagtgggacaggaggggcccccacactcttcagggcctgccgcggccccctcgggctgctccctctggagacaggccttccacttgggccggagatcgcgggtgtttgcacgtgacccttggctgagcgttttctctcctggatcgtcagtgccgcagctcaggcctggccaagcagagcaggcacagggtccagtcccc

SEQ ID NO: 9711 - DNA, 201 bp, Bos taurus
ccctgtcctcccctgacctgtctcccctcctgtggacccaagggttcctcctacagggaccacagctcttagcaggctccggggaggagggccggtccagttgaggacaagtggaccatggaggaacccgagtcacagatctgagaccccactggagaaagagtgaggccaccttcccagggttactcaggcgccagccag

SEQ ID NO: 9712 - DNA, 201 bp, Bos taurus
acgttcacctggagggaagggacggtgattccacaggggacccccaccccccacctggaagcccggggcagccggcgaagttccgaacagaggaggttgtcgccatgtgggaccaggaaaggctccacagaggggacatccctcaagggacaacccaggccacatggcccaggaggagctgagaggtgggaggtgccttcc

SEQ ID NO: 9713 - DNA, 201 bp, Bos taurus
gggactatttccctggaccaagaggccggtaaggtaggtgcggtccagagactttggctactcgtggggcctggtccagaatcagcagactgagtggcccgtgagtgaagtctttgacagacctgggagtaagcattcccggcaccgaggggcaaaatggtcacgaaatgcccccaaaccgtggccaacctgtggctgtga

SEQ ID NO: 9714 - DNA, 201 bp, Bos taurus
ggggacccggagcacctcccctcctgagcctcggcccagggcggagcaccccccacggggaggggctgacatgtgaacaccatggcctggagccctgctcggtggacgtggctgctctcagcacctcagtacttccctctggaccttgggtcctgcagaggccttccaggcgccagcgctggggatcctcgtccttggctt

SEQ ID NO: 9715 - DNA, 201 bp, Bos taurus
aagtcctgaaacagagttgcactggccccactggggcttcagcagccatggggaccgtgacagaagggggtgaaggtttcttgcagcccagacatcccaggattctacacttctgagccaaaggccactgttcctgaaatttgctcccagtttacctccagcattctccaccaaagcttgtacaatcccgatggctcacac

SEQ ID NO: 9716 - DNA, 201 bp, Bos taurus
cagagagcttgggaggccctggcccgcactaaggcagttcgtctacctgtagcctcctgtgacccaccacccactctgggccgctctgtgatgggactcatgtgtcgtcttatacaataacagagtgcaccttagcaatgtccgttcttgatggtgtgcggccatcgccacctgattccagaactttttcacactggcaca

SEQ ID NO: 9717 - DNA, 201 bp, Bos taurus
ctggaatcaggccccaggcaaagccacctcaggacaaagaggactgaaagcgtgagggtctgttgccaagggactttgacaagaagagcctctgaagggcggactgcaggatggccccaggaggaaggtgtgtgacacgggcggtgagccaggaagccggtcgatacaggactgatggtgaaaccgtttcatatcaagcaa

SEQ ID NO: 9718 - DNA, 201 bp, Bos taurus
gtggggcttcgtcctcattcactgctccctcgctttcctgccaagatgggtgaacctcttccgagccagctgccccggacttcatgggccaagagtggccgcagtgctcagacaggactcagatcctgaccatcaccccccagggctccaagcggtgtgacttcacaggggtcgcgagtgacgggccggggctccggtggg

SEQ ID NO: 9719 - DNA, 201 bp, Bos taurus
cctcagacgggagacaaacgatgatgtaggaagcatgtaggtggcggtcaggactgggctccggtctgggctccgctaggccttgtcccgttcctcagcatgatttaatcagcttctctgtccctcggtgtcctcacccgtgaaaacagggttgcggccatgagtcctgtctggtccacctaatgccgctacttcgaggac

SEQ ID NO: 9720 - DNA, 201 bp, Bos taurus
ggcagacccctcagctccccaaaccccagtccaggagccgcccttgtcctggtgggagttcccatggctccttccatgtcagcacacccctaaagccgcttggtcggccaagaggtttccaacagtgaagtctgcccaagctttagaaggttccggaactctgccatggagggagcagagtcctctagcctcgggcttcgt

SEQ ID NO: 9721 - DNA, 201 bp, Bos taurus
acaggaagccaccctcaggggccatggctcagagtcgttaggtgggcagacacacagatgtagcttcagggagggaaagagcccagagctggacagtggcagagcaggaactgtcccagccagaagggtctctgggactctggacctggggcggagtggtgaggagtcgcctggggggactgctaacaatgcgtctcgttg

SEQ ID NO: 9722 - DNA, 201 bp, Bos taurus
tgtgtgtgtggctgacacatggtaatacataattggggaaaaggtagatcacttactaagtagtacaggaagtgtgggcagtgtttgcagaaataaaatcagcttcccactctccactgtattagctaaattaactccagaggaattcagtacctcagtgagaacggtgaaacgatcaagctggtttttaaaatgcagaat

SEQ ID NO: 9723 - DNA, 201 bp, Bos taurus
ccccttcccaccccttcccagcagccttccaggtcagcctcacacaccttcattccttcccattgtctgctgcctcaggcccacccactgtgtgcaaacttcagggcggggagcacccaacagagctaccactctctcacttggcgacccggctggggccacctctgagccagcgaggctgcctgtcccaacagggctact

SEQ ID NO: 9724 - DNA, 201 bp, Bos taurus
ggctccgaccttggggctggcccaggtgccttcagcctcaccatcgcccctccctacccgtctaagaggccgcatctcttacaccctagatccccacgccattagtctaacatctcagcttctggaggggacctttaaagatacgtatgttcttaggctttaggctcaaagtgaaatcactcagttgtgtctgactctttg

SEQ ID NO: 9725 - DNA, 201 bp, Bos taurus
caggtgtcccttttccttctgcaggtggaagggtttaaggaggggagcttaagaaagtcccgccgggctgtggacggggctatgcaattcccccttttctggggccttcctttcctcatcattagcattggagaagggaccaggtgaccttgaaaggactcctagcacctcactcttgctttctgatgagcccctgttgct

SEQ ID NO: 9726 - DNA, 201 bp, Bos taurus
gctcatgggtacagagttctccagggcagctgtcacatttggggtgtgaaggcagattgactaactgccccttcatcccctggcactttgtaccgtaactgtctccactctgggcttgggcagacgtagtgatgcccgcaggtccaggagttggatggtgagcaggacagacagtccctgcaggatggaacccgaggatga

SEQ ID NO: 9727 - DNA, 201 bp, Bos taurus
ccttccccgcccccagaggcgtcgaccacggtcaaggtagagtccttcctgctcctgtgtgaacctgtaacagctgttgggcttcgtagaggactggtttccttgaacctttaaagtttcctgagtcccccttttgcttttctaaaggtaaactttattaccccaccagacttttaaagccatcgttctttgtgtgagggg

SEQ ID NO: 9728 - DNA, 201 bp, Bos taurus
cactttaaattaagccttaatcagatattaaatttgtaagtttcagagtatgcaaaaatactaggcagaatgagtttaaactgttcagatcaagatgctatatcttaattcagcaagtcttttctccggagttacaaagggaaactttcactgatacagcgctcgctcgctctctggtctggctgctgccattgcttgatg

SEQ ID NO: 9729 - DNA, 201 bp, Bos taurus
cccacgggaggggcgaggccacttctaccggggagttgtgatgagcgaacaaacactccatgaatgtttaactcacataacaaatactcaactgagtgccgtctctgggcctgccaagtgctggatcacagggtgtaatgacatggtccttctctcatgggatttataatctgtacacacagccctctgattcaaataacg

SEQ ID NO: 9730 - DNA, 201 bp, Bos taurus
ggggcacaggcagaccatctaaggcccagagcattaataccgactcgtcagtcccttcaagggcaatgcagttggacagaaacgagccctgggagctcttcgggccgagtggcaagagagaccctgcgtccccgatgcggcacctattaagccatcagggagggagctggtccctcactcagaggccccactgcaagaact

SEQ ID NO: 9731 - DNA, 201 bp, Bos taurus
cgtgagcgggcacacgaatccacgtgccctgtgctcacgtgattggtcacctgttgggcttgtgcacattctgtgtgcttgtggcatgacaatgattgtgagcatctaatagcataaaattacttacggagcttacgtaatagctaatacctgtatggcccttactagacgccagcaccgttctgagcaatttacatagat

SEQ ID NO: 9732 - DNA, 201 bp, Bos taurus
tgagcgggagggtaatggacacggtgtgtccccggcctctgtctagccggggtgtgtggtgcacgttaccttctcagcagtaggagctgatcagactcacagatcggctgagcttggccattgtgtcgagggctgctggatcctctgtgttcccctttgcagacagctgaccgcttcctgcaggtgtttcttccctgtcca

SEQ ID NO: 9733 - DNA, 201 bp, Bos taurus
cccttctctgttagactcctctctggtccgggtacaggacgctccatgtgcgcgaggccccctgcctcagagggcctgcctgcaagaggttggtgcccacttgtctgcgtcctcctgtttcaccctgatggggaaaacagaccactgtctctctggcttgcttctccctgatggctggcaagcttggggatctcctctgtt

SEQ ID NO: 9734 - DNA, 201 bp, Bos taurus
aggcagttctgttccagagaggaagggacgggccccccggattccaggacccacccagcatcggattcgaagcctggccctgggcgcactggctccgtacgggtcccagcttcccttctgaaaggagacggtttggatagacgagccctggaaggcctggaagctgcacagctataacaaacagccccaaatttcaggggc

SEQ ID NO: 9735 - DNA, 201 bp, Bos taurus
ctccgtgagtgcactggcccagcttgtcaggacaccatgagatgtctgcccccaggcctggggacaccagtgtccccagctggtgaccctctattggctcgagcaccttcccagccatgctccttcctggagtcttggtcctgagcaaggagggggcctggctggggaacagctgcttaaaggtggggcccgccctgtgca

SEQ ID NO: 9736 - DNA, 201 bp, Bos taurus
tagatggtgtgcagaggtgacctccagaggaccacacagcctggaacctgaggcttgcaggcccggccctgaagggcatctgtgctgaggcctccagccctgtccacggagcctctgggactggaacccctggggtgattgtttgacagtacagcttctcaggtcctgcccctgcacatcccagaccagcagacccaggtt

SEQ ID NO: 9737 - DNA, 201 bp, Bos taurus
cacctggcccagcatcagtacctggtcccaagcagcccacgtgaagtgcaagccctgtcttcagcgcccaacgacaaccttcagagggaaggtcacaaaaagggccaccgagtccccagagctcagcacagtgctcaccacagtggcacacccttgctaagtatgcatcacgtttattagcaggtaacagtagaacagaaa

SEQ ID NO: 9738 - DNA, 201 bp, Bos taurus
ggcatttaggatacggcctcagctgggctcccaacttccctttacgtgtctctggcatccaccagcggctcctctgccctgcccattcctggggtcactgtggccgggcctctgcctacccacagctgtccttggcacactgcctggcactgttcccctctcccgccacatcgtgcctgacttctgtgctttctccttgga

SEQ ID NO: 9739 - DNA, 201 bp, Bos taurus
accatctgccgtcctcccagaggtcagactggccccaggccccccagcaaggacactgttaactgcatggcccaaggccctgggcaaacaaaggcactcttatcagggagggcattccaaggacttagtacatctctccagagcagccggggccagacctgtcttgggaatgtgcagggttgggacaaccaaggcctctcc

SEQ ID NO: 9740 - DNA, 201 bp, Bos taurus
acagagggagacagatatacaagaagcagagccttacaatttaatctgatccgtgctgtgcaagagaaatctgcaaagattatggaaggctccacgataagtaaaaccagtatcatctgagaatgatggcacccactgtatgcccacagccttgctccctttttctgacagccatcgtgggggcaggtgtcccgagcctgg

SEQ ID NO: 9741 - DNA, 201 bp, Bos taurus
gcattgaccttgacctttattgaaaaggaacattgtttgttctcagagcagaacagagggacttatttttcagtacagtgatgctcttctccagaaagaacggggtcttctaaatccttggttcacccactcacaaggctggctgcttactcgcctgtcagtcattactgcacatgcccaggagggcagagatctctttgg

SEQ ID NO: 9742 - DNA, 201 bp, Bos taurus
tgaggcccatcttccaggatcctacaatctgctatggaagagggacactgatagattatagtctaccaagtgttaagagaaaggaaaacaaaattctatggggactccacatggcctggtttgaggggtaaaatgtctactctaggaatctcccatggttgttttgtggatctgatgaggtcatatgtacagaagtactag

SEQ ID NO: 9743 - DNA, 201 bp, Bos taurus
ccaggtagtatgtgggaagtttcacatgcaaagttaaccaggaacattttaacaaatgacataaattacaaaagtagaatgtgactggagcacaagggccgggacaatgaaataatgacagagacaaattagcatgcaggatatattaactccatcatttcccatagtctcccttgagggtcttcccttccatgacatggc

SEQ ID NO: 9744 - DNA, 201 bp, Bos taurus
ggaagccatggagtgatgatgctttaatagagcaaagactacaaaacataattaaggaaagtacagataccacatctgttttaccaagtagcctgggcttcgtatgtgcaaccctgactaccaataagatgtactttgatccatataatattagtatccaagagcagaaatctgaaaattatggggcaggtaaaaacatta

SEQ ID NO: 9745 - DNA, 201 bp, Bos taurus
ttaggagaaaattacaggcatccagataagagaaaatgatgacttagaccaggtgcattcatgacggaaaaaaataatgggatggattgaggagataaactacaaaattgcttgagcgattggttgagagatgaaaagggatgatgacattgtgtctgtttgcctaactggatgggtggaggtgggtccttagacatggaa

SEQ ID NO: 9746 - DNA, 201 bp, Bos taurus
tcttgaatcagattctgttctaaaaatgtcagttccccttacacagcaaccccatgaatagctactactattattttcttttgttctataagtggaaaataaagctgagtaaggctcaatgatctgcccaagactgcaaggtgtaagtgatgaagccaagatgtggaattaggctgactccagagcccacaaataaaactg

SEQ ID NO: 9747 - DNA, 201 bp, Bos taurus
tggtaaataaatctaacatgggtcagctttgaaatgttcttaatttttttaacgtgataactgcaggcctctggctccaccctggcctggtttggtatagtcgccaaagtgaaagtgcaagttgcccagtcgtggactcattgagaccccatagactatatagtccatggaattctccaggccagaatactggagtgggta

SEQ ID NO: 9748 - DNA, 201 bp, Bos taurus
gagtacacaaacatattctcagggtcccaaaagttctaattttcaattgttttaaaaatttcaatattaacaaaaatattactaaaagaatattctggatcacttgagtgatgacttacataagtaagtgctaccacatactttggggaccaacttctgagttcctgtttccaggcttgtagaaaatcaagaaaaatcaat

SEQ ID NO: 9749 - DNA, 201 bp, Bos taurus
ctatgattcaaaatacacagttaatgcaaagaaagagagaaagaaggctactaagggaagagaggagactggagtggagaggtgagaaaggaaagtcatatggaagacaaatgtcagcatggctaagtacccaatacatgccaggaactaaggtgttgtcatatataactcattttaacatacattgattgtgtaacttaa

SEQ ID NO: 9750 - DNA, 201 bp, Bos taurus
aaaaaggagattaatccattaggccagaatatgtggtacatgtgggatatagtgcaataaatgaatgctaatctgatgaaaaatctttctcaaatatatcagcatttcttctgatatggaaacagatacccagagatattggtgtcacaattgtttaagtcatagagctatttgatataggatttggtacaagaagttaca

SEQ ID NO: 9751 - DNA, 201 bp, Bos taurus
tcataactctgtttctcagaatccaacccaaagaattcagtaaaagcatttttaaaacaaagattgatgtataagtaccttgattgcagcctaatgcataatagataggattgaaaaacaacaatcaaatattatgctgaatacagtcaaatattatacaaattttaaaaatgctgaccttaccagcactagaatcctgct

SEQ ID NO: 9752 - DNA, 201 bp, Bos taurus
agtctgtttatctccaaagtacataggttttcttaatagagcattcttctaatactaattgattctctgctaatatttataaatatattcatatcagccagtaaagagaggaagtcattgctagagagatgaaggaagtgaggaaaggaagtgcatttgtctggagtcataaagtagaaaggaagaaaaatgatataaata

SEQ ID NO: 9753 - DNA, 201 bp, Bos taurus
gactcatgcttctgttttcctgattcatccacatagatgacaagaacaggaagaatttgataaaccatcaaagttggtaataaaagcactgaaagaagcacctcacatttatccactccttctgtgcatcaagatacattaaagaggtgaccatttaatattcacaataacatgatgaggaaaagatgctctcttagcagg

SEQ ID NO: 9754 - DNA, 201 bp, Bos taurus
gatccaggggtaactgatcccagcttgccagccagcctcctaggctcagctgagtgactctgcactgtatttatgtcccaaatggccttgtgtttgctctgtcttccctgaagactatggggcagccacttctcttggagaccacgtagctccgagggaaggtttcaggacctaatttctcagctgtcctggtaaggccca

SEQ ID NO: 9755 - DNA, 201 bp, Bos taurus
tatgccaggcgtgcaggtgaggaaaactacttgggcaaattccccaggtagagagagatggagattatatctgggtctgtttagcatctaaacctaaaaccttgattctcaatacacagcccagaaggtcacttccattggctttctacaatgtagcacttaatctcaaccaggtaacctgcctctgtttcacatatattg

SEQ ID NO: 9756 - DNA, 201 bp, Bos taurus
tggaatcattagtgatgtggctggtgtttgggtgggatctgggaagagctggtaggttatcaaagtcagcggctgtggagtgtctaaatcatgtgtgtcttcagtctacagggcagctgccattctcctggccattccaggcaaaggacagacagagctgactggtgacatcctggtgccttagacagagagcaggaccat

SEQ ID NO: 9757 - DNA, 201 bp, Bos taurus
ctgaaaagggggacttctctgggcttttctcctcccactctccttttggggcccactttaccatgtagctgcggcagtaagaaagccccacggggctacccatcttggctgaggctcttgccaaccatgcagaaaccccgataagaacgacgtgagccaaagagagcagaagctcgtctgctcctgcctgagtcctaagtg

SEQ ID NO: 9758 - DNA, 201 bp, Bos taurus
cagggctgtccttttcctgccatgctcccccatggcagcatgccccattgtgtacacacacagacgcacctgtgaccagcactcagcgtttgttaggtcattggtcttttgcttgtctgtttcccgtggcttcagcgggcagtgacccttcccacctctatacccagcacctagcatgagtcttgacaagtaacaggtgct

SEQ ID NO: 9759 - DNA, 201 bp, Bos taurus
ttttttaagttcagcgttcacacatgtacctgtagtgaggacaggaaatgggatgttagtaacttgcgtcagtaccctgaaactcctgtgtgcctcgaaaccctgtccagtgtgccctttcgtgatacaaagagcagttccaaggagagagagctctgcttccaagacactcggtaaagagtggttattcacttctcactg

SEQ ID NO: 9760 - DNA, 201 bp, Bos taurus
gcccccagggcattaccgttcttgttcgttttttttgctgatctgatggccgcaaaaaaatatctctttattttcattcccttgtctaagagcaaagttagtatcttttcacatttctgttggttttctttctttcatttttatttgtttgattgttcatccccttaacccacatttcttttgatttgttcatttgttctc

SEQ ID NO: 9761 - DNA, 201 bp, Bos taurus
cactgtacgccttccctcgcttagttgataaatgcacagtataacccctgccagagtaatctcactcaagtggaatgtgtctacacttgtttctttggtgtggggcccagttactatttctttggccacagagacccagtactatcttgaggttccgtttatactataaaattagtaattctagggtctgaatgtttgtgc

SEQ ID NO: 9762 - DNA, 201 bp, Bos taurus
gattatgcgacatgaagtggtttcaccgtcctttagacaagtgttattcggggaaatgaaaaccccaggagagaggttcctgtgttagccatcttgagagaaagtttctataatgatttcttaaaaaaggatggtagtgtttgagatttctgtaagtggagggtgaaaaatataatgaatttgctttactattcatgtgca

SEQ ID NO: 9763 - DNA, 201 bp, Bos taurus
gcagtcctgggaaggaaccacttcctgcctgcgtgcccttgagcaggtgcctcgtcatccctgtttgtaacttggtgtcgatgatgattcctacgagtgcgggtgcgttcatttcccgtggctgccgtaacagaccgccacacatgtagtggcttcaaacaacaggtttactatgtgacagctttggaggtcagaagtctt

SEQ ID NO: 9764 - DNA, 201 bp, Bos taurus
ctgcgctgtctgtgcacgtgtcctggtgtgcccgtccacgagagcctctggggtggatgcccctggcgagcgcttggcagggccataggcatgtcttcagttttacaaggtgaagcccaaccactctccacggtggttgtgccaggttatgccagcagcaggggtgcccggcccagatcctctgctgctctgtgtcggggc

SEQ ID NO: 9765 - DNA, 201 bp, Bos taurus
tgataggagccaggcagtccctgggtagttatgaccccttctgcctggagctgtcacttcttgttattctcataggaaattggtcactggaatctttctacgatggttcccttttctcatgaatgattgtccgctgccctcactatgggtggaaaggctttggagtagcaaaggaggacagtttgaatactgaggagttga

SEQ ID NO: 9766 - DNA, 201 bp, Bos taurus
agtcttatttttaaactctccatcatccaggaaagaaaagccaaatggatctgttgtgtataaagcctatttcacatctcactacctgccaatcaggcatgagccagacttcaaaggtgtgtttaagcaaaatacactgtaatccatcaagtggaaggcaatcatatataaccgacaaatcacataatcaataatcaacat

SEQ ID NO: 9767 - DNA, 201 bp, Bos taurus
ggggctggctgctttccagaaatccctggatggaaggccaccctgctgtctctgtttagatggtgattgaccactgaatagctgcccaaattgagacgccctgcccagagcccggcctgacagaacaatcaggttgcactgccctggagacagccggggcaggagctggtaattgacagagagctcattatggaagcgaga

SEQ ID NO: 9768 - DNA, 201 bp, Bos taurus
ctccgcagagctggtagtggaggaatcggcctcctgaccttttcatttaacttcttattttcccttttgtttcagctcctctgcagcgtctggctctcatcaccagacagatgacgtttgggccccaggttccttgacctctcaaggaccctgcacatctatcggacttatcagagctctgtgttccaagccagatgaatg

SEQ ID NO: 9769 - DNA, 201 bp, Bos taurus
aaggaagagttacttcaaaggccctgaggcaggtttctctccatctcccagctttgtgttgctcaccaggcttcctccttgggcacattgccctgaataatggtaaaatggccttctgtagctgggagcccacatactattcactcagcagctccagagaagagaagagcctctttccagctagccagtgtgctgactctc

SEQ ID NO: 9770 - DNA, 201 bp, Bos taurus
tgtgtttgttgtttgtctgcagccggcgggacctggagatcgagcggccgatgcctggagcccacacggtcaccctgcagtgagttgccctcccccctgcgctgtctcttcagctttgctggccagtgccagcagcatcttagccctgagcttggcaggacggcctgcctgctgctaggacagcccagtgggcaagacctg

SEQ ID NO: 9771 - DNA, 201 bp, Bos taurus
tgccctgtgccatcaaaccacaggccaatgcggcacttacacatgcagctaaagaaagcaagctgcagacacacagcgccacgcgatacccatcagcccacgggcttctcttgcctcggacaggccagtggctctgtcttcgaagtgacgactgcaattctcccttctttgtgcatctggccctcgttgccacagctcagc

SEQ ID NO: 9772 - DNA, 201 bp, Bos taurus
gtttggcctagaacagtaaccccctgttccaggcacctaggaagctctgtatatttttccttatagagatttttggggtttttttgttttctaatcagtttggcccattgtccttgatttaatttaatctaggaaacccttacaaaacaaatcttaacttttcttctaccagttagcatttagaggttatacagtttagca

SEQ ID NO: 9773 - DNA, 201 bp, Bos taurus
tttcagctgatttctagagatcagtaatctgcccaatcactcctgcctctgaggttttgttcctggaagattcttggcctctgaactagagttttccttcttgtgtttgttctttactctctgcctgtgctgacatggatctcccaggtgtgtatctggccacactgtttcactggtggactttggaagctgaaggctgtt

SEQ ID NO: 9774 - DNA, 201 bp, Bos taurus
gattcttgccatgaaagaaaaactaactcctatttgcttaagtttctttatttgggttttgcgattatttgtagccaaaagcatttctcatttgtagaggtatctaacctagacctagaaagccagggaaagcctcttcttgaagaagaggacatccatgctaagagcagaaggatgcggagaatgaattcaaagagagag

SEQ ID NO: 9775 - DNA, 201 bp, Bos taurus
cattctgtgtttcttgcagggtgatgcccatggccatccagttttccatcctgatcatgctgcactcagctctggtcctcatcactacggcagaggattacaagtgtttgcccctggtcctccggaaaacctgctgttggattaacgagacctatttggccaggaacgtcatcatctttgcatccatcttgattaatttcc

SEQ ID NO: 9776 - DNA, 201 bp, Bos taurus
ccagagaattgtgacatgaaaaaagggttctgttagtatgtccctgtgcacagcactgtggtgactatgactgagtgaatgaatgaatcctagccgctaagattctggatggcaatatatgacttacagtccagctgtaactgtacagctcaaccagatctgagcactctctcctgctgagtctgcgtgtggcctaagact

SEQ ID NO: 9777 - DNA, 201 bp, Bos taurus
gccatgtgatgctgtgtcactgggggtagggagtgccaaccgagcgccaccaggaagagaaaagcctgctctcggtggcaatggaagcatcagcttgactctgttggctgctttgggatttctctagatgacatcataataatagctctgctcttataatcataaaaatgacaataatcgatagctattaggtacattcct

SEQ ID NO: 9778 - DNA, 201 bp, Bos taurus
cccgcctgcaagctcaggctccaaagccagggatttcccatgtgcggatgagaaatcactggttggtcccttggcagcaggacaaacagaaaaggaacagattcacccaaggggccaggaagagcagttttcatgacgaaggacgattccatcagccctcccacaagctattcctcacaatggtaattataagtataataa

SEQ ID NO: 9779 - DNA, 201 bp, Bos taurus
tgaatgctctgaatgtaagatctcagtatctgaaagcctttgtgtttcacctgcagttcactcttttgtgtttcctgtctgctgtgggtttgttgttgttgttgttctgtctcgtagaaatctacggattatttttcttatcttcacttgatatctagtgccagggaggagacagttttgggtagagaagaaaagggggag

SEQ ID NO: 9780 - DNA, 201 bp, Bos taurus
attcctcagtccccagcaggaagggatgggccccgggaggtaggcagggagccacggcatcggcgtcacatgccacctcctccccgagccttctgataccgcagagggccccacctcattgacgtggggatagcggtgacaggtacttgctatcgagtcagaaagccctaggctcctaacccagctttgctggggctcctt

SEQ ID NO: 9781 - DNA, 201 bp, Bos taurus
tcgatggctctgcagccaggccctgcttcttccagggcccagataacgcaccagaggcaaagactgcattcaccaacaagggcttgaatgctggaatgttggtgaccctgtggaactggaggccccgtggtaacagtgccgcatggtgtgggaccagtgggaattgagccattaggtgtagagacccagcctcacggggca

SEQ ID NO: 9782 - DNA, 201 bp, Bos taurus
tctttttggctggtttggcttttcctgtccttttaaatgcaattaggatagacgaggggtggagtcagttcttaggccatcagaggacagcagaggataacgaagtaataaaaggggctcttggcagatacgagtttggcactgggatgctgtgctgtttgggtcctcagggcccctggggttccctgagcacagtcacag

SEQ ID NO: 9783 - DNA, 201 bp, Bos taurus
aagtttcaagccagaggtgatttgaagatgctatcttgggagggtctacagccagttgaggggaagttcctcttctctgtgcatctagccatataaggactgggctcgcacactcaggacatgctgaactgaactgcctggacagtctgagccaggctttgtagacaaggtgacagtttgaattttaaaggccactgctcg

SEQ ID NO: 9784 - DNA, 201 bp, Bos taurus
gatccatgttgtggaactagcacagcactctcccctgtggtgggaggagagtggaaacatttcattggtagatgaaggacagagaaggacttgcccattgcttactgcattgacaatccatagatcaagtctgcaggatataaaagtgccctggagtgagtgcatgggaagcctctgcctggctctaaagaagctggctgg

SEQ ID NO: 9785 - DNA, 201 bp, Bos taurus
taatgtgtgatgcaaataaagcaatgaatagtgagaaatttatagatttaaatgctactgttataaatgtaaatagtctaaacaatgaactaagattccaacctaagaagttaggggggaaaatgaacatagtaaattcaatggaagtaaaaggaaataaataatatagataggcgcataaatcattgaaatggaaaacaa

SEQ ID NO: 9786 - DNA, 201 bp, Bos taurus
atgtgacggtcagaaaaaccaagaaaagactgagcaactcatgcaggttgaaggagatcagagaaatgtgacaactcagaacgatatataacactagattggaccctttgatcataaagaatattattgggacaactggtaaaacatcaacaggatatctgggtaaatgaagatatatcaattctttgcactaatcttaca

SEQ ID NO: 9787 - DNA, 201 bp, Bos taurus
gatgtagctcactctcagcaatacatgaatctgaaaacatccaccttataaattctgatcccacgtagacctctcgaagtcctcgcttgccattatgctagttctctttctgcacttgctcaccaaaacgtagtactttaaaaaattttgacaactcataattttgtagaaggaaggagggacatctttgctccatggctg

SEQ ID NO: 9788 - DNA, 201 bp, Bos taurus
gccaacctcatacattattttcaagtcctcttatccacacatatcattttgtcgtgtctgagatgtaatcttgttactgaaacccaacttgtgtgccaacgcacagaaaggccaaacaataccaaaacattagagtctggaacagagaaaggtgtattgaggacgctgcaaggagatagtggctcatgtcttaaaatcccc

SEQ ID NO: 9789 - DNA, 201 bp, Bos taurus
ggatgacatcaccaagaaaaggcccttgttcccccagggcccagcctccctggaagatgacaagggttagggagagagaaagcccgggccacttgtcggatttggcaggcagcagccaacagctggtcaggcgggttaatgagccctgcactctgctctcgtccagcctgtactggcaaaggcagaggcaagcggctccgg

SEQ ID NO: 9790 - DNA, 201 bp, Bos taurus
ctatgaaaatgtgctctccttcttcctgaaagcagtggagagcaatgagggaaaaggaggatagcaacataatcataattagactttaaaatgagtctatttctggagtatcacaatttgttgaaaagagtcaagaataaagtagagactagattggaggctctggcagcaatttaagaaagagttatggcaatttgatct

SEQ ID NO: 9791 - DNA, 201 bp, Bos taurus
cattaactgcagatcccaaacctttgatgactttctgtgtcatcacggcctttcctcatttgctgtataagagatatttaaaatgcatttccagaaaaattacagagaatagtcactctggccttgttacaatagaattgctcatctgtgacaatagatgacttggccaggacactctgacccagatgccaaaccattgtt

SEQ ID NO: 9792 - DNA, 201 bp, Bos taurus
gtgtaattgatggtgcgaacaagtacatttatacatgaagacaagattcaatttactcaatggagtctgcttcatagtttcataaggccaggaactgtgtcggatatattagaggggaaagtacatctaataataaaacataacgttggcatttgaaaacaaaatgaatacaaagctattagctagttttggccccacaca

SEQ ID NO: 9793 - DNA, 201 bp, Bos taurus
tatgtactagttgtatcagagacaatggctgttaaaggaagctgggtatgcctattaatgttactaaggaaactactggaaacatcttttagttcatatcaaatacagaacaacttagtttaaaaactgtaattaaaatttaacatattgtctgggaaactaatcattgttcttaatcgttctctgaaaaaataaccagtg

SEQ ID NO: 9794 - DNA, 201 bp, Bos taurus
ggaagcactggccccattttgtgccctggtgagctccggagagccccaaagcatggtgcttgctgctctagcatacctaagattatattaaagaaagatgcgttttcttaattaatatctggtaagtgttacaatagacatatgaatagaaaaagatggggtcatggagatgggaatgatttggctgcacgggaaataagc

SEQ ID NO: 9795 - DNA, 201 bp, Bos taurus
tgtctgtcttcatgaaggccctgaatgataatctatttttgaccttataaaggtagacattactcatacctgaattgtgaaacaacatatcccatatacctggctatcagaggccaagcttttctattttagacgttcaaaaaatggctttccctcatttttgttgcctatgcttttgatgtcctgttttttgggccaacc

SEQ ID NO: 9796 - DNA, 201 bp, Bos taurus
tggcttgttgtctggggatgtgcaggtgagttatcagcaaacccctttgccccctccattactgggccctgatgcatctttcctctttgattttctctgcccctccttgcacttgctaagctgggtctctttgttctctctgaaagcccaactctcttccgcccccttgcctttgctcagaatgaactctgacaccaacac

SEQ ID NO: 9797 - DNA, 201 bp, Bos taurus
atgctcttagcgaacacgattatggatcagttgcatgctgggctcaatttgacaccatccacatgcaattcttactcagtgacacagcatccaggccacacgtattgacttgcatctgatcttggcttgaaaggaaaatcgctgctgcaggaattcaggttctacagaccctcaggtcactggcctcaaatatttaaaaat

SEQ ID NO: 9798 - DNA, 201 bp, Bos taurus
ccatgatttggtttacccttttattatttttttttccctgaatgtctgcggcatgtgggatcttagttcctccagggaactagggatcgaaaccacggccgctggaaggtgaagtcttaaccattggaccaccggggaaatctgttttacccttttaaaagagtccccctgactgctgagggcaaaggcggggtaggtaga

SEQ ID NO: 9799 - DNA, 201 bp, Bos taurus
ctccatctgaggggttgtgctgctggaggtactctggcccaggccatgcatgccacactgccccctggggagggctctgcagggcctgaagacacaacacgcgtacaagtggctgcacgccgagtctaagtcacaatggacacaccaccacagctaggtacgagctcatcaaaaaagcatctctacaggcactaccaggcc

SEQ ID NO: 9800 - DNA, 201 bp, Bos taurus
cgctctcactcatgctctgcatttccacggctgctagttctttaggcgattccatctgccctgctctcctggagcccaggttccccccaagacccactcttctcccactgtgtgcttccaggctctggcaacacaggctcttgcccacggcggatgctcaataaccatacacccccaacactttccaaatggaaatcggac

SEQ ID NO: 9801 - DNA, 201 bp, Bos taurus
cgccacccccatcatggctaacaatatctggagtttattaaacacctgcactaggaaatttgcatgcatgatttatgcaagcacaacccttcgatgggccgtcctggctatctctattttacagaggagtaaactgacccttagacttttattttttaagattttttttttttttttggttgttgtaggccatttttaaag

SEQ ID NO: 9802 - DNA, 201 bp, Bos taurus
atgtgctgaagggggtgaggaccaattgttctcattagcctggaagcaggggcctgatctctgacccaataacggagactgtgaaggagacaaaattcagatgttctgtggtagagaaggaagaagagggctgttgcatcaaacacacgggacaaggaagatgcttgtcttcctctgtctggcctacttcacttggtatga

SEQ ID NO: 9803 - DNA, 201 bp, Bos taurus
caaagaccacagctcatatcaggctcaggatgtcagaaatctcacttctgttgctcctaaaagccagtcactcaattcttgtcaaaaaatgattttcacccgctatctgatttcttatctctttgttctccgtgaagccctaggattggtgggctgaagttgtatgttgcaagggagggtgggaaatatgtggaaaattct

SEQ ID NO: 9804 - DNA, 201 bp, Bos taurus
aacaattctcgtattcctgcaatgacctgagtgttgtgttaggtgatggacattccatcctagacctgcaagtgttaaattccaaatttggtgttgacagcacccggagttactttccaggttcatcctgtaactctaagcaactctaaaacctttacatgcaaacagctcctatctgtctccatcagtttttaagttgaa

SEQ ID NO: 9805 - DNA, 201 bp, Bos taurus
cgcctactcccatgttcccaacccagaagcccagtcccttccaattctctcccagtgccccctgcaatgtgtcattttaacgcagaagctcctctggtctatggaatggttagggagttgaagctcaaaccctgacttttaaccccatatttgctttagctggattctctttggagctgcagctgggagtttggtccttaa

SEQ ID NO: 9806 - DNA, 201 bp, Bos taurus
gggttgggacaatgaggagcctcagaagagcaggaatctggagacaggagggaaagtcagtttgccccctgccttccgtaaagtcatttctggtggactaaggtcgtgacttttctcagaaacctttttcaacaacctcttccccattttggttcctgttccttctttctactaactttcctactggcttaggcgtggcct

SEQ ID NO: 9807 - DNA, 201 bp, Bos taurus
gataggttaagacagttttctggagcctgctcctggcttacctttacccgcacaatccctctgaatcctacttgaccttctaagggcaggagttggaaagagggctgcgaggactggaaatggattgcaagccttctttaaattctggcccttcatcctaccttgttaaatgagaaggacgagcacagagagaggagactc

SEQ ID NO: 9808 - DNA, 201 bp, Bos taurus
tgcttgcataatgtggaggtcaagagaacactgtacaggggcaaacagaaagaggagataaatggttggaaaataccattaatcagaagagaaagttggcgttctgcattatgaatctattagcagtttagctaagtcatctccaggattctgtaattaagtgggatttacccagcactttgcttttggaaggcttccctg

SEQ ID NO: 9809 - DNA, 201 bp, Bos taurus
ttaggtgtaactgctaataagagggagagaaattcacatgcatctattgtcattcacttgcagaattatccaaattaaaaataccatcagatttaaatagttgagaaacattcatacctgttcccacaaatacaaattggaaagagccaattaagattactttctcctatgccctagcaagcattctactcaagaggattt

SEQ ID NO: 9810 - DNA, 201 bp, Bos taurus
tccaacttgggggtcccagaacttgaagcaaatgaagagctgtttgtactgctaaagaactcaatactgccaccttctggcaagaagaaaacgtgtaagcggcagaatttgaaacctgtgttaacagaccctccttaatcagttcagttcagtcgctcagtcctacctgactctttgagaccccatggactgcagcacgcg

SEQ ID NO: 9811 - DNA, 201 bp, Bos taurus
cactgcagaagctggccagatgctcaccaatcccatttcctcttttcctaagcacaggaccatttctcttagcctcccttgcagttaggtagtggagttctggccaatggggtggtcattacagaaccctttgagccatcaccacgttttttttcccttgcgcagggacatcagtggctaagctgacagcaccccaagatg

SEQ ID NO: 9812 - DNA, 201 bp, Bos taurus
taacccacaagcaaggaagggaaggaccagtgcccctgccttgcagcctggtcagccaaaggtctctggcaggcgtgggggcctccctgcatgacaacacgacccagggcatcagaacagcaaggctcagccagcagcatccttgcaaattcctggccggacgctctgagccttcgccagcacttccaggtctccctcgtc

SEQ ID NO: 9813 - DNA, 201 bp, Bos taurus
tatggaaaacttagaagtaaactatatatcggcctttatttcgaaaaccattactgaatatccaaaataacaagtaattacaaatttctgtttaaccgaacagcgatgaccatcacttattggccactcataggctaggtactgctccaagaattctccacacattatctctttttaatccccatgatatttccataatgt

SEQ ID NO: 9814 - DNA, 201 bp, Bos taurus
aattttgggacgcggatttacccacagcatgcaaaacttggagtttggggccacgtcagtctgccatatggacaatagtctgaagaaacagttgagcatcgcattccggggagaaataatgaaggctttctggttcacagctccaggcccttcctgaaacctgaccacattcctccctccagattccatgggacattgctg

SEQ ID NO: 9815 - DNA, 201 bp, Bos taurus
agctagaggatcagactgggctggagcacaggatgaagaggacagtagaaaagatgagggtggagagatggagtccagcccaaatcatgaaaggccaggaggcacaggtaaaggagcacagagcttgctctaagcacagggaatccaggggagagtttccagcaggaggagtaagagatatgaatgttgaaatcccagggt

SEQ ID NO: 9816 - DNA, 201 bp, Bos taurus
gcttccaaagctctaaattttcacatgtggcatttttattccatcttcacaataaccctgtgggactaatattgttttctcagttttcccatttaatagatgaaacggtaagagctcaaatgacatgcccaggctatatatgcggtacctggctggtctgggagttggacccaggatcttatttaaaaacactatttcagc

SEQ ID NO: 9817 - DNA, 201 bp, Bos taurus
aagctctgatgtaaagagctctgatggacacacttcaaactcaaagtagtggttactctggagaggaggaagaaagagacagatgtaggaaaacaggggacgttagctataccagcaatgctcaagctgaaagaagagagagaattttaagtttttaagtataacatatataattgaaattatttttcagttaaactttat

SEQ ID NO: 9818 - DNA, 201 bp, Bos taurus
tcaggctcccatgggagtggagcccaggcatgggtgttttaaaattccgccacggcatgtcgattgccaagtttgagaaccacgccaggcccttgtgcagctcatgcacccaaggctaggactcacatctggggagggaagggaattgcagtgtgaggcattacagggtaataggcccatgggttaggaactcccaagagg

SEQ ID NO: 9819 - DNA, 201 bp, Bos taurus
gactgagatgactttttacagaaaaggccacaagcagtgctttactgaggaattttgtctggaaagcctgtttaagccctctcttcttttggctgatgggcggccctggaatttgttcgttttccagtgttaggccatttaagggcatgatggttgaaccagtaagcaaactcacattgtgctattataagtgcctcatgg

SEQ ID NO: 9820 - DNA, 201 bp, Bos taurus
gctgagtggtggttaccaagggacagggggacaggaataggggagtcgttcaatgcatataaagttacatttatatgagatgggtaagtttctgggatcttccgtacaacataaagcctatagctaacaataagatgtcatgtgcttaaaatttgttaagaaggtagatttcatgttaggtcatcttaccaaaagccaaaa

SEQ ID NO: 9821 - DNA, 201 bp, Bos taurus
attctaaaaatagtatttattgacacctgctatatgccaggaactcttcatcataacattttggggtgtttttactactcccaccccccagaagaagaaatgaaggttcagagacacagtcaaggtcccatagcagccaaatgacaagtgagggttgagccaggtctggttctgcctgggggcacagtcttatgagatacc

SEQ ID NO: 9822 - DNA, 201 bp, Bos taurus
gactagcaaagtaggtctcctttatattgatagagaaataaagccataaaagtcaaataactttcccaaggtcccataggcaattagctaaccaactgcaatttgaaccaaactctgtaagattccaaagttcatgctctttcctttatagcaggctgccttccgattgccagataattggactaaaatttttacgggacc

SEQ ID NO: 9823 - DNA, 201 bp, Bos taurus
aaaaattatactagaattctatcctttaaaaataactgaaagttcttgcaaaaaaagatgtttatacagtaatgcttattgtagcaccatttatagtagcaaaataaatcagaacaaaaatatcaggggctagttaaatattacatgatacatatcacataactaaacagtggggtcaaccattagttaccactgtagaaa

SEQ ID NO: 9824 - DNA, 201 bp, Bos taurus
atcaatcttttctctccaagatgacccctccatgggcttctccattctgggagagaacaataccctctcccagtttctcgggcccaaagcctcagacacttgtcttggctctttctctcacacctccttctgtctgttccaagactatccagagccacacggcgcctcacccccacagctctgcctctggtcctggccgtc

SEQ ID NO: 9825 - DNA, 201 bp, Bos taurus
ggggctgggtgactgttgtgtgtggcggtgacgtcatgacacgtgtagcagcattcctggcctctatactccagatgccagtatcacatctctcccccaattgtgacaaccaaaaatgtctctagatggtgccaaatgtcccctgtgggggtgttgccagaatcgtccccagctgagagccactgatttacagcgagaaat

SEQ ID NO: 9826 - DNA, 201 bp, Bos taurus
agaaattgctctaaaactccaggtccccatggaaaccattggaaagactgcctattgactctacatgtgatgctgctacgactgctcccttgataacaaacggatgctattaaaagcctggctcaaatggaagcctgctatagctcatggcgagagccacattctctttggactgacagggcgaaaagaaatcaccctctg

SEQ ID NO: 9827 - DNA, 201 bp, Bos taurus
cacctcgtttcagcttccagaagtcttgattcccaggtggtcagtttcacactatgctccttccctgctcttttgcccctgttttggcccttatgatgctatcttgtcattgcctgttttccatgagacacttaagctttgtaaaattgtggactcagactgtcttgttcatatttgtatccccagggcagaacacctggc

SEQ ID NO: 9828 - DNA, 201 bp, Bos taurus
atgtttcataggctcgaggcaacctgttatggtagataaaacacagcacaacaaaaaggcaaggaaatttccgttctagtcctacttttaatccttgtaatagcagtgttgacaagtcacttagtttcatgtcacagtctgtgaaacatttcctgcctatgctcaaagaattctttaaggatcaaataaaaaaaataccac

SEQ ID NO: 9829 - DNA, 201 bp, Bos taurus
ggctgcccctagcgccctcctgtgttccagctcttttcttcctcatcttgtctctgttcctaatacgttccaggggcctgctgctaccatttcttgatcactgacttatggagtctcttttttttccccctaaagattctggttctgaaatcagagctggatcaccctgggcctcagttttctcatctgtaaaacagggat

SEQ ID NO: 9830 - DNA, 201 bp, Bos taurus
gagactgcacacagatacagcaacgttattataatgggcagacggagacacaacccaactgcccagcagcaggtcaccgaataaacaaaacggcccacgacaccactgtggtatgatatgaactgtgtcctgcccaaattcattagctaaagccctattcccagaatgtgagtcaaggccttcaaagaggtgattaagtta

SEQ ID NO: 9831 - DNA, 201 bp, Bos taurus
taatgagccacaatgctggagaaaatatgtgagtagtttgtgaaataagctagggtcttaatagacgcaattcattgaggatttaattaatacttattttttccacattctactatctattaggagtctcctgaccctacggtagtacgtccacacattttggggtcttcactggagggttatatagaattcctattataa

SEQ ID NO: 9832 - DNA, 201 bp, Bos taurus
atcttaccaaaatccagctggaaaaagagaaatatggcttttagaaatccagatgcagtatcacaaagcaaactataaaagggattttggccaagaaaaagtagcttaataactgatacacacacacacacacacacacacacacacacacaacctctgaaaatacactcaagattctgaaaaaaaatgtgtattctatga

SEQ ID NO: 9833 - DNA, 201 bp, Bos taurus
atccccagaaaagggaggagcagcaagagagggcttagtcagagggcaggatccagaaagagggactcctcccttaggcccaaaggccgagcagaggtcacgaggtggagaccaaatcgacatggtaaattggatagatgaaggcaatctgcctgccaaaataaggccagagaatcagaagagggagacaagacaaggcag

SEQ ID NO: 9834 - DNA, 201 bp, Bos taurus
gaagatccagcacaaccaaaactaaacagatagataaataaaaataattatcaactgaaaaaaagaatttaactttcctgaatgttgacaatgggcctccttggagaaaaatctatttccaactttttgcctcaggctgggatgttgagaaatctctgccagaaacaaatagtacacaaacatagatggttaagatgtgtg

SEQ ID NO: 9835 - DNA, 201 bp, Bos taurus
ttctacaatctaatgattaggtctcaatattttagagggccagtgcccttggactgtgaatttcacacttgcttttcaatttcccctcattctcaggtgggcaggatgacaagagtgggccagagtttggcatttccctccccacacatgaaacgttgaagttggctggggtcgggtattttctttccccagttcagttgg

SEQ ID NO: 9836 - DNA, 201 bp, Bos taurus
gagaaacatataatgcttagccccaaaaggtatggtaatgtttaaatgagttctacagggacttctctggtggcacagtggatggtaatcctcttagccagtgcaggggtcatgggtttgatccctggtctgggaagattccatatgtcagggagcaactgagtctatgagccaaaactactgagcccaggctctggagcc

SEQ ID NO: 9837 - DNA, 201 bp, Bos taurus
ggacagaggaacctgacaggctatagtccatgggctcgtaaaagagtcagacatgacgtagcgactaaacaacaacaaaagacaccttagaatggaatgacttacacatgttttcaacttcaataaatactgtcaaacagttttccaatgtggttctaccaatttatattcctacgagggatataggagagtatccttact

SEQ ID NO: 9838 - DNA, 201 bp, Bos taurus
gaggaacatacaggctacagtatgtggggctgcagagttggacacaaattagtgggtcttcacacattctgttccatatgccttgaatccttttccctcccacttgtctcagtttacttttatttccctctagatggcaaatctgtttccacagagaaaccattgaaaactcatcaatgcgcatgcacggaaccatggttc

SEQ ID NO: 9839 - DNA, 201 bp, Bos taurus
tactagaatctctagtaaaggaggaactcatggttaaaaagctcattttaggcactaaaatattttggctaaatttatggaatatagatctctaatggacaaaacaaaaatcacatatttgtagaattttcctaaaaagcttttgatgtgcgagtctgctaagactttgatatgatataatttgtcaaaatatatcttctt

SEQ ID NO: 9840 - DNA, 201 bp, Bos taurus
ctttccaaccctgatatccagttcatgctccagcaactcaagacaggtcaagcttttacaacaccaccacagttaacccatagatgtgagttaacccacaatgagaaaaaaatgactgttgtaaaagctgctgagttttggaatggttttttatatagcattacctaaatgataatacactctccatgaaatggatcttca

SEQ ID NO: 9841 - DNA, 201 bp, Bos taurus
catggaaactgaggaccaaagggattatgtgggttgctatcattacacagctggtaaaagttggagcttggatttgaacctgcgtcctcatcctcaaacattttcagtgactgcagccgctcccacgtttctttggtcagaatctaaccccttggttaaatagcatattaaaaaaaagatagtttgggaagagttttccac

SEQ ID NO: 9842 - DNA, 201 bp, Bos taurus
catctcatgaaggtcatccatgtccaggtgcaaagaaggccccaaaaggatgtaggaacttctattaaggaaccactgccagtttttccttggaatatcttcccttgaaaatgagagaccggcccccagacactcattgctagtcagccaactggcatatttgaaatttcctattccatttttggacagtctaaacttgtc

SEQ ID NO: 9843 - DNA, 201 bp, Bos taurus
cctatttcctccttttggagacccctggcctttctgcctgttaccctgtcattagaatgtcaactttgtggacacttgcctacccctatgctccttcttggaggccatgagacagaggaagtaggagataaattctctcctcactggatgcccagggaagaacttcacagttaggaaataggtagaaaatagtaaagatat

SEQ ID NO: 9844 - DNA, 201 bp, Bos taurus
taccttctctcacatggagttgggaaggaagaggactcacatcctgagcctggggtgcccctgtttcttcttgtagatatgaaatgagctctaaggcctcatccttgagattttgatctagacggtttacagtgggaaccctgtgtctggacctttcaaactgcccatgtaattctgataacaactcactcatattcccat

SEQ ID NO: 9845 - DNA, 201 bp, Bos taurus
ggctctaacgacataattagagtggaggaagaaatagaccaacattgggctgatgagctcagaaacaggttcatgagtgaatgtttcctggagaaagctcgctctgacttgaacaaaggaagaaatatactttggtgacggctacctgtagatcctgggttgtccaggctagtcaatgtcgtgagctatgatcctccttaa

SEQ ID NO: 9846 - DNA, 201 bp, Bos taurus
tccatcctgcatttcataacctgacctgtggccccagaatcatgctttatctccaaggaggactcatttcaagcaggggttttcttcatgttcctagaacaggaatgtcaagtgccaggcctactcagacttcccgagtctgggatgcaaagctcctgtatccaccttccagctgtgatcagagtagcaaaggtagcaaag

SEQ ID NO: 9847 - DNA, 201 bp, Bos taurus
cattatggtatgagtgtggccaacagcccaatgatcagaccaccttacaaagtgagctgccatcagtaaacagaaacttagttcagattcctggtccaaactacaacacttggccctattgttcacaacaggagcacaaagttaccatgtttaatatattctggcatgaaaacttaatgtcttcaggccatcaaggaaaga

SEQ ID NO: 9848 - DNA, 201 bp, Bos taurus
cggcccactaccgcctggcgggtggcgctgggaagcagatcgtccctgctgaacttccggtacacgctttccagaaggcccaactgcgtggcacatgaactcctaagaacaaaggaaaattacatgcacatgccggctttaaacgaatactccacgagggcccactatgctacaagtaaatgctaatgattatgaattaga

SEQ ID NO: 9849 - DNA, 201 bp, Bos taurus
ccagctcatggaccatgaaacacgagatgaaaggaggaagcaggggagagatactgaggtgtctgtgaccacagggacagcagccctaggggaggggcagcggccggggcagtgggcatgcccacagcgggctggatcatttactttttagtgatcaaccccttggaaaaaatctctcccactggttacacatctggtctt

SEQ ID NO: 9850 - DNA, 201 bp, Bos taurus
caggtggccgccttcttggagagccctcgcctgcccccaccagagagaagcagctcttgggagaaaatcaggctaagtcacattcacatcagaggtgcccggggcctggctccccatgctgagcaggagtgacctctgccatggggacccatcccccgatgggctggcctactcttctgctctttcctccacacgggcagt

SEQ ID NO: 9851 - DNA, 201 bp, Bos taurus
ggccgggacctcttgacctggaattggatgccatggaggctctgtgccgcgtgactgtttaataaactcacagatctgagcagcgtgtttcataccttccaaggccattatgtggaggacggagcaaggctgagatgagactcccccaccccagcccaggtgatcccagctgtgcatgtgccctgtggggcgtccgttgtc

SEQ ID NO: 9852 - DNA, 201 bp, Bos taurus
gtgtttcaaacgttacataaagaggcacttggctggttaactggctcagttctgcctgggtttcgtctcaggaagcatttaagctcgctccccaggactgtacccctagtaaacaccctgctttaagggccctccgcacacgtaggctcattgttcctcctgagaaccaccagtttataaaaatcacaaacacattgtgtt

SEQ ID NO: 9853 - DNA, 201 bp, Bos taurus
gctggggtccttgggctgggtccctccctgcctctgtaagggccacacggtcacttgtgtgtgtgctgcgggatcatgtggcctctgcttctccttctgcgcacggaagtctgtgtctggcaccgctctatcctctgtgtgagggtccagctcgtcctctctgggaaggacttccaacatgcccccatgactgttcctcac

SEQ ID NO: 9854 - DNA, 201 bp, Bos taurus
gaccttcttctgcctgctgcgacccccgcgcagggctcagagaagctcacctgatccacagattaaactcggcagcaacttccaggaaaattgtcgacaggggccagaggagcaccggcagcccagagaggccgaagttgtccggcctctgagaaccatgggctctgcagactgggtccgagcgctctgaggaggcccagc

SEQ ID NO: 9855 - DNA, 201 bp, Bos taurus
gcactctcagtgagaattaaatcatgggtccaggtgtctccatcctgtcttgtgtctggttctgatccagaagagtagggggatgtgaacttcactgtggttgacccagggttattgctccaggtagaagacattgccagagatccaaaattatttagaacttttattcctgtttgattttcacatttacagaaggctaca

SEQ ID NO: 9856 - DNA, 201 bp, Bos taurus
acccagcttcccagccactcaggcatcccactcccttataagggatgctcccgacacactggccattgtccagctccttttcttggccaggtttcccacagtgtgatctttctgcctcaagtatcattcacatcgaccactaacccttcctcgcaggacatcttcctctgcttcttcccaatgcctgacttcttttattca

SEQ ID NO: 9857 - DNA, 201 bp, Bos taurus
aaattacaggaactgtgtgaccgtggatgcaggcagaggtgctggctctgagggtggaagaaggggtcatgagagagggaacagagcagttctgtaggctggacaatgcagagaagtggtttctttccgaagtcccagaggggaaggcaggctgctggcatcttgacttttgctccatccagcaggcccataacataatac

SEQ ID NO: 9858 - DNA, 201 bp, Bos taurus
ttgatgaagatgtaaatgaattggatctcccttacattagttatgggaatggaaagttgtaaagccacatgggaaaacagtttggcagtttctttaaaaacaaataaataagcatgagctcaccactccacccagcaattgaccctctgggcatttatcgcccaggaattttttttttttcttttggtctggccctgtggc

SEQ ID NO: 9859 - DNA, 201 bp, Bos taurus
atgaccttctcctctcaagcacatacttgttagagaattctaactctccaaaaatccaagtttccttctaactaaaactaaacttagttcctgcctttgctaagtaatgtaaccacttcaggtgggaaatatatgtaaccttcactcacctgtgtgtctgacatgatattttcctttaaaagctgaaaagttggtatctcc

SEQ ID NO: 9860 - DNA, 201 bp, Bos taurus
ggctccccaagaaatggtgagttgggatctgaaaggtgagacagggcaatcaaccccactagccaccagccttgtgctgacaggagccctgtggctgctggaaaatgagatgtggctggtggaaaatgagatgcacggaaaggataaaaatcatatgagatctcaatatctcaaatatttagcatgtaaaacatctcagga

SEQ ID NO: 9861 - DNA, 201 bp, Bos taurus
cgccaaatcagaataaggaacctgggtaatttccatctgcctttgacaactaggtggagcaggccctgttaaaccagtcaccactctaaccgaaggaagctacctgccacagggctgatcccaatgattcaggtctcattaaatcaggagatgacgctcagtcaaagcaaagaaaaatgtcgcaaaacgtggttaagacac

SEQ ID NO: 9862 - DNA, 201 bp, Bos taurus
attcacttacgtttcccacccgacccctgaagatactaagtgtttaacacctgttccaaaagttagggttgggagccatccagtgtaagcaacatcaacttacaaaaggcagcaggttctagttacaaagcgagagcaaactgaagcccagcacccaggtgagcagtggtttaaatcttaaagtaaattaattaattctca

SEQ ID NO: 9863 - DNA, 201 bp, Bos taurus
cggataggccacagaggagttcctcctatgcaaactatcctctctcctcctctctccttccctcctcacctccccccacccctgcccatcataagcacaggatgaagaggccacactgagcggtctgcaagtccctcaggtgaccagcttagaacagccacctgaactgatgcggtccccatgttctggagtaaccatggt

SEQ ID NO: 9864 - DNA, 201 bp, Bos taurus
caggccacaactactgagcctgtgttctagggcccaggagtgacaactaccgagcctacacactgtaggctcagcccacacacagtaagctcagcccacacgccctagggcccgtaatctgcaactagagaagcctgcacactgcagcaaagagcagcccccacgtgccacaactagagaaaccccatgcagcaacaaaga

SEQ ID NO: 9865 - DNA, 201 bp, Bos taurus
aagtagactcaggagagtaaattgatttttctagtgtcagagagggaagggccctgtgggaggacagggagggagtagcaggtcttagcccccactccagggctctggaagacacgtgcttacaagcctacaaccctgaaaaggagaactcaacaggtacaagtattaacaacaaatagactatgagtacaaggaatatat

SEQ ID NO: 9866 - DNA, 201 bp, Bos taurus
ccagccaggactcacaccgcagctcagagtctgagtctagggctgatcgcttgtgttgtcagagtaccaatgccattttctttctcaaccaagacattacagtaagaacagaagacacggaggttaaggtgctcgtgtgcccactagtccatgtcagtgtcctcactgcgttttgttcttccacagtctatgctccagtga

SEQ ID NO: 9867 - DNA, 201 bp, Bos taurus
gggagcccgtgcagcctgagtgaggctcacacaaaacccagttcacaaggaaccagtggggaagcacaagcgcaagcagtcttcccggccgtcacagaccatccactttggacggaacaatggctgcttttgttcttgccgtcctgtttgttggctttcgtgtcctcagctgtgacactggtggatccggcctgatcgatg

SEQ ID NO: 9868 - DNA, 201 bp, Bos taurus
aatttcctgtggcaacaagtagaatttgtggggggaaaaaaagagatagaaaatttgcccagacagacctgaaaatagaaaagcctggtttagtgacttatgaacacacctttttgtaacttttgattatccttggtttgcatgtacattaatacatttcataacccatctgctgtaactggtggaaaagaagttcttcga

SEQ ID NO: 9869 - DNA, 201 bp, Bos taurus
agataaaccctcccacaagctgctcacttgtcagtcagactcttggaatgtggacaaggaaaacctcagtgattggctgaaacggctcttaaattacgaccgaaagtttcactttccaggctctactgggaccagtaaccagactgcatcatttgtagcagcccatagtaatgccatcattcattctaaaaatatttgttt

SEQ ID NO: 9870 - DNA, 201 bp, Bos taurus
caccagctccaggcactttgttcatcaaaataactcactcatgccttcctgaaaatacatctccaaatagtaagaaaatttggaaaggaaaagttaacagcaggcctgcaatctactttttttccccttaacctggaaaatgaaagagatgccccagttaaacccctgcctccatgctaacaattagacctggaaaaaaaa

SEQ ID NO: 9871 - DNA, 201 bp, Bos taurus
cttgggggatttaagtatcctcagatggggaaaaggaaggaaaaatgtatattaccatttcttcagagcatgcttcttcctctgtgtcacatctatttcccgtactgtgcctgggagtaaaaaaacaaaatttgattccacctttcatctctctaatgcccagtctttgctgctgcttaaaatacatcctccacaaaaagc

SEQ ID NO: 9872 - DNA, 201 bp, Bos taurus
cttttgtgtaattgtttctcccttttcaggctttcctctctataaaagagagatgcgattttctctcaaataatgagaagctgcctgacatgatcacaacgaacttactaaagagtaatattgatgaaggatgttgtcctttgatgatatcaatgcaagttgatcaatgaaccctttgaacacacaccttaaagtggattt

SEQ ID NO: 9873 - DNA, 201 bp, Bos taurus
gcgtaagcactgggccctacagatgattctttttaatatgcaaaagacatactgcccacagcccgaacaatttagaaatgcctcctgcctgttgaaaatcaagcagcatctttacatggcctcccctccccccaagaatcggggcacatttctgtgccctgggcttctgtgcgtctctgctccttctcaaggtccccatgt

SEQ ID NO: 9874 - DNA, 201 bp, Bos taurus
acaagaaaggcaagacatttccctcactgtgttataagaaagtcagccatgttccactgggttaccccgctgccatatgcaataggaagtggctttcttttgttacgaacagcatgtcttccgttttgtctcttgcctgagctggctggaaacaaaaaccgattacagaaacaggcttgtttgccatgccctgtatgacga

SEQ ID NO: 9875 - DNA, 201 bp, Bos taurus
ggttttccctgatgaagagctttaaggtgttcatggctgagaccaggcaggcgtcacaccccagaagttcgtagagtgccctgagcacagccactgccccctcacggtttgacaacatcagcctgtatcattcactcttccaggacccatttatgccctcaaccagccagctaccatctcggagaaagagaaaagcagaga

SEQ ID NO: 9876 - DNA, 201 bp, Bos taurus
acacaagcaaacactaatttactgatcactgacaggcagttaccataaggatatacaaccttacgtcttgaacaggatttcggttttcatggttgtagctaaaagctatgcactaattagcacatattaatggaatatgctcccccttcattagtgctaaaaatctggtagccttgctaaggtccacacacttatatacac

SEQ ID NO: 9877 - DNA, 201 bp, Bos taurus
ggagcgggtgtgataggagccctcagagccagaacctgagaggcggcaccactccgggatcacctttgcccctcgaggttgttagccctggagttctacacctcgaacacgctagtctatacgtcttctcacctgtcgtggaccccaatccgatcccagcctgtggtcgtggtgcacagtttggaatctgtgaatttggtt

SEQ ID NO: 9878 - DNA, 201 bp, Bos taurus
ccccatctgatcctgtgatgatgtcaaccattctacccaaggagtttgtaattatttcaggaggaaagcttctaattagcaccaaacagttttccagcagtagctggaacatccacatccaggacacaggaagccaaatggaaggagggatccagacaaggatgcacacagaggcacagacaaggatgcacacagagggat

SEQ ID NO: 9879 - DNA, 201 bp, Bos taurus
agtgaagttcccagtagaagagaatgccctgcttctggccacagtgaaccgagtcatggaggaaacacggaaagcagcttgtctgggagcagaagcacagaccagccagctcagggtaagactggcctagattttttggtgtttgcctttttttaatttccgttattaatttaagagctctattagagaccattagatata

SEQ ID NO: 9880 - DNA, 201 bp, Bos taurus
ttctttggttcttttgatgatgaactgcctgaaaaatgtatgctatttaaattgtttgttatcttccagctaaataagttcaataattcctggtttgtttgtctgtctatggaatattgtatcaaatattcacatcaagtttaaaagttcaaataatcattggaatgaatgactacttgtgaaaaacagtaaataaataaa

SEQ ID NO: 9881 - DNA, 201 bp, Bos taurus
gggttgatgacacgtggatcttagagaagtttctataagtgctacctatctgtgtctaactcctcccattatgactcagcacccgggaccttgctatccatatgtatccagtcctcagggagtcattgatgatggtcactagtcataacatagaggtacttggagctcagaactcttctctggccattgtaatagtttctc

SEQ ID NO: 9882 - DNA, 201 bp, Bos taurus
ggaggcctggggacaaggcctgagcagaccgggtctagcagcaagtctgctacagctaatcccccggtatcctgtctggccaccaggatggaaaccgcctcgactctccaggcatccctagaggctgctttccctctgcaatctgattcttctacaagcggagggccaagtctctgagagcaggagccaggaaatacgggg

SEQ ID NO: 9883 - DNA, 201 bp, Bos taurus
ctcatctgagaagagcgctatttctcaagcaactgttttccagcagaaatctggccattctaagaaaacgttaacaaactcataaagacacttgcaattttatttatgttcagtgtaatctggccttgtagttcttgtaattatctaaatattaaagaataagatatgtcattgagaaacattattaattatatatttaag

SEQ ID NO: 9884 - DNA, 201 bp, Bos taurus
cttcctcatgtcatgtgttaaaaggatgtcttgtgtgcatctgtcatccagggaacttaaaatggtttcagaatacagataacccaggcccatggtctctggatggttccccaaagacacagcatcatcctatgaaacatgaatatgcaaatgaacaatggccaggatgtatatatacatacacacacacacagacacaca

SEQ ID NO: 9885 - DNA, 201 bp, Bos taurus
tagttgggaaccaagggaactagaatacagtatactgcaggcccttttcgtggatgactcacattctaaatgactgctttttaatgccacagtttaaataatactgacacgttgtaggaacataacaacaaacccaacgccaggttacagttagatcatgcatgcctatttcgggtcccttcagctgaggattgtatacag

SEQ ID NO: 9886 - DNA, 201 bp, Bos taurus
cacgttccaacagtgaaccagaaatttgcacatggtaaactctaagggaaaaaataagctacaatatgtgtgatgataaattattaagtagaatttgcccatatcaaaatcatgcaatatgacattgacttttgagctgctcatgaaaaagtcttgttataactattcaaaagcatatttaccttgggaaaggaggggggt

SEQ ID NO: 9887 - DNA, 201 bp, Bos taurus
gaaatccaagtaaattaaaaggaacagaagctggaaatatgcaggcatatttgtggctggagtcattccactccttgtacattatgtggtttacctcagcgtgtggaaaaatacagtaagtgcttcattgtatggggggtagttgtattgtgtaacttagacggtttattctttcttggaaatattttatgataaacacat

SEQ ID NO: 9888 - DNA, 201 bp, Bos taurus
gtatcactgtaaattctggggacatccgtcttcctaagaacgtgtgagtcatgtggatgaacactactgttttctgaactattccgttgctcacttactcgtgtccattcctgtgccccactccagccagtctcttaaagtgactttcctgcctcattttccattttctctacaactccagaaaggaattcccccgcatgt

SEQ ID NO: 9889 - DNA, 201 bp, Bos taurus
tgcagagaagagcttgagagtatagggtcaagagctccacgtcaggctgtcactggttcctccatcccatcccaggctgtgacgtaacctgtaaatgcccgtctgctcacttgttatatagaaacagtactagtctccaggcatagggttgctggagggtcagatgggacataacgcctgcaacaagtaagtgtgtgatgt

SEQ ID NO: 9890 - DNA, 201 bp, Bos taurus
acttctgagtccaggagcccagtgttcacgtgagttatttgttgtattaaccaatgaggactaacctctctgtgaaaagcttctgtgtttaaggcactggactgatgaccctttggtgtgaattcataaattaatttctccagtgatttgagcaattaacaagaatatccgatacagcttttctaataggtacacatgcta

SEQ ID NO: 9891 - DNA, 201 bp, Bos taurus
tgatacttattgcttggcctataagatatttattttgtgtgtgaaaataatttttacttataatggctgaaaaatgcacgcaagttgtagtgttgaatcatgtaatctaagataaatgcttaaagggaaatttcacaacagttgcttaaagaatcttttagaaaatgtttgaggatatagaatgtgtggtagccaacttct

SEQ ID NO: 9892 - DNA, 201 bp, Bos taurus
agaacgagatggtctaggaagtcccttctcatacccctgagtttctgaacgccttagccggggaccccttcctgggatgggggccaccagtcagcaccagcgaagtgaagggtctctaactgaaggggcttctgaaccaacaagttcaaccctttgtttaagagaagtgaggtcatggagggttcaccatggggctgcttg

SEQ ID NO: 9893 - DNA, 201 bp, Bos taurus
tcaccagcagctgattcctcgagctgggattaaccccgggcattggcaacagagaatctgagtcttcaaagttgatggcaagattggcctgcccttgctttgcatccttgtcctgtggatgcctccatggaaacctcttgtgaaagctgtaaaaatgcagacacctgacctgcttcctgagaaatctgtgtgcaggccaag

SEQ ID NO: 9894 - DNA, 201 bp, Bos taurus
aaatgggcaggggaattctgaactggagagaaggtgaaggatagtgtgtatagctggaatgggaagatagcttttgagatggaaaatgcacttaaactagccatgaacttgagagcatttgtgtagacaaaaagtcaccttaatgaaggcattcttgagaaatccacctttacatcatagcttattcaagaatataccact

SEQ ID NO: 9895 - DNA, 201 bp, Bos taurus
gctggcagaatccctgactacctttggtctttgctcatggaggatactatatttagctgtctagctaccaaaggttccattaattttggatatttcccctctacaatctgtttaagggcagtgacaagatatttcctgagtgacctgtcccttctgaaaagaatacataacctgaacgccagcactttttgtcatcaagat

SEQ ID NO: 9896 - DNA, 201 bp, Bos taurus
ttaaccaaaattaaactgtatttgcttgattgcatagatcctcttcctacagaaggcattgacttgagaggagggagaatattcagcttttagaaaatgacttgaaggcttttaaatgcgcacaattcatagtcttacagtagattaaaactggagcagaattacaataggagcagaagctcttacaaagaaaaaaaaaag

SEQ ID NO: 9897 - DNA, 201 bp, Bos taurus
aagagccacctgacatctgggttttgtctttcctcttctaattctatacaaatagttttcttgatttaagtaatcctaaatattcgtggcttctacctaacgtatacttcccattcacaccctaaaaagctgcactcagaaacaagccaacatttaatgatggaaaagtgatgctagcaattcacagaaatcacacgtcag

SEQ ID NO: 9898 - DNA, 201 bp, Bos taurus
cttcatgaatgaaagaactttaaagccagaaaaatctttaggattgaatgaaagaactttaaagccagagaaatctttaggattttttttaggtagatatgatatttaagtattaatccataatgtaacaatggaggaacaaccaagaacaatttatttccctataaaaatagttgcatttttattactatagaaggtatg

SEQ ID NO: 9899 - DNA, 201 bp, Bos taurus
caaagataaagcattaattccaaactttagaaaccattctcctatttcctcactgcccttattatttatagattttccacttttttttataccttgaattgtccagataataattttaattctccacatcaatcatggcaacaaacactgccacagaaataagtaaccttaggcaagtctctttacctcgcaattcctaat

SEQ ID NO: 9900 - DNA, 201 bp, Bos taurus
ttggcctttttttttttttttagttgcctcaagtcattttgaaaagaggtaggaagtctaaaaaatagttcaaaatataggagtccctttccccctctcgatgcatgatttctaaggccaattaaaatgccatttcctccaggaagcaacggggatttcctgaacttcaatccattagtactccttctgtaccaccagcac

SEQ ID NO: 9901 - DNA, 201 bp, Bos taurus
tcattcttctttctccggggtctagaacccaccttgcccagagaagagtttcagaaaactttgttgctatggaaggaagtgtggaatgaacagcctgagacaggctggcatcattactttctgtggtatgtgattcctttgtattgctaattctattatcaatatttattggaattaatcagatgatgatgttctgactag

SEQ ID NO: 9902 - DNA, 201 bp, Bos taurus
ttaatatctttggccaaaacaacatcacaacaagaaaccgacgagtttttctgtgggtgcaaatgatcacagacaagctcattttatttcatgtttacataaaaatacaaataattgtattagtacatcctcctaatccattcttggcttgagaattgtaagcgcatagaaagagaatttgttcccagagctttttcagct

SEQ ID NO: 9903 - DNA, 201 bp, Bos taurus
acgtgtacagcttatctaaacatgactgagataatccactgttgatgagtgattccaggtgtttgttaaattgcgatccatcaccaccaacacaaggttagcccagcaattcttatatatatatttatgtattcctatataagaatagtttgcataggttgacatatgcctcatttctctgtaagattccatatcttaaaa

SEQ ID NO: 9904 - DNA, 201 bp, Bos taurus
agatgttttaagagtcatttctattaataatctgtagttaacagatctgaatctctcaatctagtgttttacttcacaaaattctaattcccagaagtcagaaattaatcttaatggagtaatatagttttaatcagcccataaggttaataaattgggttgattgaaatacacatcattagacagcgaattttggcagat

SEQ ID NO: 9905 - DNA, 201 bp, Bos taurus
agcagaaagcatctgtttgggatcagagaattaacttggggcacacggatttgggtagcaacccagtgtcccaatagaagtaaaagttgggggcttttaatggcaaagaagataaatgtgcattaaaaagaattttaattggagttaaagatggaggttagccttggctaaacatgattgattgctaagactattactaga

SEQ ID NO: 9906 - DNA, 201 bp, Bos taurus
ttaaactctataattcatctgtattttcattcagttactcattcattcatataaaactgagcttttgtcatatgtaaaacattgtgtcatgtttatactgtaagatatgtaaatcctaatatggaagatatattcattgtctttatggaattcacagtttacaatagaaaattgatacccacagatacaatagtacaacat

SEQ ID NO: 9907 - DNA, 201 bp, Bos taurus
gcaatttgcaagaactctatcactgttacttagaaagtagagtcttcacagtgatttttcacaaatggaccactttaccaggcctacctagaagtggttttaagttctaactcatcaactgctaacagcaggcaacacaatggtagtcagattttatctctataaacacaactgaaagctctggccacctcttaagatatc

SEQ ID NO: 9908 - DNA, 201 bp, Bos taurus
taccacctagaacatttctcacacttatgtaaatgagaaaatcacctccttggtgctttggaagcattaattcctcctcctagaaaagccaattgacccataagaaaaactgcattcacatttcttttctgtggatatagaaaaccaagatctgtggaagtataggtttttcttacctagtccctgtattttccaaactgc

SEQ ID NO: 9909 - DNA, 201 bp, Bos taurus
ccccagaggacttcagcatccctgggtgtgacctatgccctccctggcctctctcttgacccctcactccatgtccctcagctccatcccacctctgtcaaccaatcctgagaatgtgccctggatttgtttccactctgacacccacaactccacagaccatcccctctgaccgtacctgcccacccatccatccctctc

SEQ ID NO: 9910 - DNA, 201 bp, Bos taurus
aaaacatcattgggtgtctgtcaaggacatatacagattcctttattcagaggggctgcctggcgggacaatcctgagccaatccccttgtagggtctgatgcccacaaacaatcccggtgcttgcaggcactgggatgctcacaggaatggtgcatcaaaattcaaggatcacacgttaagttctccaaataaattttga

SEQ ID NO: 9911 - DNA, 201 bp, Bos taurus
ggtaggaaatatattaatttatggactagtttggagacagtttatgtttttaccatataaagattagctattcatacacataagatgttttcttttattctagcttttaaaatgctcttcagtaaagttttacataaggtcttgtgcttttacattatttttgtattttatggattttgttgctattgtaaacaggttttt

SEQ ID NO: 9912 - DNA, 201 bp, Bos taurus
aagttgcctgtttcagtgatgcattcctttcctagaggtgttggatttgaaactggaggggctagtgtgttgtggtggtttcaagacatatgaaacatgtccttattgattattaacagtgtattttctgttgattttgagaaccttaaaaccagaactgtctgtattttatgaaagagctgtcctatgaagtcaaatgac

SEQ ID NO: 9913 - DNA, 201 bp, Bos taurus
atatttttcttttgcttacaagaaatgtcctcataagaaactgaaattctcatttccttgtgcttgaagctcacaatactaacatatgtatgtttagatatgtagtatttctgaaccccgccctgccacacactttccaataaagctcaacaagaattctttgttgagagatgtaatatttggaggggaggataggggaat

SEQ ID NO: 9914 - DNA, 201 bp, Bos taurus
ttgtgctcccagtgctgggggccaggttttgatccctggtcagggaactagatcccacatgctgtagctatgtcattaggagtaaaactaaagactgaatcgatatttggtgattgctggccttaggctctttccaactgtattggcagctttcaccttcacagactgtgtctaggacgtttctagaagcttaccacgtca

SEQ ID NO: 9915 - DNA, 201 bp, Bos taurus
cccccaactccccccaatacctagatgtagagctaaaagctcacagtctccaatgacccatctgttgctccagttgtaccagttgtattgtgagcggcctcccaccctcttttgagagcaagggaatcacagacttaatacagtaaaatgcagtgggtcccattctatggtacagggtgttggagcttggtggtcccgact

SEQ ID NO: 9916 - DNA, 201 bp, Bos taurus
aagtcccatgtttttctgactctgctttggggcaagaatgtacatatgtgagccctacccttagatctgtagttccttgtggccttcctacaattgtttgacaggagtcgcatgtcccccagaagcctgttgtgaatggacgcgtcatttggagggccacaggtcacatgaagcactttgccaccacgcgttagaccagac

SEQ ID NO: 9917 - DNA, 201 bp, Bos taurus
ttcgccagacaggccagcaagatatggagaccaccatggagggggctggaggaaggggccagaggagaaggatagacaagtgactttgataccagatgcagtatgggaagtcccataagagaattccagcatcaaactctggggtccagcagagaaaggaataggaaaaggcttaatcaaaacaccaatttttgaaaagat

SEQ ID NO: 9918 - DNA, 201 bp, Bos taurus
cacaggaactagctttttagttgtgaggttgtggtgcatgtggtgggtccttttagaaaggagatggtgttggaacagtggctaagaatttggcaaactgagaaagaattttaaaatggcagaattgaaaagataaggcaaaggcaaggaatacaaaatgcccaggtgttgggaaaatgctgtaattttagtttggctggc

SEQ ID NO: 9919 - DNA, 201 bp, Bos taurus
acagtaaattaccagcacaaataactctattctgaccattgttattgattgtgatttttaggcatttttctagttaaatctgtgaggtggtgttagagaacgaggcgatttcagatcattttgaccaaataaatcactagcattctcatgatatacagggcttctaagtgaatttaaaaaggcaagtttcataaccaagag

SEQ ID NO: 9920 - DNA, 201 bp, Bos taurus
cctctaatgtaattatttaaccatagtaacggtgacaacaaaaacaacttaaaaaaaaaatcaaagcccaacagaggaatctggatattgcttggaacatgtcatagaaaagtggtcctaatatgagtctgatttaagagagtgatgaaggttcatctttgctgcttgttccttccactaagatgagtgttcatgtgtcag

SEQ ID NO: 9921 - DNA, 201 bp, Bos taurus
aagggcatgagattgtgcagctttatttgcaaatgtgtagcttggctagatcaggttagcttttgagggacggtggccaagaatgtgatgggacaggtggagactggcatatagagagtcagggaaatggaagacccagtgcagctttcagggagactcaggcaagcactgtgggccattcagttggggagaatctgttca

SEQ ID NO: 9922 - DNA, 201 bp, Bos taurus
ttaggctcattgagggatcttataaaattataaccctgttttccatagcaccctgcgtagtttccactgggttgggaggtagtccatgaccaaggtctttcggaatgtagtagtaatgtctccagagaaatgaggcagagcatctttttaatgagttcaaagacacatgaatggagaaatttttaaaagttcagacagaga

SEQ ID NO: 9923 - DNA, 201 bp, Bos taurus
aagtatttccgtggagttatagggacgcactttttatgattattattattgattgcaataagtttcagtcccattctaatcctggtatccagggtcttttcgaggctggagaatgtacctgcaaccttggacctggctgtatgttttcccaccatttgtccttgaagtgtgaactgcaggaagtttgttctattttatata

SEQ ID NO: 9924 - DNA, 201 bp, Bos taurus
atttacaaggttttagacatgaaagaaaggcagcagattgaaagtgagaatgggagagcactggagaatgaggggtccacagagggtcatgctggcctcccggcaatgctggtccctaccttcaggtgcatcatttgttgccatggcaacttcatggaaataaggaaggtgggcggagcttggcccaggtcctgagttttc

SEQ ID NO: 9925 - DNA, 201 bp, Bos taurus
atgtggtcgcacagagtcggacacgactgaagtgacagcagcagcaactccctgtccacacactctgagctgtcacgtttacctgctgtggtttctacagattgcagcttgctccacagtctttccaggcaatccgaaccaggggtggacaaaagcatctcaactctgttctctgtcaacatcctcaacatcttcccagcc

SEQ ID NO: 9926 - DNA, 201 bp, Bos taurus
gctaataagaacagtctgtctatggcccatcaaacatgtactgtacctctgctttaatcattaagaaaagaatgcattatctagaagttaaagaaaagtctgctctgaagatagggataaatggccgcccttcctatgatgcccatgctagtggtccttccaagataaggttcccttgccagacattaaggtcatgctgac

SEQ ID NO: 9927 - DNA, 201 bp, Bos taurus
cagaaccgggacaccatttgggaatatcaggctcccatatcaattcttcactttgaaaacagactcatcttcccagtatattctaacctgatctcctcttcgcctcactcttgtcccaatctgcccccttagccatgtccagatgccctgtcccttgaaacccttgtatccacttcttttttcttatcgtgatgatgattt

SEQ ID NO: 9928 - DNA, 201 bp, Bos taurus
gtccttttgaaatgaggaagtctcttttagcacatatgactgaagcagaggtggacgtgtcttaacaacctatgtaagggctggtgcactggtcatagcagacaccctcttccacaacacaagagaagactctacacacggacatcagcagatggtcaacaccgaaatcagattgattacattttttgcagccaaagatgg

SEQ ID NO: 9929 - DNA, 201 bp, Bos taurus
tttttgttcatgagctggcttcaaatatttgaaagcctgtcatggggaagagggattaaacttgttccacaaatctccagagtagaaccaagactaatgattaaaagacacaaaagacagcttttagctctatatagaaaataattttctgacattcagagtcgtcctaatgttgggctgcctcggtgtagcacattccct

SEQ ID NO: 9930 - DNA, 201 bp, Bos taurus
gcgccagagcgccctctgctgcccgaaagaggcatgacatcacttacaaaagccagatggcactgagctgcaataagcggtgaaaatattaagctcttagcagcatttaatctgtgaaatttgaaaactctcatcatattgtatgaagggacaacctgattttgatttcgagtactcctcggataattttcttcattctgg

SEQ ID NO: 9931 - DNA, 201 bp, Bos taurus
ggaaagaataattacttgagcgctgcaagctataaagccactcaagcttgaacatgatagtcccgatggccagagtgcagagacttccttgaacaccaagtgcactcagtaaagcttccgtcaagatcatgacctaggagtttagtaccaaacttcaccatgaggaaaggctattcaagacctgcctaaaaaagaaaaaga

SEQ ID NO: 9932 - DNA, 201 bp, Bos taurus
aattagtgaaacaggacggtcactgtgattacaggacacagaatctagaatcaggaatgtaatgttcaccacagaactgtctggtgaggccacagagacaggaggagtgcctgaccatgagaggatgatgaatcagtttcctgagccactcttccgtggtgagcccacaggaagagaggactgtgatgcaaggccccatca

SEQ ID NO: 9933 - DNA, 201 bp, Bos taurus
tttctttctacccaactgtgtgttttcagtgaactaaaatgtcagcttccccaccctaccccctgtatcctgttgacagaagagtatgtttttgtacttttctatactgttctctcaaaatagtgagggaggctcagtaaagtcacctggggaataccactgggttaatttgaaaaaatctcagattctgagctttcactg

SEQ ID NO: 9934 - DNA, 201 bp, Bos taurus
tggttcgactccggctcgaaggagacaaatgtacttttgtcgagcctcctctgatttatcatcctttccacgcaggggtttccctgataatccattacgttccagaaaacaggtgagagctctttcgcggcagctttggtctatggcagcctcctgggtgtgaaatcttttgcgaatcccagaatcagggacatgaagtcc

SEQ ID NO: 9935 - DNA, 201 bp, Bos taurus
tggccactgccttcattgagcttgaggttaaagggccaggattaccctcctctgaagatgatatgtaaatattggactggacacattaatgtatttcccaaaaccaaaactctggctggagattaaaggttgtatttaaggacatctgaattagggaaagaatctgtgaaaactaggaatgagttttaaacagcctttttt

SEQ ID NO: 9936 - DNA, 201 bp, Bos taurus
tctggtgtttgaaaaagcaaataagctggttattccccttttccaagcatcctacttttcccctctctgatttatagttgccattgaacacatggctctcatggttgtgttgacttttcttgtctcttcctgatcattcgagatcatttttaaggactgccaatcactgtaggttttcattctaagtgaactcaattaagc

SEQ ID NO: 9937 - DNA, 201 bp, Bos taurus
catggaaataatgaagaatgttccaggcagaaggattagcaagtgcaaaggccctaaggcaggagccagcctagtacatctgataaaccatgaggccactatggctagaacagacagagcaaaggcttagtgacaagaagtagagtccctgagatgggctcagaacgattgtaggggccagtctacatagggttgtgtggt

SEQ ID NO: 9938 - DNA, 201 bp, Bos taurus
agaggaaatgcagacaagaactcttaaaatattgtgaatagtcatgatcagtccatacttaagagggataaaaatttattgatatccttaaaccagcatcgtgaatcctcaggtcccatgctgtcattcttctctgtctcattcatgaaggatgtagactatctctcagagtcttcttcctgtcacatctgagactttgcc

SEQ ID NO: 9939 - DNA, 201 bp, Bos taurus
cacttcaaaaccctgacttatgttctggccacgccctggggagcaggtactcaatacagatgccttcatgcctgggaccctctcagctctagtaagcagatggtatagataggaaggcccaggctgagcacagaaagtgaaaaacaacgtgaaagccagtcagctgacagtgtgattaaacgtaggaggctcatccaccca

SEQ ID NO: 9940 - DNA, 201 bp, Bos taurus
attatctgggtgggtcctaactagaatcacaggtgcctttataagagaaaagcagagagagattcgactacagagagaagaaggtgacgtggtgatgaaagcagtgtttgaagatgaaggaaggaccatagccaaggaagacaggttgccaccaaaagctgaaaaaggcaaaagaagttttttcttagagttttcagaagg

SEQ ID NO: 9941 - DNA, 201 bp, Bos taurus
tttgcactgggcctggaaaattgtgtcgacacgtttcactgtggcaggtggcgttgaggcagggtgatcatatagttttcatttaaactgggacacttccgaggatgcaggggcctgctagtaataattatgcagggaagcaggtgtacactgggattgtacctggctaatcagaaagcacagttattccccattgttgga

SEQ ID NO: 9942 - DNA, 201 bp, Bos taurus
cttaaatcctgggaaagtttcagccaaagcagtttaaaagatctagatagtatggtgaaaaactgactttccttaggctctcagataatggtgatgttcactttgaattcatagttgttctcaaagagagtgaaacattgtttgattgggaaattgagcaggttttaaaaggtcctcaatatctatgacacagcaaatcct

SEQ ID NO: 9943 - DNA, 201 bp, Bos taurus
agtatagctaactaatcaatatggatgttggatgatatgctgtaccaatgtacagttgatatgatccttggatgcagatccaggagagggagaaattgtttggtggctaaaaagagctccactggagctgggcttcagagatttgtagatttccggtgagagagaagggggagggtatttaactaggggaaactgagtaaa

SEQ ID NO: 9944 - DNA, 201 bp, Bos taurus
caagtgacagaaaaccactgaaatagcaaagactacagaatggtttctttaagtctaatgtttgcctgcctattaactggaaaacggtatttaccagattgacaagttattcatttttttgtttttaatctttctaattcacttggatattttatcagaccactcagtatttggtcgaacactaatttaggttgccacttt

SEQ ID NO: 9945 - DNA, 201 bp, Bos taurus
ctcaagttatgggatttgcttcatgagaaagatagccaaaaaaaaaaaaatcaataaccatctcttataagtgtctgaaagataaggctaatccaaaactatattaaacactctagaaatacaaataataagatgtcagtgtgaacggttctcatttggtatcagctggtaacttcaggatggtcttgagaattctgcctc

SEQ ID NO: 9946 - DNA, 201 bp, Bos taurus
catcctaggttttccttaagctagtctatccatgtgacagcaggcctggggccacccagaatcctgccctcagatcaagtttaaccgtgagaactgggcctatcttcttgtgcataatagttttaaaaatgtggagcccactcatgggaaccattcactgttgaattactgctctaagtatatccacaaaaccatctcaga

SEQ ID NO: 9947 - DNA, 201 bp, Bos taurus
agacataaaaataggccaacaatcaacaatagatgagggaaatgctatgacagaagtgaatatacaagaagaatgctgtaagaggataagagcagacagaagactccatccaagtcagaggccagggaagcctggaggaggagttgataactaagtcaacacttaaaagatgggtgtgaatgaccgacagtcagatggaga

SEQ ID NO: 9948 - DNA, 201 bp, Bos taurus
gatcatagtttgttttgtacatgagtagcaatgttttctttgtaatgatagccagaactttgacactgcacaggtatttctcttgaggctgtgcaagtgtatgtattcttatttatttccccatctgaactgaatgataaatcaaccacgtggactaagtgtaatcctggcaatttagaaagccctgtattcctagtgctg

SEQ ID NO: 9949 - DNA, 201 bp, Bos taurus
tggagaagacatcagtcttttgtaagtctgagatttttcaatttaacatgaaatctttggcttcttgggactcttctccaggggactgtaaagggcactgatgtcactatgtaatttcttcaacaagagcttgtcttggagcatcgcagtggctgggaatgaagaaacttctgtttcagttccaacctcaccagcagcttc

SEQ ID NO: 9950 - DNA, 201 bp, Bos taurus
attcagatcagaaccttagtcccaggccttttcttaataaaaattatgaaaacgaggagctataagagtaagtgctttaaacatcagacctgggacaggagtccacacgtcaaaggcccaagaaaggactgtggcattcacatcgcagagctcaacaccaaagagtcctctggcccatctcaactacaacatactaggagt

SEQ ID NO: 9951 - DNA, 201 bp, Bos taurus
taggcgaagaaaggtgacttgctcaaggccatccaactgtttaatagaatgaaatctgagtgtcagtctaggggttatttttatttttaaatttttgctacgccaattggcccaaaagatttttttaatgatggtgacataataagtcagtgtatctcaaactgtacacccatccctacaagcttaagagtacgtgtggta

SEQ ID NO: 9952 - DNA, 201 bp, Bos taurus
aatactgcctggctaaaaaagtatgtagaatattttaaaagttgtatctacttaatacttaatacggtggaaaaaagtgcttgatttacctttaatttctgactagagctgtctctgggctggctcaaaatgttgtgacatattaaatagcagtgccaatggactttttaaaaaggaaaaaagggagaaaaacctaactct

SEQ ID NO: 9953 - DNA, 201 bp, Bos taurus
ggtgcacattactatgtataaacagcaaggacctaatgtatagcacaaggaactatattcagtatcttgttataaacttaatggaatagactcaaaagaaaaatatatagatatatacatacttgtataaaggaatcacatttgttgtacacctgaatgaactacaattgaaaaaaataaattaatttcttattctagctc

SEQ ID NO: 9954 - DNA, 201 bp, Bos taurus
gagtctacagcctctagcccagggctgtcaccgttgcacttccctgcaggtaggtaggctaggatacagttaagacggtggccttcagaaccacactttccaggtctacatactggctccactactcaccaactgccccaaagagcttgactttcgatggccgtttcctcatctatcaatcaaggatgataagagaatctg

SEQ ID NO: 9955 - DNA, 201 bp, Bos taurus
cttttgattcaaatatttttgctcttacataaggacgggctaagtccttagatattttccctattgatctggcctattggctaaccctggttcttccacagttcggcttattttgaaagtgaaagtgttatttactcagttgtgtctgactctttgtgaccccatggactgtagcctgtcaggctcctctgcccatggaat

SEQ ID NO: 9956 - DNA, 201 bp, Bos taurus
tggactgtagcctgccaggcttctttgtccatggaattctccaggcaagaatactggagtagattgccatttctttttccagggttttggtattatacccactgccaagtccaaggtcttaaagattcacccctacgtttacctctaatagtttcatggttctggatattatatttaacgcataagtcacttaggcatttt

SEQ ID NO: 9957 - DNA, 201 bp, Bos taurus
gagctaccttggaagcaggccctctgtccccagtcacaccttcagatgactgcagcaccacctaacatcttgagtgccaacccctgaggttctctgcgtcagaggttagtcggctgtgctggcctgaatttctgacccacagcactgtgagagaaagaaatatttactgttgtttgaagccatcgcatttcaggtaatttg

SEQ ID NO: 9958 - DNA, 201 bp, Bos taurus
gtggatgctgaaataggggatgcattttaatttcccatttaccctcacctatctttttcaaatctcagctactattttttagcggattgcttagtgtgtgctgtgcttagtcactcagtcatgtccaactctttgcaaccccatggactataacccgccaggctcctctgttcatggagattctccaggcaagagtactgg

SEQ ID NO: 9959 - DNA, 201 bp, Bos taurus
aaccagaggcaggatgtttcccccaaacccggcccccagcctggagagaacctacttttcccactcagcacctctagcttgggagcttataaagggctaatgaagaagctctataggccaacataccttggttctgtttccagcgccctcactaaagggctgcttggtgacctcaggcaaattacttacctactctgatcc

SEQ ID NO: 9960 - DNA, 201 bp, Bos taurus
gcatggcttctggagaagggtgaaggatcttggacctgctcaccacctccatggccgcctctatggccaccagcctgtccaagccatcatggcctcccactggggtgacagcaacagctcctaagtagtctccctgtttcttctgcttgccaagtcagtgctcagttgcttagtcgtgtctgactctttgtggccccacaa

SEQ ID NO: 9961 - DNA, 201 bp, Bos taurus
ctttctcctcagaagtaatccccaccctgacttttgtggtcttctttctcttactttgctgcattgttttcccacatttatattttaaaacatactgtttttttattgcatcattttgaagctacataatgtgaaattaggtggcgctagtggtacagaatccacctgccattgcaggagatgcgagagatgtgggttcag

SEQ ID NO: 9962 - DNA, 201 bp, Bos taurus
actgttataggatgaaggagtatattattaattcaacaaaatagcatctacaatacttacattctgtgtcttttatcttaatattggggtttatgggtactttgtccttttttgttgttgttattcattaagttaggtctgactcttttggctcctctgtccaagggatttcctaagcaagaatactggagtaggttgcca

SEQ ID NO: 9963 - DNA, 201 bp, Bos taurus
ccaatgatttctgtggtccttctctgagctccagatccatatagacatcctcctactggagagaaccttctggactgcccaaatgcagtctttctgaaaccaatgcactctcatcccttttcctactctatttctggactttgcctcttagtgaccaacatcctggtcttcacagtgaagcaagcaggatattccaggacc

SEQ ID NO: 9964 - DNA, 201 bp, Bos taurus
agtgatgttgcttttactgatgataaaaatggcccctaatattctggtgtttggcttccaataataaggatgccatccaagagttcaaacttccctgcaggttcagagtcttcctgaaagaaggaaacttttattccatctgaggttggtacaagaagctcttcatattgttttcctcacattacattcattctgtttcct

SEQ ID NO: 9965 - DNA, 201 bp, Bos taurus
acccagatttatccatttgatgtatttagaattgttcatacgtggtactcttgaaaccagagacatctttactgctaaatggcctctcggtgatcaatcgaaagaccactctatacctgccctattctctgacctgtttgtgtctttctcagagcagcaactcaccctttacaacatcgcccccaagcggcctttcggcct

SEQ ID NO: 9966 - DNA, 201 bp, Bos taurus
cccctcccttttggacttctccccactcagctcgccacagtgtattaagtagagtttcttgtgctatacggtatgttctcattagtatttttatgtatatctggggctgtttctgagctctctatgctgtttcactggtacttttcaatctaccccatattaccatcacatgccttagttaccaaggaaggcttcataaca

SEQ ID NO: 9967 - DNA, 201 bp, Bos taurus
ttaaaagcgtgcaggccctgcacacactctaatttttatcagcaaccctgccctggaacaactgccataaaacacttcaccaaatcctcccaggttgggatatacagttttgaggggtaggaggccgctgtccccctttgcctggcaaaccaataaagccattttttttctactacacccaaaaatctgtctctgagattt

SEQ ID NO: 9968 - DNA, 201 bp, Bos taurus
ctggactaaaaaggagggatttatttttgaccaaatagagacttggaggattctggaattcctcacagcattgttagggctcatgaaaaggccagttctcctcctgacactcacctatctagctgtgttcactgtctgtcctgttcatcaggtgactgtcagggcctggcctagcactggcacaaaaggctgctgcccaca

SEQ ID NO: 9969 - DNA, 201 bp, Bos taurus
gggaaagaaagtatccacacaggcaagtcaaagaagagtatagaggattcgtccaaggcaatccagggcaaggctgcttcagcctttcgtgggtcatagaccactacaggcatctgatgagagctatcttcagatgtgtgtaacacatgcatgatacatgcatgaatatatttatgtgtgtatttgtgggcaattcccttg

SEQ ID NO: 9970 - DNA, 201 bp, Bos taurus
ggtcacttaattcattcccacaacaccttgtgttaagtaggtatgaaggcaaaaattcagattatttataaaacactgtggaaacttgaatatggcctatgtattagataacaaaacagaattcgtcatttttgcaggcaggcggctgcgactggcgcgctaagcgcaggtgagaggagccaccccacgtccgacgtcagg

SEQ ID NO: 9971 - DNA, 201 bp, Bos taurus
gaagtctccctttgcaaatcttattttatggcaccataggaagctttacagtgatcactccagcactgcttcactttcttacaaaaggctatgtcattcgattgtaccatgaggccagaacagacacttacaaagccattacttacagtgttgtactttcggaaaaaagtacagtatttcaccagaatgatgtgaagattc

SEQ ID NO: 9972 - DNA, 201 bp, Bos taurus
aatcctaagtctctttccagatgggccatcccttcatccatgtccttgggcacattccatggcttctgttctctctcttccccaccctttgaagactgcagggatctagagtggagtagggggcccccatcttttttccaggcttgctaacttcactgtgattctgtctcatcctgttgttgtaagcaacacctccaaatc

SEQ ID NO: 9973 - DNA, 201 bp, Bos taurus
aacagctctgctccatagagagaaaggccaatgcagcgggtttgtataacccagcctgtgtcgctgccttcaaggagtttaccatctggctgctttagcacgggaagtcggcctttggagcacaagctgcctcagggctgtggtgctagtaggccggggaggagccaaccctgagggaggctgtggtgatggggggcttct

SEQ ID NO: 9974 - DNA, 201 bp, Bos taurus
ttcttgcctctattatccacacactcccacatatatgttgatgttgactggagcattggttacaaatgaggtgatgactcagagagaacactaagaagtcggtagagttgaactgagctggggaccagaactgatactgctggcgaagagccagaagacagaagagcccaattccatctggaaatagggattcaaagaatg

SEQ ID NO: 9975 - DNA, 201 bp, Bos taurus
atcctcgattggcttcttggatccttctctttttaaaggaaaactgcattctgttcaaactagctgaaatatcctctgcaggtcaaatggtatattccgtgcaggaatacaaatttggtttgggtcctcaggaggatgctctgtgtatgatcctgacaaagtctcatattaactcccagagcaaactgcacagcacattgc

SEQ ID NO: 9976 - DNA, 201 bp, Bos taurus
taatggactgagaaaatagtagccattgcttgaaagtaatgaagtttgaggctttgtcaaatggaagttgtaaatatttagcatcttctataaactctagttttgacatgttctcggtttttagtatgtttaaaatttaaagtgacacaagcagtgtgtatgtattaaatactattttattatcaaattttaaacttggtt

SEQ ID NO: 9977 - DNA, 201 bp, Bos taurus
gcacacaggcaatcactatgatgggaaagtggaccaaggggaaaatccaaaggacatctgagtctgtcctgtcctagctgttactcaatgtgctgagataatgtgacatcaagccttctctcatgtgttcagccatccaggcttttcccagacgtcctaatgaattgtatcactgcccattactacacattcctgctcact

SEQ ID NO: 9978 - DNA, 201 bp, Bos taurus
ccattttccttccgtttgatgacccactttattttcccaacacaaccacctgaatgtctcctggcatccattattcataaatggctatgtcaacagaatataattgcagtgggtttgcttcaacaaggtataatgtatcccagtttaaatttctcttattcattcatcagccagccataaaaaaaaagagagagagagatc

SEQ ID NO: 9979 - DNA, 201 bp, Bos taurus
aagcataatttgttcacaaaatctcagtttggggaagaacaaagacttgtgaatcattacagaaaagaatcatttcattctctcactaaattgtagcctttctgagattacagtaaaagaagtctctcaaaactggccttttaatttttgacttttatgttggcacctaagtgaaagaaaatgatcatgaaatatcagcat

SEQ ID NO: 9980 - DNA, 201 bp, Bos taurus
ggcagtgaaagggaaaaatgggtgtattgatagtataaaaaataaatagaaaaaataaatagaaaaaatagaaaatcttaatgtgatatttgggatccctgcatactttgttgttatttttgttcagtcactaaggcgtgtccgactgtttgcagtcccatggagtgcagcatgccaggctattatgtcttctgctatctc

SEQ ID NO: 9981 - DNA, 201 bp, Bos taurus
aaaagctttagagttaatgttttaagatattgctattacatgagaagtgaggcaataaaaagtaattattttaggacagttttatcagcaatttacaacacgccacatactggctgtttgcaggtatttctgtactcatgctcacactctgtttcttagtatcagaaagaacctttccttctgatcaatgagtgggttgtg

SEQ ID NO: 9982 - DNA, 201 bp, Bos taurus
ttatgaatgctcatttagtttataaaagattataatctgattactgttttcctgtcaaagctcatgtaacaccaggtaacatgtaaaagctttactcctgcagtttctcagcattcaaaagtgtttcactgttacctgtacctttcagtgatatagcaattgttttataaactccgggattaaaacggtgcaaggtaggcc

SEQ ID NO: 9983 - DNA, 201 bp, Bos taurus
gccaaagatcaaggttttatgaaaaatctatcctgtggggtgctaaaaccttgagaaatacttgttcataagaaagacaatgccattgaaaatattatctgatcttgttagtgcaataaaacctattccagtcactaatgtatcttgaccttgacttttatatattaaaataactagttcttatccttaaggaagtgtcta

SEQ ID NO: 9984 - DNA, 201 bp, Bos taurus
atgttcattaattggccattcatgacctcccagatttctattgaagccccatacttttcctttgtatagactggggagtaattgatggctctggtctcttaggaatgaggagtaattgccaagttactggcccttttggaggctgtgtctgcttggttatttccgttcagtaactccatattccctttctgatgatcccta

SEQ ID NO: 9985 - DNA, 201 bp, Bos taurus
gcaggcatgttcagtgaaaggggtgcctctgaatccccctgtaccactcagctcaccccctgaggggaaacgccacgtgcattcaaatcaaacgttttctatcaagttctcaactaatggctttcctaggagacccaagcctgtcagtcacctatttcctatttaggcatgttaaaacagaatttgttgtttatttgtatt

SEQ ID NO: 9986 - DNA, 201 bp, Bos taurus
acacttttacaagtggtttaaaggtgaaaaacatagtcttataactcatggtctctggggtgatacaaaagatgtgtaaacaatgagtgggagaatggaaccttcatattctgtatactctgtaactgtttaaccctggaagatgaatttcactttaatatttggctttgaaattatctatgtaagactattacttcacta

SEQ ID NO: 9987 - DNA, 201 bp, Bos taurus
gcagtgagttattctaacatttgcagtttgcgagcaacagctgtgtttcttaatgctgcaacccccctccacttttgtcggaggccatagtttggcctctcgagccttctaagcctcggtgagacataatgggaaatttgagccggctatgagattaaagctccgaatcgatggccaaccagcaattgtcattttagaaaa

SEQ ID NO: 9988 - DNA, 201 bp, Bos taurus
ccatcgtgaaggacgtaccctcttacaaggaggcagaagagatggccgagaagcaagacaagccaaagcaagaatgtgtaagtgaaggcgaagggctcaaggaaagcaaagaccttggaaagaagccgaagtcctcggaaccatccatcccgccaccccgcatcgcttcaggggcccgaggaaacgcagccaaagccttac

SEQ ID NO: 9989 - DNA, 201 bp, Bos taurus
ccaattctccaacctctgacctttaatagtataacacttattcattaaaatgctgcagaacagagaataatattcatcttgttggaggtttatagcatcaatgttaccagacctatgtggacagtggcatgaacaaaagattccagcagtaagcagtttgcaacaactagccacagtccctcctttttaacttgggtaaga

SEQ ID NO: 9990 - DNA, 201 bp, Bos taurus
actttgattttgccctggtgagacctgtcctagacttatggtctctagaactgtgagataaaagacttaaggatgttgcttaggccactaactttgtgagtatttgttacagtagcaaaaacaaaaacaaaaaaaaaaacccaacaaacaaaccattcaggggccattatcgaaatagagacttcatagcaattttctgac

SEQ ID NO: 9991 - DNA, 201 bp, Bos taurus
gagcatctggggaagaatcaggtttttttttttattcagattgttgaccagattcagttgcttgctatggtagtattgaggcccctggtttccttgccagctattagctgagggatgttcccagcttctagaagccattcacattccttgggttgtggccctcctgctctatcttcagtcacctgtcgtaggttgagatcc

SEQ ID NO: 9992 - DNA, 201 bp, Bos taurus
attgaggggcaaggattaactgagctaaagtgaatttgaaaataccaaattagcttgttcaacaattatttccttagatccagctttgcctctaacactgatcttatgtttaaatggtgaacacaataacaatccttgccctcaaaaaggttacattctagaagggagtcagataacaaaaaaagaaaaaaaatgttcaat

SEQ ID NO: 9993 - DNA, 201 bp, Bos taurus
atgatcttgcctgaaaaaccgcatggacagaggagcctggagggctaccatccatggagtcacagagcgggacacgactgaagcaacttagcacacacatccacattaggcttaaactattttagtctatcactattacctattattattattattttcaagatacactcaattattaattgcctaagactttagaaacag

SEQ ID NO: 9994 - DNA, 201 bp, Bos taurus
ttttctcttcctgacccagggattgaacccatgtctcctgcatctcctgcattgcaggcagattctttactgctgagccacctgagaattcccttaaacatagatacgaattgcttaatgataacagttgtcagttttccacatttcagatcataagtatttcttgtgagtttttactattttggcagggcgttgaggggg

SEQ ID NO: 9995 - DNA, 201 bp, Bos taurus
attattcattctaaaaatatgctgagtcaaaggaacatgaaatttgaagggatagaaaaagagggctagacttccctgatgctcaactggaaatttcttccggtgtcagaacatggctgtgtagcaactttaatcccggtggattttgaaaaaatacaaggatcttcagattttagtagcccctgattactgcctttgctc

SEQ ID NO: 9996 - DNA, 201 bp, Bos taurus
ccaggactgccgcagggagctcattgaaagttaatggccttcctctgagtggaggctgagggcggcaagatagaacactcctgaccttccttccctcttttaaacccaggttaccagttaatgaccgtttaacctctcctgctccattctttctcagattcaaagtggtaatggtaatttcttttccctgtgattaaaaaa

SEQ ID NO: 9997 - DNA, 201 bp, Bos taurus
aagtctgctaacttagcatggtgtagattttttatgttccatgctactcattttgtttaactagaaatgtgaaaatttcaggttttcaactgatgtgcaacaggtgtaaacttttcaaatttaccctttgtcagttttaagcatcctgtgctgacatattgatatcataaattcatagaaatgtttttcagcagataagag

SEQ ID NO: 9998 - DNA, 201 bp, Bos taurus
cccactccagtatttttgtctggagaatcccatgaacacagcagcttggcatgcagcagtccatgaggtcaagagttagctgcaactgagcacgcgtggtgtgctcacagtgctcccatttttggagaaattcaggctgactccagggactacaaacaaagtatgtctctttctcctctcaaagtcgctttgtcatgtctg

SEQ ID NO: 9999 - DNA, 201 bp, Bos taurus
cttttagtgtctattgcagcgcctctagtatattctttaaaaaatatttctgttgtgattatgggttttgttttcgaaaacagtgaaaagataaatcatagaaggaattaaggaattatggaattcttaaaaatgcaattattaattttggccagatcacaagtttacatggctacagagaccaggtaggtaatgtgcaga

SEQ ID NO: 10000 - DNA, 201 bp, Bos taurus
gaggagcctggtggactacagtccatggggtcacaaagactcggacacaacttaggaacataacaacagcagtaacagtggcaccatagggccatcaaggatccacactcctatctccctgctccaacattcttaacccaggagcttccatcttcaaggtcagctcaaaatccattatgatgtgaaggtctagccatcagg

SEQ ID NO: 10001 - DNA, 201 bp, Bos taurus
caggggatcttctcgatctagggattgaatccgtgtctccagcattgcaggtggattctttgtcactgagccacctgggaagccccaaattgaagaatgcacatattaaataaagagaaataactatgacataagtggaatacacacatgcaattgattaatacttttggaagaaactaatctctgtaagctttgtcttgg

SEQ ID NO: 10002 - DNA, 201 bp, Bos taurus
ttatctgtgtaaatctctggtttctcattagatcaaatgctccctaagatttgtcactgtgtttacatctgcatcctttcagggccaaagcagcaggaacgcaaatgtatgtcaacaaattaacaagacacttgctgacaaaagccaccacctcatcgacagtctagatgctccattctcttggctttagctgctgtgtgg

SEQ ID NO: 10003 - DNA, 201 bp, Bos taurus
cagtgtcctctactgctacacatgcagctagactccatttcccagcctgccttgcacttagatggggccatatgactaagctctggccgcatgaaagtgacgtctatcaacgtgaggggcaaagaaagactgctgagagccaccgagacatggaggccctttctgcaggcaaaatttaacaggaagctgaatgacaaaaag

SEQ ID NO: 10004 - DNA, 201 bp, Bos taurus
gagccttggaacctcaaactaacccctagcccctccttagtgctctcctgtggacacccccaggcgtctgctgagtcatgacccaccctcctcatggaacggggtggaaaagtaaagtaactgtttgttgaactggcaaaaactgcaagttttaaatgccccagaagaggtttatttcctacacagctggttctaagcaga

SEQ ID NO: 10005 - DNA, 201 bp, Bos taurus
tgaaaaactgaagtttccagtttaactcaaagtcaagttttttttaaaaaattgaaatgaaattgaaggattgactcaatgcttcactttccaccacatacctggtttcagccaacctaactcagtatctcaaacacccatgaaacatacatgactttaagaacatcaatgccaatgactgttatcaagttaacactgagt

SEQ ID NO: 10006 - DNA, 201 bp, Bos taurus
gtgggccgaagaatgtgcatctgttctatttctgtccccacttcctctccaggaaagggcgagccgagtcgctaccggctgccgagtgctactaatagacacgcaggcctggggaacatcgtgtgtcctacacggggataaatcaggatcagcccctggtgtgtaagaacggagtgagaattacgagaaaaacggagcact

SEQ ID NO: 10007 - DNA, 201 bp, Bos taurus
cgctctatttctaaacgatattgtggaggcaatgtggcaaattacggtgcgtccccgccacgacctggctcaagcctcccgccccggtgaatatgggctctgtgctctaataaccggcctatgagctcaggtggaaatcctgggtgggaaccaactgaagtcccttccagcgctttctgccttgtctgtcaaagaacttct

SEQ ID NO: 10008 - DNA, 201 bp, Bos taurus
cttggccgtattcttagcttggcgccctagccagttactaaaagttcaaggaacttgacagacagaggctgtttgtctggtgaagcgatgtgaactggccgggctgagcctgccatctcacgccggcaccttctgtctccttccagggaagtgtatttccgaccaggctctcaaggctgttctctgtgtgagaagaccttt

SEQ ID NO: 10009 - DNA, 201 bp, Bos taurus
ctggaaaaaccaaggaagttggatttttatagaaaagctatgataaagtcacaagactggtttcctcttgccacatattaaatataccttttatctttacagttacatcacaaaccaaaccctaataagattcctcttcctaagggattgttacataaacagcatttgatcactgagcattgattatgctgctcattcagg

SEQ ID NO: 10010 - DNA, 201 bp, Bos taurus
gcacattttttcataacttaaccaggaacctaaggattttctttgtccctttaccattacatctaatggatgctaagttctggccaagcagtctcctaagtagctctcgcctttgcctcttccttttcagatccatggtcacacatggcttcagtctggcctcttattagctcaagcctgaccaaggtcagtagtaacctg

SEQ ID NO: 10011 - DNA, 201 bp, Bos taurus
ccaatcacagaactacgaagtggtagagctgagatatatatacaatttctttgactttagggccagtcctagctctaacattcaaaactgttttctataacatcactttggaatattaagaaaaggcccctttcttcctcaggaaagtgaactctgctttagaattaatgaaataggaaaaatcaaataaaaagcaacccg

SEQ ID NO: 10012 - DNA, 201 bp, Bos taurus
ttagttcactattggatgtatgtgattcactttggaccaaagagaaaaacccaagtttggaggaggattgagggaggaaacctatggtcaaccgagctgtctctattgctagatgtgaactagaagcttgtagctgtagtgccatgtggggacccaggcttaaggtgatgttatggatggtagaatggagaagtgaaaagg

SEQ ID NO: 10013 - DNA, 201 bp, Bos taurus
tcaaagcagtcagatggaaaaggggttctcttacccaagagggtcagttttgttattctgttcaactttgtttctttgttgttccggcctttagccaataggttggtggaactgaccatttacatcaggaggacaatctgctttactcagtttactgactcaaatgttaatctcatcgaaaacaccctcatagaaacaacc

SEQ ID NO: 10014 - DNA, 201 bp, Bos taurus
ccctggagaaggacacagcaatccagtccagttattcttagcctggagaatccttaagacagaggagcctggcaggctacagtctgtgaatctgcagagtcggacatggctgaagtgacttggaataatgctagttatttttattcctgccagcctgatctaggctctcctgcaggccttgggtagattctcttttcatct

SEQ ID NO: 10015 - DNA, 201 bp, Bos taurus
agtccatcagaccctatcgattagcgagcaggtggcaataatgtatttggcacaatggcagacgtgaatgtcatggaaggccctgctctcggagagcatggaaatcagtctggaaatacacgcaatccaagtgaaacagagagtcacaaaaggcatcaaaatccattggttaaaacctatacctggcctaaagcaagtgct

SEQ ID NO: 10016 - DNA, 201 bp, Bos taurus
tggagaattctggctttcagtgtgagtaaaggaaagaagaggtaaagattggtttgaagggaataaagggaataacaggaataattgtgagtctaggtcaattccatattggtgactaagagaatatttaggagcctgggcctcatacatttaaaaagcaatttcccaccttaaattaataagaccaactggtgcacatca

SEQ ID NO: 10017 - DNA, 201 bp, Bos taurus
acaacgtgccctcacactgtgtgagttcaccgcacgcagagaactatggaatttcaccccgtattaatatgttgtcttaaggtcctatcatcagatggcaatctataaagatggctcctgaaccaagtgctcgcacaactattcattcttcatttacttattccattctaaggatgggaatgctgacggacactgcaaaat

SEQ ID NO: 10018 - DNA, 201 bp, Bos taurus
cagttgtgcccaagaagcaaacttaattcataggatgcttcagagatctaaaaaaagagatgaatttcaaggttgtatgctagtttgtgaactgagttcattttagttaaacatcactatatccgcatgtttcgtggggttctctctcttcctctttacctactctgaaatgaatcgacatgtcatctatgaataccgtag

SEQ ID NO: 10019 - DNA, 201 bp, Bos taurus
tccagctcattttgcctacaacagaatgatcttcacaatcatctcatagcccttaagggactccttttgctaatgttttcaattaacatcagagactgtgtacaagctggcctttcctggccctcccagtctgctctctcattgcttttcctttacagacttgatcattcacagtttactgcgctgtgtcccttcccacct

SEQ ID NO: 10020 - DNA, 201 bp, Bos taurus
agtgggccttgaggtcacctagcaccaccgaccctggcatctaagccagctgtggtctgagtctggtcttgttgccttgagccctcaggggttgggatccacctgatgtccttgaaggcaggcctatcgtcaccatgttggtctagatctctaacatgattttttcccctggattttacatacacctgtaagggtgtctgt

SEQ ID NO: 10021 - DNA, 201 bp, Bos taurus
cagtgtagcatccaaaagcctctggcatttccagaaaagagttttccttgtcaggtcccatctacacactttaactgggcctgcacatggcagctgtacagtggcatgatagttgcatgtttgatcacctcaccctgcaagcccagggagtaccctcaccaaggaatgcagccaggtctgtcagatcccgttatctaggtg

SEQ ID NO: 10022 - DNA, 201 bp, Bos taurus
tttcaatttcaatcagatatcatgcaagaaagtgaataattatgatggttcctagagctatgaacaagaagatgtgctcaatagtaactacttaggagcaaggggaagggcaccactatacatagtgtgagcttagctgtgaagatgtaaatcatggaaaagagtgagggaaagtatattctcagcaaaaaagaagcagta

SEQ ID NO: 10023 - DNA, 201 bp, Bos taurus
ttacatatgcagtataactctgcttaatggcctttctacagttaggacctttcaccagcaatcagaaagtattccaattccgtaggttcagaggcccattcgcagtggacacgctgatgcttatggtctcctttaattccttcttcctatctgccctgtaccctgtggccagttctttctctaaacacagctctatgacct

SEQ ID NO: 10024 - DNA, 201 bp, Bos taurus
tgtttctctttctctgtaatgtacacatttgttgctgaaacagaatgaattcccaacacctcatcaaaagaaatatttgaatgtagaaaaataatcaatcgctttggagttgataccatttgtttcacatagctcagaacttctttgcctagtctgaacctctataatgtcatcaggaaggaatcagacttccttaatcca

SEQ ID NO: 10025 - DNA, 201 bp, Bos taurus
agaatggtcttctcaccagtagtcaactgttaggctcactttacactatgacatccctcctggttcactccccaacaagggccagcatcctacatccctgcagaatgtgtgagaatgtcttgataccttccatactgcacagatggagtcctccctttgcataaacactgtccaccaaggattttgttctgagatggccac

SEQ ID NO: 10026 - DNA, 201 bp, Bos taurus
ccatggatttttgcagggttgggggagtgtctattcaatcccgtgcaagtcacaggccctacgatgatattgagaagaacaaagacacagttaccaagcctttgtatggttttgttcagctcccagtcacaaagctgtttataagtaccttgacccagccagtaatctacagtactttttccagctgtttgttttggcgtt

SEQ ID NO: 10027 - DNA, 201 bp, Bos taurus
gtaaaattcacctctgttggctttagaagcatatcctttcttttactgtaaaaaaaccttagcacatattccaaagaatttgaattttctagggtgaaacataaaattgtgtttattaacaaccttatactgataacaaacacatacatgcacacaaattcaccatctcttaagtctatttagaattcagaaaaacaagag

SEQ ID NO: 10028 - DNA, 201 bp, Bos taurus
agttctactgaaactaacttccacctgtgatagcattcactagaggtgttttgtaaagggtgatatataagcatgcagaataatcgttagataaactaacgttgtaaaagaaaatatacatgacattaataatagtttaggttttaaattgttaaattgttctactagcaaaatgcattagtatgtgcatgccagttgact

SEQ ID NO: 10029 - DNA, 201 bp, Bos taurus
ccgggccccgaggcctgtgctcgtgaggacggcggtcccgcaggcagtgacaggcctgcgccccgaccctcctgcctgacgtcctgggcccgcgtgtgcgtgcacacaccacacccgctccagcggcggtgggagctttaaataaacacaggcgaggggaagagagggcaataagcagcctgtgttctcacaccatacaca

SEQ ID NO: 10030 - DNA, 201 bp, Bos taurus
cttggaaatggggagcagcagagctagggtttctgcggagccacgttcatccacccccaggtctgagtcagggagggcaacaccgagggaggagaagacggcttgagtccagttgtcctctcctcaggtgcctggtaggaactgcgatgggaggtgggaactctgtccgtggtcttcgaggaatctcaggcaacagatgag

SEQ ID NO: 10031 - DNA, 201 bp, Bos taurus
ccaactcgtagcgaccccatggactgcagcctaccaggctcctccgtccatgggatttttcaggcaagagtactggagtgggttgccattgccttctcctggggaagacctcaattctggccactctcattacatcacagggtggcccccgggttttgtttacatataaggccccatgtttaatatgctgagctctgtgta

SEQ ID NO: 10032 - DNA, 201 bp, Bos taurus
gactattgggttccaccccaggctcccgaaatcaaaacctgaattataatgagattcccaggtgatttttctgaatgtttaagcactaaagaatactgggcttaagaatgatgttagcataggtgattgaaaagttcatgtagcaacttttgaaaataatgttgtttttttactatatttcctatcatttatttgatgaat

SEQ ID NO: 10033 - DNA, 201 bp, Bos taurus
tcgaaagcagaccctctaagcgtgtgtcttcctcccctcaccctttgggagttgcgtgacctcatttgccgtccttaccgcggttgggcccacaggactttgcaggcgtgtccctaagttcatccatggaaacaccccttgccctccttaccttttttaggcccacaggactttgtggtgtgtccttaaattcatccatga

SEQ ID NO: 10034 - DNA, 201 bp, Bos taurus
atctctccctttctgcttattaactaggtggagtccactatgtgaccagaggttagcaaaaagcaagaaagtcaactctgaacacactagttctttatcagtgtaaattactaattccacttcatctacttccccaaatcttgtcattcttcatacttgttcagctttataagaaattgtcaaactcaagtggctcaactc

SEQ ID NO: 10035 - DNA, 201 bp, Bos taurus
gaaaatgatatctaacattattatgacagagcctaatacagaattccatgattaaagtaaaaaccattcattctatagttgtatgttgcagataacactttattgtgtgaaacacgataagtttttagcaatgcaaatatttataaaattaaattaaacatttatttttcaagtaaaaaaatgtccttaggaagcaatatt

SEQ ID NO: 10036 - DNA, 201 bp, Bos taurus
tcgtggatctcttgtgtatcatgggttttcccatgatagcctgaaaatgcattcagttcctagcctttcaaaaggaatattttaccacaccactaattacaaagtattttgttcaaggggtgagagcagttaaaatatccccatctgtttcaagaatctcattaaggtgcatctatactagttcactgagaaactatttca

SEQ ID NO: 10037 - DNA, 201 bp, Bos taurus
ctgaacagagtaaaacaacaccaaagaccaaaatttacccctgagaattcagtgtcaaaagcccattccacagaaacacgctgtccagtttgggatatctatgcttttaagccttttcttgactgattgtaaatttttagtgctcacagagaacatgcaaaaagttaatttaaatgttttgtggacaaacagcttaaattc

SEQ ID NO: 10038 - DNA, 201 bp, Bos taurus
acattgatgaaaaaaatcaaggaagatctaaaaagagagagaattataccatattcattgaaagaatgaatatctaaaatgtcaattccttccaatttaatctttacattcaatgcaacctcagtcaaaatcctacaaatctattgtatcaatatcaataaaaatattttaaagtctacatgcaaagagaaaatacctaga

SEQ ID NO: 10039 - DNA, 201 bp, Bos taurus
ttgtttttctgtttaattctgtatatacaagcactatttaatagaacttatgatttatttgggttcaaacaaaagtagatcattgagacaggattaatatacaaattcagaagtagtttcaggaaaaaaactcatggagagtgggagagtaaaacaacaaagatggcaatgggatattatttcaaataagtgtctactctg

SEQ ID NO: 10040 - DNA, 201 bp, Bos taurus
acagtcatcttttacgcacaaggcatgttaaaattaaagccattaaatatattctggagcataggaatattttttaccttcaaatttctgctttcatttgaaactttactgaaacttattatccttaaagtacagaatcaagtaaatattttaaaggctcagacatatgagtttgaggcccctggcccctgggtggaactt

SEQ ID NO: 10041 - DNA, 201 bp, Bos taurus
aagaagctaagcaggatgtgactttaggtgatagttcaaacccacttaatcccttgagaagaactggaatataaagtacagttggccctcagcatccacatgtacaccattcatgaaatcaatcaatcaccatagaacttgaccctgtgaatacagagagctcagctgcactacaggtacttgagcagcctcagaatctgc

SEQ ID NO: 10042 - DNA, 201 bp, Bos taurus
tctgtaggtgatttcctaaaatgctccatctgtcccagaaatctcagtgtccatttccccatcatatgtaaccctcattaaaaaacacataagataaataaagattaaagaagatgaggcttccctgatggtccagtggttgagaaactgcctgccaatataggtttgatccttggtctgggaactaacccacatgctaca

SEQ ID NO: 10043 - DNA, 201 bp, Bos taurus
caaagaacttatgcagttcaatacctaaaaaacaataatttaaaaatgggcaaaggacttggatagacatttctgtaaaaaagacaaacgaatggcctacagctatatgctgaatatcactcatcatcagaaagctgcaaattcaaaccacaaggtctattcatagctataggatggccattaccaatatctatatctctt

SEQ ID NO: 10044 - DNA, 201 bp, Bos taurus
gaggactagataaatgatatgggaaagacctggggagaataatttgatttaaattaataagatttttatttctttcttgagtgtccaaacactctgttcaacaacttactatgatagcttcccactgtaatgaaagctgaattttatgccttgcttccatatttctctgtcatcaaaattcattgataaaataaggataaa

SEQ ID NO: 10045 - DNA, 201 bp, Bos taurus
aagacagacttacactttcatctccttttgctagtaaaaatgttttactcctgaaagtttttatttagaatatgcatgttatattggctgttatttgtggccatgcaatattctcaaattatttttaacaaaattggtgatagaataggctcatattccagggggtgggaggtatttgtgggatagcagtgactgtggtgg

SEQ ID NO: 10046 - DNA, 201 bp, Bos taurus
ttgtacatgtgtgatcccttatggatcatagcctaattcattatcattcctgtcagaccattcttctggagcaaaacccatctcaatctaaacatattgctttgaactaactatatcagccatgtctattgaatagcatgactgatgatcagcagttggaaagttcatcatggtattcatgcaccatagtttgtgcctagc

SEQ ID NO: 10047 - DNA, 201 bp, Bos taurus
agctctatcagatttgagacccactatccttctgccttcatttcctaccactcttactagcttcatttctatcactggccctctcaaaggtcctgggcccatagaactcacttctgcctcagggagcttgaatctgcttccagtgttccttctccagatagcctcatggctgatttactcacttctttcagtccttgttct

SEQ ID NO: 10048 - DNA, 201 bp, Bos taurus
tattttttcatatttattttaatgactgtcaaactctattcctctcttacaggataacttattgctaaattcaatgcatattttactggcttcaattttttggtcactgcttgttacagtaatggtatttcttcttgcccttgcttctgtcttatcatttggatcattcttccgaacccttactaatgatcttcactattc

SEQ ID NO: 10049 - DNA, 201 bp, Bos taurus
tgcaattatatatttgtgacaaattgctccaaagtagtaagctccttaaggatgaggaatatgtaataaaattcttcatatccttatgttctagcagaatgtctaacatatagaaaatgaatgcatattttggaaaattcatatttttctggtaacattttaaacattacacaattttatgtgatctttgaactgaaataa

SEQ ID NO: 10050 - DNA, 201 bp, Bos taurus
ttttttcagcaagaatactgaagtgggttgccatttcatcctccaacattctagagggtgaggataaaatatacagaatagttaacaaatactataacatttgtgcagcaaataaatatacatccgaaaaatgaaaaggggaaaataatagtatttagagagcatagtgtgggggggtggggtgggggcgaaaatccctca

SEQ ID NO: 10051 - DNA, 201 bp, Bos taurus
gtgatagaaatgagaggtcacattctggaaggatcattttcatgggaatcagatcacaaaatataatgacaggaataatatggacaagagtagcaatagtccaagagctaaaatcttcaggtttcaagggatgagagtgtgtcttaagaagaggtcagttcagttcagttcagtcgctcagtcatgtctgactctttgcaa

SEQ ID NO: 10052 - DNA, 201 bp, Bos taurus
tggagaagcaaaatatacttacataacaaagaaaacagtaaaataaaaggttcaattacaaactataaagagtcattaaaatactgtaaaaattaaaaatacagtttaggattagattttagtttgagacaaacctgagtgtgaatcttatgtctgcacgtagttgacacatcattatgtaaaatttttctataagtttca

SEQ ID NO: 10053 - DNA, 201 bp, Bos taurus
aggtgtacacatgttccccatcctggaccacctcccacctccctccccataccatctctctgggtcatcccagtgcaccagcctcaagcttcctgtatcctgtaaatttcttttaggtagtcaaggaagctctatttcctatttatggcaatctatgtgggataccataaccaaggcccttttcatttttctgtcaatata

SEQ ID NO: 10054 - DNA, 201 bp, Bos taurus
ccactgggatctgggtgtatctgtccattaaaatcagcactctgtggatttgttagtcctactccataaatcaggtactgacttgcgtcaggtcagctaacgtgaaaagctagtggagctgatggaattccagctgagccttttcagttctaaaagatgaggctattaaagtgctgcactcaatatgccagaaaatttgga

SEQ ID NO: 10055 - DNA, 201 bp, Bos taurus
ttataattaatacaagaaacactgataacataattgcccatgaaagaaggaatgaactgtaagtccttaaatataaattatatcacacatattagcatggttgtaaacagctttaaaccttttataacatgttatgagacaaaagatgtctctcatcaaggatgattctcaaggtattcaggagactattaacaaaaagcc

SEQ ID NO: 10056 - DNA, 201 bp, Bos taurus
gaagcagtagcaaacaaactacccttcttccttatcagtggttgattgttcttgctcctttacagcaaaacaaaagtctctaaatatgactgtatgtattaatcctgtcaaaaagtcagctatttttttaactcatccattaatacattttcattaaatatacagctgtagaaaaattcacactttataagcatgcatctc

SEQ ID NO: 10057 - DNA, 201 bp, Bos taurus
acatgtggtgtatcctttcgacctttcccgaactcttccatttggtggaggcttattagttcctgttccttaccaggacctcctgtcaaaaaaattcatgtgaatggttgctatagtatctgaccagggtgagtggtttcaatcagtgtgcttcccctaacaactcccaaaggaaatcaaccctgaatgttcattggaagg

SEQ ID NO: 10058 - DNA, 201 bp, Bos taurus
gtattgattttgaatagtcacccaatgtcattcattgagcttcagctacattctgaaatccatctctgtatttccaaatcttcaagtgttggtagtatgttaaataatgaatatcatgtattccttgactcataactttccatcacaatgtgtttcctaaataaagttgaatatataatgtcatttttcacgataacttca

SEQ ID NO: 10059 - DNA, 201 bp, Bos taurus
aatttcctactttattttcaaacattccctgagtcacatcactctagatttacatagctatggaaatacaccagtatatgccagccattatgtttaataacgtttttgttgttttaagatatgctcacatatccacatatccactaaaattgtttgataagaaaatttaaatctttaacactgctcaaaatgactattaaa

SEQ ID NO: 10060 - DNA, 201 bp, Bos taurus
tacagagcttagacacagggttggaagataactacagtgtgaaccggcgcttagcaatagaaaagagaggccctagaaatataacaagggacctgaatctgaagagaacaattaggttttgaaaaatcatctcctctgggaaatgtatgatgcagttctagccagattttgtaaatccaaactggatttacagttatttcc

SEQ ID NO: 10061 - DNA, 201 bp, Bos taurus
cacctcgctgcctgcttcaacaataaaggaaatcaatgcttgtgttgcacgaaccttgagtgttctgtgtcatcagtaatttctgtctatactgcctacccttcaaatcctgaactcaggagttttataattaaccttgactcagaataagacagccacacaaatgtcgtttgatattactgattatttcgggataaagag

SEQ ID NO: 10062 - DNA, 201 bp, Bos taurus
attcctgtagcctagaacaccctttcctccctcatcttctgcatattgcttctattttttttccttcaaaatggaatttcatatctatctctttcaggaagacttttctaatcccctcctccagtttcataggataccaaatctctgggcttccataatatgtaggacttttcatactatattgtaattgctttagtttcc

SEQ ID NO: 10063 - DNA, 201 bp, Bos taurus
gggcaagggctttctccctctatgaggttgtatgcacagtccagtaaactctgggttggtttctcacattcatggactggtctcgttgtctaagttaaggggcgaggtcatggagtgacctaagctaaacccagtaggttatcaggtgattcttgagattttaggattactccaggtcagaatgacgctagaaaggatcac

SEQ ID NO: 10064 - DNA, 201 bp, Bos taurus
tgtagaatctataaacgtcagattctggagccaccaaaaatccactgaaacgtgcaacaaatgtgtcttgttccatgggccaaacataggaagctgaatccacccaaatggcacccaagtaccctggagttttttcactgtattggagtatctcttcaagacgtactggccggctattattccacacctcaagcgttaggc

SEQ ID NO: 10065 - DNA, 201 bp, Bos taurus
cgccaaagcccaactttgatataagaagctgtctaggagggataaattcttaaagctgtgcccttcacaaataattttaaaatacaaaggtataaaataactggaaggcccttattatcacttaattctcgtgatcccaggcagaaagccaaagcatttatagatgtgatgagtaccagctccagtatcaaaactgtttta

SEQ ID NO: 10066 - DNA, 201 bp, Bos taurus
atggctaattggaagagaaaaaacatccacaacccacatggcctgatcacatcaaaacacgccatctgtcactcctatgctcttagtcaccaccccagccaacaaaagtctctccatcatcaatgaacttatatttgtttgttgattactgatcattattatctgtttattctgatagccttcattttcggtacaaagatg

SEQ ID NO: 10067 - DNA, 201 bp, Bos taurus
ttggccagttatatttcaagctttagtactttgtgattatagaatgttttcacactttgcttttgcaattgaggttatttttatgacttactgttaattattgtaactgtcatgcttttttaggaaaaatgtatatagtctttgtgttttcaaagttagataataggtaagtcggtcattatttatagtgttcaaaattac

SEQ ID NO: 10068 - DNA, 201 bp, Bos taurus
tggcatttagaaggtacccagagctgccaaatcaataaaggaataaagtgagggaaactctcagatcttcttggagaaagagggatttgaaatgccttcttacaaggcaacttcttggaggtggtgccttcataggagtaggggaacttgatgataacaatataatgataaataagggaacaaggggaaaaagaagaaagt

SEQ ID NO: 10069 - DNA, 201 bp, Bos taurus
gtcgtgacaggtttgcctcctctaaagagtctgccaaactctacggttccttcaacttcaggatgaaaacaagcactaacgaaaacaccctggaactgtcgctggtggaggaagatgctctcgctgtacagagttaattctggttgtgaacttcttgagagtctgccttggtattttatatgaacaaaacaaagcaaaaca

SEQ ID NO: 10070 - DNA, 201 bp, Bos taurus
tcactttttaggccccttctatctacaaagtatgtaatttcaccagaaaaagttttgcaatcttaaattgctaggcatggcctattgttgctatttgttcattgatgtattctactttgaaagaggtaatgcattctccatgtggcacataaggccatccaatcagagatttggagaggacgaattttaccttcactgatc

SEQ ID NO: 10071 - DNA, 201 bp, Bos taurus
caagcacaaatgaccatatactctgtttctatcatcttattttgaccccaagttctaagggttctaagcatatgctggaaggttggcaggtttcatccacatcttctagttcaggtgctcgtcttctgagtgtagaggacttttatcatatagggcagttccccatcaacacccttttctagcaagaaaccagagatcatt

SEQ ID NO: 10072 - DNA, 201 bp, Bos taurus
ttcctatggatatcaagtttcatagtgtctattttaaagaaaacacagagcaacctgctccacagacgtgcttggctttatggccctgtccccttgccacctctattgcatccacatatggacctggtttcagatggtcttgctcagagcataaaatggcctggattaatccaggacatgtagctggcggtctccaccatg

SEQ ID NO: 10073 - DNA, 201 bp, Bos taurus
cccccctattaaataaaccaacaggtcacatagtctgtcttgaatatgtagccttatatcctgttgctctgtcttcacgtgtcatgggtgtcagagatggcaaactcctagaggacaagcgctgcagtccgtgccgacatgcattagcaccactggaagatgaaaataaatgtagtatccacagtagttccgaggattcca

SEQ ID NO: 10074 - DNA, 201 bp, Bos taurus
ttcattcttgcagtaaacataaggaaatggtttcagtcttgaaaatgtgcaaaaggcgggcaactctgccacctgtcatttgtcccttgtgtctttgtcactaatttgttttttactaggctgccagcatctcaagttatgctacttctagaaaagtttaattgggttttttgaccctttggtatgaactgtatactgata

SEQ ID NO: 10075 - DNA, 201 bp, Bos taurus
ctccagaagaagctgaaaggtggattgtaaatttgattagaaatgcaaggctggatgccaagattgattctaaattagtgagtgttgtctgtgctatgtactagatgtcagttgctgattattttatacttttgggggagtttttgttaggacattcattctagaatttttgttttaatatataatagtttttttgaaggc

SEQ ID NO: 10076 - DNA, 201 bp, Bos taurus
ttttcctctcctttactcctttctgttttccactgagttcttttcagcaggtatccagagcccgtgatcagaaagtatttgtgccaacatcaccacctctatctttgggggtaaagtattttgaatttagtaaccacagataatttaaggagccaacaagcagtgggaggaaactgttcttaaaaatgaattcccaaaggg

SEQ ID NO: 10077 - DNA, 201 bp, Bos taurus
agccctcacagctgctggtgcacctgcagctgcgaccgcagcccctccgcctgccctggttccaccactgtgtgtgtttgcagctggccccgccacagccgagtgtgtgttcacaacaggctccagccactactgctgcctgccttggtccctagcctctgaactggggctcacctctgagaaccccaactgcccttgtgg

SEQ ID NO: 10078 - DNA, 201 bp, Bos taurus
ggaagaacaaggccttcaaaatctaagaccaggactgttgcagctacattacattgcctctatctttattccatagtttataccaatctttaccgaacaagaagtcagaacttggccaccttaaaaaggcattaggtctgtaagatggcaagtaagctaattatgacacattttgcacaagaattacggattctaaattgt

SEQ ID NO: 10079 - DNA, 201 bp, Bos taurus
acatctgcccctattggtaatactaatttttatcacttgtggagataatttctctattttgaaataaatatttaccccattataacaaataagcaggctacaggaacacattttaagaccatgtaaatatctttcttctcagcaaaatattctcctggattttgccttcactaactgttctttcctggttcaatctttact

SEQ ID NO: 10080 - DNA, 201 bp, Bos taurus
ggtagaaaatcagcatctcttccaaccctttaactttgtgaaatgatcacaaaagagagatgagaaaaaatatgaactttatttgtgacatgggcatggtgatacagcatagtgagtaatcaagtttcataacattatagggtattagaaagacattactggaatcttttagatttctgctgtgctttcttaccacagagc

SEQ ID NO: 10081 - DNA, 201 bp, Bos taurus
gtaagtctagaaattatacttgacagtataacattattttggtatatatctatgtaatataaatgcacatcaacttcaggataatggttaattttggtgcgagtttggagggggtgtttttagataacattttatttcataataaaaaaaacaaattcaaagcaaatatgtcaaaatatgacatctgctaagttttaatgg

SEQ ID NO: 10082 - DNA, 201 bp, Bos taurus
tgattattgttggttggatttgagtggacagcggggaaggtaaacgtacaggacagggcactgtacagcggtaatgggcagggacagagacaatggaaaacggagggagagtcactgctctgacttagcaggttgctgtcaaaagctcagtgaagatccggcgttgtcagatcttggatttccctgccagtagacaaacac

SEQ ID NO: 10083 - DNA, 201 bp, Bos taurus
tgagctgtgtaatcagagagcaagctgagagaggccagagaaagtcccaaccccaaaagggcgattttctgtccaatctctacagtctagaatacagatgtctaggccctcatgtcaacccttcagattctgtaactctgtaaaagacgctagaaaaggttactggattctgattcaaaaacagagttaatctattctcag

SEQ ID NO: 10084 - DNA, 201 bp, Bos taurus
tggccacctgtgcggaagacttcgtgggagtccagcctttctgaggggagagtctggcacaccacagaagcaagatggagatagatgagtttggatgatacgagaggaaggaatgggccaagatgccctctccccagggcaacactggaaatggctgggcttttggctgcagaggtcttccccggtggctcaaacagtaaa

SEQ ID NO: 10085 - DNA, 201 bp, Bos taurus
aatgtttgactggctctgtagacctcagaggccttggctgcaggttttgatacgtatatgctgacctttaactctgggccagctctgtcctttactgcaggtgcaacatggactatgttcgtgaagttccttatttagtcactttgttagagtgtgataggcagggtcactctgtaggtcaactcctgtttccttgggcca

SEQ ID NO: 10086 - DNA, 201 bp, Bos taurus
aagtagcaaaaggggcttaaggttgtagatggaatacatatgtgggtgaaatgaattaaggctgctactcagttggccttgagatggaaaattaacctgatgggtccaatgtaatcacaagggtcctcctaagtggaagtgggagacagaaggctcagggcctgtgtgattccacgttagaaagacatgactgattgttgc

SEQ ID NO: 10087 - DNA, 201 bp, Bos taurus
agagaacaataataaaattaggggaaagagcataagacatatgtacaaaatttgatggaaactttgtaaaccagagttggcaagcttccatagcatgttacgaacattaccaatctatacggggtatcaaacaaatgtctttttcttctttctgagtatacctactactgcttagtaaactttagttaaaattgtataaac

SEQ ID NO: 10088 - DNA, 201 bp, Bos taurus
aaccattatataacatcagtacagggtcttccaagacaactcagtattcagtctttacattgtaagttctatacattgtacatggcccagttgtttaagataccaagatccaaccagattttggaaaaccatttgcctgtcttaggatcagcataataaaaaattttcaaagagaggcctttgtcaaccacctcatcagtc

SEQ ID NO: 10089 - DNA, 201 bp, Bos taurus
atggtgatttaccaatgccataagttcaaaaaagaaagaaagtcacaagaaaatagctcaaacctctcttagtctgatgtggcaagaatgtccaagagaccatggtgtattccatatctcattttttttcttattcttgtgaacagatgggagctgtactatttgaggaagagtaaatcctggtatttggccattatccaa

SEQ ID NO: 10090 - DNA, 201 bp, Bos taurus
ttttttaacagtagatgcaaacatctacttgtaaatggccatttttacaactgccaccgctagggcgctgccacagacactttcgcttggcccacccaccatttattttcaaccctctcttcctgacctctttctgggctgtcatgaaatagtagcagggtcctatagtaagattcttggaaaacttctgttttcctgatc

SEQ ID NO: 10091 - DNA, 201 bp, Bos taurus
acaagattctaaaaatatatattaaattaataactgatttgtggcaaaaccttaacattttcagaggtgaatagcttggccctggggccatggtcaaataccatctagtctttgataatttaattgaaactaacattggtgataaaaatacaggctgtttttcagggacaacgtttgatttgggagactgggaggggcctg

SEQ ID NO: 10092 - DNA, 201 bp, Bos taurus
ctcccaatcgattattccaagtgtttgcactgccaagaatgggatttctcccagggactctgaagagtggtgcttaattattcatcatgaaatttaattttagagcttgtaatcatgtaactgtttaaaatggaatttgtcactgaaacacgatgcaagaaaatagaggattatttaacttctactcatctcacttcaaga

SEQ ID NO: 10093 - DNA, 201 bp, Bos taurus
tacatcttaacgagacagaaagaatttacagtgttaagttttctaaagtgaatgctctaaggaaagacaggtcagggcctcgaatcagaaagttaaacctatctaaagtttaccaaagctatagcaaagttaagctctcttattcaatggtaaattagccaaggccttcaggaaataaaagatccaaattagaagaccctc

SEQ ID NO: 10094 - DNA, 201 bp, Bos taurus
gttaagacacacgttccaaatggaggagccaagcctttcctccccacgctggctcttttgctagcaatgaatggcgcttttcagaattctccctgtgaacacaactaattctgtaagagcctgctctgtgtgtacagctctcacctggaactgggagtgttgtggtggataaaggctaacaagaaggacgcaaagggacga

SEQ ID NO: 10095 - DNA, 201 bp, Bos taurus
gtttgttttccagattgcccccctccagtccccacggctttaaaaccacagatacgcgttatgttcgcgatcattgtatccgcatctggttattcaaatcgctgtaaatagctgctctgctgtaacaacagaggccaaatttcatttgtggtaaaataggcttctctgatatgaattacatttattagtatttttactatt

SEQ ID NO: 10096 - DNA, 201 bp, Bos taurus
gcctctgccaggccacccaaatttgaccctaacaagattaaagttgtatacctgaggtgttccagtgggaaaatcagtgtcacaggtaccctggctgccacagtcattctcttggatctgtctccaaaggaggtgggtgatgacatggccaagacaactggtgaaaagttgggagtacagtgaaactgaccattcagaaca

SEQ ID NO: 10097 - DNA, 201 bp, Bos taurus
taacaattttctccccaacatgttccactgtaatttgtattttcatatttatctgcccactgttaatttcaatgttatccccttctatgcattaataaaaatcaccaataaaatttaaatatgactcttcccatttactcattttttacatattatttgctcactaataaaaccttgtctgttttgccctcaaaatgattg

SEQ ID NO: 10098 - DNA, 201 bp, Bos taurus
aagggccatcattagaaagtcaacaaataacttctggagtggagaaaagggaacatgtctagactgttggtgggggtgcaacatggtgcagccactgtggtaaacagtacgggggccctcagaaaaccgtaagtactattaccatatggtccagcaatcccactcctgggcacatatccagacaaaactctagtttggaaa

SEQ ID NO: 10099 - DNA, 201 bp, Bos taurus
atcttgttcttgatattggaggaaagcttttaacctttcaccattgagtatgatgctatttgggggcttgtcatatatggactttattatgttaaggtgtgttccttctatattcaatttctggagtgtttataataaaagaatactgaattttgtcaaattttttttctgtttctattgagatgttcatataattttagt

SEQ ID NO: 10100 - DNA, 201 bp, Bos taurus
gttcctctcgatttgtccctaaaggccaattaattccaagtttcctgcaactggcattttaacttcaaaaatgtacctcaacagcacctgcttaataaaacgctgtgagatgatactcaggtttattctgctccttggtgtcagttcttttctgaagtcaatagcactttccatcttcaaagttggctatgcacacagtca

SEQ ID NO: 10101 - DNA, 201 bp, Bos taurus
aggagaacagagaggtacagaggaattaaaaaacttctcagcatcccacagtgagaaagtgatgggctctctgaggccataatccacatgtccttccttccaatacactcctccatagatagagcacacgcaccactggctctcttatggggccttggaatagtcttgatgcatgtgtagtgaaataaacctggtcatcag

SEQ ID NO: 10102 - DNA, 201 bp, Bos taurus
ttacaaaagaaaccagttattcctgaaacacagctatcagatatttttacaaatacatatatgtttattaacaattagtgagcaagccatgcttttaacagttactataattttaaagtggttttgagtgtaagtagttactctagatatctactaaaactgaaatgtaatatgaaattttctatgatttctactggtgac

SEQ ID NO: 10103 - DNA, 201 bp, Bos taurus
tgctttttcaggaggtatccaggttcatggccattaccttccctttatcccaaattcaaacaagtccagcatcctttcagcagaagcccaagctcaccagcggcctgggtgtcacaggcataataggaaatcatttcacaggcatcagagaagcactgaatgtatgcagtggcctggactgggggctcctgggtcatcacc

SEQ ID NO: 10104 - DNA, 201 bp, Bos taurus
caagtcatgttcttaaggatctttaacagtctgactaggagctttgcttatggaagcccactaggaggccaaataggaaagaagcagagtcaagaccgcagatgtgacagacgtacaaactgccatctgcagaggacaggaggaaggagctcctgctcacagacggggtgggatttgagacgggcttaaaaattgggcaga

SEQ ID NO: 10105 - DNA, 201 bp, Bos taurus
cattttggtgctcaataaatatttgctcatgataaagaaaacaaaacttcataataaatgctttagaaatagaagttaattaatttgtatatacactatgtacaaaacactggagtcaatactatggcaattataaagaaaaataagacacaatatttgttctaaaatccagtgtgctaagtgaagcatagagacaacata

SEQ ID NO: 10106 - DNA, 201 bp, Bos taurus
gcaaatatttaggaattcttgaaaatggaaaaaaaaacactaagttggtatagagttattatatcttttgcttttctgataaatctataaggaatatagagcatctcacatatttcatcacataccttcaagccaagcattgctcctgaatctcgaggtacacttccatcttttaaacgcttatttaataaaatgcgacca

SEQ ID NO: 10107 - DNA, 201 bp, Bos taurus
atcagcaattataactgaaaacgtaagcagtcatctcagaaactgctaaaacaagtagacaaaaacacacaatagaaaaaaaaaaacacaatagagagaacgaaaaaggagggagagaggaatacagatgatgatgatagatagatagatagatagaatgtaactaataagccagagctatcccatggatggaggaacctt

SEQ ID NO: 10108 - DNA, 201 bp, Bos taurus
cctacctctcacctgcctagagataatgccagcatataaaattcaatgtgcataagctggtatcacagggacacctgatttcttataggattggataaagcagaagtgtatttcctttttacatttctttactacaaacaactacatgtgtttttcctattaaagggaatgcttagcagtggaggtatcttaaaatcatct

SEQ ID NO: 10109 - DNA, 201 bp, Bos taurus
cagtcacttagatttcagcatggcttggttctgcagtgaaatttcagtatataaattatccagagtgatcggagtacagtctggctacttaaaccagtttaatacttcttaactcattaaatccagttttaactgttattcaaaattcattgccaggtcagttggtgattcagctctgttctggccactaggcactgccct

SEQ ID NO: 10110 - DNA, 201 bp, Bos taurus
gacaacattacccagtccgggggggagggtaattctgcgcctattcttctcagtgatcacgtgctgacgtcaagtgagcaacagacgggcctcccaagtcgtcaccatcttggacagagatgtgtgtgcccccaacccccacgccagggaggccctctgcccagatgcagagagtgcagccatcaaacagcctcaagctgt

SEQ ID NO: 10111 - DNA, 201 bp, Bos taurus
tcccttggccagttatcctgccactgggttcaagaaggaggcaaaatctgtgacaacacatccctggtgagaaccacccgcacacaaggtagatgtctgtacacaacttgcctctttccaaggccaccctgtaaactgctagacttcttgctgaagacctgagctattcacttttatgaacctcttaaatccctcaaagag

SEQ ID NO: 10112 - DNA, 201 bp, Bos taurus
agactgtttctgtagtcaatactgtgacagtctctccaaattccctttcaagtctgaaggatttctattctcagctgttgagcgggctgcaggcaggcagcgctcggctatcagcccacctcaaaattgccgcagctgaagagcctcattactcaaggtcatacccttttcactggggcatctgaatccagagatgagtca

SEQ ID NO: 10113 - DNA, 201 bp, Bos taurus
tatactagcagggcatttccaaaacataccagagtaacacaagaaagaaagaaatgtgcaggtaaagaaattatccattggaagtttttgatttttaaaaatttttggaggtttttattacagtaggtgactgtgagatgaaatcatttagtcatgtccagctctttgtaaccccctggactgtacctctattcatggaat

SEQ ID NO: 10114 - DNA, 201 bp, Bos taurus
gagagcacggtttgcaccatgtgaaaatgagagtgaaacccccgagggcggctcgctgaaatatgtgcaaaatgaaagaagccctccccaaggcctgcagcgtttctcccttctcctcttcgatctgcaaaacaccggatttcactgctgccagagaaaataccggggtcagcgccccgggccctgggcccttccaaatgg

SEQ ID NO: 10115 - DNA, 201 bp, Bos taurus
aagtacgagggtccagataaaagggaaagagccttgaagaaataaagggggagatttaagaaatagtgggaaaagtcccaaggaggtgggtttctgggcccggaactgatgaaggggctggcatcaccttgcagacttgtttgaccacagcagaccatggtcagtgatggctgggtcttcccttggccgtagactctttac

SEQ ID NO: 10116 - DNA, 201 bp, Bos taurus
tgggctcacacctccttcctgctccaggcctctgctggtcggcagaagagccagtgcttacgggggcagccacgaggtgctggcagagggcagtccgcgcccctggccccagttctgttttgttctttggagggagagggtctggttctcagcctccccgttctgacaacaggacttttctgtgtgttcagcgacagagct

SEQ ID NO: 10117 - DNA, 201 bp, Bos taurus
gagatgaagcattttagcaaagaaagcaaatttccctgaagatattagaatgagggaggctggagtctgagacacacaggatgagttagaaaaacaaagaggggtagtactcctctgtggacaaatggtgaagtctttcaagagtgattccatccaattctgaaggtagattgtgttaataggaatgtggcctgttctctt

SEQ ID NO: 10118 - DNA, 201 bp, Bos taurus
gaagggagaaaaggtaagaacatctagctcagcagtgtttgataattatctcttggtgacagaattagcatattttcttttgtgttttggtagtttgccaacttgtacattcctttatgatggggaaggtaggaagagaaaaacacattctttaaattaaggcataatactaattacacactataacaacaaaatattgta

SEQ ID NO: 10119 - DNA, 201 bp, Bos taurus
gctcttcatttactccctcttcatcccaaggaatctagagtcacctctagctttcatcaagcatctaggagaccctactagaaggccctcaggtgacctcccaccagtcctcacacagccccctgtccactttgtcactggaaatatgcaagcgttctttgcactgatgagctctgggagtgcaggcccatctgcttccag

SEQ ID NO: 10120 - DNA, 201 bp, Bos taurus
ctctggctaagaaatccttttgaatttcagacaagagttgcagtaactgagtccggtttattcaggaagagtggagccagaatgggtctgctgtgaataaaatgacaggcctgctttcttcacaggcgacttcttccctatgaccgaattctttgatgttaatgtaattctcattaattgctaacgccaaagcaacagagc

SEQ ID NO: 10121 - DNA, 201 bp, Bos taurus
ggatcttctctacctctggatggctaccgtaaggaagaaattaattttcttccctgaggctggccattccaggagatatttgcaagattaatggcctttttactttaccacctcacctcacccctatctgttctataaaagatcctggcatccagacttcaataagatggttatttggagacattagtctgccatcttctt

SEQ ID NO: 10122 - DNA, 201 bp, Bos taurus
gaaacggtcctttgctgacacttttataattaggagttcaagagaattcattcttttctccttgggagaaaagcattgagctgttggtttatggggtgactcatggcaggcaagagcctggatggggggccttctttccagggaagagcccagaaggtacaaaccttgtccaagaggacctgagatcagctggcaggaaat

SEQ ID NO: 10123 - DNA, 201 bp, Bos taurus
aacacacaagtacataagtatcttcgtaattcaagaaacaggttttattcttatttcatttctaattcagttgtagactgggcaactttgcatcagcagtacctgcactgtttcacaaactaagtaggataagcatagcctaagtgtctagcacaggatctgacacataggtggtgctgaataaatgctacaagaaaaagt

SEQ ID NO: 10124 - DNA, 201 bp, Bos taurus
aactcttagggcccttagcacacatccctgtctcaacctgctctagaaattgctccagcgctgtctcacatatgtttctcccaatcatattttaaactccttgagggcagggccatgtctggagccgctccacagggtgagctcatgttgattcccataagcccttgctcctttcatggacttggagctaaggtcctcctg

SEQ ID NO: 10125 - DNA, 201 bp, Bos taurus
tgccaggactatcagcagtgtagcaactacccatctgtcctcgtagataaacagttctgaattctttgtccaggggttgctaaagctgggccattcattgtccctttgcccactcagtgccaccagtcaacctaagaaaaggatacagaggaagtgcattccctgtaattatgtacatattaaagagatggtagtattagc

SEQ ID NO: 10126 - DNA, 201 bp, Bos taurus
catgccagcctcgaatttcctctttcttaagggtctatttcctctacgaagccctttcctttatgaatccataatgattgttctctctccttcagtcctataggatatacttgatcttttatctggtacttagcatttgctgttttctgttactattttctcttaattcttacactctcttaattagattgtaggattctt

SEQ ID NO: 10127 - DNA, 201 bp, Bos taurus
taggatctttcaataaattgctttttctacttttaattcctttggtttctacaaatagtttagtatctcttttgttaaaaaaatactcttattcttttgtgatcatttttaatttcctagttttaatatttctggcattctatttgacagctgcctccttttcagtttctttagtttcacaagcatgttcatttaaccttt

SEQ ID NO: 10128 - DNA, 201 bp, Bos taurus
ttaaaatatattgtacaacttaaaaatattttatttacttggaattactcaggaaaacaatgcatccctaaaacagaatatctatggccacacaaaggaattgaatagctctcataaatcacactgtagaaagactattacaaaatatcctcacagaaaaaaaaaaaaaaggggatactttaaaaatgaatgtaacagggc

SEQ ID NO: 10129 - DNA, 201 bp, Bos taurus
tggccatgaagggagccagctacacactgaagatggaagaagagggaagtagaaagaactgggctctggaaaatcttgtcactccaattaatcacacatcgttgggccctaccttgagacttcttgttaggtcagaaaataaatcccctatattttaagcccctttaagtcgggttttctgtttcttgcaatagaaagcat

SEQ ID NO: 10130 - DNA, 201 bp, Bos taurus
ctgttggatagggatgaactgatgaggagttcacacaaagaaagctggtcagtcacgctctgcgtcaagagttttccacatggccacagaagtcggggaacccaggatgcagaaacagaaatggaggatgccttatattctcccaagggaccctactcccacagggccatctggtcacccaagtgcagtttctccaagcga

SEQ ID NO: 10131 - DNA, 201 bp, Bos taurus
gattcttaggcgttatggccaaactaaaactttgtgtgttgcttaaaatgataagtaacactgagctagtgttttgaaggaagctctctttgcttcctctccagcctttgataatcaatgtgtggtttaaaagaaagacgtcagtatatctaaataattgtacagttagctaacttgcccacggctttgactctgtcacct

SEQ ID NO: 10132 - DNA, 201 bp, Bos taurus
agacactctggtttcccaggaccccaacttgctgccagggaggcactgtagcaatggggggcatggcaaccaggtggggtgaggttggcactagcagacctgttggtagtactgaacaagacaggagggggaaaaccctaccaggggtgtctgtttcacaggggctccaataattcataaccattcccacaacagagcagg

SEQ ID NO: 10133 - DNA, 201 bp, Bos taurus
ctcaaacctcccactcacattcctcctcaggccaagttgcctttcccagttgagtttgtctatcccacttctgaaaagaatccaggccatttgccaagaggataaaaggcactgagcagtaaagatgtctcaactatgctgagcgtgttgcccagtctttctctttctgggccgttgggctttcctgccagcctgactttg

SEQ ID NO: 10134 - DNA, 201 bp, Bos taurus
tgggaacacagccacagacagtacaaaaatgatggctgtagtcctgttccaataaaatgttatttacaaaaacagtcagtgggtgtatttggcctttgggctgatcttgttctcaagttcacttgttctcagactttggtgtgcatcagaatgacctgagccacttgtgacaacacaagctgtccagaccccagattctga

SEQ ID NO: 10135 - DNA, 201 bp, Bos taurus
ggtagcttagacaagatttctcacagttctggagactggaagtccaagattaggggactggttttcttcctggcttccagatggccacttccttgctgtgtcctcacatggtggagagatagccagtgaactctctgatgtcttataaagatactaatcctgtcagattagggccccacccttatgacttcatttaacctt

SEQ ID NO: 10136 - DNA, 201 bp, Bos taurus
tgtcttctaatcctggtagtacttgtccatgaaatgcctgtgtaacctctggaaatcatcatccatgataatgtcggccgaatatccaaccgcagcatcaaattctgcgtcagaggcggaggaggatggcgtggagcgctcttcctttggagcgtcctcttgctgacgcagtcacctcagcgcggccctggcgcagcctcc

SEQ ID NO: 10137 - DNA, 201 bp, Bos taurus
cggtccagctcacacaagccaccctttgttcagccctcccctggcacgctctcctccaacactgaggctattataacacaggcctcctgagcagcgcacatatccccagccaccaaggtcaggcatatgcagccaacgttccccagctgtggtctggccatctcccagcgcatctgtgggttcggtgttcaacagagtggg

SEQ ID NO: 10138 - DNA, 201 bp, Bos taurus
tgcacacacgttgtgtgctgttgctgttattattgtcattgctgtgggagtgtcattcaaagtccatcctccatcagaatgaatgatcagcttctggtccgtgactgtgctccttaggcctgaaggctgtgattcatgatggtcaagggcacctgcttgggggatcagacaaaactaaacacaaacctcacctctgctttt

SEQ ID NO: 10139 - DNA, 201 bp, Bos taurus
ggcctgaaggctgcatgtggcatcagactccccacaaagcctttgctgggaggggaccgttgtcaccaaccgtggtcatcggattggctccttcgctgggcgtcactaaaacccctcagctcaggccatggagttcttcttataattaacctttcttttgtagctaatggttcttatagataagactctagtgtagggcag

SEQ ID NO: 10140 - DNA, 201 bp, Bos taurus
tggagaattccatggactgtatagtccgtggggtcacaaagagtcggacacgactgagcgactttcactttctcactctcgtgaggctttcatcttgttttgttatggatcagaacctcagggaatcttcacacctcctagtcatccttcagaacctactgggcccactctgcggattctttcgcctcaggcctaattatt

SEQ ID NO: 10141 - DNA, 201 bp, Bos taurus
ggggagcacaccccacccctgacaggccagggatagctacagggcagagaaagttccacctcacacatggcacaggttttacaccctccagcaccaaccacgctccctatcaaggtgacaggggccagcacaccctgaggaaagatgtggctggtgtctacatcaaaatcagccctcatgccaaagacactggatcaaaca

SEQ ID NO: 10142 - DNA, 201 bp, Bos taurus
ttagagaatgtgctgaagtgctgcaatccactgcatgatcatctaacacattgtaagagttctgaacgtgccctcaggagaccatcagggtcagagcggctgggcccccggtgtgctcagtgcctctgaaacacagtctgtagacctctccatgttcctagtagagtcaaaggcagacctaaaaagtattgatctagttga

SEQ ID NO: 10143 - DNA, 201 bp, Bos taurus
tcataaagaactcaagtcaggctgggcaaagaaactgagtaggtctcatgggtctgcttggcagcaatgggtacagaaggagtgatgggagagaggaggagggaagggacatttttaagtagcatcagaagaacaggccaaaacagaaaaagatgccagtagccctatctaaaattacatctgtgctatatttgatgattt

SEQ ID NO: 10144 - DNA, 201 bp, Bos taurus
ggacagaagagcctgtcaggctacagtccatggagttgcaaaagagaaggacatgactcagcaactaaacaacaaaaggcctagctaagctggagaaggcgatggcaccccactccagtactcttgcctgggaaatcccatggagagaggggcctggtaggctgcagtccatggggtcgctaagagtcggacacgactgag

SEQ ID NO: 10145 - DNA, 201 bp, Bos taurus
aaatcccttatcagaaccaagtgtgcagataaactcttaggtgtcctttctttggacaaacaagtattcgagacacataaacaggagcaggccattttcacacacggggtggggggcttcatgggattcatcatttaaaaggcaaaagaaaccaaattggaagcaaaaattccaggctgtgagtggctcaaatattagcac

SEQ ID NO: 10146 - DNA, 201 bp, Bos taurus
ctgtggcttggtgcatgttgttcccatgcctgaaggcctttcctcctaatcctttcccacgagataaattcaagcatattcttcaaacccagtaacacccgccttgaagccagggccctggcaattcatctgtgcccccagataattttctatcactttttcagtacttcaaagagtagttctcaatggtggctgtacagc

SEQ ID NO: 10147 - DNA, 201 bp, Bos taurus
agtggcaaagatgttttaacagtcaaggactggattaggacaagtgggaaaggttgaggcaatgagtccagtgtatgatgccaactttttgtttttttttcctttggccaaccctattacacccctttggggaagtttcacaaccctggccatcttcgcagcagcatacaagaagttgtgtgtacaccactagtctaaact

SEQ ID NO: 10148 - DNA, 201 bp, Bos taurus
cagaacctaattcgggacaagggattagcactgccacgtggcccgggtctaaagccatctgctccactgagcttgaaccaggaagaagtcagctgatgttgtacactcttctttcccgcattttcaaaaccagactggagatggggcatgatgttcactgacccactaaagtatcagttgagatcaggtagttcctctgct

SEQ ID NO: 10149 - DNA, 201 bp, Bos taurus
cacacagcaggggcctgtcacggggcactcaggaaaggcccggtgcctttttgcaccgtgtacctctaatctacatcataaatcaagtgacgggctcacgatctgtcctaggcccaccgtaactaggtgctggaggttaaagagtgagtaagacacactgctggctcttgaggctctcacagtcccttagggaagtgcatt

SEQ ID NO: 10150 - DNA, 201 bp, Bos taurus
agaaatatcgggagcaggaaaatgctggttttctcagcattaatctgagatgcaggtttcagatgttttaaggggaattattaacaaaaggatgctcccataaggacagcgagatttgcaggcatccagatggttggcccttccctcaggctctctgctagggatttctcatgggtttcttcattaatttccttagagaca

SEQ ID NO: 10151 - DNA, 201 bp, Bos taurus
acaggtttctttaaaggagaagaaagtgtgctgaattcccactgattttaatgtgaccctggtcggtttgaaggtctcggcttccataaatcaagtgcctccagcggcttttcccttttcacctctctaacccttcccacagctccatctcaggtccggacttgcacgactgagtgaggcggccggctgcccagcggtcag

SEQ ID NO: 10152 - DNA, 201 bp, Bos taurus
ttcatataggtcaaagaaacctgggccacttgagtgttagaacatatcattaatctactctagtgatgacaacatgttaatcagaccaaatgactaaaagcgtcaattatatcagagtactgataaaatatgcggactccggaggacaagaggtaaaccttgggagattcaaggcctagtggcccagtggtctagaacacg

SEQ ID NO: 10153 - DNA, 201 bp, Bos taurus
ggaccacgtggaacatttaagggcctgctgggaatggagggcaccatctctgtccacgtgctggttagccagcgctcaattacataaccgtgcttagctgcggcccttgggagtgctgggtgatgcactctggttgcctggttggaaagcaaatgaaagcagtttgtgagcacatagcattatctctgccccaaatgacca

SEQ ID NO: 10154 - DNA, 201 bp, Bos taurus
ctcacaagaccagtttctcagggttgtatgaattcctgtgcctcagaatagttcatttggagaggccatttaatctcttaaatctcttaaaagtcaaatcgttgcctccgtgggcactaacgttccccatcttttggtttgggaatgcatggggcatgtatagagacgaaatgggtcctgtgtcatctcctggctctgcaa

SEQ ID NO: 10155 - DNA, 201 bp, Bos taurus
atgatcattgcctggaatttcttggactcctataatttcttgactctctaaaagctaatagcacccctgaaatctagcagtggcctccatgacctttcttctggcattcttctggtggttttcagaagaaaaaccgctcagtcatgtgtgactgtatgtgaccccatggactgcagcacgccaggcctccctgtccatcac

SEQ ID NO: 10156 - DNA, 201 bp, Bos taurus
cccagtgcaccaggcatttgggggctagaagcccagcgttctcctgcctgtgaccctcagcagaggcagggcaggaagcagatgacccgggcctggcagcgtctgagactctttcctgagcattcttgtaaaaaagcaaccacattgccacatgtgcctggaatttgatttccaggccaagtgtcagcttttccatgctaa

SEQ ID NO: 10157 - DNA, 201 bp, Bos taurus
aaatggaataaaacaggtacagaaattaaacttgttaaattttttgtaatcgttgtaataggaagtgacatctcataaacttgtctaggaagaaaatcctgacctcctgtaataaagtcaatatgtgcagagaaatggcatgagggtcaaattaagcgttgatctgccttccctggaagaaataccaggccacctttggtc

SEQ ID NO: 10158 - DNA, 201 bp, Bos taurus
ggatggaagggagagggaggaaatgaggggaaaacagggacagagaaagaaggagagatagtaagaataacagaccctgtttatggttctggacttctagggactacacgcttacaggccaacgtctaacagaagaaaatggagcagtactttattaaaagcagagcaagcacagttctctggcaaactaggctagaatcc

SEQ ID NO: 10159 - DNA, 201 bp, Bos taurus
cccacctttgacaattcttactattaacagactttttactctttgccgttctgattgctgttcaatgacaagcattcttggccatttacatatcttccttcatgatttacctatccacttcacacattctttctgatgtactctcttctttttctgaataatttccttaacttgaccaaagggcctgggctcttggcgact

SEQ ID NO: 10160 - DNA, 201 bp, Bos taurus
tctcccctttctccttttctggggctggcatatgatgcgatggggagccaccttgggatacaacaccctgaggacagcagagcagcaaggtcaaagacacctgacccctcgaatgactctgcagagcaaggccaacaagccagccagactttcagagagagaaacaaactgctatactctttatgcccctgttacctgggg

SEQ ID NO: 10161 - DNA, 201 bp, Bos taurus
aaagcctacaatggctaagatgcctctgagggtcacatgattctctacttggaagtcagcgcacttggtaaactacatttaccctgtcctagaattatttgcaaacttggctatgagtttaggtaaaatgggtcactaccttttacaaaggctctagaaaaatctacagatccaaaatacctccctctttccccttggtca

SEQ ID NO: 10162 - DNA, 201 bp, Bos taurus
ctgctgttggtgtcaaaatcacaggtgttgttacttctagtgtatgttgttgcctagattcatcattgaaggagattcttcatttcagttagaggttagtgagaataaacggtctaatttttttttcctatccaaggtcacaaaccccatgaatttgacccacagaccatcaaggggtccaagggccctggattaagaggc

SEQ ID NO: 10163 - DNA, 201 bp, Bos taurus
gtggaacctggcagccacaacccctggagcccacagaaaccagctcggtgagaagtccgctcacggcaacaaagaatggccccgactcactgcaactaggaagagcctgctcagcgaagacccagcaaaaatcaatcaaccaatcatttctttttttttttaaagaaagatttgagaaagggaaaacaaaagagaatagct

SEQ ID NO: 10164 - DNA, 201 bp, Bos taurus
cattggtggcaagtttctcatttggtaaaaaggtgtctattatacatttcaatcagaaacaataagaggagagatttcctgggggccttaagacactgtaggggtctattccactgcagggggtgcagtttgacctgtggtcaggtaactagggggcttcccaggtggcgctggtggtgaagaacccacctgccaaggccg

SEQ ID NO: 10165 - DNA, 201 bp, Bos taurus
ggtattaagatggtgctgtagcttctctttttattcatcttagcagtgaattcggtggagccgtgcaccagagaggttggctgcatgtttgagggcccgcagtgcagaaggctgtgctgtcggttacctaaccctgggctcggttagcccctgcttcctgcacttccccccatctgtctgcagaggaggaagggtaagggg

SEQ ID NO: 10166 - DNA, 201 bp, Bos taurus
gggaagtaatgaacaagaccttacaaacatcctgtaaattcatgagctagagaaaaggatgcaaactctttaagtattagcagtggccttgaaagtaacagaaatgagagaagaggaccaggtgaagaagagagaactggggaagcgttggcagttgacactttggccttggcacaagggagaaagccaggagacttagtt

SEQ ID NO: 10167 - DNA, 201 bp, Bos taurus
tgacatcccaggatcgtgtgaccaggaagaggaaaggctgaggtttgacctggccttcctaacgctgaatcccctatccgttctttctgcccttgcagggatcatcaaggcaaatgctctgggggccaggtagctaatctaaatgagagaagctgactggagtagaagacattagggagtagtcaggactctggggagtca

SEQ ID NO: 10168 - DNA, 201 bp, Bos taurus
cttgggtgagaagggggtgtggtatcctctgagacttgctaagatgtcccctgggaaaagtcattgctgtcgttcaggatgaagattgcatttccagtacctcttcccttctttcataaaaaggcaaaatataccccagcaacaactcgacttcctgtttgtttgtcaaaggaactctctggaaaggagagtggggtcccc

SEQ ID NO: 10169 - DNA, 201 bp, Bos taurus
tggtgcacacgtggtgatggagttcagagcccggcagcatgttgtcatttaagatccctgttgttagaagttgttggcaagcttcgttgtcatggccaccatgatcacaaacaagacagttagttgtatttctcaagtctccctttcagactcaaaggcttctactgtatgactgtgaaggaacttttggaaagctttgtc

SEQ ID NO: 10170 - DNA, 201 bp, Bos taurus
acaacaggggttcaaggcttctccatctatgattcaacccgagttcctcccgttccatgccagggtggcaagaccccacctcttcatctccaagtgggcctctctgtcattggggctacaaacgagtggagggtctgtgtctgcttcccccggcagggtgggctatgggagcccccaggcacccccatgcagccccaggtc

SEQ ID NO: 10171 - DNA, 201 bp, Bos taurus
tgttccaaatttcagactcacagaagacagatactgcttggtataggatgggtcggggggcgaatcctaaattacccacccaggagagggccaaggtcactgaggtcagtaggaccacaggagccagaggagagagggtggtggtgagtcagacgtcctaggaggggtccgctgtagcatgatggtggcccacaggtagga

SEQ ID NO: 10172 - DNA, 201 bp, Bos taurus
tcgtccccttctcctcctgcccccagtccctcccagcagatttatacattaaaaaactagctgaggcggttgcggtgggagagcagcaggccaagagtgtaagttgctcaccccaggggctgcctgctgtcccgctgccctccgagtgcagccatgtccgaaggagaagccccaggagggagtgaagatggagaaggacca

SEQ ID NO: 10173 - DNA, 201 bp, Bos taurus
tgcaagaggcacaaatgcctccgagaccataactggtttaaatggtcatgttggtactggagaaagagaggaaagaaggctgaaccagtaggctggagttagagtctgaaggactttttactctagagtaggcattgggaaaaggagtacgtcaaagctgcatattgtcaccctgcttatttaacttctatgcagagtaca

SEQ ID NO: 10174 - DNA, 201 bp, Bos taurus
agaagactttaggcattccccagaggatttcaggcggtccccggaaaacttcaggcgccttgaggaggaacacttcaggcggcctcctgaggaggacttcaggcgctctcgggaggaggatttccggtacccaagggaggaggactggaggcggccacctgaggaggatttcaggcgacctcccaaggaagacttcaggag

SEQ ID NO: 10175 - DNA, 201 bp, Bos taurus
tttgattaaaatattataatgctttataaataaaggtatcagtgtatttaatgaaattggtctgagtgcaaaatggcctataaaagagtgagccagattgctgtttttcaaactgtgctgcaggaaacttttcagaagctgccaggggccttgggaggggtccaagtagtgtactaggattcttcttcaccccagcctctt

SEQ ID NO: 10176 - DNA, 201 bp, Bos taurus
tcgaggcgaaagcaaaaagatgacagtgaagacaaataagggacagaatgaacaataaatgagtaaaaagacagagagattgagaaaatacctgggccaggaaaagaaacagagaaccgtaaaaatagacctgagaaattactatgtgcgatggcacccactccagtcctctggcctggagaatcctgtggacggaggaac

SEQ ID NO: 10177 - DNA, 201 bp, Bos taurus
ctcggatctggatggatgagcaggatttcatcataggattggagagaagggcgtcccagaaagaatgatctggaacaagggccaggggaaacttgtgcattgtttaggcttggatgagcagccttgaggaggtggagaggctgcaggcgtggctggacacatgacctgggtcacgtgacctgggaaaggcctgttgagtct

SEQ ID NO: 10178 - DNA, 201 bp, Bos taurus
aaaatttttcccagttaaaatcacacataaccctacacaggcacaggaatacacacacacacacactttttaaccaaaaataaaatcatataaaaatggctttctaaccagtttatttccctcttaaaaataaattgtgaatatctgtacatgtcaatgtatagtaattcttattgtttttttctaatatcatagagcatt

SEQ ID NO: 10179 - DNA, 201 bp, Bos taurus
tttgcacagataattggaggaggaaatggcaacccattccagtattcttgcctgggaaatcccaaggacagaggagcctggcgagctattgtccaagggttgcaaagagtaggcctagactgagcacatgtacacacacatgggcagataatacaaggagctcttacatatcctttacccaacttcccctaagttcacgtc

SEQ ID NO: 10180 - DNA, 201 bp, Bos taurus
cataaaggtaaatctcctttatgctccctggccccgaggagcccacaacccagagagaatgacaaatataaaagcaagttattactacctagtgtgcccattgtgatcagtgctctaagagcagtaggaaaaaaggtgctcaggaggcactgaaaagaaattgatcagttttccaggagagtgagaagaaagtttgaaaga

SEQ ID NO: 10181 - DNA, 201 bp, Bos taurus
ttagcttcgtttgtccttcccaacctctcctctccacagctccacccctgccagtacttgttcaaatacacttataggggaaaagaatattgaagacatttccacttagacaccttcatatgaggaagaaggaatgttagaaaatgtatttaactaacaattgtttagcacctgctgaaactgtaaaaaatgtttgatagg

SEQ ID NO: 10182 - DNA, 201 bp, Bos taurus
agatttgaggaattactctacaagaacagggcaggttctatttttgacatttcagcaatgagaccacttgtatattacggcctgatttgatttactgtacgaaaataagagttctgtaatttgtaaaagacatttattacatgagtccaaaaattaggaaaaaaaaaaaacatgcttagtgtctctgtctatcccatctgg

SEQ ID NO: 10183 - DNA, 201 bp, Bos taurus
ttcatatatcaagttcgtagtggccatctgttccctccgaactgctgcgtctccctccatctgccctgtttttcttctgctaatcgggtggcaagggctcagatgatcgggaagtttctctctgacttttgatttgtcagtcatcatcaagccagctgtgcatttgtaacagactcctccgacgggtggtggtgaatttaa

SEQ ID NO: 10184 - DNA, 201 bp, Bos taurus
aatttccacaagtacttaacctggctcagaagtcatgacctcactaaaagtagacctctcctcctccccagatgaaattgcaaagcggttctttgccgctctcctcccctgaccatcattcttggctccacgtttttcatccttgaccctgaattccagataccttgctattcaatttatcagttaatgaattaacatgta

SEQ ID NO: 10185 - DNA, 201 bp, Bos taurus
ttccataatttaaaaaacaataagaaagtaatagccttaaagaaaaggcaaaccaaaattttaaataaaaaactgcaatgaaaacaaaacaagaaatgaagaggctaatgtgcacaaagttcctacaactatgccagcacaaattgatcaataaatgtgagctcttgtgattcatgcagtacatatatatattaagcacca

SEQ ID NO: 10186 - DNA, 201 bp, Bos taurus
gtattttttggattaaccacaaaaaaccttgtgccctatgctgggttgatttggagggaatggtgttgggggaggccccattgcagtagggatcaagtatacatttgagaggctgattctattattgtcatcattattttattgtttctatcactgaagaaattttgaaatccctattaagggaaataaaaaatctgattg

SEQ ID NO: 10187 - DNA, 201 bp, Bos taurus
gtgagatactggaagcatcacagggtggagtccaagtgggaaagcaggacctggagttgaggggtcacaggactcaggaagcctggccagttgcccacctaaggggtaggacagaggtttttatagtcccaggcagagggagcgtggtgagcagaggtttctgttagacttctaactgtcttagtaggacacagggccttc

SEQ ID NO: 10188 - DNA, 201 bp, Bos taurus
agtttattggtttttaattttggctatatttgttaattcactaattctatctcttttctttagggtagatgacccttaaaagctgaatttggcctttttgctttatggctatatctctaacatatccaacatataataaaatattgaataaaatatttgataaagaatgagtgagtggattttctttgtttcattttacta

SEQ ID NO: 10189 - DNA, 201 bp, Bos taurus
tgctggtctgcgtgctggccgccgtgtgcttcgcttccctggccctggtccgccgctacctgcagcacctcctgctctgggccgagagcctcgactcgctgctgggggtcctgctcttcgtcgtgggcttcatcgtggtctcgttcccctgcggctggggctacatcgtgctcaacgtggcggccggctacctgtacggct

SEQ ID NO: 10190 - DNA, 201 bp, Bos taurus
aatgttataagctaaattttcttgaaaaaaaatattataaactaggataaattatcagttatcagttattaatacatttccttttgagatcttgtgtcaacgtccgaagggaaataaaaacctgcctaggccccagaacttgcccagtgttcatgtatatgactgtggcatttcttaatatctgttaattggctgattaag

SEQ ID NO: 10191 - DNA, 201 bp, Bos taurus
agaaaggaagctacagcccttaatcacggtaatgacatacatcacttttgctttttctatttgtcaggaactgttaccagatccagcccacacttgagaggaggataatacacaaggataagaatcagtaggagccaccttggggactgcatatctaccagggatatagaacaatttttttctgtgcatgtgacttggtgt

SEQ ID NO: 10192 - DNA, 201 bp, Bos taurus
aagagatttttaaaaaattcctctggacatttatatctatgattgcaataattaccaaaaaaaaaaaaaccttacagaaaagttaaggcaatgttcaaggcaaaattaatagagcttttttccttttaacacctttcatcagaccgttgccttcttttccgccatagcagccatcgtcagtatcaaatcctaatgcgctgc

SEQ ID NO: 10193 - DNA, 201 bp, Bos taurus
tttttggccttctacttcctttcttcatgtgcccccatgagatatttgccaagtctctgagtcctatttctacagtattatcgttacgcattctgcgaaccggctttctaagagtcttaggaagaaaaacattgagtaaaagcatttgcttacaaaatacagtattttaagcggttgaccttgatttgttccaaatctttc

SEQ ID NO: 10194 - DNA, 201 bp, Bos taurus
agagccggaaaatgcagaactggggcttcttgttagttcagcagggcgagagagctggctatccaaaagtcagaaaaaaagcagccaattctcaaagctcgacatacagtcagctagtcataggactgaaataaacttatcaggtggtaaagtaagacctaaaaactgtattattattcttggcatattgaatttcaaatc

SEQ ID NO: 10195 - DNA, 201 bp, Bos taurus
ggataggctgagccggaagaaacactttcactttaccagcgtccttaagctcattttgttcagagtgaagaaacaacattcatttgctggcctactgacaggtgtatccctttcattatgggaattagttctgtgatacctaaagtgtatacaacttgagcatattcttgagtgtggccatgtatcttggattcataaaga

SEQ ID NO: 10196 - DNA, 201 bp, Bos taurus
taagagctataaagaaatcacgttttctaattaaaagtacaatttagaagattaaaaacaatggaacagatccttgaaaatgtatataaaaattcaaatagttagctccttgtcaagccctcctgcagtttgagtgcatattttctttcaataatggttaaaaatatccaaccaaacagaaggcaccagggagctcagtct

SEQ ID NO: 10197 - DNA, 201 bp, Bos taurus
atttctgatagttgtaacagcctattttaagctgataatgacaacttcaattgcataaggaactgttttacttctgctctattttattcaagattgacaatttatgtctttttaaattgtatacccattaccaagttattgtaactatagcttttttttagtacttttgtcttttaaagtttatacttgtactaaaagtaa

SEQ ID NO: 10198 - DNA, 201 bp, Bos taurus
aggagatattaaggctaaactatattgtacaaatcaatatctaatcaattcaaaatgattgatgaccataaaagcagaggaataagaaggatctctctctctccacatgcaagcaccaaagacaggccaagggaggacacggagagaaggcacctctgtgcaagttaggaagagcacctccaccagaaactgaatcaactc

SEQ ID NO: 10199 - DNA, 201 bp, Bos taurus
gctggagacagaatcagccaggtttttggagagcactcagtactcacccttgcgcattcagtaaaagcagccatatcagaacactctgatatctgccatgggtacacattccagggccaaatttgaccaagtatcctgatgagatctggcaattgctcgacagtgtgcaaagagcacagttggcaggaaggctcattccgt

SEQ ID NO: 10200 - DNA, 201 bp, Bos taurus
aaaggtttgtgcgcccgatgcacagtggggccagaaaaactgagacactggagtctggaccagggaaaggctgattgcagcgccaagcaaggaaaacaggcggcctgtgctcaaaacccctgaactccctgatggtttggggggagaaggttttataggcaaaatttggactcagagttgcagggtatgtgactttcttct

SEQ ID NO: 10201 - DNA, 201 bp, Bos taurus
agaatacacaccatggagtagggatcctgtttcaaaggaagcttctgatgtatttggagaatctctgatagtgctgagaatgccaggaatgggggttgataccctagcccaagtctcttgttttacactcttatttttcagtgtcacagacatttgttgctgtttagttgctacgtaatgtatgactctcttgcgacccca

SEQ ID NO: 10202 - DNA, 201 bp, Bos taurus
aggaagaactgtgtggggaggaaggggataggtggaatagagggatatttttattataagcctttctcaaccagtctatggcctggatgtagtaatcatagctgtatattaatctaaattatatgtacatgatagacagctcatcctttgtgggcattcattctcagcttatcagctaagacaactgaaggggcccaaagt

SEQ ID NO: 10203 - DNA, 201 bp, Bos taurus
tctctttttcactctttgtgaccttgatgaagtcagaattaagtggcactgttgaccaaacttgcaagagcgcacactgagaagagcagtcaaaaagttttatttgcaaatgactcaagcggttcaaacgactacaagggtgaggagacagaagtgcaggaagtgactgtcgtggggttaccgggcggggcaccgctagaa

SEQ ID NO: 10204 - DNA, 201 bp, Bos taurus
gacttcccaagttggggagcagcaagtgttctgtggctcagcagttacaggaaacgggggatggggtacaggcttccgtggcccaagtaattcgaatttgcaaactctctttgaagattggaaatgcacactagaaaataaggactctggatagtccttcagtaaggaaacggccttatctttgtttacccactttctccc

SEQ ID NO: 10205 - DNA, 201 bp, Bos taurus
taaaagaaaacattttcatggatatctaaaagtactgtgggcctgaagctctgtttcctagtacctaatgcataagtcaggactgttttctggtgggagcagatttcatttccctcaaggggccttgccacaaaaagaggagaaggattttctgtcctgtggatcgctgtgatctttgagagcatagtattagagttaacg

SEQ ID NO: 10206 - DNA, 201 bp, Bos taurus
tgttccatttacagaccacagacagagtagactgagcaaaattcttaagatgcccaggatttttggaatagtacatgagctttggcttcaacttaaagtagccagctgcattagccgctgacaagagggtcagcttgtcctctgaagctttgaagtcaggcattgatgtcagctcttgctatgaaagtcctaaatgacttc

SEQ ID NO: 10207 - DNA, 201 bp, Bos taurus
ggaatcaccaaatacgtactcttagaactgtgcatgtacaagtgactgcaattcatttccaaaaactaaacttcactgtaggccaagtgagtttcaagtactctgacctcatagcccctgaactctgtgccatagaactacaggctcctacgctacatctatgctaattaaatcctatcctcagggcctctctgcttggtt

SEQ ID NO: 10208 - DNA, 201 bp, Bos taurus
ttagttcagatgaacttactagatgtataaagaacattccatccaaaaaggaagaacagacatcccatttgaatttatatgaaacattctccaaggaagaccacaggccagactacaaaacaagtctcaataaatttgaccagactgaaatcatgttaagtaccttttctgaccacaaggtaagtgaattcagaagacatg

SEQ ID NO: 10209 - DNA, 201 bp, Bos taurus
atatgagatgccactcaaaatcaggaaaatcaatctttcttcaccttcagttgctctcacatttctgctctgatctacagtgtgccaatcacactttttttcccctggaaatttgcttgtcacaaagatcagaggcattattggcatagacgggcccgtgtgtgtgtgtgtgtgtgttgggagggggtcggttcctgggag

SEQ ID NO: 10210 - DNA, 201 bp, Bos taurus
gaacaagcaatatttaatgaaaacctaatacgactaaaggctcttagcatgatctttacaaaattcaaagcacaactactgtatctgttcccacttgaaaccttatgaatatcttccatcccatcagggtttcaatctcatttggaaatatcacacattgcagtctgcgttctgtaccagccttaagacagttaccccacc

SEQ ID NO: 10211 - DNA, 201 bp, Bos taurus
ctttctttgaatctcctccccatttaggttagcgccgagcactgggcagaatcccctgtgctctccggtaggttctcagcagctgtctgccctgcacctcgtagcacacgcgtgtcaatcccaatttcccgattcatccaactcccttttagccgcctttggggtccatatggttattctctacttctgtatctctatttc

SEQ ID NO: 10212 - DNA, 201 bp, Bos taurus
agtttagtacaaaaaaacaaataaatgaaagaggcctcatccagcccacagattgggttgcacagtaaatattgcatttcttaattttgtttaaataatttatatttaacccagaggccacatttggctggactgacaggaaaattcaactcaggcattcagttcagttcagttgctcagttgtgtccaactctttgcgac

SEQ ID NO: 10213 - DNA, 201 bp, Bos taurus
aatcatttcttggtctaattgctaaaattgttcaaagtctagaagcactccatttaaattgctagcaaataatttgttggcattttaggccttttattttggggggaagggacatgccttcaaagtacctccttcatttggaacatttgtgaaacaatgacagcaagtttcatctccaaaacaaggaacacaaaagcaggc

SEQ ID NO: 10214 - DNA, 201 bp, Bos taurus
aacaatatgatacagtctgtctgttaatactaatcagtctacatctgtgctgataatccacatgatttgtaatgaaaaatatcttcttactgatgccgttattataatgttgtgggctttgggaagtgaagaggtggtctcatcttacaggtatctcctaatatcacaactgaaagtgtagactttagaatactctctttt

SEQ ID NO: 10215 - DNA, 201 bp, Bos taurus
gccagttttgtgagagagggattccagaggggaaatgatgcatttgtgtgtggaagcctttgctctgagtcttatggtggagctactgttgatcggcaggaacagaagtaacgagaaaaccagacatggagtattgcagaataaggcttccctggtggctcagatggtaaagcatctgcctacaatgtgagagacccgggt

SEQ ID NO: 10216 - DNA, 201 bp, Bos taurus
ggaggtacttaaaccagagggtggagttctggtctctcagattccagagagattcctagtcgctttcatcatgtgaagacagaaagaaggcatcagaaacgaaccaggcaaatggccctagtctaacgacactggcaacacgagcaggaattccagtctccaaaactgtgagaaatgaatgtctattgtttgttagatacc

SEQ ID NO: 10217 - DNA, 201 bp, Bos taurus
tttctctccatcatacatagctatgtgcctcttttcatacatgttgatgaagatattttactaagtatatcatttttctaaggtcaagttcacttgtcttgctggccagtcaacttccataagttctacactagcaggacttcccctcaactgcacaaaatatttctcttcttggttcactctctagactttatatacaag

SEQ ID NO: 10218 - DNA, 201 bp, Bos taurus
tacagttttttctgtttcctctattgtattactatttacctgtttccataatttatttttagagaaacactttaagggagttgaaataagctctaacttattgagaaaagagtatcagaacatttggggcatatgttaacaataccacagttagctattagtagtacttcagaggagaacctctgggattatgcaaataat

SEQ ID NO: 10219 - DNA, 201 bp, Bos taurus
acggagtagacaacgctagaaagacagaaattagcgtaattgttgcttaacagcgagagtaatggtgggaaaaaatggaaagtaactgcaaggggtatgacctttcttttttggaggacaaaaatgttctaaaattagattgattgatgatggctgcataaccctgtggatgaagatactaaaaaagcactgaattgtgta

SEQ ID NO: 10220 - DNA, 201 bp, Bos taurus
acctttctaatcccaacgaagcacctacagcagtggttttcaatgatggaaaactgacattcttgtgtagagagagtcatgaaagagaggtgaattctaggtggctttctgaaatgtttacataccttatacatgatgtaatctgttagaaaattcagtcatactcctaaatagcatatacaagaaaatcttctttcagct

SEQ ID NO: 10221 - DNA, 201 bp, Bos taurus
ggaggctggaagtctgagatcagggtgctctcacgcttgagctcttgttgaaggcagtcttccggttttgtagacggccattttctaattgctcctctcatggtggagagagagggggggagttactctgtctcaaagaacactaatcccactcacgagggccccaccctcccaaacctaagtatctcccaaagaccgcac

SEQ ID NO: 10222 - DNA, 201 bp, Bos taurus
ttattctagatgcaatttcattagcaataaaacaaaaattgatacagcaagaataattctacttctagaagttctgcaagcaatgctcttgtacaagctacaggaaatgtcgagtcacaacactgcagggcagcttccgggctaagtcagccctgaaaagatccaggtcatcagtaaatcaaggactgcaacaaattctta

SEQ ID NO: 10223 - DNA, 201 bp, Bos taurus
gaaatgtactgctaaactgattcactaatatattatttactgttttgtcctgacattagtaacaaaaaaaactagttgagtagctttcctcttctattctttgaaatagaggcatattgtttttgaaggtttagtaatggttgttacagccttcagatttgttgccttttgtagggggagagttttgaatactaattaatc

SEQ ID NO: 10224 - DNA, 201 bp, Bos taurus
cttactaaataggaaaagctgtcctcatccagcaactagagactccaggaagaaaaataattaggagcacataaatagctggccagccctgcgcggctgcgctgggagagatggaggcggggtgcggggtggggggcgctgtgcccagtgctcgcttcacccggcctgtgaccggtggtgtcagactgtaatgctgtgtta

SEQ ID NO: 10225 - DNA, 201 bp, Bos taurus
ctggcccaggagaattatctggggagcactgcaaacccccagggctcccacagcacagctgctgcagggcgagcgagggagggacttatcagggcagacacgctctcagactcaaggaggcccgagctgccgacaggcatcatcagcatgaaagaagggacatccatgtcccgcggggatggaccagagccgtcaggacgt

SEQ ID NO: 10226 - DNA, 201 bp, Bos taurus
ccagaaaacgctcgcccagccccagcctctgctgcttccttcttacgtcctctcaccagtcgcactaaaccgtgtgtctctgggccgtccaggtctctctgctgcctctgggcacttactaattcatgaattagtccacaaatactcagtgagccctccccacttggcaggcacagttacggcccctggaaacgtgccgcg

SEQ ID NO: 10227 - DNA, 201 bp, Bos taurus
tggaagtccagctcttctagtggtctctgtggatagcacatgcagggtgagatggggggtttgtcactgtctgtaagggacagttatctcctccctctttgatctttcccccatcaccccggctgtgtgatgggatcagagtaaacgtaggccccagttacagtcaggaagggtggggtcttgcttccacttgacctgggt

SEQ ID NO: 10228 - DNA, 201 bp, Bos taurus
tggaaagcatagtttagtaaggtactgagagtttagtagagtgctggaaatgagctaaaaatacaagatagaatattagaaacacaagaagagatttctgccaacactgaccaaggctttgtctccgcaggcttgctaataagccactaattccttaattcccagcgtgtgatcctgtaaaggtccctaagcatatgggag

SEQ ID NO: 10229 - DNA, 201 bp, Bos taurus
ctcttcaggttgccatggttcagttcactgatgaccccaggacagaatttaaactaaactcttacaaaaccaaagagactcttcttgatgcaattaagcatatctcatacaaagggggaaatacaaaaacaggtaagacccccaaaagcccagctaaaacccaaagtaattgttactaattatataaatgattttttgaag

SEQ ID NO: 10230 - DNA, 201 bp, Bos taurus
gtgtgcccggctcaccaggagagcgaggtaagagggccgtgcctcttgctgggtgcgctgacacgggggtagcaggggagctcatgcagggacagcattccgaagaatggactaaattaattctgccccatctattctccagcttcttgtttgtttatccccaatattgagaaagttgagtaagctacaacgtgtttatta

SEQ ID NO: 10231 - DNA, 201 bp, Bos taurus
actatgttccagggcctggtctaagtacctaaaaaatgttgtttcatctaattcttacagcaatcttaggatgcaggtacaattactacacccatttcacagatgagaagacagataataatggccacaaagtcagtaaatggtgggacaagtattcaaacccaggcagtctgattctagagcctggacgcaactacttta

SEQ ID NO: 10232 - DNA, 201 bp, Bos taurus
agtgcgtcgtcgtggagaagccctcctccagccccaggcgcgagagccgagatcaaagcgcaaagcacaaatgctgctctgatcaaaacacagctttcggcgtttgatgtggcccagcctctattgaggtaaggacaatggagtagtgtggccaggggactttggcaataagtataaagcaaggtgcactccatcaaataa

SEQ ID NO: 10233 - DNA, 201 bp, Bos taurus
tgtagcttccagcaagatttccaagactcactatcattaagagaaacagctgttttgaaaggcactgtgcttgcaaactcttttattcccactaatgtcagcttttaagtagcgtttagaataaagaagaaaaaatttccttttgccataaaaagaaacaagatggtgtggtctacatcaaaggttcatgtaattatcatt

SEQ ID NO: 10234 - DNA, 201 bp, Bos taurus
tcagcgggtggcgctgtctctcctgctcggccacaccctgctctggtgggggagagagtcttggtctcggacctggcatttctccacctccccccttagtcgctgtggggccctgggtctgtgagccttggtttcctctactgtggaaggagggtgataagatggtgtccttggcagaatcaggtgaggtgataattcaag

SEQ ID NO: 10235 - DNA, 201 bp, Bos taurus
tttttgagacatattagagcccattccagcttgcccggccctttgcatgaaaaaaaaaaaatgctttaactaaagtaatttctttaaagttacataaaaagatagacaaggccaaagattctcacaaaatacaccatcaaaatgcaattgggttaaggtataaatttcatatccctagggaaacagctagacaaatagtta

SEQ ID NO: 10236 - DNA, 201 bp, Bos taurus
ttagtgtctggatttacccaggaggcctgagagttctgcagtatttattgtactatgatactcgttccaccttaatgcaagaggaccggtctttcacccctaatccaatcatttattggccggtggtggaccctgggatggtgagaataatccccagtgaagcagttccaattttctctggtgcaaatgtacagaaacaat

SEQ ID NO: 10237 - DNA, 201 bp, Bos taurus
gatggcctatgacctctctgtggccatctgtaagactcttcactacatgaccatcatgaggcctcagatgtgctgccttttgctgggaggggcctgggtcagggggatttttccatgccatagtacaacttcatgtatcaagtacccttctgtggttcccaatacaatagaccactttatgtgtgatttgttcccactgtt

SEQ ID NO: 10238 - DNA, 201 bp, Bos taurus
tgcctggggggatcacacaggttgttgcctatattaaatacttgacggagcagaagcagtgattcttattacagtctttgaccccttgtttggcctctacataaggtaggtaatcttgggctgcatgcataggactgggagtcagaaaagcctccagtttctcagcagaagtgctagaaggcagacgagcagtgctggttg

SEQ ID NO: 10239 - DNA, 201 bp, Bos taurus
ccttagcaattaataaacagtagaatgcccactgcctctttcttttggaaatcctcttaggtatcttttcaagatacttcggccctttttccacagcatctcacacgcccacaggaactcagacatctttgtcacctacaaagttgaagcacagctggcccaatcactgattctttcctctttaccctgctactaggtcta

SEQ ID NO: 10240 - DNA, 201 bp, Bos taurus
gcaagacttaaactatatgactgagatcactggggctgactgtgaccctgtgtacaaggtagccacatgggagaagcagatctacacatgttgttgagatggtcttgtgcgatgcagtcagctctcagacctctgaccccttgggaagaggaatcccagtcaatgaaaaatgattgactctgatcaacagtgagcaggaac

SEQ ID NO: 10241 - DNA, 201 bp, Bos taurus
agttagaagaagtctatgaaggaaatgaaaaataagaaatcacaaatttatgattcagtcatcaatttagcatttataatcagacatgtcttatgtattgatgtttttgttgtttagttgctaaggcatgtcatactcttggtgattccatgtattgcagcatgccaggctcctctgtcttccactatctcccaaagtttg

SEQ ID NO: 10242 - DNA, 201 bp, Bos taurus
acaataggtattcagcaaattcaaggaatctgaaatactgagtgttaatgtaaatattttctgattatctactacatgcagtaccttcattttagaacttcgagtatataatagaaaagaatatgaggacaacttcactaataaaaaaggtaaaagatgagggagaagaaaaaatgaagactgaatgttacctgaaaaagc

SEQ ID NO: 10243 - DNA, 201 bp, Bos taurus
cttccactatcccacttgcctttacggttattggtttagtcattcagttctgtactttgccaccttattttttggactttctgcctttcagttggtatatgctgtttaactctgtttgaccctggactctactgtgtccatgtctgtatttatttgctgttgattcagggctggtctcttgggcccctgacttatgccttt

SEQ ID NO: 10244 - DNA, 201 bp, Bos taurus
ttatggcctgtagggtttctgctgaaaggtcagctgttaaacatatgaggtttcctttgtatgttactttttacttcttcctagctgcttttaggagaagatgatggcaacccacttcggtactcttgcctggaaaatcctatggacagaggagccttgtgggctgcagtccatggggttgctcagctcagtcagctgaac

SEQ ID NO: 10245 - DNA, 201 bp, Bos taurus
aaagaagacatatggatggtcagcaaacacattaaaagatactcaacatcattaatcatcagaaaattcaaataaaaaatagaatgaagtattacctcacacttgtcaagatggccatcatcaacaagtctacaaagaataactactggagagcgtgtggcaaaaagggaacccttctacactattgattgggaatgtaaa

SEQ ID NO: 10246 - DNA, 201 bp, Bos taurus
tccagcatttctaaatataactaatttctccaaactaatttttccccttttgtgaaggagaagcaaataaaatataatgcaaatctatcaagttatgtacgttaaaaagggtcttatctaattggtgaattccttcattttctggtgcatttatttgttgcacatgatatataagcatcacatgcagcaaaaaatcacatg

SEQ ID NO: 10247 - DNA, 201 bp, Bos taurus
ttgcttactgaaaagaatcccacttacgggccagaggaggaggaggtggggaaggcgcaggaaatggaggaggcgccgacttcccctcccatgagccctcgcagttgtctgcgctctgctctgtaccagtttggggaagttgcccgagccctgtgtctcccagatgtgcgacctcattgagccacagccagacgagaagac

SEQ ID NO: 10248 - DNA, 201 bp, Bos taurus
ggtttttaccagtggttttacctatgggctgttggttgaagttgtccctcagtttctctccacctgggtcactttatagggcagctgtctttcatcagagggagcaaaagcaagaataagagatgatcaagacataatctagggtaagtttattcctgaagttacatttcatcacttttgtcacagaaaattagttaaagc

SEQ ID NO: 10249 - DNA, 201 bp, Bos taurus
aaccatcaatgatgttaagatttttctcaaatgacatatctaatcaatttaataactatacctacttaaaaaaaatacaaaacctgaccttttcttatcttctctatttctacatatctgatgcaaaatggaaccatttttcttcaggatttttgtaatttgtttcaatccattttcttattcatcctctattgtgttctg

SEQ ID NO: 10250 - DNA, 201 bp, Bos taurus
gaaggaccctgaaacactcctaagagggaaggagatcaaaataacaatgtagactctagtgagcttaagacaaaacagactgtgcttataatcataggccggtagtacctgactccaggtcctcctgtagaaaaattgatcaggaaatgcatggttctcagctaaagctccaatactttggccacctgatgtgaacagtgg

SEQ ID NO: 10251 - DNA, 201 bp, Bos taurus
ttgaggtctacttttcctgggcttcagggttgaactctttcttcattttggtttgtgccttcataaggtttgtccaatggtttatgtaagcttcatgtacagtgtgacttgtacttgagttctagtggaagaaggtgaagttttcttctttgttttcttctgataggcttggcctagtgaggtggcaatcctgtatgctga

SEQ ID NO: 10252 - DNA, 201 bp, Bos taurus
cttccagcttcctcctcacgcttcgcctacccagggttcagtgaacagtgtgaagagtgagacaaaatgaaacccctcctttgtagacagtgtttggcctacttcttttatgtactgtgctgaccttgtaggcatcttaagtgactctgtgtctaagggtattatgaatatgtctagtggccttgaagaaaggatagttat

SEQ ID NO: 10253 - DNA, 201 bp, Bos taurus
attcaggcctttgatgctttattttcatcttgactctcctctcagagagaagttgtagtttgatttttttttagttgcttattgtggaaacacagagttaaacacacacccaaaagggccctcacctcccagacagttaactctgaaagaatctgaaggtccttttgttagtctattgtctctctgcacagaggctgttac

SEQ ID NO: 10254 - DNA, 201 bp, Bos taurus
gctgccctattatggctagcttaagtcaacatgttcggactagttatggctgttgagagccaaaaataatagagaactcacccttgaaggctgcggtcataatttcttgacaatccctgaaacaagagatgatcatgttgattagtcttgacttggagccattagggagaaagtctaaaacaggtttatttgctttggtgt

SEQ ID NO: 10255 - DNA, 201 bp, Bos taurus
ttgagaggtgaggtctgtgtcctcttgcccttgacaccctaaccaatacaatgagggggagtggcactgtgtaagttgtcagatctaggccttaacaacttcacatctttcatgtcctctttcctggggtatacactgctagaaccaatatatcatgttgtgaggtagccaagcagtacatacagagaggcccaagtggag

SEQ ID NO: 10256 - DNA, 201 bp, Bos taurus
tcactctttctcattcatctcattctccctaaaagacaaaaaaattactcttcctttaatagagagaaaagacaactaaaaaatgtaacataaatatcaataaaaagaaggaaaatcatcaaccactatctagcctaatacacatcaaccaattaaataggaagacaatctttagaaatggaataatactcaagccaggaa

SEQ ID NO: 10257 - DNA, 201 bp, Bos taurus
ccataagaaaaaaaggaaatgtaatacatgacttaaagaaagtagcaagtgataacatatgctatagttaatgacacgttctccagttttccaatctttacaattcttaaatgaaaatgtttccatatttgtaagtcccataccagtattttttctgtcctatattaaaaacaatcacaggaacaaagaggtacatgaggg

SEQ ID NO: 10258 - DNA, 201 bp, Bos taurus
tacaggagtatgcaaagaatataaagaattttatacagctcagtctgttttattaaaacctgtattggttgtcacatagctcattaattgtgagacctttaatttgacattacagttgctttctgtactcttctgctgctgcttttgtcctacttttttcaatatctcagctaacaagtgtttgcatatttttaaaccaaa

SEQ ID NO: 10259 - DNA, 201 bp, Bos taurus
ctaaatggaaacagtgaccaccaggaggaaaaccaccatgagccagattctaaccatgaaaaggctttcagccacttaacatgtgaatttagaaaatcactcaacctctgaaaaatagaaatggtcaagaaaaatcccaataatatctaaaagtaaatgagagatcagtggaaatcaatattccattcagtcactacttta

SEQ ID NO: 10260 - DNA, 201 bp, Bos taurus
agaagtgtagaatgaagtttcttctgttgatactagctctgcaggtcgctgcttctggagctgccccactgactgactatccaagccctgaagaaaatgatgtggcattcgctcaagtaagaactggcactatagaatttatctagcctgatttttgtctttaagatttatttcactgacctgttttatcctgaaagtact

SEQ ID NO: 10261 - DNA, 201 bp, Bos taurus
ctgcagaccggtgagctcccaagacctggggaaattgggctaagggtgcaggggggggacggagatgaagttagggaagcggcagggacgacaggtggtggacggtcttgtgggcctttgtacaggctttagagtccagaggtttaagaggagaaacatcacttgacttgcgtttaaaagaatcacaggctactctgagga

SEQ ID NO: 10262 - DNA, 201 bp, Bos taurus
cccaacttctgaaatttgacacatagctgtgaaagttgaattgaactgggttgaagtttaactgaatctttgaatcagtcagtcaacacattcttcttgaatgtttagcacagagctggacactgttgagaaatgcaaaggcaacttcagatatggtctctgccctcatggaatggttactctctttgggaaatgcccctc

SEQ ID NO: 10263 - DNA, 201 bp, Bos taurus
cttctcttgaaaggagacccagaagttaggacctggggacaaggaggcagagaaggtgggagaagccataagtgtttataatgtactctcttttcttttactctcatcccatgatgaaattctcatatattatttacttggggtggactacatgaaagttctttggaaaaatatgtggcgagttgtaaagggaaaatgatg

SEQ ID NO: 10264 - DNA, 201 bp, Bos taurus
gagttgttagtataatatatgttatcagttaatctgtagtaaaaccatcttttcaagtgagctttatcaacaagtcttcaacaacaaaccatgtcattctgtagagctgatggtttttagaggtatcatctcccaatttttgttactacaacaaagtccttttggtttttcttttgagtcttatatgtacaagagtgaatt

SEQ ID NO: 10265 - DNA, 201 bp, Bos taurus
atctgttatactgtgtacgatgttaaaactcacaagccactaacttatctttgttaatactgtctggatttgttttcatttcctgcagcatcattatgttctctttcttcctaactttgcttaccactttataatatttggtcaactgaaggtattgcctccataaactagttaaccataaggtttctacagcagaacctt

SEQ ID NO: 10266 - DNA, 201 bp, Bos taurus
agcatggtatatcccttcagctagccttctttaatatttttgtttgttttcagtatgaagatatttctcatcttttgttgtttattcttaagtatttcatatgttgatgttattttaaatactatttaagtttagattttaattgttaatagtatttttaaattccttgtttagttatttcttgtcagtatgtagaaataa

SEQ ID NO: 10267 - DNA, 201 bp, Bos taurus
ttcagttggcaagcttttattgaacttctcttacatgtactatacatgacacaggtaccataaagatttaaacatctctgcttttgaggggtctatactttagagcagtgacctctaaagtgttgtggcagaacaccaggaggatatgcaaaacaaatcactgttgcacaagaagaacatgttaaaatttcattttctatt

SEQ ID NO: 10268 - DNA, 201 bp, Bos taurus
acattacacagttttgttcgagtcttacggtgtaattaccattacacggtattataatgtaactgcaaacacttattgggcagaggaccatatttcattcttattataactcttgctaatcaacatacagcatataataggtacttaagacttcacatttttattctctacctttctagactgcatttctgttactcatta

SEQ ID NO: 10269 - DNA, 201 bp, Bos taurus
actggtgggtcagtcatcttaaaggccacatgccatccagtgagactgtcctgtcagctttccccacttcctgctaccatctcaatacagaggtcattcaaggtggcctaggttggaaatgacctttctatgatagtcaggtcttgtaactgttttccttacttattctttataacaaagatgataattggtgaatgtgag

SEQ ID NO: 10270 - DNA, 201 bp, Bos taurus
tctccaagggaacttccgtacatgaactggggtctcctgcattgcaagcaggttctttaccagctgagctaccaggaaagccccagaaagattaagcctatacttagtctgaaaaatacttaaaaaaatgtgccttggtagatcagagcatgaactccagggaaagagctacagggtataggttgaacattcttgaaaatg

SEQ ID NO: 10271 - DNA, 201 bp, Bos taurus
gctttttgggtcctgggcatttcttgccagcacaggacctctcttggggcactctgtgcccagctctcaatcttcctacctctccctctttcacaagtgagccaagcctcatggtctggaagctttttctgccgtctgctcacccttcccattatctttcagaggcatgattctgaacacatttcatatttctgacactgt

SEQ ID NO: 10272 - DNA, 201 bp, Bos taurus
atatttttaatcctcacataatcctttaaaataggtacaactattactcctattttaaccaaagcatgaagtagttaaggcatttgcccactgtttaataattaatagaggaatattcaaacacagctctaattctaacatctctcttctctaccactgttctcccctgctcctgggaatgtaaagtcatattagtcctag

SEQ ID NO: 10273 - DNA, 201 bp, Bos taurus
tgcggtaggcggtttggaagccttcgggtcagcgttggtaactgcaggagacctggcccttgtcctcatggggcctggtggaggtggcggctgtgtactcagaaggaagcagatagagcaatggagaagaactacagaaagacataatcatatattctttcatccattcagcagagatttattgaggcagtaccagacact

SEQ ID NO: 10274 - DNA, 201 bp, Bos taurus
attcccctagtgacctctcaccttccaaaatgaatccacttggttctcttcacatctctgctctgcttaggttgtaagcttttcaggaacagaaatcactacttcttaatgcttataaagcccctaacaactggtatagttgtagtttccctggtaaatagcgggtgaatcctcttgacatttagctttccttgtgttgat

SEQ ID NO: 10275 - DNA, 201 bp, Bos taurus
tttttgtggaacagatttgtacagtttgtgaaatctgtgcaaaattcccattacaaattacccaggtctggtcaaagggaccaaaaaatcccaggaagaatgcataggaatttttaaaaagtttaactgtcatgtctgttttttaagtagacaagtcatatagacattgaatagttttcatgacatgccttggaaaaggca

SEQ ID NO: 10276 - DNA, 201 bp, Bos taurus
ggccggcagcgtacttcttgtggccagggaagactggggaatttctcaaataaagatattctaatgagactgttaactccttcctagatgtgtggaaattccacagttgtgggtgggccaccatggtttgtatcaatcagaggatcatatagtaatctggcttcccaagtggttcagtggtaaagaatctgcttgccattg

SEQ ID NO: 10277 - DNA, 201 bp, Bos taurus
aataaagcaagggttatggagatccttcttcctttcactgttaactgaagaaagtgtttaggactttgtggcagcttaggtatatgatggccaccaaaaaactttctttcctcttgcacatgcaggtcatgaagcctgttctttaaacctccttgaatctgggttggcctgtgattgattacaggcatactctggagatac

SEQ ID NO: 10278 - DNA, 201 bp, Bos taurus
cggtcacctagccattcttctcaaaggaaaatacctaaggtttgttatctatctatctatgtatctatctgtcatctatctaacgtgtctaaagtcaactgtgtcttcatccaaggattattcccgttaatattttgctattattccttcatctatattgtctagtaaagcctatggtttttccagtagtcatgtatggat

SEQ ID NO: 10279 - DNA, 201 bp, Bos taurus
agcatcctagaactaacaccaacaaaagatgtgattggaatgaaaaggtaggaagtcaagaggtacctggaaagtatagtaggtaaattgtactgagattcggattctagacccagctttatgatttcatgggagattcttacagttactcaatttctatctaagccttaatttctgaaaatattatgtttgggaagcatg

SEQ ID NO: 10280 - DNA, 201 bp, Bos taurus
taccacagttatttgtgtacagctattccaagtatcttattgatcaaaaccatcatcactgaaattcagtaaactctcttactagaccaattctactcctgattctcctttagtctgtctttctgtctttgtaacttgttcttaaaactcccaagtgaatataagcaaacatattttgttatagctgttttaactcctcac

SEQ ID NO: 10281 - DNA, 201 bp, Bos taurus
attggtatgaggattactcatctgtgggctgagtgaggcatcaagatcctgggaagagtttggctgactgagttaagggttaaattttgctccaggccaccgagaagggtttgaacaaatgagctgagccctccagttttctgagctgggagggcatatgatttttaagtagaaaatcagcagccctcacaatctccatta

SEQ ID NO: 10282 - DNA, 201 bp, Bos taurus
ggctctaaggacccagcatccagcaggatgtgacacactgatttctattgaggcaacgtcagaacccgctctctaaacaaactatagcaatagctctctacagagtaccaagaaatggatgggataaggtcatgtttcaaggagcgtgtgaggcaagaaaattgatgactattttatctccttgccccaaatgtattttta

SEQ ID NO: 10283 - DNA, 201 bp, Bos taurus
tcagatttttccatatgacatgggcaaatgagcattttggccaacccaaagatcatcaacatttatctgtcatgatctgagtgagaagtctttgacatgtaacatactaatcaccaggcccatgtaaccttaaaaaaaatttgttttcaattgttttcttcaaataataatcaagacagtgaaatatttagaggggaactt

SEQ ID NO: 10284 - DNA, 201 bp, Bos taurus
gtagttaacttgaaaataaatcaagacagttgtcttaacttttaagcatctattaaagttgtaatatgcaggagacacctgatcatgcagaatatctaaacagggaaaataagaattagaataagaacactgaataatttctttattctaaattagtatttatcagaacaactagacaatatattttaacagatggcattt

SEQ ID NO: 10285 - DNA, 201 bp, Bos taurus
tggaagttttggtgaaatatcttgttggatcttttaaagaaaataaaaaccatattatcctaatataatttatatattgatgtcctggtttgaacttacattggtgtttgttgtataatcaactctgatagatgcttaaacctttttttttttttttatttacttgattgaaacctcactgtaaaatccttatgcttattc

SEQ ID NO: 10286 - DNA, 201 bp, Bos taurus
tcaataatctttgttcactctcctttttattttagtgattttcataattttgaaatttttattatactcaaaaaatctagcttcttactagaaagaaatcattttagagcatgaagaatacaaaaagaatccctagtccactttctcagcttttaggatggttcgatacagctttcctatctcttcctagcaggattttta

SEQ ID NO: 10287 - DNA, 201 bp, Bos taurus
tcacaatcatccacccctcactttgcaagtctctaagacataaggttaatccctttggagttagaccaaatgtcagttcaaagggttaatggccaaggttcattgtaatcaccagccaaactgctctgaattctgtccactgagggatacaaaggtgctacaacaggaagagggtctgggtcatttggagaatctacatac

SEQ ID NO: 10288 - DNA, 201 bp, Bos taurus
tcctgttgagctatttcaaaacctaaaagatgatgccatgaaagtgttgcactgaatataccaacacatttggaaaactcagcagtggccacaggactggaaagcgtcagttcattccaatcccaatgaaaggcaatgcaaaagaatgctcaagctactgctcaattgcacttatctcacatgctagtaaagtaatcctca

SEQ ID NO: 10289 - DNA, 201 bp, Bos taurus
cactacaactagagaaagcccctcgggagcaacagaaaccagtacagcgaaaaataaataaaatttaaaaagaaaaatgaaggccaacctaatcagataacatgttttcatagacatttggaaggtattgcttaaatgcaaaggcttgactacactggccagtaatttaggtgttatgaacaagacatctacagggaagca

SEQ ID NO: 10290 - DNA, 201 bp, Bos taurus
ggtattaaactatcagaatttttaaaaagtcatcaataatgttaggctgcagagcaaatgtaaagctatagccatagtcatgttacatactagaaatttgctggctgtatttgcagttttctcactggcaggaaaaggacctattctggtaatcaatacccttgctccactcaacagagtaaagtggacctgtagattata

SEQ ID NO: 10291 - DNA, 201 bp, Bos taurus
atttggaggaaaatgattcagaactttaaaatccacacagaagaactttgggatctatagaataagaaatataaaactattttaacttcttgaaaaatggctatcaagatagatttggaaaaattcatatgtgagacaactaaagaggatacctgagtgaagtcagcaaaattttgaaagttctatatggtggtacaaaat

SEQ ID NO: 10292 - DNA, 201 bp, Bos taurus
ataaatattttattttaagcagtgtctttgtgaatatgattaaataaagaattgctcaatcaagagattaccttgaattattcaagtaggccctaatgtgtccttataagagggatgttgaagaagattagatacacatccaaagagcagaaagagatttgaagatgctggccttggagattagaatgatgcagccacaag

SEQ ID NO: 10293 - DNA, 201 bp, Bos taurus
gactacagctatctctgagcataatttatgctgttaatagagtaaacaaattagcggcctacataaggcaaagtatgagcaaatattttctttggtggtacttgaagaatctctcatttcctcaagccagatgacagagctaaagattggacacataattaattgcaagagtagttgaacttaagaggaggctaattttgg

SEQ ID NO: 10294 - DNA, 201 bp, Bos taurus
tctctctctcaaaataccttattgtattatattaaccctttttgttaagatgatgtgagatgacaaacacctgtgtgataattccaagttaagtgaatggtgtggcattgttacttagcattaacctactactgagctgatgataagaggagaggagaatcaaggggagaatcattcgctccagttgatccttggtcacag

SEQ ID NO: 10295 - DNA, 201 bp, Bos taurus
ttgctatgaaacaaagaaaagtaatggaaccttaaagctgatatcaaacttactttggaaaaacttctagttcatgaagtaggaagcaaccttgtatattgatgaaggtatttctctagaatgttgttttaaagtcttagaaagtagattgttaaagccaataagtatgataagtagcatggccattaaaagacaggttaa

SEQ ID NO: 10296 - DNA, 201 bp, Bos taurus
ttaacatatcagagagatacaggtattaagaaggtgctattaagaatattgtcataataattgaaaagaaatgagtacaggctgtttaactgcattttcttttatatattctagatgttaaagtttagagacttatctgtggggtaggtgactaatagagcattgtgatatgaaattcaacttatctaaacagtgatttct

SEQ ID NO: 10297 - DNA, 201 bp, Bos taurus
acacagagaccttaataacctacttgtcatttgtcttgaagagtctttacttcactttttgtcattgcttttcagtatcaatataatttacatattcaagtgaaatattgatgctcaatgggaatatgagtgacaaattatgcaagtaccaagattttgagctgaatgtcacaaggagatgaatgttcaaaacaagggagt

SEQ ID NO: 10298 - DNA, 201 bp, Bos taurus
gtggtggcctctaccccaatgtgactcctaccaaggttttctgatcagaataaccccttggagggcactcccttccgcatgttctctccttctgtctcaacagtctcacccttctcaccctcagcagatactgatcaagcacaatctttttaaaaaaataatggttcaattgatctcaaatagttgataggatgtcttctg

SEQ ID NO: 10299 - DNA, 201 bp, Bos taurus
accctcctccctcctccctccccataccctccctctgggtcatcgcagtgcaccagccccaagcatccagtatcgtgcatcgaacctggactggcgactcgttagaaatcactgactagctttacgaacgtgaaacttcgttcaagttttctttttttcttttttttttaaacttgatttattttagtttacttttggcca

SEQ ID NO: 10300 - DNA, 201 bp, Bos taurus
agagaattcatgcccccccccccttccaagactttcaagatcacatttttatttatattaaggtcacatttcttaaaaaagaacaaaatgtgagccaagtgaaggacgtctgcaggctaaaaaatattcaagtttttcccttgcaaagctagatattttgtttgatcattcagctgccacctgcatcacacccccagctct

SEQ ID NO: 10301 - DNA, 201 bp, Bos taurus
gagcctggtgagctggcaggccacctctgggtcccgcaagcctctggcgcaggtgaatgaactgagtggacacacccacgggcaaaacattatccttctcgcatcaagtccttgctgtctggcctgtgtccttgccatcttcccaacctgccagtggagtcagcattctaaaataggatgtctgtcacctgcctcagcccc

SEQ ID NO: 10302 - DNA, 201 bp, Bos taurus
tcgactctgtattggtgtcctgatatccagaagtcaaaaccagactggtggtagacacccatatttcaaggaagcaggtctggcttccttttttctctctatttgaacaactggtgcatttaatagagaactgtgttcatcttttcaaactcgctttccacttttgtattttcttcttctcatgatatttttcaggaaaag

SEQ ID NO: 10303 - DNA, 201 bp, Bos taurus
gcaaatttgaaaacactgcacactgtaggattccaaacagatgacattcaggaaaggagacaataaaaagatctgggttgaggagggaaggttgaatggacggagcacagaaaatttttaaggcaatgaaaatactttgtatgatattataatactgggtacatgttattatacatttttccaaactcacaggatatgcaa

SEQ ID NO: 10304 - DNA, 201 bp, Bos taurus
ccataacctgtcctcacgaatatggagaagccaaagaaaaactctgcccaaagactgtgtgtgtgggtcttgcatcaagccaggattgacagccttcttcctggccagcgacatatgtaattttaagtttctagtaatcacacacataaaaaagaaataagtgaaattaatttcaataatagattttatttaacaaagtat

SEQ ID NO: 10305 - DNA, 201 bp, Bos taurus
ttgatctcaagatgactgtggttctaatgtcatttgttcaagaatcatctgaaaatctaaataaaatcagttataacagcttcccccatcatcatgcttacgaaactccatgaaacaaccactatgtcttagtaggttctcactttctgaaggaacagccaagtgtgagtgtaactaaaatctctgactcgtgtatggaaa

SEQ ID NO: 10306 - DNA, 201 bp, Bos taurus
gggtgctggagactctggtctctgcagctggtgccagactcctagaggcataagagtggtccaaccttaccacctcacccaggtttatgggggccctgcaggtcctagcagcgtctctggggaacgcggtcagagtctcactgacgttgggaggaatcaagggggcgccataaaggtcaccggccgcaataccctccagcg

SEQ ID NO: 10307 - DNA, 201 bp, Bos taurus
atttgtaatcataaagaaataaaatactttaaagtaaatgaaatcctaaagaaatgaatatcctacatttcaaatctagggggatactagtgatcagtatcaaaaggaagatgtataggcttggtggctcagacggtaaagcgtctgtctacaatgcgggagaccaggattcgatccctgggttgggaagatcccctgcag

SEQ ID NO: 10308 - DNA, 201 bp, Bos taurus
ttactcagaaaatcttggtttaggagttttcctgttggcccagtggataagaatctggatgcaagttccatccctggtctaggagctaactacatgctgcgggacaactaagcctgtgtgctcggccacgagtgcagccaaaaaaatttttttacataaattctaaaaaagaaatttgtttagaagtaggggaaaggtaca

SEQ ID NO: 10309 - DNA, 201 bp, Bos taurus
tgtcagcttgcgggagtctccctgcctaggtcagtaacttgtacagatgcattatgtgtttctaccaggactgactgatgcctcactcaggagggccctgggctatgggaaaatgctctagagatgctgggaggaggcagaggaaggaaggcgcagacatagaaaatggctgtctcttctccatccccggccttggacact

SEQ ID NO: 10310 - DNA, 201 bp, Bos taurus
ggactaagtgtttctatttgagaaaagcaattgggccgcagtctatgaggcaaagagaaagaaccagagcaggatgaactgccgcagctctaattacaaaccaagaataagatacagacgtgggccccgcagcaaagagctgtcatttatacacagatctttacagccaaatccgtgcaggggaaaacagcagagttactg

SEQ ID NO: 10311 - DNA, 201 bp, Bos taurus
ccctgcagaacactctaggtggaaggaagatcctgtgcaaaaccccccaaatagcagagagcttgacagcctgcaaagcagcaaggaggcctgtgtggatcggggacagtgagccaagaagagtcagactgaggtcagatgagagagagaaggaggacacagggcctcgagaaggagtctgaactttataagaggagaact

SEQ ID NO: 10312 - DNA, 201 bp, Bos taurus
tgttactgcaaagcaccttccaaatgtcagctgacttaaaacaatcagggcggtacatgcaaaaatggattctgaagagcgttttttgatcaaaagacacctgcctagacttctgactagaattaggaatcagtgtatctgtgtgatggaaattcctctatgtgtcctactcagtaaacccaaactcctctcatcctgtcc

SEQ ID NO: 10313 - DNA, 201 bp, Bos taurus
ctggattgttttcatattttggctattattaataatgttacaatgaacatttgaatacaagagtttgttgcatatatttctattctcttaggccaattcctaggagaggaattgctatgtggtaagttaagtatatggcttagtttttaaagaaattgccacactgtttacccaagaggccatgccatttcacatttcacg

SEQ ID NO: 10314 - DNA, 201 bp, Bos taurus
agggaagcacacagcagccaagagctgaattttggggaaagaggccctgggagaggactcatctaactatgcagaaacagcccagatatcctgggttttggtaaggtggggcagtgatggccatggtcaacatgctcaggagacacccactgagagaccttgctccacatcacagcatagtgctagatctggggcagaaag

SEQ ID NO: 10315 - DNA, 201 bp, Bos taurus
gggggttagcaaaagacattgagtttttaagggaaaatggtaaatggccactcttccgcagtgagagttctttggtggaaatgtattttagtgtttagtataaaacttttgctgactcacactgcatcatctctctgttcttatcatataatcttaatttccattttctagcatcagacaatggatcttgaagtgaagatt

SEQ ID NO: 10316 - DNA, 201 bp, Bos taurus
cttcagggctgaaatgtaccaaatctctttaggttttaggatctttgcctgttattttcattctacctcccactcctctaagtacaactgtgccacccctctccacgtagccaaaatcattccttcttcagcactaagctcaaagattatttaagggcgatttcatgtccctgacttggtcaaccctacccctctactgcc

SEQ ID NO: 10317 - DNA, 201 bp, Bos taurus
cagccctggcccctgtggagttactattttttgctggattccagtgtatgtaaaaccttgtttttaccctccaagtgtagagtctttgtttctcccagtcatgtggagttcctgttctctacttctactggccttcaaagccaaatgctttggagatgattgttcttacggccacactctggggagcctgatgtggggctc

SEQ ID NO: 10318 - DNA, 201 bp, Bos taurus
atatagatacaccttgggataaggtaattaattcaactattggttttattaggtctgataagatgaaagattaaagagtcattttcactgttttctgtgatactgaatgtttagtaactacaataatattttggctttcagaatgtgattggttgaaattcacctgaagtataattttaaaatgtctgaaaattattgtgt

SEQ ID NO: 10319 - DNA, 201 bp, Bos taurus
ctcctaaaaagctttgccttccaaagaggactcatatatggctgcccaagaggttttattttagaagtatgaagaagctgaagagtataaagggaaggtaatagtggataatgcttctaacaacaataaaaaaaaattggaaggataaagggtaatgcttatatgatgtgaggaaggaacacaatttgttcaccatttaag

SEQ ID NO: 10320 - DNA, 201 bp, Bos taurus
tgttaaccccatgggtacttctatttcaacaagggcttgtgccagctatttttagtcaagtccaggatgtgcttatattgtaaacacttcaaaaagtgagggtggtatctttatagtctgtatagataatacttacggaaaatcatgctttgagaaacataaaattattacttccagtgatgtggcataattgacactgtg

SEQ ID NO: 10321 - DNA, 201 bp, Bos taurus
gctgcagtatccagcatgttgaactagcaaaattagtaacaagggaagaaaattttaaagataagcaaactaaaaggtattgcttttaactgttagaactcggtccccaaataggccttagaatgttctttaaccttccaaaagtttttctaaaaggttttctccacctgctacattaaaatttaatacagatgataaagt

SEQ ID NO: 10322 - DNA, 201 bp, Bos taurus
cggatgatttttcagttagatttggatgtgtataagaggtttctagaggaagaagtagggagaagggaatccaagaagtaactgtaggcccaagtgtagaggcacaaacatgcaatagtaggttctggaagcaagtggtctatgcctagggcacaagtgcaaagagctgtgggcaagaagcctggaaaagtaactggaggc

SEQ ID NO: 10323 - DNA, 201 bp, Bos taurus
gcggacgcagggccgcacgccattggctgacagggcgcacgcgcgtttccctcagatgagcgctgtgtttggggaagcgagtcttgggagcggagagcgtgcgtgtttggccagcgtgggcagacggtgccccggcgccagtccgccttagtgcttcctttggaaacgtacgctgtgcgatcattccaggtttgatccgga

SEQ ID NO: 10324 - DNA, 201 bp, Bos taurus
aatcagagttggccagtttgtcttactaattccagatatactggaaataggattggatttgtaaaggggctgaaaccttggaattgatgatatgatgtaactaatgttacattacagggaaaggctaagatctttacattagatttctgttgtgccacattccagaatatttttgctattaggaagggtttccaaatctct

SEQ ID NO: 10325 - DNA, 201 bp, Bos taurus
tgtatttgggcctagtcatttgctagatcagattggagttaggtgatttaatatggtctcacacactatctgggtcttcagcttggattgttggaacatctgtggtggcctggcttctctctccacatacactttcagttagagtttctctgcagtgtgtgggtttcaaagtatgagagatatagacagagagagagaaat

SEQ ID NO: 10326 - DNA, 201 bp, Bos taurus
attcattgataaatttatttccaatgagctataaatggctgatgagcataaaactcacctttcaacaaggaaaaagagaatgtattcctttttaggcatggttatgtagtaaggctggtgatttttaaagacaagataaggtctcttcctctgaattcctaaaattacctccatcagcacatctcaaaaaggaaatatgaa

SEQ ID NO: 10327 - DNA, 201 bp, Bos taurus
ttccccttggaaagtaaacccaggtctcttcggataagatccctgcagttttgctgagcactgtggcagggattctcctccgggaggagggcccacaggagcctgaacccttctactaccctcccctttctcctctcttggggcagctaattattctagggagctgagagaagtgaccctgactctctgtgacctctcgga

SEQ ID NO: 10328 - DNA, 201 bp, Bos taurus
ctacagccacagtgtgtaataattacttagttaagatggcattaaatttgcacaggaagatattttgagagagagactgcgttcatgtagcttttattacgttgtattgttataactgttctattttatttttagtagttgttagcttcttcagtttggagaaggcaatggcaacccaatccagtactcttgcctggaaaa

SEQ ID NO: 10329 - DNA, 201 bp, Bos taurus
aacatcttggatctacagaaagttcatcacccaaccctctaaacctgctgggcttcatcatcaaggaaggggcaccttagacctcacagacatataaggagggggtacactggggccatgggtattgtcaggcctggctaatactgatttctatactcaccttacagtttgaggaggtcagttggtgaagtggaatatgag

SEQ ID NO: 10330 - DNA, 201 bp, Bos taurus
tgggtaatattccattgtatatatgtaccacaacttttttacccattcaactattcagagacatctatgttgtttctgtggcctagcttttgtaaataggtctgtgatgaacattggggtacatgtatcttttttgattatagtttcctcagggtatatgcccaatagtagattgctgggccatatggtacttttattctt

SEQ ID NO: 10331 - DNA, 201 bp, Bos taurus
cttggcgctcttcacggcattgccgcctctgttggtgtgagcagttcctgaagaaaaggggcttcttgtgctgaggcttcaactccccacccatcagtcccagggcccagtgtagaccacagcctctctgcccctgcagaagagagctcacgaggagtccagccagtttcctctcccacaggaagtaggagctgcgtatgt

SEQ ID NO: 10332 - DNA, 201 bp, Bos taurus
tgacagctgcgtaactcctgtgaataatactaaaagctatcacatcgtacacttcaaatggctgtgtggtatgcaaattgtatctcaacaaagctactagaaaaaaaaagactaaactttatgatgatacaaatcagaaagatatctcacatttggaatgaaaaactgggaagagacacacgagggggttccctgagggca

SEQ ID NO: 10333 - DNA, 201 bp, Bos taurus
tatatgtgagttctctacccatattcacattagaaaaactgagaaaatgttaagatattaacttaaatataacaagaaaaaacctatcagatgttaacataaaaaacatcaagtaggcttttcagaaaagtctacttacatgtttgtttaaaaaaggcccagaaggctaacgtcagagctgtttcatttgattctaagagt

SEQ ID NO: 10334 - DNA, 201 bp, Bos taurus
tacaagatggtttgtgtgtatctcttatgacctagtggttcttatacataaagttcaattttttttatatggtataaaatgccctttaagatctggctcaatgtcttcttatcaacctcatttttcacttcccatttttttcagttctgcacacagtcccacccatcgtttcatatgcctcaattacttccttctacacat

SEQ ID NO: 10335 - DNA, 201 bp, Bos taurus
tgtgggggccgggcaccttacatggccaggcttcagagccacgaagccgtcttaccagtcatagatgtcaccatcgcaggtgacaggagtaacctggagcgttaggggcctcactactcaaatcctgtagtttccattttgaacagctctcaaatctctccagtgtctgtcctcgcagctcctaccataggccaggccatc

SEQ ID NO: 10336 - DNA, 201 bp, Bos taurus
gttcagtcataaactgacaacattggtgtgaggagttctttttaaaataaagaaagattggttcatgcataacttatatgttctttttccttagaacaattactgtattagaaggggagttctctacctctcccatatttgctatgtaggctttatctactgaggatcatcagggaggaattaatgattctgaatgctgtc

SEQ ID NO: 10337 - DNA, 201 bp, Bos taurus
gcaaaggtagatcctatcctagaactggccaggactgagtgacagtgtgactatggaacctaagggagggaggagtcagaggtgatgcctagacttggattccagatggcctggggaatggtctttccatcagtgaacacaaaggacagacacagaagacacttgtaagaggaaggagagttggtttatgaaacagaaacc

SEQ ID NO: 10338 - DNA, 201 bp, Bos taurus
gtatgtgaaatctaacataggagagagctaggtgtattcaagggactgggagaagaggcaagagtttcgagcctggtatggaatgaggctggagaaatggaaggagttgcaattgtagtgtgcaaagtaaaagcatgtcaggacctgaatctgttctttagtcttgtttagactgtcaagatgagtatgaagattaagaag

SEQ ID NO: 10339 - DNA, 201 bp, Bos taurus
atatagattgtgctacttattaatacagaatgttatgtaaagattaatgattatctgttttcaataaatgaagtacttgaccaacccatttagtgaacctgtttgaagcagcaccctctggtgggatttggggtcagaagaatcagggctccaagcctgttttcatgaagaagtgtggacttacactcggagatgcctggc

SEQ ID NO: 10340 - DNA, 201 bp, Bos taurus
cagcgcaataaataaattgaatcattcaggcaaaacgggttaagggaactgatgtgaataaatggctccttctggccttccctagttatattaataaacatctcatggaaaatcttaaccctatgcttgtcaaactctgaagcaatccattgctctttctctccttggattttctaagagcggaacaaaaagatatctgat

SEQ ID NO: 10341 - DNA, 201 bp, Bos taurus
tggactgcagcccaccaggctcctccgtccatgggattttccaggcaagagtactggagtggggtgccatgcagttaacactatttcaagcaaaaagagtggccatatcttcacatttttaaccagctatactccaatataaagtaaaaagttcaaaaaaaaaagagtgaccatatggtctgaaggaccaatccattgccc

SEQ ID NO: 10342 - DNA, 201 bp, Bos taurus
atttcaggtaaaagctaactttctagtacatagaacccatttactgttgcttttcctaaagaaagtgttcttaacatataaaaagaaaaattgtgaagtttaaggtgggtgagtatgagtgtggtaatttggtgtaactggaagtattacagataagaggagtgaggggaacagcaaggtattaatgagaaaagttcctgt

SEQ ID NO: 10343 - DNA, 201 bp, Bos taurus
tcatgcgttatgaggctacaggtctttatgcccttaatttttgtttggttaattagattgcaccttattccgcagatgattgaaatagctttaaatgaaaataatacaaaagcaatcattctaaaacagaaacaagaataaagaactgaatcagaatacctataaaacagctgtggaaagtgaaagaagagaacacaaata

SEQ ID NO: 10344 - DNA, 201 bp, Bos taurus
atcccatcccaggattttcagctcttcctggaagttggttctgctcttctccggtctagtaaataatcgaacagaagagaaacagtgagatgcggagcagcgtatctgcctggactgcagggcctgtctgcatctggctgtacaaggcgcacatgcagagcagacacaggcaaggagtgagcgtgactgactgaccggccc

SEQ ID NO: 10345 - DNA, 201 bp, Bos taurus
actgccagaggaaatgaagctgtggccctaattggttaattataagggaaccctgcagcagcaaaaccctgccctctgaatcaaggcttccctttctacacggttggcctctggtctcagtctgattgccatcctgcctgaatatgcacaacagaattttcttctaccaccttccgtgaagaaagcccttgcctccacaca

SEQ ID NO: 10346 - DNA, 201 bp, Bos taurus
caaccagcctgaaaggtaaacagtgcctccaagcacagataggataccagcactggctcacttatggcagagcgcaggagaaagatggggccactgtacaaacagataggaattcagctaagattttaataaattgtaaaaggctgggcagagactaggaaccctgggggccacaaatgcaagaagagtttgcacctgctt

SEQ ID NO: 10347 - DNA, 201 bp, Bos taurus
gctaacggcgacctcctccgagaggactgataccacacgccacgcctcccagggctgctgcagccggagccgctgtccctgcggcaggtcactgctgacctgtgccttcacaagagacactcagaccctcaaatacaggtctggctcagtctcttgtggggatcactgctcctttcccttcatcctggtgtgcacaaagtt

SEQ ID NO: 10348 - DNA, 201 bp, Bos taurus
tataggactgtgacactttttaaagttttggtgagaaaagtgtaatcagtaatgtctgccatgggcttaggacttagtcctcatgcagtatatttgctacccctgtaattagaccagggcaaatctcaacctgccttgcaatgctaccttttgaacagctccagaataacacaaaatggaggcattttattttgggagaaa

SEQ ID NO: 10349 - DNA, 201 bp, Bos taurus
agtctcccttcttcctcagggcattaggggccctccaggctctaaggaggaggcatatgtagtgagtcattagtggatatgactggtcttatgtctgtccgtattataatctgcaataaaaggggggttaggtatataagcccaataagtataattaatcaagtcagcctgagagggggaagcaaaagcaagcagagcaag

SEQ ID NO: 10350 - DNA, 201 bp, Bos taurus
ggtaccctccggcacgcacccttggtggccttggtagttcagtgtggaaatttggtgtgagatgggctgtccaggtgagagattttttttttcccctatagctcctggcctcagatcattaagaccgggaggttgaacagtgtctgggggcctcaaaggatgtccctgctgtcagtggcttattctcgtttcccaggcgtt

SEQ ID NO: 10351 - DNA, 201 bp, Bos taurus
tactgggaggtttccctgtttacacttcctgaactgggcaacaggctgtcctctgtaggatgacgttcctactctgccaatgaagaacccaccactctaattgaggttttcatgccaatctctgtctgtccatgtgatgtaatctcattatttgaaatgtaaggaatttagttatttcaagtagtgtttttcttacttctg

SEQ ID NO: 10352 - DNA, 201 bp, Bos taurus
atgcagttgggatgtggtcaaggtggagctggcgaccgtggcctggggtggtcagggggttttcaggaaggaatatgacaggacctgctctcaggtcaaatgcacgtgagactggtgggtggagaggaagggggagctatcccaggtggccagggccagtataagcaaggacccggatgtgggagtttattcagggaccgg

SEQ ID NO: 10353 - DNA, 201 bp, Bos taurus
ggctttgcaggccatgtatggtctctttcccatattcttttcttaatacctctttacaaacataaagctattcttagctagaaggctataaataatacggtgtggactacatttgaactgcaggccgcagtttgccaactattttcagagcttctgtctttgcccaccgtggccaggagtggggggccaacagggcacaat

SEQ ID NO: 10354 - DNA, 201 bp, Bos taurus
ttagttctctacatttttctcaagtgagggccctgatggctggaagctcagggctgcttgagaccctcacgctgctgtaacaccccaggtcatggttgtccatctcgtagggccggattgagttctctttgttccaccttggggtggccctgaaggagaaccacagaaggcagtagcagatgcccctagtgctctcaaagc

SEQ ID NO: 10355 - DNA, 201 bp, Bos taurus
caagctgagtgatagtgcaacacccctgggcctctatgatcatgaaatctaaactcaaatccttttatactcaaccttcaccagatgttctcctactgagaaatctggggcctctgggagctgggtctctgagggccttttatcaggttccagtgtgacagaattcacacagttgatgtggatgaaaaatgtgcatcctct

SEQ ID NO: 10356 - DNA, 201 bp, Bos taurus
cccacacttgagtcagcaacctgacttgtttcggcccataccatgtggcagaagtgtccgttttgagcctaggcaccaggaggccttcgtacttccacttcgcattcttagaactttgataccacatgtgaacataccaggttagcttctggaagatgagagaacatgtgaaggaaagcccacttgttccaaccaaggcca

SEQ ID NO: 10357 - DNA, 201 bp, Bos taurus
tctcaaacctcacatgcttatctgctatgtactcaaagtctcctagttctgttgtgaaagaggaaaatatgtaaataattgtatgcatttatttttttttataaaaaattaggaattcaaacagacaccgtcatctttttcaatgacataaatctcctggaacatcattatgaatctaagggggaacattggaagctctta

SEQ ID NO: 10358 - DNA, 201 bp, Bos taurus
ggagccaggaagggaggcgtccgggccttgaccacaggcagcccaatgccagcagtcacatggtagactgttatgctgtgctgccttccctgcccgtgctgatgggaccaaagccccatgggcccacaacacacagagcctgtcatttctacttcatgtttatgcacggtgctcagccaccttcagtttaacctttgcttt

SEQ ID NO: 10359 - DNA, 201 bp, Bos taurus
atcagggccccacagggttgagggaagccaagtgccaggatatatgctttaagggagtgctcactctccggttcccaccctggacttccaccaactggaaagtggtgcctccttaaatttggggccctggacacctcacccttctcaccccagtgctttccttgttccttatatagctgatacctagaattgtcaggttag

SEQ ID NO: 10360 - DNA, 201 bp, Bos taurus
tcaagttccggaggtgttttagggccagggttagacacaaaccctgcttttctgcttccttttcacctgcttccccacattgccaccctctgtggtttatcctacccttacagcaggggcccccgtgccatcgcacaaatgaggcaagtagacagagtccagatctccttctggggtgggcagtaaggggcaccgggattc

SEQ ID NO: 10361 - DNA, 201 bp, Bos taurus
gacagcccttctctccttcagtgccacccaccgtccaggccagacagagcatcgtgaatgccaccgccaacctcggccagtccgtcaccctcgtgtgcaacgccgaaggcttcccagagcccaccgtgagctggacgaagtaaggaactggctggagcctttcccaccagctagtggaggaggagagctggcagggcctac

SEQ ID NO: 10362 - DNA, 201 bp, Bos taurus
cccagccttctttaaggtgagaatttttatagcagacactgtgttttaaaagccagcgtttaatattttttaaaaagaagacctctagattttggtgtttgttatctgccagtatgaaaatggatgattaaccaagcaagattccaagaagtcctttggaaaatggtggggtcagtccttcattccaagtcagtcatgagt

SEQ ID NO: 10363 - DNA, 201 bp, Bos taurus
aagcccacactatacctcactgagacagtgcatctcacttcaaggggttgtggtcaagtaaactgatttgggttttgatggttaggaagagaaagaggtaatgtcgaccctcagataacctggcccagggcagctgactccccgccccctccccagaccccggctctgctggaaccccaaactctgccatccttttgttct

SEQ ID NO: 10364 - DNA, 201 bp, Bos taurus
ccgaggcttatattttaaataaatttgaacatgtagatgcagattacctgtttctggttacccgtcacaaggtcaggtccaaacttctggctgggccagcccgtcaagatcaaagtcaagagtttgtgtcctctatccctggtggcttgtctgctgctccccctggtctcttgcacaccggatcccttatcagcagtcagt

SEQ ID NO: 10365 - DNA, 201 bp, Bos taurus
ggtgaagggaggaggcgaggccgacatggaccagaaccgcccagctctcatctgatctgccccctgtcttccggttccccaggtcagtgaggagatctgccaggagctaacaggctcttgagaatcccttggactgcaaggagatccaaccagtccatcctaaaggagatcagtcctgagtgttcattggaaggactgatg

SEQ ID NO: 10366 - DNA, 201 bp, Bos taurus
tccctccagaccgagtccacaagcctttcccctgatacatgtttatacagagaacaggggccttagaccaatctagcttcagcaggtcagcccaaggtacgtgtgaggccaaattcttatgagatcctgagctccctttgtttccactggtaggagggaaaaaacaggctttctttcaagttcagactctcctacatcact

SEQ ID NO: 10367 - DNA, 201 bp, Bos taurus
tttattggatagaaaatgcaaatgggttttaagcacagggaaaaaataactccaccgatgatgagatctacaaaataaaattatgctgagatatcatttgtcacctattaaattggcaattatcaaaatgttagaaattgctaaattattctccatagaggtgataccaatttacacttcttctaacaatgcacgataaca

SEQ ID NO: 10368 - DNA, 201 bp, Bos taurus
ttcctgcacatatccctactaggctgcctgccatgccctatacatctgatctcctgaacaccttgagaatgtttttattcccaccttccacagtttatgccacttttccattccaggccgcgaccacttccttcctgcttggtcccttacaatagcctctcaaagacgggtttctccttgttaattaactcgtgctctgct

SEQ ID NO: 10369 - DNA, 201 bp, Bos taurus
cccgatttcacgctccatcgaagctcagccacctggatgtagctagctgccttttctgctcgaaccccatctcgggccttcatctcccactgcgatcttcggcgagtgttttcagcagaaatagggaagttgacacatgtgccagtgttggccccttatgcaaaaacattctgcggccgaggtcctgccagtcatcctcct

SEQ ID NO: 10370 - DNA, 201 bp, Bos taurus
tggcaaactgtggcctagaggtcaagtgtagttcacccctctttttgtagggcccatcagctaaaagtggactttgcactttttaatcattggccaaaaaggtccaaagaagagtgaaactatatgaaattcaaaattccacgtccataaatgaggttttattggaacagccagatctttcattcatgtgttgtcttggcc

SEQ ID NO: 10371 - DNA, 201 bp, Bos taurus
tctgaaaagatctctcaggaagaaattagtagaagggttccagaaagcacccacgtcctagtttccagcttgccttatcaagagaggcctcctgctctttgcctttcaccctccctcctgtctgtatgcttggctacccacacctcctccccacagcctcctacggcctgtctcatgcatgccccatgcatgtaacacagt

SEQ ID NO: 10372 - DNA, 201 bp, Bos taurus
ggaagaagtgccatggcctcctcatgtgggctgtcgccaccacctcgggtgctcagagaatacaaggaatttcacaattggcaggcccttcacttaactcggagctcccaggagttgggctgtcaggggagagtttcacgttgctgccagtcccttctgaattgctaatacaagaaagatgcagatccctgctggaggccc

SEQ ID NO: 10373 - DNA, 201 bp, Bos taurus
cttgacctggggctgtcaggcaggccctgagcattgagtactgaccccaaagctgtcacactaggtcatcaagaaccggacagaagattcttcctgcccttgaggggcttacagcaaggccctgcgagagtgaccctaagcaacaagcaggcatattcctcccgcctccaaggaagggcctgggctcagcggtcaaaacag

SEQ ID NO: 10374 - DNA, 201 bp, Bos taurus
ggacacagcatcacggcctgtccactgtacagagcacattggtcgtggcagaggatctggagcccacacctaggttcctttatgtcaccctaaccccaaccctgcggagaaggccatggcaccccactccagtactcttgcctggaaaatcccatgggcggaggagcctggtgggctgcagttcatgaggtcgctaaaagt

SEQ ID NO: 10375 - DNA, 201 bp, Bos taurus
tttcgtgcgctcctgcaccatggcagccgccactgtgtcctgtcactgtttaacacctgcctccttccactagatacaagggttttacttccttcactgcgatggcctctcaatgcttgagaaaagtttgtggaagagacggatgaaaagttggatagggctcagccttcccatcttaaccttgctcactccaccgggaga

SEQ ID NO: 10376 - DNA, 201 bp, Bos taurus
atacgtctttgtgcatttctttaactaataccatagtagttggatcacatacttttgaaatgaaaagatgaaggtttaggcactaaattctgttgtctgccttgatcacacaagttgtatgaaaagaatatttaaaacttttaagtgtcaaattaattattcatgtattatctaaaagtatatatgcatattatatttata

SEQ ID NO: 10377 - DNA, 201 bp, Bos taurus
gcaggacaacacccttctgttgctgcccatagaaagtgccctgaggcaccctgggcgactcattcctcaaacatgtgacactcaaccaaactgcacacagggggagagaaggccagctcaccacagagagctgacccccacacgccacagtgcagaacgcagacaagtcacccattgtagagcacatgggctctcagtctc

SEQ ID NO: 10378 - DNA, 201 bp, Bos taurus
agcactggccagatggttaaggagcaatcatgagactgacactcccctagatgaccaagctctgaaaggggacaggtgtccttgaggccccaactccaaatgaggcatcctttgctagtcagtggattgggctgatcaaccagtgctgtctttcttctggctccctggaaggtcctggcctggagggtcagtgacctggtt

SEQ ID NO: 10379 - DNA, 201 bp, Bos taurus
cacggttagccgggagacagaggtggtggcctccgcagctcagccccattagctgggctggtgggaggcggctggcgcgtttgagggctcagacaagcccagtgattgaagggccggtctttggagctgctgccagactaatctcaggccggcagcccgtgcttttcctttagtttcagcccactcgctggctctgccctg

SEQ ID NO: 10380 - DNA, 201 bp, Bos taurus
ggaagtgagaagggtcacagtaaatggtggagaatacaagttgatgtttctgttatggaaacagttcttatttaatggacccaaactgcgtgggaagagaaaagatattcttcctctagttatacacagggataactagttatacgtagggatatgttactgacctcaagccattctgattctttttgaatgggatttttt

SEQ ID NO: 10381 - DNA, 201 bp, Bos taurus
ctccaggttttagggtccagactggttcagcaccatctgtcatgattgtactcacccacgttgcacagccaatatggcattgtctcttcgcactcacccacaaattggctcctgtacaactcctccccattattggcctctgttctcagactgggcctccagaattctagcgaatacttctggcatcttaaagttctcata

SEQ ID NO: 10382 - DNA, 201 bp, Bos taurus
cagccaacagaactgtgatttctccagccacacagcatcactctagggaagcaccccagatgcataaaactctctggaagagcaaaatggcccacagtgcccctcaagtagccctggtcattgccaagttcattcccaaacctttgggaccaagggacctggggccagactcaaggagaacttgcactccttgcaggggca

SEQ ID NO: 10383 - DNA, 201 bp, Bos taurus
ccctggggagaaggaggagctgagcctcaggatggactagaaagttgtccagtgcctaagcaggctttgtgctggatgtccggcctcacttctctctgtgcgtctgccttagccttctctactttctttcagattggcttttcctgcctcacatgtacatggccaaatgtggctatcagcttcttgacaacccagctcacc

SEQ ID NO: 10384 - DNA, 201 bp, Bos taurus
tgggcaccagaggccagcgcccctctcagcaacctgggaagcaccgttagcattcctgtggctgctccagctgcttgtgggctgacactgtgacctcatcggagaggggcctggggcctaaagagcctccagatttttgacaagatgacacgtacaacgagaaagcagctacacggctccccctccaaacttgaacctgct

SEQ ID NO: 10385 - DNA, 201 bp, Bos taurus
tgctccctcagtcctcacagaaatcctgagaatgggtcctattagagtcctgattattcagatgaggacattaaggcacagagagatggccatacacatattccctaagtttgcacagctaataaagcgtggagccaggatttaaaccctgatgttttcattctgtctactctggaagtattcatcagtgatggccatgtt

SEQ ID NO: 10386 - DNA, 201 bp, Bos taurus
ttctaacttgggctgtttgaaatctccctggtctctggaatcctccaggggaaaaattaaacagggccccagctcactgaaggcatgattggccaactgttgggtttttgtttttattgttcacatcattttatttcccactgaccccacttgaaaaatcctggaggcccctgactaatatcttttccagtgtttatagaa

SEQ ID NO: 10387 - DNA, 201 bp, Bos taurus
tggccccctgtcaaagctaaatcaatactcccttttttctctgcaagaacatctcagtaatcctaattggtcactatggcaaccccatctgcagctcttcgtggcctcaatgaagagacagaaggatgagatggggtgagatggaggttaagcctacttattgtataatgctctgcctttgatatcacctagatccacatg

SEQ ID NO: 10388 - DNA, 201 bp, Bos taurus
tcaggtgcacagggctctatcctgctctgcttgactccctaacaagtcaaaactcagactggcaagaactgtgaatgggagaataatgacaagcgaggggtgtccccaagagccttccttgttaaccagcatggagtctgcaattgccccggggctggggtgtctgcaggcaacagcaacagggtttgcaggaatttgtga

SEQ ID NO: 10389 - DNA, 201 bp, Bos taurus
caaagttacagggaacaggccagtgtggaggcagggcagggcagggtgaggccgtcctgatggccactagagacatcctggccagcggtgtcctagccccgggaactttccagagggtgttgctgccacacacacctgttctggcagctggctgggatggggcttgtctggatatgagtgtggggcggtgggtacctcata

SEQ ID NO: 10390 - DNA, 201 bp, Bos taurus
gagaagagaaggtgcaggcaggaagggcacagggagcgctcatcagcatctgaagggcacacagaagacagtgcgtttatactgcgctgctccagggcccggaatctggaataattagaagtaacaatttcaacgcaggaaaaatcttttcaattattagaactgatccaaagtactagattaaggtcctagggatttaag

SEQ ID NO: 10391 - DNA, 201 bp, Bos taurus
agacactgtagaataagccttaagtcccttcctagtaatcttcaagtactttgacagccatttgtcttgtgatctcctcttccccaactagtttttctacggattataaatgtacctatttctttcaactatgtctgatatgatggtttttaaatttctccttggctcctttccttgagacaccttctggtttgtcaaaaa

SEQ ID NO: 10392 - DNA, 201 bp, Bos taurus
tgggtgctgtggggtcaacagaaggagcggtggccattcatctgtgaacaagctgagaagctgccatcaggacccactacaccaggtccaggtgccctggagaaatgcaaggtaaggaggaggccgggctgaagaggggcagagagagataggaccagcctacagacctgagcaaggtcaaaggccacatgagggtgctgt

SEQ ID NO: 10393 - DNA, 201 bp, Bos taurus
cctggtgggcccccacctggggagcccccacctgccacttcccacacaagatcccctcagaccctctcagtgagtacaaagtgcagaaatctccctggagtggggctcagagagctgcagaggcctcccagggatctagaaagttctctccaccaaggcatggaagtgggaccccaccccaggggctgaaagggactttct

SEQ ID NO: 10394 - DNA, 201 bp, Bos taurus
agaagccacatgtgcaaaggccctgaggcagaaggcgcatgcatgaaaggagccactgtggctctggaacagaagagactggttggagaaggatgcagacgccagtccaggcaggcctggtggttcctgggtgaattcaactcttattctcaggagaatgggaagcctctgaagggccttaagagagctgttgcaagcaag

SEQ ID NO: 10395 - DNA, 201 bp, Bos taurus
gcaaatcaatttctgacctaggaagccaagagaggaaggaaagggtctggttccttaggaaacaggaacagaaatggcctaagctctaactctctgccccaaggcctggcttttgggatctgaccagcttcctctgggagacagagatggctggttatcctccaaaacaagtgttcgctcctgcctgggaactgcccagga

SEQ ID NO: 10396 - DNA, 201 bp, Bos taurus
aaggacctcaccaaaccactctatctaattttggatttatttctgtattcttgctttaagaaagactgcaaaaccattgaaacttcaggcccccagaaaatgtgggtctgctctggctcccaaataggactctttgctcatcagagagaggcaagcacccatcactccccagcctggtagcctccaccagctggcctcctc

SEQ ID NO: 10397 - DNA, 201 bp, Bos taurus
catgataatccaaatgaggtagttattatttttatccccaacatgcaaaatgaagaaacagcctcagagagattaacttgctcaaggccacacaactggtgagtggaataagcagactacagaccgagctctgctttccaccactctgtgacggtgcctctccaagggaacaacgccgtcagggccagccctccttaaagc

SEQ ID NO: 10398 - DNA, 201 bp, Bos taurus
ttctcttcaattgtatacaccatttcctgtgataattttaatattaggtgcctacatgatggcacctgctgatccatgacaataagcttctttgaaaaccgtatgtgagctgattaagttcttaacctgtcagactacagaaattgctttcctatcatgaaatttcacaatgttaattagcacatacaaacacaatatgtt

SEQ ID NO: 10399 - DNA, 201 bp, Bos taurus
aaatcaaagatgttccatagacacttcattaactttccacctcccacaacagacttctgttgattctgtcttggaggataaagtatcacatttcctatctctagactctcttaactgtcacatctttgttgtttttgctatttagatgctcagttgcatcctactctcttgggagcccagggactgtagcccgccaggctc

SEQ ID NO: 10400 - DNA, 201 bp, Bos taurus
cacgactgaagtgacttagcagagcagagcagaagataatcttcagaagtactgtttccttgaccaatctgaaaaatcctaggacagattcgataggcccagtttgggtcatgtgtccatccttgaaccagtctttggtgagggagatggagtattctgattggtcaggcccaaccctagcgctattgacaatgacgtcaa

SEQ ID NO: 10401 - DNA, 201 bp, Bos taurus
ggccacagcaggggcctctaaagtgcaggcccaaagttggagccccccttgctcttgtctttgcatgcattacactcagtgactgtttattgaccatttagtataggccagacactgtcagagattcagatcagtcgctcagttgtgtctgactctttgccacctcctgaatcacagcacgccaggcctccctatccatca

SEQ ID NO: 10402 - DNA, 201 bp, Bos taurus
aaaggaagtgagaaaaggagaagtgttttactcctggggccaaggtgggggcaaaacacccaactgtgtatggcttcagctctgaccagaggaggagggagctcttctgggaaagggccgggggctgactggaaggcagtggctgtgcctgggcgggcagggagccccgagctctgggcagagggaccgtgccagtgaacc

SEQ ID NO: 10403 - DNA, 201 bp, Bos taurus
atccaaagaaagcatgagtgcccaacacagactcaaaaagccaagttcactaggtcccacatcatcactgttgtgatcacaaacactagtccctctccgggactctgtcatctcttcccacctggaccctcaacctcagtacctggagactcactgtgagtctccatatggccctccagaagccgtgtccagcgtgagggc

SEQ ID NO: 10404 - DNA, 201 bp, Bos taurus
ccagtgtctgcctctgaggacattggcagctcatagaatgccgggccggtgcccgggatggggggcaggtactccccactccctgcctccccttctgctcttcatccctccctccccctttattaccgttttttgtacttgatgccttctctgtgagcagtggctctgttggaaggagggagccaggagcctgctgggaag

SEQ ID NO: 10405 - DNA, 201 bp, Bos taurus
ggggccgaaccatcatctgcaccatccaccagcccagtgctaagctctttgagatgtttgacaaggtgaggatctctaggactcaaaggtgactgaccagtgatggggagcgggccagggatcagtcaaggtgtggtgggacctgcctgacccactcgtgctattttccttgcccttctttttctgcctcagctctatatc

SEQ ID NO: 10406 - DNA, 201 bp, Bos taurus
gatacacctacctccctttaggtaaatagtagatttggcagtctgccgtctcagcatttatctgttactaccagtagtggtatatgcctgtgggtggccatgctgcccctaactctctttgtgcccctagccctgctctgcgtgttgtgccatccttcggttcttttgcttctcatgcagactcttaacaccagggcccag

SEQ ID NO: 10407 - DNA, 201 bp, Bos taurus
aggaggcaccctggccgggagagcaggctggggccctggctatagctctgctgcacaagacagggacaggacgggcactcacatggctgcgagtctcctcgttgccaaaggaacggcctgaactgaatggccctttcatggggcagtgggaggccagccgattggctgtgatcccccgtgcccctccctgcccagcgtggg

SEQ ID NO: 10408 - DNA, 201 bp, Bos taurus
tctagccaggcccggatttccttacctagcagttggcatgccctcaggtaggggcttaaaccatggcaacacacatgtcccactcagactggggacaaacgctgtcgttcctttggggccatgttgtctccttcttttgtcctgcagcagtccttggccctgggaaatcccaggcaaagtgtatcatctctctggcctcag

SEQ ID NO: 10409 - DNA, 201 bp, Bos taurus
tgggatgggggctcctctggcctcacacttgggggggcggcagcagcagcagcgaggtcccagaactgccttatgccagagacccctggcacatctccccgtgggcctggggcctggggggtccacctgcaggctcctgggggcagtcaggcctaggaggtctctgtgtggcctctgggaggcctggcagccctcccctcc

SEQ ID NO: 10410 - DNA, 201 bp, Bos taurus
acagacgtgtgtgtttgtgcatgtttgcaggcacagaaacacatagggcacacgcaaaaaggttaagcaaagtcattaatcagagacacattcttagaaccgtacaaggaaaatgctttaggagatgaaataagcaatttatttcaatttacttaataaacatgtattaagaatctatcaagtgactgagagaaggaatta

SEQ ID NO: 10411 - DNA, 201 bp, Bos taurus
cttggctggccttggttgcttcatcttgagaatggagatgacagagaatgctaattcatctcattctcctgaaacctctcaaggggacagcggactagtatataaggtcacaaaacatgggctgcttaaaaggctagagaattgggaacagggcaaaattagggcagttgtgggctggctggtgtcagaaggagtctcatt

SEQ ID NO: 10412 - DNA, 201 bp, Bos taurus
cccaaggacttcgtgtggtcttttcaggggcagaagcgttaaactaaccaaggtctgttccagcgctaagctttgaagctgtgatgaaaaccaagctcatttctggcccttgatccaaagacaatgcaaagagagcagcatctttgttcctttgggaagctggccccgtcttcctggtagtcaggaagccatgtaatatgt

SEQ ID NO: 10413 - DNA, 201 bp, Bos taurus
ccttccaagaccccagttccattgctcactaacagagagggcctctctagggcatcttcccaaacactggcattcaccatgtagtggctgctgggcatcctactgtaaattgttggccctttgacttattactgagttgctaagttgtgtcccactcttctgagaccccatgaactgtagcccaccaggctctcctgtcca

SEQ ID NO: 10414 - DNA, 201 bp, Bos taurus
cttttatgtctcctgcactggcaagcgggttctttaccactagtgctacattaaggttggtgggtgaccagcttaccctctggtattaagagcggcttatccagctcaaggcctgaagaagggacctggttttgcccttcaggttgagaatccttctcctcctccttctcccatcttccttaatttcatgaccagttgaga

SEQ ID NO: 10415 - DNA, 201 bp, Bos taurus
ctacctttcctttgagaaaccaatatatatgactctgtgatattcttgtgtgtgttttgcttacggggttagtgctctttatttttatatgggtttcatgtgctgccttgtgtttctccaggtagaatgcagttcattactaagaatatgattattgactttttttcccctctgttttctcttcccttctctctttatcct

SEQ ID NO: 10416 - DNA, 201 bp, Bos taurus
gcccagagtgggtgagggacttggatgagggtgacggcagaaagggggtgcacttgagtggcatttccaaggagcggcagacgtgctgacagcttgggcacgcagatgagggagcaggaagtgtcggagggaacttcgagatttccagcctcggttttctttcaggaacaagggagccaggaggggaggcaggtctgaagg

SEQ ID NO: 10417 - DNA, 201 bp, Bos taurus
tcatcccatcttccctcgaatgtttgttcgaggtaaaggaccagggccacgtgtatgaattagaggccatgagaccggaagcaggaaggtcagtgagggggcgcgtgttcactgtgagatgctgtgtctgaacttggcaacggctggagggatggagagttggaggtcatggtgtgaccttcgggatgagctccctctact

SEQ ID NO: 10418 - DNA, 201 bp, Bos taurus
attccaggcccagtggggagttcacccccaccacccctcccctgctcatacctccagctgctcccctagagcgtgtcctgaggacaaatctttccttgaggcaaggagctggccaagactccagcagctccagttctgtggcctccctgatctccttgtccttttgatcaggtgcttagacctttgtccgagtgagatttt

SEQ ID NO: 10419 - DNA, 201 bp, Bos taurus
ttgagagggacacatgggtgatatttacatcctcaactgcattatctgggaagtgggtgttttaactacttcctttttacggactaagaacacacagccccagagaggccagcacctagaagcacgaggatttgaaaccaggtctgtttcctccaggagctctcccactggaaaggcagacagatggcagaagttatttta

SEQ ID NO: 10420 - DNA, 201 bp, Bos taurus
gaatggccatttagttctacagactggcaagaccacatggaggacaggataagcctttgtcattggttctgctggagagggaagagttctgctggaggaagagaaggagcagcattgatggcccaagtctgtgtgtcaggaaatggtgatgcgggtgcacagccctcacacagacacaggagagcccactgcacatctgag

SEQ ID NO: 10421 - DNA, 201 bp, Bos taurus
ctacaacagggactaattagaaagtcatgggcagcaaggaggaattgattaacggggtgaggggacactttccacggcctgcctttctatgtccctggatgtcctaagatgcccaagctgggaacagagtatatagctttccaatctctgacaggaagaccaagttcaggatgcttgaaggttctttcctttgggggcctg

SEQ ID NO: 10422 - DNA, 201 bp, Bos taurus
tcccccactttaagatcagcagcttcagagctaatgttcaattctcatttccagagtctaaggtataggttttcacaatcagattctgagttgaacacagcaacatttatttattaatttctacctgattgggcttccctagtggctcagacagtaaagaatccacctgtactgcaggagacggggttcaatccctgggtc

SEQ ID NO: 10423 - DNA, 201 bp, Bos taurus
tctagccgtgagtgtgtgtgtgcacgcacgcgcaggtccagccaccttccggggctaccagcctcattccctggcgttcccctcgggccctcaagactgtcgtcacgccagtgctctgtgtttcccctcctgtttgattctccaagtcaaactgccctggccacggcgtgttccttcccggtgggagtcttgcctgcacta

SEQ ID NO: 10424 - DNA, 201 bp, Bos taurus
tcttagagacacagttgattcccagttcctatgttcccccttccaccctcctacccctggtcagacctttgttctctcagagctccgctaaataagatactgggttggccaaaaagttcatttgggtttctcagtaagatattcggccaatccaatactgtgacaaattcaccaatgccaagatgttaataagatttaatg

SEQ ID NO: 10425 - DNA, 201 bp, Bos taurus
aatgtttccaaactcctaagacacttccctcctgtttttatctcaaccagcaagactaatgtatatgagcagaagagtacgtctctctcatgcacacagacctacttccctcagtgattcagatcctgacatggcagagtctctcaaagagctctgcttctccattcaagaagccccagttcacacaggaatcaggcaatg

SEQ ID NO: 10426 - DNA, 201 bp, Bos taurus
ctgaagcaccctagtggtgtgggcagggatagaaagtgggaaatgggaacagttagaaccatgttggctgaatcagttacagtgcaaccgagggctcagtgaggaagaaacccacttgttcccaccactggcatatgcgtcaccatgacacacagcgtctagccccaacaagcaacaagcttgtgttccaatccacgcatc

SEQ ID NO: 10427 - DNA, 201 bp, Bos taurus
ggcggtcagcagcctgcatgctgcaactggagagtggcccccgattgccaccagagaacagcccaagaatcaacaaagacacagcatggccaaaagtttttaaaaatgataataataaccaccaaagacaattttgagtatggtagtttaaccccaggtcctatgttgaaatattttagaggccctacatatttttaaatg

SEQ ID NO: 10428 - DNA, 201 bp, Bos taurus
tttggccacaccacacagcttgtcaggtcatagttcctcaaccagggtcaaacacatgccccctgcaatgaaagcatggagtccaaacccctggatcatcggggaatttcttctggccatgtctgaggaggggcttcccaggtggcgcaagaacaaagaatccacctgccaatgcaggagacgcaagagacacaggagacg

SEQ ID NO: 10429 - DNA, 201 bp, Bos taurus
accgtcgttatctgaacagggagagagagaggaggaatctgaacctagacttgcatttgtagcacatctacaagatctaaataaatgagaggggtgtccttacgaagtgttagaagcaaaatgccaaccaatgcattgttatcggaagaaaaagtgtttgaggcaaagaagtgatcaaggagtcagaagagattttctgtc

SEQ ID NO: 10430 - DNA, 201 bp, Bos taurus
aggcgggagcccatacttcgccattgtctgaagggctgggggatggacctccagccaaagaaagcagatggagaccaagcctctgctggacacccagcctttacccacctggcccaggaatccactctgagtgggaattctaggtctgcagaaatctgggacacccagtttagccctcttgaaggggagggaatcacactc

SEQ ID NO: 10431 - DNA, 201 bp, Bos taurus
tggaaatcgcctttctgttaggacgtctccgaatcctcggtttagagattcttatatctggtaggtgtcgaaggggacagcaggaaccacaagcagaaccacgtggaaccactaacttttggggccaaggacagaattcttctttaggtctggtttggtttgcgaattcctggctgtcatagcaacccccaaagtaaagga

SEQ ID NO: 10432 - DNA, 201 bp, Bos taurus
gcctctttcaaaagagctcactctacagtgttggacatgcccggtcccatctttcttcttataatatgcttcatctttgatttctgtgctggttggtatagcttcttggtttcctattggcctatttctatcttaaaacatagagagctgcccagcgtctcctggcctcaatggaccggaagtagcaacagccttgttgat

SEQ ID NO: 10433 - DNA, 201 bp, Bos taurus
cgctcttgtaaactgagaagtgagtgtccctcccgactgtgatccacagtcctgatcctgcacagtcgtgggcatggaccctccaggatgccctggccttttcagggtcacagggatgccagaaatgtcagcttcctgcttgagatcagactctaaccttgtgggtccctcaatcagggcctgtgtggtgctgagggctca

SEQ ID NO: 10434 - DNA, 201 bp, Bos taurus
gctgcccgcacttctctagcccagggtcctggccttaccatgccgtcggaacagttggagcgcggactggaagcgtccgagtcgccgctgtagtgttcgccgctgcggccggggggcaacgggccaggcgcgtaaaaggcagcggcagcgccgggaggcgcggcgtcctggtcgcgaagtagcgcctgcaggccttcgata

SEQ ID NO: 10435 - DNA, 201 bp, Bos taurus
ctggggtccccggtgtctgactcaacccctgggttagcccctgtttctcttccccaggccccatgcgccccaaagggccccaggcctctgtgtttccaccgccctgctcttcctcatcacaagagtcattacctattaatgccctgagtgtgcaggcggggcgtgctgggcaaggccggggctggactttgtgccccattg

SEQ ID NO: 10436 - DNA, 201 bp, Bos taurus
ttccgcatttagaaaaaaggaaagttaagcacagaatggtgacttgtcctatgcgacataagcggtagaggcaggactggggacttgtcttttaaacacacctatattactactggtaatagcactactggaatatacatatatattctctggtgaaggacagggaaaactggtgagccgcagtccatggggtcgaaaaga

SEQ ID NO: 10437 - DNA, 201 bp, Bos taurus
tgagtagcagcagtgctgggccgagctgtgtgctccgaggcggctgggagcgggcaggcagaagaactcatcgcatggaggcagggagtggagaccaggcgtgagccaaggcttcaggcctccttcagaagtatcactcctctagaataatgctgaatatctagaatgtgtgtttttattctacaaacacagtctgaaatt

SEQ ID NO: 10438 - DNA, 201 bp, Bos taurus
taattttctgaatgccttttctctgagctacaagccttctttgctgtttttggtttggaagttttctggaatttagtagcttgtttctccaaattaggtatacctattgagattttgcagtttatatgaccttgtaacataatcactttctgaaaagggccttatggccacataggctggagaagttatggccctctttac

SEQ ID NO: 10439 - DNA, 201 bp, Bos taurus
ttttagctcaatggattttatgattaaagagatttttaagagcatactgttttacttataatttgttgaaaagtactaatttattttgggaccatgtattataaagttttcagtaccggagaaagttttaggtgtcagtgcaatgatttttctctgcatataatattcaagtgtcagtgaaatatgcaaaattgggaaaat

SEQ ID NO: 10440 - DNA, 201 bp, Bos taurus
cgtcaatcaatttacatcgatctaacctagttaaatttagttatttagttagatttagttatctaaattaatgtctgatttagattgtggacagtaaggaacatacttcggatttttctgttttagcttttccttatactgacctgatggacaaagtgggctacttttggccagacactgaggagaaaagacttggttgtt

SEQ ID NO: 10441 - DNA, 201 bp, Bos taurus
tgggccaggagtgtggatgggctcataggcattgcagttacgatctggatggtatccaaagtaaatattttgccattagctttctcatcaatttgataattgttgttggcttcaaggggccaatctgtagattttttttgaaagcgtatttgaatttttcagttctacatcttattgtgtagttccttctcatcaaaagca

SEQ ID NO: 10442 - DNA, 201 bp, Bos taurus
taactctcctttcaggctttttggaaaagctgatactaaagtttccccgctggaagccaatcttccctgctgagaaatatgtggaatatggtgttgtcagggggagagttggtaaagacttggatgaggttttcagataatacccagttaaaagtactgtgttcctgttaaagaaaaaaaaatctattaaaagcccatgct

SEQ ID NO: 10443 - DNA, 201 bp, Bos taurus
ttccattttctggatgtaccacagtttattcactcatctgctgaaggacatattggttgcttccacattttagcagttatgaataaagctgttataaacatccatgttcaaggtatactgcagacatatgtcttcatatggtattgacatttaagtcaacaccaaggaatgcagttgctgggtcatatgtaaagagtatgt

SEQ ID NO: 10444 - DNA, 201 bp, Bos taurus
aaaaatcagctttcttctcttttgctcaagaggaaaatgaaatagctggtactcatggaatgagaagtattttgaatttggtggtatacagaggacactactattttgagaattaagtcaccaaattatcttaaactgcttccaattcaaaacttccatttcttaagaggaaagccaaggaaatcagatctaggaatgtac

SEQ ID NO: 10445 - DNA, 201 bp, Bos taurus
aattcatttattccaggacttattctaccacaaatacaactgcttcttaaataaatgatgcacttttcatgattttttttgctataataaaacttttagaaattattgaaatttatctactcttgtttcttctatccacatgccatttttggagatcagctcctgggactgaagaacaggccacttggatttacagcactt

SEQ ID NO: 10446 - DNA, 201 bp, Bos taurus
tggaggcactgggtgtggggagacagcatttgtcatttgtttttctaaaccctggggatttgaagctaggtgaagaggaggtcaccaaggagggcagtctgcgggccctctaatcctgcaatcactcacgccaggggcactccctgtgccagggctccctccggcacttgacctcacttaatctcggtgactgacggccct

SEQ ID NO: 10447 - DNA, 201 bp, Bos taurus
acttagcaatcataatttttgttacgttcccctaaagaaaatctcccgcttaaaaattttgacaggaggaatgtgtagggacaatgaaagtgaggggacccgtttggggacctatcgatggactctgtgtaaacataggctgtctcttctaattcttgcctcactgctcagggaacaagtcggggttatttttcttccttt

SEQ ID NO: 10448 - DNA, 201 bp, Bos taurus
atgatctttccccacccccatttcattatttcttctttgggtctggagtgatataaggaagatagacagagatctatctttctaaaccttagcagattgcattgactgaagcttctactgactccaagggagcaaattgtaatgggtaaatagttacaaagcaatcccagggaggaaacattcatagaaactttataaatg

SEQ ID NO: 10449 - DNA, 201 bp, Bos taurus
tagcttcaagataaatccatcttttcctgggccccacctatgatcagaatctcagaagggtggaaatgtgtgtggattttgttttgtttcagaatttctctagatgagtcttaatggccaatccctgggctcaaccccacctttgggaactgctgtccggaatctcttgttttcgtcctgcctgtctgcttaacgcctcaa

SEQ ID NO: 10450 - DNA, 201 bp, Bos taurus
gtgtctaaggcatctgagttttgtgttggctgtcagtggatcccaccttagaaacttctgctctttaatgtctgtagtctgttatgtaaataatgtggcctgtgtattcacctgtgctcttacacaaataattgctttggggaaagaatcactgaataaactgtttataatgattacctttgggcatatgggatgagggcc

SEQ ID NO: 10451 - DNA, 201 bp, Bos taurus
ccccttttgttgaatgtatctcggtcagtgcaaccagcccaacataagactttcaactagagcacaggacagcaaaccagagccccaggccacggggggcacccaactcttactttggtaagtttttattggaacacagcccctcttatctatttacctattattgtctatggccgcctccaggggataaaggcagagttg

SEQ ID NO: 10452 - DNA, 201 bp, Bos taurus
gtctttgatttcattttcatgtatctgcatgtgtactttattttcctgccaggaagtcatgatgaaatggtgttggaaaattttgcgccctgacatcttcgaatatttactcttctcctcttctggaattccagtctggtatatattgaaccaattgactcggtatttagtttttcttaacttcacttccatattgtcgat

SEQ ID NO: 10453 - DNA, 201 bp, Bos taurus
taatttgtctctggggtttttaaaaagaagtatgtatttatattcagattgatggtccagcatctttaaccctgactaaataggtttgggacaatctactgaaattcctgtggtggacatatttcctgaaagcctctttgagatcaccactcctagaggctttacatggtaaatcattggctctatggaaatttcatcaaa

SEQ ID NO: 10454 - DNA, 201 bp, Bos taurus
ctgattggcagggacagtaagtgctggggctttgagagagagcctgttgtgggctggagcactgaggaagtctcccagggcaggtgggccagagccagcaagtggctagaggggaagtaacagagtgtctaaaaagacagtgcacctgatcggtgtggggcagggggttgaggagatcactctttatatcaggggccatcc

SEQ ID NO: 10455 - DNA, 201 bp, Bos taurus
atgataacatgaaaacatcaaatctgcatggtgatgcatagtttgacattgctaattatctatggtatttccatctgagtcataggaaatgtgaggttaacttcattccctatgctgacttttcacaccacctaccttcaacctgaccacctaatgcttaatgggaatatgacaaggttagaaaaaacaaaaaaacatgtg

SEQ ID NO: 10456 - DNA, 201 bp, Bos taurus
tttgtttttggctgtgctgagcggcttgcaggatcttagttccctggccggggactgaactcaagcagagattaaacctgggccatagcagtgaaggcgctgagtggaattcccttgttgttttttcttttttttaaatcatgtctttaagaaagcagaaagttggccacttaggaaactacagtgaattacttgagtttt

SEQ ID NO: 10457 - DNA, 201 bp, Bos taurus
ttcaggatgagggaaaaggcaaaccaaaaaggaaggggtgagggctgctcagagctgccccagggactggagaggtgcgatcaccagtgaggctgtgtgtgccgctctcctcttcctgctcatcctggcccactgtgccaaggatcctgatgtgcagggaggcagtagggtgaagtgggaagagctggaggtgcaagtcgg

SEQ ID NO: 10458 - DNA, 201 bp, Bos taurus
tgctcaaggagtctccgcaccaacccagcaaccatggccatcctgaccatgtcctctgcctgctgccgaaaccacagggatttcttaattcccaagtttcgcctacatggcctgcatcatctagttttttcctttgatttttaatttcagaataatacatgctttttgtgggaaaatttagcatcacagaagcacagtgta

SEQ ID NO: 10459 - DNA, 201 bp, Bos taurus
ggccagaggccatctaggagagaggacttgggactggaaagtgcaatgagggaaaggcaagccaacacaggtgaatcagacacgtgtttgtgtgcttgtgggcacacatgtggccagcagaatagcaaggatagctgcttgtgtttgctgacatctggggcatgggtgcactgggaggctctcctaaaagtatctgaggta

SEQ ID NO: 10460 - DNA, 201 bp, Bos taurus
ttgagacaagcccattttatagactaggaagttaaagcatagaagcattaaatgacttgctcagagttatccagttggttaagtggtagaaccaggatttagacccaggcaggctcactctacagatgctctaagtgaatttttctgtgaagatggaattgttccacagtctgctgtccaacatggtagccccttgccaga

SEQ ID NO: 10461 - DNA, 201 bp, Bos taurus
cgcagattttccaaaactataaattataaaattataaatttattgaggggccagaaatagaaaaataaattttctttaagctatgtctgtttctttcaagccttgttttataaagtcaaggtggccctctttttgataacagctgtaacttctgagcccttgttttgtgccactcattgtgctagggaggtccttcatgtg

SEQ ID NO: 10462 - DNA, 201 bp, Bos taurus
gccaacctacacacttctgaaggaaggggaacagagagtaagaggcagacaataaaggggctgtgcccatatcacctcaaattcctttgtgccctggtacatggccctggcactgatgagcctttgcttccagaggctggcacctgtggctcattcctgaaggaccagcctcagggcactggagtttctctgccaaacacg

SEQ ID NO: 10463 - DNA, 201 bp, Bos taurus
tgcttactctgggcttaaacaagattgaggggggtagggagaagagacaaaagaaagtgaattaacatttgcggagtaatctaattaggagccaaagcctatatgtcttaagatcttggtaaattctcaactcttcagatacattctgagatcctagcttcacctctcttcctctgttccctcagctcttccaattattct

SEQ ID NO: 10464 - DNA, 201 bp, Bos taurus
actggccagaagaagaagagttgaagccaagagcactagatttaagcctgaaggagatttttaaaaattaggtgtctgtggctataggagttattggcagtgaccaacacaggcctcaggcaaaatagagaagaaagcagattcctagcaacccctccagagaactgagcaagccctgtgatgctctgtggctgggttaag

SEQ ID NO: 10465 - DNA, 201 bp, Bos taurus
gatacagttagttaaaatgaggcataatggtattagggtgggccctggatccaatataacacatgtgttgttataagagggaaagttgaacacagacacagagagagagagaagatggccacataaatgtggagacaggaatggaagtcctgctgctgaaagtcaagcaatgcctggggctaccagaccctggaaaaagca

SEQ ID NO: 10466 - DNA, 201 bp, Bos taurus
gaaccaggccttgaatccagatctatctgattctaaaggcctttgccctttcccttataccagcctatttatctcagtcacaaagaaatggtggtttcttgaaaggggggaaagggacccatggccagataagtcccaggcagtgaagacaggcatgctctcagctgcctgataggacaggtctgaagaggactgcaatgg

SEQ ID NO: 10467 - DNA, 201 bp, Bos taurus
tgtctcctgcattggcaggcagattctttaccattgcaccacctgggaagcccaaacttagtagtttaaaaaccttaaatttattatcttacagttctgggaatcaagtctaaaatgcctgtcagcagggctattttcttctggaggttccagaggagaatctattttcttgccttttctagtttggggaggccatctgca

SEQ ID NO: 10468 - DNA, 201 bp, Bos taurus
caataaaagaagaaaatctagagattcacaaatatgtggaaattaaaccacacagtcttaaacaaccaatgggtcaaagaggaaatcaaaagaaaataatttgagatgaatgaaaacaaatcacaagataccaaaactttgagattcagcaaaagcagtccttaggggtaaatttatagatgtgaacatctataaaaagat

SEQ ID NO: 10469 - DNA, 201 bp, Bos taurus
aactattaccaaaaaacacatggaaaattcaacagttgctatatgctgtcatttaaaacatttttactcatctctaacagcagaaagtctgggggttggtaagtaggagggaagaaagttgtttctgaaagatcaagagcttagtagctcaatatcccacaggagagcttgaagcaaaagagtaggtcaactcttaagata

SEQ ID NO: 10470 - DNA, 201 bp, Bos taurus
tcatctttaagtttgagctcacatggagaatagtcctggtttctgtactggcagtgacttaatgtctctgcctgaggttcacaactcagaatcccaggcctgataaggtcattcatgatatgcagattccctgcaaacaaccacagccaatttcagcatttattcaacttctgcctcctaataatgacagccggaagtgag

SEQ ID NO: 10471 - DNA, 201 bp, Bos taurus
tgcgtgctcactgatggacttcccacaaaacccccagctccctgtaaggacccctgtgtggccacctctgcctccccacaacatacaaggagctggccctagacacagcacctgctccaattctccatcatattctcaacttgaggtttactatggggaggaatgtggagttgctctggtctgttcctatggtggtggcct

SEQ ID NO: 10472 - DNA, 201 bp, Bos taurus
agatgtcacgtaaatgcagaatttgggcgatcggaaatgatcacccaggctctcaggagcctgaagatgagttgcgaggacagactgatcacacagaaccggtggccctctcgggggtgccaagaggatattgcttagacaatggcctttctccttgtgagtttaacagcagccttatttagaaggtgaagaaatctagga

SEQ ID NO: 10473 - DNA, 201 bp, Bos taurus
ttagcccacacttgccacaactagagaaagcccacatagcaatgcagacccagggcagccatcactattaattaaaagaaagaaggccaggactaatgtgcatgtctgctctgggtgaggggcatgttgacagcatatttatcccatatttgccatttctggcccagtggttcccaactcctatattccaccctggcttga

SEQ ID NO: 10474 - DNA, 201 bp, Bos taurus
tgactgaatttgtaagtcaaaggcagaagtccacaaacttttctgcaaagagctagataataatcttttccattttacggaccatatagtttcttttgcagctactcagtctaccgctgtagcacgaaaaccaccaccatagacaatatgtaaatgaatgaagcatagttatgctccaataaaacttgccatgggctgcat

SEQ ID NO: 10475 - DNA, 201 bp, Bos taurus
gggagtttgtgcagctggagaacaaagtgagagggttcctcagagactcacctggaatgggggccgtgactgctggctggatggggtaggcctgctgcacaaagggcttgacgctggagacagaggacagagagagtcagaaaccatggctgtagcagcagctacttcctaggtctggccgtggcctcccagggctaggga

SEQ ID NO: 10476 - DNA, 201 bp, Bos taurus
cgtgtgctgggccattgtgaaacaagtctcattcttcagagtttggtcccattgcaaggagctggcaacgtgggcactcatgaaatattaacatgttacattgatttttttttttataagtgtggccaacagtggatcaattatattagtatgaaaagcttttcataattcatttggggagcatcaagatctcatttccag

SEQ ID NO: 10477 - DNA, 201 bp, Bos taurus
gagtcatgtcaatgtatggcaaaaccactacagtattgtaaaagtaattagcttccaattaaaaagaaaaaaaaaaaaaaaaaaaaaccctttccctctttctggaggaaatcttgcctttcaataaacagggcccttgtcccaactaagagagccgaaactgttgggggccgggggcggtgtgggggctgcggagcaggg

SEQ ID NO: 10478 - DNA, 201 bp, Bos taurus
aagcaggcagatagtttcctacttctgttaatatcacaaggtcctggggaaggcctgcgatccgttggttccaagtgagaaaagcaggcagggaaactgggtgctgtcacaggctgaaagcagggccagcaagccaggggctggcggtaagcctgggagaatgttcagggcaggatcgggcagacatgtcagagaagaaag

SEQ ID NO: 10479 - DNA, 201 bp, Bos taurus
aaactgcctcaccaatatccaatattcaagtttagtataagatcacttatcatttctccaaaccactaatggacatgtatgggaagatattagtccttttgttgatatgatatttattatttaaaaagttgccaggagaactgggttatgaaagtcaattcagcaaatatttactgagcagctacttctacttattctaaa

SEQ ID NO: 10480 - DNA, 201 bp, Bos taurus
acaaggtgtcaaaggcatcacgttctgaaaaaaagagaaagcaaatagagcccagagctagtgccgccccaggccccaggccccagcctctacagaccagcggtcaactccaggtgagaattctctgggggataaattgtgctggaaacttgggaaactgcttaggcagaggtttggggtggactcttatcttgggggcct

SEQ ID NO: 10481 - DNA, 201 bp, Bos taurus
tttttttttttctgtttttctcatggttagactggagatttgggagaggaagaccacagaggtgaagtgccctttcattgcctcctatcaagggttcacgttatggatgggagttatcactggagacgcaaccttgatttggccaaagtagtgtctgcgtgaggttcctccataccctgatcactggaagccagtcactaa

SEQ ID NO: 10482 - DNA, 201 bp, Bos taurus
gtcttctactctgaggcatagcaaccatctcacagaggcccagagcagcccgtggtcccccagtggatcaccttggccctccctgcctccagctgccctgagagcagaagtccggtcacctgatggtggtcacagccacaggtaaaggcagcaaatgccacggagaaagatgaaaggtgagggccaacatggccttggcaa

SEQ ID NO: 10483 - DNA, 201 bp, Bos taurus
aaacaaacatggttaagaaatttttacttcagtaaaaagtactaaaaatgcaactctgaaactgcaacttccctgaaaagagagactgaaaaacaaacacagctaagaaatttttactttcagtaaaaagtactaaaaatacaactttgaaattgcaacttccctgaaaggaggaattcatattcttaaaattagagaaaa

SEQ ID NO: 10484 - DNA, 201 bp, Bos taurus
ggtatctgtatatgctcttagaatgtttttgtcttttgcctactgtctaaacggactgtttgggttttttattacagtgtttcgagatgtctttatgtatcctaaatactagtcctctgtcagatatgtgctttccaaataatttctcccagtctgtagcttctctttttatcttcctcactttggctttcaaagggcaaa

SEQ ID NO: 10485 - DNA, 201 bp, Bos taurus
ccactggctgttgtataaaatccactttttgttgcacttcacaatccaatcaagaaaatgttcattgctgttgcacagaataaggtgacaacttaaacagcgattttttaaattttctgtcagctcatgaggtcagctcacttatcaagttttttcacctttccaatttgcttcaaatacctaacgaacatgctgagttct

SEQ ID NO: 10486 - DNA, 201 bp, Bos taurus
cccttgccttaaatcactaccctataagtgatcagtaaatgttaattgattgaatgaatgaataagtcgtaagaggcctttgttatttactcacgcttagggaacaggatccagctttggtggtggtggaatgctttcaatgtttctaagaataccatctcattcccatcttgaaacattggccagtcttgatatttatag

SEQ ID NO: 10487 - DNA, 201 bp, Bos taurus
gggccatttgctactcagctctagctaactgtgggtcatgggttgccataaccttagattttcaacaatctgaaagtccacattttcaggtgaaatgtgacatttaagcattggtagataatctgaattttatagaaccagtgtgggtcacattatgcagtttcagcagaacatgcatgttgtgtaccgcttaaaaaaaaa

SEQ ID NO: 10488 - DNA, 201 bp, Bos taurus
atttatagctagtagttggggaactgagtgtaaatctggggatgcctttggcattgtatatctgaacaatgtcatcatttgtttccagaaaaaaaaaagtcaagcattctactacttgtctacaagatagggtacatatttttcagttttacttatcctatcaacctcattctctgccctccttgcttttcatccacttat

SEQ ID NO: 10489 - DNA, 201 bp, Bos taurus
acttggcaccaacacaagcccacaatgtgaggttatgatggggagctgcacagcataccaccatgctgtaaagctaagattgtaatatggcaacctgatcaccccactgtacctcccatgatagcatcacacatgtattataatatttcaacactctgacaataaccagcatattataaaaccctgacctcacagctttca

SEQ ID NO: 10490 - DNA, 201 bp, Bos taurus
agtaggagggtctagagcacttttctttgagaagtaaggagctttataagggtagttttgtcaaactcagttcttggcctggggcaggccagttggcagtccagaagacttaactctccaaggaaataaaaactctactaagaagcccaacgtgttagtcctgagggccagacatctttcagagattacacctgtgtacgc

SEQ ID NO: 10491 - DNA, 201 bp, Bos taurus
acaggtactaactaactaggtctttcatgaaaataaagtggcatgatgtgaactttccaaaagctgggggctacctgtatatggtttaattctgggcctttgataagtcagacactgaaatgagaaagatcacccccttcctggagaatctcaggaagtaacagacagctgtactgagtggaactgtgtgcgatctgtgcc

SEQ ID NO: 10492 - DNA, 201 bp, Bos taurus
ccgcagctgggaggcaagctgcccttggcaaaggccagggacacactggcccagcctgtggtgcggccagcaggaaaggtctccttgtccactcctggcccgcagcctatcttgttcagcagcttgaaaagacaaactggtgctgaagacaagccaagctgaacaccaggccatgcagtgagctcacatcccgcccctcac

SEQ ID NO: 10493 - DNA, 201 bp, Bos taurus
ctcaacaactcctccttgcatgcacgtatgcatgctgaaaaaaaaaaataatcgtacgacagtatttcaaggacatttgaacatggtagtcaaagggctcggtttagttgggaaatccctgcaagaacatttttagagggtagtgcgtccagccgcgatacacagccatgattgaagcaggctgctccagcttactcttcc

SEQ ID NO: 10494 - DNA, 201 bp, Bos taurus
tgaaaaagaaagtatctctttttagtcttttctacttctacactttccataacctttactcttttttgctgtaaaaagaatcaattctctttttttggccgcaccaggtcttagctgcagtgtgcaggctcttagctgtatcacatggcatctagtttcctgaccagggattgaacctgggccccctgcactgggagtgtg

SEQ ID NO: 10495 - DNA, 201 bp, Bos taurus
ctaataaaaaaagtatataaagtaccaaagtttgcaaattatttccttatttaaaaaattagagtggatgcaatattatcactataataacattcttagtaacttgcattcatatatgcttttttactttggaaagaaaggaatactaggaatcgcacatgaagactgtatcatctaagttgccattaagaatttctttgg

SEQ ID NO: 10496 - DNA, 201 bp, Bos taurus
agtgggctaggtttgggggagaaagcctgccacagccaggaactgaggataaggactgtatgcagccaggcagctgtcaccaggagggcttgaggccacacgtctcgaggcaccgacacctagagccctcagcatgactggcgaacactttctgaggtggtaagtgatggcccaccactagagttgccagatttagcaaat

SEQ ID NO: 10497 - DNA, 201 bp, Bos taurus
ataaggagactgtttgtgggcctcaatagcctctgcagtgccagagtctatcaggagaaggacccatgaggaacccaggtgagctggagccaggatgcccggatcctgtgagaggcccattagcgcaggatttcagaacatggactctggagtaaggccaacctgggctgaagtcatagctcttccatatgctggtcaaga

SEQ ID NO: 10498 - DNA, 201 bp, Bos taurus
tctccttcacccaggaggcaaaccgcccaagtggcctctgctacagggacactgaaaaccctcttagaaagcacaagtcccagggccaaggagccctgtccggcaattcctcttgggggcactggtcttggacttggtacaagtgtgaggcttcctgtgccacatacctggagtcagcagccccatctcttcccagctccc

SEQ ID NO: 10499 - DNA, 201 bp, Bos taurus
agagaattttacggactgtatagtccatcgggtcacaaagagtcagacacagctgagcaactttcactttcactttggaggttctgggggttacaacttggcaaaacctttgggggccactataaaacctgctgcaatctggtaagaaaagaaataataataccactattttacagatgagaaaactgaggcatagagatt

SEQ ID NO: 10500 - DNA, 201 bp, Bos taurus
gtgagaatgaaaacaaactgtcatggaattatctcctcatctctgagtcagccagctgaccctaaaactggcacactgccctcttgtaatatggagaatatagagtcttcttgagtggtgtctgtgcattatgacaagagaacccccaaaatgtcatgccaaaccagagacctacctggttctgcaaaccaggcaggaaag

SEQ ID NO: 10501 - DNA, 201 bp, Bos taurus
aagtgaactattgtactttacttaaaggaagtgggtggtagtattaatattaagcaagatggactctttctgatggccagaactatatgtagattcaatttaattacttcatattagaaatttagttaagaataagtggtgtagtgtggaaggacaagaaaaagtctccaccatcaggcctcgttgagaactggatgaatg

SEQ ID NO: 10502 - DNA, 201 bp, Bos taurus
tttcatctggacagtgtgtcttatctcaattaaagtcaaagttctgatgttagatttcatttttctgctcccctcactccatgacattagctttgttctttcacatattaatctggtccttcggactttcctatacaggtaggttttgcttaccttgaccttcatacactacggagtgttctcttggaacctataggaagc

SEQ ID NO: 10503 - DNA, 201 bp, Bos taurus
aaatggaaatattaattttgggggtcatatttatattagtgttactgttagaaactgtggtttcctgtactttttaagaatagctaccttaaaaagttatctgttctcattttcttttgcacccttcttgttgttttgtgcttcccactttttgttccttgtatgaataccaccttatggttaccacgggagctctgaacg

SEQ ID NO: 10504 - DNA, 201 bp, Bos taurus
ggagcgtggcagtagaatttctgtacttctctcatgcccttaacagctggattactggaactgctgccttaaccaccaccagatataatgtgacccaaccggtccatgtatttagccttagtttttacaagaatgggtcaggtttgtaggatgatgagaaggacagaaatatataggaaaatcacagattaagaaacaatc

SEQ ID NO: 10505 - DNA, 201 bp, Bos taurus
acagtatcttttctttttttatattggcctcagactcatggcttttttatgcaagggaatccccactagcggttacattctaatcttgtgtcctttcttttctattctcaaatgtacctggaaagctgtatttacatctcagggttaaactctatgtaatttgtttgggtctctttctatgcataatgaggccataattat

SEQ ID NO: 10506 - DNA, 201 bp, Bos taurus
cctacctgacagactattaaacttcctttaccaaatctacttcctcccccagctacagaaacatacccatggttctgtcctcggccctcgcttctcccactaccgtctctttcttcctgacctaaccgactcccacggcttccctgtctctgtctccagccctggcctctcacggctctgaacgtactcttccagttgaaa

SEQ ID NO: 10507 - DNA, 201 bp, Bos taurus
atgaggtcgcaaagagtcggacacgactgagcaactgaacaacaacaagcctctggggcaaggcatacatgtagttctgtggtaaaggcattaacttctcggggaaggccgcctgcatcagcaatgtgagagatagctgtgggttctattctgacctcaccggttccggtttgtccttatgaattctagtttgccctcact

SEQ ID NO: 10508 - DNA, 201 bp, Bos taurus
gctgtttgacattttggcctcaaggtctaccacaccttgacaatagtatatctctttttcttagttcatattctcaagagaaaatgtggtcagccaataatgaattgtttctcttgggttggccaaaaagtttgtttggatttctccataccatcttaagaaaaacccaaatgacattttggccatcccgatacttgggtc

SEQ ID NO: 10509 - DNA, 201 bp, Bos taurus
ggaggagacatcaccagctctactagagaaaaagccagccatggacgtcagggagcggggctggggagaaggctatctgcggtttaggccggtgggcttcttagagttaggatgagctgggcttcctagctcaatcttaaaacctattcccatgacagctcgtcgggcctttagtgggaggcgggggtgggggcggagcat

SEQ ID NO: 10510 - DNA, 201 bp, Bos taurus
ctaatacatgctgtcatgcttgaccacctacctaaattctccaagctttctttaacctcctttatgcactttttttttgtgcccattaaatacccttctttctcttgtctgcctaatgagttcaggcataagctcatctctgaagccttttctgatgaagactgagactgagttgttttgtgttccttgtgttcctctggt

SEQ ID NO: 10511 - DNA, 201 bp, Bos taurus
cacttgatgctcagggataagcatttcatctaaaccagggcccagtcacatgccaggagctgcttctcaaaaggtgtgtaattctctgctatagatgacatgactttgctccagactctcaggggccaactttatgattcttttgctgggttttgcagtgagctctagattgcatctttccccatcattgccacttccaac

SEQ ID NO: 10512 - DNA, 201 bp, Bos taurus
ctttgagctggtcttcatgcaggcctctcatctggaagtgggaccatggaccctatctctctgctctgagcccttgaagcaacatcttctgatgtctcatgatcttacggccaagtcgactatagcccaagtcagacttggtgtcactctgcgccctctaatcatcagatgcatttagcaatctttgagaatgcagattct

SEQ ID NO: 10513 - DNA, 201 bp, Bos taurus
tagccattcatataccatatgtggcagttcaaataatgttagttaattcgtaaaagaggtaatcgtgtttgaataatgctccagatcaccttaaatcagtgtagcagttttacttgctaaatgaacaagtctaaatatgactttatctgctaagtagctttcagtcccatttgggatttttaagtgcatttttttaactgt

SEQ ID NO: 10514 - DNA, 201 bp, Bos taurus
cctgtagtacttcctaaggccaggtattattctgaatattttccttcccacagctggagaggcaaggggtcctgctggtggaatttgaggctccccttgcgacaggcccagagctgccagcccagcggcagagcgtggtcttagaggaagatgtcattcagttctcgccaaccatggaattctcactgcgacctggggaca

SEQ ID NO: 10515 - DNA, 201 bp, Bos taurus
taaaaataaaaaaaaaattgaaaaaggaagtgatatgtggaaaagcatgacctagaaaacttaaaggtcatctgggccaaccatctttcccagttgcctgccttagagaaacctggttatttggatcatgtggcatgaataagccccccttgcccttttaacggccacatagaatattataggcagaatacctaggaagaa

SEQ ID NO: 10516 - DNA, 201 bp, Bos taurus
gctggtggtgagtggctggccagcgagcaaagcttcatctgctgttccccatcgctcgcattactgcctgaaccatcctccatccctcttgacaaagagcttggggcctgctgctctagtagacattgctgtccactggttgaggtggaaggaaactaatggggtggggaattaataacgaacaggaaaagaattatgata

SEQ ID NO: 10517 - DNA, 201 bp, Bos taurus
gtcacattcctgatacaaggtagaatcggaaacgtgcagagaaatgcagtgagttctaccctctggtgagcattggagcccatgaggggcggggccttatcgatgacgtggtatgagtgaacgctgctgctctgtgatgaacctggaggtgcctggactccaggtcaacggagtcaggcctccttttgaccccgagttgcc

SEQ ID NO: 10518 - DNA, 201 bp, Bos taurus
gctcaaggccattccccagttttgcttccctgatgccaaggactggctccctgtgtcagagtacagcaggtgaggcccagtctggcagaatctcctccactctgtcatagcgggcggctggctgggcccactctagtcccagcctcttctcctgtagcagcctggtccttcaccccctccctgggatggcagccccttctt

SEQ ID NO: 10519 - DNA, 201 bp, Bos taurus
aaccactcactatttgtcgaagttgatcctgtgatgatgcatgccaccagcattacctcggcctcccgggtgtttccggtgtttgcctgcaggaacacatgactacatggctaaaatagccttctccagcccgtcaatactattgtagcaaaagcatttccccatacttctgggccttggctttatatctcttccagcaat

SEQ ID NO: 10520 - DNA, 201 bp, Bos taurus
agcccgtgggctgttcggttcttaaagctgaggggccttgagtcaggaattcagagataacagacacctgcctctgcttgaggccctccaccctggcctccgagtcctcattaaagaaatcagacagacaggattgagcgcttggtctgcaagtctgcccatgacactccttggctctggggttaaaactcccacctctca

SEQ ID NO: 10521 - DNA, 201 bp, Bos taurus
ttcctcacacacgctgagagatcttccctgcctcaggacctttgtacttgctctttgttctgcctggtgggattttccttctcatcctgcaggtctcagctcctcagagaaggcctaccctgactgcctgatctaaaccagctccaaaacaggaggtaggtttctgtctacttcctgttttgtttccttcaaaggtcttat

SEQ ID NO: 10522 - DNA, 201 bp, Bos taurus
aggagagagacaccaccccattgatgttgctgtgtccttctttcgtctcccggggtcaggagaagtagagatcccaggtgaaagcatttgtggcctccaaccctccacacttggtcaggtggacgatcccatccctggctcttcccaggcagagctcaactaggagacagaggggacttttgaaataggcctaaagcctgg

SEQ ID NO: 10523 - DNA, 201 bp, Bos taurus
aagaggaatgagagtagatggcggtctgcaggggaacccaaggatggcatttttccccacacctccttcctgagctggccgggttgggctggggcaccggttgcttgaagccatctggaggagtgagccacatccaaggttgtctatagaaaagcctcaagtcaccagagacatagattgcaaatgccaaggccaaaggag

SEQ ID NO: 10524 - DNA, 201 bp, Bos taurus
taatgaagcaaaatagattaaaggggaaagacaaggagttcagaaatttgtagagtagtatcacatcccctttttccatcttttttcatctgtgacatccctaggtcccacatccattcctcacgtgatgtagtcacaagtatgtaagttggccctcttagaaggcaaacagtagcaagtgtgagccagttagctcatgga

SEQ ID NO: 10525 - DNA, 201 bp, Bos taurus
gcatattctatgctctctggaaaaatgaaatgtatatggcatgactcttcactctgagaatttatagtctaggatgaatgttaggaagatacaactggtgaaaagtttattgcctagaaaaaagggagttggtgaaagccttctgggaaatcgtgtctagctgtggaggaggcctgatagggaacttgagtaagacacagc

SEQ ID NO: 10526 - DNA, 201 bp, Bos taurus
gccatggccagggtcacaatcccagcccccacctcctcctctctccatcccagccttcccaatcacagagcaaacactgaggctgtaggccatgtactcatagaacaccagaactatgagtgcttcagtaaccagtccacctccttctactacaggggaaataggcccagagaaccaagggactagcccagaaacagaatg

SEQ ID NO: 10527 - DNA, 201 bp, Bos taurus
ggacgaggccactcccaacaaagagaagaggcccggtaagtgtgtccaaatggaacaaagctctttgaactgcagttctagttatgagcatggcacacttagtgtaggagggcctcacagacagcctggcaaatgaatagctatagaccttatgggggcctcaaatccccactcacctcatcttctgactcattgtgtggc

SEQ ID NO: 10528 - DNA, 201 bp, Bos taurus
taatttgtccaagtattcaaaattatttggtggctggatgggattagaacacacgtttcttggacttcagagttcatgcttttggcccctgtgcttgcttaactgtatcttgcatgatagaaacacaggacccagaaatatgctcaaatcagtttatgggcccaagcatttctcttgtggccatgcactgagctgttgttg

SEQ ID NO: 10529 - DNA, 201 bp, Bos taurus
ctccccttgaggcccacgcatgtgagcatctgtagtgaggttcacccttaataggtgatctgggaaagaaactcctatggattctgggagtaagctagaggctgtttgggccaggaatttgaaggtcttgttacttggatggtcttaaaggagtggataggatggactctgggtggacacatccctgtggccttgtccagt

SEQ ID NO: 10530 - DNA, 201 bp, Bos taurus
agtagaagagaatgaacacacaatctgagcactttctaatgaggtggctctgctgggaaagaccttgttgaaaaagaaaatactcagttattgattgcctgtgtgacatccacaaattgctcctgtttgcctttatcatcagctttggcttttagagtcttccccaccaccatgtgttatcttctgcctaatgtactatca

SEQ ID NO: 10531 - DNA, 201 bp, Bos taurus
gtgatcaatttctttgctccagtaagtggcctaatagggattccaagccaggactgtctgaaatcagaacttggtgctcctaaccactatactatactgcttctgcatgtgctcttggcccaaaaaagaaatatcatagcagaagcagatgtggggagggtgtgaggggtacagatgaattaagtttatatcaggtaactt

SEQ ID NO: 10532 - DNA, 201 bp, Bos taurus
aattagtcttcttatgatttctcatcaatcactggaaatcacaaaaaattatgcttggttttcagggaataacagataggcagcaggccaaatacagaccctagattgctgacccccaggtgaggatgatgtctctctctctataatgaatctccagggacagagggtactcttgtaaaaatgcagattcaggcccagcag

SEQ ID NO: 10533 - DNA, 201 bp, Bos taurus
cactctccacagctgccgaaggtatctttgaaaaatataagtcagatcatttccctgtctgcttaaaactcaccagtgacttcccatctgactcagagtagagctcagctctaccttccaggccatccggggctgccggcccactgcctctctgccttgatttctgcaaactcccctactttgagcattttgttcagctac

SEQ ID NO: 10534 - DNA, 201 bp, Bos taurus
gatctcatttctattacgctccctctcagccccattattctcccacactgcttacctcactccttgtacaggcttcctacaggcctcagtgttggctgttcctcagcctgtatttctacatggcttgctccctaatctctttcaagtgtttgctcaaatgttttaatgctcctcaaggcctaccattacctatattaaaat

SEQ ID NO: 10535 - DNA, 201 bp, Bos taurus
tgataaaagtcaagcatctattatggtaaaagtttttaacaaaccagatatagaagacgaatgtgtttgtctgatggtgggcctctaaaagcaaggctacagcactgatgtacttactggtgaaatgtgaaaggctacccaattaacataagaaataagacactttactgcttatattctatactgtacttcaggccttag

SEQ ID NO: 10536 - DNA, 201 bp, Bos taurus
caaggagtgataggccaaaagaagacaggagttaaaacaaaagaacaggattttgcaaacagtattgcattagacaaaagtatgtacaggcattcttttatattctaaagtagcctatagagtggggcaccatcaatacagccttaagaactgacttgagctctgagtacaactcatggaagcgagtgtaaagagatctgc

SEQ ID NO: 10537 - DNA, 201 bp, Bos taurus
gtttctccaaagacatacagatggccaacaggcacctgaaaagatactcagcatggctaattgttagagaaacgcaaatcaaaactacaaggaggtaccatctgacaacagaagaatggccatcatttaaaactctacaaataatagatgctggagagagtgtgaagaaaagagaaccctcctaccttgttggtgggaatg

SEQ ID NO: 10538 - DNA, 201 bp, Bos taurus
atgatgaaactgcaatatttactaaaaatgtaatagatttatgctttatgctttacattcattctctcattttcttctcacaactgtgatttaaataccatcattatcctccccatactggaggtgaatgcagaattttaatgcagatacataattttgaggttgagaaactttgtaattacatggaaattacatggaaat

SEQ ID NO: 10539 - DNA, 201 bp, Bos taurus
gtccatgaagctaagagaagacctaattatctcaatgccaaaagaccctctccaagacatattatagtaaaactgtcaaaagtcaatgacaaagacataacatttaaggcatcctggggataaagaactgatacagaacaaccaggaaacaaaatggcagtataattcctcattcatcaatcatcaccctgaatgtaaatg

SEQ ID NO: 10540 - DNA, 201 bp, Bos taurus
tgattaggaaccagatcttttgactgcagagccaaaatcatttcccttcatactacatctaaactgtctttctgccatgagtctggaatgagaccatcttgatgaaaccttttccatgctcctaatagaaagtttctcacaatggagtttctagagcattttgtatctctcatagctcatgtcacattctaccctcactgt

SEQ ID NO: 10541 - DNA, 201 bp, Bos taurus
ctcccaagagaggcccatatatactaaaaattccctcctacttgcaaagtttctctgttcaggctccagcttcacaagttatgcccattcttaaaatgtaacaagtttagtctcagtagatcaatggcagtgtaagcccagtatccaaaggaaactactacaagtcagagactgttacgttacactgattttctgcagtaa

SEQ ID NO: 10542 - DNA, 201 bp, Bos taurus
tcaggaaggaggtcattgtcagacacagatgtttgctccttgaaggcttgagtagtgggagagagctgggaagctttctgagcaggggtggggcctggacagaggtgatttgaagagctggggtgaggacttagagctcactgggtcttttctgtacctaggatctgaccaacagccacttcttcttgtttgattttgaaa

SEQ ID NO: 10543 - DNA, 201 bp, Bos taurus
ccacttcctccgccaccaacacacactgccacgggaaggcctggactaagtccagccagtgctggacatacatcttcacgggcaactggctttcctggggcaactggttttcctgcttgaaggccttgtctagggacgggcccagagcaagacgggcagccacgcagtcctgcagattgtgcaccagtgccaaacgcagac

SEQ ID NO: 10544 - DNA, 201 bp, Bos taurus
atgacacttatcacattgtaggttatatatttacaagtctgattcccaccctagtctgagaacttgtaaaggacagggagtgtgtctgtttcagcattgtttctccagtaactgttttaagggccttgtccagagtgcccaggaaatttgattgcttgataggttgatcagctgattgaatggttcattcacctactcagt

SEQ ID NO: 10545 - DNA, 201 bp, Bos taurus
aaaggagccagatcacatgggtctgggaattccctggtggtccagtggttaggactcttatgtgttcactgctgagggcccagggttctgtccttggtcgaagaactaagatcctgcaagctgtgcatggaccaaccaaaaaagaaaaaagattatatcatgggcctggtaaggattttcaactgtaaaaggaagccagga

SEQ ID NO: 10546 - DNA, 201 bp, Bos taurus
ccattttaaatagagaggtggcaaggtacatcgaaaaagtatggttttcatagtcagactgtcgaacttaattgctggtgaagggcaattctctttttctaggtctgttacgagtactagataaacttttccacatactcatttactcatttcatattgtgccagacgatggggatggatggtgtgttacacagaaatgga

SEQ ID NO: 10547 - DNA, 201 bp, Bos taurus
tcaggatgaagtgggagccacatgtgcttagggccttggccacagctccctgtgccttgagtctcagcacagccctcagtatgaaggtgtaggagaggaagatgaggaggaggtcagatcccaacagagtccagcctccagcaaattggtagagacgattgatggtaatatcattacaggagagcctggagacagacatat

SEQ ID NO: 10548 - DNA, 201 bp, Bos taurus
gaaagaataactttctatggttcttactaccaattcaaagttactttattgtttcctgatcttttcctaggaagactcaagacctataggtccatgaacaagccatataatagcattctaggaaactaattttctatatatgtagcaggtataaatgagctgttcttccaaacctctcagataatacatggtactgacttg

SEQ ID NO: 10549 - DNA, 201 bp, Bos taurus
tggttggaagggtcaaaggaagaagaaccttctgaacggggattgggagacattgtattggaaggatttagtgtctgtctataatgtggaagacctggagtatcaaaattgagagttctagccattgggacctgttatcaagtctgttatcaagacctgttattgcagccaaacagtgatagaatagtaaataagtctttt

SEQ ID NO: 10550 - DNA, 201 bp, Bos taurus
atttgaaaaaatcaataaaatagataactctttagctagatatctcaagaaaaaaatacatagaaggcaaattactaaaacaagaattagagaagagacgatactactgaattaacagaaattaaaagattataaaggctatgaaaaattatataccaacaaattagataatgcaaattaaatggacaaattccttcaaac

SEQ ID NO: 10551 - DNA, 201 bp, Bos taurus
caccttcagactgctcagattcccccagagaggcaggcagaggtcctctatgaatggttagggacataaacttcatcctgtcgacaagtcaacacacatcgagcacctatatggtgagacaagtagatctctgcacccatctataaagggcttaactggattaaattatatattctgtctaggtggtctcaagccacatta

SEQ ID NO: 10552 - DNA, 201 bp, Bos taurus
accaaaactcattaagtgtctaaactgcctcagatcctacagtaggtactggattaacaaaggcgaataaaatacaatccctaatttaaagggcagtttagcctaactagggagatatacaagaaatacagattcgaaatatgttgaaatgagaatataagaaatccagcttatttatcaaaagcttctgggatcatagaa

SEQ ID NO: 10553 - DNA, 201 bp, Bos taurus
agtcattatgctcatatttcatatccaatggctcagtctgaatgccctctgtactaacactcattgggattcttggcctggagtcagcgcactgttagatcggggttcattctgtgttatgtaccttgtggctgtgattgggaatttcctaattacagtgataatcaaatataaaaacagactctctctctctctctctct

SEQ ID NO: 10554 - DNA, 201 bp, Bos taurus
ctatagtataaaacattcacccttcactatctgaaacgtcagaacattttatcctttatggcttctctgtgtattatcagagattatccctggtaagtcactggggatagagattctgcattgattatgagaaactggagggttggcttcaaaaagaatgtgtatgccatgtcatccaatatagttccaggatgaaaaaaa

SEQ ID NO: 10555 - DNA, 201 bp, Bos taurus
tgagcccctcttttgtactgactgctgcagccaccatcatgcaagtgtcagggcaagagttgttgtctttcaccattgatgctgctgcttctgcctaagttgcttcagtctacttggtatgattaaagagtgaaacaggtttttctttctattaccataactctgtagggataaggctgcaagttgttataagacaatcaa

SEQ ID NO: 10556 - DNA, 201 bp, Bos taurus
aaaatactctccaatatatgagtaaacgttcaaaccctgtagtaatgaagaaggtaaaaattttaaagatacagaaaaaccatttaagggcccattattatataataaaaaaataaaaacattacaattgccaggaatataaagaaataatgcaatatgatcacgtattgcacagttggaaaaacaagagacaaattgggc

SEQ ID NO: 10557 - DNA, 201 bp, Bos taurus
cccatatcctggaggaccactgattcccctgccacctacactgttaaatccagtgggatttgatgctgggtataatccagctgatattcaatgaccacacgtcttagcacctgctctcatgcaagatggctgtctagattactctgagtttctaatttgggtgagttgatagacatacaggacagtaaaagagagaaggtg

SEQ ID NO: 10558 - DNA, 201 bp, Bos taurus
ggccgggttgtgagaatatttttcaagaaagagtgacccaacatattcagaatttggtaagttctttcaggctaactttattttgaatgtttctcagggtccctaaattgagattatataaaggccactaaggcattacttcagccttagtgaagtaattatttattatacttatttattactctaacctcatattaaaag

SEQ ID NO: 10559 - DNA, 201 bp, Bos taurus
gaaaaagtgagataaatgacaaaaacttagagaaagacaatacaggaaattgtgaaggtatttgcatatgcacacatgtatcacttatccaaatatttaaaaatgaagttttaataaaatatttgttggagtacagctctgaatctatgtaaattatcatcttgttacattttggggtgataccttctatattcaattaac

SEQ ID NO: 10560 - DNA, 201 bp, Bos taurus
gaaactgagagagaaacagtttatgttgtatttctctcactagctaagcacagtggctggttaagaaagatgctcgatctgtcttggttgaattgaatgtgttggaaaaatcagtataaatgtgtgggaagctttcattaatagattgggataaaacctgagtattgtagagtgcagaaagggagtcaatggtactaaata

SEQ ID NO: 10561 - DNA, 201 bp, Bos taurus
ccctgtgccagttggagtatttctgccaggtcccaccgtgaagttagggtgaatgagtatggagagtctagagaaactcatgtgtgtggccatggtctctcgagaggctttctccaaatttcccccagcctcatcaaactcaaccagaggaaaagcagtatatgttttcagggagaacccgtgaaactcatcacctgcctg

SEQ ID NO: 10562 - DNA, 201 bp, Bos taurus
gcaggctgcccaaggtggcctcatgaggtttttatctctttcagtggaaactccatgaggctctggaacatctgaagaaagagcaggaagaggcctggaagctggaagttggtgagaggaaacgaactgccaactggaaggcaagttgccccctgaggaaaagagtctgtatggtccctgtgttgtcctgaagctggcttc

SEQ ID NO: 10563 - DNA, 201 bp, Bos taurus
cctgaggaaccttactggtccccatatcaaaagaacagacaaagccaatggattgtctaaacttagttttactacttttcttgacccataaagaatatcacggatattttatatcccttcccaatcatacatacaagcactgacatatttgagttaggatggtctttgaaaaatcattagaccttaaaattattcatgaag

SEQ ID NO: 10564 - DNA, 201 bp, Bos taurus
gacagaggagcctgagaggctacaatcctctcagggttgcaaagagttggacatgactgagcgactaggcacacacaccaatgaaactgcagtgaaatccaagtatagcaagaaaattgcaattcctctaaaggctttagtttgtttatagatatgcgatccatataggaagaaattgttattaaatcttatcctatcagt

SEQ ID NO: 10565 - DNA, 201 bp, Bos taurus
catatctttattttccattttaaactgtacataacaatatatgataaacaattacattaattctaaggctaatcaaatccatagtcctttaacaggttttaaacaaaatattgctgtgacagtgatgttttaaagcagaactggccattgttacagagcttttgtaggctataaagccatttaaaggaaagaaagcaatta

SEQ ID NO: 10566 - DNA, 201 bp, Bos taurus
agtccttaaccagaaaattgccttgagctgttttctaatattatgattttgtccctctgtttctgcactctcttggtcactttcccttcccagtttttctgtgtggctttcagagaaggccaggaatgttctccctgccatctttcattctaagttcttacttatgacatccactcttaaaacccaggcgccatggcctca

SEQ ID NO: 10567 - DNA, 201 bp, Bos taurus
aatcctgaaatgtttgctgtaagctgtgtcctttgaaggaataatatatttttagtttttcttcggattttcaccaatttctaatgggttaagtcttattccctgtttcaaaactgggtttttaaagatgaaataatcccattgctgtattgttatcttcttaacattattaatgaggttgaacagttagggaatgttttg

SEQ ID NO: 10568 - DNA, 201 bp, Bos taurus
ggccagggtggggcagggatggaaaggcaaacagggaagatttcttgcagaaggaggaggaagggaagtcagagtgtgtttgggagaagggaaaggtggattgtgatgaggagtggccttgccagggcctgatgggaagggaagtttgcggtgtgagggtctgtctacctggaggcctcactgtggtgtcttttgcagaga

SEQ ID NO: 10569 - DNA, 201 bp, Bos taurus
tgaggcgagctgatttgcattttttaaaaagatctttctggctgctttgagaagaatggattgtaggggagcactcgaggagggcagttaagaggctgttggcagtagtctgagtgagaaatgatagttttggagttgggggcgagggggagtgtgagtagggtggcagagatggcgagatgaaattagaatgctttgaag

SEQ ID NO: 10570 - DNA, 201 bp, Bos taurus
tgtgtcagctgcaaaatggataagccgtcatactgggtatccaaagtataaagaataagcgtacccaggacgatgctagagacaaggggccatcctggctagagttgactcaccagccttcagtgccagaccaccagactccttagtgctccgttccaggcccatctcagttcctattacagtctttcacgcttgcaggct

SEQ ID NO: 10571 - DNA, 201 bp, Bos taurus
tgcagactgcatgagggagctgtctatcccatgttcacttagctaggaccacagtatagatggggctgaggcagactccatggccatctgggtacagcccaacccaaggatccctccccttacagttctccactgtctatgttgttggtctcctgcaagaggccctgcagagttaagcttgcttggtcatttggtgcttct

SEQ ID NO: 10572 - DNA, 201 bp, Bos taurus
gccaaaggaagcaccgttgtgcagcaagcagccaggctgagaacaggctagggatcttgggaagaggctggaagcctccaagacaggctagacctccacgctgtcaggcctcctaaggacctaagctgaagcatgggtccaaagtgctctacctgctcagcctctggccagccagcaaagaagagcttcccaaggaggctg

SEQ ID NO: 10573 - DNA, 201 bp, Bos taurus
ggtgacttgaagttgaatccaaagaacatttaccatttcagaaatcctaggccctttctgaatgctaaatctactctgccttgctctctaaatggagcaacaaagcctggaagacagcacatctgtttaccacatggtttactgaatattttaagcccacaagtgatatctattgctccaaaaatgattcctttcaaaata

SEQ ID NO: 10574 - DNA, 201 bp, Bos taurus
attttgcaaaaacggcagtggaacatgtttaaaatcaccatttgcttgggcgttcctattaaagaatattcttactatccacatgaagtggaagtatgttatgttagttcattctagggtatgaagtatatcagaaagtaaatgtcactgaaaaggaaaaatactttgaaattacacttgagaatcccaaaaatgatagga

SEQ ID NO: 10575 - DNA, 201 bp, Bos taurus
actctgagctagtgggaaagctgggctgagacagagtgaggaatgatgggggcatgagtaacgcgggtggtttcagggggcctcacgggcccagtgccctgaccttgtccagctcctcctggttgccaaagagtgggtggtaacggcggtacttgccctcgcggtatttggcttcgaggtggcaccgccgggcactggggc

SEQ ID NO: 10576 - DNA, 201 bp, Bos taurus
ggaggcagagaagcttccagggggtactcatgagctgggccttgaaggataagcaggaaactgcacttctaagccaagggaactcaagtgtgcagggcccagggatgggaaaggacctggcagatgcagagatggggagagctcagtggggcagggacaggagacacaaaggacacccagggaggtggaggggtctgccct

SEQ ID NO: 10577 - DNA, 201 bp, Bos taurus
aggtgatccagcaacctaggtgattgacctaggtgaccagtagggaacagggagagggaaaggggctgaggagtcaggcctgggcctcacctctaccccaccctgaaactgatgagaaaagaggaaatgaccagggatggggtggaggggctgtattccagggtctgtaacagaaactaccaaactcaagaactttctgtt

SEQ ID NO: 10578 - DNA, 201 bp, Bos taurus
aaacatgatctccaataaaactaggaaacatgaaatgtaagtggaagagaggcctgaggagagacaattaaattggagaaagagggtaaaatataaggcatgaggttacaaaactcaaaaagatgtggggagtacatttcttcaactgcacttactgaggtataaaatttaaaccacattcccaacaacaagaacaaggga

SEQ ID NO: 10579 - DNA, 201 bp, Bos taurus
gtcttttgagcatctttccatgtgcttatttccatcatataccttcttggtggaatatctgttcatatctattgtccatttttgattgggtggtttgttttcttattactgagttttcacagtaattttgttttttgctttggccttttatagttgttctggatagaactccttctatggatactgattttgatagcttct

SEQ ID NO: 10580 - DNA, 201 bp, Bos taurus
gggggtggggaatgaaaaccctaagggaaccatggacaggcccaggccccatctctggatcctggtcagactgcctggcccctttttgtggacattgagccttgctgttcagtgggcaggtcaccctccttgagggtgggttcccgaccctgttgccttatactattttcagcccaagtaagagcaggattttccactcct

SEQ ID NO: 10581 - DNA, 201 bp, Bos taurus
cactcagtgaaggttgcccatccacccctgagctagttacagggcctgaggagcccactcttgtctcattggcagacctaagtcacaggcctttcactcccagatcctcaaggctccagggaaagaaggagggaaggctgtcatcatgagaggggtctgggaattaggtgggagaaactacagaggagcagaaccatgatg

SEQ ID NO: 10582 - DNA, 201 bp, Bos taurus
ggcttacacacccactgtgttccctgcagagtgaggaacctaaaaaccctgaaccttggactaatttggtcactgccggttctcagtgctctcacggcccgctctgaactctctctctttgtttctccctcctgtctctagttttttctagtcctggctctggtgtctctcacagaggctgcagtcagtgggcagggagag

SEQ ID NO: 10583 - DNA, 201 bp, Bos taurus
agtgcttggcagtcctgtgctgagcgccgatacaggtcagcctggaggctgaggctgtcaccagggtaccctgggtccacaggcttttgccagcctctgtttcaggatgaacgtatgtgctgggggctaagggcggtcagttttgctcccctccttgccatcctctccctgcagtcactgggcctgggaggcgtcatgctg

SEQ ID NO: 10584 - DNA, 201 bp, Bos taurus
actcgccctcctcagctgctccccctcccaaggccagggctacccacagggctcacctcctgtcctgccatgaggattaccggccacacggtgggcactcggcagatgcagcctccatcattcatggctcccctgcactcctgtatcacacaccttagccccggcccctgacccggagatgcagcgtatctgtaggtatcg

SEQ ID NO: 10585 - DNA, 201 bp, Bos taurus
aaccctgaacagcttccaaactataggtcctagttccaccctcacagaacatgtctgtttcccctgctccagcacaacaatccacagatatgatatcagtcattcttcctgaattttttcttgttcaaatccagactcaattctttcaactcttccccatcctaaccacccatctttggccagaattcccaatttataaat

SEQ ID NO: 10586 - DNA, 201 bp, Bos taurus
ttttttttaaagaaagcattctagagggggaaaaaaactggtggaaaatgctagtaaagtctgaacataccaatttcctagctttgcaaccttgaaggccgtgtcttttgtggggaggggtaaatgacatattgaacatgtttgctgtatactgaagccaagaaattcatttagggctcagcacaggagtggggagagcat

SEQ ID NO: 10587 - DNA, 201 bp, Bos taurus
ggggcaggtagatatttgttcacctaggacctggagcagaaatggaggttgacagcaaatgagagcaagagatctctttggggtaattaaaaatggcttaaactggattttggtgatagttgcacaactcagtaaatttactaaacagcattgaatagtgtacttaaaatgggtgaattttatcatatatgttatacctca

SEQ ID NO: 10588 - DNA, 201 bp, Bos taurus
ctgggctaccataaggatcaaatgaggactattccttattgcactcaactctaatctaatgattaaccttgtctttctggaacacacagaaaactaggaagtaagtttaaagaaagcctctttagaaccaaaataactgcctctcattcttcacactttattactgataccagtagagttcctggagcctcaatcttcctt

SEQ ID NO: 10589 - DNA, 201 bp, Bos taurus
ccagtggatctttccgacccaggaatcgaaccgggttctcctgcattgcaggaggattatttaccaactgagctatcagggaaaccgataatacatagtatggcagatcaaatagccgaattgtctgcaaattattggggcaaaacagagatggcagtgaaagtgacatttgagctgtaataagaacggaaactgagagga

SEQ ID NO: 10590 - DNA, 201 bp, Bos taurus
ctcatcctctgccacccccttctacccaggcttttctgtgggccatatgctcccctgtacagacccctctgctctaaaccatgcacagcactagtgcattttctctccaattggccacttagtttctctgttctgtattcatgagctcccttgattctggtcagctatttttaaaatatataacatggatataattcttgt

SEQ ID NO: 10591 - DNA, 201 bp, Bos taurus
taagcaggggagtaaaatattcaggttagtgttttagaaagatcattactgctggtccacagaagaaggaatggacagagagagacaaacaggtaggacaatcgtcgagctatctggaacaggaacgagggcctgaatgaaagcagtggcaatggagtagagataagataatttattccagagataattaagtttgtagca

SEQ ID NO: 10592 - DNA, 201 bp, Bos taurus
tgctgagtagtatttcactgtatggaggtgccaggttttctttaacctttcactactttttagttggtgttgtttgggttggatgtttggtttattttcaagttctttattgcaaataaagctgctatgaacactattcttggtaaagacagtattggattaaatacgatccttggtttatgatacaatgtcatcactggt

SEQ ID NO: 10593 - DNA, 201 bp, Bos taurus
tcaagtttacagttgaggaaattgtgttttgaccgggttaagtaacaagttgtttaatcttaccatcagttggtttcgttttcctcgaagtttgttattgattcaggcttgacctgcctcacagggttgaagtaaagatcaagtgagacgatggatgtgagagcgtttcgcgcatcgtgatgattgagtgcctactgtgag

SEQ ID NO: 10594 - DNA, 201 bp, Bos taurus
tgctgcttgacaggcagggagcaggttctgaccaggaaaataattcctgctgaaacccatcatcctgtgacacttcccactggcccgagccttggtccccttctgctgagaggcagcctcttgtagcttctgcagtcactggttttggattccaggcctggctcttcatttagaactctgtgaccttgggcaaggcactca

SEQ ID NO: 10595 - DNA, 201 bp, Bos taurus
cccagccctcctcggggatccaaggaggatgagttttgtgagcaccttggtgtctcaacagctctggtggctggagtctgcccttctcattccaggagtggctgtgtcaggagtgggtcaagggccagtgggcaggtgggaggctggcacgagggcagacgcaaggccactcacccacacagcggggacagcactgctgcg

SEQ ID NO: 10596 - DNA, 201 bp, Bos taurus
acactctcaatctgagctgagtgaacaccccaggccagcagtggatctagggcagtcaggttctaggaaaagaatccatttagggatgcagaggtggtgcggggggcctggtgggcaatggtggccactgctggcacttacacagaagcagcccaacttcctacagcttgagcagcgcttcagttcccacaagcacaacgc

SEQ ID NO: 10597 - DNA, 201 bp, Bos taurus
tgagtacaaagcagactctctcatcggccctcgggcaggaaccaggtcccaccccactctgtccccagggttcagcacagggcctggcacagagcaaagacggatgaatgagcgaagggctgaataaaatgaatgttctggcaaagaaaccctccctgatcacagtgtgccgagctctccagggccgggaaccgtttctat

SEQ ID NO: 10598 - DNA, 201 bp, Bos taurus
agatggagaacagcgtggggctgccttgtactgaaggggatggaggggcagatgatagctcttcaaaaggcaatctgagtgcaaataagggaagccccagatggggcctgccagctctgctgggcctcgcctcagtctgtggtgtccatcctttgttccctttttcctccactgggcgcacccctcccgacccgacagttt

SEQ ID NO: 10599 - DNA, 201 bp, Bos taurus
gtacatgataagcctcactgtgagtgtctgataaacaggatggagctggaggggccagcagagcccgtattaggtggggctgtgagtttggcctttatatacagagggcacgaggacattagcaaagggggaatgtagaagagaggaggtggcttggcttagatccagcctcactcctcccagcctgtgaacacccagctg

SEQ ID NO: 10600 - DNA, 201 bp, Bos taurus
ggttttcatggctaaatggtaaaaaaaaattcacaaagacctgtgtggtctgtgtcctgagggaagagaacaagggggcgtatggcagtcaatggccagacggtggggagccagaccagctgtgctgagcagccccttctcattcctccattcttcaggccaagagtcaggccgggaaggtctgggcaggacaaaggctta

SEQ ID NO: 10601 - DNA, 201 bp, Bos taurus
tctgggtatggtgtcccatgtataaagatgcagagcaaatattaggattgatgtttgaaagagatttggaggttctgtgggccgtgtagtatggcacatatacatatcttagcacagaggtgtaaagcctttagtagtgcaaggcagggacaggccttcatctggaggcaggcactcttctggatacagaagagaagcgtg

SEQ ID NO: 10602 - DNA, 201 bp, Bos taurus
gcagccaaataatcataaacaaattctttaaaaaataaataagaagcaggttggtaaagacgatgtagatagggaagatgggcagggtgtggaaaaagagaagctggggggaagacacttcggctccagagcacagtgtgagcaaagacccagaggtggaaaagtacattcaaggacacagcaagtgacctgatgtaacca

SEQ ID NO: 10603 - DNA, 201 bp, Bos taurus
tgtgttctgttccctggaaggtggcaggaggtcacagtgggtccgaaactgggctgtgtggcgctactttcgagactactttcccattcaggtaaaaacttgcaggtgttatcttgggagggtgggaatggatgggaaatctgaagtcatgccttaacttacccatccacagcgatcatgtgtgcagggttgaacaaggtg

SEQ ID NO: 10604 - DNA, 201 bp, Bos taurus
ttagagttggtcccatcatgtatatgatgtaggtatttcaggtttgttttcatgaatggagtttatcctacatggaaggtatttaagtaataaaattgtcttgttaataacagttgtcctggtgctctggagtgactggtttacatgtaatattcatgtatttctactggaagaaatcaatctaagtattaaatggggaca

SEQ ID NO: 10605 - DNA, 201 bp, Bos taurus
caactaccatgtatctaagaggggaagactgttccaggccaagaagtaggaaaacatgaaggtaggcgtgtacttgaggttttcaaggaatggctaagaatttagtatggccggagtggagtgagtggtttgagattttgacaagcttgacagagatagggaaaaaggaactgaggatcaggacagcagaggaaatgacct

SEQ ID NO: 10606 - DNA, 201 bp, Bos taurus
gaggagacatatccttggctactctgcagctcactggaatacttctgattccttccagcgtttaatgatgtgactttgggagaagcaactagtggatttatgtaaggtcgtatcacttcattggttaaatctctagatagtgtttctgctcacctgtttctaatctagttctctgttcttttttataaatagaatcaagtt

SEQ ID NO: 10607 - DNA, 201 bp, Bos taurus
tggttgaagggctggggaggcccccacacaggacactttggctccaggaaggagccccgtgttcacaatagggaagagagccaagaaagtaggaagagaccgggacagtgggcctggagagtgtggcggggttgggaaggattccagagccttgacagaagtgccaggacagtcacaggggaaggtgcccagctctctgga

SEQ ID NO: 10608 - DNA, 201 bp, Bos taurus
catttctgtttcatgaaatcctcttgttatgaaattcctcaaccctgtcaattcaaatgtgctcctgtataaaaggatgtagagaacatagattggttagattcctcatgtgcacagtttacctcagttaatacaagagttcattaatgcagtgtaaaggttaaagttttcagatagtttaaaaatactttcacttgaata

SEQ ID NO: 10609 - DNA, 201 bp, Bos taurus
tcttgttcttcatctctaatgtagcaaattacttaacatccttaaaagtgtatagagctttatagttgaaaatgcttttaaatacatttcaatacactgctgtgataggagacttcagtagcacctgggatggtgcagaggaaatagtgggtaggtgttgagctccaggctcctctgtttattcgtcatatgaacttgagg

SEQ ID NO: 10610 - DNA, 201 bp, Bos taurus
ctagccccgtccccctccctcctccaccctccccgcatcaggtcgctctgccaagttactgagctcccctgctgctcctccagtttgctgctcctgctgcggggccagtgaggaaagtggtgagagaccctgggcccagcaacacccctcttcaccccgctaagactgagggaacccactgggctactgtccccaggcaga

SEQ ID NO: 10611 - DNA, 201 bp, Bos taurus
cacccacagagctgaggatgtccagggccatgttgaccatctcagcagcgtgccggctcccgttgtgcctgggcactcccgaggccaccatgtaagcatctccgatggtctccacctagaagtcatagccttcatgctccagtacaagcactcccctccctggactgatccacgtgccacacaaggctgcctctcaagaac

SEQ ID NO: 10612 - DNA, 201 bp, Bos taurus
tgaccttaatatacccaggctccaggttcttcccctggaaagtgaagacgacatcaaactttgtcttggaagtaaactctccttggcctcactgggctgttgtgaggacgaaattaggtggcatatggcaggtgtctggcacaaggcttgtagcctgcgggccctcagcagtggataattccatcacccttcccattgaga

SEQ ID NO: 10613 - DNA, 201 bp, Bos taurus
tcttacttttttttttaacttagcatgttttagtcaaatatctctctaggcacttgaatttacagaccctgatttacatgttaaggatagaaggagccaacaaaagaacctatgaggaagcaacaccaagataggaaaaccagcagaacaaggtgttacagaaaactagagcggaacacgtcttgtttattaaatactatt

SEQ ID NO: 10614 - DNA, 201 bp, Bos taurus
gggatgaggggagccacagttgggacaggttgggccagagagcaggagactgcattttacagatgagcgagagtcctgaggcacaaggaaggtaactgttgtgcccctcctgggcctctgtctccccatctgatgatgagcgtgcggacgggactttctgaggctctgattttccctttgggcacagggaggaggaggagc

SEQ ID NO: 10615 - DNA, 201 bp, Bos taurus
ctgagggcagggcaatggacttcagatgaccaggttttgtggaccagaagtcaggatgtgagagtggggtgaggcatttgccattagcctgcctggcccacgccaggtgagttcacctccccaggagcctggcttgggtgcgggggcaggttggatccctgtggtgagccgtagggtgcctgggcccagaaggagtcagct

SEQ ID NO: 10616 - DNA, 201 bp, Bos taurus
agggactctgcctgcaggcttgagtttcacctgggtcatgttgcatgtcagatggtgtcccgtaactgtcaccagatcccagagatccactcccactcgctcccacagaggccctgagaatgggggctgcagagtggggaggaatgtgactgactggctgggaacaggatggggcctgcgttgcttcggtggtgctgggcc

SEQ ID NO: 10617 - DNA, 201 bp, Bos taurus
tgggaaatttgctgggcctctgggagcttatgggacggtgggggtagggagagagacagaaggaaggatggggcaagagaggaagaggcactcttgcacacggcctctgattctgcctcctccttacatccctgcagtggccccttccatgcagccgctgtccctatatctctctcctctgagccattgcacagcctggct

SEQ ID NO: 10618 - DNA, 201 bp, Bos taurus
ctgctggcattcagaagttgttttgtggaatttactcggcgtttaaatgttcttttgatgaatttgtgggggaaaaagtgttctccctgtcctactcctccgccatcttagctcctcctctgtcatttttttttttgacagataaaaagactatggtcttgaaaggggcagtgtcacccagcaaccaaaggaaaagccagg

SEQ ID NO: 10619 - DNA, 201 bp, Bos taurus
tttagctccatactaaaaaaatttcctgtccttaaacacacagatactctagaaaagtgggaagaatacatgatatgtaaaaactgaaatcagccaaactgtcagatactcttgacaatccatactctaaaggaccactcttttttctcttaggctttgtgttctttcccaccaggtaatcctagatttggtgttactgct

SEQ ID NO: 10620 - DNA, 201 bp, Bos taurus
tttatactcatattttatgaaaaggcccaaggtcagtttgtttcaaagtttgtaagtcttgttatctatttggctgaaccacactgattccatcttgtcagctctatctcaggccagcagtcctatcctctcccctttctatgtgattgaattttagcctactcccaggactgtgcccaagccagataagttcttgtcaac

SEQ ID NO: 10621 - DNA, 201 bp, Bos taurus
atgggagaaccaccagcaagatctattatgagcttccttttattaaataagcaaaaacagaagggatcttgtttgtttcaggtttctaggcattaaaataaaacttttgaataagtttcaaaaggggacagaatctaccatgtgtgtgacattttcatatgtcatgtcattcatagttataaaaaatctgttaaattagtg

SEQ ID NO: 10622 - DNA, 201 bp, Bos taurus
ttggcacctattaaataaactaattcaacaatctttattgaatacctgtgggagctccagggaagttccctactttcataggtcttacattctaaagtggtatgtgacccatcactgttgatatttagctgagatcccattctaggtattttttctagaactgttcggaaagaggtgtgctgtcttccactgagtccctgt

SEQ ID NO: 10623 - DNA, 201 bp, Bos taurus
tgtatctatctctaggtacaattgggaccctgaaaatgtaaagaagctgaggaaagaaggatgtgtgagccgtaaaggatatgaaacccaaagtttggctgcaaaagctgggtcacgaagccattactaaccgccatctcagcaacagtgcagaacacaggactatatctgcctgaagccctctttatccaggagaattaa

SEQ ID NO: 10624 - DNA, 201 bp, Bos taurus
aagaaataatgaggccccttctatatcatgcaagatgttaacccaggtaaaatgtcaaactcaaatccctaaagtacaaatgatgtaatagaaagaccttcgcaaattggttatccatatggccaaaaataaaattggatttctgcctgccccacaaaaatcaattccagatggattagagaactacatgtcaaaagtaaa

SEQ ID NO: 10625 - DNA, 201 bp, Bos taurus
ctttaagcctggccccctttctctgctcccaactgttcacaggtccctcaccctacagtcattcccctggtgaaacagaacacggcagacaccccagttggtgctcctcaggccctgagcccagtgtgtctttcccaccacaaatccatcctccacctgaagtcttccattagctcaatcagaacaaggtatccctcctct

SEQ ID NO: 10626 - DNA, 201 bp, Bos taurus
gaacgttctgttttgccctgtgcccaaggagtgctctcccctattgtgacagcatgacaaccagatggtgcttcctctgtgggtggccactccaggaaaccctgggagtttttgcaaactgatgcatttatcctgaaagcagcgttttggcatctttgtattctctctgttccaaaaggcaactttcacgcgaatgccctt

SEQ ID NO: 10627 - DNA, 201 bp, Bos taurus
catattttgcttcagagtttagagatgccaaccataattaaacccagatgcacacatccagtcgctgcttactgtaaaaggggaaaagctctaggcccaattttaaattttctcaaactgcccaattttttaatgtcaaagaagaaaataaaaaccctcatccttaatatttatccgagaatgaacaacattgaggaagaa

SEQ ID NO: 10628 - DNA, 201 bp, Bos taurus
ttcacctgctctccaacctgccaacctccaagctcctgctccctgccaggaatttacttcctgatgcctcacaggctatgtaaatcttcagatcagatcaaatcagtcgctcagttgtgtcacctcaattccctttagctctaaaatgatttttaccatttggagctcttgtaagcttttttgcctttagggtcagcaaat

SEQ ID NO: 10629 - DNA, 201 bp, Bos taurus
gctcctgtaagtgagtgtacaagccttgggtctgtgtgacaggaacaaaataaaagactgatgggaaaccaaggcactggcctctctgagccaagttaaaccacacgcatattgaaggtacccctatttgctgcacacatcctgttcaggtaagaggagaaataagaagctatgtacatatataactcagggcctccccaa

SEQ ID NO: 10630 - DNA, 201 bp, Bos taurus
cagaagcctctttggaactcagaagaaagtgaagaactcctttctgtttctaggtggtcgaaacagtaccatgctttctgagaccaccacttaatgactttgatgaaccctgctgagatgttctcaggctgcttggggtcaaatgccatctcctctcactttcagcttcatgtttcacaatcaaccatgtttccttacaga

SEQ ID NO: 10631 - DNA, 201 bp, Bos taurus
aaaattgggaagggaagggatggacctggaatatagtagctactcagaaaattgttgaatggatgaaagcagaatggtgtgttatgagaggggcctaaagccaagctttttcttgaagcacaggctccagccatcaccaagatgtactctttgggcatcagcacagacttacgtgatgagcccaacatagtccaatcctgg

SEQ ID NO: 10632 - DNA, 201 bp, Bos taurus
gttagtccaaagggctggtcagggctgcagtgcacggtaaccttcattgaactggatatattggcagtttgcaccagaggtagtctcagctgcattgagggaggtcacgtttaaaacaccatctctccctgtcaatgccacttggcctaatcacacgctgtcaccaaagagaaatgactacagtgatagatctcttggcag

SEQ ID NO: 10633 - DNA, 201 bp, Bos taurus
aaggaggccctggggtagaaaacacaaaaaaactaagatttgtgcatgagaagacaacgagctggtgggtgaggaagaggcatgcgctagagaaaagagagatggccatgaactcctgaagtagctctccctggccttagtagatgggttgtagatgagaaatcaaaagacagctcatgagcactgtggatcatcgttatt

SEQ ID NO: 10634 - DNA, 201 bp, Bos taurus
tcaagtcattctgggactccacagaaaagcatacacacttcaacttgcacttacttaatttctctgctttggggagagctgatggggccctacaaaacaagtcagttccaagagagccaatggaatgtgaaacagtcctaaaacacagactgggacgtggcctgatgatcctactctttggtccctgtcctctctctctga

SEQ ID NO: 10635 - DNA, 201 bp, Bos taurus
ttttcttcactttgcaatcaagtgagagctgaacaattttatttaagtaattttccttgcagaaaatatcattaggctagttaagatatgtggaatcttttcttgtggcagtggggaatctttgaagagttttaagatatggagtgatctggctaaatttccacttttttataggctacaatggctatatgttgggagaat

SEQ ID NO: 10636 - DNA, 201 bp, Bos taurus
ccccagagtgtggctggctcaggacaaactatttcctgatttggaagaagcagttccgtgtgccactgacagtggtgttacatgaaatgcttctgaggccgccctaagttttgttattcagaaccaccctctctagtctggctttctagaagctccatgaaccacattctgatgtcttcctaccctgtgacgggtctgggg

SEQ ID NO: 10637 - DNA, 201 bp, Bos taurus
tgaactcagggctttgcatggtctccagataatggaaaaccccctctgtccatggaaaagcggcttctcctgccattccacagacccaaaagggacctgaggtttgggtgttctcaaggagatacacccagatttccacattcctgttctcagggtcccactccttccctgtggggccctaacacttgcagaactataaat

SEQ ID NO: 10638 - DNA, 201 bp, Bos taurus
ctccagtgatcttggaagatgttccttatggcaggactgaagtgtatagtttcaagtgtagaaccagcctgtccagcaaaaacctaagttcgttactagtggaacgtggcctctgcaccaacttctccacatttctcccccttcggctttgcacatccctgctgttgtcctccactccttgttctaaactttgacctcgct

SEQ ID NO: 10639 - DNA, 201 bp, Bos taurus
attatttattactcgactaacatctgcctctgtcttttagactctgtctggtctagtccccagactctgtgatcaccagagttttctgtctttccctggatggctcactgcctagcacatgcatggtgcacaggatgcaatccagtttcatgaccttcttacttgaagactaagcatattcctgccttggggcctctgcac

SEQ ID NO: 10640 - DNA, 201 bp, Bos taurus
caaatgtcctctcctcccctcccccaatttcttccttctcttccactttgccttctttaaaatattaatcaggactaagtaaaagagaataaatagcttgcagaaatatagagttctgtacatttttgttgttcttagtagctcacaaattatgaattttgtcaagatttatctatgaatcctttcccctccatttgatta

SEQ ID NO: 10641 - DNA, 201 bp, Bos taurus
acactcacggaaaagcgatataatctcttcctacaatcagggacgatagagcccatttgctctgttctccctttattcccttgattccttgactattgtccgctgttttcttaccacctctccctcaatgctgatgcattattcatcaaaccctgcgtttgaggagggttgcatcttgtaatcagagcagtgggtcctaag

SEQ ID NO: 10642 - DNA, 201 bp, Bos taurus
caaaatgaatttctcatttttggtttatatgtaacggtttaatggaggaaaattgagtggttagcactaatcttgggttatttatgtctcacaagatgttgctattaaatggtggtatcccaatagccagtgaaaccagaccctggtcaaaattgtcctttgaatatgataaagctgtggataaagtacacaggaaacata

SEQ ID NO: 10643 - DNA, 201 bp, Bos taurus
acgctaaaatgttaagatttacaattaacacgtaatactccaaaacattatttagaccacccttgcaatgtttggctgtaaccatgagagtttatgagagattccaagtcatccagatggaaaaaaccacatccagactcctagatcaatgcttttctagtatacactctgtctcccttaacagatgccagagaaattgat

SEQ ID NO: 10644 - DNA, 201 bp, Bos taurus
cactcatgttagtgacagcccacatacagatgactggttttcctgtggcatcattttgtactcaacctttctgatgttagtggtgcttatatgtatatatatggtttagtcactaagtcgtgtccgattcttatgaccctatgaactgcagcccaccaggctactctctccatgggattttccaggcaagaatactggaaa

SEQ ID NO: 10645 - DNA, 201 bp, Bos taurus
tccaaactgctttcgttgtcccatcatgtcctctacagtcttgtctgttgtttctcttttataaagacacctgtgattacaaagggcccctcaagataatccaggataatcccctcaacacaagattctaaatctgatcatatccacaaagacccttttaaaatataagatgatagtcacaaggcccatggactagacctg

SEQ ID NO: 10646 - DNA, 201 bp, Bos taurus
attggattaaaatcaagagacgctttttatcaggaactaataaatatgtttggcaacagttttatttgtatgggaggaaacagcaactgcaaagtatcagcgtcaactgggtgactgtaactatatcacaagatctcatttcacaacactgagttataacagcaggaggctaattctgcaaccacaatttaggcaaagctc

SEQ ID NO: 10647 - DNA, 201 bp, Bos taurus
ggaaagtaagcttctttcctcctccagtctcactctcagggcccagatgcctttggtaccaaggcttcagaggtcgcagtgtgcaaggtagggtactatgaacataaaagtgaccttgaaggccaggcagacggatctggactaaatcttgccaatgcactcttgaattaacccctaataacagtgggctccatttctccc

SEQ ID NO: 10648 - DNA, 201 bp, Bos taurus
tacaacaggcaggaaaaaaaaaaaaatacatgctaaaacaaaatacttctttgctcaagggaataaatcttaaatctgaaaatgtgcaatatgaggtagatagttgtaagttgttacaaaatggatataatttcacaatgaaaatacttaaaaatatctgttggatggacatcttaacattctttttgtgtcataaaggga

SEQ ID NO: 10649 - DNA, 201 bp, Bos taurus
gttactaacttagatctactctctcattacaggtctcaggggagttgcattttcaaagaagcacataatacagtatacaggtttacaagtatacacactgcgagcatatcaagatttcattccactagcaggaccttggcggtccaatccccaagcaaacacccagggctgatctccagagatgtttctgaatcttaatca

SEQ ID NO: 10650 - DNA, 201 bp, Bos taurus
ctctaaaaggaactttgtgacttgaaataattgtttcttatttcagcctttcttttgactttggcactatcccattcttatctgggtttttaagatgtttgtgaatttcctttgcgtctagctctgaattcttgttatggtcaaggctaattttaggactccctactgtcaaaaagcatacatttttacattgcaagtatt

SEQ ID NO: 10651 - DNA, 201 bp, Bos taurus
ccagtattcttgcctgaagagtcccatggacagaggagccatggggtcacaaagagtcagacacgactaaagcgacttagcatgcaaagtgaacttcaggcctattgcggtgattttatctcttacgtggatttattgagtttaattagtgtttataattatcccttttagggaactgtctttggtgtatgaaaaaaggct

SEQ ID NO: 10652 - DNA, 201 bp, Bos taurus
gaggtgaaaagatggcacctgacagcctggtgaagatccaccttaaggtgggaaccacacctgaggtggctgagagtaagtttcagagaaaacagactgtgtggcctcagctagaaaaagagaaaccaggaaatatctgacttggttcctaaccaagtccctaagccatcctcagaaaacttacttgtaataacaatagct

SEQ ID NO: 10653 - DNA, 201 bp, Bos taurus
tccctggtcaggaaactagatacagaatgccacaactaaagatctcacattcttcaactaaaaatcatgcatgccacagggaagattccatgtgccataactaagacccagagcagccaaagaaagaaagaataagagaaattcctctgggtacgaatgagttaaatttccaaagactatataagtctatttgtttctacg

SEQ ID NO: 10654 - DNA, 201 bp, Bos taurus
taaagaacaaaaatggttatcatgaaaactttctcaattagaagtgtatttaggttcaagaaataggaaacgtgtaaaattctctagtatggcttcaacataggcattttctttactcataccataagaatctagagttagaccgttgctggtattggctcagtgactcatcaacatcaggattgatgatctgtgattctt

SEQ ID NO: 10655 - DNA, 201 bp, Bos taurus
ttttctctgtagcgtctggtgagccaaggaatggtaataggagcctgtgttaattctgtctgaaaacaccatctggttctaagcacttatctaggccatgtatgtcacagcctagatgtggtcaccatgatattcaaaggtcaaagaggggtctaattacatgccccagtacttaaagggcagattcaccagagcatgaac

SEQ ID NO: 10656 - DNA, 201 bp, Bos taurus
ttcctgcttcctctttttttcttgccttccctttcccttcccttctcaagccatttggtcctaaatctgtaaggcggccataacaagatagatgtttcactggactggaagcggcagagctctagggaataaagacagtatctccaagggtgtgcaggggtgggcccatgtgctgtgaaggcccaggttggaaagagagtg

SEQ ID NO: 10657 - DNA, 201 bp, Bos taurus
aaacttgcttctaggcactgggacagtctccaccccaaatctagcctgattgcgaacctcctgtgtgcagttcctattattgaaagctggccaagggactgttctgtttagggtggatcagacattggacatgagagttggggtgcctacctattcagtttgtgtgccattaagtgttagatacagctggggctgtgaaga

SEQ ID NO: 10658 - DNA, 201 bp, Bos taurus
tttatagattaagtgggtcacagaaacctgtaggattttaattacccaaagtgctaagggaagaatttcattcagttgtttatttcagaagacatctgactatgttccacctggtcaacggcagctttccagaagccactcagaacacattctctttactactatcagagtgcgagtctgtctagatgctgacgttgaaca

SEQ ID NO: 10659 - DNA, 201 bp, Bos taurus
ttaccttttcacttacagggagcactttatggcctctcttcagaattgccagcattgtttctcttgtgctttggagccgttaagtaaaataagggccacctgaacacaggcatggtgataccctcgatggtcagtctgagaaccaagagggttgctaagtgactcatgggccaggttcgctggacgaagggatgattcaca

SEQ ID NO: 10660 - DNA, 201 bp, Bos taurus
agatcttgtcttgtatatttccatgtttgtgacacctgtcaattatgccagggccatttatttgcctcggaggagactggcctagtcaatataattgcaacgggaagagtcaatttgtagttgtgatcttcaaaattaagtttttgagtctccaacaaggccataatcttgaaaccaggctttactgaaaaataaatgttt

SEQ ID NO: 10661 - DNA, 201 bp, Bos taurus
aagaggtggtttacatgaaaagcaaaacagagaggggctgtagaattcagcaaaaccaggaattcagatcagaggtaactggaaaacccgagtcacccccgagaaccatcctctgctctgtgtttcccctccagaagttgaacaaggcttcgagacaaaaaaatctcagaggccagcatgtccctggcagtctagatgatt

SEQ ID NO: 10662 - DNA, 201 bp, Bos taurus
ctttgtaatcagggttcatggaacggctgcatagtgatttcatccctggccaaagatgccataaaaaagagaaatattcagtgatcaccatttcacatcgctgtaaaagactgagaattggggcccagaaagctcggcttccagcaacattctgctttgacaggaccttaaaatgccttctggagtcaagacagggagaaa

SEQ ID NO: 10663 - DNA, 201 bp, Bos taurus
cagtgatagacacctttctgcgcgactttggtgcctgacttttcgaagtttgcgctcagaagctttttctttcttttctttttaaagaagtgaaaaggctgtcgaggccagctccttctcgtccacactcgttgtgggccgcccactcctctcccgcacgccgcatctgtaaacctgagcggggctccagcgctgggcaga

SEQ ID NO: 10664 - DNA, 201 bp, Bos taurus
aataggtttagaggagtgaaagacgcagatgttggttaagaattcctaaaagggagagtaacatatgcaaaagaaggaataattaattaaacgaaaaaaaattttctgagttgataatttagcatgagtgggagtaaaggacacatcagatgaaacaaggaagccatatgttggtaactgttgaaaccaaatgatgactac

SEQ ID NO: 10665 - DNA, 201 bp, Bos taurus
tagctaaaattaaaaaatacatattttatctgacatataggtatgagtgggacagacacgctagacagagttctccatacacagggaactcagtgaactcagggttatcactctactgttttgaagatagattttatactaaggagtactgtgtggggctctcctggtggtccagtagttaagaatccaccttgcaatgca

SEQ ID NO: 10666 - DNA, 201 bp, Bos taurus
gagtagttgtttaatagcattgagaaagtaagcctttggcgattagccaaagaagactgcatctatgtataggcttgcagttcagaatgaggctgggatcatttgtatcgagggtgcaattagcctggcctgagctgcattttgaaggatgactttatgacagtctgtcatgacaacaagggaatattttatgtacagaat

SEQ ID NO: 10667 - DNA, 201 bp, Bos taurus
tggtataataggaaaattgctggtattttatgaaaaagtgaaatgtagcagccataattttccccattttgccctcatgcagagagtccaaggatgaggatttcatgttcctgacttttgggcttgagactctccaagacagagtaactagggaacaaagtcctggtaaaagtaaatgaatatttctgtgagatgtactca

SEQ ID NO: 10668 - DNA, 201 bp, Bos taurus
tttctgtttttcaaacaggaatcctaatttattctaatgaaaaaaaaatttttaagtggttggaaatatacccaaaaatgaacaatttatctgttcgtgtgatggaatgactgtttctttcaaagcttctaataacatggccattttatttttgtaattgaaaataattattccaagaaaaaataagcataatgtaatact

SEQ ID NO: 10669 - DNA, 201 bp, Bos taurus
tactaacaagatgaattaacctttgatggttaaaaaactacttttctcctcccactggaggacttggagaaccattagccagaacctggggagttgaaatgtcattaatgggaaactgggtcagatcgacaaaccctgaatctccaggctgctgttaggagccatgtcgaggaccacgatcagcctccccaacctgggcac

SEQ ID NO: 10670 - DNA, 201 bp, Bos taurus
accttcctaacctagagatgctgggtccatgcagtggcctcttagacatctttctgctgcacacacactattagttttgattggaggcttttatttatgatcaaaaggccatttctcaggtcatgtaattatgctaaaagccaagaccgtctggcgactacaacctctgagagcatgtcaaacaccatcatgatttcaagg

SEQ ID NO: 10671 - DNA, 201 bp, Bos taurus
tcaacaattaggcctgctccaagtaagactgactggttcttgagttcagggtgcagatggtgagacccacgtgtcagggttttcccaggtcctccaagtgttctcctggggcctgccgtctcacacactgcttcatagttgtctagttcttttctgctcttcctcttcgtctctgaactcctggagtcatgtttctcacat

SEQ ID NO: 10672 - DNA, 201 bp, Bos taurus
gggaatgaggaccagcagctcagccccctcttcttgctgcccctgtacttccctgactcctgaggaccctcctggagcccttgggcaacagttcttagcctaggtccctagacttgctaaagcaatatgaaaatagctgtgtattggcttttggagggcaagactcctaactctcagattttctactgatcttccaaaaat

SEQ ID NO: 10673 - DNA, 201 bp, Bos taurus
gaaaccaaatggtcaagacttacaggccatgataggctgtatgcaaaacaaagatctaagaaaacagaatcctgggtaagaagtagccttgagaccagggagatttagagtctagatatgaaagcctatctagactcagggtctggatagtcttaagactgtgaaaataaagtgttgcctaattgccctagttgctgcatg

SEQ ID NO: 10674 - DNA, 201 bp, Bos taurus
tagctaaggttcctgactcagtcctagaactcatgggtctacatgaatagaacccccgattttctagatttcagagcatttgtcctattccaactcatagaaaagaccctagagaactggcacttagtagtaaaacaggggctgttaaggaattctctgacaacctcacctccaaccactaagtacacaactgtgagcagg

SEQ ID NO: 10675 - DNA, 201 bp, Bos taurus
gggatggagaggcggctgcggccgctgccagactcgcagccaggcaggtgggcgcataggaaaacccggcgcggatcttgccaattcctggaggcaaaacccctgagaggtttagggcccagtgggaaaaccaggaatggctccaggacaattacagacagtggaccggtgggaacctggacgaggtctgggactcagtcc

SEQ ID NO: 10676 - DNA, 201 bp, Bos taurus
ctgtcagtgggggtaccagagtctattacatcaactgttgtaaggattaaatgagtaaacgcatgcagtgtggcccacagacctgtaatgaactgggggtaataatggatatgagattacatgcatgcaaagcatttggtgtatactaagcactcataaatggtaacttctgtgttgtaggaaaaaattgccgggagaatt

SEQ ID NO: 10677 - DNA, 201 bp, Bos taurus
aggcctggcatgctgcagttcatggggtcccaaagagtcggacatgactgaacaactgaactgaactgaagacataggtactgactaggcaggacagacaaacaatgaatggatgtggccattctcattcatacagttgaatatctccaggatgatcgactcaaggacattgaacacaacattgcatctctgggtccagcc

SEQ ID NO: 10678 - DNA, 201 bp, Bos taurus
tctttaagagaatgatggtgtggatgacgctgagtggctgtggcatcgggaattcagggtgatcttggcctagagcaccttggggataaagaccagcagccctagccctgcctctgccctgccagggtttcagcaggcctagccccacggcaacagtgttgagcaaaaacttctccacacagagggccagttttgatgctg

SEQ ID NO: 10679 - DNA, 201 bp, Bos taurus
cgctcaggtggcgatggcgtggtcagtggcgtgtccggggtgacttgtcacactgcagcctcaacggccagagtgggccagccgtgtgacagccctgccctcagagaagagcatttccaagcagagggcacagcaaatgtgaggacctgaggtggaaaggacattggtgatttgaaggagatacaaggccggtgtggctgg

SEQ ID NO: 10680 - DNA, 201 bp, Bos taurus
ctcagaggccgttcctcccacaaaatgaaaataataaaagctatgagacaggactgtcaaggggactgaatgttacaatgcacgaaacatatacaatagctcatggccattggtaagtgctcagtgtacgtgagttgctgctgcagcaaagcatagtctgagataaaggactattcttggggaggcttatttttcttaaat

SEQ ID NO: 10681 - DNA, 201 bp, Bos taurus
gatcaaatcagggccccagcagtgaaagcgctgagtcctaactactggaccaccagggaatcccgcaacctctttgtttttaaaggtcaccccgggagagtcctgggccaggcctcccagcagcttctagaatgttttgagtggctattgggagcgagtcctggcttggggtcgggaggcctgagctctgcactggtctga

SEQ ID NO: 10682 - DNA, 201 bp, Bos taurus
gggaggcgaggcacggcgtctggaggaggcacgaagaaatgtgtcagacaaagctcatcagcacctcagcacctggccaaatagtaattaccagtgcctcgtgccacccaggagagggagggcgatatctttatccccattttatagaacggtaagtggaggcccaaggaggttacacaactgcttttagccagtcagtca

SEQ ID NO: 10683 - DNA, 201 bp, Bos taurus
agacaaactgccagatttttcatttccaggattgcaaaggtcatggagctggctatcgggaaattaaagttagctgcgaattggagtgaatgggaatcaacgtgaagtgagactaagagatgcctagaacatagaatgaaattcaccttctttgttgaagcttttcagaccctttgatgtaagtccactggatagtctatt

SEQ ID NO: 10684 - DNA, 201 bp, Bos taurus
ctcctggggcctgaggaagcacacagcgatgaaggccgccaagggccccttctgcgcatgctcggagccaagcgtgttgcacgcgtggccgcatctggtctcttgacagtctgttgacaccaagactgctctgtccccacctccctggagacaatgtctcaaatccaggaagctgtcctaaagaaactgatgctggataca

SEQ ID NO: 10685 - DNA, 201 bp, Bos taurus
cttctttaaaatgactccctgatcagagaatttacgtttatttagaaagcgactctatctaccttcgatggaaaatcaacatcactggccacagatacacattacctgttacttaagtgttagtccctcagtcgtgtccgactctgcgaccccatggactatggcccaccaggctcctctgttcatgaaattcttcaggca

SEQ ID NO: 10686 - DNA, 201 bp, Bos taurus
caaattccctttcccctcccatagaggggaggcctggtgagttaaagaaatccgcttagacacttagctcatgccaggccggtgtccacggagacccaagggagaaagttcatagtatttttccttgccaggagctgacactcacctaaattggaggaggggcgtctgtgagccagtaaagcaggcccttggccagggggg

SEQ ID NO: 10687 - DNA, 201 bp, Bos taurus
atatgatctcatttaactctatgaagtaggtaaatagcattgttaccatctttcccttgggaggaggaagtggagacttagtatgattaaacagtttgcccggatagcagaattggaacttgaacacagctcccaagcaatgacatttctattgcatgaacccttaagctgctagaggaagaatgtcctgaaatttaaaca

SEQ ID NO: 10688 - DNA, 201 bp, Bos taurus
atgttgagttgtgtgagttctttgtatattttgggtattaactccttatttgatacctcatttgcaagtatctcatcctgttcagtagacggcctttcaggttgttgatcctttccttctttgtgcacaagctttttattttgtttcgtgctgtttgtttgggcttcccaggtggccaaagtggtgaagacccacctgcca

SEQ ID NO: 10689 - DNA, 201 bp, Bos taurus
ccaatagcaatagctgtctgggcccaggctttcatgcgcttatcaagctatttggaaggaactgaggcttggaaaggagatgtgacttaacagtgggctcaggctgggccggcagagagaggaaggacaaagaggaggcggggagactcttctggtgccccaccagcaaaggcggtgggctccggaggacaatgtggacat

SEQ ID NO: 10690 - DNA, 201 bp, Bos taurus
ttacaatttttttttcaattcttaggtgtgggcagaagaaaaaactggtgatcaacaatgggaatggaaccatggaggagagaaagcccagcggactcaatggagaagctagcaagtctcaggagatggtgcatttggtgaacaaggggtcgtcagagacccaagaccagttcatgacggcagatgagacgcggaacttgc

SEQ ID NO: 10691 - DNA, 201 bp, Bos taurus
ccaatcttccctttgagcttgccaataattcctcttctcgtttatgtctttcaccatccttctacccggataactgaaactgaagtggcctctgtgaaacggaattagtgtggaagggacaaaaaggtaaagggttgtttcagtgcttcaccccacgcacttcactcaccttacggtcacaatctggcctccgtctaggac

SEQ ID NO: 10692 - DNA, 201 bp, Bos taurus
aatcctgtatgacccaaaacatatatgtctgtgggccacctatggtccacgggcatccgataccccaaatctgctgctatgggaagagcggagcttgggaggcagacaggcctccacccacttccaccttggccaccatctccgggatccttcaggcacaggggctgggaagctggggtggcaggggcacatgatgggaag

SEQ ID NO: 10693 - DNA, 201 bp, Bos taurus
catcccagaacacttagtagtaaatctctcctaagctgtcatcaactgatcccaacgcaagaattcagaaatttgcaaagattttctcctttatccttttgctcaactacaactgacagtcccaagcaaagatgcaccccataactttgacaatgaaataattgagaaactaatgtacaaacagattcttctattttgggt

SEQ ID NO: 10694 - DNA, 201 bp, Bos taurus
gcccgtcgatgaggctgtgtgcagcaagtacaaataaacacaccttgttgcttttcgtcttcaaagagacggatgaaggctccctgctggggtgcgaggtgttttttcctgacagtccacttcggcctttacctttgtgataagtgacggagaggcacaggatgtgagccaggagcagagggagggcctccaagactggtc

SEQ ID NO: 10695 - DNA, 201 bp, Bos taurus
catcccatctgacctgtgtcccttctaaaagaggaaatttggacacagagagagaccagggatgcaggcatgcagaggaaagtccacgtgaggtggcagcgaggaggggccatgtgcaagccaaggagagaggtctcaggagaaactaagacttcccacaccttgatcttggacttctagttcccagaagtgtgagaaaat

SEQ ID NO: 10696 - DNA, 201 bp, Bos taurus
ttcagcctggcctttcctccccgtgtgaccccaggcagttcagttttgtgggctggggctcctgtttcctatcgtgaaattatcttccagtattcctgtcaacttggccggagttcaaggattctgtgatcatagggccgcagagtctgagacctggaaggaacctgcagttccctttgttggaggtgctgagagtccctc

SEQ ID NO: 10697 - DNA, 201 bp, Bos taurus
ttcacaaatctgagggtaaagactgcacggcaatgaggggcttttaaaaagggaaacttcacagtttgtcaggggtcctgagggcaggtgaggatgaaggctctcaaaagcaaaaccttcttttggcaaagatgactgtcactgcccagcaagatggaaggtgatggagaacggactcttctttattcatttttattcaaa

SEQ ID NO: 10698 - DNA, 201 bp, Bos taurus
ttgagggagcatcttttcaaatcttacttagaccaactgacttgcttttcaaaaacaaaataaaatcatatgtttccattataaaggtacacacacttatgatagaacattttgaaaatagagaggaggaaaaaattcacccatattttctccatctgtaaataatgattattagcagttggtgtgtttccttcatatatt

SEQ ID NO: 10699 - DNA, 201 bp, Bos taurus
ctatttgaagattttcttcattgagactgactgtaagggttttacaatcctatctctgaaatattgtttcaactgccttggtgatccttttgatgcaagatggtagttggtctgagcacctaaaaagacagctatgctgctgctaagtcgcttcagtcatgtccaactctgtgcgaccccatagatggcagcccaccaggc

SEQ ID NO: 10700 - DNA, 201 bp, Bos taurus
cgttccacatcagcatcagaagccaggacttcattatattttgctctttatttcgaaggagtttcatctggttatctgtcaaataacctggtattttattggaaatggcagaggagtacactgagtgattacgagaacaaatagaacttgtccttagagagcatctgttcttcccagacatcactgtgcttttcaaatatg

SEQ ID NO: 10701 - DNA, 201 bp, Bos taurus
gtttgcacatctgtcgttggaaatatttgccaagaaaacttcacgaagagtcttttacgaggaaaccaaggaaaccaagcaacccacatggtttgtctgcttcccctctgtatccctttctcataggattttatgagcctttaattgttatactgagagtcatcagggcttggtggataaaagggtgagttttggggtccg

SEQ ID NO: 10702 - DNA, 201 bp, Bos taurus
catgtctccgcgagcctaggcaatgctctggcagggcaagcattcagggctttgagagcatcccctaaaggcacaagagctggcctctgacctcctctctccctcctctcctgtctcccactgctctagctgcactggtctcccagccgtttctgggacaggcctgctcttccctctgggcctttgctcttgctcttccct

SEQ ID NO: 10703 - DNA, 201 bp, Bos taurus
gtaaaaataataaaatggcaaagttagaattcaccccaaggcagcaaacagcagaagtgatgctgtggaaaaccgggttattgactcagttggtaaaatttaaaagtgctcctacaatgtggaaatcaatgaaagacaatataatagctttggtagatagaagacaaagatgctttaataactaactggtgttccacatat

SEQ ID NO: 10704 - DNA, 201 bp, Bos taurus
acaaagctacatacaaaactacaagtttgaaactttcaaagatgtgaaggtgaatgccatcagggtcaggtgtgaatgaggttgcggcctgccctccatctgccgttgctgacgatccttcagctctacacctcccacctcctgttggaaacccttgcagattcactcaatgccaggccctgtatgctagtggttatactg

SEQ ID NO: 10705 - DNA, 201 bp, Bos taurus
gaagctggcagttttgagcttttcaaaaatataaagaataagaaagccatgcatacacgtacacataaatatccactacaaatagaagagacaaagctaccgggcaatttcatttctgctaaatggaaaatctgaaataaatggtaacacttgttggaaaacttttttttttttttttagtatgtgaagtcaatttaactt

SEQ ID NO: 10706 - DNA, 201 bp, Bos taurus
aaggaactggtaacgagttagattataattctgccgcatagcaaatcatcaaaggcccagcatatatagatagttaaagatagatatttatttatatatagtaggcccaatacacatccctaagttgtttttacaggaaatagattccttccagataaaaactgctgaccatgagaccatagatgctagactggttgaaac

SEQ ID NO: 10707 - DNA, 201 bp, Bos taurus
ggactgacagtttcatttataatttcagaaaaacgttatgctttaggacatttatatctctggccttagtcacagctgtgttatctcatgtaaaaacacatgagaacactttatgatgagttaatcattcaggaagataaaaaaaagatacttcctgtattcccaagttattgaggttcattagaaagaacaaagatttgg

SEQ ID NO: 10708 - DNA, 201 bp, Bos taurus
gtttccctttctttgcattataaaataacaaaaaaatgatgttcaaattttctatccaacagttatatggtctctagtttcaatctacttaactaagtctatatttctttttcccttccagttttattgagataattgaacatctctcattgtatacatgtaaggcgaagaacagaatttgacatatggacatacttcaaa

SEQ ID NO: 10709 - DNA, 201 bp, Bos taurus
atggacatgagtttgagcaagctctagagttggtaatgaacagggaagcctggtgtgctgcagtccatgaagtagcaaagagttggacataactgagcgaatgaactgaactgatgcttatatatcatagaattagatgcaaaccttgcaaatccttgaggcttctttcaggatgcatgatggaagtttaaagtaagaaag

SEQ ID NO: 10710 - DNA, 201 bp, Bos taurus
ctcagggacctgtccagttggaaagaagttgtgcactgcagccacagcctgtgtaggatcaagaggaggctgctggtgtgggagggcactttgtgttcctaaaggttcagacaaggccctcagatgtggccatggagggtctgtggtgcctggcctagtcttaccccctgccttgcaggacactggggctgcctggaggga

SEQ ID NO: 10711 - DNA, 201 bp, Bos taurus
aacataatgaaccatctaaacaatgagaccccatgtgggccctatcaatatttagtttaaaggtagtctgtgatctgggtaatactttggaggtgcaagactaggcctggtgacaccagttaggaaattttaagagtagaggttgacagggatgattacaatagagatagaaacataaaacagaactaatcatcgcccttt

SEQ ID NO: 10712 - DNA, 201 bp, Bos taurus
ctatagaaattatttagtatgtcaatctttgccatttaagagctgatcaggatatcctagtgaatgaaatgaagctgtctctcctgtttgtcccacataagcaaacacttcatggaaactttggagactggcactggaaaagaaatttggatgattatcccatgcttctcatagttaaagattgtttactatgaaaaaact

SEQ ID NO: 10713 - DNA, 201 bp, Bos taurus
ctatcttttaatccagtaacagctattctttccatttcatgctgaaaatttctgatgattaggaatctatggaaaatagtagttaaaatagcattattaagactatcacatgaaagagacattctaatttcagagaagttacagtgtgaaaagaaaatatttctaagaaataaacaaaatttctgaacattttaatgacag

SEQ ID NO: 10714 - DNA, 201 bp, Bos taurus
gaaggaatgccttttttaaggcagtggtctccaacacttttggcaccggagaccagttttgtagaagacaatttttccatggacagagtgggggatgatggtttggagatgattctcataaagagaaagcaacctagatcccttcatgtgtagttcacagagggcttgtgtttctattgttaccaagttcaagatttttcc

SEQ ID NO: 10715 - DNA, 201 bp, Bos taurus
taaatggacaataagaaaatacattcatccacatatccatgcttgtatgtttgtgggtacataaacaaaaggaatatcgtggtacaaaataaaactaaagtcagagaacaacacaactttttatcaaataagtaatatatctattacacatacacccaaattgattcttaattatatgcattcaatttaaaaaaaaaagtg

SEQ ID NO: 10716 - DNA, 201 bp, Bos taurus
gtatgttcataatttccatatcatgttcacatgatttcaggactctcctttgtaacatgagacacaccaatttttcaatgtggtctccctttcaacactccggtcttcagtttttgagtttctacagtttcaaagttgcctcagtttcagctttttaggaactacaataggtttaattatggctcccacgtatggactctg

SEQ ID NO: 10717 - DNA, 201 bp, Bos taurus
aagctcattttatccctctaatagttttctaaaaatttgtaaccctgaaaatgtttcaacaattaactttgcttcaaaatgtaaaagcctagagggataaatggtttttccaggtgttgctattagaataaaaatatatcaagtatgtaaaggacatatgttcacacgtttaaattatttattttgtgaaagtttaatata

SEQ ID NO: 10718 - DNA, 201 bp, Bos taurus
tgttcctctttaggaaagtcagaaagcaaaccagtattgtggctatctgagaattcattgccccttaattctttatcaagggtccaatataaatctcagtaagagattatgtacatgtcagatccatttatataacagctgagtcgatttggagacataaagctaaaataagaacatctcaggaagctgtctgtatatatt

SEQ ID NO: 10719 - DNA, 201 bp, Bos taurus
cttttgatgacacatgtcacatcccttttcaatgatgtctcagcactttgctgttttgtggaaaattttagaacaatcctaactcctttaatatacttggcagaatcaagccatttcaagccaccatctttttcctgtgccattttcatggatattttgatagctctaaatccaaatacagataatcctatctgtcagatc

SEQ ID NO: 10720 - DNA, 201 bp, Bos taurus
aagaaattcaaagcttttccagtaagatgagcaaccagcgaaggatatgctctctcaccattcctttctgacattgtacactaaacaatttgccctgtcatacaaacaattttagcgaaatcctggatgtaaacgtaagtctgactgcaaaggagtcttacttatcccaatatatactgttactttatagtaacaccctag

SEQ ID NO: 10721 - DNA, 201 bp, Bos taurus
taatcaaagaggcagtaatgtatttatgttgccaaaggatgaagctgtttgctttagctaaactacacattcattttatgtcaactaaagaaaaagagaaaaacatccagatctttatcaaattactgtataattagttttagacattttttgattgacacaatatgaaacataggataagttttgaaatatagcaagaac

SEQ ID NO: 10722 - DNA, 201 bp, Bos taurus
taacagaaagtgctactggtttactttattctcataggacattcattatcctcagaaaataagcattacttaatttctgaattggactaggatatcctcaatgagctttttagttgccggtaagatggatagggtacagaaggctgaataatggcactatccaggatcttctctgtgcctaaccccatagccagataatgt

SEQ ID NO: 10723 - DNA, 201 bp, Bos taurus
attattttatttttaaaatgcactctgcatatgtggaaataatcagggaaactcagggatgcacaaactggggtaaggccagaaggaatttaatcgaggcgtttctttttttctctctctcttttaaaaccatcatttcactggatttcaaaagccatcagatttgcttcaggccattaaaaggcaaattggacattaatt

SEQ ID NO: 10724 - DNA, 201 bp, Bos taurus
ggagagacctcaaaggacaggaactttttggcaagcccaaagatcaaagaactaagacagaagttcttagttttcaagcattcaagaaaaccaagagggagaatgtctatgagttgagaagcatggccttctttgttcaaagctggtaatggaattaatcttttttttgtgagcaaatggactaaataagaaaaataagaa

SEQ ID NO: 10725 - DNA, 201 bp, Bos taurus
catcagggaagccaattatagacaaaatgtggtcaaccaagagaagaagaattccataaataaagctaatccagtaaacatcaggttggccaaaaagttcctatgggcttttcaatatgatgttatgagacatcacatgtataacacatggaaaaacccaaatgaacatacataatatcatatggtaatacccaaagaact

SEQ ID NO: 10726 - DNA, 201 bp, Bos taurus
ctgtagtgtctttctttaagttctattccataaacctgctatagaacaactgccatccaggtgaaattaaatgcaacaatatgtttattgtgaaggtaggcaattgtagcatgctgaaatctgctattaactttcagcatttcttatacctgtcaaatatacattggctccagtcttaaaaactgactggataatttcatg

SEQ ID NO: 10727 - DNA, 201 bp, Bos taurus
actcctgacggtctaataggcatcaccgcatcttcaggttcctgacactgcccacagcccacgtcttctgtttctggccttgccttatatagcatgaagcaccagaatgatcacactgcaaagtctgcacactacccctcccccatgacgtgacttgcctggcctctggcaaatgcccaaggagaagatgagggtccctct

SEQ ID NO: 10728 - DNA, 201 bp, Bos taurus
caattattaaaacaatttatttcttagcatgtaaatcatgttttactcagcacatttgctgatttcttcttgtcctctcctggtttctggtttctatatacaataatgcacaaataaaaatcttcattggaattcaacacttcctgctgttatcattctcctattgaagtttcagtcctgttcacatcataattggtttct

SEQ ID NO: 10729 - DNA, 201 bp, Bos taurus
atcctgttagaaatactgaggttgatggtcagtgctggaagctacaattctgctacgtcacagaactggaaccacaaagtttggacctcaggcccaaaccatcctagaggaagtgctggtgttcccccaaccatgaagcttatgagccccacagctcaaggctgagggccctttcaagtctgatgtcttactcagtggatc

SEQ ID NO: 10730 - DNA, 201 bp, Bos taurus
ccactccagtattctggcctggagaattccattgactgtatagtccatggggtcgcagagtcagacgcaactaagtgactttcattttcactttcaagccgttggccagcttctcagtccaagtcaagacagtgtttccaaaagccaccaccaaggtggtttcaaacttagtcacttgagatgaattttaataaactttct

SEQ ID NO: 10731 - DNA, 201 bp, Bos taurus
ccaggtgacataagagaaagaaaatcaggcttgtttcatggatagaccagctcaaaatactgatgtgagcaaaatggactgcattcagtctataccaccacttggcagctctggtgaggaagactctcccagtaagcagaacatggaggtggatctggccagctccttcctacagggaatagaccggcacacaaggatatg

SEQ ID NO: 10732 - DNA, 201 bp, Bos taurus
gagggaaaattgaacacacagcaagacctctgaacaagaagtaatagccgttaaattgaaacacgatgcaaggttttcctaaccatgagctcataatacgcgtgttcatagaaagtgatgtgcttgctgcctgcagcaaaaccagatgctctctgtttccagttgatcaatgttgctgtaaggtaggagtacatgtctgaa

SEQ ID NO: 10733 - DNA, 201 bp, Bos taurus
gtgtccttccaacagctgagttagagggaaccctcatggcaagacttcagatctccaagtcagggaatccagatgttgaggatctaccacagtgagactcgagaaggccatgagatgactccctgacatctcatgaaagataattaacctgagcttgaaagtaaagtgaagcgttagtcgctccatcagggctaaggatag

SEQ ID NO: 10734 - DNA, 201 bp, Bos taurus
tggcagcaatggctagacacatgagggcctcacgcagatgtggtcagattgaaaaggatttgccctgtggctcaatctggactgagacccagcagaaactcgctggccctaactctgccagaaactggcagggtattctcctgcctaaacttcaaactcttcattttcaaaataggtaatattggcatagtggatttccaa

SEQ ID NO: 10735 - DNA, 201 bp, Bos taurus
cttgcatttgagaccatcttaaagctcatctgaacccagtcacctttgcatttcaaggatcccacattctgatggccatcgttgtctcagtttaaacccttctagtgaagtgaggtaaagactgtcccaaagatgtcacttcatcgatggaaatgcctaattgtataggactggcctagtccccattccttctcaattctc

SEQ ID NO: 10736 - DNA, 201 bp, Bos taurus
aagtcagaggcctcacactttctgacttcaaactatactacaaagttgtagtaactagaacagtgtggtattgacattaaaaaaaaataaaaggatacatcaatggaatcgattaaagggcctagaattaaacactggcaaatttgctcaactagtatttgacaaaacagccaagaacatccaatggggaaagttgtccct

SEQ ID NO: 10737 - DNA, 201 bp, Bos taurus
tgagagacagagagaagatgaagggggtgggaattattatttcccaagcttatccaactagttgagaggttcagctgtttcttctttccgctttccagagcgccctgcaataggctcctccttgccacatccactcaggagacaaagaaggctgcctctcagcctaattaaaagtcctaaggcagcagaagagaagagggg

SEQ ID NO: 10738 - DNA, 201 bp, Bos taurus
gaatatatccctaattgctgtttgcttggattattttgaaagcggtcagagggctttccactttgctgagtgctttatacatcacattcaaattttcactgactatttaaatgtttggtccacattcaagcgtttgacagctagttgtgttttttccaaacaaaaagaagataaagggctccacacttgccataaaatatt

SEQ ID NO: 10739 - DNA, 201 bp, Bos taurus
cttgcattcccactgtctgtctcaatatgcacccatgggatgtggtctgggagcccagtagcctcgctggactgaagtttagctgggcgactggcccacgagtactcaacagagaactcatagtaggcacctgagtcctgccatgaaagccagtctctaagaaagggggaactgttccacctgtagcagccttgcctggcg

SEQ ID NO: 10740 - DNA, 201 bp, Bos taurus
ccatctcttatctatcaaaaaaaaaaaaaagaaaagttcattcaggtttttccataagaaggtatggcaaaacccaattgaaatttttggccaacccaatgtataaagtctataaaataaactgctgtctgtagaagtggcaagcagctcggcgattcccccttgtttgtgtgggcaagttctctccactctcagtggcct

SEQ ID NO: 10741 - DNA, 201 bp, Bos taurus
ttagaattctttaatttgaatttgactggctcataactttgtatttattgctaatagatttagtttgtataccatctggaacaaaatcaaaacagacgtcactttctcagattttttaagggatgattccctaatgtgtatatatgtgttggggatattagtttaattttaaagttatttttacctcaagcttagtattcc

SEQ ID NO: 10742 - DNA, 201 bp, Bos taurus
gagcggtagaggaaactttacttactcacctgctgatcatctgctgcatggccgagttccactgatggtctgtggccaggggttggggacccctattgtgcagcactgatgggaactctgtgttctgagccttgattaaagtcaggcctgaaacccccaggaaaatggagccctggtacagctggcttaatttcagctgac

SEQ ID NO: 10743 - DNA, 201 bp, Bos taurus
tactgtatggggcatttgttaccaagaggaccagtttcactggaaggagtgggtccttgattagctcatcaaggaggccaaatagatggaaagaaaataacacatgaagtcaccaagcctgggagacctgagccacgtagagagatgagagccctctctgtgtgagccctctgtggcctggagctgacaagacttgctgat

SEQ ID NO: 10744 - DNA, 201 bp, Bos taurus
aactgtgctcaagagttgttgggaatccaaggagggttttctttacggtacttggagccacctgtctcatcctgccgtgggccctacagcaggccccaccacaccctgtggtctcacctagggcaccaagaagctgggttcttacagcccgcacggatgaaaacaaggcctccctgaaggagagcccagatgcagataaca

SEQ ID NO: 10745 - DNA, 201 bp, Bos taurus
caagagctgataatctggaaggatcgacgctgagagccgggaaggcagttcacaccccagtcgtaggcgtgacttcgggccaataggttcctttttctgaacttcagaacccagagcaggcaagtgtcacaagcacacggaacacgtcaccagtcatctcagcggtcaaataaccagccctgacatggggcggcccagtcc

SEQ ID NO: 10746 - DNA, 201 bp, Bos taurus
ttccagtgaggcctcttcaaaggggtgggaggcgcgagtgggtgggctggggaacagacgtggtcatttggctgcattgcttctcggggttggcatcagtactcacggggcaggccaaaggatgccttgtagataaaagggaggcggaccatgagtctccagagaagggactctcctcaggtggggctgaggacccaagga

SEQ ID NO: 10747 - DNA, 201 bp, Bos taurus
gctgggatggtggtaagaaaacaggcagcgagtcaggttcccagggactgaaatacaaaacccagctacttcctggccaggccttctctgactcagtctcctcatctctaaaatgggactattgacccacgctcacgtgcgatgagtttgtaaagcccgaggcacttagcatgtggcctgtgagtggtgatgtttagttat

SEQ ID NO: 10748 - DNA, 201 bp, Bos taurus
ttttgacttacctttcttgggggtggggtgcctgttgtctccatctcctctcaggctaagatgtctggtcctgatgaattatccttgctgtttaccctaggttcaccttcagcaccagagatcactgtgatgttggcaagttgggttcctctcccccgggggcagtgtcccgacttctctgcatgagaagggggcctagga

SEQ ID NO: 10749 - DNA, 201 bp, Bos taurus
tgagtctgtactacgtgtctcatccttcttagaccagcagctactgtggcttgaggtctgctccggcatttgaccagtgcccaggagggccctcccagccgtgcagggacagccatgctctgctctgacatcctactggtcaaagcaagtcactcactcaggcccgaagtcaaagggtgggcgatcactgcccatgtgaga

SEQ ID NO: 10750 - DNA, 201 bp, Bos taurus
gtggaggccagggagccgtgagaacatcagatatgctgggaccagcagaccctgggaggggcgacaggcagccttggggagacggggttcttgttcggaacggccatgcatgtgctgcgtgactgtggatgagaaactgcccctctctggactttccagattctttggtccgacagatgggaaagcgtggaccctaccggc

SEQ ID NO: 10751 - DNA, 201 bp, Bos taurus
ccaacatctcgttttccaaaagttccacctcaagggtgtaccccagggtggccccgccatctctccctgtctcactcccgagcaccttcctggcctctgaagtcacctgaggtggagcactggggctagccagtctcggagctgtcctgaagcccctctctgggtttctgtggccctgggttcccggggcagcccagggag

SEQ ID NO: 10752 - DNA, 201 bp, Bos taurus
ccaggtgcttgggcagagagaggaaaggacaccaaggaggaagccatgtattccttttgtgaaggattcaccaaggaaagggtgtcaggtgggccctgacggggttggaatttccaccagcagtaggatggcgttccagaaaggcgaacagcactggcagagacctgcaggtctcaaagcggcagggtgtgtaacacgtgg

SEQ ID NO: 10753 - DNA, 201 bp, Bos taurus
cttcctgtgaaccgtggatcaggctgttcttctcacaatggatctgcaaggtgggagccctaggaagctgacccctgggcgctaacgggtaggactggcccgggagttaatggacatgactttagggaagtgagggtgtccttcagaactggtttgtgagcttgggggtggaggacacagctgaggctgactctacaaagg

SEQ ID NO: 10754 - DNA, 201 bp, Bos taurus
ggccagagaacgggtctttgccaaatgcagctgagccttgtggacttgtgtcctggggtgagttctaactgtgtcagtgccattgtgacttcagagtcaccctggcctggcattattcctctgccatctcacccatgatagccgaagccccactgagacttttattgtctgtgttatactgttgaacaggagccttagatg

SEQ ID NO: 10755 - DNA, 201 bp, Bos taurus
gctggctgggattttttgggaaagggtttaggccaagaacataacataacagttgtctgtgaaaataacctccaggctatggcaatgaacctttttgtgccgagtcccagatcggccataccagcaggctaattgttagctgtgaacccactccctccaaggcctggcttcaagccaagatacctgggttctagcccatgc

SEQ ID NO: 10756 - DNA, 201 bp, Bos taurus
catcgtgttaatgtcccatgtcccacctcctcaggactctgttccgggcactctaaagaggactgtaggaactccacggtgctcttggcagggtctgtgattggcctcctgcttcctctgaggctgaggacccctggagaggtgggtcagtggcatccgctccatccgctctgccacctgaaatgagagtgatgaggaagc

SEQ ID NO: 10757 - DNA, 201 bp, Bos taurus
gtccgatgagcagctaccttgtaggggagacacaagctataaacaagtcagtgaggtttccttgcaagaagaactaggaaaacaacaaatcaaggaatgtggaaggagaggcctaccttgtgagaatctgatagaatccaggagcaggaacctcaagggcaggtgctgggacaggaagcccttaaggaggaacggcactct

SEQ ID NO: 10758 - DNA, 201 bp, Bos taurus
cccctccccaaggcaattcagaaatcactaatggccgctgaccactcacttccttcaagcccttctctctctgtctgaaagctaaggcttcagataggaacacccaatctttctaccaggcaaggcaactccccgtcaaaacccatactgggacaatcctggtagtctgtcacgaaaatggtgagttcagcccaattgctg

SEQ ID NO: 10759 - DNA, 201 bp, Bos taurus
cgtcactttgaagccccgtttgcattccatttttaactagagggaagaggatggaggtctttggtttctatgacaacccagatgggccataatacaagatgcttacaaatgttcagtcgcagggatgccaaatcaaattaaggcagagttagcactacttcataaaaactagatgggggagaaaacaaaatacttacggca

SEQ ID NO: 10760 - DNA, 201 bp, Bos taurus
gtaacttcaactttattccatgggaaacctggcagaagactttgagagcaaaacagactttagcaatttcattggcttgggctctatgggctagtatctatgacaaattaacacaaatcatatgttaaatgtaaaggtaatgagaatgacaaaaggtaaattttcacattaaggtctataaacctggactgttttcaaatt

SEQ ID NO: 10761 - DNA, 201 bp, Bos taurus
tcaaaggatggagtacattccatttcacaatgcaactctgatttatttaagcagtccacaatttgagggggaggttaaataaacttttcatatttgaacaattatagatttacagaaaaattatgaacctaatacagacagttcccatagcctcacacccaggcaaataataatttccctcattattagcatcttacatta

SEQ ID NO: 10762 - DNA, 201 bp, Bos taurus
gacactaccccacgcggccctgcatggctcagtgagtccccctactctcagaactgtaagtaatgaaccatcttttcgactgactatccttctcatctgcaggccttattgtacctgaataaaacccaaatcctggttactttttattacagttttgcatataccttttttctgaggggagagtccaggcttttaatacgc

SEQ ID NO: 10763 - DNA, 201 bp, Bos taurus
tctatggggtcgcacagagtcaacttagcagcagtagcagcagtctctactttgaaggactgtgtatgtgtgccagggagagatttctgggagggaggcacaggcccagcagggattattcacaggggatatctaatagcagaggtctcttggaaatgcagagccttaattcttctccaaggaatagtaatataacagata

SEQ ID NO: 10764 - DNA, 201 bp, Bos taurus
ggccctcagtccgctcgagagggggcagctggctgccactcgcggccatgccctcaaaggtgccggggacctgccaggaggcgctggcctcgccagaggagtagttaggtgtgcttctttcccagcgcagagtgtcgttgttgaaggtcagcagattgtggcaagcgcggcagcggttcaagtggccacgggacaggttgg

SEQ ID NO: 10765 - DNA, 201 bp, Bos taurus
gtcccaggaggaacgctgctccatgtggggaagctgggcacacaggaatgctaagggcttccaaggagacgcagggaaggaggaaaggagccgggaaaagtggccaaggatgggactaagtgcccagacacaatctgacctaacccagagaggataacctgaacgctggtccacgggtgcccggctgggacagcactggtg

SEQ ID NO: 10766 - DNA, 201 bp, Bos taurus
tgcctcatctttagttaacatccatcaaacatgctcactggttataaaacacagcaattagggctagtccttcaccggccaagtcatcacttctctataaggtaattttctttcacattcaactcatcctcgtgcgcccaccttctggaactcttccatacaggccagcctttccttccagttactgctgtcgagaagctg

SEQ ID NO: 10767 - DNA, 201 bp, Bos taurus
ctggcctggggcagaatcaagtctcccagtttgacgcttctccaaatggaggagattcagggctccctgactcccagggacagtggggcaggaaggagggatataacaacagggggccgaaaaggactaagagcttcagatgtgaacgtggctctccggtggctctgatcgtcttggttattaacagtccttggggtgacc

SEQ ID NO: 10768 - DNA, 201 bp, Bos taurus
tcggtatagctacgtcgctggataatctagtgttcctctgcttgcgtacacatatggatacctggtgtccatcagtggcctcaaggattgtctaatgctgattgtaaacaaaagcataagaactcatgaactgcaggtggacagagtagtttactgggccactttggtaagataagatcattaaattgaagatattgtcac

SEQ ID NO: 10769 - DNA, 201 bp, Bos taurus
cagcacacagggcacagcatacatggtagatacatctgttcacacctgtggaatgtagctccaagagtgaagcgtggctccaaacctggacttggggtgatgatgcgtccgtgggttcaatggctggagcagatgtgccggcggggtggggggctttgattacgggggagtctgtgcacgtgtgggggcagaaggcatttg

SEQ ID NO: 10770 - DNA, 201 bp, Bos taurus
ggaaaggcggtcttgctgtgcggccgccgtcacttccaccttcagtctccgagaccttcgcagagactcaacagcgctgctacgtcgggagagagcgtccggagggtcctaacctctgcggcccatgggaagattttcccactttcgggggaaaacaagtggaggctgctagctatgaactttgtacgctggatctggatt

SEQ ID NO: 10771 - DNA, 201 bp, Bos taurus
cattttaaaaaatggcctgtaacaccaaagagatgaaacattgctttcaaataagtccataaaaacgacatgttaatgtagaatactagactttcgaaaccattatttagggacttccctgatggcctagtggctgggaatccgctgtgcaacgcaggggatgcaggtttgatcccacgtactgtggagcaaccgggcccg

SEQ ID NO: 10772 - DNA, 201 bp, Bos taurus
taagtttcttctgcgctcctggggtcattgagcaccatgtggagggaacccaggagcctggttccagagcactgtggtacagcagtgtccatagcggccatccagatcactgagctggctggtttattcacattctgtttctttaaaaaagacaactgcatgacccagtttagaaatcttggcctcagatatggtttgaca

SEQ ID NO: 10773 - DNA, 201 bp, Bos taurus
ttcctcaaggtctgaaaaggatgcttctaattattgaaaagacatctttgctttctgtgatttcaggtgtcagctcctgagctttagaacatggctgctacaagcaatgtgactgaaatcattttcttgggattctcccagaaccagggtgcccagaaggtcatttctgtgctgtttctcctcttgtacgtggccatcctg

SEQ ID NO: 10774 - DNA, 201 bp, Bos taurus
ctccttcctcatgacctttgccacgggtggagtacctcacgctggcccccaacatcttacctgtgcttctatttcctcatctgtataaaaaaagcagtgactataataatatccacattacaggcctgttgtgagaattaaatgaattaatgtatgtatagcaaatggcaagtactattgcaatgctagctataattatta

SEQ ID NO: 10775 - DNA, 201 bp, Bos taurus
taattttatggatcctacactctgagaaggcaggagccaaatctgtttttattagccactgaagacccaacaaatatccatgtgcctgtttcattatttcggctcaaaaatatttactgatgaatgaaggacagaggaataatggaacacatttattatgaaattgctttgtatgtagatgtagtcacagatttaaaaaaa

SEQ ID NO: 10776 - DNA, 201 bp, Bos taurus
aactgaaataatgtagaaattagtgaaaaaatgaatatacgttggagtttattaagcagttctccatattaaatgtccacaaatccttggtctaagtcaaattatttcacttcagttttgtgcaaatgcaacattcctgttccattctttctcttattgcccatatccaaaatatacatttcagaactaatcttgctgaag

SEQ ID NO: 10777 - DNA, 201 bp, Bos taurus
gttctcactgtcacctacttgaatgactcttggggtcttacacagccaggatcctcaatttgaactctgttcccatcatgagagagattcacatgcctcagtttattaacatgattaactccctgtctcactttattaatgttgccaaaatcttggcactgcttctgaatagaaatatggagacagggttttggagaaaag

SEQ ID NO: 10778 - DNA, 201 bp, Bos taurus
atgatatcaccgattcaatggacatgaatctgaacaaactttatgagctggtgatggacagggaagacttgtgtgctgtgtttatggggtcacaatgagtcggacatgactagcgcctgaatagtaacaatccgagttttctgcctacatctccaaagtttaattaggatatggattcctggaacatgcagcaccccctca

SEQ ID NO: 10779 - DNA, 201 bp, Bos taurus
ctaagtctatggcatctaccatgactttgtcagcaacctaatgtaagtgatctttgaacttactcctttgcccctgggccacattcaaatcacgatatttatggtatgatgataaacaaaatggactctcctctcacaagtaaaagaaacaccgccaggaatagcacatttgttcaaaataatggtgatgatgatttgaca

SEQ ID NO: 10780 - DNA, 201 bp, Bos taurus
taggccaaccaatattgtgtgcatgggtcaggcacttaaaagccattagggtgcctgccacatgaagacacctgtgtgaggatgagggggacacagaaccgatcaggccacaagggcatccgcccccagcaagacaacttccgtgcaccatgtcaggtacatagtagttgaagcaaaacagatcattgtcccctggccacg

SEQ ID NO: 10781 - DNA, 201 bp, Bos taurus
gacgtaccaggatgtgctgtacttcctcctggcctccaacgtcatcacgcccactgtgctcatcctggcttcctacgccttcatcattgctgccatcttgcgaattcgctccacccagggccgcctcaaagccttttccacctgttcctcccacctgatctctgtcaccttatactatggctccattctctacatctactc

SEQ ID NO: 10782 - DNA, 201 bp, Bos taurus
cgttgattgacaagatgaatgaataattggatggatgaatggataaagaggtaccactgcatccccaaatacttgcaagaggcctggaaccttaggaatccacacagtctgtcatttttagctttttcctccaatttccattctagataagaatttatgccctagaaaacatccttttcaacacggccctatggatggtat

SEQ ID NO: 10783 - DNA, 201 bp, Bos taurus
gaataaaggcttcactcctggtgacatggtggaaatggagtaagggggctgaacttggttgagtgttgcctgaggatgtgaataaaccaatgactgaaagatcaagcaaatgaatgaatgcacagtatagtattcatttagtgtattatttgcttgtgttattatgaccagtttttggtgcccattcaaagcctggccccg

SEQ ID NO: 10784 - DNA, 201 bp, Bos taurus
caaatgcgagaggaagtggaaggaagtttcaacaacaaatttgctgcattttgctcttaatagaagagacgctcctccagcagatgcccctggcctatcaatccagtcctctgaacctggggacagcacaagatgggcagaagtcttacgagagctccctgtcctgctccttcccggggcctgcacttataccactaaccc

SEQ ID NO: 10785 - DNA, 201 bp, Bos taurus
cctgagctccagcagaggagcgggaagccggaactcttcccttcaaggcgttttggcagcacgtcaagtgatggaggcccggaggacgggtcgtctaccatcgagaaaatccgagagcgttacgagaacggaggcgatgtgtgaagtgcctcatcagaaggaacgtctgctttgtccgtagacagaggagggcagacaccg

SEQ ID NO: 10786 - DNA, 201 bp, Bos taurus
ctccggaagagctctcgtcactggacacaaactctttgctcttgaagctctcgctcagctgccttgatgaagacttcgatgatgagccccgggagggtgtagattttttctccatcttcactttgactttcttcttcttcttggacttgtccctaggtgagcaagagggaagggggtgctgggccctcaggttccccacat

SEQ ID NO: 10787 - DNA, 201 bp, Bos taurus
aagtctggtgtgctgctgtccatggggtcgcaaagatgggacatgactgagcacctgaacagcagcaggcaggtgggagaatagaaaaccggccagtctccgaggtgaaaacagctcagggctggaagagccaggcgccctgagagaccctttctccttgccccatcatatgggggccccaggcatgacctcatggctcct

SEQ ID NO: 10788 - DNA, 201 bp, Bos taurus
ctttgagcctcgggcctgcactcttcccccaagaagtgtcaggccaatgttgcaaggtcccgagtcttaggaatccccctttccagccccaaagtaactacggagcttggatggccctaaagagcctcagtcatccatttgcataacagcacagccatggggggggtcctagaagacgctctcccctcccctgcgtttcat

SEQ ID NO: 10789 - DNA, 201 bp, Bos taurus
cagggggcagcttggtgagaagatgtaaaggggtatcggctgctgaccctcacccggccatcagccacggcggccaaccctggcctgcgcagagaagactgcaggaaaccagagacaggctcagccagcgctccacccgtcctcactaagcaccaccccccacacaagggagagccagggtaggggccgggctgccccggt

SEQ ID NO: 10790 - DNA, 201 bp, Bos taurus
ctactacatgctctgacttttcatctaggtagggcctaccacacttgtacctaattgcctcctgtatatttttacagctgagtgaattaaagtaagttttcacaagtcttttcaccctaatgttctagtcctgaccttagttggtgtcctgtactgaaaatgtgctttattagttaaaggaatgtagaacataggaggaat

SEQ ID NO: 10791 - DNA, 201 bp, Bos taurus
cggttgccaacagagactaatgaaaatctacaggaaggctgcctggcttgctgatagccaaacggcccccaaagtgccgaggccaggcttccagcagggacgcagggaagtcccctctggggtgaccaccagccaggagaagaggctatcttggccccccatctccagaggtcagcacccctctaaactgccctttgctga

SEQ ID NO: 10792 - DNA, 201 bp, Bos taurus
cgctgaggactgagtccctccccaccggagccttgccacagactgtttgggcttcctcatgccatgggggctgggctccaggaagcaggcagaggaagccagtgttaaggcctggaaaccgccacagcatcgctcccatccttctctgctgtaacacgcttccctggtggctcagacggtaaaaagtccaccgcagtgtag

SEQ ID NO: 10793 - DNA, 201 bp, Bos taurus
agagcaaaccagagctaacaggtgcgggatggagccccagggctgggaggattgcaacagcgtagctgggaccctcagaggccaggcctgcgaggtttccgagtggtcacctccctctctgtaacatccatttccacatcgtcttttttttttttaattgggggatgattcctttacaattttgtgatggttttggccaca

SEQ ID NO: 10794 - DNA, 201 bp, Bos taurus
aatgaggaatgagacttgggcaaagcagaagagcagggaagaactggtgaggaggaaggagcaagactggccacatggccgctcccgccacttagacctgtgctcctggtggcggcacgtccttgactgaagtttaattctggtggtggtcctgggcacgtggtctgccttacatccctgcagacaaggtggggccagtaa

SEQ ID NO: 10795 - DNA, 201 bp, Bos taurus
taatattcagaatatacaaaaaactggcctaactcagtaacaaacaatgcaattaaaaatgggcaaaaggcttgaatacacagttcttcaatgaagacacatgcatggccaacaggcatgttaaaagatgctcaacatcactaatcataaggtttacaaaatcaaaatgaaatgttacctcacacccattaggatggccac

SEQ ID NO: 10796 - DNA, 201 bp, Bos taurus
ccccttatgagaacatccacagctcttcatctcgcttgtttagtagaaaagcaattaaacggtctgtggggagtgtgagcgcctgttgagtaagtgcaccgattcatttgcactacttggccttagaaaaatcattgtctggctgaggatgcataatttacatcaagttatagccacactttttaatgtatagctctaaca

SEQ ID NO: 10797 - DNA, 201 bp, Bos taurus
gaagataaataacttaactaaggctgacaccgtctgtaaatggtacactcagcctctgaacttgggtttgtctgatgtcaaggctacagttctggccactgtatcccaaacaacataggtcacaccactggatcacctttcttgccccagagccctcagccatccttgaaaactgggccttatttctgagatgtatttcac

SEQ ID NO: 10798 - DNA, 201 bp, Bos taurus
aaagatcaaataaaggctttaaagcaggtaaccatgtttggcccagggtagatgcttaatgaatggcagctgtatcagtaatagtaacaatattattgtatactaggccaaagaagagagagagggacctggggggcacagggcgggtggtaaaaagatggactgattgaacgtgtgtatgaaataggtcacatcaggcag

SEQ ID NO: 10799 - DNA, 201 bp, Bos taurus
ccgatcgagagagagcccgccgcagcttcgaaggccccatgcagccaaaaaataaattaaaaaatttaaaagtaaaaaacaagaaagggagtcagtagggatgacaggcccttcagctcgacttggatgaagggtgattggaagctgaactcagaagagaggagttaggtaattccaaataaggaacaaaatgcaaaagga

SEQ ID NO: 10800 - DNA, 201 bp, Bos taurus
ttgcacccttatgtcaccctgatggctcccagctgcacccttacacgatgaaccagacgcaggactgagactgcaaaagccatgtttcaattcacaggccgcctgtctgcattctggaaagacaatttcaaggaattgaatcaccacaggattgtcactgaggcagctgacaggtgttttcagaaataatgaggccggttg

SEQ ID NO: 10801 - DNA, 201 bp, Bos taurus
ttactacctattttaaacatatgtttctcctagaatcgttattgtggttttttgggggggggcggtaatattgggaagacccgattttctgatgctactaccttatacccacagttgcccagaaacctggggaaaaacgagctggttgttcacaagtgcactttaatttgctcgactgaacatcccagagctagtaggtgg

SEQ ID NO: 10802 - DNA, 201 bp, Bos taurus
agagaccagggagacagatatggtgagaaagccatgctctgttctaagacttctcagtacaaggcatctccacgtggaaccatgcctgcccaccagaggattgagacaacaggaaagtgattgaagttaatacaagaaacagattggtttaagtaagaggaagagaaactaatttctgttaaatatacaccatctgtcagg

SEQ ID NO: 10803 - DNA, 201 bp, Bos taurus
gcgaccccatggaccatggcccgccaggcttctccgtccatgggattctccaggcaagaggtctggagtgggctgccattcccttctcctctgcccctccgtctcatcctcatcctggcccgggcacccgcagactctgcaccccggcgaggccgcaccgcgcacgcgtctccgtgggcccctcgcgcagccgccggaagc

SEQ ID NO: 10804 - DNA, 201 bp, Bos taurus
aaaatctgtttggccacatgtaagtaccgggtttctatgagaatttcatcacaaatttacaattacattctaaatcctttagtgatttaccagagtatgcacttttcaagatgtggaggtggccttcgtcagtagcgcagtcttctgcgcatgcaccggccttcgtcagtagcgcactcttctgcgcatgcacctgctctc

SEQ ID NO: 10805 - DNA, 201 bp, Bos taurus
acagacacagaacgttgtccccctggcctgcagctcttgagccccgccggcttcctggggcgcgcctcctgctcctgctctggaggggaagcgactggcccggtgacacgatgtagctgatttccgagccaaaagtgacatttgggatggtctctggaagggggaatgttcagtggaagggtaacaaaggccttcagggga

SEQ ID NO: 10806 - DNA, 201 bp, Bos taurus
agagggggccttctccttatagtctccactgatggcgtcccgagtccatccctcggctcccaaagggcgctgcacggtgcgggcttatcattcaaaacgggcgtcttaaaatgcatttgggccagaaagtgtcttaatgtggcatctaataattggaaccaatgaaaaagcaggaatgcaaataaactcttgcttctgtaa

SEQ ID NO: 10807 - DNA, 201 bp, Bos taurus
attggtgatggacagagaggcctggtgtgctgcagtccatggggtcacaaagagtcggacacaactgagcaactgaactgaaccgactggagtttagaaatggtaaaggcccacgaggtgcagtatagcacccaagaatagtagcacatggtgctgccacttgagtacattttccaaggcatttccctgacttgataagta

SEQ ID NO: 10808 - DNA, 201 bp, Bos taurus
tcctcttgagatgacgggggaatcttgtggtttttttcgagctgtggggcgacgtgtgttgtttccctcaagttatgacggggtattcagggagcctctcatatggccccagggaagtccagtctccattcaagttacgagggggagcacggcattgctctcgagtcacggcatgggaatcgggcctcaagacacgttgaa

SEQ ID NO: 10809 - DNA, 201 bp, Bos taurus
ctcttcttgagatgcgatgggcatctcttggagccctttgagtggcctaaagggagtcaagcctcctgtggagttttgagagaggactcggaattgttctgtaggccttgcaggaagagaagggactcaagtcgcgatgacgagcgaattgcgtggcttttctcgagctgcatcgttacgtgtggtatttctctcgagtta

SEQ ID NO: 10810 - DNA, 201 bp, Bos taurus
tgacgggggaatctcgtggtttttcttgagttgatgtgcaacttctggggtttctctccattatgacggggaaatcagggggtctctcatgtggccccagggaagtccactctccactcgagttgcgaggggagcgcggcattgctctggagtcacggcaggggaatcgggcctcaagacgcattgaagggggaatcttga

SEQ ID NO: 10811 - DNA, 201 bp, Bos taurus
atcttgcgatgacaggggaatcttgtagtttttttcgagctgtggcgagatgtgtggggtttctcacgagttacgacaggaaaatcagggagcctttcgtatggccacagggaagaccagtctccattagagttgcgagtgggagcgtggcattgctttcaaatcacggcaggggaattgggtctcataacgagttgaagg

SEQ ID NO: 10812 - DNA, 201 bp, Bos taurus
ccagttctttttccctttttcaagtctttatgaatttgtaacaatagtgcttctgttcagtgttttggccatttggcccctgcagcatgtgggaacttagcgccctgaccagggtctgagcccgcatcccctgcacaggaagatgaagtcccaagcaccggcccgcagggaggcctctaggcccaggccttatctccagcg

SEQ ID NO: 10813 - DNA, 201 bp, Bos taurus
aaaggggagaagaaacggctggacctcaggaaagagagaagtcattggcttgactcgctccccgccctccccaggcaaccttctacccaggcccctcagagggtcataacttccccgtcagagttcccgcctctctggaagctgtgaggctccatttggaacccagagtctacagggtaaggttgtgggctttgaggtgtt

SEQ ID NO: 10814 - DNA, 201 bp, Bos taurus
atagaaggcgccctcgggccatagaagaaagcctaactctctgatgctggcctttttttctccttacaatgctgaacggagatgaacgcatcggggcctcgtgtctagatatgaattttcctttgtgcagcgctagtcatgatgggaattccatagcaatttatcaccgtaatgactacagattctagagcatcagggtga

SEQ ID NO: 10815 - DNA, 201 bp, Bos taurus
cctgacgaaacctgcatccagcagggggctggtggggagacagggaacctaaggaatgctgctggccggagccagctttgacaggaaggcataggacaaaacgtctttgtctcttctcagagccagtggtgcagaggtgagaaaacccagagttggggcttccccgtgctgagctgaggcagaagcatgtaggggcaagaa

SEQ ID NO: 10816 - DNA, 201 bp, Bos taurus
ggccctcatggcagcgcttgagctttcctttttcaagtcccaccgatcactcctcaaagaaacagaaacaaaaactagtttctactctgatggaaacagacggcccacttcttacgcagatgtgctttcaggccctaaacacttgccatgaataaaaacggaatcaaagatatgataaagatacatccttagatcataaaa

SEQ ID NO: 10817 - DNA, 201 bp, Bos taurus
ataaatactgctgaatgaatgaaaaagttcttgacccatttcaggggctattgatctttgctagactgcccctatctcttcccaaccccattctttgtcatgcttcattcagcaagctgtgagtcttctggttgagatgcaagaactttaaagtgagagaaaggatattctttttttttttttcttctaactttatgtctc

SEQ ID NO: 10818 - DNA, 201 bp, Bos taurus
tttctaaagttattgctgcaatctatctttaaatgaagattaaatgcctcatgccctgtgaccaggttctatcaaaaattgagttattgtgttaactgaacaatgacccaatacttaggaataaattctgtagtaaaattgtcataaaatatgactactcatgacatgcaatactgcttgcggctaaagcacaatgtacag

SEQ ID NO: 10819 - DNA, 201 bp, Bos taurus
cttagtcctgtattttctaagtctcttgtgatgacttaatgtcccctgtcattgaaatgacagaaccacaggccgttctaaaggaattggcagttttatgttactgccagcctctcttccagcctctcttctcctgaccctaggagacccctgtcccctgccttacccagttctgccaaaagagcccttagatagggggag

SEQ ID NO: 10820 - DNA, 201 bp, Bos taurus
agttggtgatagacagggaggcctggcatgttgcagttcatggggttgcaaagagtcagacacaactgagtgactgaactgaactgagggccaggaaagcgctgtgctctttgacctattccagggaggaatcaagaggatcaaggcaacagcctctttggtgtatctggtctgttctgggtgggggacgtttctggagcc

SEQ ID NO: 10821 - DNA, 201 bp, Bos taurus
aataggaggtaggaaagcctacaactgcaggtaagggtaggagagccttgtgtgctctcgagtcagggtaatgcttcactgtgtgtatgtgagcacacgtgggcctgtctcccttgaaggaggaaatgccagcccgctccagtattctggctgagataatgccctggtcagaggagcctggtgggctacagtccacggggt

SEQ ID NO: 10822 - DNA, 201 bp, Bos taurus
gagtccataaaagaccccgagcctccaaacttttctaattattcataaaatatatttgcacgtcctgtaaactcaccgttggatgaaggctctgggcctcctagtctagatttggtctgatgagaccacctgggaaaagacagagatgctttcctcccaagagattctttcatctccttggcctcccaagggttaaccaac

SEQ ID NO: 10823 - DNA, 201 bp, Bos taurus
gaagtagtgagtcactctcaagtcagagaccgctcgcttcaggaggaagcgcaccaaggggctgtccaggtagcattcatactttaaggcctgggtgggagacaggggacagggggctttgttgactgtccgtactctataccaagcaatatccctgaagaatacagtctgtcttggggtcccgggggcgggaccatcaga

SEQ ID NO: 10824 - DNA, 201 bp, Bos taurus
ctcttcttactttgtattattgtattttgtttatgtatctattgtctgtttgacccccattgaaatataagtcagggtttttaattgaccactcttttctattgcttttattgaccactctattctattgcttagtaagtagtacctggttcgtatctgacacagaatagacactatttgttcagtaaatgaatggacata

SEQ ID NO: 10825 - DNA, 201 bp, Bos taurus
gtattcttgcaccactgacattttaggttggaaaattctttgctgggcggggggatgttctgtgtactagaggatgttgaacagcatctgtggcctctacactagatgcccgcagccagtagcactccctgcccaaccgattatgacaatcaaacatgtctccagacattggcaggtgtcgcttaaggagagaatggcccc

SEQ ID NO: 10826 - DNA, 201 bp, Bos taurus
ccgctgccgttttaactcctgagtggccggcggcccgctcccgacacagcccgcgggaggcggggccgggccggatgctatggctgggcctccggggctgtggagcccttggcgccttcagacgcagctctggtccgaaagaagaagggagatccgagaggggaaaggggccgttctcatattgcctcttactcccttgca

SEQ ID NO: 10827 - DNA, 201 bp, Bos taurus
aggggctgctgtggtgtcggaactgccctcaggaccggtcttgaaggacagcggagagggcaagtcctccagggacaggactttgcagtatgttttcaccgctcagatgaggcgagagggcctgaggtaagcaactaaagtgattcatgagcagtagcaagcggtctggcccgatagccagggatttgaaaggaactagac

SEQ ID NO: 10828 - DNA, 201 bp, Bos taurus
ccctctgacggggagcctagggtcagtgggggagcttctgtgggcctcaacctcatgagggaaagaaactgttgttgggggacacatggaaaagtgagaatgggacagaaaggcttggccctcagggtccacttggagtttgaattagggaataaactgggattgtggttttagagaatcccaggaccatctgcagggtcg

SEQ ID NO: 10829 - DNA, 201 bp, Bos taurus
tcagtggagggtgatgaagaatgcagagggtgtctgtttttgtcccacctggacctaatgggaggagcatggagggtccttgggcctggggttgcccctctcccacccccactgcgttcaggaattttcagagacgttctggatatggactcgggagggactggtggccagtgggaaagcacatgccaaatgaagctgtct

SEQ ID NO: 10830 - DNA, 201 bp, Bos taurus
gaatcccagcactgaagcccggccacgttcccaaccactgctctgccagagaatgggttggtggcaccattaaaagctcctgccacactcaagcctgggttttcttgaagccacgtcaggcctacgtgccttaccttccttggtgcctggcccttggttaagcccaagatgccaagccatgcccagaagtagactgcggtg

SEQ ID NO: 10831 - DNA, 201 bp, Bos taurus
ctttggccagatgagttttgcacacaagttgctggacctttaagatatggaagaaatatatttccctactaggcctaaaggcagcccagaaggactcttgtactgtaggttcctgttagataagaagaccaaacccaggctcccagccagaaatcctagggtcaggccgtgtttaaccagtttaattgttgtgcgaacaaa

SEQ ID NO: 10832 - DNA, 201 bp, Bos taurus
acagcagctcccttgctgggagcccccagtcccaccattcccttcaagagcacacagcaacacttagcctcagcccgcactggggccctggggctggagacggttccagctgaactgaaagcaaggggtgtgggatgcagactgggctcagccagagaaacgagaaggaaactagaactccagcagggccagtgtgctgcc

SEQ ID NO: 10833 - DNA, 201 bp, Bos taurus
aattaatatatgccacgtgctcagaacattcctggtacacagcaagggctagacaatttgactactgttcttatggcccatatccatgtgcccaaatgtatgaaaagcaggcttacagaagcacagtgtctacaggaatctcatgctacagatggtgactctgaggcccagagagggcaagggacctcctgaggtcacccg

SEQ ID NO: 10834 - DNA, 201 bp, Bos taurus
gtcagaagcctcccagggcctcatcaagcccccgaagaacgttttcaggagcccagcaaggatcactttaggccctggtccacggactgcggccagctgcggacggcagcttcgccaggatggggtctgtgttacagctgaagaacaagtctgcaccaggtacccaccgggccaaaccctactgtaccctccagtctggcc

SEQ ID NO: 10835 - DNA, 201 bp, Bos taurus
ggccttttgctccctgcattgtctcacaaacaggggaaggaaatgtgggattaggctgtgtgctcccccgaactggggattctgaaagctctgctgagtactgataggattggcccgttggagagacttctcatgaaagctgaagtactagcacatgaaacagtggaagttcgacttccctgatagccacagaaatcacaa

SEQ ID NO: 10836 - DNA, 201 bp, Bos taurus
ggatattttttgcagagaactgtgttgggggaacactgacacaagaggaagaccatataaagcttcaactctgaccaaaagagggcttcggggaggccacgtgacagttggtggctacagtgaactggtgtctaactgcacccgtggggcttaaggtgaaaggcatcagggcagggagaggacggtgccctgagaatgaac

SEQ ID NO: 10837 - DNA, 201 bp, Bos taurus
tacgaaacttggggccctatatgcagagcagtaaaggggcaggggaaatgggcatttgtggaaaactaaggaaagtggttttagaggtgcgagagtggacgaactgacgtttgttaatggcctttatgcaaggcgccatgctaggaatgttccctgcctgatcttattaattctcatgtcaacctagtgtccatttgagga

SEQ ID NO: 10838 - DNA, 201 bp, Bos taurus
ctaaatagcattctttaagagtgatgatgttaggtatactttgctcatttaactagaaaagtaaagagcggatagagttaggttcctttggaggaagtgtttagaatttattacatcagaacttattatgtcagaaagaggggacttaagctaagtatgatgactaaattgggcacgtgttgctcccatttttctccttgc

SEQ ID NO: 10839 - DNA, 201 bp, Bos taurus
agattacaagcaaaaaagaggaaggccatgtgagagaagtggagggaaggaagcaaagtcacagagaagatgctaggccactggctttgaatgcggagccaaggagctcggctctagatgctaggaaaggaaattgagagcctcgctgctgatgccgtttggcccagtaaaattggttttgcacatctgatctccaaaagt

SEQ ID NO: 10840 - DNA, 201 bp, Bos taurus
tgtttcggttctgttgtccagagctgttatctgttggaggactccctgcccattttgtaagcacacagctggcaggccctgttgcaatctcgctgccttcggatcagccctgccccggcagcaggcaggcagggggtgggggtggggggcctgggaaacacgcggccaaacagttgtggtgagtgtcaaaataaaagcccc

SEQ ID NO: 10841 - DNA, 201 bp, Bos taurus
tcgtaactctggcccccggctctcgttgtggctgttagcaacatcctgaggtttttactctgctcgcgaccgatctggccatctagagggattccacgcccgtgtgctgctgcctcccctagagacattcaggttattggagaactaatctcatctcaaggggccagacaccaagtcccaaagcctgcagacctctttccg

SEQ ID NO: 10842 - DNA, 201 bp, Bos taurus
cagcccaagagagcaagtgaaccccaatgagatttggcctttgccccctcatgtccaaggcaggaacagtggaccaaagtggcaactctaaacattgggagcaactacaacctggaataaggccagatctgacactgaagtcaccctacacggcccacagcaggtccagagacctttctagaaacattagaggcctttggt

SEQ ID NO: 10843 - DNA, 201 bp, Bos taurus
caggctgtcacagcaatagaaatttatttttacagttctgaagcctggaagtcctagatttaggtctgatagcattcagtcacatggccttccctctgcacatgcatgaggttgagagagagtgagctctgtgatgtctcttcttataagaactctaatgctagtgaatcagggcccctcctttatcacttaatttagcct

SEQ ID NO: 10844 - DNA, 201 bp, Bos taurus
agtgggtagcctttcccttctccaggggatcttcgcaacccagggatctaacccaggtcttctgcattgcaggcagattctttaccagctgaaccacaagggaagaccctgaggcctgttactgagtcctatttgagccttaattcttggtagatcatacagggatcttgtctccagagagaagggcagtctggggtcttt

SEQ ID NO: 10845 - DNA, 201 bp, Bos taurus
aaaaaatggccacagatgcttcctgtccttgtatctacatctttaagaatccctccaatttgaggtagaagctttcttcatcctttgagtttgggctactctgtcatttgctttggccaatgggacaaaagtaacaaatatgatataagcagaaccttgcaaatcactttgtgcattagggttccccttgttgctgctctt

SEQ ID NO: 10846 - DNA, 201 bp, Bos taurus
atcatcacaccactcacacatcacaatatacagtcttgcagaatgaaacaactgcagacaccacagagtgctgtatatttggtctgcttgctctaaacacactgttttcactcgtaagtgtcagtgggttatgaactggctcagatatcacttttccataaactttaccatttccatgaactcagggtttttaaacaacaa

SEQ ID NO: 10847 - DNA, 201 bp, Bos taurus
atagacttactaaaagattgatatgtattatttcaagtgttggaattaagatgtctcctggacaccttggattaattagagaacattccagtttagctttaaaaggggtctatgtctgtgagggagttatagacccagactgccaaggagaaatatgggtaattttacaaaaggaaaaaaaaggatgatctatttatcaat

SEQ ID NO: 10848 - DNA, 201 bp, Bos taurus
ccgtggcatgggcgccgcgggcccgatctgggttttcctgactcttctcgcgccgggggtcctcggtgagctgggaatgggatcatggaggtagggaagcttctgggaccgggatggcctctgtgccacgatgcaaaggaagcagtcaaaagtgagaaggtgggacaaccttgcctgcttctcgctcgtttggggcacctc

SEQ ID NO: 10849 - DNA, 201 bp, Bos taurus
cagtcacttacacatgtaaccctgggccagaaagaggagtgaagtacaacctcattggggagagcacaattcgttgtataagcaatgatcaagagacaggcatctggagtggccctgctcctctctgtaaactctccctccctgctgttcaatgctcgcatgtccatgttgcaaatggatacaagatatctggaaaggaag

SEQ ID NO: 10850 - DNA, 201 bp, Bos taurus
tggtggctgccagcccactcatatgcaggatgaagtattgatagagctggcttcagggcctaagtgtacttgagctggtgatatcacacccaagagcaaggtgagataccagtgtagcagctgtggagcccagtggagtctggggttggtgctgtcatgctgctgagttgttaagcctctggtgctagtaagctatgtatg

SEQ ID NO: 10851 - DNA, 201 bp, Bos taurus
acaaagaaatgattaacaaacagcaaattgagtagtgacaagagcagagttcaaccatagtacaggaacagagaccagaaatctgagatgcatatcagaggatgttcaaactgaacccaaaatgatgtgaaagagatagtttagtgttatcaaattgccaacctccattggatcacagaaaaagcaagggaattccagaaa

SEQ ID NO: 10852 - DNA, 201 bp, Bos taurus
aaaaatttatttagtggattcaattcagatcagcaatatttatactaaacttccagtgcaagtataaaacagggccacttttagaagtgttattcaaagaaagaatgtcatcatgatacatcagtagagataaactttgaatgtttagtttttcaaatataaaatgaccttttagagttttaatattaaaacttgtagcag

SEQ ID NO: 10853 - DNA, 201 bp, Bos taurus
tggctataagaccttccagatgcgtttagagatgtgtgctaggaataaggtgcaaacttctcacataatcctatatatgatagtatctgcttctctctgatgcaggctactgactggtactcctaatgagttttgcctggaatgtttttctaaatagcataggttcttcaggagacagtagattcacatataaaaaccatt

SEQ ID NO: 10854 - DNA, 201 bp, Bos taurus
gtcctaagaccctacaccactttgtagtcagctttcagaaagatgaagagaacatgggaaaagatacagttgttaaagttattggccgacgaaggagtatcacttttacttgtgtttcatacctagatctcactggggaatcagtgacacagtcataccatgacacagaggctgagaaagtcacctttggccaaagagtag

SEQ ID NO: 10855 - DNA, 201 bp, Bos taurus
ctgggacttgtgcttgccctgaaaaactaatgtccttcccttctggacatcccagaatcagtcctacatacttctgtcaaaacactcttcttattagccagtatctctcttgatgataaagtattctaaacacttgaatttctggcttaaacggctatttacagcttcatttttctctatgttagcctttatccttaaaga

SEQ ID NO: 10856 - DNA, 201 bp, Bos taurus
aaaaatattctcttttgttcagcttatagttttttgttattaaaaatatagaattgttttcctaatgtccaataccatgcataaaatttaaacatatcacgatatcctagaaaataataatttctcatattttttgaggacagcttaactgtacatgtgtatttagcacactgacaagatcgatttttatttcttttttta

SEQ ID NO: 10857 - DNA, 201 bp, Bos taurus
attctgtgtcactcgggtgcttacaatcctggagaggactttcaatgtaaactccagcctctaaacttccatttatctctccagcctcatctttcacaaacctacccactggattgacgtggaacactagttctaagactacttcaacttctgaaattaaaagaatatttttggtttacgtttcttaaattcaaagcatat

SEQ ID NO: 10858 - DNA, 201 bp, Bos taurus
agaactgactcacttgaacagaccccgatgctgggaaagattgaaggcaggaggacaagaagatggcagaggatgaaatggatggagggcatcaccagcttgatggccatgagtatgagcaatctttgagagctggtgatggatagggaagcctggtgtgctgcagtccatggggtcacatagagtcggacatgactgctc

SEQ ID NO: 10859 - DNA, 201 bp, Bos taurus
tcatggttcattagggaacttaaatgtgtttctctcttttcttttaacacagagagtttctctctgaaaaggctcttaaaattttaatttttattcccttatatttctcttgctcttttattccagtgtcccaggagacttttgcttttaaaaccatatagctttactacagtatcatttgctattagtcattgcaagttg

SEQ ID NO: 10860 - DNA, 201 bp, Bos taurus
agacttagggagaacctctgaggtgtgtgctgggatggctgaaccaagaggaacctccagactcagccatgctttgtgccagcatgctgtgtctgcagaatgacctgagcagatccttgcccagatgtattcttcctttcctggggagttttcctttgtgggctcttagtaactccatagagcagcatactttctctggaa

SEQ ID NO: 10861 - DNA, 201 bp, Bos taurus
aatatccttttgatctattgggtttcggatttagccagaaaaatgcaaaaccaattagacttcactatttggattcttcaaatgataggttgcctattttctcctaacactgaagattttaaatgttgtcaagcaatagtgagtaacatttgtattttaataacatattgtgttttaaaagccacaaagtgattttattta

SEQ ID NO: 10862 - DNA, 201 bp, Bos taurus
agaagaaataactgaagaactgaagaggttcacgaggcaggaaatggaaagaggattttctttatctgaggggcacacttggttgttaaggtacaagacccgagcatagaacggtacatgaaggttgtaagaactgttcagaaagcaatctgcactattatttcatctatgaagagggaaattaaaaacaaaaaaaagtac

SEQ ID NO: 10863 - DNA, 201 bp, Bos taurus
ccattccaagtaattaacatgatttccttaatccttctatcctaccatcactccatcattctcaaacacatcaccacttcctcaaaatcagactgaaaaccagctgacaaactagccaatatattggagcttcacttaagttattctcttccacctacccaacaaattgctattctctgtgatccttccctgtagttaata

SEQ ID NO: 10864 - DNA, 201 bp, Bos taurus
tggtgctactgttattgcttaaacaaggataaagcagataatgaccagggagatacttcattgtacattatcataagccttacattgataaaccctgtagtacacactcaagggaagatgtcaaatagatcacaaagtggtacttgatagttagcctagtgaccatgactctatttgtaaatctcctgcacagctgggtca

SEQ ID NO: 10865 - DNA, 201 bp, Bos taurus
ctacatatagctaatgctatcacggaccacagaactttactgacacctagaacacaaattttctagcagcttcatggctgggcctcttatctatcatcaacagtaatgttctttgcatctgactgtaaaagtttccaagttacacagtctttccttgatcactttggcccaatttctcctagatcactatgcacaccacag

SEQ ID NO: 10866 - DNA, 201 bp, Bos taurus
cttattttgatttgcattttggtgctgtcattattgtgtcctgtggtcagtgtactgcagttctcagagccaatatttaacttatatcaaaatattaatatgctttcactaaaacatgcattgcagactggaacagagatcaacctaacagccatgaaagtatcaaaaattttgctctgcacctcccttcagattacaatg

SEQ ID NO: 10867 - DNA, 201 bp, Bos taurus
aaatgtgttggattttagcctccactagttcagaaggtgaaattctttcaagaaaaggttttaccagggcaagtaagctaaagaagcctattaggccactctctaatccagaatgattggcatcttataaaaagggtaaattcatacatagagacagacacatgtaaaggaaagacagacatccacaagccaagaagagag

SEQ ID NO: 10868 - DNA, 201 bp, Bos taurus
agactccacatctccttgggcctgcctgcaagggagcttccctgtgcacggaaactcctcctgtttcaggactccctccctccttcggggcaaaaggtcctgcccagaacttctctgtctttcccctttttaggtctccatcctctctcctacctcttttcacgttgcttagactgttaccctggaggcctgggttcttct

SEQ ID NO: 10869 - DNA, 201 bp, Bos taurus
ataacccactgttaattatagttaaacttccccaaagcatcctatttgtatacctttccatgtttaactaatctgcaatagggatattggtataagcttaccagggcaagtcaactctgtgattccctgcatgtttaaatgcagtgaaatataaagaatgaatgaaacatgaataaacaatatcatcatttaagtctctgc

SEQ ID NO: 10870 - DNA, 201 bp, Bos taurus
tgagaagacatatactacaaatttttttcatgtgatattaagtacaaaatgtgacatgagtgatcaaaactgtgaaaaatcttaagcagtcagcaaaggagagaggttctatctaaatatcatgtttctttaatattattacaaacaatcaagatacaggttagtgtgcatacagttaagtatagttgtgaaaaatgagag

SEQ ID NO: 10871 - DNA, 201 bp, Bos taurus
aaaggagaagggatgggggtctgggactacagaggggaggaatacaatttacagggagatgggaagagccagtgtctggaaaataaacatttatcatgccatgtagagataatgggacaagaagaatttcttgagaatcaagaacaatgatagattttttcttataatatttagtcttttgtcttcaattcctagaaaact

SEQ ID NO: 10872 - DNA, 201 bp, Bos taurus
acaatactttttgttggatgtactgtgtatagctaagcactgctctgcttatatatatttataatatggtcatacatttatttttaaccgtgctgattttagatttagccaaaaatccaaatgttaggcagtgtaagccttagttttttcagataacttattagaaagaaaaatgatttggagaaaggaggaatgatgaaa

SEQ ID NO: 10873 - DNA, 201 bp, Bos taurus
agaggattccagtccccactgagcttgcagttattggcagcatctctcttttttctcttcctccttgttctcttttggtggacatatatatggtccacttgaatacttctaaatccccccaaatatgtccataatgaatatagtacactgtgttgatttttttaactgtaactgagtatgctgagcaggatttttttttat

SEQ ID NO: 10874 - DNA, 201 bp, Bos taurus
tagggtagggtatagccgattaacaatgttgtggtaatttcaggtgaacagtgtagggtctgtccatctacgttttctgtaacagagatgttagctgcccctaaacacatgggagttgctgatttgcttctacttgcccatccaaactaggttcttcatgaaggggaggtaacagatatgagtggcaagctgagtccattt

SEQ ID NO: 10875 - DNA, 201 bp, Bos taurus
ttgaaaatcctcaagtagaagctaagcaacaaacttcaggagaggtaatagcagaggagacagcatgggtgtgaatagggccatatgactcacacttctcccaaaaaaagcaatactctgattttatcagtcctcaaagattctcctatgggccaataccattgttatcttactggtattttttccctaaaaatttattcc

SEQ ID NO: 10876 - DNA, 201 bp, Bos taurus
gagaatatttcaggttagacttttactctctgtggccataaattccccccaaattgatagaccagcttcttggcttctgggcagttctgcaaacaggcaatcataggcaaatgctgtacagacataaagcctgaaaaccctggtcttttactcactggacttagtattatggtcaccaccaccatcgccagcatgtaactg

SEQ ID NO: 10877 - DNA, 201 bp, Bos taurus
tacagatagacattcaaggaattttagatccaaatgtgccatgtttatagtctaaattgtgagagttggaaagatggttttattttaggaactagtgagaaattgcttaaaaagcctcaatttgctttggagaacattgattgataagaattttgatgtgggtcttctttgtaacagagagacactgctgttagttaagca

SEQ ID NO: 10878 - DNA, 201 bp, Bos taurus
ctacaaataatatgcaccagaatcactggggagcttgccaagaataagtggtatctcttcacaaaaggaaactttgttatagaaagcatgtcatgtgatatatgaatctgtaccttttaaaaatacataagtatttttagggtgagtgattctagaaccacattttgaaaacaacttcttaaaaccattttcttattctga

SEQ ID NO: 10879 - DNA, 201 bp, Bos taurus
gaagaggttgattaaaataggaaaatattcctgatagactttgttatccaatatgattagaggtttataacagaagttgttgcacaaatttttaattttcgaaggatatttatacttatgaaactttatgctgtcaggatgaatggatctagagtcaaaccgatttaagtcacagtcaggaatgctctcttcctacatttt

SEQ ID NO: 10880 - DNA, 201 bp, Bos taurus
gcatttttttaatgaaaaaaaaagtaaacatttccttctgatgccaactgtagttattaggaaccatagaattctatttttccctcgccctaaaatgagattttagcactgtatacaattacatactgagcccccaaacctctgccctggtccctctatgggccctgaagactgagcactaactcttggatccaataactc

SEQ ID NO: 10881 - DNA, 201 bp, Bos taurus
tggtataggagtctggtttcctagaagtaaacatatctgacaagttgcaattatcatttggccagtttgatctccaactaacaataagtgaaaggagatacattattgtctggggcattcatcctaaattgcaatgtggatgttgggttctaaatacaaaatagggcaaagataatatatctggagtcaagtcaattccct

SEQ ID NO: 10882 - DNA, 201 bp, Bos taurus
aatgagttacaaattacatcctcataaaaacttgtacacagatattttggtagttttattcacaactgccaaaattttgaagaaacccaaatgtatttcagtagatgaatagacataaagactgtggcatattcatatatgaatattattcagcaataaaaataagtgagctatcaaaatataaaatgatgtggaggaact

SEQ ID NO: 10883 - DNA, 201 bp, Bos taurus
ttacttctttcatctctgcaccataacagactggaattctatagtcagtgtcaatacatctttttttgtcatccagtgtattggattaaaaaatccaagctattggaagtgtaggtcagagaagaacagtagttacaccaggtttttactccctggctctgctgagatgcctgataaaggcatctctttctgcaattactt

SEQ ID NO: 10884 - DNA, 201 bp, Bos taurus
ggaatagctaacaaactgaaaatataagaaataagaaatatacagaatatgttaaactttttcacaggattcaagttctctgtgataagaactttgccttcgccatagaccttcacctatagaagtgcagatggtttaaaattaagctaaatcacatgtatgcaatggaatgcaatccagtataagactatgtgaaagaca

SEQ ID NO: 10885 - DNA, 201 bp, Bos taurus
cagcttctcaggtcagacctgtcccagccttagaggcactagttgtcccttcacacgttccccaggtcctgaatttacatcagtggcactataaacatgcagtttgcacagctctggggagagatttcagctctgagtcagatggcctctggggctcagctgtgattccaaccccaacttgtgtattagcaaacagttgga

SEQ ID NO: 10886 - DNA, 201 bp, Bos taurus
gaaactactacagtgtgcaaacattttcttataggttacacaattaagacctggaaatcatgccttactcttttaatcctactgatattctcagttcacatctccttaactcatcttttatgaactgctagatcccctaagttctttctattaactataaagaccatttatactctcaaggctttttaaacagcttcagta

SEQ ID NO: 10887 - DNA, 201 bp, Bos taurus
aaggtttcactgtattctctgttgaaattcctaagaaagcctaatttacacagataatgaaccctatccatatttacaaataactttagtccttgttgttaaaaaatgggttcacactagtatgtgtgtgtatctgtgtgtgtgtgtgttcaattgtgttcaactctttgggaccccatgaactatagcctgccaggctcc

SEQ ID NO: 10888 - DNA, 201 bp, Bos taurus
attttgccttttaaatgagagagagtagcatgattgtcaaagacctgtctttagatattaactaacaaagccacaataataagcatcattacattacattgaaagagtaatgcaccaagattgctaaatctctgatctttagttaacaaagggaccattgtaaacttgccaaaggctgacctcagtgaagagtcaagacta

SEQ ID NO: 10889 - DNA, 201 bp, Bos taurus
tccctggaccagcattgtaatatcagatgaactaagggcactagttctagcttcttctactttaatgtacttcatctgggccttccgatctcatatcagtactacagaggggcaactgcccacctactcaagagctaggttgatttctttatcaggtatgcacaggtaggcccatctgtaggaaggtaggtaggtatttcc

SEQ ID NO: 10890 - DNA, 201 bp, Bos taurus
ggaatattctggctattttggggaagggggtgggcatttccataaattgggccccggcccacactttgacctttccgattcgccttggaactgtcatggcgtctgtgggtgtcatttaacttgggaatatgttccaatgagcatatactgaggttcaagttctagtgggagttgactgtcatcttcctatttgatctgatc

SEQ ID NO: 10891 - DNA, 201 bp, Bos taurus
atacatcctcagcagtatctgtgaaaaatgaatcaagtatagaccattcatgacatgatgtcacaaataggatctgttaatattttctagctatcattataacaagaatctacttaattctccaacgttttttttttttttttccagtttggcaaatattttttcttcaaaaataaaataactttcatatctaaaaattta

SEQ ID NO: 10892 - DNA, 201 bp, Bos taurus
taacagacaaaagtactggctggcctgctgggcaagtacaggtgaaacgccactgctccagccctgctgctcagaacccatggcatgtgagatggggagcggatgttcaccgaagctgcttcagaaaaacggactgccacagccaccatgtgcccagaggtcagatttttcccttgtgtgactctctcacattttgctcag

SEQ ID NO: 10893 - DNA, 201 bp, Bos taurus
tttcacccacttgttggttgtttattgcatgcctagactctcctaggtttggcacagtgcaaaggatacagaatcaggtctggtgcctaagaagctgacaatctgatggggagatgatgaaaggaccgcaaggagttaagagggataaatgagtcagcccgtcacagaaaccaagacagtaagaaaatacctgatattaat

SEQ ID NO: 10894 - DNA, 201 bp, Bos taurus
ggcttatttcaaacctcttagaggactttgaggggatcaaaatttcaggggaggaaataactgcaaaagtagtgaaaatagcaacagaagcagaagtggtacctgaagatgtgactaaattgctgcaatctcatgataacactttaatgaatgaggagttactttttatgaatgagcaaagtgatgtctatagattggctt

SEQ ID NO: 10895 - DNA, 201 bp, Bos taurus
aagattagctttttttttccctgctaacttagttatgcctcttacctatctgccatctttacagtcttatgggtagaagaagagagggcagagatgacacgaaagaggtggatccaaaaataaaggcaagtaatcaccgagacgggctcttttccttctgacattttcctggaatacaaaagctccaggtggcattcctgg

SEQ ID NO: 10896 - DNA, 201 bp, Bos taurus
ccagacatctgaaaaccacagtgatactgtctattggtatgttgttttcaaaaaattgtttacatcaaaagagagaagagatactcattttcagcatctcgcttcagggtggaaggagagtaagattagggccaagttggggatttgagataaagactgaaaattctggtgagttcaggaagagatctcaacacaactggc

SEQ ID NO: 10897 - DNA, 201 bp, Bos taurus
ggcaggccggtggggggccgattccacaaaagccaagatcgggcctgggcctagaagcaagggcttacacccagagcgacggcctgcactcattcatggcgctctatgatctgctcggcattctctctatgaccaacctgaaccaaatcaaggcggcctaaccaccagcagagcttactctcccaccgggacaactcggcg

SEQ ID NO: 10898 - DNA, 201 bp, Bos taurus
atttttgttacagaaaagattcatacaatcatttcatattgtttaagttttataaagaaaataaattagggaatgtgatggagcatgactccatggggccatttttgtgggtcagagcctttagctgaatgaccagatgaactagcaatgatgagactgagagcagaatcttctagagagagggtatgcaaggttcaacag

SEQ ID NO: 10899 - DNA, 201 bp, Bos taurus
aaaaacaaaaaaagcaaaggagaaaacaaaccagaagcaccataaaaaataaatgttaaacaacagaaagctataacattatatgccaaatcttaaattcgtatctgtgtaagtcttaattaaatgtttaaaagacactaatttacacaatataataaaattaataagggttgtctgtatcactatcatatctaaaaggct

SEQ ID NO: 10900 - DNA, 201 bp, Bos taurus
aaagggggccaggcctttgcacacctatgatggccaatcatcagatgtgggctgatggggtggagaggctgaaagaaacttggttaaagcagcttcctcagctacgggcaattcctggaatggccgctgtggagcatgcgcagactacactgcccggaggtggcgggagccagtggtttggtttcgcgggacccggcacca

SEQ ID NO: 10901 - DNA, 201 bp, Bos taurus
gggggtgcagacattgctagggggtaactgggagaaggggggacgtgtgggcacagacataggtgcgtggttctgaagcaggacgcaaggtcaccggccacgagtgagtctgggaagtgacattataagtgtgggagagagggcagttctgaaatagtatccaggaatgtcccaggtgattagctccaggggcccagtctg

SEQ ID NO: 10902 - DNA, 201 bp, Bos taurus
ctacatggcaaacggaggttgatgtttccaggttagtgagatgggcccagtgtaatataagggtccttacaagagagggccaggagggttcagaccaatcgtaaaatacatgaggacagaagccagaggctggtgtggtgtatggatgggccaaggaatgcaggtggcctctagaagctgaaaaaggcagaaaaagaggtt

SEQ ID NO: 10903 - DNA, 201 bp, Bos taurus
aaaaccaccttccttaagtattccattcttaactcctcctatatgtcaggtgggggagattttgactccatatggctcatctgggccagtcatggcactgcggaaaatttatttcaggtctcaatttaatgagagtctttcactttgaagtgccatcttttcccctaaattattgtgcagagagcatgtcctaggggtcat

SEQ ID NO: 10904 - DNA, 201 bp, Bos taurus
ctaattctggatgctctgttttgttccattgatacgtatgtctgtctttacacctatactacactggcttgatttataatgagttcagatcagctgggtatatgttttccaaatctgtttttcttaagagttgtcttgactattcttgttctttgcatttctgtgtgcgtgtgtgtgtgtgtgtgtgtgtattagtatcag

SEQ ID NO: 10905 - DNA, 201 bp, Bos taurus
cacagtttgtgagctgttaacaggcttagaagtgcagctttctctgtttcctgccctctaagtccctgctttgcctggtttttcaagactctgcagctcccccttaggcccggctgcgaaggaatttccctgtacaggggagctcctgtttcaggactccctccctcctggcacaagctcctgcccagaaattctccatct

SEQ ID NO: 10906 - DNA, 201 bp, Bos taurus
gattactgcctgtagtcctgatccatggagattgggagagaatgaatatattttttaagctgctaaattttcaacaatcaaacaataatcaaatgacaaatcaggctgactttacctactaaaaattcccagattcatgaaaaagagtaaataaagatttcaagcttatggattggacagtattttaagaacccacggctt

SEQ ID NO: 10907 - DNA, 201 bp, Bos taurus
cgtagagtctcccctcatggcagcacctgactgtattggcgtaactgccagcggcttgggtttcatcccagagcagataagacacctcaggccaaaacaaggtgggaagtgaagagtaataaatctttataaatgcaggacactttaaaaacgcaattccagggtaaggtggaccgataaatccagtcgttggccaatgag

SEQ ID NO: 10908 - DNA, 201 bp, Bos taurus
ggtgtcattcagtctgaggccactgaataagaccaggttgggttcagaagcaaaggaaggtttattctttgatcagagaatgaactggtgtgagctccattctagagaacaagctctctggacaggctgtgagtggggctaccttctagggatctctcagaagatgaggggtggtttctcttggggctggcacagttgccc

SEQ ID NO: 10909 - DNA, 201 bp, Bos taurus
ttggggtggtctaagggagccctgatacaccatgagatgggaggcacaggttgtggtagaaggtgaagttgcctgttccactgtgagtggtgaacaaggaaagggtcaggaggatgaattttattaaagaaagctgagggtatttgttttgactagctatttgatgaaagggaatgaggaaacttcagaataagacatttg

SEQ ID NO: 10910 - DNA, 201 bp, Bos taurus
gcagtgattttggagcccaagaagaggaaatatgtgactactttcatgttttccccttatattttccatgtagtaatggggccagatgccatattaggttttttttttttttttaatatttattcttaatctggctctttcactctcctccttcaccctcatcaagaggccctttagttcctctttgctttctgccattag

SEQ ID NO: 10911 - DNA, 201 bp, Bos taurus
tcggtttagttacagtctgaatcaaacacctgagatacaggaaaacaaatgatataaaatttcagtctaagtcagaggccaggagaatacagacacccaggttgaagacacacagagagaaagaatccttgtttaatcagcctgtaatattcaggccttctgtaaattggttgaggcccattcacataggagaaagcactc

SEQ ID NO: 10912 - DNA, 201 bp, Bos taurus
cgactcctatttctctaactttcgtccctgtcaatctcggggctgttttaacacagtagcctcttgtctcctactttcggtcttgttcacctaaaattatttccacacacagcaatcacaaatcgtagtttggatcatagccttaccccacttgtatgcttttgaagtgtaacatccaccggcaagtttcaattcggtcta

SEQ ID NO: 10913 - DNA, 201 bp, Bos taurus
attctttgtcccaatcctaaatcctgagaatgttattgattgggccaaatttagtcaagttacctcctaaaaaccatgtttaaggaaggtagtcattttgaagaagcatggctggccttaactttcccacctggcatatcactgtccgtatggaaggaggcattccagtatactaaggtaacaatgaacataatgtcagaa

SEQ ID NO: 10914 - DNA, 201 bp, Bos taurus
tccaaaaagtcatctcttgggccagccaggtgttcttgtaaatgtgtcttcacaggagacaaattgccttggaattcccactgaaacttgatgagaggtattggggcatcttccaattgcatggcccagagactgatacagagtctacacatcagcaggaccttcccaggaactgcagttcctaaaagctcttcatccaag

SEQ ID NO: 10915 - DNA, 201 bp, Bos taurus
agaattgattttaaaatattttttttcattactggaaaacataccttgaacacattctcatgtcaaagaatatagaactatgtcatttgctgtaatagtcgcataacttgtactgatttcagtgttggccatctggtgatgtccatgtggagagtcttctcttgtgttgctccaaaagggtttttgctatgaccagtgtgt

SEQ ID NO: 10916 - DNA, 201 bp, Bos taurus
cagttgtgtctgaccctttgcgaccccatggactgcagcgtgccaggcttccctgtccatcacaattcccagagcttgctcaaactcatgtccatcgagtcggtgatgccaaagaagagtaaaagaacttaaaagggggggtaatgtttctacattccttttactggccaaatctccacactgctgctgctgctgctaagt

SEQ ID NO: 10917 - DNA, 201 bp, Bos taurus
cagaagcagataaatatccccaaatatcttgtcctcttaacagagaaaaaaccaaatcctagttttgtatcaacttacttttaatattaaaatgtatttattcaaatttattcttaattaatctgtcctgaccatacactgtttttcccattatttcttttccacaaaccttctataacttccttttttactttcagattc

SEQ ID NO: 10918 - DNA, 201 bp, Bos taurus
caggcttttcccttctctgtctttcagccaccgccattttggacttcattttcctattctaactgcctaacattcctccctcaagaaatgggaggcccaatttttggaaataggggcgttgagggtgtctctggctacttcttgctgaacttggatggagaggggcattgggcctccactcttgctgttctcaagcctcag

SEQ ID NO: 10919 - DNA, 201 bp, Bos taurus
atggcctgctcaccctacttggcctccgacacacaggggcaggtagcatcatctcagctctggggctccgtgcaggctaccttcttttattaacctattggatggccaagtgctctgctcctgtgctatactccacttgagttcttaactcctgtgctacgctccctctctagtgcaaagggttctgaacttcctggatac

SEQ ID NO: 10920 - DNA, 201 bp, Bos taurus
tgtcaccatctttcactatcatatagtttgatttgtgcacttctcattttctcttcatttctcagaagatgtcaattagggtcctttctaccgaagaaaccttgttgtttggccaggcttgttacttaaatacgttttgctcccttgtgtgtctgttagttgcttagttgtgtccagctctttgtgactccatgaactgta

SEQ ID NO: 10921 - DNA, 201 bp, Bos taurus
gaggagtctgttgagccacagtccaaggaggtcacaaaagagtcgaacatgactgagcaactgagcacacatataagatatagatagagacgagcacacgcgttctcaccaaagacactatcttgtaaatcacggggatagtttttaacactgacaattcttgatcatcgaaaagcagttttcacaaaggcccccttcctg

SEQ ID NO: 10922 - DNA, 201 bp, Bos taurus
ctgtgtctcctgcactgcagccagattctttaccactgagctgagggggaagccatcaattcatcccttaaatatttcagacaactatcttcagtttttagatattcttatgctgtttatgtgtctggttcatcaagttttatattacctctactttcttatggctaactattaacaggcatttattttttacaaagtgcg

SEQ ID NO: 10923 - DNA, 201 bp, Bos taurus
tccagtaatcagtacaaatcttttcaaaattctgagcgggaaatagttttcttcttaaatttgacatgcaaaattatcacctacgaactatgtgtgtgtgcgcatgcccagttgctcagttgtgtctaactctttgagcccccatgaacagcagcccaccagcctcctctgtccatgggatttccaggcaagaatactgga

SEQ ID NO: 10924 - DNA, 201 bp, Bos taurus
gatacacccatttgttttcaaaattaatctaaaattcattaaaatactaaaaaattccagactttttcatataatttaatatgatatttgccattatctataagtgaaagtcagtaaaatatctacattaaaaatctctgaaaaacattagaaaaatgaggtagaccttgtctcataaggtattaaaatatttccactgat

SEQ ID NO: 10925 - DNA, 201 bp, Bos taurus
gtgctgcaattcatggcgtcacgcagagttggacatgactgagcgactgaacggaactgaactgatacagtgtgaaatgtatcaaaagaaaatattagtccattaaaagaggccattttcctgctgatccacattaagcaattctaaatggttaacactaattttataagattcaataggaggaagagcttaccaaaatgc

SEQ ID NO: 10926 - DNA, 201 bp, Bos taurus
gagagctaggcaaggcctgattggccgggtgacctttgatcagagtcttgtaagacgaagtgttttgccatggggagagctgaagaccttccaacagaagagaaagcacttgcaaaggtcaggccttaaggaggtttgtttgagaaactgtaaataggaaagtgaaactggatcagaatgatctagggataggctgagggt

SEQ ID NO: 10927 - DNA, 201 bp, Bos taurus
tggcagttagtggggtcacaacaagtcggacatcacttagcaaccaaatcacaacaacaaacagaacttgcctactacatataacctgcaaagctgcacccggtatcaactagccttaagataagtgagtatttgctagctataaagacttcaagtggctactgccctttggaactctctgacccagagaattctcaacct

SEQ ID NO: 10928 - DNA, 201 bp, Bos taurus
cagagcttccagtgtagagggaagtccacgcaaaactcagtctgagacatcagatgctaactgacaaccttcagtcctcatttgaacctcctgccaggatcgggccctgggtttcagaaaccagtgctcgctccctttccagcagcctctggggcacccggccaggtgttctccatcaaggcaggatgcacccacctgctt

SEQ ID NO: 10929 - DNA, 201 bp, Bos taurus
atttgcaggataatgaccatcgtgcaaattcaggttctatcagaacatatatggtaacttgacaccgtaaaactataaattgaaccataaaactttaaaaggagtaacttctaatgaggaaagaaatgatcagttcataaattttatggttctgcaattaggttgtggttgatagagcagggtaaagtttaaaactatggg

SEQ ID NO: 10930 - DNA, 201 bp, Bos taurus
gttacagactgagttcagggattttctgggcccactgtgagagggaccctatctaaaactctgttgatcacctgaccttcatagtcccttctgtggctgaagggccacagtgatattttggatcttttggaattagtgtccaatatttccccagagattcaattattaatatttcctttaccacaatgtaccctggtaaag

SEQ ID NO: 10931 - DNA, 201 bp, Bos taurus
tagggtctcacaccttgcttatgccctgaaccccatcatcttctgctacttgttcacttgctcaccctgcttcagccacactgatctttttgctattcctggaactcaaacggccaggtcctgtttcaggaacagagactctgtcgctccccttgcccaaagcactttacgccgtttaggttcttgccaggctccctcact

SEQ ID NO: 10932 - DNA, 201 bp, Bos taurus
aacgtgtctgttcattataagaagacactactatttatggggtggattggcacaagaggatgtggcagagagagagctggccagttctgaaacacactacagacctgttaatttgatattattctctgacgacaacagcaagggttttaacacaggggtgagatacggcccgagttgcgttctaaaaaggtaattctggca

SEQ ID NO: 10933 - DNA, 201 bp, Bos taurus
attgtggatattcttttaaaaattgcctgaaagtgtaaattttaaaaatctgtactatgtaagagataaagtattatgttaaccccaaatttatccacaagaatagttggaggatgcagcctggttaaatattcagttctgataagaaataattaatattatagtgaggtaaccattggaaggactgatgctgaagctgaa

SEQ ID NO: 10934 - DNA, 201 bp, Bos taurus
gacagaaggatcctgcttcgtgaggcccgtgtttatggcctaacttttttaaagaggaatttggaaaacttcccagacgctgcatctgcccctagcccgtgcacctcggagtctaaggccggcaagggaggccgcgcagacgactaaatttattaacggtggatgggccactctgtctttcacagcaacagcagtaggtga

SEQ ID NO: 10935 - DNA, 201 bp, Bos taurus
tattctgaagtcatatttttgtagtacaaactgttaaaaactttttactctttcaagtgctgagttttcttcagatgttttatgagttctgaatatgcaggtttttatagcagaaattgtacatcagacagaaattgtctattttaaactatctttctgcagtttctacttgggcaaacttttggtaaacagtcttaagaa

SEQ ID NO: 10936 - DNA, 201 bp, Bos taurus
agacagagttgaacggagcaagaagagacagcaaagaaccatgccaggcaggacaaaccagacaactcaaaatagtgatgagcacagccttgtctagcaagagcacagtctcctttttcaaaatcactgtttactgttttgctcatttccaaaatatcatctttagcaggtcattaaggcaaggaactagaagtgtaaact

SEQ ID NO: 10937 - DNA, 201 bp, Bos taurus
tgaattcattccatgccctctggattcccttctagcatctgagaggaactgaaaaaagctctgataaaaccccagctctgcttctcattaccttcataacctggaataatataacttctcaatttcctcacacatgaaacaggaataataatacctatttccttgctttgagatgatgtttcttaaaattctctaggcttt

SEQ ID NO: 10938 - DNA, 201 bp, Bos taurus
ctagactcttcttgggagtcctggcaggacaaagcaagaaaggttaaagacctatgccgaattagaatgataacttctttgtaaagaatgaataaatgcatttcccagagaaccccactcattaccaaaagctgccttctctgagtcagtatgaccccttaagccaaaaagaaacattttctagtcttctgacttggcatc

SEQ ID NO: 10939 - DNA, 201 bp, Bos taurus
aactgaaaataacaaaacatatttatatatacagatacagaattctaagtacactctaaacagagcttcctatacgactttacaggctccccaaatttcagaagtgcacacaaataacattatgaccaaggattatgatgatggggatcagaacaatagtgaccactgattaattgctaatcaggtgccaagcactgtgct

SEQ ID NO: 10940 - DNA, 201 bp, Bos taurus
gcttcatgctaacagtgatcatcagaaagaactgagcgttgtcaaaggttatctttccattcaaaggtaccacatgagaggcggagatagaacttcatacaaaatttcgtcctgtgaatagaaatcattgaatgactgtccaaagaggccaggagggttttaataaaatatccaaagaccagggcaacagtgaccttgaat

SEQ ID NO: 10941 - DNA, 201 bp, Bos taurus
tggctctgttccatacatttcctgccaggagctcaccttattcctacagtcaagcatggcagtgtctgagtactgaaggccatggtcatggtacctcctcggtggagttgcattgaggttcagttgaatcagtatatgggaagatgctctggacagtacctggtacacagcaagctcttcatgagtcatagctatgatact

SEQ ID NO: 10942 - DNA, 201 bp, Bos taurus
ctaatggaaaaaccctggggacaaggcctttgacacagagttctacaggacagtgagagtgacatcaagtggatgaaggagtgaatgaaacagtcccatggactcagtcccgtggtagaggattgccattctgtgaagcaggcttcctgttcagagtcatccttaggattcagtgtttggttctaccccccaccctggttc

SEQ ID NO: 10943 - DNA, 201 bp, Bos taurus
tccacgggattctccaggcaagaatactggagtgggttgccatttccttctccagctacacatataggttactgaatattgagtagcgttccttgtgctacacagtagggccttgttagttattttatatatagtagtgtgtatatgtcaatcccaaactcccgaaggcttgatttaaaagctttagtactttggtcctgg

SEQ ID NO: 10944 - DNA, 201 bp, Bos taurus
tcaggtgtgcaatgatcattcttaaatttcactgaaaggtgaagggaagtctgtgtgagagcagggggaacgcttgggaagtcaccacttctctgctttgagtattgattcatgtattccgtaaacactcctatagaataagacatgtttgaaatcttctgtgagtcacagacagggctcaagatgtcaatattgagacct

SEQ ID NO: 10945 - DNA, 201 bp, Bos taurus
aacattatgcagccaaacaaaagaataaaaataggtataatttataatctcttagactttttttaaagtttaaaaatcacagtgcagattaactgatgctgtatttgtatagatgggtatgggaagaattggatatagggcacttcttgtgatatttgtctcttaaaacctgtgaatctattactattaaaaaaacaaagt

SEQ ID NO: 10946 - DNA, 201 bp, Bos taurus
ccacactatttgattccctttcctggcctgaagctgccccttattttcttgggctgccttgcacaactgagacccttctaggatcccaaacaggaggcaggaaaactacagttgtctttggcatcctgctcaatctgccaaacctcttctctgcctccaagactttttgccctggagttcagtcaggcacgggtcactcgg

SEQ ID NO: 10947 - DNA, 201 bp, Bos taurus
tagtctcaagacaggacttgcaaactctagtttgtaaaaaaaaatgtattattagtgatatcagctgatcaagtggtaagaagctaataaaaggaccaccggaataaaagttgatatactgttccaatcctgctaaaggtagtaataaagcatacctatgtatatcattttcccaaacgtatgtgtaatacaatgtaggaa

SEQ ID NO: 10948 - DNA, 201 bp, Bos taurus
atataattggattaatatctatgtatttatatctgttttccattcattaccttgttctttgttggttttttgttttggttttgccttccactctttctggctttgctagttttaatttagcatttatatgatttcatttttttctcctcttagcacatcaattctacttcttaaaaaaattttttttagtggttactctag

SEQ ID NO: 10949 - DNA, 201 bp, Bos taurus
ctctccaagccttgtagtcagtaagcagactcctcttaggccaaaggatagcaaatgcaatgaacagcttgttatatcaagtgctctcaattttccttccacaaaaccaaaggggccacaaaaatttcctccttttgcaacaaaatgtcagtctccattatcagctggtactagctgggggccactcttgtttcctattgc

SEQ ID NO: 10950 - DNA, 201 bp, Bos taurus
ctcacctggggtgattttgtgtcccacccaaggaagatcattggcaagatctggagacactgtgagttgttccagcagaggaggtattactggtatgtagaggataaggccgggggagctgctaaacattcgtcaatgaaccacacacgccccacattgtcctccattcactgttctcagttacagatttctttacactta

SEQ ID NO: 10951 - DNA, 201 bp, Bos taurus
ctcttgtccaaattaccagctaggtgttcctggtttaaaggaagagctcattgtggttgaccttgaacatggttggggttaagattggggaaaggatagctatggtggccatgagttcatcagctaaatcaagccatttggtgtcagggcatgtgtataaaaccttctgggaaaatcagaaagttcaggatgcagagtttt

SEQ ID NO: 10952 - DNA, 201 bp, Bos taurus
agatttctgggacattcaggggccattctaccctgttagacaagatctgtaaagagctaagttctagagctactttcatcaacttgtctctgggatgccttaggccagataatactactggttccccttcaatgagcacagaatacgtattcaggcagagttttaagcactttatgaatctcaactcatttaatcttcatg

SEQ ID NO: 10953 - DNA, 201 bp, Bos taurus
aagaaagcatgtatataggaaggcctcacagaaggcaagacaggaatactcaatcatatttacaaataagagctatcctccagatatgcagtgacacctggtaaaatgcttggcatcttataaaccccatgctgaacacagagatataaactgctttccttctgtggataaatttgcaggaagattcctaaaatctttgtt

SEQ ID NO: 10954 - DNA, 201 bp, Bos taurus
gtcattactttccttcctcctcttcctgtcacacatctggaaactcaccagcctttttcctatccaaccgctgaccaggcctatttagaaagtcagcaccaagcagcaattgtgaggaaacacccttctccctgatcttgaatttctccctttccccggccccagcacatgctctgctatcctccccagggcagcaatctt

SEQ ID NO: 10955 - DNA, 201 bp, Bos taurus
tatttctcatgattttgtgtgttggctgggctccgtcgggcagttctgttccacacagtgtcagttggggtcatccatgtgagtgcctagagttggaacacgcaacagggcggcacctatgtttggcacctcagctagggcagctggaaaggctgggggctgactgagcatctctctttttacatagtttctcataattca

SEQ ID NO: 10956 - DNA, 201 bp, Bos taurus
ttaagccactaaccaaataaccaaaaattggggttgctttttaattttgtcccttatggaaccatagaaaattattttattttttccttctattaaaagtgtaaaaaccactaggacaggtgttgtactggtaaatgtttaacactcaggtcttcagggggaaagcctagctttacacaaagtgacaatttctgtggtgta

SEQ ID NO: 10957 - DNA, 201 bp, Bos taurus
tcaatttttttatatttaataaaaattttagaaagagggcaatatactagaacaggagtgagcaaactacagccttgaggccaaacccaacccatcatagtcatgtaacctgatttccatgtttaaaagacaactttggaaactggtgagtgagatgtggaaggccaagagtggaggtagggaagtcagagatgagactgg

SEQ ID NO: 10958 - DNA, 201 bp, Bos taurus
attcacccagttgctcacacttaaaaactaagaaatctctgattcttccctttctctcttttctaatatccatcccttagcaagtgccaactacatctcccatctgtttactctctagcaccactgcctcctcctgagacaaaatcctccttctctcttgttccaacaaactctttgctggtctccttgctctcatttcat

SEQ ID NO: 10959 - DNA, 201 bp, Bos taurus
tccccagttcctggcacagagcttcctaaagctgctgtaatttcctaagtgataagaacatgtggtgcatcttttggtgcagttgggaaagaatccactagtcagtgtcagagccccaggagaggcaggttggctccctgggttgggaagatgccctggagtgcatgtgagccaagttgcttcagtcgtgtctgactctgt

SEQ ID NO: 10960 - DNA, 201 bp, Bos taurus
cggctcagaatgacccagagaacaggtgtgagactgaggtcaggagccttggataagtcaaaattctacaggagctttgtgacccaggttatgttaaattctgtgaatcccagtgttttcatttgctcatagcaggttttgagggtaaaattgatatgaacctattttgactattgtcacgttttatatggctttttttcc

SEQ ID NO: 10961 - DNA, 201 bp, Bos taurus
aattccacaaaaatccaagggcctgtctcctcggtgaaacttctaacagtttaatcatctgggatgtgtcgagataccttcttcagagtaaagaacaaattgctgcacctggcctccccaatttttaagaaagggaagccatggacatggaatgaaggcaacacatatacttcattttcattacaggcagtccaaaagctt

SEQ ID NO: 10962 - DNA, 201 bp, Bos taurus
aggatgtgaaacaacaggagctctcagctgctgatgggaatgcaaaatggtgcagccactttggagggtagtttgttggattcttataaaactaaacctattccactataccacccagcaatcatcttctttgatatttacccaagtgaattgaaaatttatgtccacacaaaagcttaatggtttatatacctttattca

SEQ ID NO: 10963 - DNA, 201 bp, Bos taurus
aggtcacaggaaggggctcagtgcagctctcaggtggggccggctccctcacccgcttcctgcccactggcctccccggctctaaggcctagggtgtctgtgagaccaggttccagccccacccatcaggagagtgaagggcaatggttgcactcatagcagaaggcacatccttggcaaaggccttcaattgccagagtc

SEQ ID NO: 10964 - DNA, 201 bp, Bos taurus
tcttctccacctctccttggcacagaggaaaggcttgcccatcccttgtcttggtagagagcacagccctgggagggaaaaacctgtggggccaagacaagaaaagaatactggtattgctaaaggagaatctttctaatgatgggagtaaagtcattgcacaagatggtgattcaaagtctttgtcttacactaaaatga

SEQ ID NO: 10965 - DNA, 201 bp, Bos taurus
gttggtttggtggctggccctagatagtattcagggcaaggtgaatgccttagaccggaacttctaaccccttttcaatagtaacagccacttcccaaggaactcagtgtgtgtcaaaggccacactcatgcagaccctgtcctgtgcattgcagggcagccttccaattgaaggggtaccctaaccccctcctcatttgt

SEQ ID NO: 10966 - DNA, 201 bp, Bos taurus
tcctccgtataaatacaccatacctttttacatgtttctgtacataaacagtttctgctgcctggaatactttctctgttccattccttcatgaaacctcccatgatgcctccttcccctcaggcagatgctggtattccttcttggcatctgtagcccttagcatctatctccaggagagcagtgtgcagcctgcactgt

SEQ ID NO: 10967 - DNA, 201 bp, Bos taurus
acatctatgcagaagaaaaagtcaaaggggccaataaattacagaaataataattactttgaataacttctattgtaaacgtccaaagatggacctttttaaataaaaggaagtgactgatggccacagtggcgtgggtagattgccaagggctggggctgtgcctctggctggagagccagtcattgggcttgtgggcag

SEQ ID NO: 10968 - DNA, 201 bp, Bos taurus
gataccaaattcagccctctccttttccagccttaattgaaactattgataattacccagaattgttttctggtggagaaggtctaaggcaaagtcataagcaaaagtccaaagtgaagtaggaggtggttatttaacaatctggggcttctcagaagtctcagcagtaaagaatctgtctgcaatgcaggagaccagagt

SEQ ID NO: 10969 - DNA, 201 bp, Bos taurus
gaactaatactgggagttattcatagaaattggaagtatgcactgtttagcactgagagccatacctgatttattatagtaggtgctcattaaatgtttctagagtttaaagaagacacacattagttgtcataggaaatgtcactgagggtggaagaataacttgtttgaagtcagtagacctgaattccaatcccatct

SEQ ID NO: 10970 - DNA, 201 bp, Bos taurus
aacccctgttctccctccctttctcctttctttcctccctcctcctccccttcctcccttgcgtagtattttttgaagagcgagtactattccagaagctgtaactgtttcccagctggacccagcagtgaaaagtctttgctattgtgttacctggtagggtacgtcccaggatcaacagtccatttcccttgagaggga

SEQ ID NO: 10971 - DNA, 201 bp, Bos taurus
gagaattaatctagtgggtaactgttcgaatctagactcgttcatgttgagacgtgacgggagctagttatttagcctctctgagccttggcctccgcatctgttaaatagaacaacagccacctcctagaagagttgtgcatacaagtcctatgtctttgaggtacctggcccatagtaagctctcaattcaatgaagtt

SEQ ID NO: 10972 - DNA, 201 bp, Bos taurus
ctcagaacgtacatagactctccccttgtggatggtggcaagaagacatttaatgcagccatagcccatactcagttggaggaccatgcatcatggttcgttgctttgcgccattgactcagaagaacatgatgcccagagagatgctgactgctcagaataggttcaagggcttgactggttgaccagctgcttgagaat

SEQ ID NO: 10973 - DNA, 201 bp, Bos taurus
acgggggagcctggtgggctgccgtctatggggtcgcacagagtcggacacaactgaagtgacttaccattagcgtgacctgggaggcatggtgtccagagatgggccatcataatgtaagctctaggcaacactccccttagtgattgacttgtactaaagtataaaggttctctgttacaagaaagagtgaagacaact

SEQ ID NO: 10974 - DNA, 201 bp, Bos taurus
tgatcaattttttttaaataagaagatgtagtaccaaatgtctcatctttcccttttttttttttttattataagtgctgtaagatttaatttctttatgtacatctgaagcagtgtgccagaaggtttacatttgctgaatctcagtactggatctgtgtgagttgctcagttgtgtctgactctgtgaccccatgaact

SEQ ID NO: 10975 - DNA, 201 bp, Bos taurus
tagtttgatgtgtaatttgttgttgaatagggctagggaggtggatgggttgagtgcacaggcacacagaagtatgtttggggaaatgggacatgaagaaaaggttacttggcattgtccaagtatagagttcgaggggcgtgcgtggtcttgtggagggagatgggctcaggtacaggaggttgtatgtcatggtaggtt

SEQ ID NO: 10976 - DNA, 201 bp, Bos taurus
agagctatcacgcaattcgacgtatctgatgcctgtgatgcgcttgaggtgagtctcagagaaaatgtcggatcaccctttggcttgatactgtctacagcatctctggccatttgcctcaagctattcctcagctttctggggctggctgggcagggcctccggtggctgcagctcccaggctggtcgcctccggaattt

SEQ ID NO: 10977 - DNA, 201 bp, Bos taurus
cactccagtattcttgcctggagaatcccatggacagaggagcctggcaggctacagtctacagggttgcaaagagtcagacacgactgaagcgacttagtacacacgcaggtagactactttattttgctacaaattactaaactactgcaggtgcaaggggaagaggatgtggttttggatgtgactcttaatgacatt

SEQ ID NO: 10978 - DNA, 201 bp, Bos taurus
aaattatttttattagaagttatattcctcagacttgatctttaaccacagaaatgacggaataacagtgtttagatttacctgtactcatttataatttttttttccttttgatcgtatgcctgttcttcatgcatattagctggaagatgaattggtttttagccaccccaaattcagggttcccccagctccctggtt

SEQ ID NO: 10979 - DNA, 201 bp, Bos taurus
gcaggtaatttgcaagccctggagagacccttacgggtaattgtggttgtaccctctctagagccagttgtccacataccactgaaaaggaacccacagaagggctgctgggatggccctctctactaatggtttcagagacctgagctgtaaaaagcttctgaaagccccttggtggggttattttatagctcttcagga

SEQ ID NO: 10980 - DNA, 201 bp, Bos taurus
gatcagctctattcagggcttcaaaaccaggccaagacagtacaatttaaaaaaaaaaaatttttttttttttgtttgttttgtttatatcagctcatagaggaaggaggggaaggcatagggttcaggcctcaaagtgatccacatctttcctgccaacattccattggccagaatgaggtcacatggccaactagtcac

SEQ ID NO: 10981 - DNA, 201 bp, Bos taurus
cgtgggttgccattcccttctccagggtttcctcttcagttccttaggcagatttcttttctggttttgtttgtttctcttaggcagatttctgattgtctggcctctttgcacagtgatgggcacagagtggccctcaattgcaagtagctggatccataaccacccttacctccaacctagtaccaagggtgcaccccc

SEQ ID NO: 10982 - DNA, 201 bp, Bos taurus
agtaagatacatagaaagggattaagaaacagcaacaaccaaagcttctttcagtctctcaaacatacagagccattcagcccaactctggcttccaacctgagaaaggggtcagaaatgagacgcagatcattccaatcttccagcattttcagcctcctgctcctcagagacctcgctgtctgctcctgtggtaactct

SEQ ID NO: 10983 - DNA, 201 bp, Bos taurus
aatctgggccttaccttaaagaggaatggcaacttctgcctttatctcttggaatccagctgttgtctaagaagggtgagtactcagagagccatgctaacagaagtcaagccacatggcgaggccttggaagaggacaactgctaagggagaggggaggcataatgccaaggagcaccaaggcgtcacctcggaagggat

SEQ ID NO: 10984 - DNA, 201 bp, Bos taurus
gtgcagcccaggacaggtcctgagacccttgcaccctaggagaggacaccctactggctgtacacacctttgttctgttattgagtccctggtgacacctgggggacaaagtggtgggggttaggaagcgtcccttctagctagttctttctgtggctgggtcatgcctcactctgtgactggagaagggcacctctaata

SEQ ID NO: 10985 - DNA, 201 bp, Bos taurus
catatgtaccagagtcatctgctttccccataaaaatcctggataaacattgatgcagaatccaggaggtcaaacagcttgacgtgccagcatcatcaaataggcaacactccagttggcccaacccaagtccgagctgttgggatgttcctccttaattgtgccatctgtggttgggatgccagccctctaccggaggga

SEQ ID NO: 10986 - DNA, 201 bp, Bos taurus
ccagtgatgtcccaatttagctttcaatcagccatgctgggaggatttacaccacagaatttggcagatgctacagaagaggcccgaaattgaggaaattgaggaaattttctagactctacaaggtacagacatccctctccatgggctggaaatcaccgcagaatccaatgcctggcctatggaccagatacctaagag

SEQ ID NO: 10987 - DNA, 201 bp, Bos taurus
gttcttctgatcttctgtgcatcccatgctatctttattccacacttgtgtgactttttcacttgtatccaggcagtatctaggtttgtattagtaactgcagagattcctagtttctacatctgaaactgcaagcagtgaaggccataagtgggcagtctcatcaactttgtttggaagaggttgcttttcaaaaataat

SEQ ID NO: 10988 - DNA, 201 bp, Bos taurus
tcctgtaacacacatccagggatgacatcagcacgagattagccaaaaggaacaggttaacccaaagctcaaggctgtggaagttttacccaggccttctcccataacattcatccaaagctcaaaaaaagtatgtccttgaataaaagatactgctgcctacaaggcccagttgtctaaggcaaaagaatgtgaaaaaga

SEQ ID NO: 10989 - DNA, 201 bp, Bos taurus
aataacataaagaatataaagaatgtttcagatgtgaggtccaaatcaaagacaacaataaaaaatactggcctgcatggagcaaatccctttcaactggaaaattccatctacatgatggctatcaatttccagaacaaaacaggggtaatctactagtaataaaaagcaacatcaacatctccaaaaagttttcctttc

SEQ ID NO: 10990 - DNA, 201 bp, Bos taurus
aaaagttacagcagaaatcagcaatatattttattacaagacttaacattagcaatgctttattatagttccatagtttttaaggacatcaataacttgactcaaaaaaaaaaaaaaaaaaactatgttcaaaggcatggctcaagtttttcaagccatattttacaaagtatgccataattacattttgctctgatctat

SEQ ID NO: 10991 - DNA, 201 bp, Bos taurus
ctgtggactgttactatgattgcaaatataagaacccacttaagaacctactcctacaacggtctacacacccaatgctgccagcttttagaagacaaccgaggagaacaaaggacaaaaagcttctgggaaagaattcaaaaacagtcagtcatttctatcttaacaacaacagaccttcctccttaggggaaagaggga

SEQ ID NO: 10992 - DNA, 201 bp, Bos taurus
agtagttcccagggaaaagtcagccaggttgcaaggcccctgaacggcctcagcaccctctctgaccagggagaaatgggtctccttagggaaaaggccatgtaaacagcaaagagctagagtaccaggaaagcagaggacagcaaaccacaccgtcctcggcacaaaaagggccagctgggcatgagccatgcactgaca

SEQ ID NO: 10993 - DNA, 201 bp, Bos taurus
tctgccctgcctcagggaggcagagtcgctcagcgcccctcgctctcacttgcctcagcagtgtttctgggggtttctgagtcccagttttcacataagcgcatgagcctgaaaggcctagtgacagctcattccttggtcatttaagccttgtctgctgcctccctggcccttcctctgccatcatctttaccaccttgc

SEQ ID NO: 10994 - DNA, 201 bp, Bos taurus
ccagtgactccccaacaaacagcaccctcttctctaccctggactttagaggcactgagaaataaatcagaacaggaaagaaaaacatccccctttttaccgataggggccagcttggaggataagactctgggtcagggatcttgctaatactgaactcccgaaagaggcagattttgggagcctgcctggacctggtgg

SEQ ID NO: 10995 - DNA, 201 bp, Bos taurus
tctccgtccagcagatcatgtcttacggcaccatcccccaggccgaggacaaggtgtgtggaatttgcttggtgtgacactgtctacacctgctcacaaacgatcccttaatatagctggcccatgagagcagagcctcatttcctggaacctggctttatggttcctgtctggtatccctccagtgtcctgcccaggcca

SEQ ID NO: 10996 - DNA, 201 bp, Bos taurus
tacttcatcccctgttttctctgaaaaatccttaatattaccttgggttttactgattaattggctctcatttggggaggtgacatgcgacacattttctgagatattaattacatgggggaaagtctggtaaagttagtgtgtgtttctagttgtgtttggtttgctggcctagagaaggcaagggtgccaaggagaggt

SEQ ID NO: 10997 - DNA, 201 bp, Bos taurus
gccctcagctgcctcccaggcagctccctcctttcaaccatttacattcggcagatttcccccagcaccttgttctcccacctcctctgtcctactccccgcctggccgtggtcctggactctgtcctgttgtgtccctgacatcttgtctgtatggatcgtctcccctcactcccatgcatcttgctgctaccttaggcc

SEQ ID NO: 10998 - DNA, 201 bp, Bos taurus
gagcctcaccgttgtcttgggaaggctgcaggcccagatgcttaccccctgtttcagatggggaagctgagtctcagcagtctgatgcgatcattgattgacaggcccggaatcctgtgtcctctccacacgctgtctctgcccgcgctccctctgctgaggcggggctgtgccctggctgcctcgctcggtgtcctggct

SEQ ID NO: 10999 - DNA, 201 bp, Bos taurus
cagaaattctaggacctgtttttttgtttaacagaataaagacttacttgggggctatttcttatggtatctgtaatgaaatatatcatgatgggattatcttatattacacatagaaaaacctccagtactgttttagaaataaaactgaaatcttccctagtccttatctttttcttcaaaagaagaaacaaagtagaa

SEQ ID NO: 11000 - DNA, 201 bp, Bos taurus
attgtatcataattttgtcaaatacatattacatcagtaataaagaaaaggaaaccaacactggtaaaattatgtcacaaactgcctctttgttagtcatacatgtgaatttttaataggaatattaatttgaagcttacaactgaaaaaagttattcataacattctgtcgataactgttctcaaacttatctttcccaa

SEQ ID NO: 11001 - DNA, 201 bp, Bos taurus
gctccagattaaaagattttaaagagacattaaaatgaaatgcagaattccctggtgatccagtgattaggactccaggctatcactaagggctcaggtttgatcccagttggggaaccaagatcctgctaactgctcagtgtggccaaaaataaaataaaataaaaactaaatgcaatgtgtaataaaggattgggactc

SEQ ID NO: 11002 - DNA, 201 bp, Bos taurus
gtactagtcccacccataaggacttcaccctcatgacctatttacttcccaaaggccctacctcctaatatcatcacattgaaggttaggatttcaacatatgaattttagaaggaatacaaacatttggtccataacatttccatatagaaaaacaaaaggtcaatagtttaagtaactttccaaagctggtaaagttga

SEQ ID NO: 11003 - DNA, 201 bp, Bos taurus
caggctcaaattcatgggaggatgcattgaacccacccctgaagtgctcagttctctgtctccctgcatttttctgtcaaataacatggccattcacagattctccttttgtcctatgggtcacaggtagagaatagtggcaggcagggaatttttgtgctaatgataaagatgagcgtgtaagaggctcccaaagttggg

SEQ ID NO: 11004 - DNA, 201 bp, Bos taurus
caaaagcaataaaatcacaaaaaccagctaagatttgaaatttggggtaagctagtacaatttcctgcttttaatgtatacatattttagatttgacaatattttccacatatagtcagataggtttatagaagcatttcaacacaccaaattaaaaagctgttaattcatacattttatgacttcaattaattattcaaa

SEQ ID NO: 11005 - DNA, 201 bp, Bos taurus
gcaggatattttccttctttacacaaataattttttctctctgttcttttgcaaagaaatctgccttttcatgcattccaacattttctttcttttctctgtaattctgcattccagcctttatcctctcagtcaatccattaacacagaaacaaatttggtttgcaatcaacattttttttattaaagttggttttagag

SEQ ID NO: 11006 - DNA, 201 bp, Bos taurus
aaaatcattcataaatcaataagagaactgggacctcccccctctttgtttcagtctctgtaaacagttgtcagcctcatatttctctgagagattttctgattcacaggttctcaacgttgtctacccattggaagcagctttaaaagaatactgatgcatgggtcccacccagagattctgttttatttggtttagagt

SEQ ID NO: 11007 - DNA, 201 bp, Bos taurus
cttggagtggctgtttttaagggccacgtgtaggctgagttaacagaagaaaccagttgaaagagaagtgagggtgatcaaaccaagcatttcctgagagagtagtaacctggtttcttgaattactgtttattaatttaaattcagtccttttcgatcctagatgtactttagatctgtgtgtgggattttacacgagct

SEQ ID NO: 11008 - DNA, 201 bp, Bos taurus
aatccttctttcctcacacaaagtagttctgctcagcatctgccctgtagactcagatatttccccctacagtccttatcaaaacggcttctcaacagaaggaattgtccccataagtcctttttataccagttcagaaaataaatgttttcctaccattatacactttctgtgctcagtggctctgtcttcccaccgttt

SEQ ID NO: 11009 - DNA, 201 bp, Bos taurus
acacaggtcgtgagcctgtgtggaattccgtatgctggggtagaggtcacctttaggttctagacggatatctagtcatttggtaaataccaacagttccagtaagaacatgccattttccaacgtaactgtgacatagtagtattagaaataagtcaagatagaaatatggaggaaagagaataatcttctgtttcctcg

SEQ ID NO: 11010 - DNA, 201 bp, Bos taurus
tcaaacttcactgcccagggaaccctggggttccatggagcatccttgggtgaaagtgctctaccctacttactagtatccttttgttataagatgaattttcagttataaaaactgtagctgtaaagtttgggaatgagtgtgctaggtactgatttagggaagaagcaaactctgctcctgtaacaccagcttaggtga

SEQ ID NO: 11011 - DNA, 201 bp, Bos taurus
ccctactccttccttgcctgaggtgcctcagtgatgaagctgatgaaataagtgatgtggatttttcatgctgagggcccttttcttcctctctctccccgcctctgctctgagaacccctcctgcatcctctctggtggggacctgccaccacccgctactcatgcccaggagagtgaagccacactgggctgcccccag

SEQ ID NO: 11012 - DNA, 201 bp, Bos taurus
gtaagtaatttaagctttcttccaaaacacaatgtactgcttcagatacatacggaattcaaatatcacttcaacagataaacatggttttgtacaaggaacttgaactatttcatttttaatgttgatgtaatataagctacagttctttgtcagtcaattcaagtagtaaaggtagataaattataccttatttcagtt

SEQ ID NO: 11013 - DNA, 201 bp, Bos taurus
agtgggccagccatgagcaacggccccatcaggcaggcctggtgggtctctctgcatgactgatgttcatcctagtgatctgagatcccggagtcgggtccgcatgcaccatggcccacaagatgcagagcacacatccagagtgtagacggctagacgagggctcaggggaacagccttatgtgggtttggatggccaca

SEQ ID NO: 11014 - DNA, 201 bp, Bos taurus
aacaggtcaagtgacttctgccctgccatctcaagacaggagcatcttctgaacaaccagcacagttaggtccaactcacttagtgttctatacacatgtacgcaaaacagaaagcaaatacaatctatgtttaaaacaaaaaaaattgaaacttcttcctttggaaaaaaattttttttcttttagataaatttcatgag

SEQ ID NO: 11015 - DNA, 201 bp, Bos taurus
ggtattgttatagtggcctatctccaggtaccaacatctgtactggttccctgtggcaactttaacaaactatcagaaactcagtggctaaaacaattcaatattttctcttacagttctaaaggccaaggaagaagggtggaggggagtggatattgagaagttagaaagctatgaacacattttgttttttctttctcc

SEQ ID NO: 11016 - DNA, 201 bp, Bos taurus
taaagataagctgagggaggggagctgtggggtgcatgctcagctcatggaaattcttctgattggttggtggtaagctaattgggagtcaacatcattaatcttttggttcccaactggcttggtttctatgtgcttatgagcaaaatatagctaacttcatccatttgcaggggatttcattagctgcagaaaaactca

SEQ ID NO: 11017 - DNA, 201 bp, Bos taurus
caaaactttatcaggtaccatgctattccctgtgttaggtgttgtacttagggttaaccctaaaattcacagatcctcagaggcccactgatagtttcactgcctcaaagagatcaatgaattttcctgagtttacagagcttgtgagagaggaggagcccacatttgacccaagattgtcaggccccaaagtccctaatc

SEQ ID NO: 11018 - DNA, 201 bp, Bos taurus
gctctcagcaaactgcttctgtaattgaggctggctgcctccaggtggcaccagagtgccgtcatcctgaagcggatccgccctgggatagaagcaagaatagtttctctcccccaccagttcatttccgcaactactgccaagatgaatcttcttaatgatgaggtttcttctctgctcaaagcccatcagaggcttcct

SEQ ID NO: 11019 - DNA, 201 bp, Bos taurus
gacagggaagcctgggcactgcagtccatggggtcacaaagagttggacacagcttagtgatggaacaacaacaaacaagcttgagcaaaaagtgctacagtgggtacctcgacttttatcaaggctttccctggttatgctgactaggattatactgtgtgaccacagagtccaggccagaccccaggcagggccactgt

SEQ ID NO: 11020 - DNA, 201 bp, Bos taurus
taaacaagaatttgaggtacacaaggtatagaatgaaaagtaactctgcctcttccaactagtttcttgctttagagagaacttttttatttttaattctgctgattattaccccagttttatatataatatgctaaaccttacttttgatgaatcttaagtaatctagtgtaccttcattgagaaaaataaaaaatttta

SEQ ID NO: 11021 - DNA, 201 bp, Bos taurus
agtctttcacttttggcaataattgtctccacatttactttatagagtcccctttggtggagcccacaggcggagaggaagcacaggattcataagatggcgggcgggtgagtgactgagaatttgggctgaaattggagaaaaaaaaaaagtggcagtggttacaccttaataagaggaatgaatttgaagtctaagttg

SEQ ID NO: 11022 - DNA, 201 bp, Bos taurus
ggacttcataggaaagaagggagagttttagatggtgagatgaagggaagctgcctggagcttagtagagggagctagtgtcactcatacttctgctctaaaccttgagtacgtagacaattaatcaattgatgattgttaaaaaatattttcttagacagaagcagatttccaagctggccagatggttttcttactcat

SEQ ID NO: 11023 - DNA, 201 bp, Bos taurus
attataaaaacaagcagtagacaagatttcgcccccaggccatattttgctgacccttggagtagctcataaaaggtagtagtaattctcacgacactgttttcatttagattggccacattaaggaaatttgtaccctgacacactgaacaggttctaaatgtgaccatcttaactttcttaaaaagtaaatgatatgat

SEQ ID NO: 11024 - DNA, 201 bp, Bos taurus
gataggtaggccatgtaaatgcaaaaccatgagtgcaaattttattccagaatgttaaaaggaaaataccagtgtggaagagaaaggtggattgaaaaagtcctggacttgggccctgtttgtctcccagcaccctacactagctctggaatgtggcaggtcactcactctgtgtgcctgagaagccgtctctttaggaaa

SEQ ID NO: 11025 - DNA, 201 bp, Bos taurus
tgccgtaatgcgacttacgtctacttcggaaaaaacacatataacatacacacaggcagaggaaccatttctaaacactttcacaaagcagcttagtatgcggacggggtaaagagtaggagtgtctgggagtggttcccctgcattgtcagctaacccagtgattcttcaggggctctagtcaaaggactagttctatga

SEQ ID NO: 11026 - DNA, 201 bp, Bos taurus
ttcaaagttctctgcacttctgacatttcagtgtttcatagagagggtgtaactgttgcctaggacaatggttttagctcaaagaaatataagaacctgccgaagccaaattgactaactatacctaagtcaaaatatcttttaaaaatgttgtgcacgtgcatatgtgtacatatatgtgtctgggtatatataacagat

SEQ ID NO: 11027 - DNA, 201 bp, Bos taurus
gttaaggtttatggtgtagtcttcctctgcacggcttttgtgagatattttacttccaaactaggaagattgctcacgtctgatgctcaagagtgtggcatgttgagaagctgcagtaacatcctgccgcagctatggggcggcccctcggggtggccaggaaggggggctgggcactgatgaccgcaggccctgagctgg

SEQ ID NO: 11028 - DNA, 201 bp, Bos taurus
taccacctcttcctccctctataaatcttcctttgaagtttctctccctagtaagacttgatctctccttctgtcataatgtgttcctgtattatagccatgtgcatttataatcagtggagttgaaagggtcataaagatgtcataaaggactccaccattagttggccccggtggacttgagcaatttacataattcat

SEQ ID NO: 11029 - DNA, 201 bp, Bos taurus
gtcagaaaaaatatttcccaacttcaactggcagagagtgaaaagctgcttatcttctgttttctcaatggtgttcaccattaacaataggcccagtaacagaagaaccataggtatggtaagtgtttcatgacttctgaataccgaggaaggaaattgcttcatagagaggaaagcatttgtctttaatctcaaacggga

SEQ ID NO: 11030 - DNA, 201 bp, Bos taurus
ggtttattttttatttattttgattcataactttgcttataatacagacagaacagagcctatgtttatctgcttgtacacatgccagaatttcacttccaggcccataactgtatgctagaatggtggattcttattgtatcagttagtataaactagcttgtgtgctgtggtaacaaacaacctccatactttgatgga

SEQ ID NO: 11031 - DNA, 201 bp, Bos taurus
ctcttgacatccatcctttaccagcttccatgctgtgaggtgagtctaaatatctacctgggacctaaaagcaccacacttccctgggcctcagggcctttctatgttttgcttcctttcttggacacagctttccttcttgtctctatttcttgggtttcatctaaggccacccctcctgcaggttttccctggcctcct

SEQ ID NO: 11032 - DNA, 201 bp, Bos taurus
ttgttttgcgcctctgattaatttgtctcacaaccctccccaagatgtgcatgtacccctctgccaagttggagtccagctcaaggtgtctgggagggaaacttgcaagatgtatggcctgatggccgtcccctgccttttgattcccaagaagtccttctgtgcatgtgtagtatctcccttgccccaaggacaaaaaat

SEQ ID NO: 11033 - DNA, 201 bp, Bos taurus
ggaggcagcttagattttggcctggtccagtagggtcccagaaagtcagacataactgagtgtctgagcagagaacactggcatgtctatgcccacaaagcccataggccctaaacctacacctgtctcagctatgggagcatttatctgttcaaatatctcacagttgctgagtttccaaagtcagcagtgggggtgtaa

SEQ ID NO: 11034 - DNA, 201 bp, Bos taurus
tgccaagttaactatatgatataaaaagagaaagggaaaacagcaaaatttaaagcaaaatatatttactgcagttttggaaaaataaagaaaagagcttagaaattgatatagcaactgttattgttcagatatttgagaatcactgctctttaatattttaagtgggcccctctctgtcaaacaacctccatagtctag

SEQ ID NO: 11035 - DNA, 201 bp, Bos taurus
tgactgcatcctccttgggccctttgtggcttgcgtagaggcagtggcgcagccctgtaatgacttttcggttcacagacctgtgtttaacttgctatctcttcacagtataaaaggtcagaggaagtgttctgcttcagagatcacctctgcacctgctagatgtgatgtggagctggaaggtgatcgtagcaagggcct

SEQ ID NO: 11036 - DNA, 201 bp, Bos taurus
cttgcccatggtggagggagcaggatgctaaagtgtgggagagtggaccagggagaggactgctgttggtttcacagagatggcctgaagggacagaagtgaggagctccctagccgggaatgatcctggaggaagcagatctgccttggaaataaggcaccactgttgaaaggcatgcaagaggtggggccgccatcatg

SEQ ID NO: 11037 - DNA, 201 bp, Bos taurus
aaactgtgatcactattcccactacaggcttcatcatggagacggtggaatacaagaacatcagcttcactccgtgggacatgggtggccaggacaagatccggcatctatggtgccactacctttagaacacacaaagtcttatctttgtggttgacagtgtgagaggcctgcgaggctcacatgaggatgctggcagaa

SEQ ID NO: 11038 - DNA, 201 bp, Bos taurus
agttattgtttcaatgaatatggaagaattaatcagaaaagaaagggtcagtatctctcaaagggctaaacaaaagggaatgaattcagagagaggaaccgcttgaggtccattagcgatgtccagcatttgaactgttttagtattctgaggcaggggctgctttataataatggtgttgaacaccaagaatgtagctct

SEQ ID NO: 11039 - DNA, 201 bp, Bos taurus
tgaggaatgttcagtgaagattaagcatttggctgtaagcaggggcatgggcttgtccatggatccacccacttttggcttgagtgcttataatgtcttctcacacccacaacctggactggtggtgttatgagcagtttctaattcctgcactggtctgtcggattaatgggatcctcttctatcctcactgtttgtctc

SEQ ID NO: 11040 - DNA, 201 bp, Bos taurus
tttcatttccctatggctagttaagggaaaccgggaagatggccacttggcagtctcagccgctatcctaggaagctggtttcagtctgcagggaagaatagaaagggggaatgggcctttccccagacaaaaacaaaaatcccagaatcagaatgaagaaccaagcagtagatattgctggagcttataaatccattcca

SEQ ID NO: 11041 - DNA, 201 bp, Bos taurus
tgaagctgtagattaatttgggtagtatggtattttagcagtatttgttcttccaatccaagaccgtggtatatctttccatctgtttatgttttcattttcttcatcagcatcttacagttttccatgttcaggtcttttacctacttagatttatccctatatgttttatattttgctgcaattgtaaatgggatagtt

SEQ ID NO: 11042 - DNA, 201 bp, Bos taurus
ctttattgtctttttaagactcttgaatctcttctaattctttcaaccatttttctagatttcctagatcactgaatggccaccagggcctatccttgtgtcccacacaccttgaaaacctcctgcttcctctgtgagcttgtacctgtacagctgagagctgttggtggaagcctctcaccatgcttcccaacctcacct

SEQ ID NO: 11043 - DNA, 201 bp, Bos taurus
agggtctgcacaaggctcagtgtctgaagctctgcctgctggtgtggggctgtgagatgagaaaggtcagtggagcagatagtgaagactctttgagacatttatggaacttgggttttaaatgacaggtagtgcggagccattcctcttatttaataaaaacttagagaagactttgtgccagatgttgttctaagtgca

SEQ ID NO: 11044 - DNA, 201 bp, Bos taurus
aaatctccgcagtctgcaggcatccaaggggcctgggtaaaatggcttgtcaggactgccccctaggcttaactatcccctcagctgaatgtgccttgcaggctccagtgggcctgagctgcagcaccgaccaaagcaaatgtgcataggcacaagccgccttctctgacctcagcaccagaggctgcattagcagggaaa

SEQ ID NO: 11045 - DNA, 201 bp, Bos taurus
acccaaaacttctgcgctggcaagtggattctttaccactgggaaagcccagggatgggatgagggcactccaaaaatagcataaaaaatatgtattcccgatgataataagttaaatagccaaaaataaagtagagaagccacatggggagttcagggaaacacgtggcctgttgcaattttaagtatggtaggaaggaa

SEQ ID NO: 11046 - DNA, 201 bp, Bos taurus
aaataacaatggaaacctgacattgttgtttttaataaaatagatttattggaatctacttttgaatctttggttttggcacaccaccagtttggaaacattggtattctacattgtgatagagacttgatatcaaattagaatatgtgctgcagaactttaatattaaaaactatttttttaaagaaggaaaattcatcc

SEQ ID NO: 11047 - DNA, 201 bp, Bos taurus
aaaggaagcaacaagaaatctgacaaacagggcctcgagaatatgccaggacgtcagtaattcatgggaaaactggttaagcaattggaattggatgccctgggtcctatctctttaaggccctctccttctatttacccttattctaactttcagcccatgtttaatgtgtctttttttcaaaatttcttaaggatcctt

SEQ ID NO: 11048 - DNA, 201 bp, Bos taurus
taaagggtcctcagtgacagttttaaagccccatcagtagagtaacattgaaaacctctgtagccatcttgaaattcttagagttaggtcattaatcttatttcctaaagttagagaagtcctatgtggcagagtcaaattctgacatcagtccggtggccctgttctgcatttctataatgtaattgtataaattcttta

SEQ ID NO: 11049 - DNA, 201 bp, Bos taurus
gactgagcaactaaactgaactgaataatctctattccctttatactctttgctttggcaaaggacaccaattattttctaattggtcacagaatctctccatatgtgacttctctccattcccttattcctgaagctctcccttcacttagtccatgtggcagccagtccaggttctccttatgactcctcagccctctt

SEQ ID NO: 11050 - DNA, 201 bp, Bos taurus
catgaaggaggaactggctctactggatgggtccaatgtggtgtttaaacttctggggcccatactggtcaaacaggagctgggggaatctcgggccacagtgggtaaaaggctggactacatcacagctgagattaagtgatatgaatcccagctccgggatctagagcgtcagtcagaacaacagagggagacctttgc

SEQ ID NO: 11051 - DNA, 201 bp, Bos taurus
ttttctaagcccttataatggagcttacataatatgtgaatttactaagtattacattttatatttattttagctcccttttaccaaaggatttgggatgccttgcatgaataattgtaggacaattatttttccagacaggacatctggattaaacagatgatattagccaaagcacagacactgcagctgccaaagaga

SEQ ID NO: 11052 - DNA, 201 bp, Bos taurus
catgtgtacattaccatgtgctgcctaattgctcttgattcttggttttcaaaagcaagttcacttttgaagcaggaaaaacagattcttaaattggctctcataagtattccaggaagtacacttcatttctcaactgtattgttactctgggaagacaaggtatagtcaactggctgctttgaagccatgaaatgcata

SEQ ID NO: 11053 - DNA, 201 bp, Bos taurus
ataaaaattaatagctgatggccatcctcctcagacacactaaaaaaagatctccagccttctactctctaatgcaggtgttaggtgtaaagatttaagtgggccagttccctgacccacttctcccaggctagtggaagggataattgatctggtaatacttggtgagaagtcaggggtgagcctgacctaaccctttct

SEQ ID NO: 11054 - DNA, 201 bp, Bos taurus
atgaactacctctggaaagttgcaaaacagctttggtaacagagcacaaccaggactgataaggagatttgccatctcaggtcaaaccttgtctattgaccggaatttgcatggcaagttgttgactgacgctatgttgaatcaagcatgatgacccttattcaatgcttaatgctttgtgacttcatgaggtgaaaaaat

SEQ ID NO: 11055 - DNA, 201 bp, Bos taurus
tctttttttagaaaaccacagtttcatagcacaggtaagtgcaaaacctcctggtcaagctaggatattccccgggaattcccttaactgacctcatgtgttcttgcctctgggccttgactccaactaccctaaatttctttccattttcattgaataaaatcccagccatcctctgggatccaatcagacaacagcctt

SEQ ID NO: 11056 - DNA, 201 bp, Bos taurus
gacacacaaaagggccagcctgggggctggagagcacttgctcagggagtcctcagcagagccccaggaattccatttcaatagagcaggaaggggaagtagtggcctataacctcagggaatatttccagatgacccacccatagtttctcctgctttgaggaagtggcttagcccagaacagcaccacccatgagagaa

SEQ ID NO: 11057 - DNA, 201 bp, Bos taurus
tcataatcttgaatgtttctgcctgatgactttggccaaatgtgtgagcacatacccaaggcttgcctgactatggccctataaccagcaggttggttccccttgagatttggacacactcagaagggcagtgaggggaatgatgcttctgttcttcagtgatggtgttttgcctactatgctaagcaacagactctaact

SEQ ID NO: 11058 - DNA, 201 bp, Bos taurus
gtaaagctgcttaacgaagtgctagttggttggcaagaggtcagctgaatatggtgaatgaggcaaaacttcatagcccaatgtgttcaacttttgtaagcgttggttgtgtgctatgtggcccagcatcgtggagaagaactgggcccgttctgttgactaatgctggctgcagacgttgcagttttggatgcatctcat

SEQ ID NO: 11059 - DNA, 201 bp, Bos taurus
tgctttccttcgttctagctgattctttgatgctttggtgtctatgccagaaaaatacctcttataatcatcagaggccagtgttttcacagaggtcactgcaagctaattaagcaaatatgtgaaaaatagtttaaaattatctcaattagtagagtgtgtgtatacatgcatctggagtggggttaaggagatactgtt

SEQ ID NO: 11060 - DNA, 201 bp, Bos taurus
tggctacccactccagtattcttgcctgcagaattccatggacagaggagcctggtgggctatagtccatgaggttgcaatttgtcagacacgactgagcgattaacactaactaactaatgagcaaattaaaaccagtctttttggatgactcttataaaatataaagatgtgtaagtttaacaaaacctatgcctactt

SEQ ID NO: 11061 - DNA, 201 bp, Bos taurus
tcagagatgcctaaagcatcctaagcattcagagtagcaggatggaccacattactagtaccaacctttgcaatctatgtaacatcaatgtttgccacatgcccatccaaaattgtcctctatgcagttaccaggatgttatctgaaaggcagaactgctcctgtcacccactcccctgctgactcctgtgcactaaagga

SEQ ID NO: 11062 - DNA, 201 bp, Bos taurus
atgctctctttccctccatcctcactttcactccttgtattttccttcgagatgagtggggaaagcgattggaagtgtgagtctggttcatcaggctgagtatgtgacttgggcctgagcaactcgagctgtaaatctctgagtacttcaggggctctgtggtgccttgagtatgagggtgagggctaagacagtgatgtt

SEQ ID NO: 11063 - DNA, 201 bp, Bos taurus
ggaaatttcattggcaaattggagtagttggtatcttattcagtcaaaaggactatactgatttttatcaaactaaatttgatgggatgctatttacaacatctatgtacttagtcctgtgtagtaaacagacttaagtatgtctttttcccatcatatttatcagttatgcaaaataagatgagaacaaggaacaatgag

SEQ ID NO: 11064 - DNA, 201 bp, Bos taurus
aaatatatatatatagagagagagagagagagagagaggcacagggggcttcttgatgctttttgtgtgggggagttgaagagtaaggagttgtgactgttttaacttttttagagggagaaagaaaaaaattgcaatgggtggtccaatttacaactcggactaaaactgagtaaattctatgctctcttttaactttga

SEQ ID NO: 11065 - DNA, 201 bp, Bos taurus
ggctatttttttcttccaatatctcagaaaaatgaacactgaagagtacagtattggctagagaagcttctactcttactcatactcttgccttccatctccctgctaaaaaactggtaatatgatacacattcaggaccaaggacagtaattgggctacatttctccaagttattccttagtagaggaggggttgaagtg

SEQ ID NO: 11066 - DNA, 201 bp, Bos taurus
cctgaactgaagtttttccaggtaggcagcttataaggtcaaaagagtaaatgagttaaagttttaaagaaagataggctgaaataaaggattatgtaacatgaatggttttgattaatgtattagtcaggacattaggagaagttaactaacaataccagaatttcagtagcttaataacaatttaattcaccttgctat

SEQ ID NO: 11067 - DNA, 201 bp, Bos taurus
aatacggaggggagagaaagatttcagtttgatgaccttctaaatgaccagaggcaaagtctagcagttgccaacctggctgggcctggatgatgcattcggagactttatcttcacctccccatattccgggtgccacacagtcactgaggatgtcccagcattatttgactaagtgcctgagacacaggcctctagaat

SEQ ID NO: 11068 - DNA, 201 bp, Bos taurus
caactaacatgcttagagcacagtgaacaagagggagtgtggctggaggtgagggcagagaggaggcgaccactaggtcctgcaatgccttgggaaggggtttgggttttcttaggaagccttcaaagaatttaagcaggcaggtgtcatggaatgctttaaaaatctctctgctatgcagagaataaattgtaagagtga

SEQ ID NO: 11069 - DNA, 201 bp, Bos taurus
ctctcaagaaccctttacaattttaaaagttgttgaagaacctaaagtgcttttgtttatgtgagttgtatctgttgttataggaattaaaactgaggggaaaaagtatgggatttatacacgtattcatttatatatagcaataaaaaatccatttggtgttaacataaacaatatttttgtgaaaagtaagcatatttt

SEQ ID NO: 11070 - DNA, 201 bp, Bos taurus
gcagtttccagccccgactcagccgggtctagagttgggctgtaagacagggtccctcccagtctgctgggtcagcgtttagaggactcctgtcttggtttggcccaccttcagggtcccatctgcccctgccccacccaagcagctcatctcttatctgatgggtgggagaggtgtcaggagagttgaggggcagaacct

SEQ ID NO: 11071 - DNA, 201 bp, Bos taurus
aaatgaggtgtctggctacatactagacaccagttacagagaaaaattaatgtaatctgataggacaaatttgcctttaccatcattttaacccagaatccgatttcagaaccaaaattaagaaagatggaaagtgatggcaattttgcaacatatcagagttaatactggattcattagaaactcaagcctttacagtga

SEQ ID NO: 11072 - DNA, 201 bp, Bos taurus
ggtcaacaaatacaaatacttagggattcataatttaataaatgcaatatgagttttcttactttctcacaatgacaagttatcatgcagtttcatgcagtatgcaaagggttttaaaaatattttcaaaaatcttttctgttttattttcaatactttattttatattgagttttaacttgtaagtcctataaagtcatt

SEQ ID NO: 11073 - DNA, 201 bp, Bos taurus
ggaccagtcagcgagcaacttccttaggtcacatcttttctaactaagagggagcatggggcccaagcagaagctttcagagtaggctcagtcctaggggtagcaattacctaccagacaaggtacacagaaggccctatacccaagcctccagccggcctaacatcgctcccctcccctccctcacacccaccattcttc

SEQ ID NO: 11074 - DNA, 201 bp, Bos taurus
cttagaactgtaaaaaccatttttagctcgggggctacacaataacaagcagttgccaagggctagatgtggtccatggaccatagtttactgacctctgattgagtatattctagccatttagtgttcctggggacatggaagatgcagccgttctagacaaaagcccaaaggggctcggagggactccagtagctcccc

SEQ ID NO: 11075 - DNA, 201 bp, Bos taurus
tggagcctatctggatctaaacatagtccctgttctgagatcaagtgatctagatatcaaagctgaaattgagcaaagtgcagtttttctttggagactttatgtttcaaagttttagcaagtgaatgctgtcttcctgtgaggaggtttgagaaggagagcacaagagcaagtcatctatgtattttaacaaaggagaat

SEQ ID NO: 11076 - DNA, 201 bp, Bos taurus
ggccagatgtctccaagacagactcaggttggggaatgaacatgtctttccaacacacaggactgtgtccccttggccttcatctctgctgagaacaggttaagtaggggtagatcagcatggtggcaggagacatttctatcagtccagtgtttctaaaatctcagtcatttcatctctatttgggccatagtgacatac

SEQ ID NO: 11077 - DNA, 201 bp, Bos taurus
gccagggtgggtcagaggaggctcagcccattctctggttagtccccaggtttctcagcctctgccacctccagcctgcagcctgagcatcctccttcccgccctcaaaggaggcctcagctgagttacagccccattcatttcttgagcacattggtccaagggcttttatcttgggccttgctttcccccaaataaact

SEQ ID NO: 11078 - DNA, 201 bp, Bos taurus
tttaaacttggagctcaagttcccttctgctctttcagtaggttcatgtcatcattcttttaaatacctaccctattcaccccatttctctcattattacttcctcctaccccagctcacataacttctgcttcagcccctcagttgtttctccacccctatctacagctgctgtggacaccattgtcaatccaatcagca

SEQ ID NO: 11079 - DNA, 201 bp, Bos taurus
ctggcctccgggctgcccttagctactgagaacatgatttgtgaggtgacaacaagccagaagtttctgtctgtgaagggctagtgagctgacagcccacactgcctggatcttgtgcacctggcccggtagtgagtctgtggtgtatattaactcactcacatggtcactggcctctcttttctcttacctttcaggaaa

SEQ ID NO: 11080 - DNA, 201 bp, Bos taurus
cacggcctagcgactgaacaacaacaacaggcgcagacgagctcgtctctcattcaagtgaaaacaagctcagaaggacagtgactgactgttttgttcacactctattcccaaggccagtgcctggcacacagtaactgcttagtaaatatttctccagtaaatggttttggctgcagcctagtctgcccagaagacagg

SEQ ID NO: 11081 - DNA, 201 bp, Bos taurus
ctcatcctctgcttccctgttctcctcttgccctccatctttcccagtaaaaacccaaagggaaatgatggtgattcagactgggaagcacctatgcagaaggtgagaagtggtcagagtctggatcccttttgcaggtagagacatcaggatttgccaaggggttggatgtgggatagagagaaagggaagtaaaagaag

SEQ ID NO: 11082 - DNA, 201 bp, Bos taurus
gttttctcatttgtaaaatgggggtaacaatccctaccttgtggggttgatgtgaggattagataagctaaaatgcatgaagtgtttagaacaggcctgcgtattctagactcacttcagggtgagtgtgcacgcatttgctgcacaccagggagtagatgtgagggttggaggaggtagccctctatgtatctgggggcg

SEQ ID NO: 11083 - DNA, 201 bp, Bos taurus
gtcaggaggcctcggccccctccactccccagagggtacatacccgctgcagctccacctccatggtccctgcactctgtctccaaagcctgtgtctacacgaggcccagggtgggaccaggccttctgacccctgcaccaacggccacagccccgggcactccccggaaggagcatctagtgctgttttcctgggtttag

SEQ ID NO: 11084 - DNA, 201 bp, Bos taurus
tacattggctggagttctgatatccccagttctccggagaagcaggattttgatttagttacagaaaatgaattatttttattctttttttttttaaaaagagaagcattttgacagtctcaatgaacaatataatttcagagctgggccatcacccgaaccatcgaccttatttgacagactcaaaaaacaaaaacaaaa

SEQ ID NO: 11085 - DNA, 201 bp, Bos taurus
gaaaaggccttattgatgatataaagtttgtgtggtctggatacaagatcaaaccagccacaacattgccgtaagccaaagcctaattcagagcaaggtcttctccctttaattctatgaaggccaagaaagatgaggaagctgtagaaggaaagtatggaactaacagagattggattatgatgcttaaggaaagacgtt

SEQ ID NO: 11086 - DNA, 201 bp, Bos taurus
agacagctgaggcctgcttcttgccccaagaacccagagccaggagaagacactcagagccaaatttccccttctcagggtggtcatggagcatgggaaccgaacgcttgcatgtctagggcccaagctggggagccccatggctattcatgctgcactctgagcttcctctgagcctcgccccagaggaagactcaagtg

SEQ ID NO: 11087 - DNA, 201 bp, Bos taurus
agccgagagcatctgtggagtgaccggccctgatggggggtgcttgggtcatggtgcctgtcagctcctggttcagctttcacagggctggtttcacaggtgaagcctaagttcaggcctgaggtttccccttggacccatcctgttcactcctccaagacaagcacctctgtgcccgggcaggatgctggctttgcagcc

SEQ ID NO: 11088 - DNA, 201 bp, Bos taurus
tctccacttcccaccctacccccttcctttcctaggaaagaaagagctcagagctgtggtttggcagccccactgctttgagacggcacctgtggacagagtttttctgggggaatccagaatgcgtgcctgcattctggtgcctgcatctgtgatgtggtgcgggaaggagacaaatcgacacacacacacatgtgcccc

SEQ ID NO: 11089 - DNA, 201 bp, Bos taurus
ttgattcaatggatgttcttgatgtcgacatcggtggtggtattgacccaggaatttttcctgcacagagaatcagggatgaacgctgtcattctcccgagagaacaaatgtaccggagaatcacagatggtgacagacactaggctgaggcgactgactgggaggaatcatggagctgagagctgctccagggagcccat

SEQ ID NO: 11090 - DNA, 201 bp, Bos taurus
ggttgttgtgagtaataatgcaggaagcaatcagcaagtatactgccctagaagtgctgcacgttgtgggcccaggagggaagaaaggggcaagactctcaaaccatcatgggatgctgggacaggatgttggaggctttgccctgccatggcagctggtaagggctgctggggaagcaagctcttgggcccctggagctg

SEQ ID NO: 11091 - DNA, 201 bp, Bos taurus
acccagcctttcctgtctgaccttcacacatagaaaacgtggccaatcagaccagggcacagatcaacagaacacacagtgggccgtgcagcttcgctgcgttgcctgtctgtctgctgaatttccgctggttgggtcagagtgggcttggagagaggccagtgcgaaatgaaggggtgagtggggaactgagtctacaga

SEQ ID NO: 11092 - DNA, 201 bp, Bos taurus
cagatctgagctccttcaggaagagtgtacgatataaggaccactaagcatttcagtgtattaacaaaccaacaataggttgatgattcaccctggattcctgccagggtctgtgaaagaactcaataagcatgatatgcatttcaaaaactgctaatcataattaaaaattccccaaacccctcaatcctataaattata

SEQ ID NO: 11093 - DNA, 201 bp, Bos taurus
cctcccttggcctgaggcttctcgtgggccttccctctgcagaaggtgaaggaggaagccacatcccctcttaagagcaccaagcgccagcgggagaaggggacctcggatacagaagaggccgacaggaccagctccaagaagacaaaaacccaggttaggcttgaggctgaaccacattgactgcctccagcagctctt

SEQ ID NO: 11094 - DNA, 201 bp, Bos taurus
gtgagcgtgagagcaaaggagatgggaactctgacagacgcgccacctaccttcatcaagtctacaaaagaggaggcttgctaatgtcccccaaagcacctcacttggaggccactgcctcaacagtttcagtgaaaatgacaagtgctgctatacacacgacacgcacgatacgtacagattgagacattctagaaatgc

SEQ ID NO: 11095 - DNA, 201 bp, Bos taurus
ggctggggcctggcaggaagcttgtacctccctctcaatgcctggacagcaaactttggaaagacaggccattatgggcctcagcagctgttctgactccagcacagggcccaatgaaaacttctggttgagtaacccatgggatgttctcactgtctcccggccttgggcagagacctgctttgtttctggggaagaggc

SEQ ID NO: 11096 - DNA, 201 bp, Bos taurus
gctggctgctaagcttccctggtgcctcatttcctgtgaatgcagctcactcctgataacaaagccctcacgatgggccaggtctgcctttcatccacgctcccttgagtaccgccctcagacccccagctcagtcctcaggaccactcagcctgctctgcccacctgctctgcctaccctgttccagggcctggaacctt

SEQ ID NO: 11097 - DNA, 201 bp, Bos taurus
gttaattaatgaataataaaaaagggagaagatgactgcaaggatgaaagcctgggctcccaggtgcctagggggacatagccggcccccagggacatcagctcttgttgggagttgccaagggctgtcatctcgtcactctctcccacaggtagaggcctgggtgggtgtgggtgggggggcaataaaatctaaaatgcc

SEQ ID NO: 11098 - DNA, 201 bp, Bos taurus
gcaacttctgactctgatgataaccatccatttaaatgctcttctctgctaagtgttgtgacatgaacccccatagttctctctcccccttctctctgaactgtgtttatccaaggatcatttttaaagctgagaaggacatgagacttcgagccatcaccctgcacaaccacataaatagaagtagggaacaattggctg

SEQ ID NO: 11099 - DNA, 201 bp, Bos taurus
aattgtgtagctaacagagtgtgacttgattataagccactggtggccattaatagatgaaaggtgtttggatttcaatagtgtttggatttcataacccgccttcacagaagtagttgagcttagtcaccacctccatttgcaacacctgtgatcatgagtcccacatggcaagcaagcaccccagctttgagcttttag

SEQ ID NO: 11100 - DNA, 201 bp, Bos taurus
tgttgtgtgtgtttcaaagagcgagcttcaccggccctcttaaacaatagatacacatgaaatccaggctttcatgggtctaacccgacctaccacgcaggcaagagggcagacaggccagactgcggtcaaaatgccagttcccagcccagctggggccacgtgcgtgaaacaagaggcatatctgactccagcacctgc

SEQ ID NO: 11101 - DNA, 201 bp, Bos taurus
tggagggtctcagggtatggggacctgaatttgaccagacaaggcaatgccgaggtagcaggacctcagaagtcgggtgggggcctgtgaggatcaagtgcgtaagccaggctcacggtgaccctgcttggcaaggagtgggaccgctcaaccccacagtcctctgctggcctgggcggagctgggtgagccacagtagcc

SEQ ID NO: 11102 - DNA, 201 bp, Bos taurus
tgaaggcgcctggcagactatcgtccatggggttgcaaagagtcagacaggacttagcaactgaataacaacattaaccccaaactcccaggccatcccttccccaccctgcagggagttccataatcttggaccagaatcctggctcttggaatacaatgtcaaaggaaagtcacagaggccacagtcatcttcccagaa

SEQ ID NO: 11103 - DNA, 201 bp, Bos taurus
gctggtgtccagcagtgtggggctcacaggtaggggtgaggggactcaacctccccaagcatctgagccagaggatgtggtgccaagcagtggggggccagaccaaagatgaaggctcagagctagggaccaggggagaaactggacccagaaatccgactgcccctgtatggcctctgtccccagggatgtccacatgta

SEQ ID NO: 11104 - DNA, 201 bp, Bos taurus
ctcctcccacagtccttggccgtgagcccctcaaagtgatcagacgaccagcagatccgagcccaccctccttcagcgtggaccagaccagggtgaacccccggcctctggaaacaaaaccaccaactgagagaagtcagtccaaccctccgtcctgagccctttaaacacacgccacagagactggagtcagaggacaga

SEQ ID NO: 11105 - DNA, 201 bp, Bos taurus
ggtgtgtttctgtcatgcagtatggcctcctgaaaaaggctgtcatacataattcctagtctcaaaaggtgtggactttagcagaggagaggaaagtcccgcggggcatagcgtttgatggagtgctgtttctaaggcagcttatgtctctctttacagatgacagatattgtttgatgagcagtttttctcctctgtgtt

SEQ ID NO: 11106 - DNA, 201 bp, Bos taurus
ccacctgtctagggaccctgggtatgactcctggattggccacaggggggcgcacagctccttgtgagccactccccacctccacccctgcttgcctgagccaacctgagttacctggccacctacagtcagagaggggtgggtcaccaactggggcctacccacatcccaccctgatgagagcccacccacgcctccaac

SEQ ID NO: 11107 - DNA, 201 bp, Bos taurus
taggtggggtcttagcagagggggtgtgactttctctgactcccctgtttcagcatatttcattagaacaacagctggaatggagaggagccaggcctttaggttgaccagcttctcagatctcaggcaggaactgctctgctctgtctttgtccagcctccagggaggctgcttcctcagaggacggacattggtgtgct

SEQ ID NO: 11108 - DNA, 201 bp, Bos taurus
ccagcagagcctttgagctgagggtcttcccagctgggaggctgggttggccttccctggatgtgccctgcaggactgcagaggccaggctagaaccttggtgagaaggtcagcttgcctccagactgtcatccatccatccacctatgtctggggtcttggtggagtgccagcagcgggagacagaggccagggctggcg

SEQ ID NO: 11109 - DNA, 201 bp, Bos taurus
gggactgggttcctctccacccatcccagggagggagtctggcagggaagccccctacccgtgggctatgagcagggcaccactttaatggccaatactactcgacatgaagagcagcacttggttgcaaggttgagggtcccaggaaggtacctgcccacatttgagccctctgcccaggctgctagcccggccgtcttc

SEQ ID NO: 11110 - DNA, 201 bp, Bos taurus
gtggcatggatgccagtcctcggctgcagtgggggttggggaggtcagagtgtgggtcacagggtggtagttcccctggcattagtgggaggttctctaagcactgggccctcgtaacgctcttatttatttgaacacaaatggtgcaggtaatcccagaggccccagggacccggggaccagcagaatgcacgactggca

SEQ ID NO: 11111 - DNA, 201 bp, Bos taurus
tcttctcaaacctcccagctcccaccctcagagtcagctgctaacctggccttgttcttcatggaggaaaaaagaagccagcagactagaaccttcctgttgtcccactatgatctgtgacctggcctgtgcctccccttccccaaccgaggaccaggtgtcctggccctgatgggggcctgaatcctacacctctatcca

SEQ ID NO: 11112 - DNA, 201 bp, Bos taurus
atggacacacgtctctggaagattctttccacctgctggtcctgtcccaccacacagcaggcacaggaggagctagaagagtcacccttttaagaagagctggcctcccctcacttgggccctgaggtggatgatgagacttggtgcaggcttttagccctttgaccaatggacactggccacgtggggtgctttctgcag

SEQ ID NO: 11113 - DNA, 201 bp, Bos taurus
ggaggtagatgttggcttctgtgacttagctcaggcctgacagatcctggccttcatctttttatttcttctgcagtttttctttcattttccaatatccgagggttcagtttatggccataaatcttccactaattcctatttggaatgggattctggttcaaggcttctttctcatcttagctctgtgttcatttcctt

SEQ ID NO: 11114 - DNA, 201 bp, Bos taurus
tgggcagattcctggggaccgggatggtgcacaatggaaggttacggggcgcccggcggctacattgtgtgtgtctgtctcagactgattatctcattttgctgggccccacgctgccagaacacagagcgctgtttactgcctctgtactcgatcaatcacttactcatacggttgaagattatggctgctcatttgcta

SEQ ID NO: 11115 - DNA, 201 bp, Bos taurus
aggcaggtacttggtcacgaaattaagacattgtataagactgtcagttgtgtactttggaaatcagctccacagatttcccttcctcattttcccaaaggtatcatcggccatttagatggagagtctctcagaatttgacctctcaaacaagaagtccatcaacctctggttcccatctcccttccaagccttatttca

SEQ ID NO: 11116 - DNA, 201 bp, Bos taurus
ctctctggcctggcccaaggcccagggtaaacagatgctgaaatggacaggaagccccagagccatgaaggtgaggcttgtgcatgtcaagtatcgggacgtcaccctttcctgccaccaggcctctcacaccctttcctgccacttcccagcagttcccctgccctgtgccttcactcaccctgctcttcaaggtatcca

SEQ ID NO: 11117 - DNA, 201 bp, Bos taurus
gcaacagaactatttcctaaagcaaaatcccaggtagacctcactcagggatgcgttagatgaactgttttagtgaaccaccagagaggttcttttttcctgtaatatttattcacttttctctttatcaaaatatactaatctttcaatctagcaagttagtaataaagaaagatgtcggttcaaataacttgccggcaa

SEQ ID NO: 11118 - DNA, 201 bp, Bos taurus
attactttcatatacatctccgctatccatggccaatatccttagatctgagttttcacatccttagtttctcaatcaccatagagagtggcagcggcctcataattgccagaatgcaggcattgttctttctgggcatcctccaggctcagaaactcacttttggagggccaaaatagctgatggctgtgacatcctttt

SEQ ID NO: 11119 - DNA, 201 bp, Bos taurus
gtcggactgagcaactagcactctcactttttatcctgccctgccccctgtcccctccagaatctggagggtgacaccacttgcctcatgggatcaaaacacctcagtgaccttgtgccatcctcggtgtggcagaatagggagaaacggagcgagacaggtagatgtgtggcaaggttgtggtgaggcagttagatgagg

SEQ ID NO: 11120 - DNA, 201 bp, Bos taurus
gcaatatccacttttattcactcgtcccagtcaataggtacttcctgagtctaccacacataaacactataatttggatgcatttattatgatatacagcaatccctttattatattctttatttagttctctgaccaggggtcaaatctgtgacctctacagagaaattgcagagtcttaaaactgtaagagccccaggg

SEQ ID NO: 11121 - DNA, 201 bp, Bos taurus
tccgggtagaggtgtctgggggacagcagaagctcaggaaaggctgacattcaaatccgtgggcagtgagactgaacatcgtacagacaatggccagactgtggatgcaacagaactctgacctctgacccacaacttccagtccaggaagcccaccatgacctccatggcaataaggcccaaatggccaggacttgatca

SEQ ID NO: 11122 - DNA, 201 bp, Bos taurus
caagagtttgaatgaagtcagttgagagagacaaagaaatcagtcagttattatcagcagtaaaagctggaagaggagtgggctgttggccacagtgaggagccaccagctctacggggtgacggacccctcaccgatccccaccagcaccccaagcacagtgaacagaagcctcgggcacaccctgcggaccaggccctt

SEQ ID NO: 11123 - DNA, 201 bp, Bos taurus
cccaggaccctctgctcttctccgcctgtactcacttgcactcttcccaggacaccacgtccagcctcctctggaagcctcgccggccagcccgggcagagctccgtttacactggcagccaccgtcgggctctgtgtcatcgtccccactgctcagcactccccctgcatctgtcacttcacgtcctgggactggcacaa

SEQ ID NO: 11124 - DNA, 201 bp, Bos taurus
tgtcatgcctgagattggaggacagtgtgcaggtttcccaccacaaaacaagcctcccggcatggacagggcggtcggccacgctcagctcgaaccaggatgagctgatggtgcctgggggacacgtgaggagtctgacacctggaaccatggggcatgtgccctgagaggctcagcagcttccggccttctaggtgatgc

SEQ ID NO: 11125 - DNA, 201 bp, Bos taurus
gcgtggtcaacatctgggtgcccatggccgcctgcaggactggacatgggagcagaaaagccaattctctccctgggctgtgacctagaataggtgtgacccccagaggccacagtcctcagacttggggctcagtgggaggaggcagacacatcctaagagtgaaccccacagtgcccaggaccctgtggctggggcggc

SEQ ID NO: 11126 - DNA, 201 bp, Bos taurus
cacccgccccgtctctgcagagtgcctcccgggggtctttgaagttggctgcccgcacagctgcgggtgcctcaacggtggcctctgtgatccgcacaccgtccactgcctctgcccagccggctggaccggggacaagtgccagagctgtgagtgggtggctcggggacccatgggggaggccaggaggcccctcgggcc

SEQ ID NO: 11127 - DNA, 201 bp, Bos taurus
actaacatttatttatttttaaataaaaaatctggatccttcactattttattctgtatctcacagaagtgcagtcctggctggacctggcctcctggtgtttttttttttttttttttccccactgcccctcggctcccagacacatgaccatggaaccatgctctctgcaaggaaaggccaaaggaaggaccatctttc

SEQ ID NO: 11128 - DNA, 201 bp, Bos taurus
aggggagggtaaccgtccctgggaagagcccagtgactgcctggggctcagggtctcctgacattcaaggtcacctctcaggaggggcttcctgacttccagagtgggggccactctggggaggagagctttcggagctggctcatgaacctcaccactccactccgcctctctgcacacactagggctgcctctccgcta

SEQ ID NO: 11129 - DNA, 201 bp, Bos taurus
agccccaaggactgtacctgaggccacacggtgctctcccctcccctcctgggggcgggattcgcaggtgactcctgtcttggagaaagtcaccagcagaacacagagcaagacacatgtatggggccgagtgaaggcaacacaagaccccgagctgtgcctttaatgacattgtttggtatgggagttgcatctcagtaa

SEQ ID NO: 11130 - DNA, 201 bp, Bos taurus
caactcggagctgtctccgtggcagctaaacacactttgatttcataaagacataactgatcccacatgcaaattattaattgtgagcccaggccacttagggcttgggacttcgctggaatttttttcaggaagaacttgcataaatagcgattgaattctagcacctgggtggctcctaggtgttgcggcctggggtcg

SEQ ID NO: 11131 - DNA, 201 bp, Bos taurus
cccacacctctgtgcaggccaccccttggacgtttacatgcctggtccggtgggaggtgagctcagactctctacggggactgcacaccatcactccctgggttgaacctctgggcaccactggcccacttgtggcttcccagctggtcacaatccgagcggcaaattacagccatcacaattttacaattacaaccagag

SEQ ID NO: 11132 - DNA, 201 bp, Bos taurus
ggcccggctggacatcaggggccaaaacagacccccagcacctgtgctactcagcttgaaaataaaatcatgaactaaggaccatatgggctttattttctggctgagctggatggccagaaccaaagcaccgacatggacgctttgtcatggccccacacagcccccacggaggaggcaggcagagagggccagcaaagt

SEQ ID NO: 11133 - DNA, 201 bp, Bos taurus
ccgcttccctggggccttagaaacaaatgtctcagggactcagaggtttttctggttaagcgccttaccgcccacatgcacaggccgcagccaatattttcaggtctttatagagtcttccttccactttctgattgatgctcctgttggatgagttttatgtgaagcgttctccaagcccccgtgagataaaaggcctgc

SEQ ID NO: 11134 - DNA, 201 bp, Bos taurus
atgcctgtgtgacccagattggcggtgggaggtcccaccttcctgagcggctctgtgctaggaggggcagcagttggagtgagggccagaggtccctgacccctcaggttgcccgattcctccccatgtggatactcagaagtcagatgtccattgagtgttgatcactgagcggggtcatggccccctctgcagaggagg

SEQ ID NO: 11135 - DNA, 201 bp, Bos taurus
tgtttttcaaaagttatagataagcctttttcataaaagcaactttttaaaataaaatatacagtagcaaatacagtcccaggcctatactcctgcccatcctggaattatgctcctcagaagctgtcatattcattgtctagtgcagaggttggatacctctggcccattgcttgttttcctaaataaggttttattgga

SEQ ID NO: 11136 - DNA, 201 bp, Bos taurus
cgaatgtggacatgctggttcaggacatctatggaggggcccacgagaccctggggctaagcggcaacctcatcgccagcagcttcgggaagtctgccactgcggaccaaggtactggccctgcgcctgctctcgctcaccgcggtgcacagcgcccacccggctgcctgcccagcgcactgcttccgtcccccagagttc

SEQ ID NO: 11137 - DNA, 201 bp, Bos taurus
tagaaaatgtaagtgaccccagcctagaagtcacaaactggaccaagaggtggctgaatcctgtgatgcagggaggcagggcctgagcaaaggtgcttcttgcctcagtcctcaagcgagaaccaagtgcctgtaaacatgatgctggcatgggaggtgtgagccccatcccgagaccccagcaggcccctggctctttgg

SEQ ID NO: 11138 - DNA, 201 bp, Bos taurus
gcccactgcctgccggccacaaagggcagcactccctagcagctgccccagcacactccatgtcaaagatccaggtccttgggggccccctaagcagtgacgcacaggctctggaccctggtctctccttcgtggcacctcccagccggatcaggcttcctgaaagcccccaactgcccctttctactgcagtggaggagg

SEQ ID NO: 11139 - DNA, 201 bp, Bos taurus
gggcctgcgcttccagggctgtgggggaggaagtggtcagtcagctgccgggtcagcagggtcatcacaacaaaactcaagggacggaaccaactgggtgcaaggccgccagggcaacagagcccacacttctgggtgaatgcacgggccactcccaaccccacagccaaggctccctaactccactccaggaaacgcgga

SEQ ID NO: 11140 - DNA, 201 bp, Bos taurus
gccctgacagcagcgtctctgtctgagcatttggactcatggcctggctggcgggcttggcaaggagcctggacagcatgaggatcttccctgcagagcatgtgtttgacggtgctgtgcgggcctgcagggggacccaggtctccaggataggagaccttgcttcccaggaggaagctgggccatcaccatctgcagcca

SEQ ID NO: 11141 - DNA, 201 bp, Bos taurus
gggccaaacaaacggccagctgttctgccctgccacctgacccaccccctgaactgccttctctcatgtgcccagctgacgtcctcctgcccagaatcacccagggccacacatgcttctgtgcaccaaggcccagtgaattatcacacaaaccaatcccaaactgtttccctgccctgccctgccattcctgccggaacc

SEQ ID NO: 11142 - DNA, 201 bp, Bos taurus
tgcacaccttcatgcaatgcaaaatttgcccctcatccacacagcacacatcgggtgtacccccacatacacgcgtgtggttgggcccctccagacgcttcccttgccctgcgaggaagaccgggaacgaagtccacagagaatatgaagtcccacctactggcctccctctgatccctttcgctctgtaggggaggggcc

SEQ ID NO: 11143 - DNA, 201 bp, Bos taurus
aggggaagaaaagagaaagggggttggtattcacaaggctgcgtgtcaaagcggctgccgagccttctctcctagaagaagtcaggactccttcccctgctcacctttggtcagcttctggccatttccgggcacttggagccgcgcctgcttgggaaagtgtcagaacaaggccgcctttctcaccgcccatctaagcta

SEQ ID NO: 11144 - DNA, 201 bp, Bos taurus
ggaaagcaccgcattggagcagttgagtatgaagtctgagctctgaggctttttctcttgggcaagtaacttcttattgttttcacatgtgaaacaggagggatacagtgaggactgaaagggataatgtctgggctgtgcttagcacaggatctgatggctggcaaggatgctataacaagtttgcaattattaactatt

SEQ ID NO: 11145 - DNA, 201 bp, Bos taurus
tgctggccaccttcctggacagtttccattcatagctgagatgactgtgtccaaatgcaagccaattccatcagttccttacttaaaaccttttatggacttctttctgctccctggccaaagcagagcttcctaccagggacctgcaagtccctgggccccccgtggtatagcccccactgacctctctcattgttcctt

SEQ ID NO: 11146 - DNA, 201 bp, Bos taurus
tcccctggaggaggaaatggcaacccactccagtcttcttgcctgggaactcccacggacagaggagcctggcaggaggccatggagttgcaaagagtcgacataacttacaactaaacagcacttccactgccggggctcaggttcagcctctggtcagggaactaagctcagtggctcggcccctccaaaaaagtcatc

SEQ ID NO: 11147 - DNA, 201 bp, Bos taurus
ctgagatgcaaaacgatttcttgggggcctcagagtgtgcagctcagctgtctttcctctctgccctctgatctgtaagtgccaatcaggacccagctcagggtgggaaaaggggccgggcttttcagggatgcgccagactcagatggctgaggtgagatgtcacccgtagggcatagctcacctctaagcataggtcac

SEQ ID NO: 11148 - DNA, 201 bp, Bos taurus
gcatcctcggcctatgtcattctttcaaaggttgtaccctgactgcttccctcctgtttcagtccttccccacagacttcacctccagacttcctaattacagtgtgaaaggccaccattctcccagtgacttgggctggaaatttcagtgtccttgagccttctctcccctcctcaccccatttccaacccacacacata

SEQ ID NO: 11149 - DNA, 201 bp, Bos taurus
aggtcactgagggtagggagcactatggagcccccactgaggagatgtggcaacttctctaatgccagaagaatgggcctttcttgaggtgtccatgtgtccacagggtaagacgtggcagccatatttgtcctcaatgacaccatccttaggccatagctgattggatcctaggtgaacatctgacccaagccatccagt

SEQ ID NO: 11150 - DNA, 201 bp, Bos taurus
agtatttaagtgccaatctgttctctgcagccaaaggatatagcagctaggtggaatgaaaatctgtattcatatagggccattctgagcatctcttttatgcagatgcatcacaagaggagtgactagttaacattctctgatgtccttatcagggttcggccacatatttcctgaactgcctttgaaaacagggcttcc

SEQ ID NO: 11151 - DNA, 201 bp, Bos taurus
gcctggtccaccactcagtgatcaagatgagtgatctgagatgagtaccacacagaatctggctcagctacccatcacatcttagaatctagctccttcttacggcagggccctcaacttttgtcttttcccctctctgtggcacctcttcctggcttccatttagccaggtccttctctttcttccacaggtcctctttg

SEQ ID NO: 11152 - DNA, 201 bp, Bos taurus
atcgatttgtgtatgtgttagtatctgtcttcttcccccagggccagctgtatggatatgtaacctgtgtagtcacacagggccccgtgtttggcagggtctaatgcttggtttaacactctatggttacccgccttgaatttctgcttttgaataagggatcccctattttcatttttcactgggcctacaaatgatgtc

SEQ ID NO: 11153 - DNA, 201 bp, Bos taurus
tctttgttctcagaagcttttacaaagcccttcccaatagacagggccctcaaggagacattcctggcctctttggccctcgttttaagacaaaaaaaaagattaaggagagagaaaagtctagtgactcaaaaatatatttttttctgtcagcacacacatactattggccagaagtagtaaaatataattatcataata

SEQ ID NO: 11154 - DNA, 201 bp, Bos taurus
ttggttcctccgcccatcataatacctgtttatacattcttttattcaacaagcctttgttaatcatcacaacctaggtattatgctaagtattaaggatactaaaatgagttaaaagtcatagctcctatattcaaggagcttgcaatccaagagagataaaaatgttatcaattcagttgataagtattatggtaagtg

SEQ ID NO: 11155 - DNA, 201 bp, Bos taurus
cctgtgaaaaccattgccattgtaagttggaggtctatgactgaagagagcctctcagaccccagtttctcctttagccaccagacccaaaggattattactattggcacatttgatgagtcattagaataattccatctccttgttagcaccgatggcagtgcctgactcataaaaggtgctgggtgaatatctgttgaa

SEQ ID NO: 11156 - DNA, 201 bp, Bos taurus
ttgtctcaccgccctggcattctttttgctccctgggaaagttgatctttaacaagggatgttcacttgtccctctcattactttggctgaaggctttgcggatgaactgctgagtgtccagccagcatttgacatccttttctcttgaatggtgaaattcaaatcatgtgttgctgtctttcctctccaatcattttctt

SEQ ID NO: 11157 - DNA, 201 bp, Bos taurus
tatatataatagtttgcatctaccaatcccaaactcccaatccttccctccatcacactccttgccttcagcaactataagtctgctggttctctaaattcgtgactgtttctgttttgtgaaaaattgaaattgagttgctcagtcctgtccaattctttgcaagaccatggactatacagtgcgtggaattctccaggc

SEQ ID NO: 11158 - DNA, 201 bp, Bos taurus
ttcactgttgctgccactgcaggtatctgctttgtgcacaaagatctcagtgtcatctctaggagacataaggccatgtctcctgatcttgtaaggccatcaaaaactaagcacatgggttactgagacctacaaaccctttctagtttacattttacccttgagttttggccctgggaattgcccctcttttcttgcaaa

SEQ ID NO: 11159 - DNA, 201 bp, Bos taurus
attcatgcaaatttgtcatcctactccatagtatgtttatttcaatatacattttaaataacctaatagtaaaatgagttaatgtctccctttgaaagattgtcaaataaaattgaaaccctaggaaaatgcccatgatcaacctgggctctatacacccacaccagagacctacagatccatgggaatacacactccaga

SEQ ID NO: 11160 - DNA, 201 bp, Bos taurus
ttgagtatatagaagtccacatccaaagcagccataaatataattaaaggtgaaaaataacaataaagtgaaaaacttgatgttcttagaagagggtagacgacttggtgcatctaaataaacaaaggccaaaaaaaattactttgttaccattttgaagtattagaaattaggttgatgatctgccaattaatatgaact

SEQ ID NO: 11161 - DNA, 201 bp, Bos taurus
tcatttgctgattgaatgaggtatgtatgcatcccctatacaggccttggagaagagtaagacaaatacctttccttacatggggtaagagggggacaggtcacgctactcaagagggctcaaaaattccacaacagttacaacatgctgggaagggtgataagggtctggttttttctgttcctacattccaacaccttt

SEQ ID NO: 11162 - DNA, 201 bp, Bos taurus
atcacattgaggtggaccagccctttggtttttatctgtaagttttcttaattgtttctcatgcttatacatcatttattgggagctcagaaatgtcacatgagggacttgcctggtgattcagtgttaagactgcactcccaaagcagggggcctaggtttgatctctggtcagaaaactagatcccacatgcccaaact

SEQ ID NO: 11163 - DNA, 201 bp, Bos taurus
ctctgagtagtctaggtaagtgtataagttagtctgagttattcatctggattgttctttaaatagtgacacaaaatttacattattttaaatagctaatatttaattttgatcttagcctccacagcatagcaaatataaaacatacatgtgtcgagacatgaagcagagaggaggatgccctcggggggccagctgtac

SEQ ID NO: 11164 - DNA, 201 bp, Bos taurus
cttaaatctttgtgaaaaggagctaaaaaaaaaaaattttacttctatctctacaatgctataagtaaaaaaaaaaaaaaaagtaactcaatccctgtgcctatcctctggtctctattttcttctccctcacctctgagttttcaaattatcactttatcccaaccactattagtgtatcaacaatcttcttatgaaatt

SEQ ID NO: 11165 - DNA, 201 bp, Bos taurus
tagttcatagaagctagttcatttagcagttgatgtggtgcttctcattttacttgtaagtttcattatgtttacatgctagtcatggtggaactttattattatgtgccattgagaatttatttttctagatagagaactttggtaatttttatacttgtgaaaatttcatttggaagaggagcatgatagtagatttta

SEQ ID NO: 11166 - DNA, 201 bp, Bos taurus
atgaatgcacatgaaattaatccatatcaaccagttcttttagggccttaccaaactttctttagacagtctttgactaaccccattttcctgtttgtggggcatggtggagtggaattagctgtccctctgacgttttgcatacatttatcttgtaatggttatcattttttcttttatacttaaatgtttatactgtca

SEQ ID NO: 11167 - DNA, 201 bp, Bos taurus
ggccatctagaattgctttaggaaatgtgcagcctctttgaaggattccactgtgctaatggcttgcacattcaagatgagggatcagtgcaattgtggtggacaggccagggataagaacaagtggcagcttgatgtgaactagcacttaggttaaaatctgtgaatgtttataatatttctttcctctcatctttttct

SEQ ID NO: 11168 - DNA, 201 bp, Bos taurus
caataaaactggggaaaatttaatgatataaacttacattatataacattaaaaacagaaaagttgtaaatactggaaatgaattaataattattttgccatattctactgttgcttagactcttgagtctgtttattgtctgttttgtctgatggaaatgacatgtaatgatgtgcttctcaattccaatttatttatat

SEQ ID NO: 11169 - DNA, 201 bp, Bos taurus
tttgaaaataactttctcactagaggaaaactataaagaacagttgtattaaaagcaatttacctctaatttcttcatgccgtttgctatttctttctggtgattgttgctgtgtataaacaagaatgtaatctcccaaatagaagctttttctgaattagcaatgaggccccacagaggcttttcttgactccatgaatc

SEQ ID NO: 11170 - DNA, 201 bp, Bos taurus
caggtgcattttttccatcacattaggccataggtggcctccatatgcagcacttttcaaagagcagtcctcgggatgattcttgaatattatctggcaaacacttcaagcaacaggcccatctctttgaaaataattatacatataatccaaatgcattctgtagttggaattggctacctgttggctatatttcagaag

SEQ ID NO: 11171 - DNA, 201 bp, Bos taurus
agtaggtatttctagcttatactacagattgcttagtatttgttgaatgaatgaagggatgagtaaacatattctctaaggagttagtcttctggatcctgggcctctctgtagcttcaattcagaacatgaagagtgaactgacaactgtgcctgcagatacccctgggaccaccttgtcactgttcctgcattttacat

SEQ ID NO: 11172 - DNA, 201 bp, Bos taurus
gacaacctattttatagtgttcactgtctccgaggacaagctttagtgagcaccatgtttgcttcttatagtattaaaatagacaatgaaatctgcttctcagaagatcatttcaccaagtccctgttgctctgtggggaaaatttgtttcctcatttatattcatgtctctaaaagacaagtagaccttggatgaaattt

SEQ ID NO: 11173 - DNA, 201 bp, Bos taurus
gctttcagtggaacaattttcctaacggagtgactctgctgccaccacccttctccagaaaagaccccaaagacacttaaattggccaaaggtgagccagtggaagcagctgagctgcccttgtctgtccaaatccctccagcacgaggcaggcagtcacaccccatcgtctggacattcacacagagaccggtgcgggtg

SEQ ID NO: 11174 - DNA, 201 bp, Bos taurus
acagagcgagaagagttcaaggtccaggggcccagcctggagtaagggttgatgatgggtgccctggcgaggcaaagaaacttgcaaaaatgcctgagggacagatggccaaccagcttttcagaacaggaaatatctactgtttcatttgaagatgtgaatgctgccgtgtaaataagcaccttccaaatcgacatcgaa

SEQ ID NO: 11175 - DNA, 201 bp, Bos taurus
ttgctgtaaagctgtcaggtggagctacagtcaattgcaggctagactggggctggagggtccacttccaaaatggtgcactcacatcatgctagttattggtaggaggcctcagatcatcccccattgggcttccatttccatgggctacttgagtgttcttggaatacaggggctggcttcaatcagaatgaggactcc

SEQ ID NO: 11176 - DNA, 201 bp, Bos taurus
acaataagcagatattccatcatggaaagcattttattggaccactccagagcagacataaaatttcttttattcctatcttttcagcatcttgggacttagatttgtttgcacccaatctataaatccccattatggatcacagccttcttgtggtgaaagggcttgcataactcagtaaagctatgaaccatgctgtga

SEQ ID NO: 11177 - DNA, 201 bp, Bos taurus
cagaataataaaattataaaatcttagtggtcttacatctatccgtataacaaactatgttcagtgccctctgtatagcacaagtctaatagagaccctggtcccttcatatgtgcagcctctttaccttatagaaattgctgtatcagttctcgagcttttcttacatgcatctagcagtaaagattgcaccttgaaaga

SEQ ID NO: 11178 - DNA, 201 bp, Bos taurus
atggagatttcttcatttcataaaatttacaaggtgacctcactcttctgaaaaaagaactacataagctcatgatatttataaccttacttgtatgatggtggaataatgctagaaatcaactggactttaagcaatatccagagagataggtgtccgggcaccagaaggaagtcaaactctgctgaaaactcctcccac

SEQ ID NO: 11179 - DNA, 201 bp, Bos taurus
gaactcataattgcagtcggtgaggcccagggttttctgcatttccacaggtacctgttccaggggtggctcttggccagtcaacaagtctgtatgcaggctcaccttcctgtcaccaggattataggaactcatgcattcctcatacttggtctgtggtttcccatcttctaatttgctgagcctggccatcattcacag

SEQ ID NO: 11180 - DNA, 201 bp, Bos taurus
attgatactcaggctcacgcaactcagtccacctcacggctgggagtgttcataaagtggccatgacctggcaggacccatccagccctttggccaagctcccattcttcttcaacaggctgtgtggactgggctgcaataaggggggtggggtgagagctttgaatccatgatgtgacttctagaaaagcaggccctcat

SEQ ID NO: 11181 - DNA, 201 bp, Bos taurus
atacagaggtgaacagaagtgaggatggtgaagttctgcatcatgagtttatactaatgaatatatagtcatcacagttgatgcgagtgctctgaagaaacgagtgtggcccttgggtgtatatggttaaagagagcctgtctgagaaggtgaggtctaagccctgggggagatctttccatacaaatctgatcctatctc

SEQ ID NO: 11182 - DNA, 201 bp, Bos taurus
agtaactgctattcaagcagcatcactgtgctctgacggtgaattctaaggacaagatcacccgctacaaacttcggtggccttggtcaagaagccgaaaacacagtgccttctggatggctccgtttcacagcggagcctgctctctgggatccccagtttatatttctgtggggcctttctcagaaaagcacagagagt

SEQ ID NO: 11183 - DNA, 201 bp, Bos taurus
aaaacaataatcattttgctcactcagcgcctgtaggttggctgagttatctatactacaggttgtgcgtctgcacaagggccattaggtctttcctccagtgatgcttattatgggtctcaggctaaaaggcagtatcttatagctacattttttgttgttcagttgctaagttgtgtctgactttacggcccgatggac

SEQ ID NO: 11184 - DNA, 201 bp, Bos taurus
ggcccagatttcctccctgtgaatgggaggaggccatgaggtactccacgggacactcaggttggttcctgactcagccacgtcactggcctgtgacctccagcaggttatatcaccaccccaagtctcagtcgttttcttttgttgtatatgcaaatagacctaatacctaccaaagagatccatttcaagctaaggtaa

SEQ ID NO: 11185 - DNA, 201 bp, Bos taurus
agcacgcacatatgactcatggggggaaaatattttaaatctggtgaatatggaagtccaagccatcctccatgaggccctctttattctgctgctaccagtcacttcatgcagcctttcagctgttgacttttttgggtgtagtcaggtaggcccctgagtgcaccaagcttcagggaatacatatcaagtttcttgggt

SEQ ID NO: 11186 - DNA, 201 bp, Bos taurus
tgtttcactccctgcaacagaagtaacaccctttctaggtggctccagacagaggattctctctgaacttttgaagagctcattatgttagctgtttcttctagtaaatcacatacattcctcaagaccccacaaatctaaacaagctcttctcagcttcatcccaaactcatattttcagtgacagatgacaagtgcaat

SEQ ID NO: 11187 - DNA, 201 bp, Bos taurus
tcccgtcacctatccttgccagtccttctgggcatggtctctcagcaaggatccaggccctcaggtgaagaggtggcctcctcggccatttaacatctatggcaatgttatcaaccaccctgtcctagcctttgccaagaagctggagccccagccaatacccagcctgtggccagagagagcgggtgaagagaccagtcc

SEQ ID NO: 11188 - DNA, 201 bp, Bos taurus
ggaagacaggggccaaaggacagagcagggaggaattccagagttaaagatggaggcatccaagagagatgggagcggcaggtcagaggagagtaggaacagtgagcagccgggggccgctccgggcaggatggccgtggagccgaggagaagatggagctgtttggagacagaagagcagaaggagctgcagacaggcgt

SEQ ID NO: 11189 - DNA, 201 bp, Bos taurus
ctatagcatgggggaaaaaaaagaaaccatttgtctttaaataagacctttgcataaaaaagaaatgcgtaaggttaccttgaatggtgtctatttctccgtctccaacacaggaatgagaataaaaaacaatgtctgtggtgcagcttccagctcccttgcgattagtaatgttatagtacattattgtgttttgttgaa

SEQ ID NO: 11190 - DNA, 201 bp, Bos taurus
catcacaaggacacgctctggctcatggggagcacaagtagctgcagctacgcagagccttgaggtttatttcgtaagtcaccaccaggccgtctcagaatggcatttggaagacagaaaaaatgaaagtgttcccactcggatttgttccttgttttaacaccaagcaaaggactgggggacgatcctgggccagacttg

SEQ ID NO: 11191 - DNA, 201 bp, Bos taurus
ggatcttcctgacccagagatcaaacccaggcctcctgcattgtaggcagattctttaccagtcgagccaccagggaagccctggtgactatctgggaacgaacgattacaactcaggccacccactctgagtatcacacgatagaaggagacccctagcagtgtgggcaagctgacaggtagcagagaacaagcgtgggc

SEQ ID NO: 11192 - DNA, 201 bp, Bos taurus
tttccctcagccacaaggctcaatatctcgattctcaagctctacttggaagcactttcttgtcaaagctttatttccacctcaaatgctcccactcttcgtagaaggcctctggttcttactactactactaagtcacttcagtcgtgtccgactctgtgcgaccccatagacagcagcccaccaggatcccccgtccct

SEQ ID NO: 11193 - DNA, 201 bp, Bos taurus
agtttttttttatttgtctttatataattttatttagttgcttttggctgtgctggatcttcgctgctgcttgaaggctttctctagtcgcagtgagtggcggccacactctggttgcggtgtgcagtggcttctcactcactgcagtggcttctcttgttgcagagcatgggctccagttttgtgaacttcagtagttgt

SEQ ID NO: 11194 - DNA, 201 bp, Bos taurus
taaaatatcatggtttcatttaaaagaataagaattacttacctatgctgcttcaattgttctgaatttaagccatcctagtatgagatcaacactgttcctaacttgaagcttcacccttgacagaaatatgtgtaggacacaaaaaggcaggaatgctttcattaatcattaaggggggttccctgaaactcattgtca

SEQ ID NO: 11195 - DNA, 201 bp, Bos taurus
tgtgcgggctgtgggcccctccaggcagacaccacttctctttggtggcctcctccgtcttctcacgtccgtcagttacagggcctctcagttgtgcctcctacactaactttaaacccttctccattgcctttatcctctctaaacatgcactatggcccaaagctccctgactagttttctcttcaatccaaccactgt

SEQ ID NO: 11196 - DNA, 201 bp, Bos taurus
aagttacaaagttcttttggtttaggactgatagtaataaatacatacatatacacatatttgttcaaataatctataaaaacatactcagaattcaatccctatgatttcattgctaaactctccagcttaaaacaagatatcaataaaattacaaaatcactgaaaaattttaatgataatcttagttaataaagctct

SEQ ID NO: 11197 - DNA, 201 bp, Bos taurus
acatctttaccatgtctgatctttacgtctccgttatccatgatttcacttctgattcaaagtgcctttattcatccagttagatattaagtgttctgaggtcctcaaatctcctttgatgcaactcctttccacaatatcaaacacggcaggtttgccagcaaattgagatatttctcagtcacttgaaagtttaaattt

SEQ ID NO: 11198 - DNA, 201 bp, Bos taurus
aacacatggaatcatatcactttattaggcatccctacctggtcatcaccagtacctgcacatgcaaactattatatgtgaaatactacttttgtttagcatatgaagattcctccaccatggattcttaagatcctgcctagacttaggcaagggcttcccagtggtcaagaatctgcctgtcaatgcaggagatgcatg

SEQ ID NO: 11199 - DNA, 201 bp, Bos taurus
gcataaatgtgttagtctttagtctacttggaaccttgaaaaagttcattgttctttgtgatctcatcacttagttacaaaatgaagaaatgtccctcccgtatactgcctttgggggtgttcagtaattcagttctgtgaacaacacttacttggtcccttggtctgtcgtgtactacgttaggagctgagattttggag

SEQ ID NO: 11200 - DNA, 201 bp, Bos taurus
agaccaggctttctgtgctgtttggccatggtgggccacaaggcccatgggtacccagacaaaatcattgtgccctgggtggacagaagacatcgggagcgaagattgtaatcgatgggccctttgcaagcagccagggctttggaggggcttccctggtgactcagatggtaaagaatccgcctgcagtgcaggagaccc

SEQ ID NO: 11201 - DNA, 201 bp, Bos taurus
gtgacagatgttacaaccaacagctttcacatctggcctccaagatacttcagtgggtcaaagaggcacttggactcttgcctcagagcactggcagcaagtttctgggaaggaaaaggccccctgatttctctttctttgcatttgatataaagcaggaaccgatgccttagaaagaattcataggatcactgtttctca

SEQ ID NO: 11202 - DNA, 201 bp, Bos taurus
tccttgctcctgggtggcctggtctatggcgctccctgtcccctgcttcaccgcttggaggttgcagagcaggtcccggccttgctcccacagcccctgggtcacccaataaggatgtgccgggctcaggctttcttggctttcttcatccctttgaggggcataggcctgggcaagaagcttggaagaatctggaaggag

SEQ ID NO: 11203 - DNA, 201 bp, Bos taurus
cctgcacgcagtaggggctcagtgataggatgaagcaggtgctgactggcaagttcctcggaggcctctccctcggccagtgtgctgctctgcccccgtcgccgtcatccttcggggcgaattcacagttttaccttgtttccatccagggagttttaactatggccatctcattactgcctgctgcagaacaagccgcat

SEQ ID NO: 11204 - DNA, 201 bp, Bos taurus
tcgaatatcagagtggcagagacgaactgctcccacttctgcactgacccctctgtgaggtcttctctggacccttcattgctctctgcaccacagggaaaggccagcagagtaatacctgtggccatgtggagcattctcatttgacgtgattgaggggaaaacccaaaacataaaagaaagttggtgctggaaaggagt

SEQ ID NO: 11205 - DNA, 201 bp, Bos taurus
tttgaaatatgcatcaggcaggaggccgttgtggagattgccttgaggtcagggctttcagttccttggttgctgagtctgaggtttctgccaaaggccacgaaatatcccttcattaactggttcttggcggcaaatataattaagagcttgccatagacccgaatgttgtaaaacgaaaggtgtctcctgtggtgtgaa

SEQ ID NO: 11206 - DNA, 201 bp, Bos taurus
gtcatttaggggaatccatcttcaagtcttccatatatactaattcctgaaattgatttgcctcagtaattgccaggcagttgtccaagagtcccctttcgaatggcctttctctgattttataaaagaaaggcttgtttcttattaaatctagattgactctctggctcccaaacaaagaaatactctgaaatactcaaa

SEQ ID NO: 11207 - DNA, 201 bp, Bos taurus
tcggttcacatactattgaagcctagtttggagaattttgagcattactttgccagcatataagatgacatagcaggaaagaagtaacaggtctctaaaatccaagcccctgtctccagtcagaacctgaccatgacgatggtcaaagactagttccgtattcatggctccttctaaagagaaaaactccctgcagcttgc

SEQ ID NO: 11208 - DNA, 201 bp, Bos taurus
tggattcgggcccaccctaatccagcatggtgacagcttaacttgatcacatctgccaggaccctattaccaaataaggtcacattctgaggttgctggtagacatgaatttgggggtgggggccctacccagctcggtgcagcatgcggacgggcaaccctggaccagtggctttatgtcctccgacttgcctctctcct

SEQ ID NO: 11209 - DNA, 201 bp, Bos taurus
gatcacctctctggggtcctgtgaggggttttcgtttatatcccacaagcatttaatatgtctactactctgtgtcaggctctggagatactgtaagacacggcacaagcttggcccccaagtagcttttgtctaatgggagaagccatgaaattaaaagacacttactccttggaaggaaagttatgaccaacctagaca

SEQ ID NO: 11210 - DNA, 201 bp, Bos taurus
atcaatgacccagtctcgatggtgttctggctctggcccatcctcttgaacgctgattgttcaccttgccttaacactcacgtatggccagcagtcgctcatttccagttctgacctcttgcttccatccctgagcacggttcagactcatgagatggactgaacttgttcattctggccttgtccagaaatgtacaccct

SEQ ID NO: 11211 - DNA, 201 bp, Bos taurus
ttaggaaaccagtttccaatctgagttatctgattttttacatttccatttgtggtctctttaagaggacagtggaactagggacacaggaaggagaatgtccaccaagttcccttacaaagagcattatggcagtgacctaatctcaggttttttttttccctaaggatcctcccagatcttgagggcagtagttgtgtt

SEQ ID NO: 11212 - DNA, 201 bp, Bos taurus
ttggcttgatgtgtcttggttatcccttggtgaatcattttctcatctcaggaccagtggtccttttccctcaaagacttggccctttctcctaggagagggtacacagcctgccctgtcagggggtgctaagtgagggctctgttcatcattctctttctttccttccaggcctacagattgtgttgaaatccatcatga

SEQ ID NO: 11213 - DNA, 201 bp, Bos taurus
tcgttgcactttccagtctccctgactgcatcttaagctgcctgaggtccaggagtgcccctataacagtttcctcacccagcctcgtgctttgggcctgggcagtgctcagtgagaccagagttgcctggagtgtatgtggcttccggggagcgtgtggagctgtgttcccagggcccgtcccagccggcagggcggtgg

SEQ ID NO: 11214 - DNA, 201 bp, Bos taurus
tcactcagtgcaatttaacagacaccctgaccttcacaggcaccttgctgggcagttacctagctccctctcccaccttctcgtcccatccccagtggaaagtgaagggcaccattctgcatgtagcaaggtttctcaagagttccacatgttcttcttatagtcagcaacaagactgatggagaagccagtcccttgaaa

SEQ ID NO: 11215 - DNA, 201 bp, Bos taurus
ctctgacacccacgtgcagagtcaggaccactcagagaagactggggaggccagttttgccaactgttttccgggcacccatctggggaacttctataccctcctgcctgggaacagagggtgggcctggggaggctcggagagatggtcctctctggccagccagctggagacagggttaaaaatgaaagacaccattca

SEQ ID NO: 11216 - DNA, 201 bp, Bos taurus
actggctggtgtggcacacggacacacgaatctgtagtttccaatgagtgagccagcacgttagttaagatggtgtgtcagtttctttttgctgctgcaacaaattatgcaaacaagtggcctgaaaccatgcaaatttattctcttatagatctggaggtcaaaagtccaaaatcactttcacaggactgaagtcaagac

SEQ ID NO: 11217 - DNA, 201 bp, Bos taurus
gtggatggggtcaaagtggagaaagaaagagaataggaaggttgtctgaaaatcatctagggagctttgcaggaagtacgggaacatcgtaatagagaaggcaagaaaccatatatatatatgctgaagtgctctccaaatgatcctgacatccctccatcactcattcctgagtatcaacagactttagaaaaaagagca

SEQ ID NO: 11218 - DNA, 201 bp, Bos taurus
tggcccaagatctatgctaagaaaattacttctttaaaatttgacttccagaaaagtttaatgtatgtgtactatatttgtaattcatgcttcttggaagttgaatttgtggttattccactgagtttatatgaacataattccctggttgtatttactatgctcatgagatttagtgatttattattaaacttcttagag

SEQ ID NO: 11219 - DNA, 201 bp, Bos taurus
attaggtaaaaagtcaccagcatggtatcagaactttcttcaagtcaatcctgggatattctgggtgggaggaaagggtccatgctggccatgggccaatcaacaatcaacaggaggtcttgttgatgctcctggttcatccccaggacaacttgctggagtgtatggaactgcccaggagtgaggatgcatggaattggg

SEQ ID NO: 11220 - DNA, 201 bp, Bos taurus
gacttgagatatctaaaaccaaattcacatgtgatccagggctctcaacactacaaggacatgtagtgacagcccctgggtgtgttgctgaacatgttacatgcaaaacacacacctgttaggtgccctttgaaggcgagctctgacacatttacttactcctttgaatccttaaattcagaccataggaaaggtcacccc

SEQ ID NO: 11221 - DNA, 201 bp, Bos taurus
tgggttgggtttttttttttttgaaagggttttcccagcatgctcctaactagtaggcctctaaaaattgtacagaaatggcaggcccctgaatctaagtagggtttatttttccactctctggagtgcccgtgggctagccatcagttgctcatctggcctgattaacataatatcatcaatatcaatatgatagatcag

SEQ ID NO: 11222 - DNA, 201 bp, Bos taurus
caatatataaatactagagaataagtggcataaaaaattcaaagtgtggctggggacacatcagaatgcatatggcgggcagatcagacagtgtggcctcaagcacatgataaaaagacattgtctgtaatggatattgaagtccctagcctgacctccagagctttacaatctggcctccacctgcctgtcagccttacc

SEQ ID NO: 11223 - DNA, 201 bp, Bos taurus
attatattgtccatgtgggggtgggatgcttctgctcatttgatgctggctctcactgtcccccaattctgaggatgcctcacttggcctttcctcttaacgagatggctgaggggttgggcggggtggggtagaccaagatccaacttgtggaccagccagagtacttggctctcctgtggcctcggggccatcagttga

SEQ ID NO: 11224 - DNA, 201 bp, Bos taurus
ccaagctctgtccaaactcacctggttcactgcaatggcttcctggctgatgcctctggatctgctcttgaccctcagcagatccatttccacactggccacaacgtaagttgtgtgatttaactgaaaataaaagtgaggacattgaagacagatggctgtctccagtaaaagccaaagtccttgctaaaaccaacaagg

SEQ ID NO: 11225 - DNA, 201 bp, Bos taurus
gtaaaagggtatcagttttggccatcacctcacttaaaggggaggacagcaacgaaccagcagagagtacagtgctagttacctcaatgccactgtgataactggccactcttctctcttccttcagaccaaaattacccagcaccaaaaaggagaggaagtaatcaagtcagaccccaacagaggcacatcatctctcag

SEQ ID NO: 11226 - DNA, 201 bp, Bos taurus
tagcaaccgccccacccgagtcaggaaaggaaagctgcttgccctctggtctgggttcagacttcacccaggccaggccccagtgggggctggtgtttctcatgggtaattgccccttattcttctcccacggagtcagctcccttcctccccaggatgcagggagaagaagctggccccaacccagcgtgctcctgtccc

SEQ ID NO: 11227 - DNA, 201 bp, Bos taurus
tgcttacatccccaacccttccctgcccctattgtgacctgagccttacacagtgaactcactttttacaaattagcttcccagtggccagctggcttctgcgaaggcaaagggcaggaagccagagagtaaggaagagtgtgcgtgctcattctccatcgctcagtcatgtccgactctttgtagccccatggcctgtaa

SEQ ID NO: 11228 - DNA, 201 bp, Bos taurus
cagacatcttcataagggaataggggcaaagccttcacttaatattagcaacattttccaagtcagccacaccttggttggatatcagcaagagagccttgagcagacatccttggcatgatggtggccataatacctcagtggctggagacatcacctaaactgctcagaaaggagaaaatcagtggagacagctgagag

SEQ ID NO: 11229 - DNA, 201 bp, Bos taurus
gttgttgttcggtctgcttggaaagtcaaataatgtaaggttctgagcttgttcgactatcactgatttcataaaaattctttctcggcaccactaataacggtggattaatgttgttactgagaaggcagaatgacttgacctaacacatgttaactctagagatgacctttaacatgttctcgggaagcctcaacttct

SEQ ID NO: 11230 - DNA, 201 bp, Bos taurus
ctttcactattttatttttctccacagcacttactaaattctaggctggtgcttctcaactgggagtgatcttgtcccccaggcatgtttggcaatatgtggagacatttttgttacaactggaaggggatggtggcattattgacatctaatgggtagaggccagggttgctgctagacatcatacaatatataggagaa

SEQ ID NO: 11231 - DNA, 201 bp, Bos taurus
gacacattgaggctgtgagaaatttttaggttagtgaggaatgtctctagatttttctgtgattatttgtagctctttccataattgcagtgatctcacagttttaccttttaaccaaagtctaatccaatcttcaagcttcctgctaaagaaccacccaggaatgtttggggatttctgtgtaaccaggccctaggaaag

SEQ ID NO: 11232 - DNA, 201 bp, Bos taurus
tcgtcagggagtcccaccagtcaacagatgacttagtgatcaggacattctggggacccagtagaggaaccctggttcagccagatgatggtgagggaaggaatgaggtgtcagcagagtgggtaggctggggtagggttactgtatttcagagagagtttgagcctaggccagagggtggaggggaccctgttgtgactg

SEQ ID NO: 11233 - DNA, 201 bp, Bos taurus
cctgtctcccttggtaatccttgtaaactatgaagtagatgacatcatggctctgctccaaacctccattagctcctttcccacctagaatgagatcgaagcttccgatctaggcagctagggcctccaagaccctcctgccctctccatttgccacctgaggcttctgctccatttctcaccccctcccaggcttccttt

SEQ ID NO: 11234 - DNA, 201 bp, Bos taurus
atcttcacaaatagtatgtattatcttctctttcttacagcagagtgaactaaggcttaaggaaattaaataccttacttaagatcacaaagctattaagtggtacagctgggatttgaaaacttctcacttctagaattgtgtcagcaaaaatggcaatgaaatctccccatggcatcttgtactgagggttggggagag

SEQ ID NO: 11235 - DNA, 201 bp, Bos taurus
atcagtggagattattgtccagagggccaacatggctggagaattaggtctggacctgtgaccacccaggggtaagacgaactagctacatataccactacagcaggcctcaacgctcctagccaaactgttcaagcttgtgttttgaggctgtttggaaatgtatgactcaggatgccagaatcaaaccaacactgaagc

SEQ ID NO: 11236 - DNA, 201 bp, Bos taurus
atccctaaggcctctatggtacctgacacatagtggaatccttgcatatgtttgatgaatgttcattcaatgaatgtatgaatatacttcagtttactaccgtctgttatgactctctgctctggccttctttctgtctttatgtgtttctgtgactttgttttgttttttaactctatttaaatttggtatttttttctg

SEQ ID NO: 11237 - DNA, 201 bp, Bos taurus
aagccttcctcacggggatgctcagcagatcactgtgagcatacacttcttaagtcaaagaaatgtggttgtgaaggccgttgctttcctgatagaggaatgtgtcagtataattatttgtacaaatgcctgttcagttcagttcagtcactcagtcatgtccaactctttgcgaccccatgaaccgcagcacaccaggcc

SEQ ID NO: 11238 - DNA, 201 bp, Bos taurus
tattccgcaagaggaaggggaattaaggccaggcctttggaatttatggaaactcacccaagttaatcctgagaagcagatgtagagggacagcactaagtacctggcttcctgagcacggccgcttttcacccaagtgtcagtgcgtggactcaccattgagctctgtaacaggtgccctccaggagaagaaaccaaggg

SEQ ID NO: 11239 - DNA, 201 bp, Bos taurus
cgggtattccacaaagcttctctctctccctctttcccagggcaaggatggctgtgggggtccccttcaaggtgctggggagtcagtcatctagccacactgccttgcaaagacttgcagtgaaaggtaaaaataaggactaacatttacacagtggtgtgaagttacacaggacttgaataatctatgcctcctatatag

SEQ ID NO: 11240 - DNA, 201 bp, Bos taurus
ccctgcccctggtataacttccaaactggtctctcctctctcattctcacatttctttgctcaaaatgcaaaacaatgggagagggggcctcacttccaagcttggtcacatgtgtttctgttggttattctgttaaaaggaaaataatctttcacgagcggtcattatatcaaggcctcagagcacttgcgttgggtgtc

SEQ ID NO: 11241 - DNA, 201 bp, Bos taurus
gccactggcctcttccaagaacaaggagtttttaccttgttgcctctgacctttgtcttcttgaataactggcttcacgatggtaacaagacccttccaaagtaggcttggtggccgtgacccagtagtcaggccacgcttgagtggagaggtgtccaccgtggaggatattattcagggtgattagaaacatccccccca

SEQ ID NO: 11242 - DNA, 201 bp, Bos taurus
acgaagctggtgttcagaccatggagatttggtcaaagtgcccattacagagaaaccaagctgaagaaatgccagggaggggcagaaaaataaatgcagtaaattaaaaatagagagaaaaccagttctcagagatgattcttcattctttccatcctttttgaggacatgcaagaaggtggctttgagctgtgagctgcc

SEQ ID NO: 11243 - DNA, 201 bp, Bos taurus
tccccttgccctaaccatgctgccatgacagcttccaggtacctccgcatgggtcaggtgagacaggaatcaatcttttatttattcccaaacagatgccagtcttctgtgcccacaggcagagaccacaggtcaccgtagggcaggaaatccgtgtaaaagcgagaggggaaaagctcctacaggaaagccttgtccttc

SEQ ID NO: 11244 - DNA, 201 bp, Bos taurus
aagccctctcatctcccattcatctctctttctaaggctctggattggctcaggcacgatgataaaaattggggtggcttttctccactccaacagttgcacggtcaaaggaacaaatatatgcacatagtcacgcattaatcctgggagatgacaggcaccgttcgagatagcagtgttcggtttccggtaggacgttga

SEQ ID NO: 11245 - DNA, 201 bp, Bos taurus
gaaagccattgtctacattttgaacagtttgttacagcagaacccaattccaggaatctagaaaactattcagcctattctctgctgattgatttgaatgggcaaatagatctggaattcatctcatttcctgcagcactaaatatttcaagaagatgaatttatctgggttttaatatgcacagtgccacctgacctgcc

SEQ ID NO: 11246 - DNA, 201 bp, Bos taurus
tgtactggaggcataattagtcagtgtcttttcttttcaattaacaagtgcttttcctacttctgagtaaataattcctaattaaatgcaccaattttattgatttactttcattttttttctcttctgcataccaaattgaaatgtgaaattcttacacattgtaattgtggatcagaacccactgattaacttgttaat

SEQ ID NO: 11247 - DNA, 201 bp, Bos taurus
ctaacttgcagcagcatcctaagtgattatgcttgcatcctcattggagtaagccttgaccaggtgatctgctgtgcatatggccagctcttctcatccccgcagatagaatcatgacttcactcccttaggtcctggactaggacatttacaggtggcctgcctggatatcatcaggtgacagtaaggatgtcaatctta

SEQ ID NO: 11248 - DNA, 201 bp, Bos taurus
cctgcgtattttggaagtgggctgggctgccagtatcattgcttcgaacagttccttgctccacagcaaacacaacagggccctgcttttgctaataaccggaccattcctgtgtctcctttcccttcatcccccgcctcgcctactctctgccctgtatgcatcttgcctcattcatcggccaaattaaagctgtgatta

SEQ ID NO: 11249 - DNA, 201 bp, Bos taurus
cctagatccacttggccaccctaaaactattagcttagagaaaattatgctttgcccaaactgaattaaccagggataaatgattttgaaagaaatgttacgggaatggccgaatcttgagaaatgaattcaaaactgtaaaaacacccagaacttcatcaccattatatcctaaaaacatttaagaactcagtatgtact

SEQ ID NO: 11250 - DNA, 201 bp, Bos taurus
taagatttggttcgggggcatgaagtttagtgtaggaaataagataattccaccatctgttcaccactgtatccccagcaccccaaacagccacaaggccgatgcttaatttggtaaaagtggtacaaagaaaggataattatccctaaggcaataaagggtgtgataaatgctatcagagaaagcaaagggccctcggag

SEQ ID NO: 11251 - DNA, 201 bp, Bos taurus
caattcctcacttcttaggcgaactcattcatttctacaaattaggactgagacaaatacttatgcaataattcttacccacttcctactttattcggattaatttttcttacaggggatctaggaaagcgctacacttagtgtactggctaatatgctttgggccataacagaaaacagttatattagttagagtttgac

SEQ ID NO: 11252 - DNA, 201 bp, Bos taurus
tgtctttataaaagaacaacagagagagtttacatttagaagaggaggcagtatgaccacagaggcaaagattggaatcatgtggccacaggtcaagaaacgccagcagttactccaagctggaagaggcaaggagcagaatctttcataaaatctctgaaagaagcgcggcctgccaacaccttcattttggccctgtga

SEQ ID NO: 11253 - DNA, 201 bp, Bos taurus
tccggggtcggggtcgggaccgggacctggaccacctccaccttctcctggggcagcagctcctcctccgccatattctccatagttaccgcctccttgccaggcccgcccggggaccagcaggggctcactgcggagtgagagaaatggcgtgaaagcccagagggccggatccgagaagtggggaagcaaatggggagg

SEQ ID NO: 11254 - DNA, 201 bp, Bos taurus
ccatttctcctaagtggtttgagaacttaatgtaagcaagtttagttccttgagacaaaaatgttacatctttaaattattacctgtagattaactcactgtgctaatttaaggggggaaaattctattagcttcttttgcccatagctcactgttaacccaagttgtttatttttcactgaaattgtattgtgtccagag

SEQ ID NO: 11255 - DNA, 201 bp, Bos taurus
aaataggtaaactggttgttttgatgcatttaaaaataaataatttgcttaagtcttttactttgtaatggattgattgtgtatcttagaaatgccttaggatttacaaagcatacttggattggaaatagtatttctaagattgagaggggaaaggaaaacaatgactgtttattttagaggatgagtatacatggtacc

SEQ ID NO: 11256 - DNA, 201 bp, Bos taurus
atgaatggctggggcctcagtttggaacttggtgactctggctgtcacagcaagggggaatctgagccaggacagatagctggacaagagttggagcccacaccagttgtgggccggcatgagtccaagccctagggaaggaataaatgggctgaggggttagtggggtttgggtacttgggatagtatagggaggaactg

SEQ ID NO: 11257 - DNA, 201 bp, Bos taurus
tcctcctgcttcttaagagaaagataaaaaacgtcttgacacttgcagcctgtttcctcctttggagacccctaggtttcctgcctgttaccctctcagtaacacacaaaataatacatctatttgtaaaaataatgccatattttacaatgagaagtctgcttcctggaagagggctctcacgtgatgatgctggcaccc

SEQ ID NO: 11258 - DNA, 201 bp, Bos taurus
acaagctttgtggcttcattaaaaatgtaaaagtagaatgttctattccgctaagcacgccatgaaagagttatgctgttctttcttctcttgacatttgtaccaaaggagaataagattgtaaacatctgttttatataagccaattccaggcttataacttgattagtatgagaatatttgatgtgattaattttccag

SEQ ID NO: 11259 - DNA, 201 bp, Bos taurus
gctttgggatcttgcttcatgcagttagtacaactccttatctgttacttgcttagggtttcagtttatcctcaggagatttattcccccaattagagacctggatacatggtaaacttccttgccagttttctagattagtgtgaggaatttttcctgaccctcgtttcactgataggacttgacttttaaaagggtact

SEQ ID NO: 11260 - DNA, 201 bp, Bos taurus
atgttcccttatgccccttctctgcctctcctcctaccatagagataaccatttttctaataactgtcaccatggcttagttttgcacatgagtgttgccgaaagactacgtattcacttgtgacggacttctttcactcaatgcattggttttgcatgtgtaaattcctttttcatgaccaagtaatattcagttatatg

SEQ ID NO: 11261 - DNA, 201 bp, Bos taurus
tagcagaaagaaattttattaaataaagaaataattgtcaagaaatttacattttttaacgaggtcaatgatgatatttagaagtcccatgagagtatattttaatgactgttataactttcagattgtcagtgtagggatgttttaattccaacattgctttttaatacccagggctttcttctggagtggtgccctgtg

SEQ ID NO: 11262 - DNA, 201 bp, Bos taurus
gattatatacctcttttattaagatgtattctctaattgagttggccaaaaatttcatttggcagaagaaagctgaatcagctttttggctaactcaatgcaacttttatctgatactcacagggcccataaatctgctccattagagggattcattatacgctcttaaaaattacatttttagttcatagaaacagaaca

SEQ ID NO: 11263 - DNA, 201 bp, Bos taurus
agaagcaacagttagaacctcacatggaacaaccgactggtcaaaattggtaaaggagtatgacgaggctgctcactgtcaccctgttaacttaacttctgtgcagagtacatcatgccaaaggccaggctggtgaatcacaagctggaatcaagattgctgggagaaatatcaacaacctcagatatgcagatgatacca

SEQ ID NO: 11264 - DNA, 201 bp, Bos taurus
cactgtacaaagaacaaaagaggaaagtgaaggacagccagaaatccatgtctcccccagagaagcccaaaatgtgtttcaacgttcagaatgtattacctcagtgtaatctcctcatgaagcaaatactgaactataggaagaaaggaagagatgggctgcaaagggaatgggcagctcttctagaaagggccatggtta

SEQ ID NO: 11265 - DNA, 201 bp, Bos taurus
aattatatagattctggccactatttctgtccttctatatggcctgtcttttccttacattgtaaagctttggtttggggcctcagcatttctcacatttccccaactatcctttaagaatggcaggtagggaaatgaggcatagttaggattatgttgcccattttttagattgtttattagtttttttctctgctctgg

SEQ ID NO: 11266 - DNA, 201 bp, Bos taurus
aattcctctgtcttctcagattttttggaactttctttgtctctgtgaaattaggtgaaacagttacctgtcccagtcttgaaggtgtgccctgtctaggaggatccctgtacatgtgcccagtggctttggtggaagagctggacctgaagtgaacacaatgcatgccttccctcagggtgtgctggtagctatcacctt

SEQ ID NO: 11267 - DNA, 201 bp, Bos taurus
gagaattagaactagaaccaagactaggacactttccattctaccatgaattaatcttcttaagctcaacctaaggacccattttcttggccaatattcctcatgacaaatttctgcaaaaactatcactaaacagattttctaaaataaaagaaataataatttcccaaagggccttcaatttaattcaatttaataaac

SEQ ID NO: 11268 - DNA, 201 bp, Bos taurus
agaaattggttaggccttgtaagagctttctcacaataaaattaagtctcttttatgattcggtggatattaagtcactaaacttgccagatcagcttcttctctgactaatagaatttggccacctcatgcgaagagttgactcattggaaaagactctgatgctgggagggattgggggcaggaggagaaggggacgac

SEQ ID NO: 11269 - DNA, 201 bp, Bos taurus
tcattttctaccaatgtaatgctctatagcttatacaaaaaataatatagatcttattagtccatgtatttaggtgtctataatacaccatggccttaccattttgttatatttctttgttttaaaaaaaaaaaaaagcttgagtgtgaatgagcatgcacaacaaaataaaatcttgaaataaaaacatcaaaatttgaa

SEQ ID NO: 11270 - DNA, 201 bp, Bos taurus
tggctgattcattctgctgtacagcagaaacgaatgcgagatggtgaggcaactagactccaataaaactaaaggcagaaaacaaatgtaatctacttatttcttatgggctacacagcccattaggaacaccatgaaatgtgactatatttacactgccccagctgagaatcctcaaagtggctgccatggacttagccc

SEQ ID NO: 11271 - DNA, 201 bp, Bos taurus
tccctggccaggtgagaccacaagttttgctctgcagatggtgaactcataggttgtcactctgttcaagtgccactgtagcaaagcaagcaaaatggtctgattctttggcaacgaccaggggcccatgagaagaaaatatatgggcagctaagatcttatttgatttttttttaatgaaaaatgttccaaacctaataa

SEQ ID NO: 11272 - DNA, 201 bp, Bos taurus
gtggaattgattttttatgtcattcccccatggaaaagtggaattttcccttccttcccttgaaactgggctgggttgagagattggattgaccaatagaacacagaggaatgaagctctgggacttttgaagctaagtagtgggttggtacaaaagtaactgtggttctggaccatgaattttaaaccattataactagg

SEQ ID NO: 11273 - DNA, 201 bp, Bos taurus
taaggtttaggaaaacaaagaacaaaatagacatttatttatcattctaacattgtgacttaatacgacttaatagccaccttaccacatggatagaaaataaaattagaaaaagactgctgtgtacctaagttatcatcttcataaaaagacaagcatacaatcaatccttggtacctgcagaaggttggttctaggacc

SEQ ID NO: 11274 - DNA, 201 bp, Bos taurus
tattggtaataataaacttcttttaaaaaatgtgttgttaggccattgccctggaatacaatctcaacagagacaacaaatttgactcatagtgacttctctttgctcataagtgggagggtggcctgtggtcagtacaaaattcgagtttggagagaaacactctctgtctcaaaggttggcttagatgctgtttgatgg

SEQ ID NO: 11275 - DNA, 201 bp, Bos taurus
gcgttaatgaaaaaggatacgtgttttagggttaaacacatattcctcttccagcaaaatgaaaggtcatcctgaggcaccttgggtcaccaaaggcctcattgtctctctgctggcgtttgacggtgtcctgtatgactccatcctcctgttactgaatgcaggttcctgtgtttgatacacagtgaggccaaaccgaca

SEQ ID NO: 11276 - DNA, 201 bp, Bos taurus
cttgctagtggccctccctttgctggcagccttttcagcagaatgttttgctcatccacacggttccagagttagccatcgcagctcctgggcgtcttgactgtgtccctcctgggggccccccgggtggctgcaaagtggagcacccccttcccagcatgccgtctttgtaatcagggcatgagaaccaggaagatgtca

SEQ ID NO: 11277 - DNA, 201 bp, Bos taurus
tcagttgtgtccaactctttgcgaccatgaaccgcagcacgccaggcctcaccaactcccggagtttacccaaactcatatccttattattatggtctcataaattatttcatccatgtgtcttatctctgattccagattataaactgcttgtgagtagagattgtttttctctcttctgtatttcctagctcaatctta

SEQ ID NO: 11278 - DNA, 201 bp, Bos taurus
aattgagaatcgtaactctaaagtataagcacattaatcagattatggaggaaaccaggtagaatcaatggaaatgaggagaaccagcgctatgggaagggggagggaattttgcttttcattttctactattctgctttggtcgagagaggcaccatgaaccctacaaatgatcacaggccccacagacaatggtccttg

SEQ ID NO: 11279 - DNA, 201 bp, Bos taurus
gtcactggaggtctgatatatgtggacaaatattccagatgcatggcctcccatctccttcacttgtttagtgcacttgttagggtctgatcagcccatcgacaagtcaacaaatagtaatggcctcatggtcttaatactacttgcagggactcctccaaataaatcttctgccccagccatgttcccatttcacatccc

SEQ ID NO: 11280 - DNA, 201 bp, Bos taurus
cccagtttcacctcttaacagtattaaataatattatcacccatgaaaccccctaaatcaaaaagctccttaagtcctgtgagttctcccgtccccaccttcatgaccagtgacctagaagtctagtcaattctaccccctaagtatttctcttttccaccctccactctccttcacctaccatgatttcagtgtttacta

SEQ ID NO: 11281 - DNA, 201 bp, Bos taurus
aataatgtccatgtgtggtgactggtatatttctaaacagaatccacagactagaaacactgccctaatgttacatttaaacatgtataacatttaaacacataacatgttaaatgtataaccatgtgcctgaaacagaaattattatacattttggttaaaagttagaattgtgactatggtcaccacggtttgtatgaa

SEQ ID NO: 11282 - DNA, 201 bp, Bos taurus
ggatctaaagagaatgacttcttggggcccattcaaaatatcttccatgtggttagaccaaggacccgaatcactgctctctgacttcattatgacttcatttagaaatgacttagggccccctagccccgtcgcctagaggggccttcatgagcctggcaactgaacggggcaggagttccctcgtctgtggcccagcag

SEQ ID NO: 11283 - DNA, 201 bp, Bos taurus
ttaaaacagacaaacgtctcctggaggagataaatgaaaggcgagaatccaactgcctggtggaaagaagcaatcaagtcagcttattgagagttcaaaagaggcatttccatggtgcctacaagtcccttactcacgaccaggtcaaaaaacctgttcctgacagtgacaggagctcctgggtcaaactgagtctcttcg

SEQ ID NO: 11284 - DNA, 201 bp, Bos taurus
tagtttgccagctgttttcttacaaacaattatataccttcattcctttacagaggaatttactaatcacgaggttggaaaataatgtacttctcttgttcattatatgttaataatcatgaataagaaagtctgtctcagtgaagaaaacttacaaagctactttattgcattctgaatttgagtgttaaaacttgagat

SEQ ID NO: 11285 - DNA, 201 bp, Bos taurus
ttaggggcggggagggggtgtgtatggaaaaaggaagaggggagcagaaggacaggagccacaggtccttgtggcctggaagcctgcaagcatgctactgcatgtgcataaaggggtgaggtgggtcgagggggcagagaaggttggagaggtggagagagccctgtgaggccaaataggattgctgggcttcatcctagt

SEQ ID NO: 11286 - DNA, 201 bp, Bos taurus
aagtgtggtgtcaccatctgtcagcacctcaccaggctgccccgtcccggtgagcagcccttctgcgaaggacggactcagagccagggtcccaggggccaatgtagctgagagcaggacacacggagtgtgcatcttgtacccgcaggcgttttgccacagctgtctttcaactccagcgcattcctgaagggagcattt

SEQ ID NO: 11287 - DNA, 201 bp, Bos taurus
ctcactctaggccttctgatcacctacccttggaccactcctttgggtgacgtagaggtatcacagggctggtgcatggaactcacttttccactcctctccagggtgaggctgaccttggccatgctgggtatgtccccctagctagaggtttcctgaccaagcacctttctgctatggcatttcccctgcttggcccca

SEQ ID NO: 11288 - DNA, 201 bp, Bos taurus
agggagaccagagctgggcctgcagtggggaggattcggttcagtggaaaagagcagggaggtgctcagagaaggggaattgcagccataattgcctgtcaagtatgcaggagaggaggcctggatcaaccagaaactatactttaaagacaggaatataagtttcgagacagggtcaggggtttgtgtatcaggaggcag

SEQ ID NO: 11289 - DNA, 201 bp, Bos taurus
acccaaggatagaacccacatctcctgcattgcaggctgattctttaccactgagctaccagggaaggccaaaacagcaaacgtaaattctaccttaccaacaattacattcaatataaatggattaaacattagtcaaaagcagagactgtcaaaactgattaaaaaaaaaaaaacaggtttcaactacatgctgtttac

SEQ ID NO: 11290 - DNA, 201 bp, Bos taurus
gagctgatgtaataataatagaaataaagtgcacaataaatgtaaggcacttgaatcatccccaaaccataaacccatcacgcccccccgacactatttcgtggaaaaattgtcttccacgaaactggtccctatgtcaaaaaggctgggaacttctgccttaaagttttccctgtattctgttgcttgaggagatgtttg

SEQ ID NO: 11291 - DNA, 201 bp, Bos taurus
agcctgaaggaatacaaaggaggcaaagaaattcaactcagatttagtcattactcctgggggcattgccttaaggccagatatcattgtaaacaagccactgaagaccactaagagaataatatgaatacaatagttagttatgttgtagagttcacaaatatccatctacagacagaaaggcaggccttaaaagcctct

SEQ ID NO: 11292 - DNA, 201 bp, Bos taurus
cccatttattatttattgttttaccatttgcatgagtcagaagtccaggcgtgacttcactgggtgccctgctcgtgttgtcacagagttgcggtcaaggcgtcagccagggccagtcttgtttgggatttgggtgcagggtccccttctaaactcatgtaattgttggcaggattcatgtcctcacagctgtgagacttg

SEQ ID NO: 11293 - DNA, 201 bp, Bos taurus
tggacagagcagcctgtcaggctacagtccatagggtcacaaagagtcagacatcactgagcgactaaccctttcaagcttcactttccttttcacgatatgtatgtatctccctttttgtctgaagttaaatctgacaacgctcagactgtatgactgtcttagaggctaatttctaggttgcaactgtgcctagtgatg

SEQ ID NO: 11294 - DNA, 201 bp, Bos taurus
agaagactcctagagcaaactctgatctaatgaggggtgtagggtgcatccagagagaagcgaaattcagacaaaattcaggagtcccttctcagcccccgaccccgaccccacccatttgcctaccacaccttctttgctgtcttgatctgtgggtctcaccttcttgcccccatagcagacccatgaccctgagcaagt

SEQ ID NO: 11295 - DNA, 201 bp, Bos taurus
ctcagcttggcgctagaactgagaaagtgaggtctgtctctctctgggaggttgaagataggagaggtgagtttgtgacctgctactggcctcattcttccacacggaccaaggagcacaggaagaagtctgcagtatgaagaaacacataaccaatgcagatacggcttccgagaatgtgcctgggagccacggcctgga

SEQ ID NO: 11296 - DNA, 201 bp, Bos taurus
agcaacttccgttggttcttaaagataaagcttattgatgtgattttcagggtcccacaccacctggctctgacttctctctgctacctattctgtgtcacgtgacacaccctctcgctccctccactccagccacactgaccttcacacacactccccgcactctctccagctacgacacccatcctgtgctgttcctcc

SEQ ID NO: 11297 - DNA, 201 bp, Bos taurus
actagtgttcttttgctgtgtaacggtagtaccacaaacttagctgggtcctcagcttagaatctccaggctaccatccaggtgtcagctgggatgtgttttcatctgaaaatgtgactggggaagactctgcttccaggctcaatcaagttgctgacagaagcatttctttgaggttctgaaactgagggccctggtttc

SEQ ID NO: 11298 - DNA, 201 bp, Bos taurus
cagccagcaacccccaccattagcaagtctgctcggaaggacaggaggcctgggcagcagctgctgcagcccagctacccaagtggggcatctgctctgttatctacaagctgtgtgaccttggccagctatttaaccttgtggagtctgttttctcatttgagtagtaatattttcatgatgctggggtggcagggatga

SEQ ID NO: 11299 - DNA, 201 bp, Bos taurus
atggcacagccccgtggacggcccacggtggcagctgtgaagggagtggttctggggattccagcgagaccaggctcctggcgtgagacagcgtgagtgcagggcctctcttctgacttattactggtttgataaatcgggtgtgctttctcatttacccagctgaaagaatatagcttttagcttagttttctttagagc

SEQ ID NO: 11300 - DNA, 201 bp, Bos taurus
gtttaagatgctcaccaagggatagcaccattttccaggcacaggcctttgtgttaaaaggcaccattaaatcagtgggcacgaagggctgctggcgctcaggttggagaggccatgaagggcaccccacctgttgaacctgggttcggttcagttcagttcagtcgctgagtcatgtccgactctttgcgaccccatgaa

SEQ ID NO: 11301 - DNA, 201 bp, Bos taurus
atcataccttagcagggtgctttgacctgttctcaacgttatgtgttgctatcatcattgttattggtgagcttagcttttctggaaatgcagggatcctgtcaggtgctgaaagttttaaaaggggaataggggctaaatttgaacaggtagaaatctcccagacagatgattccaaggtctgtccctgggcccctcaag

SEQ ID NO: 11302 - DNA, 201 bp, Bos taurus
cacttcaggatgggtacaaggtcaaaaggaaggcctcggcggcaactctgaaaatcgtgtctgcttgaacagattcatctgacatttgcagggacctcagtgaaggccccttttatttattctgtctccaggaccagatgcattgattgccctttaataggttccgaagaggaaagaatggccagactgtaggagttttca

SEQ ID NO: 11303 - DNA, 201 bp, Bos taurus
caaacactgtaaatcaaattatgtttcaattaaagtcttttaaaagtcacatccgagttagaatactctatcccagagtaagaatatagcttgtgggggccgcaagctagcccaatgccgaggcccaagaagggattctgcaccctccaccccagcagcagccctgcaaaaatccagggcagagggcaattcctgatgtat

SEQ ID NO: 11304 - DNA, 201 bp, Bos taurus
tctctgacacatcaaggacatccagcagcgggtgggggtgagactagacaagaaatgatgcactggcaggttaagggcaggagctctttgtgttgacgagggggaatcaagcccaacgtgtgctgggggcccttcctcccatcactagtccatgggcttcttcccccaccatttggagacccctcagccccctctctctct

SEQ ID NO: 11305 - DNA, 201 bp, Bos taurus
catggagaccaccgagaacaatgaaagcagcagagagtaacaatatagatagagcaactggagtgaagacaaattaaatacagatactccacactcaagtggcatctttccttcgacgattcctcagggcaagttgctccattcagcgtgcattcaggaatctctccctactctcgctgcagactccatcattaatttatc

SEQ ID NO: 11306 - DNA, 201 bp, Bos taurus
tgccaccttgtaaccaaaacattattgcaaaatagaatagaacgtgtattatcagcaaaattaccaataaaaattatttggaaaatgtaagaaatcatctcctttgtctatacttttttctttcttattgtagcaatcaaattttcttgaaaaattaaaatctttcactacgtaaaatatattttttaaaaaatcaagaat

SEQ ID NO: 11307 - DNA, 201 bp, Bos taurus
ccctttctgcaacattacaatttaaaaaaactaagtccattcagaaatcaaactggaatgttctaagacaactattcaaaagttaaatggcaaatggctagagaacgtcttcccttaagacaaacagaagataagactaattttctaccttaatttttttctacttcttttctttcataaatcttacactgtccagcttct

SEQ ID NO: 11308 - DNA, 201 bp, Bos taurus
agaaaagttaaataaaccttattacattatcaaacacaaaaatcaatattcttttatccccaatccttcctaaggccagaaagagtataaggaaaaaaatatgcattgtgcaggttaaatgtatatttttaatgtacttgtttgggaatcaaaaggcctgaatatttcttccatctgagatacagcaaactgtgtacaaat

SEQ ID NO: 11309 - DNA, 201 bp, Bos taurus
aaggagagccatcctagaaccgttctattgggtacagagacaagaggtagagaaaaaaattggcctgtgaatacttacaaagtaaatcagtgcttttaatttaaaaatttaataatgatataaaagtggtaaggaaaccatctggaaaccagcaccaattattggagctggcatcaaggaggatgggcctggtctggcctc

SEQ ID NO: 11310 - DNA, 201 bp, Bos taurus
gcaaattctaagtctcagtcagatttctcctgcttcttttccctgggcataatttaaggaggtcttttctttaagaaaagttcagccatcttcacactccggatccagctccttgtccatgtggctggcagctcagtggactgcagtttgttctgctgcccagcagtttagattaagagaccagaaaaggaaacttaccct

SEQ ID NO: 11311 - DNA, 201 bp, Bos taurus
aaaatgaggaagttaattgcaattgattgccaagtccctttgagttctagaagttctagactttgtaagatcccatccaacaaacatacatgggtcaggcgtggtgctgggccctgctgaaggggcaagaggaccggatgcccttccttcaagggactcacactgtaggagggagaacaggagtttctgcaagtagctggg

SEQ ID NO: 11312 - DNA, 201 bp, Bos taurus
agccagtttaaaaggaaatagagacgcttccctgctcctgtcttttctgagctgtgagagccaatgccacacaggggccaaggggcacccgctgggtttcctctgacggagagtcaagagctaagtgtgtcttctttcccatgaaggttctgccaggtcgacggtaggtgaaattacaggcttacctccggccagtgtttt

SEQ ID NO: 11313 - DNA, 201 bp, Bos taurus
acacatgtataagtcaaatcttgatgggaacctctggaacagacagccccgatagtaggcgccacggctacccagacaaacccggtttcaaaaggccacggtctcatcagaccacgtgcacagccaatatgcccccactgggataatgaaggcggctgcactcacatggccccaggcaggtacccagttgccctgtgctat

SEQ ID NO: 11314 - DNA, 201 bp, Bos taurus
gactccgaagaaggccatgtgggagagcccagagctcttcagtctgtgtccctttgctcccgtttcttcctcctcatccctctactccctccaacagaaacatttcacctgcattttctagtggccgtctctaaggcttgttgcccacgtggtatgctaataacaatgaaagtgaaagttttacttgctttgcagtgtctg

SEQ ID NO: 11315 - DNA, 201 bp, Bos taurus
agggcttggccaattgcgtcatatttaaagtaagacccaagccaacttcacttcagcttccaatgctctccatcagacccaactggcactgcaaacagaccgcgcggccttccgttcctcatccttctctctgcccaggactctgcagcgttccaggatctccttcagcctcgcggaaggtgtcccgtctcctctgaacag

SEQ ID NO: 11316 - DNA, 201 bp, Bos taurus
cccttaaggagttactgatattttcctcaaagtgatggcctgatcagccataacaggctacgtctcagagtccgtggaggcgacaccttccaagcgtgaccagactacctggcaggccatcaccctggaaatcacttccacctgaaactcttcactgcccggcagaatctcactccggctgggtcggcagcactccttccc

SEQ ID NO: 11317 - DNA, 201 bp, Bos taurus
ctgtcaagttggcacataaaattaaccatcacagtggctgacctgtccactgaagaatgttcagcagcatccttggcctctatccactccatgcaagaactgcctgtccagtagtaactacgtctccaaatgagccctgggaagaaaattcaccctccattgagagctgttgcctcagaggattccttctactggatatgg

SEQ ID NO: 11318 - DNA, 201 bp, Bos taurus
agcttgttggagatgcgaaacctcaggccccactcccgaccgactgaatcagacctgcacgtcacagagccaggagactcacaagtgtattccagtctgaacacagaacaggcctccccattgctcctcgggactccaggcttgtccgccctgcctgcccagcagggtggcgagagccgtccggacaagaaccgtgccagg

SEQ ID NO: 11319 - DNA, 201 bp, Bos taurus
tcacaggtgggatcttacttccctgaccggggattgaacctgcatcgcctgtattggaagcactggagtcactgggccaccagggaagtccctcattcttttctaactaacccaagttctcctcagcctgcaaaaggcaattcagaccccacttctcccatgtcgcttcccttggccactttatcccaccctggcgggata

SEQ ID NO: 11320 - DNA, 201 bp, Bos taurus
aaggtgaagaccgtgaaagtgtctgctgaggaccctccaggtgaccaaggacatggactccagctcctgctaggagctcgtctagaactcctagacggccgtgtgggaactgctgcagggctgcaggggggtgacctgacacgccatgctcccagagagatatgccctccccttttggccctaaatcctggagaagaaata

SEQ ID NO: 11321 - DNA, 201 bp, Bos taurus
gaaatttcagaagctatgtagaacaatttaaagaaggacatgaataaataagtgtagatggaaaaaaagctcagccactgaacctggatgacttagtcctgaagtcatggttggagaagtgggcttggaatctggaatggaaaattagattcaattctccagccttatccatacaaaattatggatttaaatctggtattt

SEQ ID NO: 11322 - DNA, 201 bp, Bos taurus
tataggtccgtatccttccccacttctttctaaattcatcatctcaaaactcacctctcttctaagaagtctcctatagcactatgctcagattattctcccagagtttgaaacacaaacatatcaggctgttttctctcagaagacacgggcccagagggcaggaatcagatgccttctttttctactaaactgtatact

SEQ ID NO: 11323 - DNA, 201 bp, Bos taurus
taaaatgtccattaagacaagaataaaattctctgaggcaagaaataaaatgagaaaaagatcacagaagagagaagtgttgcaggcctggaatgaaggatgctattgcttgaaagggaaactaaccttgcttcctgctgggcagcagcccgggagcctttgcagtcaggcttcaggcagaaacgtttgcttaacggagcc

SEQ ID NO: 11324 - DNA, 201 bp, Bos taurus
aatcatagaagttatgtgtccagaataagttcacaaatcttaaaaaaacaccacccacacagtgtcatattacataatttgtattcttagtttgtcacttcgtatttgccccaattttttcacattcacataattagatctatcttatcagcactgtatgtcactaatgatgctcttgatactcgcttactgacaaaaaat

SEQ ID NO: 11325 - DNA, 201 bp, Bos taurus
caccgcctcttcgtgaacacactgtcactgccctacttaggaaggatgggaaggaatcaagggcaggcgcagtcgtcgttggcccttttccagaacgctgtactaaataaaaagaatcaagcgcctccatctgaaaacagtctggatccctgtggggcagacacagctcaggactccactttggacctggggccctccaga

SEQ ID NO: 11326 - DNA, 201 bp, Bos taurus
actccttccccatctccttggcttttggatcatcaactggcccccttactcctggggatgaaaactcccagggttagctgctaaacccctttgagtctggtagacccctggtcactggccctccgtgatgacccactgagaggaactctctcccatccccaggaaggtgtaaactgtatgcgctcatggtctccaatcatg

SEQ ID NO: 11327 - DNA, 201 bp, Bos taurus
catggccttgacaggagctcatcagcagatagggggcctcctaagctactcaaaatccacccagcttgagcgtttgtcgctgttgttattgtagatgcagtctagacttaaagggcgtctgggacctgggcttcggggtcaaggcagtccagtctccccatcagagcagacgcccttcctcccaggggcgtggggcggcct

SEQ ID NO: 11328 - DNA, 201 bp, Bos taurus
taagtaatttctctcaatgatgatagtgctactcgattttggcataagagaataattccttttgttactatgttttaattacagccaacacttatggagtggttatttatatatcaagcaatgttatgagcatccgatgtgtcttaactcaatctttaaaaagccctgtgctgcaggtctggtattcccatctctttcaga

SEQ ID NO: 11329 - DNA, 201 bp, Bos taurus
cagtctctgtgggtgccaccaagcctttacaggaccgccagactcagtgctgaatctgtattctccaccaaacaccatcttcagagtgaaactaactcggcggcccaaaacactctagcaccttccatcctccaggcacctgaccctcgcgcagtgggggcccgggaggcttcctctcacattcctttcttccacgctgat

SEQ ID NO: 11330 - DNA, 201 bp, Bos taurus
gggtgaggagatgtggccggtggatgcggtcacttccaggccaaggtggttaaagtaccttttggtgggttcagaggctatcagttgacagtagtggtgcagggacttccctggtggcccagtggctaagactctgctcccagtgcggggtcctggtttcaatccctggtcggggaaccagatcccacatgctccaactaa

SEQ ID NO: 11331 - DNA, 201 bp, Bos taurus
acgcgcgtggcagtgcagagaacagcgtggtttagattcagccccgagctgaaatggcacgtctgaggacacctgattacagtcatccgtctcgggcctctgggctgctgactctccctggctgtgcatggaaagtcagaggtacttgcgccaggtgtctttccagaccagaaagagctcaggcgtggcctcagcagcgct

SEQ ID NO: 11332 - DNA, 201 bp, Bos taurus
taacatttcacctctgtgctaatatttattcatctaagaatgtgcatcagccagatcatgaaactcctgttgtgattttctcgagcagacatccttctttatttctcccacaggtcagggtatggatctttcttcttctgctgtctgcaaaattccctccccgtaggcacttcacaccagcactgtaggaagattggcaca

SEQ ID NO: 11333 - DNA, 201 bp, Bos taurus
acactgagtagggggatgggggggtggaatgaattgagagattgggattgacacagatactttgtataaaatagataactaatgagaacttcccctgataaaacagggaactcttctcaatgctctgtggtgacctaaatgggaaggaaatccaaaaaagaagggatctatgcttacatgcagctgattcactctgctgta

SEQ ID NO: 11334 - DNA, 201 bp, Bos taurus
ggctactcgctccagtgttctggcctgaaaaatcccatggacagaggagcctggcgggctgcagcccatggggtcacacggacacgactgagtgagcgcacagacaaggaaggccacttggcgagctgatggagattctgggagcactccccgagtcctttctggaggaaaatggcatcacggatctgcagttttgggtgt

SEQ ID NO: 11335 - DNA, 201 bp, Bos taurus
taaatgtgcgctttcattgaaaatcacttcgggttagacaaagcccattcttccgcacttgaaaagcttaccggtttctgcaattcatttgtgtgagagatagagattttccacggaccccagaggaacccggtggagacaatccctgtgcgggtttcagccgcacagcgcggcccgggagatgcaggagtccctccggcc

SEQ ID NO: 11336 - DNA, 201 bp, Bos taurus
acttcagcttttttaaaggactcatggttaggtcatgctcacccagaacagtctcgggatcttccagcgggaaagtccctgctgacttgaggctggagttcgctctgcagtttctttgccgtggtgcctacattagtggttgatgagataaccaagacctggaaaccttggcaccatctggaaattctcctcaccacccat

SEQ ID NO: 11337 - DNA, 201 bp, Bos taurus
gcagggcttccagggtgcacggggggaggggggctacaaacagcacagccaggtctgacagccatgctgagatcggtcatcggtgtctggccagcattatctggactgttttaagtacagtcagtcttcagttccgggtcagtgtgttcccatttctttggggccagttttcagaatcgtggctacagtgtggtcatcacg

SEQ ID NO: 11338 - DNA, 201 bp, Bos taurus
gtcccctagacacagtctataccccccgacgctgcatttacctggcttgatgtaaaacagggtgaagggagcagctaacgtccccgtggaggccccacgcgttgggatgctctagaatctaaattcggagtcatagaagctaaacatcctcccaaattttaacacagaaaccttagaataggttttgactcatcacagatc

SEQ ID NO: 11339 - DNA, 201 bp, Bos taurus
agaacttgacaggggaacggggtttgatttcttgagaacccaatcatctaatgtatcgcttgaaacagaaaaagccttgtcttctgcatgaaaacgaaatgtcactaacatgtatctgcccatgtttcatgctattattaccaacgccccgttttctttttaaatggtgactcagagctgtgtgtgtagtagggcctgctc

SEQ ID NO: 11340 - DNA, 201 bp, Bos taurus
ctggatccttttccaacattgagggcccttgtggagtttcctgaatgtatcccccactgtagcccaatcacacggagtaaaggaaacttccattcagaccgcctggccttgggggatctgtttggaggctggaggtcatcacttagcatgttcacctgagctctggaatatatggatatatgccaccgcccaaagcaaagg

SEQ ID NO: 11341 - DNA, 201 bp, Bos taurus
gcacgtatgattatcattattttattgcagaatgaggagcaatgctccctgtgatgagaggtgccagaactaacatctaagaccaagacggcagagcagcgccaggtgcagggtgcttttctgtagagccgtgcccagtttggcctcggtgtcctgcagctgtgactgcggtgctaacctctgttgtctccagatatgctg

SEQ ID NO: 11342 - DNA, 201 bp, Bos taurus
tcactccctttgtggcccccgtcacgtgtgccttgttctatttggtggtgtcctcaacgtccctctgagtgagtgtgcactcagtggcttcggtggtgtccgattctgtgcggccccatggaccatggcccaccacgcgcctctctccatggggttctccaggcaagaatactggagtgggttgccatgtcccctccaggg

SEQ ID NO: 11343 - DNA, 201 bp, Bos taurus
gacaaatgcctctcctccatcctccagggcgacagcatcagtgaggaccctggtcgatggccgagacctcacgtggcctctgagcccttcttaacgttgttcttcagggctccaccaagaagtgaagtgatgtggcatgcaagatgcaatctctctttatccttgaagtaccagcgagagaaaatgggccaaagagacatc

SEQ ID NO: 11344 - DNA, 201 bp, Bos taurus
caggcaggaagctgtagaagtgttatcaatacgacaaatgaaatgtggatgcctctagagtcttatacaaccaccaaggcccctctcggaatcatacgtacatccatcgatacatacaattttgcatacaagctcataactggaagctgagatgtctcacttaggatactgtcacaaattacgtattttaaagacaaggca

SEQ ID NO: 11345 - DNA, 201 bp, Bos taurus
tgggggacctaagatcccacctctgtgaggcaactaaacccacgtgctgcagctcctgcgtgtgccgtccagcccaagcaccccagctagagaaggccacccccacgaggaaagatcctgcacgccacaactaagagctggcgtagccaaataaaaatagttaaaagtatctggcctcttgagttcatgtgttacaaactt

SEQ ID NO: 11346 - DNA, 201 bp, Bos taurus
ggggtccaaccaggaaactcgggcctcagcatgattcagttctctgtgctcaaagtgacaactgtaagtcgcagcgttctgagtatggagataaagagggcggtggggccagccatggttatcatctgttctgatagtcatagttagagcctgctccagacacaaggccgacacagatgtagcaatgttgggcatgaaaaa

SEQ ID NO: 11347 - DNA, 201 bp, Bos taurus
ggagttgggtcatggcccactctgacttcagcccgtcccccgttcccagaaagatctgttaggacccaacagatcatgtccatatatttagctctttacataaggaaatatatagagatttaaaggtatatcattttacccccaaaactatgtaataaaaaccacagagagcaaaaacccactggactgtagttgtgacat

SEQ ID NO: 11348 - DNA, 201 bp, Bos taurus
gccccattatcttgaatatttagaaatgtccccaggattacgcaacattaaggattaactttgcaaccaaccgtgatccgatttctgatgctgtaagaagaccttctcttgacgtagcagatggactaactgggcaacaggtctaaagtctgtcttttattgcacaagacgagggttgcgggggcagagggtaaccccttc

SEQ ID NO: 11349 - DNA, 201 bp, Bos taurus
atcccagtaagctataagtaattgtgtttatttgagttttgttgttgtttgtaacttatttttagcatacgtgctagcaaagcaagcgccgagactaaattttgaagactgagctggaaagacgagcttatcttccgttatgattttgtcatggcacccaccaccgacctcttggcgcttccgcaagttaggagtcttccc

SEQ ID NO: 11350 - DNA, 201 bp, Bos taurus
gagggcgtcgtggtggtgaggctggggggcagggaggtgacggcagaggggagaacccgtggctgaggccaaggtgtggcaggggccagactgggggcgacctcagacacgctgaccctgatctggctccatgaacaagggcaccctccttgccctctctgggcctgccacttcacttccaaatcaccaggctgtggatag

SEQ ID NO: 11351 - DNA, 201 bp, Bos taurus
gttactcagacttccaggtgtctaagtatctcaagagaaaacagcttacaccacaacaatctggctatatccaggatcaggacacacccttctaaatagtatcatatagaggatctcctaccacccattaaagaaattccactctatttcaaggatctcgttccatatagaactcttcctgatttgggcctcaaacttaac

SEQ ID NO: 11352 - DNA, 201 bp, Bos taurus
gaaaaggagccgtgtgaggatgggagaagggaaggaaggctcctgtgttaccattaggacgcggctctgcacgcagtagtaggtccagattgagtcttggtttctgtcatcctccgttgtggccttctgtggccgcctctgccaggctccgtgttggtgcgcggggcccgcccacgtggggagcgcccgcgtgtgccgggg

SEQ ID NO: 11353 - DNA, 201 bp, Bos taurus
ttgaggagaaccaggaagaatgagggccctgaacctggagacagaaggcttggggagggagcgtgctgctgatggagtggggcgcgcctgtcagcgcccaagctgtggactctggggaggccgcgtgaccccacgtcacgtcctggatcagctctgtccagagcgtgcccacgccctcggcgccccctctgcggtcccgcc

SEQ ID NO: 11354 - DNA, 201 bp, Bos taurus
actcacgtcctccatgacgccggccgccggaggccgcagccgggccgcccagcctccgcacctgcgcccgctcctccttccgggacacgccctgggacccaccctttgctttcaattggccgaagcgtagaggcgggcccctcctcctcgctccagggccctgcttccggcggccgtcccagacccgcccctcgccctcga

SEQ ID NO: 11355 - DNA, 201 bp, Bos taurus
gactggccggctacagtccatgggattacaaagagacatgacttggcgactaagcagttacagcacgcactagctctcttctgataggctgtggaacttggtcagatcttttggcctctctaggattaagtttcttcatcagacaaattcagttcagttcagttcagtcgctcagtcgtgtccgactttttgcgaccccgt

SEQ ID NO: 11356 - DNA, 201 bp, Bos taurus
ggaaacgtttgagcttctggaggaaatctcccggtattgtagaatccccctgtgactgggtccccatggtgtttttaatgcttaaatttccacactgagactttcctacacttgcaccagttcccatacggtttccacttgtgagtctctgctccaatcaactgcacttccctgtattctccttttaatgtcttcagtctt

SEQ ID NO: 11357 - DNA, 201 bp, Bos taurus
gaccacttctagtttatcttgattcatggacctaacattccaggttcctatgcaatattgttcttacagcatcaatctccagctatatctacacctgggcgttgtttttgctttagctccatctcttcattctttctggaatcatttctccactcttctccattagcatattaggcacctaccaacctggggagttcttct

SEQ ID NO: 11358 - DNA, 201 bp, Bos taurus
ggaggcctggcgtgctgctatttatggggtcacaaagagttagacacaactgagtgactgatctgatcagatctgattgaggaaacaaattcagaaagtggaatattctgtagaacaatcggcctggattcatcaaaagattcagtgtcataaaggtctgtgggagacaatggaagatgaaatgtacacatggcattcaaa

SEQ ID NO: 11359 - DNA, 201 bp, Bos taurus
cctggaccccaggagtggtcacaggccctacatactgcctcctgtgtcccagaaatggtaaaatcaggagtggtcatgattccccaccaactcacctttgaactctgggactgatcattggccctagtcaacacctatccaaactccagaagtgcttgttagctgtctctactcccaccgtgtgccctggagttgcagttg

SEQ ID NO: 11360 - DNA, 201 bp, Bos taurus
taggaaacattttcatgaatatttggaaatcagacttatttacattaatgggccatttgatcctagtttctagtgtgttgtcttttatgagacttttccaaatagtaggagggagtcatggaaggttttatgtaatctccaaaatcatatagtgaaatctctgacaaatgaattgagcatatctatggggaaaaatacaaa

SEQ ID NO: 11361 - DNA, 201 bp, Bos taurus
gtcagactgtttgccactccatggcccatagcctctctgtccataggatttcccaggtaagaatacaagagtgggttaagtagatgactttccattaaattcactgtaacttttttaaaaggccatagattagacacacagaggcctaaggtttatggaaaaaaaaaaaatctgtatctatgcagtccaatatgataatta

SEQ ID NO: 11362 - DNA, 201 bp, Bos taurus
tgagtgcttcatgaagaagtaaaagcttgtgtggctattcctcagtctctctggctgttctgtgcatattatcctaggagaaacctgcttttctttaactctttgtctcctgtcctccatctcatctagcaaagttggaggacaggagggagctgaaggagtcatacccaaatctatacccttaggacttaagtctggcat

SEQ ID NO: 11363 - DNA, 201 bp, Bos taurus
cgttcttcgtctcgcctccaagcttcctaagaagccaggtctctgaaagcagccaggggcaggccgggtagaggggccagccgctgggttctcgggttgctggctgccctccgcaggaatgccaggtgaatacagaaggcgggacttgcgggtcgcggagaactggggccggagccgcgctcggctgtgcactggcgtggc

SEQ ID NO: 11364 - DNA, 201 bp, Bos taurus
gtggcctcaacatcctctgcttggcttccatcacttgtgtaaccaatttttggcattaaattacttctctttgcattcttgaataggttctcttttgcacgatatgctgaactgtccatgcatatgtgctttcattaattttctctgccactacaggtgctacatgcacaggttgatggcactaacatacagaagaaaatc

SEQ ID NO: 11365 - DNA, 201 bp, Bos taurus
atcagatcagattcagaagtactataaaaagtactaccccatttaaggaacaaacatagaaatatgacctagcattggacgctctgtaagaattggcagtgtctggatgaattactcaagagcagcactaagtgattacagataatagagaacaccttaataaattttgtcatcatgcccctaaatcagatacagctgaag

SEQ ID NO: 11366 - DNA, 201 bp, Bos taurus
ggaaacacctaggcattgtcgctgtgtgattcatagtaatgagaaaatctttaggaatttaaccacgccataaggaaaatgtttaagatggagcttgttgctcattcttgattaaactttcattttctaatgtattttcagaactttctgaacacaataatacttgattacagctgtatcttctttaaagaaatccaaaca

SEQ ID NO: 11367 - DNA, 201 bp, Bos taurus
acccactcaagtattcttgggcttccctggtggctcagctggtaaagatccacctgcaatgtgggagacctgggttcaatccgtgggttgggaatatcccatagagaagggaaaggctaattccatggactgtataatccatggtgtcgcaaagagtcagacaggactaagcaactttcactagtgatgggtattacagtt

SEQ ID NO: 11368 - DNA, 201 bp, Bos taurus
attttaaaactgaatgtcattttatcctccaaacctgttccttcctgttttaccttacctccatcaattcatctggccaactgataatgacaccacaaggattatttattactccttctccaaactgtcacaaccagaaactcaggaacttaatcctgaggccttcctctgactcagctgatcagccacaaaaacctacat

SEQ ID NO: 11369 - DNA, 201 bp, Bos taurus
ggtggagcttatataacaaagtagcctgtggccaagcgagtacctcacgaggcacatgcacagtgctgtaagtgatctcggttgttacctaattatttacgaaacttgcagcaaaagtgagaggccctggggcaagagcttgacctcgtcatcttggctaatttgctttttccctacagagagtttgatagggattgcaat

SEQ ID NO: 11370 - DNA, 201 bp, Bos taurus
aacacaaaaaaggtattgaggaagttaataactttaaactcatcttccaaaatcatatttaaagaaaattctgccatctgtggagcattatgataccgtccttatgattttatattatttcattttatgcatgacatgtgtacagtgtgctcagtcgttttagtcatgtctgactctttacgaccctgtggatagtagcct

SEQ ID NO: 11371 - DNA, 201 bp, Bos taurus
tcggggtgtgctagcagtcactgccatgttgaggggcggggccaggtttggagaggctggagccacaatcctgagtgaggttatcatatccttggtgctacagagtttctgtcttggccaggggtagcgatgggacccacgaggctggaagaggagccttgagccagccctggcctttcccaaggtgcactggtgattctg

SEQ ID NO: 11372 - DNA, 201 bp, Bos taurus
atgcaagccctcacaaactctgtagccaaattttgaataaaatcaattctatatttctgcatgatatgtgatatgtctctactctgaagtgaaagtgttggtcactcagtcttgtctgactctttacagccccatggactgtagcacaccagctcctctatgcacgggattctccaggcaagaatactggagccattcctt

SEQ ID NO: 11373 - DNA, 201 bp, Bos taurus
ggaataataatagcatctatttcacaaagcccttgtggggattcagtaagtcagaacatctcaagtgcttcctacagggcctagaacagcattggcactcgatgaattgtggtcattattgttgaaaattttcagctgccaaataaatggacaacatgtaactaattgccttataagatggccatcaagtgcttactttac

SEQ ID NO: 11374 - DNA, 201 bp, Bos taurus
agaactcggacggcatgtgctcgcctggcctgaggtcacttcagagccttttttcttcactaggtccacactctccaaggggactaccttgctctctgtgcaccaggacaggctccacagtgaacaccgacccacgacacatcctgggacgtgctgggtcacagccaccatcagcatctgtattttacaggcttataaacg

SEQ ID NO: 11375 - DNA, 201 bp, Bos taurus
tggcctggtgtaatcagtctgcccacagtggctggtgagcccgggtggggaggatgccacattcaaggctgggtgtttgtctttgctcctggcaggctggggaatcagctgtgctctggccccatccccttgttgcattggatccacttgctaagaccaagcataacctccagccccagtgcttcagccgccttatccacg

SEQ ID NO: 11376 - DNA, 201 bp, Bos taurus
ttctggggctccagccaagtggatgattgttaaccaagcgatttttaaaccgtaaaaagtgggtacccgtgcagacccatgagataaataagtttaggtgaaccaatcctgcccacctcccccctgctttgtagtaactggccataggtgtcaccacactgtatccacactctgatcttttctgatcagttcccacataga

SEQ ID NO: 11377 - DNA, 201 bp, Bos taurus
ttctccagcctccaggcctttgcatcaccctgatcacaatacaaagcagcctgcgggtgtgggcagccaccacaagaaacttgtgaagaaggaagattcttgggccccagcccagacccaccagaaacgggggtccagccctgccacagagttttaacaacccctccagggctctgaggcaccaaggctggagcgctgacg

SEQ ID NO: 11378 - DNA, 201 bp, Bos taurus
agctgctcactgccccgggtgcagcagaatcagctgggggactcgtcaaatgagatgcccaggtcccacccccagagttttttcactcaatgtaggccaaataacttgcacgttgaacgagttcccaagtggtacagacgttactggtccagggatggcactctgagaaccagcgatgcaggcctgagaatgggctgggtg

SEQ ID NO: 11379 - DNA, 201 bp, Bos taurus
cactcccccatctcccgccaccaaaggacagccccaagataaggctgaaagtgctcacaggaaaagcccttgctgtcagcacatgcaaactgaactttctctaggcctcccaagcccttaacagaatgcaggtcagattagcgcagtctctggcctaaaacctttcagtacagtccactggtttggggacttacagcaaat

SEQ ID NO: 11380 - DNA, 201 bp, Bos taurus
tcagggcatgctgagcccactgccttactgcttggggcccccatccccagatgcaagcttgtccctgtacccttggctctctgcccaaatgatgcctcctcgctggggcctccccgaccctctcatcataagtgggtatcccctaccctttgttttttagcactttactgtgttggaatgacacacaattatttgcacgct

SEQ ID NO: 11381 - DNA, 201 bp, Bos taurus
tggatcagaagcacaggtgctaacctggccttgtgactggcttcagaagggagtggcggtaggtgggggagtggagggtgcggtcttgtgagaccaaacccttggcctgtgggctctgatgcgctcgctctccagcgatcagtgtcagaactgaattgaactgtaggacaccctgctggtgttgcagaaaattgcttggtg

SEQ ID NO: 11382 - DNA, 201 bp, Bos taurus
gtcaactcgccagcacttggatggggtccactgcctcttctccagcatccatgctcaatagccttgcccagaaagcaccctgttgctggccccagcccacgtccgcacagtctggggcttctgctggatatatctcagtcacttagttaagagaggcagcgtggtggtgttcgagagtgccgaacctggggtaggccaccg

SEQ ID NO: 11383 - DNA, 201 bp, Bos taurus
gctatcgtatgacccagcaatcccattcctgggcatgtatctggagaaaacaataatacaaaaacatacatgcaccccaatgttcatatagccaagacacgaaggcaacctaagtatccatcaacagatgaatggatgaagaagatgtggtacatatatattaatacagcaaaatatcagtcagccatataaaagaatgaa

SEQ ID NO: 11384 - DNA, 201 bp, Bos taurus
agactagctaaataggaatgttgctacaatgctctttctttccaaatgtacgtgattcatttgtgaacagaaaagaatcaggtttcaaattaaattcctggtctctgggcctgcttctaagtttataagaggcagcaagattgttaaccaaagttaatgggacttcctggctagaaggttaaatttttacaagagtatggt

SEQ ID NO: 11385 - DNA, 201 bp, Bos taurus
taaacagacagagttcttcccgggataggtcaaggtcagtgttgaggtcactggcaaggaagtctggagtggcttggactgaagctactgtgtcttggggaaaaaagacttgttttcattgctttagtcatgagcacaaatcatgactccaaagcttgaaaacccaaagacagcacagcagcctcttatgatgtcactgtt

SEQ ID NO: 11386 - DNA, 201 bp, Bos taurus
tgggcatgtacataaacatatttgttcgtgaatgtgctgttttaaacaaagtggtcagggaaaaacttaaaagaggcatcatctttctgtaagacacagtagagtgagggagtgcagagccccaggccgaggaaacagtaaacacagagatgggaggtggggacaggcccagcttctccaggagcaggagacagtttgcgg

SEQ ID NO: 11387 - DNA, 201 bp, Bos taurus
aacacaagtgtgatttcagaattactaggagaaaattcttggaagaaaaagataacttacccttattaatttgaaaacgactctagaaagaaatagggagcgacactttctgcctcttacttatctgcattttctattgtttctacagtcagaatgtatcacctgaggaaaacttaagtgtggtattttatatatgaattg

SEQ ID NO: 11388 - DNA, 201 bp, Bos taurus
cttaggttgttggatcagtctgttataaaaagttatgagtgtgagagaatgattgatagctggtaattctttctgattttattggcaccagataaaaaggggcagtagtactgtgtcctgaagtctggaaccatgtccaaaaggcctgccgcctagttcccaaaagcgcctgagctttatgatgatgtctcttttcttact

SEQ ID NO: 11389 - DNA, 201 bp, Bos taurus
atgactcttgggttttccctttgcatgttttggatactcttttagataatttggctatggtgttgtatcacctcatttgcctcaaagagatttgccccaatgcttgattggaataagtggatgtgctgatggttttgagaatatgacaatcctgaagacatctttctggcttgactatttttcttacggcattgatgatat

SEQ ID NO: 11390 - DNA, 201 bp, Bos taurus
aatgaactctagccagattttcagaatccaggccgaattctgtctctatctttacacctttctagaactagaaaattcaattccttgaacccattatttgctctctacattatgcagttcatttggtgttattatcttgtaacttttggggtcagtgttgtcttgagttgacatttacttttattttttgaacagtagaaa

SEQ ID NO: 11391 - DNA, 201 bp, Bos taurus
ttagtcaggtccatgtcaggaacactcaagttttctagagagatgcgagactgaagtccatcaggaccaggcgtgggtcctccaactctccttattttatggaacaaaacccattggtttgcattcacggaaatattttttggaatattgaacaccactgaaaggttttttcccagtgcttctgtgcttggctaagtcctg

SEQ ID NO: 11392 - DNA, 201 bp, Bos taurus
aaatataagagcatttaacttgtgtgcaaacttattgagattatacaattcgtatttcctggcttatctgtggagggtgctttcaattggccagaggtggcaaacactaaccagattcagaaagctaggaaggaggaaaacagggtccctcatggctggggtgtgcttgagggacaagcacagaccctcaaggagggcctg

SEQ ID NO: 11393 - DNA, 201 bp, Bos taurus
ccaagggaggcagacagcaaacacttcacctgcagaggaatacaggcctgctctatcaaggtctcaccagtgaacctggcagatggaggagagatggaaagcaagggtgtggaaaagaggcctagaggaaggctctcagctgtgcaggaggaagctgcaagaatgctcatcccacttgtgtttgtgaaagagaaaaattga

SEQ ID NO: 11394 - DNA, 201 bp, Bos taurus
ggtccactcgtcatcatctaatacagagcagctcaattgggccgagtctgtgccaagcctcctcagagctcattggccaccctggtgacctgcctgcattggttgggacaccaaataccacagcatcagatgcggtgcaggtagcatgattggcccactaagtgcaagaaccaatctgggaacccaggaaggttgtgctag

SEQ ID NO: 11395 - DNA, 201 bp, Bos taurus
gatgacatggaatctagtcttaactgtgactaaccagccatgtgaacttggttgaacaaagtaccttcacgacacacttcctgtttcttcttcagagcctggaagccgcagtggccctacacttaccttacagagtcttttaggtgatcaaatgtgtttaagcatggttgtgctttgaaaaatgtaaatttctattagagc

SEQ ID NO: 11396 - DNA, 201 bp, Bos taurus
atcttgtagattgagggtgagaacatgttttttcccaaggagaggaggatgagctgaggcccttgtcttgcaggttgaccttggcctcctgtgatagagtgttgtgtctggattgtccgccgttcagggagcacctgggtggctcacgttgctctgagctacttttaggcctttggtcccttatcgctggatgttcacgtt

SEQ ID NO: 11397 - DNA, 201 bp, Bos taurus
gaacttctggatgggagcttgtgccctgaggcaggggaaggcgtcctgaaacaagaggcattcctgtgcacaggggagcttccttgcaggcgggcccaacggggagctgtggagtcttggaaaactgggcagagtagggaattaaagggcagaaaacagagcaagttgcacttctcagcccgtgaacagcttgcaaactat

SEQ ID NO: 11398 - DNA, 201 bp, Bos taurus
cggcgctggcagctgctgtcggctgcgctgagacgcgatggcagggtgcttagccagcactcccagtaagagggtctgtcaggagcccagtaagcagatgcagggctgagctaatgagctaagtggaaacagcacactcttttctcagaggctgcagacagagagatgactgttagtccccagaatggtactccgcaggga

SEQ ID NO: 11399 - DNA, 201 bp, Bos taurus
agctgatgcacaatattacataagttacaggtgtataatgagtcataatttttaaaggttatcctccagttacagttacttaaaacattgtctgtattccctgtgctgtacatccctgtagctcacttcacatgtaacagtctgtatatctcaccccactgccctagagagtccctcacccttctctctccccactaataa

SEQ ID NO: 11400 - DNA, 201 bp, Bos taurus
ctggctgcctgctccaggaccacaaagctagccgccataaacccgctgaatagcttagctgctgactgacaacttttctcctacccaatgaatgcaattcaaagttctgtggcctaaaatcaaaacacaacccagagctcaagacccaaagtcagacaaacctggttttgactctggtgtgtcccatggactgcaaggaga

SEQ ID NO: 11401 - DNA, 201 bp, Bos taurus
aacttcagagatatttctgttttccactgatttaagcattctttggactccttttatcttcagcaaaaagctccacgtatgttctgtgaagagccgtaccaaggtcatcctagatatgatacaggtatatgtttatcatttagttgcagtgtatgtgtttattccaaggccggtgggaatggcattttgtaacttgttttt

SEQ ID NO: 11402 - DNA, 201 bp, Bos taurus
cctgggtcctgctgccttttaatcagtctccctttgcaggagttgcttctgttcttttgatcactaaggtaaaattttttttgtttattcacttgaatttataataaatgaatttttcctttcccttttgacagctagctttcttagtctattgctttcattttgttatttagaaaataagatttgatactttctctttca

SEQ ID NO: 11403 - DNA, 201 bp, Bos taurus
tacctaagaaacaaattaacagggagggagctatgtcttgttatactttttactcaagacttgaatgaatatattagttttaagactttaaatcagaaaggtcagcagtgataaagttccttagcagttcaattatttttgtatatattttaattgtgcttaacagaaattgctcctgttctgtcttgtttgttataatta

SEQ ID NO: 11404 - DNA, 201 bp, Bos taurus
taatgggcggaaaactacattaccatcatgtttttctcgacccggtagtgaagcccacgcgggtatgggtgtaaaggggcctgcttgtttggcagcgggtatagagtaactggcattggtgcgaggggctggaaggagggctgagtaaacactgcaagtaacagtagagaaagatgccgtgggctttccttagacttgctt

SEQ ID NO: 11405 - DNA, 201 bp, Bos taurus
gctcctggcatctagtgggtagaggccagcagtactgctaaacatcccacatggcacaggacagtccctcactaactatgaattatccagcctgaaatatcagtaggcccacagttgagaaatgatgatctctggaccatagtacattaattactccccttccctccctcgttttcttcccaggtgccaaggttgtcttcc

SEQ ID NO: 11406 - DNA, 201 bp, Bos taurus
gaggttattgtttagttgtctgtgtttcttatatgggctttcttggtggctcagtggtaaagaatccaccttccaatacaggagatgcaagttcattccatgggtcacgaagttctgctggagaaggagatgccatcctgctccagtgttcttgctttggaaagcccacggacagaggagcctggtgatgtacagtctatg

SEQ ID NO: 11407 - DNA, 201 bp, Bos taurus
tctttgattcagtaggggaataactattaatgagtatgaactgtagctccatttcactgtagaagacacgccagatggttggaagtgcactttagaaggggcagagtcagaagtactatgggctaaacaaaggctatttggagatggggtgtgtatggaagaaaccaagagtatggctgggtaaggaagaagatgactgct

SEQ ID NO: 11408 - DNA, 201 bp, Bos taurus
actccactatattttgatgctaaatatccagcaagtcaagctgatagaggattaattcattgtcttcaataactgaagaagaagacgtatcataattttttattattttcttaatgacgtacattggatttggtagtctcgtctaccatttttgtttatatcactgtgaacaatgtggctctctttatttttggtaaataa

SEQ ID NO: 11409 - DNA, 201 bp, Bos taurus
gggcagaaacttcttaagtaagattttaagaaaccacttattggcctttcatattaaaaacatatcattttaaaagatactcaagaaaatgaaaaggtgtgttatagactgggttgaaatactggtacaacttatacatgataaaggatttatataaaggatatataagaaactcttccatttaattataagacaagcaat

SEQ ID NO: 11410 - DNA, 201 bp, Bos taurus
taaaatgagagatgtagaagataggaaaaaacattaaaaaatcataagaactttggtactacataagaagaattaaacattttacttaaagaaatttgctgtgaaaggtcatttgtcccctttctgctttctagataaggtctcaagaaagagtatattttttgtatatttttactgtgtaatatgtatctctgatttatg

SEQ ID NO: 11411 - DNA, 201 bp, Bos taurus
ggtgtgtcatttgagggctccttggtcagtcacccggcatgccagccagttcctgcatctgcatggagcgcagccagtgtggtgcagagtttgacatgctgccttttcactcagaagcacccagagtcaccaaagccaggaaggacacggtggggacctaaccttgcatcatgcagtcagtaaacgcactgcgttaattat

SEQ ID NO: 11412 - DNA, 201 bp, Bos taurus
tttttagctatgtttactcatcaaagtataggtcaagaaaaggaaaacaagagagcaaatgcttcttgtctcttaaggcctgctccctggttcctgagtcatcttcagggtctgccttccaccctgtatgacatcaggagttccagcacccttcaagagggaattgatgtggacttacctggtgggccagagactaagact

SEQ ID NO: 11413 - DNA, 201 bp, Bos taurus
ccattgtccctgggcaattcttgctacttcctcaacgttgactaggaagataaatagtagacaaatcatttatttaataaaaccaaatctagggtaatgtgtcctctggaaaagattaaccccctcaccctctttccttccttttgcctctcattaattgcctctaattactcaattgcatctaattattgccttctccag

SEQ ID NO: 11414 - DNA, 201 bp, Bos taurus
acttaacacctttttgaataacttatgacttagctttgtacttgctatacgtgatccagtcataatgtaaacacatttaatttaaatgtacttggtgtctctgaaaaggagcaatgtatattttttgagtatgtgaatgatgacagcatgaagagctatggcatcatgtcctctgagttatagtttaaaataaatatcatg

SEQ ID NO: 11415 - DNA, 201 bp, Bos taurus
tggggtctcaagagtcagacacttagccactaagccaccactagacttggcaacatttcaagtaatcttaaatttaggcttatgtggcctgattgagaaatgtttggtgctgaacatggagctgggatgactaagattttctgttttgttattaccttcacttggctcctgtacccaggcagtctgtgatacaggccagct

SEQ ID NO: 11416 - DNA, 201 bp, Bos taurus
gcagaaacacagggttatagagcagttatactcccagactgtatttttgctttgtattgactatgataattttctggtgggcagggccattatattttgttaggtagatactttcattttttatactaaatgtctatgagtagcataataatcgctgtttttttgttttctttctggattaggaaatgaaggcccagaaag

SEQ ID NO: 11417 - DNA, 201 bp, Bos taurus
catagagtatctttctggatcccctaaaatgggtataatagtttgttcaaaactggctatattattctcctttctataaacatactcttatcatgttacacggaggtccttcctatcaggagatggattctactctcctacccattccatctgaggtggccatgtgacttgtgttggccagcaggatgtagcagaagtgac

SEQ ID NO: 11418 - DNA, 201 bp, Bos taurus
gattctcccggcaagaatactggactgggttgccatatcctcctgcaggggatcttcccagtctagggatcaaaccagcatctcttacgcctcctatactggcagacgagttctttaccactcgctccaccctggaaagcccatgtaatggctagtgaggtatattagacagagaaattataccaggttcagataaagatg

SEQ ID NO: 11419 - DNA, 201 bp, Bos taurus
gaatataatttgctgtacaatgttgtgttcatttcttctgtacaatgaagtgaatcagctatatcctggtactcttggacctctttctcaccaccaccccctcaggtcatcacagagcatcgagttgagctcccggtgtgaaaataattgcaaatgaagcaacagacaaaggattaatctccaaaatatacaaacatctca

SEQ ID NO: 11420 - DNA, 201 bp, Bos taurus
ttaaacaaatatacaaatgaacttatttgcaaaagagaaacagattcacaaacataggagacaaacatatggttcccagagaggagagagggatacgttaggagtttgggaataagaaaagcccacacacgccaggcctccctgtccatcaccaactcctggagctcactcaaactcatgtccatcaagtcggtgatgcca

SEQ ID NO: 11421 - DNA, 201 bp, Bos taurus
aactttcatcatagagtgccttgttacctgggagagttcacaacctgacggttcaagccagtttgttcgtcctcaccttcccccaccccgccctggccagagttgactggtcacacagtctttctctaggagttttcaaccaaacatcttaagattcagaaacagtcagcagcctttttctctaaccaggctgctgccaaa

SEQ ID NO: 11422 - DNA, 201 bp, Bos taurus
tagtaatccccctaatagcatgtacattttaacaatgaactgaaaaacacatggaaggtgaaagtagagacatcaggccagcacaagccacggagtagcagtcccggacctttccaggactccagaaatcacatcaaggaagcagtgttccatctgctcgggcctaaccctataaagctgatgagtaaagcaaatagtcca

SEQ ID NO: 11423 - DNA, 201 bp, Bos taurus
tcaaatggccttttttgtagactgtacatcctttctttaaaggacattagtcatatctgagtaggacttcaccactgtcatctcatttaacctttgctgacaaggcacaggagggcctagaggagctatcccacattgaagatcaggaagggcggcagtgaggagatacccctcatccaaggtaaggagcaatggctgcgc

SEQ ID NO: 11424 - DNA, 201 bp, Bos taurus
gtctcattcaattgagttgttaatcttccttaattgcaaatttggaccttatggggatcactcattattgcagtggacatttgtcattttcctgagactctagtatatggggaattccatatcttatgagtcttggtaagagataagctggactccctttagagaagtggattgtctcattatcttacagacattctagtt

SEQ ID NO: 11425 - DNA, 201 bp, Bos taurus
tgactaggaactcaacgcattcggctcttggtaaatggatctcacatccttggtggattcttccaaaataatcatctaataatctaaggaaagatgatttggaatcctactctataagtgactgatgtgctagagtgagacatttcattaaatcgattattcactgagaaaatctgtgttcccatcttgtgccaaacacca

SEQ ID NO: 11426 - DNA, 201 bp, Bos taurus
atatcagcaggggttaggtttaagtacacacacaaaaatagcagtttaaataaggttgctttcatgcaaaagaatctcgagggtggccatctggagagatcatgttggttgtacttggttatcaaagacttgtggtcctcccaactcttccttctaccactagggagagtttcaggagctccatgagcagctcagctagta

SEQ ID NO: 11427 - DNA, 201 bp, Bos taurus
gacactgaggtttctcatttgggatcctcagagtgtatctcaatttctccttgtgatatcttgtagagatggaataaactgtcagaatccatatctaaactgctgtcaccttactatcaagaatatttaaatgaatgatagtaatacttttggacattcatttggaaatagttttagcatgtatgttgcttttttcttgac

SEQ ID NO: 11428 - DNA, 201 bp, Bos taurus
tgtatgacatgggtccactgtttatagactgacatttaaaaataggcctgcttatctgttaatggcagctgtggcaccaggcttctcacttgtgtctatgatggtctctaagtgaggcttggcccagtacacaattcaggttcacctaactttgttgttggtttctgtatatatgcaggataggttttatggatttcggta

SEQ ID NO: 11429 - DNA, 201 bp, Bos taurus
tttcttcagctgtaaaatgggaataatacccatcttactatatgggaatttttgaagcatgtgaaataacacaaccacaaggtaacaagcaccaaacaaacgttcattgttttgcttccacttttccagattgggtttgcatttccccaaaccatgtctctcggagaaggcaatggcaccccactccagtactcttgcctg

SEQ ID NO: 11430 - DNA, 201 bp, Bos taurus
acctgagccaatcctcagacccagaactcactggccaaagagaactgaggtcccctgaggacgttccctgcaataaatgccatggcaactgtgtacactattaatttcccacatcattgcaacgtgggtaccaatggatgctgccatcttgagtgtgggcaagtcctggaaggacgtgctccttttcattggaaatctgtg

SEQ ID NO: 11431 - DNA, 201 bp, Bos taurus
gacgttttgacagctcaggaaatttagagcactgtgctcggaacaccttccagtccagctgagaaaggagggttgttggattcctagctatttacctgttctcctcccctccattcttctcccctgaacaatataaattatcttttgccagatgaagaccttaagtagcaacctataagtctccttactaagctggacaaa

SEQ ID NO: 11432 - DNA, 201 bp, Bos taurus
ttactcctcatggttttttaaaatgataaaagctgaaagattaaatagtcggcccagaccgcagagttggtatcctaactctcaactctgatttcaaagcgcctgttgcccatttaaaaaaacaaacaaacttaattcttaaggaaaaaaccaccaattatgctgccctgtatctattcaggaaagttcacctggaggtta

SEQ ID NO: 11433 - DNA, 201 bp, Bos taurus
ctgggccgggggtggagggtgtaggggagggaagggatgaacaggctgagcacaggatatccaggaccatgaaaacacaccgatgattatgatgaataaagcttgtaatgtgtttggccaaacccaagaaggtacagtcctgaatattcactgaaagcactgatactgaagctccaatactttggccacctgatgtgaaga

SEQ ID NO: 11434 - DNA, 201 bp, Bos taurus
gccttagaaacaaatttaggtagaataaagattatcccataaacacccccacgctcactcatattccagtaacttcatgggaattcttgctaagggcggaatcacaactaggatgggagaagttgcacctgactgcagggtccttgcggccatgcagcaaaagggataatcctcattccactgcagcacagtaaggccaag

SEQ ID NO: 11435 - DNA, 201 bp, Bos taurus
ttatttacaaagtagggttttaagaccaacactgaggcctgatttcaccctatgccccttatccctactcccatcccaggcacccagctcacatggcccaagcccttcacacgctctttcctacatcacagactctcttccactgacaccctgctgtatttcccaccaagactgctcctaaggttactgcattagtgtgtg

SEQ ID NO: 11436 - DNA, 201 bp, Bos taurus
tgactggacaaaatctggaacctgacatactgacccccttgagttcttctgaaaatcacaggtgttagtaagcacgtgaccaaaaccatctgcatgaggttagcctcgagaaacgtcaggtgtgggtcctgctgtcctcttcccaaactggaaaggagtgtcagcttgaacactgggaagcagcaagggacggaggcagga

SEQ ID NO: 11437 - DNA, 201 bp, Bos taurus
gaataagaaatactctagagaaatacttaaaagtaaggaatctctattagtattaagatgtctatacgtggtgtggtagacaaattatggaaataacctaaatttctaacggatgagaaatacttaatgtagtgtaatagtctagtaacattaaaaataactatatggactatgctagtatgggaaagtgaacaaaaaaat

SEQ ID NO: 11438 - DNA, 201 bp, Bos taurus
cctatcagggattgaacctgggcccctaggagtggaggctcggagttctaaccactggacagtcggggaattctcaggtttagacattttgaaccgacttccctagtggcctggtggttaggaccgagcctccactgcagggggcgtgggttcaagccttggtcgcacgctgccctatatggccaaaacagagaaaagcac

SEQ ID NO: 11439 - DNA, 201 bp, Bos taurus
acacagccaaataaagaaataaatattaaaaggtaaagacttatttatgcaggattttttcttttaagaccaattctttacgatgcctgtgtcttctggaaaactgtaaagagggagaggagaattcagtgctttactgtgaatgaaatacttttcagctcaagttcccaagagtgggatttatctgaaagtcagttataa

SEQ ID NO: 11440 - DNA, 201 bp, Bos taurus
cccccaaaaaaaacagtttctgatttcaatccactcctagaagaatgagaactcagagtttataaagatttacactttctgtcatcaacatttttcatccccacgacagctcaggaaattcaaacgtaaagaccaatgggctgagtctgagagaccaaagtgacttgtcccagatcacgtgactagcaactcacccactat

SEQ ID NO: 11441 - DNA, 201 bp, Bos taurus
ttgaggaaaaggaactatatttgctatttgatttatacttttccatggtgcctggtaatgagctctgcccatcacaaatctttagtaaacattattgaatcattttctaactgctgatcactgttacatgatgggtttttgtttgtttcctttactttagttctaatggtactgctgtctcccaaatcagctgaaaacttt

SEQ ID NO: 11442 - DNA, 201 bp, Bos taurus
gtcattagcaacattgacgtgcttcagttaaatgaccaagtatatgtgactctttttagagaacacctagaaaatgcttgcaggtggcatgtgtcagtaaggccagccttgatctagcctccttggtctaccagatgttctgtgggcacttgtgagcattttctaagtgagtcagatctggaccttccagttgcttcttgg

SEQ ID NO: 11443 - DNA, 201 bp, Bos taurus
ctcatccatctttctccctaaattctatttctctccctacttagtgtttaagcaggatagaatactattcaggcattctgtaggcaaccttctcttctcaatctatgagctcttcttatctgacctcagataggcccatggctttaaataccatccaaatgtatatctccaactctgatctcgcctttggacttaggatgc

SEQ ID NO: 11444 - DNA, 201 bp, Bos taurus
agcccaatataaaatttcataatttatttcagattttcaggtaatcaaaaaaaatgacacttaaaccagcttttgattcagcaacaaaggaagaagaaatgtatcgtaccacctcagtcttcaatacctgttacaggagtatgttacagataatacagatagagttgtaataaagatagggttataacaaaactatgacta

SEQ ID NO: 11445 - DNA, 201 bp, Bos taurus
catttttctcccatgaacacctaaacctacaaacttagtatggagagcatgaacagagtcacgtttattgatacttcactatccccacagggcctagcacagtgccagcccacacttactgttcaatacacgtgacttctaccacttcctcctaacccactgcctggccccttctcccatctcctaaatgagggaatcagg

SEQ ID NO: 11446 - DNA, 201 bp, Bos taurus
caccattccacctctccaggccctggggttcttcatttgtaaaataagggagttatgccagaagatcacttaagacagactatcgcttaagggatcatccagctctaacattcagtcaaggccgatgcagtaactccaacaacacacatacacacattctaacatcctctgacgtgctcaaagtcaagcaagtgcaatcat

SEQ ID NO: 11447 - DNA, 201 bp, Bos taurus
tacttaacaggttggccttcacctgatcaggcctcatatgcccaaaatggctgccataaccccaggcattgtctctgtgtccaaggaaagaaaaagaaggcggccaacaccaagtatatctttctctttatcaggaaagcaaaagcctttttattggtcataactttagcacatgaccccccttagctgcctctacagtgg

SEQ ID NO: 11448 - DNA, 201 bp, Bos taurus
atggtcagagtttttttttttctaatatacataactagcataccaaactgatggtgctataaatataattacttagggtgaggccacattttttaaagtcaatttaaagagaaattttaataagcaaaagtaataagatagcgaaagtcattataacttttttttttttaggccgcactgtgaggcatgttggatcttagt

SEQ ID NO: 11449 - DNA, 201 bp, Bos taurus
ggggaagctgggcactgttgaagcagggttgctccccgggttggaaagctggaagacgggcagaaggaggacttctccctaacgaatccctggccaagcagtatgtcaatcctaagagatcacatttagagaaaactaaataactggatgagaaattcagttcaagaaacattggccagaagtttagatgttgcttttatg

SEQ ID NO: 11450 - DNA, 201 bp, Bos taurus
tagcaggggatgcgtagagaatatgacataatcctcaatctgagaactttcaatattagctgtggagactaggaattgatataaaacaataccaaaaagaccacgtagcaaagttttacaggtgataaaaacctaatgaaagtcaggaaggaaacaggttagtgttggaaatggagcacttaataaatgggatagaatagg

SEQ ID NO: 11451 - DNA, 201 bp, Bos taurus
aatctaaacaagggtaagaaaaccatggacagcataaaggacaccttgttttccctctttggctatgagagatttttgtttctgttgactgtgtctaatggtaagagtcgacttcctccacttcctgggcttcccgggtggcacagtggtgaagaacctgcctgccaatacaggagacttgggttcgattcctgcgtcagg

SEQ ID NO: 11452 - DNA, 201 bp, Bos taurus
ctcaagctcccatccacaccaggagagaggaaaaccccagaagaaacatgataccatttggctcaacttttttttcatcttccctgtagatactggatgcattaccaggtctcttgactgcggagttcacactgacagtatttttaagatattgcctcattaggacatatttccttcagtctgcaaatgggacttgctttc

SEQ ID NO: 11453 - DNA, 201 bp, Bos taurus
ctgaattctgaagatttgaaagaggagtcagtcagctggagatgaagataccaactttaagtgagagctaggttagagcatgtggcttagatatgtaaccgatgtttggtttgtttatttgatactttattcgtttcaccatttatgccctgctaccctgaatttcagctttgtgaacatatagatacatagtatctagta

SEQ ID NO: 11454 - DNA, 201 bp, Bos taurus
ttgtgaacaacactatgaccggtgaggaactggggcctccagccaacagccagaaagcctacccataaccacacgtatgagtttgggaatggcttctcccaccccagtcaggccttgaaaaaactatcaccctggccgacagcctgactgagctctcaggaagcaccttgaccaggggcatcagataaaccacgtctcagc

SEQ ID NO: 11455 - DNA, 201 bp, Bos taurus
ggatcgaatgaactaccataagtagtagagtgcctagagcagttcttggccagagtaagcacccagtgcctagtagctgttataaatattgcagcctccacactcaatgacctctgcacaagtggccagtcactaggcttccttatcatttccactctcaggtggaaaggggatacataaacatggcaaaaatagcaggag

SEQ ID NO: 11456 - DNA, 201 bp, Bos taurus
tggtgttttcaggtgtctttgacatgagtggctaaaacagaatcacttctacaaagatgcctctggcaagctctgtattcatttcactgcacttcaaatcaaggggccggtaaagtgaaacagagacgctcaacagcgatggcagacgtggctgagtgactcctcccagaaagcaggcttatctccatggggatctttctg

SEQ ID NO: 11457 - DNA, 201 bp, Bos taurus
ggatcaaacctgggttggcactgaaagtgcagcgtcctaaccactggaccaccagggaatttcccgtaggcatgggtttctagcagccatgtttgtctgacgtgttgatactccatgcactcggccacagttgatagggatggtaagcattccatgctaagccaagttctgttgggaacatggagctgggatggagacaaa

SEQ ID NO: 11458 - DNA, 201 bp, Bos taurus
atgtgcgtgaggaagagggaggggacaggctctttgtaaattatcaagacacaggcactgacacagcaaaagacgtctatgcaaatgatatgctctgtttcaataagtcaattaacagaagcccatgttgcaatcatttccaagcagtgctttggcaaaaattaatgtagttgaggggcttatcagataataacattgaaa

SEQ ID NO: 11459 - DNA, 201 bp, Bos taurus
ttcacatttcattatatgggagaaatagcggtaggaagtggccgattttgattgctactttgcctctccttcatccccctggtgattttggttgaaacacctgagaagagttgatgacaaaattaaaggagaaaggagcaaacaccagctcaataccattaagttggttctcctggacatatgttttcaaccttcatcctc

SEQ ID NO: 11460 - DNA, 201 bp, Bos taurus
gaaataaatgtgcaacttcagtgcctattcaaggacaagtttgggcttggatcagtcatgagtgaaatgtcggctggcaaatgtctgccttgtaaaaggtgcagggtggtttatggggttatgaagggatctgaagaccttggagataatcaaagtttattattcattaccttcaatttacatcatctagcaattattgct

SEQ ID NO: 11461 - DNA, 201 bp, Bos taurus
gtggggttgcaaagagatggacatgaatgagcaactgaacaacaaatcatttaggaaaaaatgtatttcccataaaggagaattatttctgcagaagtttgaaacttgctttagttactaagagactcttttaggagaatgttttataagtgtgtctaacttgacaaaataaaaaaagaaatgtacaaatctttagaggag

SEQ ID NO: 11462 - DNA, 201 bp, Bos taurus
aataattctattaaatggaaaaatatgcttctacagtcctttaatcttgtatagacatggacacacacacatacaccccttggcgttttaatatttgacggatgtttatcttgggttttcaatgaagtgttcacaaatattttccagcttcctgtggattatttaatttttaaattctatcgttcaatatctccctaacta

SEQ ID NO: 11463 - DNA, 201 bp, Bos taurus
acaggggccaaagtcatgtgcgttattactattgctgttggcatttattacctgctgtgctgatacagaaaagagggcgcatctttggccaagcaccgcccactatgctaatctatgctaatttcacaacaaccatcagcacagcacagggcaacagagcttcttgcttagccatccatccatgcatgcatgacatgaagg

SEQ ID NO: 11464 - DNA, 201 bp, Bos taurus
tgacttggcctctgttctccaggtgtgagtgacgcacggcattgctctagggcacagccactgactattctgaagtccctgctttggccccaagcctgccctgtgccatgccacggaatggtagccacatctctgcataccagtcagcagaccactctgttgcttgtcctgtgtctgtttgccctcctaggtggccttttc

SEQ ID NO: 11465 - DNA, 201 bp, Bos taurus
ttgtatcccttctttccctgagtacttagatagcagtgtggcccacttcagaactttctttcttgctttgctctggccacgaacatattttgagatggtacctactccatcaatcctgatccagtattaggagatgtgaagcaggcaggtgcccaggccagcccatgatgagtgtgtacattgaatgagaaagaaactttt

SEQ ID NO: 11466 - DNA, 201 bp, Bos taurus
agattaaaatacccttctctgtacctagtaagattatgcacaaaaataaagactgttattctgttccattttaaacaggtttatatgtccttgaaatagattgagtttcagttaggaaagtttgatgcttataatttatttatattatgtaggaatattaaattttagtctcatatacatttaacttccctatgggaaagt

SEQ ID NO: 11467 - DNA, 201 bp, Bos taurus
ccaatactagttccatgatctgttctatataaaatggtttgggatcataaaggtttgaaaatttctgaatacttgtaccactcttaggagctttaaacacacatgaacataggttctgggaagttctgtagtatatatgtatatgaatgtgtttgtgtgtgtgtgtgcacctttactgaacttgctataacttaaccatta

SEQ ID NO: 11468 - DNA, 201 bp, Bos taurus
tggaggctagaaacaggaatagcggcacaggtgagttaaatttgaaaaatgtatagaacctcaattagtctctgtaaggaggaaagaaaatctgtgcaaaagaatatttgttgcaatacagaaaaaaagccttacatcttcttacatggaaatttttctttaaagaatccctcactcattaaattgttacaaaatggaacc

SEQ ID NO: 11469 - DNA, 201 bp, Bos taurus
aaataatgctatgggttaaaggcccccttcccaacaggttacagagtataactatgttaacagtgtgagtcagtgcttgtgttatttctctactctgagcagattgttaggccacttgcatgttaagtgtactataatacagaaaatcaatgactacaccctccagtatataacagggtgaagccattaaacatttcatca

SEQ ID NO: 11470 - DNA, 201 bp, Bos taurus
aggcatttatgctaatgagatgactgagtctggaccccctcagtagcatcaagatgatgtcggtcaacagaatgacgaagagacgagaggattgcagggggtatgggctggaaattaagctcttgagcaaagacatctgatgaacgtccaggttggtgaggacatctgaatgcttggagggttacagaccccagttccatg

SEQ ID NO: 11471 - DNA, 201 bp, Bos taurus
attctgagtagatatccatcattctaggggtgaaaatgcttgagaaacatgctcaacaggacagttagactgagttcccactggccagatgaacagacaacgcattcatttatagacaaggtgggcttctgcaggttagacctgtgtggtgacacagggcctcaggatcagcagggccttgtgtttggggtttaaagctct

SEQ ID NO: 11472 - DNA, 201 bp, Bos taurus
gccctccactctgcattttcacctgactcctccttcagcttctctaactcctgagccagatgtgtatttaactccatgaccaaaaaatgccagctgctgctcctgcaggacacccacatcctaaggccaacatgggttccaggtcaccctctcaagttccagctcctgctgtggggttccaggttctcctggctcctccct

SEQ ID NO: 11473 - DNA, 201 bp, Bos taurus
tatttctaaaaacccagtcatcacagagtacaatctagtatcatgtaaacttaatttaccgtaggccaagctcacagtgtcccactagaaagatcttttctgaagtattcccacactgaccttgcaaacatattttattattagcactaaggagaaggtactgaaacatgtacattaattacatcatgtgtccaaggccac

SEQ ID NO: 11474 - DNA, 201 bp, Bos taurus
ctggagtttcagctagggttaggttgaggtattgatgaaacatgaattggcagaagtttctttttttatggagactggctgatgatacatggggatcttttagactcttctggccactttatttgaaatttcctctgaaaatgtttttaaaaagaaattcctttcagtaccttgactataacacatgggtcagcaaattat

SEQ ID NO: 11475 - DNA, 201 bp, Bos taurus
caccccactgcagcatgctctccaggtatgaccacaagggcacttactgcccttttatttttctttcaaatttctggccccaaccagactcagtgcagaagctcttaactttatcagaactacccaaggcagagagcacatttcagtgtgtctattccagggcatctactcaaagctcccttcaccgtggtctatttaggg

SEQ ID NO: 11476 - DNA, 201 bp, Bos taurus
ttccattaattctcgagccaggcttttatgactcaggggaggcctgggagagtacagcttttccacaaacaagaggtaagcagcagacacgatggggaggagtctgtcccaggaaggccaatagggtcctccttggttacacgggtactaagatcttgggcaccaagcagcacatggctcctctactcatgttctattggt

SEQ ID NO: 11477 - DNA, 201 bp, Bos taurus
agggctgcattcattggtctagagtgtgactcacagctaactcagcttgtcggttcagttcaggtccatatggttggaggactgagatccttgtgtattttatggccatccccctgcactggtctctactgttagaagctgcccacatttgtgctcatattttccatgtggcctcctccaatagccaacttgcatgcaggg

SEQ ID NO: 11478 - DNA, 201 bp, Bos taurus
atggccttgcagactgcatttttgtgacgggagagatgggattttgtgctggggctgccctcctccagagcaacctctgattaaccattggctttgatccgtcactttcaatccagggcctcaggtttctcacttataaatagagaagtttggattcgttgcatgtcaagagctatttgaacaccgcagtttattccttat

SEQ ID NO: 11479 - DNA, 201 bp, Bos taurus
cccgtttgtgtatgagtatgtggaggccccaaaagtttaaataatctgtccacagttacccagctagtcaaatggcaaagctgatgtgcaaacctcctccaatgggcctcagagctcatcctcgttctcttaaaccaccttgctcctccagggaggggtgctgcccaccactgctgagattcattgggggaagctttggat

SEQ ID NO: 11480 - DNA, 201 bp, Bos taurus
aaaggtgcaaatagaataaatggttattgttaaagtagaaaacaaattaatagagaaggagtaataaagcttacatgcgcaaatcagggcaatagattcacaatgtgcaaaggaatttctcatgacattccagcctctgagtcagagaaatactgaaaggggtaagcctggagatttggaaaaagaatttctgaaggctat

SEQ ID NO: 11481 - DNA, 201 bp, Bos taurus
ttcattggcgggcatagcccttggttgctatgagcgctgtacacacaacacagctgtcatcggtattatagatctaacgggagccaagggtctcacatctctaaggaaaaaaaaaaaaaattcaggactttggaataacatcaatatctataaataaatgtgagctcagagaagttaattacagaatacaagaacacaaca

SEQ ID NO: 11482 - DNA, 201 bp, Bos taurus
ttatgctggagtaacagggaacctgttttctatctgtatcttccctttggcaatatgaatgtctgacctttggccttttttaaaagaaaattttttggccatgccacagggctcttagctctctgaccaggaatcaaatcagctccccctgcactggaagtgcagagctaaccactggaccaccagggagtgcctggcctt

SEQ ID NO: 11483 - DNA, 201 bp, Bos taurus
cagggaattccctgccatttccaagaacacaaaggaagtagtaccttaggagttggtccagagtactttattgagctggttatactctgacagtcctgcctgtttcccaccagtgagtgcgtattttacacttgtgttctcactggggcactaaacagcttcagatgttcccccagcagttggtgtcttggccttggtacc

SEQ ID NO: 11484 - DNA, 201 bp, Bos taurus
gttcgatccctggttagggaactagatcctgtatgctgtcgctaagacccggtacagccaaataaataagtatttatttaaaaagaagaaaggctttatggttaagagagcagttactgtaccagggtctctcgaccttggcactgttggcattgtggactgaataattctttgtgtggggctgtcctgtgctttggagaa

SEQ ID NO: 11485 - DNA, 201 bp, Bos taurus
gtagcaggcattatgtcgggctgccagaattaaataggaaaaaaaattttaattctaattgtgctacactctgtggcctggtccatgcacttgaaagtgacatgtgcccaaggaaagatgaaggcatcaggtattgagccaacaatgattccagaaagcaccctaaatcataaagaataatgacttggaaggcttaaaggc

SEQ ID NO: 11486 - DNA, 201 bp, Bos taurus
tccagggcgaatgcctgatctccagtgccattaggtataaaggtgtcctgggaacaatcatcactctggcaaaaacagaagggccagtgaaactctacagtgggctgcctgctggtctccagagacaaataagcttcgcctctcttaggatcggcctctatgatactgtccaggagttcttcaccacagggaaagaaggta

SEQ ID NO: 11487 - DNA, 201 bp, Bos taurus
tctctggcttgtcctcttatagtaactgtctgaaagaaggaatgggcttcctgtctactctttgctcctggagtagtaggcacacgtggcaagtcatccgctctgtggatgtggcctgactgttgtccacctcctgtttcaggagtgaggcgagagcaggggtaacttgggtgggcaaataggacatcccagcgcattgtg

SEQ ID NO: 11488 - DNA, 201 bp, Bos taurus
actccgggtatcaggacgcttgtttgcagagccggccggccagccgcccggagcaggagcagctggttgtaattatgcatcgcagcttcagaggaagttgctggctgcggatccaatgctgggcccggctgcacactggctgctgggcttcagggaacaatggagatagaaactcgcggcagcaggggaaggggaggagga

SEQ ID NO: 11489 - DNA, 201 bp, Bos taurus
tatccccaagccctccccttttgtggatttacctgggtcataccagctgaaccaactgaagaaacgatgaccatgtgactggcctgaagcaaacagaacccagtcttcaccttttccctcatctgagctgctcctgtatgtctgaaggtctgagaaaaggtggggaaaggccatggcagagaggagaggaagggagagata

SEQ ID NO: 11490 - DNA, 201 bp, Bos taurus
tcgtggcccagtcaggacagcccagcttaaggaagaacagactctgcagtggacgttggaagggggacagaaaagataacgccaggctttgggggcaagatgaccccagtgcagaggccacgggtgtggaaacgctaggtcagaataaacgacaaagagaaggagctttggggaaggttagaaagcctcaacaaagtcaga

SEQ ID NO: 11491 - DNA, 201 bp, Bos taurus
agagacctatgctgaacccactgtggaggaggatttgtttccttcagagtaactgacacacaagacagacccccactgtcacaggcagtggatgacttcagctccgggccccgcagcgtccctaaatgggagaaaacgtgcacatgtaataaagcgagaacagcggaacaaggaagccgacacttggcgaagagttcctgt

SEQ ID NO: 11492 - DNA, 201 bp, Bos taurus
cacctatgggacagtatctgaaatggaattagacaaagttctggaatgtaagacacccaaagagtgaatgtttaaaaaaacaaagaaatttcatctaaaattgctataatttcccacttttctggaaaaaggctcttaaaatatgagtaatcttctagggctgactatattctaaacatatttggtaaaatgttctcttta

SEQ ID NO: 11493 - DNA, 201 bp, Bos taurus
acagctgcgccaggccactgaggaactttactactttgagtttgtgtggacaacttgccaatctgtggctttgcagggaggagagtgacttcctgcctcacggccacaagatagggctctggatccatttgcacttccacctagaattccatggagactggattatatttgcccaagtctcagttgggggtgtcaagcgcc

SEQ ID NO: 11494 - DNA, 201 bp, Bos taurus
cacttgatttttatatattgatttgtatccacacaaattgcaaaccctcttctaatatcaaaaggttcttttggattttctacagtatgtagagagttttatcatttataaacaatgatagcttcatttcctccttgccatttcttatgctttttaatttttccttatcaaactcttctggtcaggattgctagtatggtt

SEQ ID NO: 11495 - DNA, 201 bp, Bos taurus
tagtctaaatggctaaaatttgaacactattagaaaatccatttgtggaaaacggtgtgtctttaagaaaattaaacccaaacataatacagtttccaaaatgaatttgttctttagttcttgcaaatttgttataatggatttattgtgatatgaaaattttaagttttgtcagtttgaggagtccacataactttgtaa

SEQ ID NO: 11496 - DNA, 201 bp, Bos taurus
tttggaggtggaaaagcaaatgtttgctgggtcctgggagacagtataggacgcagaatagacgctggactctgggccctgtttcccccgcaacacccagcccatcttcttggcagatctctctggtggtaactccactgtgtgaacaggccctctaaattcttttagacagttagtgggaaggccaaggttctccctgag

SEQ ID NO: 11497 - DNA, 201 bp, Bos taurus
acatcagggcctcctgcattgggagtgcggagtcctagccactggaccatcagggaaggtcctctgacttgcattttaaaacacagaactgaatttgtgagagcagaagctagttttcaaagggcctatcttgtacagttgattgactttgcctttcagggcatgtggactgagggcatccagtaccctggactctatgcc

SEQ ID NO: 11498 - DNA, 201 bp, Bos taurus
gatttataaatttaaacttttagcattttgtgttactctgaatggatgatgtgacataactactttgtatttaagaaatacactaaaaaaaagttattttctattcctaaacatcttcccctaaagtgaattttatctatgtcccatggccatatatgacaccaactatttttgtgccagtaactgtgaaaggaaaaatca

SEQ ID NO: 11499 - DNA, 201 bp, Bos taurus
gattaaatggtggcctggaggctgactactctgctgaacccagagtagaggtgacaggtcctatcaggctttgctcatgctctttctttcatggttagctcctgctctttggccacttctgcctgctcaactcctggtagatcttcaaaactcagatgaaagagtagagaaaatgtatgctagtgtgctgtctatttcaag

SEQ ID NO: 11500 - DNA, 201 bp, Bos taurus
aaataacagtgactatagtcggatgtgaaaagagtcagaaactcagaataaccagggttcaggggctagtaagattgttgggttggattcaaggttggatattacaggtggtgatccaagtagacacagggagtgtggaatggaggtcctgctgttggggtgccgaaaattaggcagaaggcattaccaactttcatgtaa

SEQ ID NO: 11501 - DNA, 201 bp, Bos taurus
ctctcatctcttcccacccctctaggttgttacagagtcctagtttgagttctctgaatcacacagcaaattctttctggccatttatcttacatatggtagtgtgtatgtttggagaaggcaatggcaccccactccagtactcttgcctggaaaatcccatggatggaggaacctggaaggccgcagtccatggagtcg

SEQ ID NO: 11502 - DNA, 201 bp, Bos taurus
tataaacactgaacagcactcagggaaagatctgctgaagtaatcagccataatacaggacatgctggggtcagggtcaaaggaatccacttgaattctctgtgactgacatcatatctgaagactatgccatatgtcctaccaactgttacattcttctataccacacaacattgtctctcatacctttctgcatttgta

SEQ ID NO: 11503 - DNA, 201 bp, Bos taurus
tatcatgctgtatgttggcagaaatataggtgttttgtagcttgcacttaaatggctcactttgtaaaataggaaaaatgaatgaccagcagatgtgacagaagccttaaaaaattctactcagcagtcaactttagctacaaaatttgacaagcttgggcaatactaggttttagacagtgagtctataatttgcacata

SEQ ID NO: 11504 - DNA, 201 bp, Bos taurus
taaaagtgaaaatatagatgtcattttgcactgtcagtcagatatgcaaactgctatggttgccagcatcttttagaaatcatggagggatcactcagacagactggggataaagccaactgcaggactaagtattctggtttagctcacatgatatattcatcttgaacagcagggggtacattttctaaataggtcact

SEQ ID NO: 11505 - DNA, 201 bp, Bos taurus
tattgtgaggtttaaattgaactgcctatgtatggcatctatcacagtacctgtgacattgagtattcaataaatgttagtatccttccccttgcccgattttttaattgaatttattacttttcatgtgttgctactattttgttatatcagtctgaaaatcagggttttctcacctatacaatcattaatataaagccc

SEQ ID NO: 11506 - DNA, 201 bp, Bos taurus
ttctggaagctggaaattctgaagtgaaggtaccagcaggttctatgctggatgacaccctgcttcttgcttcatagatggccatcttgctgtgacctcacgtgctggaagagctttctggagccccttttataatggcactaattccattcataaggatatcccctaaaaggccccaactccagatttcataacattggt

SEQ ID NO: 11507 - DNA, 201 bp, Bos taurus
ctcagttgtagagagccactttacccagtcatgatctgaggaagtggtccgcatccagtgcatggtgaagttgggaatataaagtctagctcaacttgaacgattgtcagtggccattgcagctccacagactcacatccagagattctcaggcctgaatctaacttgacttcttttacccaattctgctgcttcttcctt

SEQ ID NO: 11508 - DNA, 201 bp, Bos taurus
catgtagggacctgggccaccttctggaatgggctgatttccttgagctgtcataagtcttacttcaaactcttgtactctgaaagacacaaacttaacccaaaggttaaacaaacaagggccaaaaaggagaaaagcagtaatagcctttaaatggttcagaaaggaaaggaactgggattcctttactgttgaccagac

SEQ ID NO: 11509 - DNA, 201 bp, Bos taurus
tcaagtcaagatgaggtcactggggtgggccctcacccaatataactggtttacttgtaagaagaggaggagaacatagtatgatgacagattggagagatgcagatggaagcctggccacgagaagctaggaagaggcaaggaaggatcctacccagagtctcaaagggaggccagctctgcagacacctgattgtatgt

SEQ ID NO: 11510 - DNA, 201 bp, Bos taurus
gtagggattctttcaaccattaggcttttgtaacctcttacacctgcaatttatatcattgctatggtctgaatgtttgtgtatccccaaaagtcatatattgaaatcctaaccttctaaggtggggtcgttagaatatggggctttcaggaggcacttaagtcactgatgaattgcattgctgctgctgctgctgctgct

SEQ ID NO: 11511 - DNA, 201 bp, Bos taurus
tgtgattggtcagtggccaggtacctaagtatgacccatgtgagaaaggcaatccatcatatttcagggcattgataagaccagagattgtagcataatttaccaatggcctaggaccagtaaaaatattctcttggtattcacagtgttagcagctggtaatgattaaggcaccttcaaaagccattatgccttgtacat

SEQ ID NO: 11512 - DNA, 201 bp, Bos taurus
ttgagcagttatgttttatcatacattgacagaaaggttgtttaggatcacagatttgccagtgttagtaatattattagacttattatctaggctcagagttgtatctctttatgtcttgtgagacttaaccaccaaatttcaatttcgtttagttttcaaatgctctgagaacaaagtcagctgcttatcgtcttagtt

SEQ ID NO: 11513 - DNA, 201 bp, Bos taurus
tcaattctagagaatatttatagttaaagagaattgtaactagtagtgatttcaaatagtaaagaattgtctgtgagatctaactctgtgacctcgtctccggccacgatctccattatgaccttacttttgccaaagctaatttgtttcttttcttaaatcacaagaatatgcacactgctacttctgcctgcatgttgt

SEQ ID NO: 11514 - DNA, 201 bp, Bos taurus
atagatgagaatcagaagaccattgaaaggttatttagatatcttggaagagaactacaattatagacaatagcaaattcaaaatgtttcacatggaaaaggggcaaaggaagaaagaattcagctctttgtaaggacagaaagaacagtgaggttggagaggataattcaagcaggaggatggtaagtgatgtgggagag

SEQ ID NO: 11515 - DNA, 201 bp, Bos taurus
ctaaacatcaagtatttgattttcataatttttttaacctgaaaagatgcataaagttacccactggaaagcgtatgtgttaaactgactactttttttttaaattttattttatttttaaactttacaatattgtattagttttgccaaacatcaaaatgaatctgccacaggtatacctgtgctccccatcctgaaccc

SEQ ID NO: 11516 - DNA, 201 bp, Bos taurus
tatttacttttcctatctgcaacatgtctcttaattttatataaatttctatatttatgttttttatttatcaccaagcattcaatagacaatattgtgctcatccatgttgcttttcaaaataaaagcacttctctgcttttcaaaataatctcttcctcaattgccagtatatccaaatggtcagggacttatgctgat

SEQ ID NO: 11517 - DNA, 201 bp, Bos taurus
tgataatattctgtcatttattgatacctttaaagttacaaaagttaaaaattaataaacaacataaaatcattttataatacaaatatcatttattgtcacactaagttttattacaaaatttcattctcaaggtccatttctgaaccactcactaatctactcaaggaaaagctttctaatgtcaaattgaatagatta

SEQ ID NO: 11518 - DNA, 201 bp, Bos taurus
tcttctgataggcatttatgtgatacataaatattttcaccttctcctaagaaaataatccatatacttctctagagtttttagggccaactttcatcaacatcatcaaatctaaatatttcctgttagccactctctgtgaggcaatgtagatccataaattaggccatctgtcttttcacaagaaaaggataaccaaac

SEQ ID NO: 11519 - DNA, 201 bp, Bos taurus
ggcatgcacgttctaaattaaaattatttttattagtaaaaaaaaaaaggaatataactgctgctgactatttacaatggccaagacatagaagcagcctagatatccattggcagatgaatataaacaagttgtgatacctatattcaatggaacattactcggccataaaaaggaatgaagttgagttagttgtagtaa

SEQ ID NO: 11520 - DNA, 201 bp, Bos taurus
ctttcatgttgctcagaaaagagttttacatgaccatagaaacaaataaataggtataaatataatcacttatttgtttgcatgtggataatatattattatgaatactttaagttccttccagcctatggctattgtataataccagagggagtagtacttgactttatgaaattgctctttgagaggtaacaactctgt

SEQ ID NO: 11521 - DNA, 201 bp, Bos taurus
aatataacccaatttccttctgcttaaatttatcaattaggaaaatgtaaagcatcaattttttcaatgacttcgcccaactcaatgctgaaatagtattgtactcagttgcttcaattgtgtctgactatttgcgaccctatggaccatagcccaccaagctcctttgtccatgggattctctcggcatgagttctggag

SEQ ID NO: 11522 - DNA, 201 bp, Bos taurus
tatcagcctccataattacataaaccaatttcttacagtaaaactttctttctttttttgtcctttcttttctctctttctttatagatatatatatagagagagagagataaagatatatacatgcatatatcctaatagttttgtttcttgagagaacccagacttaatacaatgctcattctatagatcttccagtgg

SEQ ID NO: 11523 - DNA, 201 bp, Bos taurus
tacttccaggatttaactggttggcccagagaaaatttactttaaaaaaattatagttatattcaggtcactattgatattattagatggaaccccctcacctggccaattaataatacctactctgactctatttctgctttattgactatgtcaaagcctttgacaatgtggatcacaataaactggaaaattctgaaa

SEQ ID NO: 11524 - DNA, 201 bp, Bos taurus
tacagataagcactaaagtttttatctagtaccatgaagggtatcagagcatgcagactccaaatatgcaattttgacatgttggttattttgagctaacggtacttgagaaacagcaggtacaaaagggttctctgacgtccctggcttcccatttctatctcaacataaatcaccaaattttctgtgagaaaagtgtcc

SEQ ID NO: 11525 - DNA, 201 bp, Bos taurus
cctttttatagaataaataaacatttgtctattttctagaacaggggtctgcaaattatgacccatggttcaaagttggcctgtggactctactttaattatacatttgattaactaggaatagttttcatatatttaagagttgttaaataaagtcaaagaagaatgtgtgacaggattatatatggcctccaaaaccta

SEQ ID NO: 11526 - DNA, 201 bp, Bos taurus
ttgttacagctcggtcacagctcagttttatttgacaagcaaaggagagtacaccctcaaggcatgagggtgagtggaccccaaaggagaggccttaatccatcttgaccttctccttttatatgtttgtcttctccccaccttgagcctgccttctgcaaattgggctagccaagaacgggccgtgtttgtttcacctaa

SEQ ID NO: 11527 - DNA, 201 bp, Bos taurus
cccattggctctttcatggagataggtccagcctttgagcggttggaaggaaaggatgccagcaaaaatggctaatccttttccagctgcagtaaactgacgattggccaaagccaagagaaaaccgccgcagttaaaatgattttagcgtcacgtctgcagctgagaatggagcgtcagtttttaaaaggacctgtggat

SEQ ID NO: 11528 - DNA, 201 bp, Bos taurus
cagtggcctgtatctctggcctctgaccataatattttcttcttgtgtattttttttttccctccttatgtgagacagaaagttaggaggaggcaaaagtgggaggaatggccttctttcagggctctgaaataagactctggtagagtctttcccagcaatgcagggcttttttagatggaatgcttgtggtgtaatgta

SEQ ID NO: 11529 - DNA, 201 bp, Bos taurus
gatactggtgtgggatttccttctctgcgggatcttcccaacctagggatcgaacccaggtctcccacattgcaggcaggctctttaccatctgagccactagggaagcccatatatcaaatgaatcaaccataaatatacaattgttcccctccttcatgaacctccatcccaactcccacctcatcccatccctctagg

SEQ ID NO: 11530 - DNA, 201 bp, Bos taurus
tgaatatatatgattctctcacatgacatttagcaacatccaatcctatgacacaacacaatcttaaatattatcttgtatgtgcttattagctcagtcatgtcccactcatccgttttctggtatatatagtttaaatgaattttaattacaataaaaagtacagcagttatttctttcctagaagtaagagaaacacta

SEQ ID NO: 11531 - DNA, 201 bp, Bos taurus
ggctaatttaaataagtttattggtccctggggcacagggtctgtctcctgttgtcccgtatttgacccttctggtgattacagcagtggtatcctggccagagtatgaaactgcagtaatggaggaggttaaagtatagattaaataaactgctcaagggcatggactggcctcaggccaggaccttaaaattaatactt

SEQ ID NO: 11532 - DNA, 201 bp, Bos taurus
caacttcagagaagattataccatgaatctatgaaacaaccaaacaatgcaattttattgtcttaaagatatttttcttattaaataatactgaatgaacatgaacctctactcaattatccacttttatttctctcatcatttccctcttccatatctgaggaggtgaaatccactcctaccatatactttcagccaaaa

SEQ ID NO: 11533 - DNA, 201 bp, Bos taurus
atgaatttcagcagaaaatcatattagcctattatagctcctaataaatgatgtcataaaatcaaatccatggctatactgtggatctaaaaatcaaaacaataggttatagaatataacataatagggtatgtccatggcctcagaatttttttaaaaaaggtctataagaaaaagcccaacagaaacatgtgtaagaga

SEQ ID NO: 11534 - DNA, 201 bp, Bos taurus
tatttatcccattactgtataagccagcattaagatttatgataggtgaaagcacagatgatggcattaggctctcatgattcgatccaattggtcaggtattagaacacactcaagctagagttgttttgagaaaattaaatgggatcaccacttcaaacccaataggatgttgacccaaaatatgctggtggcacctgt

SEQ ID NO: 11535 - DNA, 201 bp, Bos taurus
gcatggccaaaaaagaaaaacactttctaacactaaattaataagatttatttagcctttgacaccctggacgtagttccaattttagatcccccagctgctccataaatgtatttcttaacttctaacctcaaacttcagcaacaaaaagtataaatacaaacattctttcctgtagtatgtataaatgtttcccacaga

SEQ ID NO: 11536 - DNA, 201 bp, Bos taurus
gttgttcatgctgcaaaaatatactgcctatttacactgtgtgggcctttgtaatgactgctatcattacagtgtgctagacgatactctattcttcacatgtttattctttagtcttaaaacaattcaaaagcataggtacagtacaaattaatcatttgaaacctctactataacagacttgagaggccagaaagagaa

SEQ ID NO: 11537 - DNA, 201 bp, Bos taurus
gagaggtgtcagtgtggtggaagcagagagcagaggaagcacagacctaatgcctcccctactcgctcacatcctgaaagcccaccatgcttggggtggagaatcactactggaaaatcatggtgtatgatttgcatttgtgtatgaacagaaatggggttgttaaaataattttgttaaatgctgaaaatgaggataatt

SEQ ID NO: 11538 - DNA, 201 bp, Bos taurus
ataagagaatgaaatattgtagaagaagtggctgcagggtggggaaaggtaagtagaatctaaaatcatcatcaaaatctatcttagtcagaaatccaaagaatacaagcaaatgttggcagaggagggtcagagtggcctagcacagaagcagaaacttggaaaattaggttttctcttttcagaggtctggaatcagtg

SEQ ID NO: 11539 - DNA, 201 bp, Bos taurus
ttcagtcctggggaaactgggacatttaatcgtcctgcagaggatactgattaaagatctctcagaggaaaagaggaaaaaaaggccactttaattatgtgtcaggaccagagaatatatcaatagcttagaacctgtgagtcagttaggaaccttcagcctcctttgtcctctccttcctattccctggcctttcctaga

SEQ ID NO: 11540 - DNA, 201 bp, Bos taurus
acagacattacaagaaattcaacaataaatagtgtcttgtccttgttcctgaattatctctattttgctggaatggctaaattcatgcctcacttagattatagtattatgaatatcacttcagttcagttcattcgctcagtcgtgtccgactctttgcgacccctgaatctcagcacgccaggcttccctgcccatcac

SEQ ID NO: 11541 - DNA, 201 bp, Bos taurus
tgtgggagacgtgatgaagaggcaggcccgtgagacctttcacgttcagggaacagcagtggagtcacagcaggaatcatcagacgactggagtcaggaagacgagaaatggccacagctacatgtacaagtacaaagtctaagggcaaaactaaaatccatgggactttaaacaaccatctagagtaatctgaagggtgc

SEQ ID NO: 11542 - DNA, 201 bp, Bos taurus
ctcctcaaagttctttgtaaactataaaaaagttcatataaaactattctttgaaaaaaatcagtaaatcctaacgtaagaaatataaacttatttaaatgttttctaacacccagtggttttcgagagtttaaaagataactttttattgccatgctgataaaatctgtaattgttcaatttttaaaaagctgttgtgtg

SEQ ID NO: 11543 - DNA, 201 bp, Bos taurus
agcacaccttctgaatattttagtagtgttctcctccacagaatccccccctcccctgtgttgtaatgcatattcaagttaaatcagatcatcaataccaaagtccttgagcataattgataggatagcatggaagtaatgctcatacaatacaaatttactggttaaatagagggcactgaaagataacatacccacatc

SEQ ID NO: 11544 - DNA, 201 bp, Bos taurus
ccttttaaaatttattttcttttctttgaggtggtgaatgaaggggtcaagtagtggacttggattcaaatttcaattttttctacacatcaaaattaatgaggcctgtgtccttgtactagttttcttttgaaatcattattgctacccaatcattccatggtcactggcaataataatagatttacctttttaaaagaa

SEQ ID NO: 11545 - DNA, 201 bp, Bos taurus
tctatcaaagagctagagaaaggaactctaacttataaacattggggatgtcagtgtccttgcaatcttaccctggtcacataagaaatggacacacgctgttctttctgaggaataactagggctacctgccactctcactctaccaccaaacagggaaaaataaatgaaaagaggtggtacaagggaagactgtcaaga

SEQ ID NO: 11546 - DNA, 201 bp, Bos taurus
aaacacaatctaaatatgataaagatcagagggtcttagatattgaaaagtgagagtaagaaaaacttttgaaagaaatgaaagtgaatgttacagctccgaaggagcagacctaaggaaatccatggcctgcgccatcaggacagaatggaagagtaattcaaacaagagatggatacactacagccatcgtctgttcta

SEQ ID NO: 11547 - DNA, 201 bp, Bos taurus
caatagaagaagattttttcatattctaataatcatattgttcaacgaaatctccaaatgagattttactttcctcactaatcatggtgagttgtcaaggtttacaaagatagtatgaataattttatatgtctaattgcccaagaccgtaacaaacaaagaagaaagatatcccaaataatcagccaccaatgagatcca

SEQ ID NO: 11548 - DNA, 201 bp, Bos taurus
aggaagctgagctttggggccccttgctcaagaggggagccttgaaactactgcattgagttaagaacctggagagggattaaggaagtctcaggaaactgtcttggggccactggcaggagaagcaagataacctgatcccactataaatgaagaactttgaagtagattatagtggtctctggcaggcctgggactatg

SEQ ID NO: 11549 - DNA, 201 bp, Bos taurus
aactctcaaagcaggataggagtggggaggagcaccctgcactgctgaagggcagaggagggcggaagcagggtggtggggagggcaagaggaggcctccgggagaatttgggattgagaggttgtggtgattccttagtcagcaggagtggacgctaaaactggtgggaaggccagcagggccaggcactggacaggtgc

SEQ ID NO: 11550 - DNA, 201 bp, Bos taurus
caaactgcctgggaaacaccagcagttttagtttcacatcagctggtgaacggggaccagagcctcaggaccacgttgaggcctggagatatcagagcaccttctctttctctcatcactgtattattaagaagctcaaaaacgcctctctccatgtgatagagaaaaggccatctgcagcctcacgtccgcatcctctgt

SEQ ID NO: 11551 - DNA, 201 bp, Bos taurus
actgtaaatatgcaaaatccaaaccatgatactgtcaaaagtctgagcagaggacaagctgatctcagccacctctgtactggtcgcatcttagaggaaacggtattgacagcctttctgattaatctaggtgggctgtcctggtgcctttctgcaatcttcacaccaaatgaacacaggtagctattaaaccagtgcagc

SEQ ID NO: 11552 - DNA, 201 bp, Bos taurus
ctctgaagatttggaatttaaacaatatcctttcaatgtaatttaaataaattcttagggggtaccagagattaaggaatggttgagatatggtctcttttgttttacttttaactgtgaaatgtaacaaatgtagagaaaagtatacaaaaaatatggttcaccgattttcacaaactaaccagtcaggttatgaagtaa

SEQ ID NO: 11553 - DNA, 201 bp, Bos taurus
ccctctccttaggcattttttgagctttatattattattattagactgtattcctcattgtgaactgcttagtggtttattagggacaagtgtggccactacctctggaagatgccagagtggtgtatgtaaaccatgatgaggttttagcagacaggggatggtatgttagctttggccttgagttcttgagggatcatg

SEQ ID NO: 11554 - DNA, 201 bp, Bos taurus
gacatgtgaatgctgcaaatacagagagagaggaagcaggggctaaagtcagttcgaattccagaacgtaacttgtcccgggagtcattacagggaagggcaggtcattgaagaatcatggaagaggaacattgaagaaaaagatgagcgttattgttaaatgtagcagtgtttgaagattgagaagagaccattatgagt

SEQ ID NO: 11555 - DNA, 201 bp, Bos taurus
aatgtttctttttctcattcttcattcttttgagttccttctttgtcattttttttttcttcctacccgttatatggaatttaatctcatccttttgttttctggtgtgtctgaagcttaggcaaaaacaggttgttgttaatttcagcaacgcatctcaggggagtttgcctttgaaatgttccctttgctaggtggtcc

SEQ ID NO: 11556 - DNA, 201 bp, Bos taurus
attaggagggaaaacgcatgctctgggccacctttgttttttccatagtttcctttgtgctttcgctatttcttcctgtagagttctctttcagtctcttagatggccatgggatttttgtgtggttctttatggctaactcactgtgtttgaaaaacttatgtccattcctgaccttggtcttatttactccatttctct

SEQ ID NO: 11557 - DNA, 201 bp, Bos taurus
taaagctataagggcaataagactcttggataattttcccctagacctacagtctggtctttttaactgtatttagattttttaacttctttcagtgcaattgagtgacaccaaaacttttaattataaatagaagatttaaaaaaaaaatttgggaaaagccttatggctccttcattctttctttgctgctcgtaataa

SEQ ID NO: 11558 - DNA, 201 bp, Bos taurus
ttagcaagaaaggaaactcaggtttagaagtacaaaggaaatggtagaagaatggagagttatttggagacaaaccttatgaaattcagtgaatgagagcgtaagtttcaatttatgatatggaaggaattgaggcatacctaaatgttgtttataagggcaaagactaagggattgagagaaggatactaggaattaaga

SEQ ID NO: 11559 - DNA, 201 bp, Bos taurus
tattatggttaccaaagaggaaatattggagggagggataaatcaggagtttgggattaacatacatgaactactatgtaaaagataaaaaaaaaacacagtaagagcctaccatatagcacagggatctctactcaacattctatgatgacctatatgagaaaagaatctcaaaaagaatgggtgtatgtctacgtataa

SEQ ID NO: 11560 - DNA, 201 bp, Bos taurus
ttaaaaaacaaaacaaaactaagaggtatggaggagatcctggcatagagaaaatgaataccaagaatagtaaaatgtgccttcaaataaaggaaaacaagcaattccaggttaactgtaatggactgaagttctgatgacttgcaacaagagtcttaagattatcatttcttagaagagagggaaaggggttctctagtc

SEQ ID NO: 11561 - DNA, 201 bp, Bos taurus
ctctcttcttctctctgtagctggggctaaaacctgcgccagtgaccactgggatttgtaacacccttttgccaggaacagaggccagacagtcattaaattggatataaacaaggcaggaattaagaatggggaatgggcaggctagacctcctatgaaagcatctggagaaaacccagacttcccagatgtaatctcag

SEQ ID NO: 11562 - DNA, 201 bp, Bos taurus
gcagcacagtgatgaataaattcaaacaaagctgaaagtaagaccctaggacttaatacagtgtaagaaaggcctgggcaaagagagacagagagattgagggaagcaagtcagagaaattcatggtagcctaggtaattgacagtagttttggggagaagagcaggtgattgtatgcctaactttcatgaggtagggata

SEQ ID NO: 11563 - DNA, 201 bp, Bos taurus
agacacaaattaggacagtagaggaatataaagccactggcctcaacagctactgcaggcattaattaataagcaactcctattcagattagcgtaaaccatcatgctaatggcctatttactttaaaacctattctccaatacagcatcactggcatttaacaaaaaactacaaggtataccaaaagtcaataaaaagat

SEQ ID NO: 11564 - DNA, 201 bp, Bos taurus
gttttgcatttcataggcagttggcccagtgtgaaggctatgaagctgttccagaatcatctaaatgaagtatttggtaacagatggcaataaacacaccgtaatgggccttattttgttttattttattagaccaaggttatggccacagctatgaacttaatctgtctttttttatagccatgagagtggttaacattg

SEQ ID NO: 11565 - DNA, 201 bp, Bos taurus
tcccatggacagaggagcctggccgtctggtccatggggtcatgaagagttggacacaattgagcgcgtgcacacatacgcacacacatctttattgaagttgtaaactttctccatagagatcatgtgctcatctgtttcaaatggcctgatatttcctactgttcaatgaaggcagatttttaatattagaagagaaaa

SEQ ID NO: 11566 - DNA, 201 bp, Bos taurus
tcacatggcctgagttcagaaggagtgaaatccgataacggacaagaaatgaacttcctttggtccctcagcaaactgatcagccctcacaggataggagatgtttcagtggccaaggagtctatcatcagggactcagagataaatgaatacccaacaagaacataaatgggagcctttaactaagcactactcagaaaa

SEQ ID NO: 11567 - DNA, 201 bp, Bos taurus
ttttagaaaaatgtaaacatatgatatagaccctttgtctgcatcccatcctggaagcactgtccttggggcagatggcaccacagtcccaggattcttagtgggcacaaataaaatacttctcagactgggagccccaagatcagtcatccctttgctcaggagaggtgttcataaggccaagcttcacatttataacca

SEQ ID NO: 11568 - DNA, 201 bp, Bos taurus
gtgctatctttatgatttctaacttggtatcatagcttgaaaagtcttttgaacatgaaattataaaaatattcttcagggtcttcacttttgtatatgcaaatatctactacataaattttagttatcctcaatttatataaacagaaataaaattaaatattcaacactatttcctgaatattctgtcaccttcaacca

SEQ ID NO: 11569 - DNA, 201 bp, Bos taurus
ttacacagcaaattaaggtaacatatagatgcctaagttccaacacaaatgaatatcaaaaacattgtgcttagtggaaaagaaaattagatatattttataataacatttagaaaaatgaaatatccacccacaagacacacatattttgtaagaacacacacactgggaggaaaaaactacattaaacacaataatatg

SEQ ID NO: 11570 - DNA, 201 bp, Bos taurus
aaatcgttatcatgtattttgggaaaagagacaatactgatgtagtctagtaatagtttcataatatagagacagtaaaagccattggtaatatgctgataagaacataatggagtcagtctggtttagatttctttcagattttagcacatagtagcaaattctctaagcctgtttccttcacaataaaggagacacaag

SEQ ID NO: 11571 - DNA, 201 bp, Bos taurus
atagcactaataatctgctgtataaatgtaatccctttgatagcatttaactgtaatggacacgtttttctgcatctaattttcagatacagagttaacgctggaaatctggagaagcattttatacaaattgaaagattgggctttctcttcagttttccagatgtattgtctcatctgcatacttgaaatatccacaat

SEQ ID NO: 11572 - DNA, 201 bp, Bos taurus
atttttaattagatagattctctttatgctgtacatttgatgatttataaatttattggtcatgtgatatgttatctaaaccatagtgaattacagcagacgattttaaaccaatctaaattagagcacaagtgtgttagtatcaaaaatgattgacttttggattctgtctcttccataatgatacatttaattcttcag

SEQ ID NO: 11573 - DNA, 201 bp, Bos taurus
aagataaaggagttattgtacatgagaacaatttccaagtttctgaaaggaagtaaacactaaatctccctataaaggacttgtaccattctgggatttattgaaagccagacatccatctatctgcttgcactaaggaatctttgcttcaaatcacaaagttagggaggaagtattctgagattagagatctatattcaa

SEQ ID NO: 11574 - DNA, 201 bp, Bos taurus
gggaaaagagcttacttttatagatactctaagaccaaccaaaagaagtcttacattaacatacactaataacagcaaaacattaatgacttagaagctacaggtctaagtcactaggggctgattaaaagaaacaggtgttaagacatttaggatgatgacagtcagctactaattaaatcattaactgaggattctgca

SEQ ID NO: 11575 - DNA, 201 bp, Bos taurus
caagggcattggacacatcacacattgcacaaatcattcttgtcactaacaagcttgtgatagacacagcagtgactttaaagcccatgtttttccctccatgccaaattttcttcctttggggcactctgttgaagctccaaaaaggtatagtgttccagcagaattaaatgagtgagcaaaacaagtttgcacagtcaa

SEQ ID NO: 11576 - DNA, 201 bp, Bos taurus
acccaccaggttggcagctggatgcagattcttgggaaaccagcttctgtggttcacctcactccctgataatgacaggccgttgccttaccctcaaccctgagaaaggaaaaaaaaaatcaacactctaaaaataagaagaaagaacaagggagtgaagttcttgccagtgctagtaaccaggagacctagaaagaggcc

SEQ ID NO: 11577 - DNA, 201 bp, Bos taurus
ggagttaacacgggtaagcattttaccacataagcaagtaagttcacaaacctgagtgctctggtggccaggactggccctgctgcagcagggaaagagcgagagcctggacacagcagacaaagcccaggatacagttcagccatcagcactgggagaggccttctacctccagggctctccagcttcatgaccccattc

SEQ ID NO: 11578 - DNA, 201 bp, Bos taurus
taagtaacactactcaaagaaaaaaaagagtcgcagatatttttggattttgctgtttgaaataaaattttggttggagaggaatgagtattagctttttaattcacttaattgttgcattattttttaatgaaggtagaatgaggtcttgattggggatggaataatatgtataaatcagagggttaagtagagtgttag

SEQ ID NO: 11579 - DNA, 201 bp, Bos taurus
tttcttaggggaacttagggaatttacaggaatggcagaatattgcaattaactaccaaaaaaaaaaaaaaaaaaaccagaagcaattctgtgacactaaagttagtgaagagtggaggaaagccaaaatactgcaggctggcaacagaatgggcaggagagaataaagataagcaccaggaaatcaaacttattaataga

SEQ ID NO: 11580 - DNA, 201 bp, Bos taurus
ggccagtatgtctggcgttcttctaagaagaggaaatttggacacagagacctataaaacatataagagggtagattgtgtgaagatacagaatgaccatctacagcccaaggaaagaggccttgaacacatccttccctcacagccctcagaaggaaccaatcctgccaacaccttggtctcagaattctaaccttcaga

SEQ ID NO: 11581 - DNA, 201 bp, Bos taurus
tgttttattccagaagagaaaaaagtctttttttacttctgatcaatggggaattggccatcctgtgtcgtatcaaatcttatagaacagtctgaactgccgagtaacaggaggaaatttcatttaaaaaatgtactaaaaggggagctttatatggaaacagacgtggatttaatacttcttctggatgctataataaaa

SEQ ID NO: 11582 - DNA, 201 bp, Bos taurus
ccatgttcagattaggttattagaaactttgaaatggcctctgagtattcaagtgaaaggaagagttaagcttagtgaggaaggcattttgaaactcattggctaaggtggtcctaagatggccgaggaattggaggggagaccactttcttccccacaaattcataaaaagaacatttgagcaccaagcaaattccacag

SEQ ID NO: 11583 - DNA, 201 bp, Bos taurus
gcacccacacacacagacgaaccagcttccaactcaggtaaataagtttaccctacaaaacaaatgattccaactaggaactagttcttcaatgaactgactcccatttagatactccaacaacatctcctgcctgaaagagggtatcccaatcaaattggacggtcccataaagaacaagccaaaactgagggaagaata

SEQ ID NO: 11584 - DNA, 201 bp, Bos taurus
ttatgtaagtgtaatgagaatagcaactgatcacctaggctcctttaatttacctttgctaaaagtttcataaggaatcttaaaacttttaaagtctctccaggccagcaaagtcatgttaaagatcacattttgtctcaaatgcctgcagttttgggtgaatttctttcttttcaagtactcaacatatcttcgggttct

SEQ ID NO: 11585 - DNA, 201 bp, Bos taurus
gctagatctcgagaagagcgattaaacatttgtttgcaaaaaattagaatgcttcccacagtgaagattatttagagggcagacatacaaaatttgctaagattactttttgagcttaatgagtttaataatatatttcaatattggaatttcagttgttatattggaaaaaataaatcccatgtacataatttgtacaga

SEQ ID NO: 11586 - DNA, 201 bp, Bos taurus
aaggggggctctcactttaggggagttctctagtgcttcaaagttctggcattgtgtctcttgcctctgggttcaggcctgagcactttctgctgcatcaagatgtcacagtccacatagcatagaagataaaacccctagactaatggtgaaataactgtcaatggccaagatcacccaaagagactcacacacttatat

SEQ ID NO: 11587 - DNA, 201 bp, Bos taurus
tttgaagatttttttaattttttccctaaaattaaggtggccagaagaaacagcatatttgaacttttttgcatgcaagtaattttttaaatgcttgtcttggagagattatatggcctattggaagttccacctaattgtataatgttatggtaatacacctgtacaccagactagaggtcacaaaatcctatcacttat

SEQ ID NO: 11588 - DNA, 201 bp, Bos taurus
attttccacctcagtcagatgactgcaagaatacatgctcagagacagtcttcaaatgacaagaaagaccaccttccatacagtgtctttattcacagctatcatattccagggtcacattagaactcaataggggcccacatcactgcaaatgtagagttagtatttattattcataaagtttaggtaaaaaaatagaga

SEQ ID NO: 11589 - DNA, 201 bp, Bos taurus
aatgtaaattggtatagtcacaatggaaaacagtttggagattactaaaaaaaattgaaaatagaactgccatatgattcaattattctactccttgtcatttatatgaagaaaataaaatcaccatatggagagagatctgcaccttcatgttcattgcagcattatccataataggcaagacatgggaacaacctaagt

SEQ ID NO: 11590 - DNA, 201 bp, Bos taurus
ttgtcttgaaaaattcaagataatactgaataaaaaaacatgagacagagaatcagtgaagaatttcacttcaacaatagtagttttgaaaatccaaaaatagagtcaatgaaagcaactgagagggttatacacaggatgaaaagtctcagttaattatttctttagatagcatttctgagataaagcatgatctgtttg

SEQ ID NO: 11591 - DNA, 201 bp, Bos taurus
tgcttgttgaagagactatcttttctccattgtgtatttttgcctcctttgtcaaagataagatagccataggcatgtggggtaatctctggacttactattttgttccattgatttatatttctgtctttgtgtcagtataattctgtcatggtgactagctttgtagtatagtttgaagtcaggaatgttgattcctcc

SEQ ID NO: 11592 - DNA, 201 bp, Bos taurus
cgtctatggggtcacacagagtcggacacgactgaagcgactcagcagcagcagcagcagcagcagtattgtttgctaggccagagagtggctagttattctccacagttggtatttccttttaagtatgcatttgaattttccattaatgaggtgtagacaaaggcgataaaatccaattccaggccaaatccctcccag

SEQ ID NO: 11593 - DNA, 201 bp, Bos taurus
tttttaagttttccatttttagttatttgatgagaaattacagaactctgaatcacatgccttctttttccccttatttttcttaatttaaaaattatttataaaaaatgcattaatttatcacttggagagcaggacgagggctggcctgccttcacctgcctgggagaaagaaactgcctgctcactgctggcaaagca

SEQ ID NO: 11594 - DNA, 201 bp, Bos taurus
tgacatgacaaatagatctgacattacttgttttataagccatcttgcatgtcagaattcctgtggcgaaagcacaaaagctgaagtggacgtggggccacggaagaaaataaagtgtgcctttagcatttacaataagtgaaaagccaacatttcttgacccattgttccacacttgggaaataaggcttaaggcctctt

SEQ ID NO: 11595 - DNA, 201 bp, Bos taurus
ctcaagtggttattttcttccatttctagattcctcattatgcatgtgctttagaggctggaattctttgttgtgctaacttattcctagacaaataattactccatgattgacttgaaaaataaatgtgttgcatattgcacaggaatttaatacatttcttgtgtggtatcaaattctcaactccctccttctcactcc

SEQ ID NO: 11596 - DNA, 201 bp, Bos taurus
caaaccatgcatgacagccctatccttttgttataaactctccgttggccacattgtaactaggaattcatctctaaatttcccccttcactgcagtcagcctctgcaaagagagggccatctgccagggcagctctgcctgtgaaggtaacaggatcccctggggggcaggagatggcatcacaagtgccctctgaggtg

SEQ ID NO: 11597 - DNA, 201 bp, Bos taurus
agcaaatattatttaaaaatatcatgtaagggagtgataagcactaagaagaagaaaaaaacagcgggaggagacagaatcatgcagggccctattgtggatggggtggttaggggctacctctacagaaggggctgttcaataaataccacaagaaaagaaaacacagagatgagcatgtccagagacctgaagtgaaga

SEQ ID NO: 11598 - DNA, 201 bp, Bos taurus
agtaggtacaactgaaaaatttgagtcactcaccatcttgtatctgacagagtcctcaacagagaaatagtccctttgaagaatgcccacaaacaatgcacttaattttccaagataaaagtttatcatcatttagaaagaagccaggaaaaaaaaatggtcttaagggctttagaatgttttccaaatgcattgtggtac

SEQ ID NO: 11599 - DNA, 201 bp, Bos taurus
tcccccggccactgtcagcagcgtccagggaggctcggtccccctggtcctgggaaagctcctccgtgctgggggaagagatcacggtggctgcagcatataggcccctgctctcagacagtggtgcacaggaactaggcggccgacgggaaagagaaaggagaaaagaagatgagaaggaggggaagaaaagagcaagat

SEQ ID NO: 11600 - DNA, 201 bp, Bos taurus
ggctccatccctcttcaccccaccctgacactggactcttccctaaagctccaacccaagtccatttccttatctggcctggctgggaaagtcagaaatctgttgtaatcactgttaacggcaacttcagaacatactcaattccttctggaaattaacatggtccacctagtgtctggtgcccttggcaacagctgggcc

SEQ ID NO: 11601 - DNA, 201 bp, Bos taurus
cccctcatttcaggctgttggcctagaaaccatcataatgcatcatgttagttaatcaatgtaatcctattaaagtcacacaatggcttgaactgacactctcttgagtgacttcactttcactttaaggcagtggtaaccaaaatgaaacctgtatgttcagttacaggcaaagagcaaaacctaggcttgtcatctatt

SEQ ID NO: 11602 - DNA, 201 bp, Bos taurus
agggctggaaggggcccaataaggcactgtggggcctgaagcaagaaggcaaatccaccttcagggtggatccttcaggggtgggtgctgatggtgggcatccatcagtcaggggccaggcaagcgccctagaaataagagctgcacataccacatcagaaaccagatgaggcaggactactgtgaggctggtgaagagat

SEQ ID NO: 11603 - DNA, 201 bp, Bos taurus
catctgattactctgaaattttgaaaaacataaagcatattgtggacaaaaaatgtcacctgctaatctcagtaaacaaaagatgttgtggccatcaagcgatcagccatagcagctgcctccaacagtacaaccctgaggggattcagaatggagaaaagcaaggtgctggccctagatagtaaagatgcttgtcaaagg

SEQ ID NO: 11604 - DNA, 201 bp, Bos taurus
ttgggatgttagtttcctttcccttgaatgccttgcactccgcccttttcctgtaacaagaggctagaattttccacttttattgccttggagaagaaacgaagcagatgtctgcaggaaacaaaggaatcaaatttgtagtatttaattgccaaaggcccaggtttgagcactgacaatgattgtggaaaaacaaaaaga

SEQ ID NO: 11605 - DNA, 201 bp, Bos taurus
agcaaaaagacagatttgaagtcaagggcaattaaacatcttcctaatgacctttctacccagcagctcctttccactcccgttgtctcagctgtgattccaatctagattatctcacatctgcctggtacactttaaaaaaaaacattttattttgtattggggtataaccaattaacaatgttgtgatagtttcaggtg

SEQ ID NO: 11606 - DNA, 201 bp, Bos taurus
ttgttttcccaagccaggtacacctgttggccacagtgaatgctctctctgaactcggaacgtacagacttgatccaggggcagtcttcacctaactgttatgaataaggcccttcaggacttgaatagacattttcccaaagaaagcttataagtgaacaacaggtacatgaaaaggcaccgaatatcactaattattag

SEQ ID NO: 11607 - DNA, 201 bp, Bos taurus
ctggcagctctgaagctggtgtcagcacactggtcattggtaccaaggaccagtgtgtcctgaagctagcgcctgtccagcgatgagtgaagttaatcctgaagtctctgcctgcagggccctggatgttccagagcttgtgtcacccaacaggaagacaggatcagggcctgcggattccagggctcatgcctctctcct

SEQ ID NO: 11608 - DNA, 201 bp, Bos taurus
aggaaatgacaatctgagattcatatccaaatccacccaactttacaagctccgcttgtgacagtcaggccacatggcctacacaagtcgacccaggactctccactctgtcacagtgactcatttccctgagagaatttgtatcacttatacacaccgagataaactgaaaccttggccaggtgctgaaggggaaacatt

SEQ ID NO: 11609 - DNA, 201 bp, Bos taurus
tgccaatctgaaaagtgaaacccattttgaatatgctctaaggcattacatgacaaatgaggctgagatagatcaaacatgcagcgaagtggaacagaaatacaactcttggaaaccaatttggaaaatttcagtcaagttttattctgatggaaaattccaaattaaggaatagcacatgccaccttaaattttcttttt

SEQ ID NO: 11610 - DNA, 201 bp, Bos taurus
gtcaagttacttgttaggccagcaaataacctagaagggaagaggggaaatttttcttttccagtagggacatggaagtatgtgctagtgctccatcttgactgtggtcctgagggccacagttagaattaaaggaagatagagtgtaagaagacaatggcaacccactccagtactcttgcctggaaaatcccatggacg

SEQ ID NO: 11611 - DNA, 201 bp, Bos taurus
tatggcattttaatcgtacgtccattaggcacttttcagcttttttcatatttgactacacttgtgacagacctcttgaaattctgtttctttcacatgctaaatactatgctttccatttttttgttcttcctctcttaacactcctgattttttctctcattttcctttggatttttattaattcagaaagtggagtct

SEQ ID NO: 11612 - DNA, 201 bp, Bos taurus
aggatacagaggaaacataaaggtgtggggcataaaatattgggtcactgaggaactggaaaaatcatcagggaaatcaaatctccatctcaagcggattctgctcatccctgttttcctctctgcagactggtttatttactctttcaagaatatgaattaattactcactcaattcaagcagatatgttattcaagcac

SEQ ID NO: 11613 - DNA, 201 bp, Bos taurus
aatgtaagtatagttgtatgtatacattcatatggctaccagagtctttctctccatatatatacacacaaaaatgtgcacactcacacactcacatacggtgtcaaatgcatgccaggtactaagttagtcagagggaacataaagtgtgtacaaatatgaacctgtattttttatataagttcaaaactaagaaaaaat

SEQ ID NO: 11614 - DNA, 201 bp, Bos taurus
tgggtgggatgtgcaggggcaccctcaaatctcaatatcgctcatgaaaatgactcttatgaaaggttctgtggatggaaaatgctgtgaaggacttggtaataagaaatcacagttcccacaacttgaccagctccttcaggaatcagtcctgtcagggagatggtcatcatctctagttgtgcatcaggcaattagaaa

SEQ ID NO: 11615 - DNA, 201 bp, Bos taurus
ctttgtaatattcctcattggtttatcctttgtgattcttatggaagtggaggtaaagaatattgactatgaaggggtttgctgagcaattattcataacgtgcaaaaaaaaagcaatcaagtttatcagattcggtcacttaattttatatcattctgcatattgtctttatttgatttttgactagctacatgcacatt

SEQ ID NO: 11616 - DNA, 201 bp, Bos taurus
taaaacaccttgatttaacttctttgttcaatctcaacaacaaaaatagaacattttaagtgtggattttttaaagcaattgaaagatgtatgcaattatgagtaattttttgctgttggctaactaatctaatcgaaaagggtttgcaattcttttttgttttaaacgaacacatttttaggggtgcacagttgttttga

SEQ ID NO: 11617 - DNA, 201 bp, Bos taurus
aagcccagaggtatcatttccagaagggagttcagtgagggtaacaaccattttgtcaacttcgctccagtatccgatctgaaaaaagacacagaaagagtgcacttggatacacggcctttctattaccaaagcactgagttattttcaaacccatgtctgaatctgaaattacacctatcctaactagacttgtcctaa

SEQ ID NO: 11618 - DNA, 201 bp, Bos taurus
tctgttacaaaaaattaatgcttagataatagcacactcatcatcgcgatttcctttgtacttgtctcattcactgtaggcctaacattttatttcatttaaatatttatttatttatttggctgtacagggtcttagttgtggcatgtgaactcttagtgcagcaggtggaatatatttccctgaccaggaatggaacct

SEQ ID NO: 11619 - DNA, 201 bp, Bos taurus
gggacacattactgtgacgtgtctgcagtgagtattgctagtggaagcacattcatctctgcttgttgttcttgattagaaaggtaagcatcttcattgctttcataacccattcataatgtcagcattgttggcaggcatcagctgctgtcagcaccaagaaaaagcaggcaaaactagaaaagaaaaaaagcactagag

SEQ ID NO: 11620 - DNA, 201 bp, Bos taurus
ataagtatttgaagacacgccatccaagaatgacccactgtagagaaataatgagacgtaaaattaaccactaacctaaaaggaaaggagcctggctgaacttagcattcctgtcagtgctaagtgtgaaacgtaaaggtcagcttcggtttggttggcatttaagatgtgagcagtatgaaatggctacaaaataagtta

SEQ ID NO: 11621 - DNA, 201 bp, Bos taurus
cacagtccctaagcaagcagtaagggcttcctccctggtctttctcctgaagacacgacagaggggaattaacaggcccacagctgcccccagtcaactcgcaacactggacttcctacccctccccccacgccccagcctagggggacatctggtgcagacaccttgcccaaggccgcaggtactgtgcccacatctttg

SEQ ID NO: 11622 - DNA, 201 bp, Bos taurus
atgaactgtttatgatcctctttgctagcaagaatggaaaataacaaattcctcagatcagaagccatacacagagcacctgttattctactctagcaaaagcaatcacatctggacgagcagctgcaacttggatgacgacgtggtggactttccagtagtcggcttcatcttccctccaggcagcagccagccagccct

SEQ ID NO: 11623 - DNA, 201 bp, Bos taurus
agactggccagtcctgcctttgttttaactttaatgagaatgaatttggttttatttaatgtactatttgcagttaatttatgttatccagttttaccatcatttaaatatttcctgcacttcacagttgactcagtttttatctatttgatttattatgtttttcaatatttattaatatgagcatatagtttttctcct

SEQ ID NO: 11624 - DNA, 201 bp, Bos taurus
gggacccagctgagctttagtcctgaggggatggatcttctgtatcctcacagcaccttcaaagcagatccaaatgagatgcccctccaatggcctggccggagttggggggacccctggcatctgcccatcatctctcaataagttatgcatcatggtcaccaatgatggagactggaggggcctccaagaagttcagtg

SEQ ID NO: 11625 - DNA, 201 bp, Bos taurus
tctatttttagttttctgagaaacttccacactgttctctgccccaacttatattcccaccaacagtgtaggagaagtcctttctctctacctgctccagtatgtcttatcttctacttttaaaacacgggacttgtattgctctttttcagctgtcctgtggtcttacttttacagaatcctgcactttccttccctgtg

SEQ ID NO: 11626 - DNA, 201 bp, Bos taurus
aaaacacctagatttccctgttcagggcttccatggctaattttattcaccattcttttagttcatctttgttatcttagatccatcactcagactaatggaaataaaaataaacaaatgggacctaattaaactcaaaagcttttgtacagcaaaggaaaccataaacaaaacaaaaagacaacttatggaatggctaaa

SEQ ID NO: 11627 - DNA, 201 bp, Bos taurus
gttcctgaccctggctgtacagcctgctgaagtcatatagctgcaaaataaaagacaagaaagaagtaaaggaaaaggataatgtgtctgtgagcatagcaatgtaatcacacagcacacctcccaaagccagaaaccaaataattggtttattctgttgcccgtccgtcatgattgaatcaccaactgactggggagaca

SEQ ID NO: 11628 - DNA, 201 bp, Bos taurus
aagagagattttgattctttgagcatttctctcgcctatgggagctaatccaaggaacagtcctactcaaacctaggaggcaataaatccccttcttgttgaggagttgcaacctgaaaatgtgtgaataacacagtccatgagcatcttgtttcacacatgatatactgtagcttcctaagaaaatgtagtagatttgct

SEQ ID NO: 11629 - DNA, 201 bp, Bos taurus
tcttggaagatatgggactgagtacagatggaactgttagaaataaagaattaaagtggtccattttcaagggtgtctggttttgagtggaaagattactgccagccaaactttcctaacagcttgttggttgtagtaactgtaaggaaagtctgggcaaacaaagggagggtgggatgcctaggatttttgtgtgggctc

SEQ ID NO: 11630 - DNA, 201 bp, Bos taurus
acactgaaactaccaagttcttagaatcagacagtctagatagtagagccaaatgatgctccctcaggcccaggaacctgatgcgaataaaacacagtaagcaaagcttagatgtgtgatgttcacagtttgactccctgctttggaagtgttcatgagataacttcatgaaggaattgggttaagtatgctggaggttgg

SEQ ID NO: 11631 - DNA, 201 bp, Bos taurus
ggagtttccccttgagagcccagcaatttgagtgtcttagtcatagcatttggcacattgctctgtacttgtttacttctctgatacttcttgatcaagaacattgtgttatttaactttggaattcctaatgtctgggccatctgctcactgttgacagagttcaagagatacttactttgtgaattacggtttttgaac

SEQ ID NO: 11632 - DNA, 201 bp, Bos taurus
gtctagggatatggcctagatggtgatgcttttccctggactataccaatctcagcaccaagagcactgcatcctgggaatctccctgatcctatgcaaatgaggccattagtctctttctcagagtatgtccatatcagcttcaaatggtaaaagcaggggacccagttgctgctttacaatggactccagtcaccccct

SEQ ID NO: 11633 - DNA, 201 bp, Bos taurus
tgtccatctgaaactgctggttgctctctccaaactgttgggtggtgggggggttgggtctgtcagtctccactatggatccaggccaccacttttagggcgaagtgaagatgtgccatcctaaaggaaatcagtcctgggtgttcattggaaggactgatgttgaagctgaaactccagtattttggccacctgatgcga

SEQ ID NO: 11634 - DNA, 201 bp, Bos taurus
tttttagaatcattcaatctaacttttattcttgggaaaatgaagatgtataaaaataatgaaaactgaaactgcattttataatttagtcaatcaggtgataagattagggatgaaaataggtgaattacagagaatttctgggtcactttgctgtaccctgagttgaaaacacttctccttgggttaacttggttccct

SEQ ID NO: 11635 - DNA, 201 bp, Bos taurus
acaatagccaaaatatggaaacaacttaaatgtccatcaacagatgaatggataaagaagatgtggtataaatatatgtacagtggaacattacttagcgataagaagggatgaaataatgtcatatgcagcaacatctagagagtatactaagtgaagtaagtcatatagagaaagacaaatataacatgatatctcata

SEQ ID NO: 11636 - DNA, 201 bp, Bos taurus
tgctaataaaatctattcttttttactttttattttatactgaattatagctgattaataatgttgtgttagtttcagatgtacagctgttccagttacacatatacatatatctcttcttttccaaaatcttttcccatttacatattgtattacataataggatcttttttaatgaaactattgttgcatatgaaaacc

SEQ ID NO: 11637 - DNA, 201 bp, Bos taurus
gtgcagagcatcaaggttctgcagggaagagcacacggtgatgagtaaatcctgcttctgagcgacagtcactctcaggagagcaagcagagagagcagaaagactcagagctgagtctgggggcagatggacgggtcacatgaatgctcccagagcacacccttccctggatgcatcctgacaaggccagaacccagaca

SEQ ID NO: 11638 - DNA, 201 bp, Bos taurus
ctctgagtctgctgtctcatcaactcctccaccactggggcccaggatattcacccgtgagcgagcctggcatctgacagtatcaccttggccacacacacggagatgcactcagcctaggcgctaacctgtcacagggctcaaagagctactcagtagggggagaggccccctcagccctgctggagcccctgcgctggc

SEQ ID NO: 11639 - DNA, 201 bp, Bos taurus
ttttaaaaaatcacatatcaaataaaataatcaggaaaatctttgaaattaccaaaatgtgacacagacatgaaacgagtaaaaactgttggggaaatggttcagatggacttgcttgatgcagagttgtcacgaaacttcaagctgtagaaaaaaatgcaataaagggaagtgtaataaaaggaagtctgcttgtggtcc

SEQ ID NO: 11640 - DNA, 201 bp, Bos taurus
tgtgaagtgatatttcactgtagttttgatttgcgttttccggatgattaatgatgtagagcatcttttcatgtacctgctagccatctctctgttggcctttggaaaaaggtctattcagatctcctgcccattttaagatcaaattgtttgttgctattgagttgtatgggttctttatgtcttttggctattaggccc

SEQ ID NO: 11641 - DNA, 201 bp, Bos taurus
cacacccatgtaggtgcatcagacacaagtgggaggattcagagtcaatggggtcactgagaattcttaagaaaacattcaagtaaaaggagccatcacttaccaacaaggccacacaggtgctggatgagaggggctaaagaacaaaagacaacatagttattgaacagaggtcacaatctgagagtcttgcctgagccc

SEQ ID NO: 11642 - DNA, 201 bp, Bos taurus
caatgacatgcaatttttaaaatattgaggatgtaaaagacagaggctaaaaggctgctccagtttaaacacttaaagggacagggcactgcacaatgaatccacattgtttcttggacattttctgggcaactgatggaatctggataagttttgtatgctaaataatagtgctgtgtttgcattaatttcctcaatttt

SEQ ID NO: 11643 - DNA, 201 bp, Bos taurus
gtgattgtccaagatcataggcctcagaaccacagggacccacaagtcccactggacagcaaggaaagtatggggtcatacactggccaggattacagtcagatatccttatgaagcagagctcaaaaggagccatcaggaccgggcagggagaagtgactgcgacatagctgatcggctgacaaaccttcagggaattcc

SEQ ID NO: 11644 - DNA, 201 bp, Bos taurus
gcacctgccccccatctcgccccggcacacacccatccccaaccttagtgtgcttttcttaccaccccaatggaggtcagcgctgtggccaggttaatgacggtgggaatcaagctgaacttcccagcctgggggcaaaggcactaccttagacagtcaggggtggggcccaagggaggtgtggggtgtggtaggggagac

SEQ ID NO: 11645 - DNA, 201 bp, Bos taurus
tgttagctatcccacctgtggcaccatgagagactatgctgtgccaaaggtggggccctgtgcacgtgccagtgcccacctgaggggccgcagcccatgccgccctccacagcgggctgtcagcctaccactctaagcttgcaaagaagcctcccatcctgggagggccgcgtgaggggagtgaagggagatgaagggacg

SEQ ID NO: 11646 - DNA, 201 bp, Bos taurus
gtttcccagtaaggtcacatcccaggttccaagtggaccagtctttgtgggaggacaccattcacccctcttccagctctggggccccaggagtccctgcgcttgtgaccgcatccctccaatctttgtgtccgtcttcacatggcttctcccctctgtgtgactgtgcctctccccttctctcttctaaagacccttgtc

SEQ ID NO: 11647 - DNA, 201 bp, Bos taurus
agtgggattgggcccagggggtggggtccccagaagagaggcaggggagcaggcagtcctcaacacctgggagtaggtgggagcagcagcccccaggggggcagggatgcaggcctggcaagggctggccagggatccagcagacacaagggatggagggtcatctgagaacccaagagaagcatcttgtccttgttcagg

SEQ ID NO: 11648 - DNA, 201 bp, Bos taurus
gggtatacaggcatttactataaaattctctcaatcctggtatatctttgaaatttttcatagtagaatgttagcatctattaagatggcaatgtcacatgtcacttaataaataaaaggctgtaacaaaagtcctatttgctaacaaaacttcattcttccaccttagagcaggttatgaaggttccatactagacctta

SEQ ID NO: 11649 - DNA, 201 bp, Bos taurus
aaacaacactttgtgcaaatgattcttctgaagctatgcttcttcccctgacttgagaggaaccgtgatggtggtcttatgggacagccaccaaagatatagcccctccgatacaggcatgcccagagaacagggctgccttcctgccagcctcctgtcgtttacactcacaacacactgtcttcacatctttcattcact

SEQ ID NO: 11650 - DNA, 201 bp, Bos taurus
tggttagtctttcctttcttcggtccatccagccaatatttgcgtcagagaggcacctgaagctggggatccagcagtacccacgacagacaaaccccaccctctgggaacttctgtatggcaagttagagtatgaaagtaaaccagggaataaacaaagtaagctccagttctgacaagggttatggaaacatagaacag

SEQ ID NO: 11651 - DNA, 201 bp, Bos taurus
gcaatgagagacaaccccagtcaccttgctgggccatttgaggaacagatgaaaagtgcatataaattcccccagtgcaagtaaagtctaacctgagtggggatggggaggccattgtccctcaagctgtctctgctctcggcagaagctgactggcaggtgtgctcctgaagccccacctcccagcttggagctgcaggt

SEQ ID NO: 11652 - DNA, 201 bp, Bos taurus
agtggcaactggaaaggtgaccacagcttagtgagggcgccagcaacagacctagagcctggatccaaagagtctcagataaggaaatggagacatgagacatgacttcacatgtgtgatagctcctataacagaaaagagacgggagtttaggattaggtggtgtggcttttattcccagccccactgcaaaaatattaa

SEQ ID NO: 11653 - DNA, 201 bp, Bos taurus
ctaaggaggtatcccacatcagaggtttgtctccctttgcctggcctgtcttcttaattccccagctatgcttaccctggcattggatgtttcccttattcctcagacttgtttgctttggcctggattttccttaattatccaagtgtctgcactgacctggaatgtcccccttatttcccaggtgtatctactttgacc

SEQ ID NO: 11654 - DNA, 201 bp, Bos taurus
cctcggcgaaatggctcactggggcatttatgtgcctgccacatagtcttcagcacctttgaaaacagccaaggtaattccaccaacaagaacataaaaggttccctagagaccattttattaccaagaggagaattctggaaagaagtctatcaagtgagtgaatgctgtcaagtgtaggttccttttcatctgaaggac

SEQ ID NO: 11655 - DNA, 201 bp, Bos taurus
acctggagaactctcgtgccaccacctgggaccctgggcagctgtggctggagctacgccaccacctcatcaccttgggtatttttcaaactcattaacaagctttggacaagtaaattgtgtgttcttttgtaatgatgacaaccatgagctctttaaaccctgttatcagagtggaatcaagataatatcccatgtgaa

SEQ ID NO: 11656 - DNA, 201 bp, Bos taurus
cctggaccaacacttctgggagactgaccccagctgtggaactggcacgtgctgtgtgcatgtgtgtgtgtgtgtgagagagagagcatagcacaggtcagcaaggccttcccagagggttactgaggtcctttgaggatcgggttgatgggggaggggtcaaagccatgttagtaaggtatccacttactttataagaag

SEQ ID NO: 11657 - DNA, 201 bp, Bos taurus
accacaggcccttctcttagctgagagcgaggctactggagccacctggggacaagaacatgcctgggaggtaactgccagctcaccatccactagtcaggggacacatggcccctgcagagccaggagaagcctgtgcttttgccagcatgaatgagagccacaggtggcagctggccagcccgtgtgttggggaagcaa

SEQ ID NO: 11658 - DNA, 201 bp, Bos taurus
tcctggcttcacagctgatgctgtttgttgttccctgtctctctagactgcccctgattcctgagagatgcccatggggccccagtttctgtttccacccgtgtctacctccagttgtctcctgaagttcgtggatcccgtccacattttccaatggccagtaatgggaagcagaagccaggacctcaaacccttgaggga

SEQ ID NO: 11659 - DNA, 201 bp, Bos taurus
accatggatggtgtccttttaagagacaaagagaacaccacatgaagacagacgcagagatgggaacaggagctggaagcatcgaggaaggagcttctcccggagcctctggaggcaggatggccctgctagtatgtctggcctccagggctgtaggagaatacgtttctggtttgtttttttttttagccaccaaatcac

SEQ ID NO: 11660 - DNA, 201 bp, Bos taurus
ataaataaccactgggcctctcttcatcctcagcactggggagacaatagagattagtggaagttggagtaagtcagaggatggatatcacatttcacagggctggcctccttactccttcaacccaccacaggtgccagcacttccaatttttcaggagaagacagaaattcagatttttatgtgaattgttttgatttg

SEQ ID NO: 11661 - DNA, 201 bp, Bos taurus
tgagtgatgagcgatcccagcaaagccggcttccattctcaggctggaaggatgttctgtgaattcagatgaccgcggggaggagaactgtcaggatgattctgccctcgggccagccgcgtgcttgcactgccgagagcccggaattccgtgggtcatcagtattcacgccttgcacctgagtgggccccttgctatcct

SEQ ID NO: 11662 - DNA, 201 bp, Bos taurus
caaaatggtattgacattggaattgacaaatagaccactgggaaagaatgatcaataagaaatagatctcagtataaatgaaatctgatagagcaaaggtgatttttcagttggataagaaaaaagatttttaaataaatgagtggcacaatcaatgtaatatctcattgcgtatttaatttacaatgtatacaaattcaa

SEQ ID NO: 11663 - DNA, 201 bp, Bos taurus
tctacaaaggtgaagagtgttaaaggaaagagggggagaggggagagagggggccctcaggggcaggacagagggggccctcaggggcaggaaacagtatggagtgttaccaccccaattctgcagaggcaagagagggagagaggcagagcccgatggggcccggaaccttcaccgtgggcttgaacaaagggatcatgg

SEQ ID NO: 11664 - DNA, 201 bp, Bos taurus
gatggtcatggaactcaaacctggccaattaaagcactgtatctttttggcctcgtgattggttcagggatagttgtggggcccaatcctggtcaataaccatcaggctgagaacttcaattcacactcgtgagggagagaaggttttgtttccactgggcctaaagcacagaggttgtcagctggggactctaagttagg

SEQ ID NO: 11665 - DNA, 201 bp, Bos taurus
aggcactcgtgtgatttcacgtgtctgtaatgggcaatgagatcacaaaggcatctcaggaacaatccaagcccaggattcttttatgcatcctgtgatttactgctcatatatttaagttgtctggtccacattgactttgaaggtcattttttgggcaacctgctttgattaaatttttccaaagcatgccaagtattt

SEQ ID NO: 11666 - DNA, 201 bp, Bos taurus
tccagtgcttttggccaagagacaagttagatcaccggtatgccttatggataataaccagtgtggctaaaactctcaattctagagtctagctctggcagctggacttctcagtggccctaggatgagatttttctgtctgtgaaaccagtggagtagccaaaatttcaacagcacaaacatcctcataggaggaataac

SEQ ID NO: 11667 - DNA, 201 bp, Bos taurus
tgatgggccctttacagccatcttctcgtttactggcaggcggagagcattagaaacccccaagacagaggacctgctcttagcgtgagatctgactagcaggagaaggtaaacggccttcttgacacctgttgggagagtgggcagctccctgccgcctcctccgcgctggccgagcgggccgggtactagcccgcctcc

SEQ ID NO: 11668 - DNA, 201 bp, Bos taurus
gcaggggaaggtaccaagctcttcaggcctgagcctggagcgtgtcagagcatcacttcagccatggtctgtaggtcaaagcaatcacagaacctgcccagcttcaagggcaggcctcaccttttcatggatgtgcagatgtctataacccacggcgaaaactacatgcactcgtgtgctgaacatccctgatattcggaa

SEQ ID NO: 11669 - DNA, 201 bp, Bos taurus
tcttgagggcatggggaagggctcaagacatatttgtaagtaaaaatgatagttctaattcacacattcatatacagggctaggaattcatgtgcgtgggcatatatcatgtcctgtaatatatattttctagagaaaacatttggtaaaatgcatacccatttgcctcctggtgatggatcatgagtgatattaattttc

SEQ ID NO: 11670 - DNA, 201 bp, Bos taurus
cacccacccaacgtggttctccatattggatggccacaagctaattcaaccagaccactgtctggattattatgaataggagatgcaagcaaaagaagcaagagaggcctgttcagaggtgagaagaaagcagcatgaatataactttccctggagctgtatttacaacttagacacaagacctccaggaggtctcagagc

SEQ ID NO: 11671 - DNA, 201 bp, Bos taurus
tagtgtcctgagccataaacgtcaagatgcaagatcaatattttttattgcttttcaataagtcaattttttttcaagtttctgctaggctagttatcaggaatctaatctcatccacctccccttttcttcttgggttgttgacataccaggaagtcccagaatatatattccagtcccagaatatatattccaaagtgt

SEQ ID NO: 11672 - DNA, 201 bp, Bos taurus
atgcatcagagctctcaccacagaggagagatgctggtgagacatgaacccttgcctggagttgccaggacatcattgagtatattccatggcctgtctcattccagagcatctcacaaagattgtttttgatctccaaacagcagcacccaagtcaactctgctttgacgttcattgcaagcagcactgtttaatttcat

SEQ ID NO: 11673 - DNA, 201 bp, Bos taurus
ttttcactggcttgtggccacaccgctgctcctctccacgtgggctgctgttctgtccatgtccagcctcctctgcctctcccagttaaggactctgggactgcattcagggcccataatccaggatgctctcatccccaaatcctgggcttaattacaccctttttccatagaaggtgacatttacagtttctaaggatc

SEQ ID NO: 11674 - DNA, 201 bp, Bos taurus
tagaaaactgaagaaaattgcattggaatgcggtacaggcttaagagcatctcttctttaaccagccctaaaggctacaacattgggttagaaaatgtctataagaaggatattgaagcatggtaaaaaaaatacacccagatggcattttaactttaaaggtaatacaatgtgtttgacaaaaacacattcaatataatt

SEQ ID NO: 11675 - DNA, 201 bp, Bos taurus
catttgggaacatctggagacagctttgattgtcacaactggggaacagagtggaatgggcatttaatggagactagaggccagggatgccattactctttatcgaacgcacaggacaaaccgccaaaagaactatctgctcccagagccgataagagacaagatagacaacattccagggccgggaagccctttaacgag

SEQ ID NO: 11676 - DNA, 201 bp, Bos taurus
gtcagctcacatcatccttactctgctctccgtactctgccatgcatggaggcaagtcaccccacttattctctgtctggatgccaatttcaaaagggaacagaattggcccctttcttgaggaagactggagaccccttttctacttgggtcaacctgttctgctgctgctgctgctgctaagtcgcttcagtcgtgtcc

SEQ ID NO: 11677 - DNA, 201 bp, Bos taurus
tcatgacatttgtggagtgacaactatgtgttagggaccgggcacatgggagaataattcattctttcatcaagctcatagggtcctgttactgtcattggtgtgttactagtggggaagtggagacatggagagtttaaggaagtcatcagtctaagattaaacatctggtggttagttatcagagatagactggaattc

SEQ ID NO: 11678 - DNA, 201 bp, Bos taurus
gtgccccagaaaggggcctcagcacctctgaatgggaccttatttggaaacaaggtacctgcagaagatcaggttaaaatgaggtcacaagggcaggccttgtccaatatgactggtgtccttatgaaaagggaaatttggatgcagagacaaatagccacacaggaggaaggccacatgaagactaggtttgtgctgctg

SEQ ID NO: 11679 - DNA, 201 bp, Bos taurus
taattgtttagtgttatcaacatgccagttgctgtcactatttttgttcaggttgtttttacgaagattatcactcttcctcactctggcctggaaccaagacacaaaggcactaagcaattcttgcagactggaaaaatgagaaatatttatgtcagttatatttgtcctgttagcatttcttggcagtggggtatgtga

SEQ ID NO: 11680 - DNA, 201 bp, Bos taurus
ctgtaacttctcactggtgatttctggtctacaactgactctcaaaacatccacatttggtggtgaaagaacctatcactcctgtttctgcgtttaaccaggtccagcccactggttgtaaacaggtccatctagcaaggctactgttaaaattgcacagccatgattgatatctcaactttccaaaagtaaacttaggga

SEQ ID NO: 11681 - DNA, 201 bp, Bos taurus
caggcagtccactggtgagttcttttatgggaagatcagctttctgagacagagccaagaggtaaagccaagctccgtgcagaaggggcccccgagggctgaccagctttccgtgccatggttaagatgaggctgagaggttggaagcaagcgactgcaggacagtctggccacagaattccaagtgtcactttgtgttag

SEQ ID NO: 11682 - DNA, 201 bp, Bos taurus
taacagctcacttgattgtgggaatgtgcacctgagcctgcaaaacacagtcttgcattttaaaactcggcaataaatacgagaaatccattcattgagatccatcttcattactgaaatggaaatagattcactgagacattattgactatctcacgagatagcacatacatctgcatcacatttccataacatgactgt

SEQ ID NO: 11683 - DNA, 201 bp, Bos taurus
aaacctgattcctcttccccctcatcacccagctgtgaaacaagcttctcaggccccagtatatccaataattcctctgaaactggactccagagaggtgagaagctctcagaatcatagacggccaccccagatctctataaaactctagatcctagcctgagaattctttattaataaaccattggttgttatttgcat

SEQ ID NO: 11684 - DNA, 201 bp, Bos taurus
ttctttttctgaaaagtccaaagggtcagggccttgtccctgaccactggtctagagggtaggattcgacactctcactgccgtgacccaacccaatttctggccgggaaccaaagccctgcctcaagtcactgcaggccgagaccactctttctcagttcttgtgtccctcctgatgaccctgttcaaagtgactgctag

SEQ ID NO: 11685 - DNA, 201 bp, Bos taurus
tggcagaggcctggatgctgattaagtagctaactcggggaaattaaagatgctccagaaccttcatcttggcggctagagcctagctccgcaggtgacacggatgtcgctccctggcccagagatggatggtaaacagatggaaggaactcactgatggggccactctcttgctcaccccacccatgatacaaaattcag

SEQ ID NO: 11686 - DNA, 201 bp, Bos taurus
cccccagggctctctgaggccctgaagcaacaccaaacgctgtgtattctaatgtaagaagagctgaggacgggaatgtgcagactgaaaacagcagttcatgccatgttaatctgtgagcatgggccagacggcttgtcaatgtcatcacaggaaggctgcctctagaggttcattgctctactgtcaaattacacttct

SEQ ID NO: 11687 - DNA, 201 bp, Bos taurus
ttaatataaatgataaagtatgtccaaaaaatcagagcagggcagggggccacaggaggaggtcagatcatgtcaggcctgtgggcccacaggagaactttggtttttgctcaagacagcaagaggcaaaggtggaggctgggagacctgtcaggaggccaagataggaccctggcttgacacggagggagttcaattctg

SEQ ID NO: 11688 - DNA, 201 bp, Bos taurus
ctattgactcaaatccatcccaccatctggaaggggcttctgcaaacagcatggggcccagatggatttgttaggagagttgtgagcagagatcagctgagagggagggaacgacagagtgagaaagagaagcaaagtgacagacagagacagagggtgaggaagagaaacaaagtgggatccacttgccatttgcccatt

SEQ ID NO: 11689 - DNA, 201 bp, Bos taurus
tgcattgcagggcagattcttaaaccactggaccaccagggaagtccatttgtctccttatatttcttcttctcctcctccttctcatgtctcacccctcactgcccctgcacccatcccctggggggtatgtctttaaataggacatgtatgtccttgtgccacaggtggtgctgggggtctgcttggaacagtggtccg

SEQ ID NO: 11690 - DNA, 201 bp, Bos taurus
gagagagcaatcactgttcagcgtacagcgaaaagtgggatgcacatccatgctgactgctccgcacccaacacgggccagaaacccacggcagaaagacgagctcatggggatttccctggtccagtggctgagaatctgccttccaatgcaaggggcctgggttcgagccctggtctaggaacatcccacaagcctcgg

SEQ ID NO: 11691 - DNA, 201 bp, Bos taurus
cagaggacagtggcacagctgtagggaagacaggctctggacccgggttctgttggcgaccttcctctgagcaggtgctattttctgggaatctggctccgacctggggaagggcccacttcccagtctgagagcctcgttggaaccagatctgaggatgggagatgcccatatgcttctagaaggcagggagttggtttg

SEQ ID NO: 11692 - DNA, 201 bp, Bos taurus
tggagctcctgctgtatacactgtcggcccagcctcaaccaggctaccctgctttaggattgaagtgacttcctgggggctgtgggtcgcagaccctcccctcctcaatcctcagggcctggaacctattcactgagtgatgctcagagcttccagatgacaaggccagcacgtgtcattctctgaatctctgatatgagc

SEQ ID NO: 11693 - DNA, 201 bp, Bos taurus
tgaatgggtgtgtaggtggatggatggatggatgggtagatggatggatggatggggtaggtgaggccctatggcatggggtctcgcaggccacagttggaagggtttattttggggaatgtgggagctattctgggcagtggcgacccctcagagtgtcaaagtgagtgagtgaccctgcctcagcctcaagggccacag

SEQ ID NO: 11694 - DNA, 201 bp, Bos taurus
ccccacccacaccttgattttagacttctagttttaggaattgtgagaaaataaatcttggatgtttttagcctccctgtcgtggtcccttcttatagccgccctaggaggcacatacagggcctgaggaggagcaggaaaagaaagaaacccctcccatctcctgctgccttcgctcatgctggcctttgaacgctttca

SEQ ID NO: 11695 - DNA, 201 bp, Bos taurus
aggaattcaggcctggaaggggctttatcaaataactaagccaaccctctcttcgcaaaaaggaggaaaattatgtgaagtgacttcccaaaggcttgttaacagagctatccagatgaaaattcagatggtaacacatgtaccccccccaatcccatcttctactttcacccactcagttatatgccccttttaaatctc

SEQ ID NO: 11696 - DNA, 201 bp, Bos taurus
gtgagggagtgtaccacaggcctcgagagtgggggcagctgagtctggtctccctagtttctgcaatgtggactggggccgggtatttccagatcttcccactttgccaggggagcccaaactcaagatttcaacatggaaaactctcccaaacatagcatagctgcatgcctcatccagtcttggggccaccgagttgca

SEQ ID NO: 11697 - DNA, 201 bp, Bos taurus
ccatggacagaggagcctggcaggctacagtccgtggggtcccaaagttggacactacttggcgactttcacttttgtttcttttgctagactgcaccctctatgaaagcagggccgtctctatttcgctccctcttgcatcctcagctcctagaacagtgcctggcacacggaactcggtaaataaatgttgaatgaatg

SEQ ID NO: 11698 - DNA, 201 bp, Bos taurus
cttaaaggccacacagccagtgaatagagagctagaaattgaaccttagtttatattattttaagcaatgcgcagactatattggcaatgaaaccttaaggaagtggctggcagaaaggccagaccagtacttgatgttcagacttgctgttgagaatatactttcctgtttgtatgcaggatttttgctcagtcctggga

SEQ ID NO: 11699 - DNA, 201 bp, Bos taurus
gtgtgattctactgctatcttttcccaccaactgggtgaagatgacgatctgcatttctctatgcaagccacatcagggcctcactgttattaaagaaaggggaagacctttaatatagaccctaaattaaagaaaggagaaggagagcaacaggcctttggagagcagagggcacagtgacttccactacgtgggcaggg

SEQ ID NO: 11700 - DNA, 201 bp, Bos taurus
gcgggaactaattccctgaccggggatcgaacccaggcccccagctttgggagcacaagagtcttagccaccagaccaccaggggaagtccctaatctttagttatatatttatgtgttcacttggttaatgtctgcctctccatggtggggggaactagtctgttttgttcatgacctcatttgaaacgtagtggttatg

SEQ ID NO: 11701 - DNA, 201 bp, Bos taurus
tcaaaggacctgggaaggagggagggcccctcctcccgccacccacaggggcacagagctccctctaagctcctggctgctcatgcctttcaggatcacaagttccaaagcaggtctccaggagggccagggcaggtgcctggaccaggagagggtaggaacagagccaaggaagatgacaatcctccccacaagagaatg

SEQ ID NO: 11702 - DNA, 201 bp, Bos taurus
gagtcttagctactggaccaccagggaaggccttcgggggctttttttttttttttaaccttgcaagcccatcttcagaggccagagtggaaccctgttcatctcttctggacagatgacttgcccctctaagcctgtgaatcactgtgggtaaatgggaaaggtcattgtatcacctgtggctgggaggccccctagagt

SEQ ID NO: 11703 - DNA, 201 bp, Bos taurus
ctatcactgcctcccattggtcgatctataaaggaagtcagctcttttggcagcctgcagaggttggcatccgagtgatacagagctaagcagaggaaggccaaggaatggatttgaaggcaaacaagcccaggcccaacactggggagctggagttatatttaatctctctaagtctcagattcaccatctagaaaatag

SEQ ID NO: 11704 - DNA, 201 bp, Bos taurus
ctctttcctgtacccttgcatcttcaatttgggacagcatccttactagaacccctgcttttaggcttaaaaagtgcttccagtaattttgttgggccaccaggcaggtcctattatcccactttgcaggtgaggcaactgaagccagagagggtcagggatttacttaaggcctcactgctgggaaacagaggagcagga

SEQ ID NO: 11705 - DNA, 201 bp, Bos taurus
cagaagcaggtgattagtttagagacattccccatctctacatgattactggctgatgcaaaaactcaatctcaggcaaggccctgaatggctcaatttcacggaggtagtcacagctggcatttccctaaagggggctggtttaagaaactggttctttatgccttctgcactccactggagggaggaaccctaggcctg

SEQ ID NO: 11706 - DNA, 201 bp, Bos taurus
ttcctcagagattatcagggttcatattccttcattcagctattaacatttactgagtaacagttcagagtggatctttctagaccttttgctatgtatatgtgtatatagataggttgatgcatatgattgtaagtatgtatacttgtatcctttttgtttaattctgcattttttttgtttgttcattttacataagtg

SEQ ID NO: 11707 - DNA, 201 bp, Bos taurus
gaagagcttattacatttttccttcaggattgatactttagctggctaattgatgagaatgactaatcattttggaaaataatcttgtcttccacatgataacccaaataaaggaaaaaaatgtagcctgtgaaatctgcttctatgttcacagattttctcctcctaggacccactattgccagctgttgcatgggactg

SEQ ID NO: 11708 - DNA, 201 bp, Bos taurus
ctttctgaggttgcacgcactttcgtttgcatatcaacaggcacgctgcagacttcattaggtgttaagaggaagaatacagaaaaaagaatatagaaaagttcccatcacaagaaaaatatttttctgtaactatgtggggttgttagatgttagctagacttactatggtgatcatttcacagtatatacaaataacaa

SEQ ID NO: 11709 - DNA, 201 bp, Bos taurus
ttagctcacaccagcagattatggtgcaaatacccaactcttgcccccagcctgggcccccaggcacattgctatcagttacccctgatagctatggcccttcacactttacatctttaatgaaaatggatcaaatttgacactgtaggtgtacttctgctatctaggcccaagaatgattaaaaatttaacctgagttgc

SEQ ID NO: 11710 - DNA, 201 bp, Bos taurus
catgtgacgttactttttgggaattgcagccatgctgaaatgcgtgatgagcggcagtcaggtgaaaggtgcagaggcctttcttgccttcctgtgtaaaaaagggaaagcttagggtttgtgggcgtggggacgtttccaccgtcgtctcatttcttgacctttgcctttatggctaagggacagaaggcctggtcatag

SEQ ID NO: 11711 - DNA, 201 bp, Bos taurus
gatttgtaaacaaataaggtgtcacatttttgtatctgtgaattagtctcatgtatagcctagggtgaaaagtacagtttaattttacagcttttgttgtagacataattttctaacgaaaattagaagggaaagctttgtttatacctttctagtagatgaatctaccaggaattctcacagttcacatcgtgtaggaga

SEQ ID NO: 11712 - DNA, 201 bp, Bos taurus
aggtcattagtctgctgtgatccaaactgaactaattttttttcttccctcccaaatctgcttctgcttccacactggcctaggtcacagagtcacatcctccctgccgctcaagtccagaatgaaagatcactcttggcttctctccatcaggcctgtcaatctaacctcctgaacaccattcctcctgcaccttctctt

SEQ ID NO: 11713 - DNA, 201 bp, Bos taurus
cctgtagctggacattcttaccaggcttggaccctctcactgtagggggagaaaaaccccaatttagtcaagtgaagtcaaagtaagatttcatataaaaattaaacatatatgaaaaggcacaagctttaaataaagaggagacaagaacatggtttaactactttctgactaggctttattttcaggacacataaaaat

SEQ ID NO: 11714 - DNA, 201 bp, Bos taurus
ggaactatgctcacgggtcatttcccttcctttttctgtagctgatttctgttcttggcatagcaggtggtgaacagggacggccctgccattctctaatgcaccactggagggcagcaaagcacctctcaggctcagcaacttctcccaggattcgggaatggggaaagtagacttgcaggcagggcccaagttcaagga

SEQ ID NO: 11715 - DNA, 201 bp, Bos taurus
tgcaggccaagagctttgggctcacttgtcccatggccccggatgtttgttgagtgtgaggaggtgtgtatagcttcaattcagtggtttcatgcagcctggtcgctgagcgttggagtggccaaggcagcaaaggcggcccatgtccccaggccagaccatgctaccaacgccactccgatactggcaagaaaggtgacc

SEQ ID NO: 11716 - DNA, 201 bp, Bos taurus
tgtgtcagggtgggactgggccaggccgtggcactgggaccacccgggagagcactgatgtgaggcaattcagaaggcccagagggaaggctctgaggctactgtgagccatctgctgacatttctttttcattccatgttttttgaggccggtgggctttgattgctaatatagtaatgtggaaacatttgggaatggct

SEQ ID NO: 11717 - DNA, 201 bp, Bos taurus
atccattttatgtgattctcaccccattaacggtcctcggtttagccagaatatcctcttttcactttcattttaaaaaccagccagtgtaataaatcttatcctgaaatctcggcagcacatcttggctggagtgtatgataaatctaatatactgtggcctctctgtataagagacctctgcacagatctgtatttttg

SEQ ID NO: 11718 - DNA, 201 bp, Bos taurus
cctggacttagggaggaccctaaatctgctgaagggtctccttttaagaagaagaaagggagttttaggaacactgagaagagggccatgtgaagacagcgcagaggttggagtgatgcagttgccagccaaggcgtgcctaagaccaccaggagctggaagaggccgggaaggagcctccactagagccttcagaaggag

SEQ ID NO: 11719 - DNA, 201 bp, Bos taurus
gcagtcgctccccatgcctcacctcccctgagccccagggaggccccagtctgttttctgtgtctgtggctctccttgttctggatatttcatatgagcggaaactgtccaaaaggtggcctcttgtgcctggcttctttcacttcgcgtaatgttttcaagtttcctccatatggtatcagtgcttcattccttttatga

SEQ ID NO: 11720 - DNA, 201 bp, Bos taurus
tacagaaacacagcataaacagggccgccatccatcctttgttcacagcagacatcactagtcagtcacaggctatttccctctgaattagcactggtgctagaatcctcctccctctgggccctgatcagtgaggagagacaggggtggctctcccctttggggtccctcccaggtgtcaggccttcagcccacagttga

SEQ ID NO: 11721 - DNA, 201 bp, Bos taurus
atggggcctatgtaaagttctggggtatcacatctagaaatgtgagccaaagagtgtcaggatcacattttgtattctggaaaagatcattccaggagacgggagatctactcatgtttgcaggccacagaagagaatgaaagagccacagaaagaagggacaatttgagagaatgtatgtcactagaatgtatgttccag

SEQ ID NO: 11722 - DNA, 201 bp, Bos taurus
gcgcgcggacacctgttcaccgcgtccgcgagcgattcgccggttcatgcatctcctcagcggcgcccaggcgacgctggcggcctgaactcctgggcgcgctacctgtggagaccgctgttgccttcctaacggtcttggcgcttctcgggtgcggtcacgcccccggcctcacacccacctctcggtatggccccgccc

SEQ ID NO: 11723 - DNA, 201 bp, Bos taurus
aggggtgttactgagaacagttttccaggacacctacaagcaaagattaggcttataaacaggctgcatttgaactaccattgggtgttctgagatgcacgtagcctgctgggtatacattttaaaatgccatctctggagctatctttagtctttgccttgcagcttctgctcatgaaaataaatacgtccacaagacag

SEQ ID NO: 11724 - DNA, 201 bp, Bos taurus
ccattaaagaggaaagttgggtgtgttcttatctatctttcaactgccttctccttcacaggccaacatcatcaatttgccatcttgtaggcaagacactttgaggtgcttttgacatcttagtgtctttttctcctctcttttggtcaaaagagatcatattttttcctttatgacacttcctattttgatatctcctcc

SEQ ID NO: 11725 - DNA, 201 bp, Bos taurus
atcccatagctgaggctggatgtgtatgaactggcacaaagccttggggctgtgaggcccgcatttacccacagaggctaactgaaaggagagacttgtttacaaaaggtacagacgccatgagatagtttccctgaggaagacagccctgtgacagatgcccacacttggaggaacctgcctagttcttagtccccaggg

SEQ ID NO: 11726 - DNA, 201 bp, Bos taurus
ccgactctgcctatctcacttcagcatttttttttctactcaatgtcacactctcctgcagcaagtggaccttctctatctggcagtacatatggcacctggaagctctggaagggcctttgagttccatgaccatagacaataggctatattttctccagctccaagtagaaagtctcagggaagagctctgattggctt

SEQ ID NO: 11727 - DNA, 201 bp, Bos taurus
gcagtcacaaagctgaacacacttgtttccatggcaccagaaccccttttaaagaagagaactcatcaattatttccggcctgctcacttggtgaatttataccctcccaaacaccagcacttaccctggtggttggagagttcaacagtaattgcagaggccctaaacctaaggatttgaaagctgggtatccataatcc

SEQ ID NO: 11728 - DNA, 201 bp, Bos taurus
gctagttagtaagcgaagaggacagggtccctctgacaggaagctgctgaggagaattggtatcaaaatgttagtattgtttttctgaggtaaggggattatgacggagaaggcaatggcaccccattccagtactgttgcctggaaaatcccatggacggaggagcctggtagggtgcagtccatggggtcgctaggggt

SEQ ID NO: 11729 - DNA, 201 bp, Bos taurus
gtccctgttgatttgggcaaagaggaacagggcgaaggggaagaaactgttcctctctaacaccttctggttagtggaggaagtagcacagccctgccctgtcaagctcccccagtctgattgctatcggagccctgaccttgctgagatgggcaactaccagcacacccattttatgaagatggagacttgactgcatgt

SEQ ID NO: 11730 - DNA, 201 bp, Bos taurus
cagggagagatcctggaggcttactaccaagtgaaaaaatgatataattgatgtggggaaaaaaaacacacaacaaacaatcctaacatcaaaccacactacagagtttctacatatatgtacacatggaaagtagggcttcccaggtggctcaacagtaaagaatctgcctgcatgcagaagacacgggttccatccctg

SEQ ID NO: 11731 - DNA, 201 bp, Bos taurus
tcccagtcacctgggcagggagggcttttcaaaatcctaattcccaggctgcagcccctgtccagtgataccagagtcactggaaggtgaggcccaggcatcaatacttttcagtgctccctgggtaattacaatgtgcagccaacatcaagaaccacagatccagctggagtggccagcatattcagaagctatcctaga

SEQ ID NO: 11732 - DNA, 201 bp, Bos taurus
gcctgggacattggaacagacacagtccccgccctcccaaggctgacattctagtaggggacacagcaataacaagtaaacaaacagccaaatatataatcgctagctgggccaagactctggggaagataaccaggctgctgcctgtctgtccatctggctggccgtccatctgccagtactccagcctgtccttacgct

SEQ ID NO: 11733 - DNA, 201 bp, Bos taurus
gctttatgtaaatggagtcataaagtatgtactcttttcatacctggcttctgcttgttgttatgttttgaaaatcaccctagttaatggcctactacgcattcatcttctgctgcatactattccattgtttgaatataccacccactctgggcttcccaggtggcactagtggtaaagaccttgcctgttggatccctg

SEQ ID NO: 11734 - DNA, 201 bp, Bos taurus
gctctggggtctcttggttttcaggcgtcctaatagattccagctcccctctctccacctcccctccaccccccagctgttgcagaaaaccacagtcaacctcttcttgctctcagctgccaagttttctctaagtaaacacagaatgtagcagtagatcagctcagttgcattcccagcactgtaggttgggtcaaggct

SEQ ID NO: 11735 - DNA, 201 bp, Bos taurus
attattctaaacaaataacaggcacttttaaattttacagatgtatttaacacctgaacagtttaacatttagaatttataccagagcataaatctacattgtagctactgaagaccataaatgtttaccttctaagttactaaaaactaagtatataagtctaagttactaaaaacatttttcaaagagtattggtttac

SEQ ID NO: 11736 - DNA, 201 bp, Bos taurus
atgtatgtgttatttcagaaattttgcacatgccctgctttaaaccactgattatttttgtaaaatgctgttgtgtggatttggctcattccattgacgccgaactcatcagatggctatattgtcttctaggaatgtgacttgaattgattaaatggcataggcaacaacatctgttttgtgaagctagtttagtgtcat

SEQ ID NO: 11737 - DNA, 201 bp, Bos taurus
aaacattagatcagagagggatggagtcaggttacacagctgaatctcctctgagataccaaaatcactgtggtcgattcagctcagggaatgtgttagttatagaagttcacccccaggttcccagaggagagaacttgtgctcagaattctgcgagagggtccttattacatacagggcagtcaggctgatgggctagt

SEQ ID NO: 11738 - DNA, 201 bp, Bos taurus
gtcttgggtaaggaaagcaactgtgtctctctgaactccagcccaggaaaggccagagggagtgaaacgctttctgctctgcagctctccgtgctgcctatgccgtgctgcctttccaagtgtggccaaaagtgcctcagacaccttcagtccagcccagagcatctcaggacttccaaagaggccccaccagtggataca

SEQ ID NO: 11739 - DNA, 201 bp, Bos taurus
ccttcttgaccttgcttatgttcaatccctggtctaggaactaagatcccacatgccctggggcaactaagcctgtatggcacacctagagaagcttgagcgctgcaactaaaacctaatgcaggcaaataaagaggaaaaaaagaggttaagtagtccaggtgggccctgctctaggtaccctcggtaaagattcagttc

SEQ ID NO: 11740 - DNA, 201 bp, Bos taurus
aacttttgatgtgtgtgtatgtgtgtgtgcatgcatgaactgtcattcatatatttttatatttattgtagaagtaacctgagatcacatgaaagggagcgaaggattattaaataccacccagagtacctcattccatgttggttgcttaaaaaagtgctggttaaacagttgatggatggttttgtaggcaggttatga

SEQ ID NO: 11741 - DNA, 201 bp, Bos taurus
aggtgaggcatcacatgaccttgctcatcaggtccaggggcagtcaccaataagagtctttcctggaaaccagtaactggtgagaggcaaggcatgacagtggtggcatggtggggtaaaggtccatgagcctccatgaagacccaagagctacccttttcccttcctttcctggatctttattgtccagctatatgctga

SEQ ID NO: 11742 - DNA, 201 bp, Bos taurus
ttacactattatttaacctggattctgtccagactcagcccttccagacagcggcagcgtccagtgcagtgggcgatgggaggctggcctcagaatcaacaccctgtgatttctggaattcggaggcagtctccactgtccttgcactcccttggtcggcagatcttgggtgccaggcagccttattacaacctggcacag

SEQ ID NO: 11743 - DNA, 201 bp, Bos taurus
tgttctttacaagcccccaagttcagcaaagctccaagcccttaaaaagaagtagaaaggcatcttgcaacacaattagagagattggttcaggggcctcacacacagcactccatccggcaaagcctcaaagggtcccgggtggaccatttgctggctttcatttctcaggggctgcttcagcaggtggccactagcagg

SEQ ID NO: 11744 - DNA, 201 bp, Bos taurus
ggatacactcatgaggactctgggtgtaagtgacagaaaatcaactccaattgacattcatcaaagtagggaagtagagagataataattctcctgttgaactacagaaaaaggcaggcaggaaataggctctagggatgcccagaatcaaggactcagaccctgcagtcctctgtctccactctttttcaaagccagctc

SEQ ID NO: 11745 - DNA, 201 bp, Bos taurus
tgtactagatttaattttatagagcacacaagaggagtccagcaagcttacctgtgactctcagaaaacgaactttttttttccaccaccatctttgattaaaaaaaaagagcaatgtctagaatcatgcccttgggttgagagaccatatgggtagagaaacaacaactggaacagaagttaggagccatgcattctagg

SEQ ID NO: 11746 - DNA, 201 bp, Bos taurus
tggccctgtgcaggttgcgaatgcacgccctcctctcctcaccctgtgtcagggggtggacggcactcctgtccccatcttacagatgaggagcttgaggcacagaaaggaaggccagcatgtgctagaactccaaacccaacctcagggcagctgggatgaaatccgtcacatcactttccccccagggaggctcttctt

SEQ ID NO: 11747 - DNA, 201 bp, Bos taurus
actgagggactgaacagcaacaacctccgactcctaagcacacaacagaaacttccaggtcactaagaccagactgagggccaccagtgccttttataagccctgggacctcaggaaaattcccgaccctccctgagcctcagtttccccatttggaaaatgggaggagaagcttttgggggccattttgcatctggtttt

SEQ ID NO: 11748 - DNA, 201 bp, Bos taurus
ggaatcttctcctcaatccccccatccgcatccaccccccactggcctcaaactccttaaacattttctcttctgttgaaagtacaaacgaaatgaagctggaatcaggacctgcagggcctacccttgctgccccctcgggccctcaggcagatcacagagatcacttttctaagtctctgtttcctagctgagaaatgt

SEQ ID NO: 11749 - DNA, 201 bp, Bos taurus
agtggaaataactcggtccactcactgatgaatggataaacaaaactgtctatccctaagatgcgatattattcggccataaaaaggaataaagttctaatacacgctaaaatgtgcaggaaccttgaaaacaagtgaaagaagccagttgcacaaggccacatattgtatgatttctttcataggaactgtccagaataa

SEQ ID NO: 11750 - DNA, 201 bp, Bos taurus
ttcctcctctgtaatatgggcccaacaacagtccccatctcgtaagattctgatcagtattagtttgttcattcaacaggaacttaatgagcacctactacgggccagacactgtccttggcactaaggaggcagcagtgagcaggacacatacaaatcactgccctcggagcccttctattttggtaggagtgatgggcc

SEQ ID NO: 11751 - DNA, 201 bp, Bos taurus
agcaaggagggagctagtaaactgtagaactaggattcaaatgcaggcagtatagttctagggccagtgcccctaaccatgtactatcacactcttcatctgtccatcatttactctcccctcaggaaaaaaaaaaaaacaacacttggcattcctatctctgagccttcttataggctctcggcctgaatcagtcaagtc

SEQ ID NO: 11752 - DNA, 201 bp, Bos taurus
cgaggctgaggcccagggtgcccgccaagatccacaccaacagtccgtccggctccagctgcaggggggaacaggggagagaggctgggttacagcagccgacagtcaaactgaggtttgagggcccctcgttagggaccagggagggacttttggcctccctgtgagacggctgccccaacttgaagttcaatgttttta

SEQ ID NO: 11753 - DNA, 201 bp, Bos taurus
tttagtgcttttctatgggtgagaagacacaagaatctgaggtcatcgaaattcttccctagatatgcatccatctcgaccttgtaggggccatctatccaaaagcacagagcgctccctcctgtctgtctgcatcctgaatttccctcagggtgcactgaaggtggccactgcagaggctgaggacgggatccttgtaga

SEQ ID NO: 11754 - DNA, 201 bp, Bos taurus
tccctggtggtccagtggttagcgctctcactgccaggggcctgggttcgatccctagctggggaactaagattccacaagctgtgtgatgtggttaaaagaaaaaagtggaggcccactgagaaattatatttgagcaaagacctgaagtgggtaatggactgagccatgtggctgtctcgtggcagagcattctaagtg

SEQ ID NO: 11755 - DNA, 201 bp, Bos taurus
gttagccggcctggcgtcttaacccacaggccccactttcggtgcccggaatcacaaccaatgaaccactgccaagaatggacccccacacctaatccatcagtaagaggtggccgagctactgcagaagccaccccgaatctgaccaccttctttgcaccccctagtcccccaggctgtgtcactgctccccatcactgg

SEQ ID NO: 11756 - DNA, 201 bp, Bos taurus
actgcaaagacactgagcagaaagaaatacaggccacccatccacccagggtcccacatggaggaggaggcttggaggaaagaaagggagtgatgattgtgggggaggccagctgcaagtctcctgcccgagagctgatgcttctgaagctgcagtcacgtgggacattcctgctcactcaggcagcaaagccaggaacct

SEQ ID NO: 11757 - DNA, 201 bp, Bos taurus
agtcatgatagtgacagtctggcctgtcagcataaaatattcactctctgaccctttataaaaaaaaatttcgccgacctctggtcaacagttgtatttgcagttgatttcctagggtcaccaaaagatgaagtaagataaggcaagtgtaacagaagcacctggcacttaataaattctcagacaatgtgatttggttta

SEQ ID NO: 11758 - DNA, 201 bp, Bos taurus
tcagtaagtgctaaccctggccttaacagaattaattttgcatttgatttcaatacttaaatgaatccagcttggaaaaagaaatacaggcaaaagaaaacgaaggctgatttctaaaaagaagggggtttgttttgttataacagtcacagattatctgccagctccaaaacgccacaaattcaccagaccctgatgctg

SEQ ID NO: 11759 - DNA, 201 bp, Bos taurus
aacaacatgaacttacctattacatttctggagatcagaagtcctaaatgagtcaccttgagttaaagtcaggtgctgacagatctgcttccttttcgagattctaggggaggatgcattcctgggcctttttcactgtttctagtgggtgcctgtattccttggcttgtggcttcttcctcaaaacttgaaagtacatca

SEQ ID NO: 11760 - DNA, 201 bp, Bos taurus
tactcttcagagtcaggataaagaaaccagattgagtgctgtcatgccagatgacttgcctgagattttctcaggggcccagatcagagttgatggtagaatgtaagctattaactttcagtgttgtctgtaactttagaccatactgccactgcagggttttttggggactttttccatcagccatgttcagtctgcccc

SEQ ID NO: 11761 - DNA, 201 bp, Bos taurus
aggatggtctttcctgctgtcacatcctaagagaaggctctctccaaaatgacaggctagacagggaaattttagtaagcattaggcagactactcactgctctaacccatgtttaggtcttactcattcaagcccagatactttacaagaagtttctgaaatcgactggctttctggggagtgaacagtgggcagtgatt

SEQ ID NO: 11762 - DNA, 201 bp, Bos taurus
gtttagatcaaacaagctaatggagttgtgtcaaaggacaccgaaggcagtttgaaaggactcacactggctgaagttgtgacagctggagcatcggggagaatagtggctgcagttgatttattcacatgaatatgtaaaaatccatgagtcctcagaaaagagacccttcccccatcccacaattgaccatcttaaaaa

SEQ ID NO: 11763 - DNA, 201 bp, Bos taurus
cccatcaacactcatgcctatggggtggcagagtacaagccttaaacactgtcatgcagaaggcccacaagacaagcgcccagaagctgtggggaggcccgccagtcccaggctcccacctgaaacacctcctctccctgcctcatcttgaggaggttgacaatcgcctggtcgctgtaggccctgacgacggtgttttta

SEQ ID NO: 11764 - DNA, 201 bp, Bos taurus
tcgatgatctgctccttgaaggagtaagctttgttctctcgcttcatgttggccttttttatgctgtcctgctgggcactgaaacaccagagtgggtgatcagccaggttccatccagccacgaggccctttagcctcccaccagccacgagatccctgctacctcttaagtcatgggcaccaggcaagtgctgggtcctc

SEQ ID NO: 11765 - DNA, 201 bp, Bos taurus
ctaaaaaagacctgtttgatgctgatgtctagttaacttttttttttttttccacagccagagtaggaaaaaacagcagagagaaaaagaaaagactaacggtgtgattaacttagaggactttgtcattaatgcctggtgcagtggatttgtgagaaatgcaaagactagcatcatccaaggaacttctcagcccttgag

SEQ ID NO: 11766 - DNA, 201 bp, Bos taurus
gtaaggtccctggggcgccggcagccaaccaggacatatttgaactctggctatgtcctcctgcagtgggcgctggccaggccggcctcaactcgagggcattatggcagttcaacggcatgattaagtgcaagatccccagcagtgaaccattgctggatttcaacaactatggctgctattgtggcctgggtggatcag

SEQ ID NO: 11767 - DNA, 201 bp, Bos taurus
tgggcacctgtgttgactgaactgtgtatgcatgtcccacatccactgcacaacatggtgctgggtctacattaaggctcaaggagcggtggtagacgatgcgggatggaactctcaccagaaacagagaaagatgtactcatccattcattcagcaaacacttactacaagtctgttatgttccaaccatagtgctaaat

SEQ ID NO: 11768 - DNA, 201 bp, Bos taurus
ttaaactttacaagcctgctgtgctgtgctttttaactagccgtgttcacatgtgagttgaagctttcattaaaaggcccaattaaagttgtggataagtcaagttttcctgctatcagttttaggaagacagatctcaataaaagcaaataaagcagacagcttttgtagatgaaatgatccagaggctaaaacaaccca

SEQ ID NO: 11769 - DNA, 201 bp, Bos taurus
tgttcaacagtgaatatcccaggaatgtagcccagaggagagaggtgggttagagtttggggaaggttgtttagaaagagcaaagaaagcaaaaagaggcaagagagagacctggctgtttatgggcaaacaatggaccctggcccagaaccaggttcttgctccatcctcctgggtgggggatggtactgccatggaggt

SEQ ID NO: 11770 - DNA, 201 bp, Bos taurus
tacacagagcttggcctagagcaagggtctatggatgttattattgttgttgttgactcactaccaagggctgtgtcagaacctgtttccatttgtaacagagtcagggagggccagggcccaaagtgacactgagggtatcaagatagactccctcacgagggggaatgggaattagggttctcccagtgacctcacaga

SEQ ID NO: 11771 - DNA, 201 bp, Bos taurus
cagatgaaaaaacgcctagagacaacaacatgttctacatcacatagtaggtagcagagccaggattcaaatccaggcccatcttcccctcaaacctggactgagtttttcaagtagcctggtgactctattgtctagagctaagaagctgtggacagagtgtggaccctctggccccgttccatctttggttaaccgtct

SEQ ID NO: 11772 - DNA, 201 bp, Bos taurus
acgtaaagtcgttgaacttgtgaaagtctatttttttcccctgtaagtctatttttcacagaatataagaaacgtcaatgaccaaatctgtccttcctccttttccccttccttcacctaagatcctcgttccagtttctattgtctttgtgtccaaagtaaactaggtgacttatttgtataaaatgttattttgccaca

SEQ ID NO: 11773 - DNA, 201 bp, Bos taurus
ggttgtttgcatgggaagcttgaggtgggctaattagaagcagagcatcctatatgattggtcagggagcttgtttggatttctttcatcagtcctaaattggaagggagggaatagggaggctagtagttgttgaccaaatcctgatggtttccagttaattgatagaatggttcggcttccagactgttggctgcagag

SEQ ID NO: 11774 - DNA, 201 bp, Bos taurus
gggacagctgccttctgctgcacccgtgtgagatgcagtcccgcgcaggcgcagtccctcggcgggagcgcagacaggaggcgggaggcaggtgggcctatttctcggtaagtgacaactggaggacttgctgcagctccgcctcctcctcgcgcagccgcagctcgcgctcctccagctctttggcggagagctccatgg

SEQ ID NO: 11775 - DNA, 201 bp, Bos taurus
tgaagcgagccaggtgccagggagggacagcaaggagcccacggcatgtcagtggggacagcagctgcccagctccactcaggctgccgtgtaaataaaacgggcctggagttgctgaagcttttgacttgtcagaagacatcagatgtttctgtgccatctctccatctgtaatcgtcggtgactcgtctaaacgtgttc

SEQ ID NO: 11776 - DNA, 201 bp, Bos taurus
cggtggtgggaggagcctggcttcgagggcaacttacgtttttgtgaggaatgacgtgtgggatgtactgcaggatcagctgggcccgctttctgtccttgtcaagttcctggaagagcacgctgggtttgagatccctgaagagcaaagacacgggtttgggataaagagcatgaataccatcctccagacaaggttggc

SEQ ID NO: 11777 - DNA, 201 bp, Bos taurus
gagcgctgaatatgaaatagaaaaagtgaaacaaactagataaaagtaaaagatccttatatagtccagtttttaaacatggctgctcattggaaacatattgagctctggcagaaagaaaaaaaatagcaatgtctggccttttgtatttttcaaaaaattccaagataattctgatatgcatctggattttaaaaagtg

SEQ ID NO: 11778 - DNA, 201 bp, Bos taurus
gttgtagtcaaaagttcacggggccacaaatccaaggatctgtgctctaaacacagctgcctgtcccaaagatggacatatgtgacctttgtagtgcaccgctgggacttggccctgggctcagcaggtcctaggcgtgaggcgggtcgccccagcctctggagctgtgatatagggtgacgatgcccagaggcgaggctg

SEQ ID NO: 11779 - DNA, 201 bp, Bos taurus
cacggggtgactaagggaagtgggccgtggagtgtcctgtttcagcaggagcctggtgtcatgcatcaggccagggtgggggaggagtttggaccagcccgtgctgtacacgagtgagctttctcccaagtcaggcacccttatctgccatctgtaaatataagccatttgccaaagtccttgcccttctccctcctgtgg

SEQ ID NO: 11780 - DNA, 201 bp, Bos taurus
catttggtaggaaaaggccatgtgtagttatttgctaacctgttgtgctacttccgaggatggtattattttgtttttgtttttgtttttttgacctggcgtggccttccttcattgcacctaatcgtgtttgtatccttccgagaggagcacaggtttttatgggtgttatgtttcaccagcaaaaacatgtgttgtgta

SEQ ID NO: 11781 - DNA, 201 bp, Bos taurus
tcaaggggttttctgactgcgccactacctggctgctccctcgtccctctctccgtgcgctgccctattccctgagacacagcagtgttgaaattaggcccgttaataaccttgcagtggcttctaagtgtccacgtgagaggaagagtgttaggtctctcactttaaatcaaaagttagaaataattaagctcagtgagg

SEQ ID NO: 11782 - DNA, 201 bp, Bos taurus
gggacttgagctctcagcaatttgtaattccccagctccgcccttttaaagatacatactcatgggtgaaatatgttgttgtgctttgggtttgattttattgcgggtaagaaactatttggatgtgtaagcccttggaatcaagggctgatgcctgaccgtgtgtggagagcatcctgcgtgtgaaaccaccagtgcaca

SEQ ID NO: 11783 - DNA, 201 bp, Bos taurus
gaccccgacaaacatcccacagtgcacaggccagtcccccgaggcaaagaagggtctggtccaaatgtcagtggtcctgaggtggagaaattctgctctccccacttggcagtgagggccccttggagttccccttctcaaaagtgtttggaaacccgaactgtgtggccatgagcttgattgctgtgtctcctcttggtg

SEQ ID NO: 11784 - DNA, 201 bp, Bos taurus
gttttcctttttactggtaagtcattcctggggatcttgggagacataatatagacttgagatgcagctccttaagggcctgaaaaggtgggacttagcacccccccagcccacccttcctggtctcctgggggtggttgacctcctggtgtgctcacctctgccgtcacaagtcagtggacttcgtgtagcggccacatc

SEQ ID NO: 11785 - DNA, 201 bp, Bos taurus
caccttgaaagactgaactcagtaagaaggtgacttatcttgtactcagaacaacacattctgctctgggctgatctgggacgggctgtttctcacagcgcggtctgttccttctctcgtacccattttaattggtccccaagcctctgcaaagaccaccactggtagacacagttcttcccagtaatggaaatcctttca

SEQ ID NO: 11786 - DNA, 201 bp, Bos taurus
cttttggcctccgagtgtctgtattccattctcttccaagtttctttgttgtgaagccacttctccaacaagatgcaatgaacagatgtaacatctacacggcgccgggcgagttcccgaggccacgggctgtttggaatcgtacctcatttagagacaaactgttccttcactctgttgggtcattgtgcttgtgaaagg

SEQ ID NO: 11787 - DNA, 201 bp, Bos taurus
gtgggccttctataattaaatgagatgaggcttggcacaggctgacacgtataggtggagagtgttctcagacgttggagtactccttcgcaggttttctctgggccgagcaccccaacaagttacctttccaagtgccactcacccttcatcatgcctctagcaggagaaaagattttcatctagaaattttataaactc

SEQ ID NO: 11788 - DNA, 201 bp, Bos taurus
ctaacatacacacagtcagtttcggcaggaagggcctgcctgctgctcagccaccgggcaaactctactttgaggccctgccccgctctccgctcatccctgccatcctttgtgtttcaagtttctgagaaaagtctcaccctctctccgtgccatctattccagctccaagtattattgtttctggccaaagtctgttgt

SEQ ID NO: 11789 - DNA, 201 bp, Bos taurus
ttagagacttagtggctcatgaggccaatgaggatgcagttcctctcatctcccgttgtcagagttgccttcatcttctgtcttctggcgcacagcaagacggccatgaaactgtcatcgtcacgtctgcacagattacaggtgacagagaagagtgttccatcccttccactagctccttcttagtaagagtgggggaag

SEQ ID NO: 11790 - DNA, 201 bp, Bos taurus
tgagcaactgaactgaactgcagcacccagtggagggttgatgagaggctgagggtgaggcactgccaggccccatctgaagggtaccaggagctagctaagcaatgggtaggctgtgtagcagcaggtcagagcctcaggcatcaggtgtaccaagctttcagattttgcttactactttaattttgtcaatgatggaaa

SEQ ID NO: 11791 - DNA, 201 bp, Bos taurus
tgacctggagaagtgacaaagtagaggatactaggaaggcctgaccagagccttttcagcagagggatggggagacccctggctggagcaaagagacaaggcggaaataagggctggtgtttggagtagacaccagacttctctgatgagaagagaaagaaagttaactatggggaaagcggaacccacgagaggattgtt

SEQ ID NO: 11792 - DNA, 201 bp, Bos taurus
gaatgagtgattaaatgagcaggggatggatatggaggtgtgtatatttccaagcacattgtggggaatgaaacagccttgccgcccgacacacagtggagactggagttgagagggcgtgcctctgcagggcttggggaaggccagtgaccccgacctgagtcctggaggatgagcagaaggcttccatgcgaggagagt

SEQ ID NO: 11793 - DNA, 201 bp, Bos taurus
tgtgaggttaggatgagtggcttttttagggcgggtcctgggttgtgttggggtctagtttgacacccctggagaggccagtcttcctcctgaactcatttgtgcagccattctgatggggtacgtgtctctactgccagatggaagacttttccgggacccttctgtgccagcacttggtacccacatggccaaagaagt

SEQ ID NO: 11794 - DNA, 201 bp, Bos taurus
ttcctttaaactcatgagcagtcacagtgatgctggataaagacaaacccctgtggattacatccagtcccaggtctccatctctaaggtggcaagtctcagctgcaatccaggtccacccagctctggcttcgaccgtgtttctggggtaaaatgcaagctttccagcccagtgctggggagtccctggctgcccaggac

SEQ ID NO: 11795 - DNA, 201 bp, Bos taurus
ttttgcacctgcacctatatgacagaattttaagaagcaactcgcttgtattcattccttccaaagcactcagcctagttttcctggaaactcttggcccagtcgcatcgtacgggtgtgtgtaatagctaatagaatagtaattgcataaaagcgtgtgaggcataaacaggctgtgagcacacactgtgtggcagtacg

SEQ ID NO: 11796 - DNA, 201 bp, Bos taurus
tgcatgccccttttaacacctcaggaaacacagtcacagactcctgagataaagattgagatgttgacatctttggggtcgttattctgcctctcaaagcgtggttcacaaaaggtgcttttcgttatactgaggaagtcagcagatttttctttaaaaggccagatagtaaatattacagcttctcaggcagtgtggtct

SEQ ID NO: 11797 - DNA, 201 bp, Bos taurus
cccacagcgagacggacccccaaatgcatggcactgttagagttccagttcctgacttttccagccacaagagctacaccctgtcatccaggaagggccatccctctgaggctcttagcttgttcctgcatcattcacactcttaactcacctctgcccagctccagcctctcagtccagttaacatcaactgcagcttgt

SEQ ID NO: 11798 - DNA, 201 bp, Bos taurus
ctggagcaggggggtcagaactgggctccgcactggacctcggggctgccgggggcctgagcccctctcccctgggcccctcctgtgctgtctgtgaggattggacagagggctttactgcttcaaagcaaaagaaaattagattcaggcaattgacatcgttttgcgtatttcaagagtaaaagcaggacacgatcgggg

SEQ ID NO: 11799 - DNA, 201 bp, Bos taurus
agggatagatcccgcgtatcttacatgccctccattggcaggattctttactgctgagccaccagcaaagccctggtgtaacgtacagtatgataaatgtaattaacactgccgtatgttatatatgaaagttgttaaacagtaaatcctgagttctcatcacaaggaaaaaattttccttttattttgtatctgtgtgag

SEQ ID NO: 11800 - DNA, 201 bp, Bos taurus
gcaccttgagagctgattccttgactgattcaaccatgtactcagtgggtgctcaataagtgacaaaggcgtgatctgttgggtggatggtagcttttgtctttttgctttattccctttgcaggtgggtagtggagtataagttccttgggggtctcaggaatgcttcagagatgacaataattatcattacttaatgac

SEQ ID NO: 11801 - DNA, 201 bp, Bos taurus
gccacactgggtcttcattgcagtgctcgggcttatccttgtggcggcctcccttgttgcagagcacgggtgcagagcacgggcttcactagttgtggtacgtgggtttggttgccgagaggccacgtgggatcatccaggaccagggatcgaacctgcatcccctgcattggcaggcggattcttagccactggaccacc

SEQ ID NO: 11802 - DNA, 201 bp, Bos taurus
gagctttgcgaatgagccgagggatgcaagccctctgtttcccagccatcttctccccttcttctacccagatccctgctcagaacagaggaggcaatggattcttttggaaaggctgtctttcggcgtctcatctccatgcagtggctgagcctagtgccctgtgtatttgcactggctgggacgctgaattcactggag

SEQ ID NO: 11803 - DNA, 201 bp, Bos taurus
tcccttctagcatcctctgctgtatttttatgattatctgacatggtatgtattgtaacctttttgtttctccttagtgtcccttactagaatgtaagctccatgaggccagggatcttggcctgattaggtctgtgctgcgtccccagagcctagaatggtgcctggaatataggctctgtaaatgtgtattgagtggga

SEQ ID NO: 11804 - DNA, 201 bp, Bos taurus
agggccccacctgaggtgccagacagcggggggtaagtgggaaggggtctaacttcttcactgccagcacccagactgtttatggctggcacgggcaaggcgcttaggggccaggggccggctcatttcacagattccttccgcgagaaggctgaccattcttcatgttcatcagaaagctgttcctttggagcccaggag

SEQ ID NO: 11805 - DNA, 201 bp, Bos taurus
cagagaatcctctggtcctggagaggactggagagagagagacttgtccattcagtccaaagcgctgaacgtccaatcctgaccacagctcctaactacatggtgcgagggtgccagtgaaggacaagatagctcgtctctctctctctttccaattcctgctccaccaacaaaaacgtgtttcctcaatgtttctccaga

SEQ ID NO: 11806 - DNA, 201 bp, Bos taurus
tgggctccagttgaagcatttacaatcagcctcctatttactctctgaaatagaagtaacaacagaaacagggtaaatagccagtatttgtctcttgtcagcactttgaggtaacagtcatacaatagtcaaggtaatagtcacagcaaggacaaagaggagtaaaaccctgtttgagtaaaggattaaaggatctctgtt

SEQ ID NO: 11807 - DNA, 201 bp, Bos taurus
tatttttggaaacaaattatctgtgtttaggttagttcagtatacccaaaattttccaaagttcttctgagcggtaaattctttatgatggggccaagcagccaccaacacaggtacttactgcctctctctcagagccgatagcaaacttcctcttgctaatgatctttatggccactttcttacatgtcttcctctcga

SEQ ID NO: 11808 - DNA, 201 bp, Bos taurus
atggacaccaggtgagttttccccagcttcgccctcccccaacaagaggacaaaaggcccgcatgtcccctgggtgggctggacctggccacaggctgccgacgaccggttctgtctgtgtgacctaggacaacattcccagcagagaactgccaacattgccttggtacacagacctgtgacctccggtgagattccggg

SEQ ID NO: 11809 - DNA, 201 bp, Bos taurus
gcgtcaacagctcaggtggcctcgtggttagagggccggcccccacccctctgaatggagacttactgctgcagaaggggatgtgaccacacgtgtcatcatcgctcagtgactcagggtcgcctgtatgactctccagtggactgctcttgtcttcagggcagggctgggggctcgaccttttgacatttacccactctg

SEQ ID NO: 11810 - DNA, 201 bp, Bos taurus
cggcccggctgtgtgaccttgggcgagtcgctgtactgcgctggctctgctccgcatccaccaaaggcacacaccgtttcttgagctcctactacgtgccaggccccacactaagctattacctacacgatccttgaagcctcaacctggtgtctctgagagaagaaaacaggccagagagggggctgctgtccagggttg

SEQ ID NO: 11811 - DNA, 201 bp, Bos taurus
cacgtggggcctgggtctggtcgtgcctcagtatcaggctcagcaccttgggagcttggcttgttaaataaaacccgcacagggagcccctcctgctgattgggctgcacaggccatgacacctcacccgccccaccctgcaactacgactctcgtctcattctctccttagacactcagacagctttcccaaatttacct

SEQ ID NO: 11812 - DNA, 201 bp, Bos taurus
actggctgggacatgggctctgtgctaatctatggcccctgtcatttgattctccagtaacccatttaaacatgaggatgagagatgctgacagaggagtgacacatccagggccaaaacaagtgcacgtgcttaggagcctcaaggcagggtcttggcgggaaaggagcaggtgagcctgggcgggaaaggatgagattc

SEQ ID NO: 11813 - DNA, 201 bp, Bos taurus
cttttctttaggagccagattatcacagtgtggccttgtgaatcaattttctctatgcgctgatgaaagtgtaattcatccttaatcaggcagccttgccgctgcaggccccgtgccggaatacatctagcccttctcccttcactttgggaagcagtcctccccccccacccccaccccccacccccaccaaaaggactt

SEQ ID NO: 11814 - DNA, 201 bp, Bos taurus
tctcggggtgaggagggctgacggagtgtccagggtggccagctgggccagttgccacaagttcctcttccaaggcaaaccttggggccactgttccctccggagcttcccaacaaagcttctgcgtgaaccttccagcacccccgcctcccgacaggccccaactgctgatgtccgttccctccacaaccccaggggatt

SEQ ID NO: 11815 - DNA, 201 bp, Bos taurus
ttggacatgactgagcaactgaattgaattttttctctttatgcctaagtttcagtgttttattgtatgttgtcatattggtagagttggaaaaatcttactgttttagggataaaactctattcaggtgatcattcacatcatggtgaagtgtctattctggtattttagaatctagaaagatactaactctttgatttg

SEQ ID NO: 11816 - DNA, 201 bp, Bos taurus
agcagcgcaagctgaaaggatttaggagtcttatcagtgatcagcccagctcaaatagggaaagccgccagctgctgctgtgcggccagcagctgtgttagatcagcagccctgtcatttgcggagtttgctgactttgagcgtaaggggaaaggactctcatctcaaagcaagggtcgttcagtgcaattcttcctgttg

SEQ ID NO: 11817 - DNA, 201 bp, Bos taurus
ttgctaggcatccggcctgctccagggcaaggaacgtctctcgcctgacctgcccaactggaggaagaagggggacgtgtcgggctctcagtgctcacagaattcctggccacctctagccagggtggtccccagtgtgaactagcgaagatccagccactgtggggggtgggggggggagtgtgaccggggacagcttct

SEQ ID NO: 11818 - DNA, 201 bp, Bos taurus
cacaaaacacctgctcaaagggaaaacagttgcaacagaatagttagaagttgaaaggaaactggctatttaaaacaattatttagatcttttttgcctttctgaagccagcttattctagataccaccatgcttagaaaccagcaagaaagcccagcaactaggcaggtgctggtagtgcattattttggatgcgatgaa

SEQ ID NO: 11819 - DNA, 201 bp, Bos taurus
gaccttcttggcatggacaaagctataggtgttgtcaaagcgcaggacgtctggggagacagatgggaaaatgggtagttgggcctgactccatgcctgcaccctgccccagccatgggggagaacaggttgtgttcccacctgttgtgtttgccaagcggggccaaactcctcccactcttcttctctcccccatgggaa

SEQ ID NO: 11820 - DNA, 201 bp, Bos taurus
tcaacgaacccagggtccggcgcttggccagtgcctattaaatcttaacagatactaactagcgccaccgccactttaactgctggctccgattgggaacgtctgtgaagttggagacactgctttgagcctataagtgagccatcttacatgagaacacacaggcacgacacacaacattaggtaattctctcctgccgg

SEQ ID NO: 11821 - DNA, 201 bp, Bos taurus
gaaaggcctggtgaggggctgtgtccagggctgtgggcgcagagggcaaggaatggggtggtcccatggcaggaggagcactgggggtggggggtggagcgtctggggaactggcctgacccagctgcctcacttcccatccttcccttggcttaggcacttaactccagccacccacctgtctccactgcaggccccctg

SEQ ID NO: 11822 - DNA, 201 bp, Bos taurus
cttgccattcggctgccccagtgatgctcagcttcatttccagcaccaccctcaatttcagccattgtcgatgcaggaactgctctgtgacagatgtccatacatagccctggcccttgactttcctcacaggctaccaccgttgaccatgtggtcactgacacggcagggaggaagtcttgggtgagaatgctgggacgt

SEQ ID NO: 11823 - DNA, 201 bp, Bos taurus
gccaaggagaggcaggactggcacatgtgccccaacatcttctgagctccgcccgtcctgcggacacaggcgcccgcacgccgctccacctcctgtttcgcgcactcagtttagcgctgtgtggccctcccaccccaccgttcccttctggtttaataacactttttggggctctcaccttggaaggaggaagtgctgacc

SEQ ID NO: 11824 - DNA, 201 bp, Bos taurus
ggacatatgttgtagagcatcttttcatatgcttctttgccatctttatgtcttctttggtgaggtgtctattaaaatctttggcctattttttaatcagattgtgtttggctggtattttgtttgtttgtttttgggtttggggttgtttttggttgcacagcttttggaatcttagttccctgaccagggattgaaccc

SEQ ID NO: 11825 - DNA, 201 bp, Bos taurus
ggtgaggtaccgcatagagacggtgttcgcccgcagctcctgggactggattggcttgtaccgggtgagaagggcaggggcggtcagcagatcggggagggaacttggggcctgaaggggcagccagggacccatacaggacttctccagagttttatgtcacccagggaggctgctagggtcaccgttacgggtcacgat

SEQ ID NO: 11826 - DNA, 201 bp, Bos taurus
ttctctcatcagaatacctgggtggacattctgctgccgtcacctgttagcttcctgccctttttaaatgagttatctaatctccttataccgtaccttatttatttgtaagtaaataatggtgttggcttcccagcccggtggtaaggaatcagcccgccagtgcaggagaggtaggttcagtccctgtgtcaggaagat

SEQ ID NO: 11827 - DNA, 201 bp, Bos taurus
atacaagtgggagatcgtggtttatctactgtaacccaatgcacagcacccaggtagctggtttgcattcacatcttcccaagaacaatgtcaaggtctcgccatccactgctgcagccctagctcctggaacaagtgcctggcaaatagctcgttgcatcagattgtctttcatccctgggtcattcttattctcatatc

SEQ ID NO: 11828 - DNA, 201 bp, Bos taurus
ccttcctgtgagaagtgttcccaaaggcaccgtggaaggcctcccgccccgtggagctggggtcttgagcacgccgaggggcagtgcgggggccggggcatgtgcatgactctgtgtcctttctcagcgggtgacacgagctttcctcctccacgtcaatgggcttctgaggccccacggcagaggcgcccgtggccggct

SEQ ID NO: 11829 - DNA, 201 bp, Bos taurus
tccgcagcccgcgcacagcatcatccgccttctacccgcaggtcagtccaaccccagagccctgcagcccatgcatgcctgtctgtcagctgaagccttgacctggccttcagcttggttctgaaaacacctggaattgggctgaagccgagtttgaggggcagttgaaattgaatttgatcttggagatgcagtaccttc

SEQ ID NO: 11830 - DNA, 201 bp, Bos taurus
tgcagacgcctgattcctgccgtggcagccacgtgcctgcaggtgagcggcaggggtgacgctgagcccgcagccccgggcctgaacgcagcaggaccgcgttatcctgcaagggtggaggcacctggaacccctctctcctgattcagggaaggaatctccttagagggggaaaggagctggcccggaggcatgcatgcc

SEQ ID NO: 11831 - DNA, 201 bp, Bos taurus
tggtgatggacagggaagcctggcgtgctgcagtctatggggttgcaaagagttgaacgcggcggagcgactgaactgaggagactataggccccaccccctaccttctcctgagatggagtttatcttctttgtcttgtaaatttagggctttcagagggttgcagagtgaagaaacactcacgggtggcctgctgggct

SEQ ID NO: 11832 - DNA, 201 bp, Bos taurus
gcacagctgagccactgaacaagagaggccacccccgaatgaagaaggggagccccagcaagagcctggggaggagcagtcctggcagaagggacagcgaatgcacaggccctgggctcaggcgtgtctgacaagccgcaggagcaggaaggcgggcagtgtggccggattcaaggcaggggtccggggaggggccggccc

SEQ ID NO: 11833 - DNA, 201 bp, Bos taurus
tattcttctgtcttattggcagttcagacagctccagagtgtgagttaaaccctcttcaccgtcaccagtctcggaaataccaatgcattcatttaagagtactgccagcatctttgtggccttgcagtatccaacttgccagagatggagtgaaatgcatagcttttttcagagcctgaataaaaccttggaatccttct

SEQ ID NO: 11834 - DNA, 201 bp, Bos taurus
gcggtggagagctcacggtgctggagaaggtggaagacgtggaggacagaggtggtccagtgtggggtgagggagcccccgtggccgcagggaaccctgcatcacgttcaagaagaggtccctgagtggtagctttagcaccgagcctgcaggtcagaagcgtgcggtgtgtcccctaaaggctgatacacagcagtctat

SEQ ID NO: 11835 - DNA, 201 bp, Bos taurus
tagaacggccttgatgagcacaggtgcctcgaatcctcacaaccaggctgcctcttaaccaagggggaaactgaggctcagagctcttgccagcattgcccgtggccactcgctcaggaagtggccgtgcgcaggggcctgggccgccctgactgggggtcgccgcctgtggccagggtggtggtggcggcggggcccttg

SEQ ID NO: 11836 - DNA, 201 bp, Bos taurus
cagccagccagtgccaaagccccggccgcagagtcaggaggagccgtggacagaggaccatagtctggaagcctgggggaaggggagtcctgcggtgacccggaggctcaggccgctcaagggaaagaaaaaaaaaaacaaaaatgccttccattcaccgccgaagcctgtctgccgaggtctccaggctgggaggaggca

SEQ ID NO: 11837 - DNA, 201 bp, Bos taurus
aatttagttttacaaagaactctctatactgtccttgttctttaacacactgaagcccactcaacacttcgtttcatggcctgaccacggtctgttcaccgcagctttccaaccccacctctccaatctttaaggaccacagtgtcatggaactggtgagaaggcccagttctacctctggctggagaggactaagtagcc

SEQ ID NO: 11838 - DNA, 201 bp, Bos taurus
acgaagccccagcaccgccagagcaagggacggattcgattataaaccagaataaacaagtacaagctcagccgagtcgcctctgtggtacgcccgggaccgacacgacctcgtaaatcgacgacctgagagcgccagtcgctccgtcgccgctgactcttcccgaccccgggggctgcagcccgccaggctcctctgtcc

SEQ ID NO: 11839 - DNA, 201 bp, Bos taurus
gtcatcagggtggggccctaagccaattaagccaatgtggctgtgtccttataagcaggtttcagagatacacagagccatccgggtccatgggcacagaaggcccaccctgtggaagggcatcaagggccgcccagctgccagccaaggagaggtccccgaggaagctgtgcctgctggcagcttcatcctggacttgca

SEQ ID NO: 11840 - DNA, 201 bp, Bos taurus
acgtgcctacagggtttttgagggcctgtgcatgtggtcccaacctgtcccatcttctgggtccctgggaaacacacgattcctttacacacccctggacaggcccctctggccacactgtcctgagggtgaagctcgctaatcctggagaccccactctgcatggcgtgggctggagggaagaacttcagcctctttctg

SEQ ID NO: 11841 - DNA, 201 bp, Bos taurus
gccgcctgcaggaggtcctgtcgcagctgcgctgggagacgcacggcgagcaggcctcgcgcatccgccacctggaggccgcgctcgacgtggagcgccggctgtttctcaagtacatcctcgagcactttcactggcaccccgccctgcccagcgcccccgacgcccctcttccattgggagaaccgactcgcgaggccg

SEQ ID NO: 11842 - DNA, 201 bp, Bos taurus
ggccatcccccccgggacgcatggatctctagcacacggtgcttttgtgaggagcagcattaatttacgggacaagaccccgagtggcccactttctgaggatggaaagcgaccgggaggcaggaaggcttacctgtagccatggtccttgtagtccttggtggccgagtacacgaccgagctggccttcacgctgatctg

SEQ ID NO: 11843 - DNA, 201 bp, Bos taurus
ggggaggcggggacacgcagtgtttaaggcaggagcacactctgtccccctctgcctggcaaagtaataaagtatccgtttctacttcacccagacagacaaatagggtcatttcaagcacacaggaagacactgcagagatgagtgaaggaggctcacatccaagagcgtcctgcagtggggtcctccgggccctcacgg

SEQ ID NO: 11844 - DNA, 201 bp, Bos taurus
tcggtcagctccctggctgctgggagaggcctgttgagttgcctgtcctgcttagagtcttgggggtacagctggttgggtccctacctcactgtggcaggagggctggtgagggccctggctggggcaaggcagggcccctgacagctgtgcctccctcccccccagtggcccatcatgacctggacaacacactcaact

SEQ ID NO: 11845 - DNA, 201 bp, Bos taurus
cgagggcctcaacatctcttttgggggagacacagaagcccagggtgactatcggggtttgcacactgagagcactgcctgctgggaagctcaccaaaaggggggggcgtgggtggccaacctggcagcagggcagagcccagggacgggcaggggggctgggcaagaaggcacgtgggtcagaggccagtgtcccaggaa

SEQ ID NO: 11846 - DNA, 201 bp, Bos taurus
tggcttccggtggacgtgtgaaccggccccaggaggtccttgcatatttcccggagtcggtattcaaaccctagttacagaaaacacagaaccaggcacacgtcacagaaggccagaaagccgagcccaagctaaatcaccacgaacgcagagcccaagggaccaccgctccgtgcaccacctcctgcggcctgctgtctc

SEQ ID NO: 11847 - DNA, 201 bp, Bos taurus
cagctcgggcagcgggcagggccaccccccagccaccgcactgcgggacagcagccagcagacgcatggagcacctcttgccacaggggatgcagactgacggccagtgggcaggaagacggggtggcggggtcctgtgtgagtgatgaccccggcgtgcacccgtactttgccaagaaaggtctggaagcacacagccaa

SEQ ID NO: 11848 - DNA, 201 bp, Bos taurus
aataaagtggccgcattcaaaattaaactggaattatgggggcaccaagtcaacactgagattttgacatgtttcaaacatcagcagagattgaaagagacagagccggggccttctttctccaagctggtgcatgatcacctatttcagctttcaaaagtgtttgagcattacttcccaaccacgaaagacctccaaact

SEQ ID NO: 11849 - DNA, 201 bp, Bos taurus
gtgctgcagagctcttcctggccctccttaggaaaggaggaaatagactgttagcaaccagtcatcacagcagcctgcatgtccttgggaacatcgacctctccacggcgcatggtacaggaggccaggataggaggtcctgcctcggctgagccagaggcactctcctggtccttgctctggagggtcgggtgagccctg

SEQ ID NO: 11850 - DNA, 201 bp, Bos taurus
aactgatttcagactttcagtcactcatgcctcctttcacaaatgctctctgctctgctgcgtcccagcgctgtggatgcacagaccctgacacgcctgtcggccttgcctcccgagctatccagtgaggaagaggagggaacactgcagtcacgcggttcctaacccagatgtattgaacagtcagtctctaacacaaaa

SEQ ID NO: 11851 - DNA, 201 bp, Bos taurus
ataaaatattcaggtggaaaaataaataagaacatatcttttctatcaagagacattccagatgacaaaaggtttcaggtggaagaggatattagactataatttaaatagtaattcctcatttcattttaaaggacataaaccataacatgttatatggtgatgaaatttaaccacatattgcttagagtaaaatctggc

SEQ ID NO: 11852 - DNA, 201 bp, Bos taurus
agcacatggtccatggctggcagcaggcctgtcaggcaggctgtggttctcagaggtcaagctcacggcagtaaccagaagtagggctatgccctgttgccatccacctcggccgccttggggagggcaggaggtgggcgctaaggatgctggcgtaggacacaggtcagagggcacccgcagacacacacgcattccgtc

SEQ ID NO: 11853 - DNA, 201 bp, Bos taurus
catctacgacagcctgaccagcctcatgaccagccttgtcgcagttgagttggagaaagtggtgctgaagtccaccttcaaccgggtaacgtgaagagagtgcaggcctctgccctactgttttccctgaggaggaccagtctgtcccctccctactaccccaggccctgtgcacataggctcagtgctgccctgaagcag

SEQ ID NO: 11854 - DNA, 201 bp, Bos taurus
catgggccaaggccaggctggaattgggagtcatggggatgctggcctggaagcttttagaagcacagctcccttcgctgggtgtgcactggcaggacttgtgtagaccctagctcaggccttctccatcagtgtcttcaggtgtccagcctccccaggcttccggtgctgggcggagagccctgtccggagccccgtgcc

SEQ ID NO: 11855 - DNA, 201 bp, Bos taurus
ttgagcagagttcactatattaaatctttgctgccaagtacaagatgataaggattgtatttaaggttgtctgataagacattgacaggggcagggtagacactaattaatgcgaggcaacttgattattgacaggcaggacctggtattgtgggcatcaagtcggccatctggtctgtacttcctgcctccatctctggt

SEQ ID NO: 11856 - DNA, 201 bp, Bos taurus
gacaaggttgcttttgttctacagagaagctgctctctcaagagtctagaaacagcggaactaagaaggaaagaaaggctgctgacagggcactttcctttcacaagttgcaaactgcttacctcggactctaactcagtgaggttgccaactatatctctgcactccacagctaagtcatcgagatgatcctggaggcat

SEQ ID NO: 11857 - DNA, 201 bp, Bos taurus
gtattctgttagctggctgtttctggatggtatattattacctgacaagaccaacacatcccatggtcatggatccatttctgcaatgccgtcactggacagtaggtcccgtgggtcagatgctatactgtgcagcaatctgtgcctcaatctggcattctgccggcagaggctctagagtaagaaagttaaatccacgcc

SEQ ID NO: 11858 - DNA, 201 bp, Bos taurus
ccagtaagtcatttatggacgagaggtcggggcggtggggactgtgaagaactacaggggtgctgggctatgtggtgactcacacctggcctgcccctttcggggacactggaaggcatgcctgcggagttgctataaaagaatatcgaggacttccctgatggcccagtgcatcagaatccacagtggataagaatgcag

SEQ ID NO: 11859 - DNA, 201 bp, Bos taurus
agagagggtatttcatgggcagagagggtattctgttctgtctcctgtgcccttaacacagcagatgctcagacacttgtgggagactcatgggccaacccacgcctctctagagggctggacatggataagatttgacctgtgctgttccaaaggcagcctctggttctgtttaaggaaacagttctgaagggctgtgcc

SEQ ID NO: 11860 - DNA, 201 bp, Bos taurus
ctccactctccctaccccacaatctcccttgcccgccacgctcccagcaaccccagagctgccctctggattccaaccctgacataccccagggcccttgtacttgctgttcctctgcctagaatgctttttacccagttactatgacagctccttttcatccctcagatcccagctccccagagaggccttccctgatta

SEQ ID NO: 11861 - DNA, 201 bp, Bos taurus
ttgcaattctataccaattcatggactatagccagaggttgggctggatggtcaaggacctagaaggaacatgattggaaaactggtgacaaagaaatttggggaaagaggtatatagataggcctctctgaatgggcaaaaagtgtgaaaatatttgtgtctcacatgaattctcaccaaagaatgaactcagccaaggg

SEQ ID NO: 11862 - DNA, 201 bp, Bos taurus
actcctcaccccatcctccctcctcaggctgcggggtccccgccatccaacctgtgctaagcggcctctccaggattgtcaacggggaagaagctgtccccggctcctggccctggcaggtgtccctgcaggtgagcggggttctgtgcgtgaagggagaggcactggggggtctgctgggcaggggggcgctgcccaggt

SEQ ID NO: 11863 - DNA, 201 bp, Bos taurus
gctgccaccatgttagaacagttggggcctgaagcaggccagggggctctccaaggaggaaatgttctatttactgggagtgaggattatgcctgggggcgggaaatggaggcctctccccagaggtgctgctgttgctttaatttgcatgatcaggcgcagctggggagaataatgtactgaccaacacaaacagaccat

SEQ ID NO: 11864 - DNA, 201 bp, Bos taurus
atcagcgctgcaagttggcctcacccacaagtaactgtcaatgagagaccattaggaaagcgattcagccaagcgtcagtggtgacatcaaatggagagttagcttaagtgtcgggttcaggccttctcctggcggctctccagcttcctccgccttggaccaaagggtgagcgggagggcccagggaacagcctggggag

SEQ ID NO: 11865 - DNA, 201 bp, Bos taurus
aagaaatcacttcacagaatccgtcatgttcaagaagagagctctaagaacatacatacatacaccagatatttttgacttttgagactgactgatgagaaagactaaggagagcctcagatttatccacactatctcttcctagggttctcagtgggtgaggagtggggagccttgtttcttgaatattttctgaagaca

SEQ ID NO: 11866 - DNA, 201 bp, Bos taurus
tgaaatccattggtctgagttttaaagcaggctttccaattatgtggaactgtcctactttaaagggcctcttgaactttcccttccttgcctctcagttggttcttagggttaaatgctttattattgtttcttttttagaacgcttcttctgttacttatttttggctgcaccatgtcttagtcgtggtatgcggggtc

SEQ ID NO: 11867 - DNA, 201 bp, Bos taurus
agaggttacaaaccgaacgcctgtgtctctatgtggcccctaaacatacctctagaaatacaactttcttgcttcccctcaaaaatttctaaagatctggcaacagttggccagaacaacaacaacaaaatggctcctctttggacaagtagctttccagttcactccatctactttttaaaggttttcaattcctggata

SEQ ID NO: 11868 - DNA, 201 bp, Bos taurus
gtgtaggtggcctggttaccacttctggagacacatctgcctgagtcacttctcctactttcctatccctggtcatacaccagacttttccccaaggcacgcccatgggcctggaagtatgaaaaaacagaatattctgtaacaggggtcagcaaacattttctgatgcaactactcaactattcaaggttgtagtgtgaa

SEQ ID NO: 11869 - DNA, 201 bp, Bos taurus
gaaaatgtgcatcagatactgttgtctaagtacttcagagaggaggcaaagccgaggacttatggggaggattctctcacctgaaggcctcataggtcctgcttagttacaatagcatcacaatgcttgtgtactagaaacacttattttacttaataatggccccaaagtgcaagagtagtgatgctgcaattcagatat

SEQ ID NO: 11870 - DNA, 201 bp, Bos taurus
catcctgcagtgacacagatgccttaatagggttaagctgttgtgtttgtgtctctgtcttgttttgggatgtgtacaagtgagtcagatcttttcctccgtaggcccagggagagcatttcgggcctgtatgggctgaattgttcccctgctcccattcatatatggatgccctcaccaccaatgagactgtgttcggag

SEQ ID NO: 11871 - DNA, 201 bp, Bos taurus
gaccgcgtttctatgtgctctaggggaagggactggcaaaaataaccttagtaatgcatgttggctaagtattataaggaaaacatgagctcagggaaatgttggctgttttataagaggaaaggactatgcatcacctggatgggagctgaattcatggaataaatgacgattatgctgacacccttggagagaacgtga

SEQ ID NO: 11872 - DNA, 201 bp, Bos taurus
acacaaattaaccaaacataccttgctacccttttgatttgtagaagcctcccccttgatgacagtgtttttaaatttcactggtgactgaagtcttccacgctctcctgtgccccttccctggtggctcagtggtaaaaaatcctaccaatgcaacagatgcaggttcgatcctgggtcaggaagatcctctggagaagg

SEQ ID NO: 11873 - DNA, 201 bp, Bos taurus
tcatgatctttttctttataaatccatacaaacactgatatcatttcaaactgctactgaaatatagaagatgaaaaccatgaaaagacaagagtttccgctaacaaactcttgggcgctcttctcttcccaaacttcttaaaaggacttcatggcccaaatcaactggtattcttccaggaggaggaaatatttttgaac

SEQ ID NO: 11874 - DNA, 201 bp, Bos taurus
tacatgtggaagcagctctaattacaagaaataactgcaggtgaatacaaggtagctcccccacctgacaatgaattttacagagacaaagccactctatgcaaaacaccaatgttttaatctccacaatgttgcagggaagagccaagttcaagaaagtcaacccaaggaaaagcacatttgacaaagacctgctaatag

SEQ ID NO: 11875 - DNA, 201 bp, Bos taurus
gactaaaacctcaacccagatatcccatccccagtgtccttggcccaggccagagattctatagtcctcatgctggcctgttctcaggatattcaaaggttcactcatgtgcttgagcttactgctgttgacaccactgtactcatccttgggcccatatccgcattcactttcacctcgattcctatacgaacagcaatc

SEQ ID NO: 11876 - DNA, 201 bp, Bos taurus
ctcacactgttttgagtcacctttcagctgaaatttcaccccaacaggtctaccttggtggccccctctaaacaccgaatactacctcatctcgcacaccactcccttgcccagtttgatttatttcttcacagcctttattcctgcttgtcatggtgtacttttgcatttctcatcctctccacattctactgtgcacgt

SEQ ID NO: 11877 - DNA, 201 bp, Bos taurus
taaatgggggtcgtcactagacacgcagcaagaggcagtgagagctgaataaagagaaggggcttacttcaaagaccagcgtctcattgatggggcccggtgcagacaggcattcggggcggttgaaggcacgctggtactcaaacacggtccccgcaaaggcaaactcccctggccagtcgacgctccagccccctgtga

SEQ ID NO: 11878 - DNA, 201 bp, Bos taurus
aatggtgggaatggtggtagagaaaaggaagagacaggagagaggaggggagggaagagacacagagatgggaagagcagctgccaatctccataatttccaggtctccagacactcaggattcccatatttctctttggataccaggaagcaaccagcttaaaaatgattctactttttagtgatgttgagatgatcagt

SEQ ID NO: 11879 - DNA, 201 bp, Bos taurus
gatggcggaagattcgacttccagtggagcctgagcctcatcatgggctcattgtaatatactagcacgagctaaacaacacacccaccggcgccatgacggctcacaggccaccgtaaaagaccaaaaaatgggcgctggtccaactgcttaagggaaatctctgtccctttctccagacagttggaacaatcctcccac

SEQ ID NO: 11880 - DNA, 201 bp, Bos taurus
cctgggatctatctagggaggttccaaacatcggggttgtgtccagtctgcagcccagtattttctagtgctctctttgggagaggtcaggcctcccccatgattggatggagtctctttgaaagctgacattgaactgggacataataacagcctcgggacatcagagccctggtgcctggcctgcagtcctagacgttt

SEQ ID NO: 11881 - DNA, 201 bp, Bos taurus
gcaaggccctgggggccctggccaggagtttgaacttgactccacgtggagctgggcagccactggaaaattttgaatgggagaagccgttaaacgcctcccaaaacaatccctctggccactggagaatggatctggaggagatcagagcagaagcagcagagaacagtgaggtgtctcacatggggggaggccgcccac

SEQ ID NO: 11882 - DNA, 201 bp, Bos taurus
gccttgaaaagcgtgcattgggtggaacacagagatggggaggccaggaaggcaggccttgggagaaggtggggtagggagaaacccccaccaaccgcccagctccccatcactccagcctccaggaccatagtgcttcttccgagacccaagtctctgttgcctccttgcttttatccctcctcttatctccacctgcca

SEQ ID NO: 11883 - DNA, 201 bp, Bos taurus
ggccccgcccagatctattcaattcagaattttgggcagtctctacgcgcactccatcttgagaaccccgccccagccccggtggcctctcagaggcagcgctgttctgtcacagaggtgggctttggaaagctccccgagctcaccatgccctccgccaaagtggggcctgaagacctccaggtcttcagcttccagagg

SEQ ID NO: 11884 - DNA, 201 bp, Bos taurus
caggtgtgcagaatcaaagctgagataattcattctcagttgccctagaatgagaagggctgtaactgtgactctctgctactttcctacatgcagtgatatttaagccaagtgccaaacaggtcctaccctgatattaaaacatggtacaccagaccccacccctcgcagagatcttagccctcctggggagggactggt

SEQ ID NO: 11885 - DNA, 201 bp, Bos taurus
atcctgagtgttctgcatgtgttttggcttcagtcatcgcgtgacctccatgagtaagtgttactgctgtgttgattctatagatgaagaagccggggcccctaaggagttaagtaccttgctcagaatcccagggttcgtacaccgcagagctggggtcaggaaagacattctcacgttccaggattcgctcgggcttcc

SEQ ID NO: 11886 - DNA, 201 bp, Bos taurus
ttcacgtgcttgtgtgcaacgcagctgtgtttgggctcccctggaccctcacaaaggacggcctggagaccaccttccaggtgaaccacctgggccacttttacctcgtccagctcctgcaggacgtcctgtgccgctccgcgcctgcccgggtcgtcgtggtctcctcggagtcccataggtgggtcagaatggggcatt

SEQ ID NO: 11887 - DNA, 201 bp, Bos taurus
ccaagcagtatttctacccaagaaccagcttccataggtgccgggctcctgaggaagaaagggggtctctagagtgggtgggcgggccctttcctcctctgttgttggttgtggtcacagactcgcttctgagctgtgtgacaggtgggggtttcactggggcctgggcagtgtgcttgtgggagccctgaaaggttcccc

SEQ ID NO: 11888 - DNA, 201 bp, Bos taurus
aggcccttgcgcatcattctgtctcagtaccacagtggtctcagcagcttttttgctaagctataagtcagcccccaattcctgtctgttcccagggcaaggtgcaggctggtagaggagggccacgcttcctgcccaggatggcacaggtgcctcctccctctgagggcaaggtgacgagtcgagaaggaggccagaagt

SEQ ID NO: 11889 - DNA, 201 bp, Bos taurus
ttcaagtgaacgaatgaacaaaagtgaatgaatgaagccgagccatcctcaatcaaacccaaacgctgctcacacacacagccccgaggctggccttcgcctgcacctcagttacggaaagctagaagttgatattttggagccccataagaccaggaacgctgtggcctgaatgacaaagagatgcggacacttcctctt

SEQ ID NO: 11890 - DNA, 201 bp, Bos taurus
agagacaaaatgatatggatttattcagattcagagcaaaacatactccacagacagagtatgggccatcgcagagggcaaatgtggccctgaaatttggcgtggctagtctttataggttgggtaagctcatatgctaatgagtgggagaattattccaactgtttttgggaaggggtggagatttccaggatttgggcc

SEQ ID NO: 11891 - DNA, 201 bp, Bos taurus
gcaggtttatactgcacaccccaggcggcctcggcactttacagaccacagcataaaccctcagaaccgtcccgcccccgacggggggaaagcggtgtcattattaatatagaagttgacaaacatcgttagcaccgtctagtccagccaccgcccctaggaggacctggtcacagtcccagggcatcttgggggcttgag

SEQ ID NO: 11892 - DNA, 201 bp, Bos taurus
gtggtctgtgagctcagggagccggtggagtcctctgctgacctggagtgggcccctgccctgctccgtatctctgggcgaaggcccagcctgctggaagcgtctattaaaacgtaattgatgaggtgccctgcgcctggggaagggatgtcggggaagggacagcaaaaggcctgtttgcgtgagcagggcaggaagaac

SEQ ID NO: 11893 - DNA, 201 bp, Bos taurus
tgaagacatgagacatcttgacttctatttccccgacacccgtctctctgccagacccagagggctcgcaggaggctgtactgtccacaacccggccttccgcgtcgctgccgaacatccgaagaaggtaacagcactttgggttttcagagtatatgtgagtttgggttaggccaggggaaaactcttgccatggacact

SEQ ID NO: 11894 - DNA, 201 bp, Bos taurus
ggccccagaagctgcagccatgcttagacaccccagagccacctcccagctcttctcctcaccccagcctctgtctacacggggactggcacaggagcgggttgatgggccccgagccccagcttaggtgactgctttccggtccagtgcagtgacttctgagtctctctgatggccctggtgactaggcatgaaatacag

SEQ ID NO: 11895 - DNA, 201 bp, Bos taurus
ttagttctaatcctgtctcttttgtgtcatctttccacgaatatgggggctctgaggttaatgcgcttgaaaatgagggacttgtggtgattctggccacggggacacctcccctgctggggacagctgagccaggaatggggaggtcgtcagcaagagtgctggggtttttctttagacttccttgtgagccttggaaga

SEQ ID NO: 11896 - DNA, 201 bp, Bos taurus
gcctttgctgagctgccagaatctttccttttcctctgagtttcaaaaacactggcgtgtgtcaaagaaatagcatccagtggaaagatcacgggctttggtattgcacagaaagggattcaagctatgtctcgcagcttactagctgggtaacctttggcaagaccctgagtctcatcatgcttccatttccccattagt

SEQ ID NO: 11897 - DNA, 201 bp, Bos taurus
tgctgaggttaccgccctcctcactgtggcctcaaggaacccaagaaacacactcattgcctctttggttgttttataaacagtgcttggaaaccacgagtcattatcactcttctggccagccagtcagactttccatgcccttgtgtgtgatgcccttaatcctctcaaagccagcatcctcattcccctaaaccagga

SEQ ID NO: 11898 - DNA, 201 bp, Bos taurus
caagtttgcaaccagctctctcttgaagaaaaagaagaaagccctgatttgtggcgttggctgattttctggtgtaagtgttctcaccacggccaatttcagttgccagtgtgataccagttaacacagagttgggaagagatgtgtcagctcttgtgagcaggtgagaactggttccaagagcccactgggttagggcca

SEQ ID NO: 11899 - DNA, 201 bp, Bos taurus
cccagggctcccagagccacctcctgtcgcctccctcatctgtggagagaggaattcgctgcctcgccacacggacgccctttgtccgacagtgctgagccggccagttagagcccagggcttatttccaacacaactttcctcagctgcaagggctggctgaagggacctgcacatttggagactgttagccttgcatgt

SEQ ID NO: 11900 - DNA, 201 bp, Bos taurus
tctacaaacaggaaacgctggagaaggtgctgggaaaagggaactctcttgcactgttggcaggaatgtaaattgatacagttgtatggaagacagtatggcgattcctgaaaaaactaggaataaaacaaccatatgacccaacaatcccactattaggcacatactctgagaaaaccataattgaaaaagacatgtctc

SEQ ID NO: 11901 - DNA, 201 bp, Bos taurus
caacccagggatcaaacccaggtctcccgcattgcaggtagattctttaccagctgagccacaagtgaaggacatcacatacacatgcattgaaaagtccgaggttcttgggacttccccagtggcccagtggttaagactctgctgccaatgcagggggcacagtttcaatgtctggttgaggatctaagatcctgcatg

SEQ ID NO: 11902 - DNA, 201 bp, Bos taurus
gggtcctgtccactgccaagcgccttgtcgacacagcggtctccacaaagagaagccatggtgccgcgggcaggggaaaacgtcatcctggcccccatccatcttcaaggagcctaccaccgacaggaagcgtctgctcctgttcagccgcactaatgctgccagccgggctcgcctatcccagagcggcagcaccgcagg

SEQ ID NO: 11903 - DNA, 201 bp, Bos taurus
tgacatgagggaggaaatctgctttactctaattatttaaatgttaaactcctccaaaaacaccctcatagaaacacccaaaataatgttggaccaaatatctaagcatcccatggccctgtcaagttgacacataaaattagcttaccaaatgggttcattcatgcaaaacaatatcatacagccattttttaatgcaac

SEQ ID NO: 11904 - DNA, 201 bp, Bos taurus
tatgggcagctatggtgacggggctggggccatgctcagtggtaagggtgtcccactgggctggttggggttctgactgtggttctggctgtcagactcccgcattcctggccatcgtttcagctgggtcctgcagccttcctggctcctgtgtgaaccagaccctctctttagaatagactccctttcagctaaaaccat

SEQ ID NO: 11905 - DNA, 201 bp, Bos taurus
tttcttaggcttagaaggattacatccatccatgagtaaacaacaaggatgagtccaagtggcttctgccccaccaacattccagggccccccgtcagagcgtatttttatcagtgaccaggaactgccttgtactgcctgggagccagttgagcggtgatctagggactagctctggagtcggcctgcttggatttctct

SEQ ID NO: 11906 - DNA, 201 bp, Bos taurus
ataatagtgacagaagtaaatgggataaatgccccccaaaagaggcaaagactcttaaattaggctgcaaaagcatgtcaggccaaaaaccacagatgagccttgaacagacaatgtggaggtttaggggtgctcaccctctgcatgcagtgggaaatctccctttggcctaaagttggatctctatatccatcatttctc

SEQ ID NO: 11907 - DNA, 201 bp, Bos taurus
atcaacagggtttgatgtcacaacagcacaaaaactgagaatggaacagtgccacagtgctgatgaaaagacccgtcagctgcttttccttcctctgctgtttttaataaatctgttttattcagatttctctttcagcctctacatctgagccatcttttgctcaggaataaattacatttgtcccatgaaatttatgag

SEQ ID NO: 11908 - DNA, 201 bp, Bos taurus
caaactgcaaaattatattttggaatatacatacacacatatatatattgtacatgtgaacacatcaatattataattactatatctgtagtatacagcagaccaggtaaaatatccattctatgtgcatgttatttaattttcatgacaatcacatgaggcaagggactgagtaggtaatccaaggtcaaagaactagta

SEQ ID NO: 11909 - DNA, 201 bp, Bos taurus
cccccataggatgtgtaaagggagagtagatccctaagtaaagtggaggtttcgtcaggaaggacagaggggaacagaagatgggtgggcattaaagatacataataacagaataccgaagtggccaccatcccatccgccttaaaatagaaaatacagccacaggtgaagatccctgcagtctcatgcacaattacattc

SEQ ID NO: 11910 - DNA, 201 bp, Bos taurus
taggcccgttcacatatgggcaactgacttctgacaaaagcaccacggtaatgtagtggggagaaagctctccaacaagtggtgctggaggaactgggtatccagagggagagaaataaaccttgactcatacctcacaacatacacaaaaattaatttgaatcacagacctaaatttaaaaaactaaaactataaaattt

SEQ ID NO: 11911 - DNA, 201 bp, Bos taurus
cgtggagtcccagcccaagagagggggtggcaccttcagagctttgaacagggagctgacaagtctccacaaatcctgcaagtcacccagtgggaacagggtgtgagctacaggtaaggggacagcagagtactcaagagcactcaccctggggctggacagtctgggtctgatcccaggtctgcctactgagacgtgacc

SEQ ID NO: 11912 - DNA, 201 bp, Bos taurus
tataagagattatagagtaatgagggattggccacaaagaggaaactctacaaattcaaggtgtagccgacgtaaggagcagctgagatgcagagttgatcggccaggacagatcaacgcatggcagaaaagccacactggtggaatttgcttgaggtcagccctctggaacgcgccagaagtctgtccactgtggtgccg

SEQ ID NO: 11913 - DNA, 201 bp, Bos taurus
ttgtccccgccttccacgcctgccctgcaggttctcggctcctcctggagcccggggaaggggtccccgtgccacaagttctacctcagcacccagccacctggcaccgtgcagggcccacctcttccttttctcttatttagctctgcttagaaacacactgcactccaaatggtgaataggattggaaattagaattac

SEQ ID NO: 11914 - DNA, 201 bp, Bos taurus
gggagcgtcctctgacctacgctggagggaagtgggtcagcggagcagggggagcgcagcagtgtcggagtgctcacggccaacattcagagataaagcatctgttgtcgcacagacgcaaatgagtgagtgtcaccctcactctccagagttgggcttttttcctgaacattcctggggggcctgtgccggctgagcggg

SEQ ID NO: 11915 - DNA, 201 bp, Bos taurus
gtcctggctgtcagcggggctggaggcaggacaggaggacccaggcaggggaccggcaggcgcccaggcctggcggagcaggtgggccggccagtggtcacgtgtcctctactggtggtccttaagcgcctgcttcacagtcccctggacagattatttcaaatgcagactcctggatgccgcgtctctgggcccggcccg

SEQ ID NO: 11916 - DNA, 201 bp, Bos taurus
gcagcccagggctcactcgctggtgaagcctccagatggcctttggagcacccactgtgggccaggcccctgctgaggatgggggcaaggaggtgcggccggtttacctctacccaggaaagagctcagacccagtggacagatacgcacagcaaactaagggaggtcagggctcaggggccagcagggaggggaccacct

SEQ ID NO: 11917 - DNA, 201 bp, Bos taurus
agaagggggttgctgaaggagcaggggcatggggttcccatcctgatgttgccacatgtctccatgaccttgatcacgtgatttcacctctcaggccttgcgtttgcagcgccagtatttctgagataaatgagatgaatctgatacggcaggtgcaggcacccgggagggccaatgaacagcaggttttccagggcggag

SEQ ID NO: 11918 - DNA, 201 bp, Bos taurus
aggttaaggtcctcggtttgagcccgagtgtcagtgggcagccccagtccttgcctttgtccttctgcaagcctggggaggcctggccttggaggaagagcgtctgcagggcagcggtgatgtcgttttgcaaacagagtcagtgtggatgccagctgagagcagggggccctctgccatgctccccacacagtgggaaga

SEQ ID NO: 11919 - DNA, 201 bp, Bos taurus
gtgcagaggttgactcggcggagggtgcacggttcctgccaaagacgtcactcagggctgttaaagtggggcgtttacgccctgccacggcatgtgtcccgcttggccactgccttacgggacccggcagggctctgtcacccccattttacaggggaacttactgagacagattgtcatgcggccaaggccacccagtga

SEQ ID NO: 11920 - DNA, 201 bp, Bos taurus
caatactgtatcaaattcagtagagactttaaaaatgactcacatccaaaaatctttaaaaaataaaaaagcaaagcacttactttaaaaggcatttgggaatgtccttcctgacagaagccaatttacaagagcctttttcccagttaggggtaggacatgcctgttctggccttcccagcatctgagccgctctctttt

SEQ ID NO: 11921 - DNA, 201 bp, Bos taurus
gcagaagacccatctgagtgctcggtgactcaaagcatcagttacattttgtaggataagagtgtcgtatcccacctagggcccagtgcgtcgcgccttcagtagaccactgcactgtcctattacggtgccgagtatcaggagggtggatgagatgttccatagattcagggactgtggtgccggccaagcgccgtggga

SEQ ID NO: 11922 - DNA, 201 bp, Bos taurus
acctggctcctccatccatgggattttccaagcaatagtactggagtggggtgccattgccttctccaccgttaggtctagcttattcttttttatctcattaggtgaactaggtctaggctaactggatttcttctaaggccagtagtataagtcttgcatttgagaccaggagctggcaaatttatttctgaaagggcc

SEQ ID NO: 11923 - DNA, 201 bp, Bos taurus
aagtactctcgggcgtgcagcctcaccagcactctgcggctctgtgcttctgtcacactggggagcaggagggctcagggcccctctcctggtgggtatgaggcttctgtgccttcaccaggaacctggcaacagacttgccctgagtggtgcctgctgccgccctggagctctggggcccaccctgctgtcccttggaat

SEQ ID NO: 11924 - DNA, 201 bp, Bos taurus
agtgctgtctagggagaataaataaatgtaaaatcaggatagtcacatatgatcacagatgcagccgcaatctgaaaaagaaaacagagaaggtaccttacttcttatgcaaacagttgtaaccaagttgaaaaccgctcagacttgatcacattggcctcttatgttgattactctagtcctgttttggggtgttacagg

SEQ ID NO: 11925 - DNA, 201 bp, Bos taurus
aggctggggtaactgaggcacaaagagatgagtgagaacttgtactgcttagcgggactctcatgagtatgtgcgtctcaggatctgctttaatgtgctatttctaaccctcccaacagccctgtgaggctgctaatggtacccccttcccacagacgtgagaacttggccaatatccccttgcttgcagttggcagaaac

SEQ ID NO: 11926 - DNA, 201 bp, Bos taurus
ctgagctgttgtcagctgctgacttgcttagtctgaagatccaagaaagattcactcaaatgtctggcaccctggtgctgcttcgtgtggcctcttgtcagtgctgccttgggcttcctcagagctaatcaggggtctgatgtggtcattggcttccagagggatcagtctaagcaagtgaaagtcaagctatgtctttgt

SEQ ID NO: 11927 - DNA, 201 bp, Bos taurus
tgtgctctggatatagaaggcaggccgccaggaacccctgcagcagaagagactgaagaaggctagaaggggtgctcgagctgagagtagatggctggatgaaagggaagggccatccaggcagaagacgggagaggtgatgaggttcagcaccagggaaaagccctgaagtaggcctttgcacccgaggatgctgaggca

SEQ ID NO: 11928 - DNA, 201 bp, Bos taurus
gagcctttgcttatttctccaaaaccaaccttttaggccagagatgaaagtgtctttagaagattttagccagtacaggcaaagatattccctgacaggacgaagctgggcctgggctcagcagaatcagcttctctggacactagatctgtaaccttgagtaagttttttgtggttctcagactttgctccacttaaaaa

SEQ ID NO: 11929 - DNA, 201 bp, Bos taurus
ggttttggaaagaataaaatttttattagtgttcatttcttctctgtctcctccccagcatggcgtggcatctgcctggcccagaatcccactaaagggagcctgtggggcactgtctggacacatttttggttgtcacaactggtttgggagctctactggcatctgttgggtaggggccagagatgctgctgagtattc

SEQ ID NO: 11930 - DNA, 201 bp, Bos taurus
ggccagctctgatgtgtatcctccccatgccccagtgctagctgcagcctgactctggctttgttactaattgaatgtgttaatggacccacatcatatattctctgtgggcctcagtttcctcatctgttaaatgggacttgggggtatctgaagtagatgagccttagcatgccatcagcctcaaggagtgcaggtttc

SEQ ID NO: 11931 - DNA, 201 bp, Bos taurus
cctctgagggcagaggcccagagggtcttcttccctgaattgagtctcaggtaactgatcccaaacatcctcgtggccatagatatgcatatgttgctcgtgtctggtcctgccctgccctgccctgtccctgctgcctgcctccatctgcctcatgcgtggctgtacagcgtgggtccagcacgggctctgcggcctcag

SEQ ID NO: 11932 - DNA, 201 bp, Bos taurus
caatgatccccacctcctggtatccatgctcttatgtagcctcctcccaagttgaagagggatgacctgtgtagccaacagatctagcagaaatggcactatatgtcctcaaggccttggtttttcgtattacttattgctgtgaggagagccaactaccatgttgcgagcaagtagccctatagagagagccacatgacg

SEQ ID NO: 11933 - DNA, 201 bp, Bos taurus
tttagtgcctgtgggtgtggttcagctcagtgtggtgagaatttagtggatcagagcctgcaatggttcagcaagagaaccaggccagcgatctgtcagcgtggagatgaccaataaacttgtagagggtcagaaaaccacctggggaaggagactggctattgtgacggccaagcttttgctccccatcctgccctcagg

SEQ ID NO: 11934 - DNA, 201 bp, Bos taurus
tgagatgctgaactttgggtctctttcttccttagcaagtgttccgtcaattaaggcaaatgtgtgatgaacttttatcaaaagcaagactggccattgttacagaagttctgtctgtccaacacttcctggacctgctcctgcatcctctttatcattaaacaaacttctagaagccagtgcaaacatctgaaagtgctt

SEQ ID NO: 11935 - DNA, 201 bp, Bos taurus
ctcaccaacactggggcccgatgctatcatctgaaaatggaggctagaaaatgtctctctgttgatttaatttgcatttcttcagttgctggtggaacccgtggttatttatgggccattatggttctttgtgagttgccagcacaagcgctttgtccatttgtgaaaactgggctgttaatttcgttttctgtttcatag

SEQ ID NO: 11936 - DNA, 201 bp, Bos taurus
cctttctctccctcacagatgacgggaagttgtccttggaggagttccagctcttctttgcagatggcgtcctcaacgagagggaactggaggatctctttcacaccatcgactctgacaacaccaagtgagctcagtcccggcggctggaactgggaggtggcatcccccagtctccagtgtccactgccctgcaccgct

SEQ ID NO: 11937 - DNA, 201 bp, Bos taurus
tggaggacgggaggcaggtgaggggtgatccagcaggccaggctggcttgaatttcctctgggttccaggagatgggagggaagacgcggagcagctagggagcctgggaggcctgggccttcgagggaaagttcccggataagaagccggaagtgagtggggattggccttgaagggagcggaagcgggctggaactgtg

SEQ ID NO: 11938 - DNA, 201 bp, Bos taurus
gaatagagtggcctgactttgtctcctgagctatgtgtgccctgaatggaataaaggaaaacagaacccagagctttcgatggccgtttttccttgggtcggtatctgaatgttgatacactaggtgagtcggttctagaatcttcaggaaagtgaaggtggcgcagccagggtcgaggaggggtggggctctggagggac

SEQ ID NO: 11939 - DNA, 201 bp, Bos taurus
taaaaaaaaaaaaactaacagtttagcaaaaaagcaaaatttgacaagcatgctttgttggtgaagccatgaagactcaggccatctcatacaagctggtgggagtgcaagttagcacaaccaggcatggaagccacttgtcaatatctagcaacgttgcaaatctctgtgctcttggccagtttcccctagaaacatcaa

SEQ ID NO: 11940 - DNA, 201 bp, Bos taurus
gcgtgtgcatccttgaggtggtgggccttgtttgcttacatctcctcctcaccaccgccaaaaaggctaggggaatcactgtctcatagaagtaatgtgccgattaaacagggtcctagctccctgaccggcatcacttaattgggatgcttcttttaattcatgcagttgctgctgtttttaccaaatgaaatcttttga

SEQ ID NO: 11941 - DNA, 201 bp, Bos taurus
gggtgtgcaagagcttataatgggaggcaggcagtgtttctgtgagctctgaggggtgcggggaacatccagacagaggccaagcacagggaagcgcccccggctcctgtgtgaggaaatgaagcctgagatgaggcctggcgcacacatgcaaggtcctgaaccggctgcctgcctgtcctcagagcgcccgagcaaaag

SEQ ID NO: 11942 - DNA, 201 bp, Bos taurus
ccttggacctgaacgccctcacctctgaagcagcccctccacttcatcaacatgactgatgagtggcttgtaagtagggcggcgttcttaggggtccagctgggctgggccccagcgctcagatggcccgtggcccggtgtctgggtgccaagttcttggctggaaaagtttccagggcggctcagaaggacggagccagg

SEQ ID NO: 11943 - DNA, 201 bp, Bos taurus
gggcccccagttcagcccccgaggaacagggcctcagcccccgcggcctcccccaccagcccctttggatagggtctgagctaccaggctgcacccaggcacccttgcacggcttcactttgtggcccactccttgcaggctcctcatgtttgttttaaatcagggttatcaagacacaactcacaagcaacaccgttcgt

SEQ ID NO: 11944 - DNA, 201 bp, Bos taurus
tggaattggctcccccggctcacggtggggccagatgcttgtacgcgtgggggagtcagggcactgcccggggcaggggtctcctgcttcatttccctggaggccgggcccgcggtggcagtgacttgaccctgctccccagaggtgaaaggtccccactttgcagccggcgctaattcccagaaccatccatctcccggc

SEQ ID NO: 11945 - DNA, 201 bp, Bos taurus
tggacactgacagtggtgggaagggcttccccagtgggcactgatacaggcccggggctggtggacccggcgctcgggggctgtcggcccagcctgcagacagcgccgggattccagctgctccttcatcttccatgccagcaccctcgtccttctcgagggaggccttgcactcacttttccttctgcaagtgaacagtt

SEQ ID NO: 11946 - DNA, 201 bp, Bos taurus
ggtgaagaagacacagcgtgtctgcagatggttgaactgcacaaagaaagggagagggacgttgagagtcctgttcagtggagaatgtggtggccctccctgtaccagttagctaactagcgctgcgtaacaaaccatcccgaatacagacgtgctgggctccgggagcagctgcgctgggtagctctggcccagcgcccc

SEQ ID NO: 11947 - DNA, 201 bp, Bos taurus
acactgtccccccttgctgaggcctggtcacctctttctggaaggaagtcagaggaaagcaagagtgcttatcggtcattttagttgctttcactcattttgttcattctgggccgatccggtggatgtggattcctgctctcccttaaagaggcagtgatgggaccaggacacgtccctgggaacgtgatgggttttgag

SEQ ID NO: 11948 - DNA, 201 bp, Bos taurus
tggatttccaaaggggccaaacatttacagaaatgacccaaactgtacaaataaaccataggtctggtggaggaggcagtttacattcctcggggtcagacgaagatgggagccggccctttgaaaaccactttgcatcaggttcgtgagctctgtgccccgtctgggatccctcaatcccatccaaatgcttcgggaaag

SEQ ID NO: 11949 - DNA, 201 bp, Bos taurus
gacaagggggccggggtgtcatttcagctccttgaggacccttgccctccctggcctctgaggccttgctttaactgatcctggggccttgctctcatccggagagctccccacttcctgggggaccctcctctcgacaaggagtgtgttggcactgcctctgagcatggacatttctgtgtcctctgccatccacagcca

SEQ ID NO: 11950 - DNA, 201 bp, Bos taurus
gccctttgctgtggccccagcaactagactcaacttccagtgaggccagcgaggctgctcagcctccactggagttccctccttagactagggacgagacgaaagacccctgacgggcctggcacaggggcagtggtggcaactgagcaaaatacacacagtgaccgcattcagagatgacgccacacccaccggtggttt

SEQ ID NO: 11951 - DNA, 201 bp, Bos taurus
atttaactagccccctactgatagcgccttaatgacaaacgtcacacttcccatggactcaggtattaggcagctcctccgctgtggccagctgggactcctgggcactctcagtctggtcttcctttttcttcctcacaatctctgcagccgctttagtggggtccgcctccagcttgaggctatgttcatggctgggtg

SEQ ID NO: 11952 - DNA, 201 bp, Bos taurus
ttctagatttgaaccacacacggcattccaagggctctgccaagacaacatgtgtttaaatgcccggtaagtggttccagctgtgtgggccctgaattccagagacagggagaggtcaccttgcagttacgcacccctgcataagtgggttgagggcgccttctagtgcagggccacgagctttctgctggagtggggtgc

SEQ ID NO: 11953 - DNA, 201 bp, Bos taurus
gaggagagccctcacttccctcttactttctcccagatcccgttgggaactgcacgtggctgtagggaacagaaccaaactcaggccgtggaataaggagcgtgtttcctcctgggaccccagaggcatccagccaggcatgccggctggggcagcagccccaagctggccatagtgaccaccaccccccacccaccccac

SEQ ID NO: 11954 - DNA, 201 bp, Bos taurus
ctccccaggcctatgtggtgagaactctctggaggactcggcctttggacactgaagttacctagcttgtctgtgggaggtttgaagcttctgcccagacagcagtgccctcggcctgtgtggaggcacagttgtggacactcaagcacagcctcctgtcctgggactcagccccaccctagagcatctgctgtggatagc

SEQ ID NO: 11955 - DNA, 201 bp, Bos taurus
cagtgaaggaaatgcacacacacacacacacacacacacacgtgctgaccagtgaaggcctgcccagactctgagggtggccgtcttgtggtgagtgatacggcttggagtggacatggactcgggagcagacatctctgacagatgcttcagctgtggagggtggcaggaacctcctagctgcacaggccatctagacgt

SEQ ID NO: 11956 - DNA, 201 bp, Bos taurus
tgggcagaatccccagccatgcccttccacagtggctcatggcccctagccactctggtgagaagtgaagcctgggccgtgggtcacgctggggcagaggtctcagaatcgggacctgagcttcaggagcttggagacggctcagcgaggtggtgggaggctggcccaggacacaggatgcccaccttcaaggccaggcca

SEQ ID NO: 11957 - DNA, 201 bp, Bos taurus
gaccttgtgtcccaatcgccaagggctctgtgtggcatacctggcctgtccagggcccgttttctgggcctgttccagagaagcacatgctctaacctccaactgctgcatctgttcccacggggcgacagcacctctgcgtcgtccgggacagctcgagttctgagccacagcaggcccagcttcacacgtgtccctgcg

SEQ ID NO: 11958 - DNA, 201 bp, Bos taurus
ttctgctgcagctgtgctctgctggggcacatggcccacagtgccagcaaaatgaccgaggaaatgctggaaggttcctgaggatgcactgaaatggacatgtctctggccagcacagggagctggggtcaagctgacacccacgtgagaatagagccaggaatcagcacccacaggggacccgggcagcctcagaccttc

SEQ ID NO: 11959 - DNA, 201 bp, Bos taurus
gcgacctcatcttgctttcttccgaggggctggggcacctgctcgctaccgcacatctcacacatattagccagcaggagtgttaaggtcactcttttcgcggccagcatgtggggtgaagccagccatcaccgtccaaagcttctgcagcggcaacggctcctgtcatacccaacacaaaagcagcagcccagggctggt

SEQ ID NO: 11960 - DNA, 201 bp, Bos taurus
tccctgagggccatgatctcctaggccagagacaacagagctggagttcaaactcagtgcctcctcaaagctccagacatccacaccctctggtccccaggtggccgagatgtgggacacaggccagccctgcctcgctgagcaggggaccagacatcagagctgcaagccagaggccctgccttcacagctggtcactca

SEQ ID NO: 11961 - DNA, 201 bp, Bos taurus
ttttggagcaccaaccatacatgagggaggagtttgtggaggggccagggacttggcgggtagtgtccagggtgcagggtgggctcacctgcaatttgggataagggctttgtggccagaataaggagggtggatataatctgtgtggtggtgaggagccgtggggagagggtgggctcaagggggactgggaggtggatg

SEQ ID NO: 11962 - DNA, 201 bp, Bos taurus
atggccagtgcaaaggccctgaggcaggagcacgaaagtgcccagtatgagggagaatgttcgcagcctttctgacaggcctcctctcccccacctgacctggagcccagctttcggctccgccccggacacgtgctgtcactcagccgcaggccccgcccaggccccgcccctcctgcccccgcacacgtgctatcactc

SEQ ID NO: 11963 - DNA, 201 bp, Bos taurus
gggacacgcctccctcccactcccgcttctggacatcgtccttgaagcaccagtcagaggatgaggaagaaaagggggaaaagacacaaactaattgggatggaaaataaaacattctacttgataacgacatgactgtctatctgaaaaactgcaaggaatcaaccaaaaactccacgatacagtgagctcaaagaggct

SEQ ID NO: 11964 - DNA, 201 bp, Bos taurus
gtgcaggccaggtcattcaaagcagcaagacagcctcagccagaagcttgccactgtgggcacaggtacagccatgagcttgtgtgacaacctacgggctacaaggtcaggccaagtgtggagtcactaggcctttttctaaacattttgattgaaatgtaattgatttataatgtattagttgcaagtgtagagcaaact

(The sequence listing continues in the following parts.)
